United States Patent Application Publication US 2021/0199660 A1 - sequence listing, part 34

SEQ ID NO: 481134 - DNA, 120 bp, Artificial Sequence
  ENSG00000161267_70 (sequence is synthesized)
agcaagctgtctccaggagccggggctggagagacacccagtgctgctctaggccagtgtggctgagggtctgtctagtctgtccttgtactcacggcttccttttctcttgcagacgcc

SEQ ID NO: 481135 - DNA, 120 bp, Artificial Sequence
  ENSG00000161267_71 (sequence is synthesized)
tgtaaatgagcatttaggtgttttcaatattttgcaattacaaataatgccacaatgaataactttgtatttttgttattattggggggttatcttttttttttttcttttttttgagat

SEQ ID NO: 481136 - DNA, 120 bp, Artificial Sequence
  ENSG00000161267_72 (sequence is synthesized)
atttttgtatttttagtagagagggggcttcaccatgttggtcagactggttatctttagagtaaattccttgggagtgagattgctcttagatcagagtgtaaataaaatatattgtca

SEQ ID NO: 481137 - DNA, 120 bp, Artificial Sequence
  ENSG00000161267_73 (sequence is synthesized)
ataaaatatattgtcattttaaagatattcccaaattttccatcctaggggtcatgtaattttacattccctccaggagtgcatgagtgcctatttccacacaatttcaccaacagagta

SEQ ID NO: 481138 - DNA, 120 bp, Artificial Sequence
  ENSG00000161267_74 (sequence is synthesized)
tgcatcaagcttttggtttttgccagtctgataggtgggaaatgtacctcagtgttgtttttattgtatttctcttctgagtgcatacccctgttctttaaggacatgacccagaagctt

SEQ ID NO: 481139 - DNA, 120 bp, Artificial Sequence
  ENSG00000161267_75 (sequence is synthesized)
ttttctttattttcaagccagtaggaacccaggggaggaatttcccatactatgttgatatctttgtaatatttgatacccaacgtaaaatttcaataatataaacaagtaaaagaaatc

SEQ ID NO: 481140 - DNA, 120 bp, Artificial Sequence
  ENSG00000161267_76 (sequence is synthesized)
atttatattgccatgctctaaacatcattccatctggatcagagaaggttttgtttgtccttttaatctttacttctttgaattgtgaaagtaatactacatattcataataaattcaaa

SEQ ID NO: 481141 - DNA, 120 bp, Artificial Sequence
  ENSG00000161267_77 (sequence is synthesized)
taatacagaagtatattatgtaaaaaagtgaagtcttcccaatctcttgctccaaggcagcttaaatgcaggtgtatacattatttgtgagttttgctattacaggtcgagtatctctta

SEQ ID NO: 481142 - DNA, 120 bp, Artificial Sequence
  ENSG00000161267_78 (sequence is synthesized)
tctgaaatgcttgggaccagatgtgttttggattttggatttttccagattttggaatatttgcattatacttgctcagcatctctgatctgaaaatccaaaatccaaagtgctccaatg

SEQ ID NO: 481143 - DNA, 120 bp, Artificial Sequence
  ENSG00000161267_79 (sequence is synthesized)
agtatttccctggagcatcatgtcagcactcaaaattcagattttggaacatttcagatttgggattattggattagggatgctcaaccggtattaacaaagcctgggtgagccatcttg

SEQ ID NO: 481144 - DNA, 120 bp, Artificial Sequence
  ENSG00000161267_80 (sequence is synthesized)
cacatatatctttgcctccttccactggcgattcttaggaacatttcgtagatgtgaaagtgcaagttgcaaaggtgtgcaggttttaggttttgttcaaatccccaaactgctttcctg

SEQ ID NO: 481145 - DNA, 120 bp, Artificial Sequence
  ENSG00000161267_81 (sequence is synthesized)
aaaggctgtcgctctcctgacagtgctcaagagaacccgtctggggagggttctggggaatgggtgtggcatccctggtgctggattcttctgcagaatgtggacctacctcagcgggtc

SEQ ID NO: 481146 - DNA, 120 bp, Artificial Sequence
  ENSG00000161267_82 (sequence is synthesized)
ccagcaagaaccatgatgccataaaaatgttgtaaagtcccttgtcctatgttaggcttctgtgccattgtgctggcttatccagtgacacagggagccacagtcagattccacagcaca

SEQ ID NO: 481147 - DNA, 120 bp, Artificial Sequence
  ENSG00000161267_83 (sequence is synthesized)
gggcagaggctgctcgatgctgcagaagactcttcaaaagggccttcggttctagtcctagactgaccactaaccccggaaggggacaaacatgtcccctccctgggcctcagtttcctc

SEQ ID NO: 481148 - DNA, 120 bp, Artificial Sequence
  ENSG00000161267_84 (sequence is synthesized)
ttacttaccctaataggattggactggtgatcttagatccttccactcctgcaacagtgattctagaattggttgactggtattttgaagaaagtaccagacaagctcattggcaggtta

SEQ ID NO: 481149 - DNA, 120 bp, Artificial Sequence
  ENSG00000161267_85 (sequence is synthesized)
tatctgttggtatctacctcttgacccattccatctgctatctgagatcagtcaggcaagtcagaaagcagttagcaccaccagaggctttggataaggcaccgtgggggttgaaagggg

SEQ ID NO: 481150 - DNA, 120 bp, Artificial Sequence
  ENSG00000161267_86 (sequence is synthesized)
gaatttgcttctagcccgattctgtagtgttagccccatgatggattccggctacatctgtacctaaacactctctctgctcttgttcagaattagtgttcctcttatctctcatatctc

SEQ ID NO: 481151 - DNA, 120 bp, Artificial Sequence
  ENSG00000161267_87 (sequence is synthesized)
attgcctttggccaactcagggacttagctccagcagatgtctgccacctcctacgtcactggctccacgctctctcctgggtcatttcagcacatgcacacacacacacacacacacac

SEQ ID NO: 481152 - DNA, 120 bp, Artificial Sequence
  ENSG00000161270_0 (sequence is synthesized)
atggccctggggacgacgctcagggcttctctcctgctcctggggctgctgactgaaggcctggcgcagttggcgattcctgcctccgttccccggggcttctgggccctgcctgaaaac

SEQ ID NO: 481153 - DNA, 120 bp, Artificial Sequence
  ENSG00000161270_1 (sequence is synthesized)
ctgacggtggtggagggggcctcagtggagctgcgttgtggggtcagcacccctggcagtgcggtgcaatgggccaaagatgggctgctcctgggccccgaccccaggatcccaggcttc

SEQ ID NO: 481154 - DNA, 120 bp, Artificial Sequence
  ENSG00000161270_2 (sequence is synthesized)
ccgaggtaccgcctggaaggggaccctgctagaggtgaattccacctgcacatcgaggcctgtgacctcagcgatgacgcggagtatgagtgccaggtcggccgctctgagatggggccc

SEQ ID NO: 481155 - DNA, 120 bp, Artificial Sequence
  ENSG00000161270_3 (sequence is synthesized)
gagctcgtgtctcccagagtgatcctctccatcctggttcctcccaagctgctcctgctgaccccagaggcaggcaccatggtcacctgggtagctgggcaggagtacgtggtcaactgt

SEQ ID NO: 481156 - DNA, 120 bp, Artificial Sequence
  ENSG00000161270_4 (sequence is synthesized)
gtgtctggggacgcgaagccagcacctgacatcaccattctcctgagtggacagacaatatctgacatctctgcaaacgtgaacgagggctcccagcagaaactcttcactgtggaggcc

SEQ ID NO: 481157 - DNA, 120 bp, Artificial Sequence
  ENSG00000161270_5 (sequence is synthesized)
acagccagggtgacaccccggagctcagataataggcagttgctggtctgtgaggcgtctagcccagcactggaggcccccatcaaggcctcattcaccgtgaatgttctgttccctcca

SEQ ID NO: 481158 - DNA, 120 bp, Artificial Sequence
  ENSG00000161270_6 (sequence is synthesized)
ggaccccctgtcatcgagtggccaggcctggatgaggggcacgtgcgggcaggacagagcttggagctgccgtgcgtggcccgagggggtaatcccttagccacactgcagtggctgaag

SEQ ID NO: 481159 - DNA, 120 bp, Artificial Sequence
  ENSG00000161270_7 (sequence is synthesized)
aatggccagccggtgtccacagcgtggggcacagagcacacccaggcggtggcccgcagtgtgctggtgatgaccgtgaggccagaagaccatggagcgcagctcagctgcgaggcccac

SEQ ID NO: 481160 - DNA, 120 bp, Artificial Sequence
  ENSG00000161270_8 (sequence is synthesized)
aacagcgtgtctgcagggacccaggagcacggcatcacactgcaggtcacctttccccctagtgccattattatcttgggatctgcatcccagactgagaacaagaacgtgacactctcc

SEQ ID NO: 481161 - DNA, 120 bp, Artificial Sequence
  ENSG00000161270_9 (sequence is synthesized)
tgtgtcagcaagtccagtcgcccgcgggttctgctacgatggtggctgggctggcggcagctgctgcccatggaggagacagtcatggatggactgcatggcggtcacatctccatgtcc

SEQ ID NO: 481162 - DNA, 120 bp, Artificial Sequence
  ENSG00000161270_10 (sequence is synthesized)
aacctgacattcctggcgcggcgggaggacaacggtctgaccctcacatgtgaggccttcagtgaagccttcaccaaggagaccttcaagaagtcgctcatcctgaacgtaaaatatccc

SEQ ID NO: 481163 - DNA, 120 bp, Artificial Sequence
  ENSG00000161270_11 (sequence is synthesized)
gcccagaaactgtggattgagggtcccccagagggccagaagctccgggctgggacccgggtgaggctggtgtgtttggctatcgggggcaacccagagccctccctcatgtggtacaag

SEQ ID NO: 481164 - DNA, 120 bp, Artificial Sequence
  ENSG00000161270_12 (sequence is synthesized)
gactcgcgcaccgtgaccgagtcgcggctgccgcaggagtcgcggcgcgtgcatctcggcagcgtggagaaatctgggagcaccttctcccgagagctggtgctggtcacagggccgtcg

SEQ ID NO: 481165 - DNA, 120 bp, Artificial Sequence
  ENSG00000161270_13 (sequence is synthesized)
gacaaccaggccaagttcacgtgcaaggctggacagctcagcgcgtccacgcagctggcggtgcagtttcccccaactaacgtgacgatcctggccaacgcatccgcactgcgcccggga

SEQ ID NO: 481166 - DNA, 120 bp, Artificial Sequence
  ENSG00000161270_14 (sequence is synthesized)
gacgccttaaacttgacatgcgtcagcgtcagcagcaatccgccggtcaacttgtcctgggacaaggaaggggagaggctggagggcgtggccgccccaccccggagagccccattcaaa

SEQ ID NO: 481167 - DNA, 120 bp, Artificial Sequence
  ENSG00000161270_15 (sequence is synthesized)
ggctccgccgccgccaggagcgtccttctgcaagtgtcatcccgcgatcatggccagcgcgtgacctgccgcgcccacagcgccgagctccgcgaaaccgtgagctccttctatcgcctc

SEQ ID NO: 481168 - DNA, 120 bp, Artificial Sequence
  ENSG00000161270_16 (sequence is synthesized)
aacgtactgtaccgtccagagttcctgggggagcaggtgctggtggtgaccgcggtggagcagggcgaggcgttgctgcccgtgtccgtgtccgctaaccccgcccccgaggccttcaac

SEQ ID NO: 481169 - DNA, 120 bp, Artificial Sequence
  ENSG00000161270_17 (sequence is synthesized)
tgtggaatgtgacccgcgcggacgacggcctctatcagctgcactgccagaactctgagggcaccgcggaagcgcggctgcggctggacgtgcactatgctcccaccatccgtgccctcc

SEQ ID NO: 481170 - DNA, 120 bp, Artificial Sequence
  ENSG00000161270_18 (sequence is synthesized)
aggaccccactgaggtgaacgtcgggggttctgtggacatagtctgcactgtcgatgccaatcccatcctcccgggcatgttcaactgggagagactgggagaagatgaggaggaccaga

SEQ ID NO: 481171 - DNA, 120 bp, Artificial Sequence
  ENSG00000161270_19 (sequence is synthesized)
gcctggatgacatggagaagatatccaggggaccaacggggcgcctgcggattcaccatgccaaactggcccaggctggcgcttaccagtgcattgtggacaatggggtggcgcctccag

SEQ ID NO: 481172 - DNA, 120 bp, Artificial Sequence
  ENSG00000161270_20 (sequence is synthesized)
cacgacggctgctccgtcttgttgtcagatttgccccccaggtggagcaccccactcccctaactaaggtggctgcagctggagacagcaccagttctgccaccctccactgccgtgccc

SEQ ID NO: 481173 - DNA, 120 bp, Artificial Sequence
  ENSG00000161270_21 (sequence is synthesized)
gaggtgtccccaacatcgttttcacttggacaaaaaacggggtccctctggatctccaagatcccaggtacacggagcacacataccaccagggtggtgtccacagcagcctcctgacca

SEQ ID NO: 481174 - DNA, 120 bp, Artificial Sequence
  ENSG00000161270_22 (sequence is synthesized)
ttgccaacgtgtctgccgcccaggattacgccctcttcacatgtacagccaccaacgcccttggctcggaccaaaccaacattcaacttgtcagcatcagccgccctgaccctccatcag

SEQ ID NO: 481175 - DNA, 120 bp, Artificial Sequence
  ENSG00000161270_23 (sequence is synthesized)
gattaaaggttgtgagtctgaccccacactccgtggggctggagtggaagcctggctttgatgggggcctgccacagaggttctgcatcaggtatgaggccctggggactccagggttcc

SEQ ID NO: 481176 - DNA, 120 bp, Artificial Sequence
  ENSG00000161270_24 (sequence is synthesized)
actatgtggatgtcgtaccaccccaggccaccaccttcacgctgactggtctacagccttctacaagatacagggtctggctgctggccagtaatgccttgggggacagtggactggctg

SEQ ID NO: 481177 - DNA, 120 bp, Artificial Sequence
  ENSG00000161270_25 (sequence is synthesized)
acaaagggacccagcttcccatcactaccccaggtctccaccagccttctggagaacctgaagaccagctgcccacagagccaccttcaggaccctcggggctgcccctgctgcctgtgc

SEQ ID NO: 481178 - DNA, 120 bp, Artificial Sequence
  ENSG00000161270_26 (sequence is synthesized)
tgttcgctcttggggggcttctgctcctctccaatgcctcctgtgtcgggggggtcctctggcagcggagactcaggcgtcttgctgagggcatctcagagaagacagaggcagggtcgg

SEQ ID NO: 481179 - DNA, 120 bp, Artificial Sequence
  ENSG00000161270_27 (sequence is synthesized)
aagaggaccgagtcaggaacgaatatgaggagagccagtggacaggagagcgggacactcagagctccacggtcagcacaacagaggcagagccgtattaccgctccctgagggacttca

SEQ ID NO: 481180 - DNA, 120 bp, Artificial Sequence
  ENSG00000161270_28 (sequence is synthesized)
gcccccagctgcccccgacgcaggaggaggtgtcttattcccgaggtttcacaggtgaagatgaggatatggccttccctgggcacttgtatgatgaggtagaaagaacgtaccccccgt

SEQ ID NO: 481181 - DNA, 120 bp, Artificial Sequence
  ENSG00000161270_29 (sequence is synthesized)
ctggagcctggggacccctctacgatgaagtgcagatgggaccctgggacctccactggcctgaagacacatatcaggatccaagaggaatctatgaccaggtggccggagacttggaca

SEQ ID NO: 481182 - DNA, 120 bp, Artificial Sequence
  ENSG00000161270_30 (sequence is synthesized)
ctctggaacccgattctctgcccttcgagctgaggggacatctggtgtaagagccctctcaaccccattgtcctgcacctgcaggaatttacactccactggtctctctcattacagcct

SEQ ID NO: 481183 - DNA, 120 bp, Artificial Sequence
  ENSG00000161270_31 (sequence is synthesized)
gggccgagctggttaggtgagctccataaaacccaaagggacttggtgtcaggagaggacatggagggggctgagtgacagagatggttcagctggtaccagagtagaaacaaggtgcat

SEQ ID NO: 481184 - DNA, 120 bp, Artificial Sequence
  ENSG00000161270_32 (sequence is synthesized)
aggtgcatcctggggttggctttagaaactaaacttctccaaaaggacagggcagattgtaaacgtcgtctcaaaaatgaaatgctgccgggtgcggtgactcacgcctataatcccagc

SEQ ID NO: 481185 - DNA, 120 bp, Artificial Sequence
  ENSG00000161270_33 (sequence is synthesized)
aaagctgacaaggcctggcttcaggggcctacagtcctggacaccaggtccttgaggactggagagctacatctggttggggtgggtggtgactgaaggactggactcctgggtcctggg

SEQ ID NO: 481186 - DNA, 120 bp, Artificial Sequence
  ENSG00000161270_34 (sequence is synthesized)
aggctgcaagggcctccatatgggtccagagaatacaaggggtctggattattggatctaaatgcctcgctgcttgatccagaagtctgggcaccttctctctcaggaccagagaccaag

SEQ ID NO: 481187 - DNA, 120 bp, Artificial Sequence
  ENSG00000161270_35 (sequence is synthesized)
tgaaccaaagcccccaggacctttctttaaggatcatccaagcaggcaccagcaccatgcccactgtggatgcagcacctcaggattagggtctggatctccacgcttgctttttggagg

SEQ ID NO: 481188 - DNA, 120 bp, Artificial Sequence
  ENSG00000161270_36 (sequence is synthesized)
agtaaggtcgccaacttgtcctggctcctcagaaatcagaacaatccattatggcaagttggagatcccaggactcttccattggaaagatgtcacacgcctggcgcagttggcgattcc

SEQ ID NO: 481189 - DNA, 120 bp, Artificial Sequence
  ENSG00000161270_37 (sequence is synthesized)
agccccattcaaaggctccgccgccgccaggagcgtccttctgcaagtgtcatcccgcgatcatggccagcgcgtgacctgccgcgcccacagcgccgagctccgcgaaaccaccgtcca

SEQ ID NO: 481190 - DNA, 120 bp, Artificial Sequence
  ENSG00000161270_38 (sequence is synthesized)
agtcccagccgcggtgtaaccacgcccactgcggaacccctcccactagagagacccagtgtggaatctctgcccagagagggtgcccgcctagacacggaagctgctcccgtcaggaat

SEQ ID NO: 481191 - DNA, 120 bp, Artificial Sequence
  ENSG00000161270_39 (sequence is synthesized)
gagagcccactgtataagccctgctacacacacaattctggaagcccactcaactcactctaattatcacagaggcatagtggagggtggagacaacctcaccaaccttgagaactctcc

SEQ ID NO: 481192 - DNA, 120 bp, Artificial Sequence
  ENSG00000161270_40 (sequence is synthesized)
tccaaccctttggtattaagggcagattgtgtccacacccataactttcctggaacccctaagacatccctcccacctggggccctctcacacccagacctgtctgggcccaagtgtctt

SEQ ID NO: 481193 - DNA, 120 bp, Artificial Sequence
  ENSG00000161270_41 (sequence is synthesized)
ccccaagcctctgccttccaccagatgctcccaccatccgtgccctccaggaccccactgaggtgaacgtcgggggttctgtggacatagtctgcactgtcgatgccaatcccatcctcc

SEQ ID NO: 481194 - DNA, 120 bp, Artificial Sequence
  ENSG00000161277_0 (sequence is synthesized)
aggcggcgctccgcgagaaccaaagtgcagccgctgacccggcaaaactcagcgggggctggatagccatgcccaagtactgcagggcgccgaactgctccaacactgcgggccgcctgg

SEQ ID NO: 481195 - DNA, 120 bp, Artificial Sequence
  ENSG00000161277_1 (sequence is synthesized)
gtgcagacaaccgccctgtgagcttctacaagttcccactgaaggatggtccccggctgcaggcctggctgcagcacatgggctgtgagcactgggtgcccagctgccaccagcacttgt

SEQ ID NO: 481196 - DNA, 120 bp, Artificial Sequence
  ENSG00000161277_2 (sequence is synthesized)
gcagcgagcacttcacaccctcctgcttccagtggcgctggggtgtgcgctacctgcggcctgatgcagtgccctccatcttctcccggggaccacctgccaagagtcagcggaggaccc

SEQ ID NO: 481197 - DNA, 120 bp, Artificial Sequence
  ENSG00000161277_3 (sequence is synthesized)
gaagcacccagaagccagtctcgccgccgcctcccctacagaagaatacacccctgccccagagccctgccatcccagtctctggcccagtgcgcctagtggtgctgggccccacatcgg

SEQ ID NO: 481198 - DNA, 120 bp, Artificial Sequence
  ENSG00000161277_4 (sequence is synthesized)
ggagccccaagactgtggccaccatgctcctgacccccctggcccctgcgccaactcctgagcggtcacaacctgaagtccctgcccaacaggcccagaccgggctgggcccagtgctgg

SEQ ID NO: 481199 - DNA, 120 bp, Artificial Sequence
  ENSG00000161277_5 (sequence is synthesized)
caacggtgccaggagcggcaccaggcgcagctgcaggccctggaacggctggcacagcagctacacggggagagcctgctggcacgggcacgccggggtctgcagcgcctgacaacagcc

SEQ ID NO: 481200 - DNA, 120 bp, Artificial Sequence
  ENSG00000161277_6 (sequence is synthesized)
cagacccttggacctgaggaatcccaaaccttcaccatcatctgtggagggcctgacatagccatggtccttgcccaggaccctgcacctgccacagtggatgccaagccggagctcctg

SEQ ID NO: 481201 - DNA, 120 bp, Artificial Sequence
  ENSG00000161277_7 (sequence is synthesized)
gacactcggatccccagtgcataaggatcaagacagacaatgtcgagggacaaaagatagaagatggaggaggaaagacattatacgtgggcttggcccagccccaccgcccacgcctgg

SEQ ID NO: 481202 - DNA, 120 bp, Artificial Sequence
  ENSG00000161277_8 (sequence is synthesized)
gtagtagcagtgcctccctcaagggcctgggttctaccaccccactcctagggatctcttgaaccttaggggtgacctgggcccaagtctctcatcagcccccaatcccctgggtaccag

SEQ ID NO: 481203 - DNA, 120 bp, Artificial Sequence
  ENSG00000161277_9 (sequence is synthesized)
gcttctgccacccccggctcagatctttgcaaatcagtacgacagcctcagagcagagcaagggttgtttgggagaatcatacctggttctaaggagtcccacgctttttgccaagcctg

SEQ ID NO: 481204 - DNA, 120 bp, Artificial Sequence
  ENSG00000161277_10 (sequence is synthesized)
gtactgagttcatgataccatggtggacacagctgagaaaatccctgccctcatggtgctcattctacttgagtagacgatgaactagtaaacaaataaacaagaacactgcagacatga

SEQ ID NO: 481205 - DNA, 120 bp, Artificial Sequence
  ENSG00000161277_11 (sequence is synthesized)
gattaagcgtcatggggtctttcatccagactgcgttttcattattcgctgaaacatacaggttttaatttttacgaggctaaggccacggccgcctcacctcggtttttgccgccacct

SEQ ID NO: 481206 - DNA, 120 bp, Artificial Sequence
  ENSG00000161277_12 (sequence is synthesized)
agaggaactatgtgcgccccaacggttgcccggatgtaggcgtagggtggagccgtaagagattgactagccagttgatttggttggcgcaggctcagaaacgccgtgacgccgcccttc

SEQ ID NO: 481207 - DNA, 120 bp, Artificial Sequence
  ENSG00000161281_0 (sequence is synthesized)
ggagaagggaggtgactccggcggaagaggacaaggcagaatgcaggcccttcgggtgtcccaggcgctgatccgctccttcagctccaccgcccggaaccgctttcagaaccgagtgcg

SEQ ID NO: 481208 - DNA, 120 bp, Artificial Sequence
  ENSG00000161281_1 (sequence is synthesized)
ctgggcggcactgtctacagcttgtactcccttggctgggcctccttccccaggaattaagaccaagaagcctggggggcctgagagacttgaacaagtgtcaataaacgctggcctctg

SEQ ID NO: 481209 - DNA, 120 bp, Artificial Sequence
  ENSG00000161281_2 (sequence is synthesized)
ctttcagaaccgagaggacaatgacatcccgttgtacctgaagggcggcatcgttgacaacatcctgtaccgagtgacaatgacgctgtgtctgggcggcactgtctacagcttgtactc

SEQ ID NO: 481210 - DNA, 120 bp, Artificial Sequence
  ENSG00000161281_3 (sequence is synthesized)
ttaggccccccagaacaaagtccttctgggtcctctcccttccaggaccctctaggcagcccggtcacccccaggccagactccagggcgagtcccctcccaacccagctggcagttcgc

SEQ ID NO: 481211 - DNA, 120 bp, Artificial Sequence
  ENSG00000161281_4 (sequence is synthesized)
agcagccagcacccctttctcatcagacacccccacatccaggaggacaatgacatcccgttgtacctgaagggcggcatcgttgacaacatcctgtaccgagtgacaatgacgctgtgt

SEQ ID NO: 481212 - DNA, 120 bp, Artificial Sequence
  ENSG00000161298_0 (sequence is synthesized)
gcagacgactcaccctgggccgggggtgaggcttggactgtttctttttccaaaagaggagctcaaaagagaaagttcatctagaaatctcaaagccatgtctcaggatgaactagagta

SEQ ID NO: 481213 - DNA, 120 bp, Artificial Sequence
  ENSG00000161298_1 (sequence is synthesized)
tgcccttacagggatcagtgtcattcaaggatgtgactgtggacttcacccaggaggagtggcagcaactagaccctgctcagaaggcgctttacagggatgtgatgttggaaaactatt

SEQ ID NO: 481214 - DNA, 120 bp, Artificial Sequence
  ENSG00000161298_2 (sequence is synthesized)
gccacttcgtatctgtggggtttcacatggctaagcctgatatgatccgcaagttggaacaaggagaagagctatggacacagagaatttttccaagttacagctacctagaagaagatg

SEQ ID NO: 481215 - DNA, 120 bp, Artificial Sequence
  ENSG00000161298_3 (sequence is synthesized)
ggaaaactgaagatgtcttagtgaagttcaaagaataccaagacaggcattctagacccctcatattcatcaaccacaaaaaactaattaaggagagaagtaatatttatggtaaaacat

SEQ ID NO: 481216 - DNA, 120 bp, Artificial Sequence
  ENSG00000161298_4 (sequence is synthesized)
ttactctaggcaagaaccgtatttcaaaaacaatactatgtgaatataaacctgatggaaaagttttgaaaaatatttcagaactagtcattagaaatataagccccataaaagagaagt

SEQ ID NO: 481217 - DNA, 120 bp, Artificial Sequence
  ENSG00000161298_5 (sequence is synthesized)
ttggtgacagtactggatgggagaaatcactcctcaataccaagcatgagaaaattcatcctgcagtgaatctccataaacaaacagaaagagttctcagtggtaaacaggagcttattc

SEQ ID NO: 481218 - DNA, 120 bp, Artificial Sequence
  ENSG00000161298_6 (sequence is synthesized)
agcatcagaaggttcaagctccagagcaaccatttgaccataatgaatgtgaaaaatccttcctgatgaaaggaatgctatttacacatactagagctcacagaggagaaagaacctttg

SEQ ID NO: 481219 - DNA, 120 bp, Artificial Sequence
  ENSG00000161298_7 (sequence is synthesized)
aatacaataaagatggaattgccttcatagaaaagtcaagcctcagtgtccatccaagtaatcttatggaaaagaagccctctgcctacaacaaatatgggaaattcctctgcagaaagc

SEQ ID NO: 481220 - DNA, 120 bp, Artificial Sequence
  ENSG00000161298_8 (sequence is synthesized)
ctgtttttattatgcctcagagacctcaaacagaagagaaaccctttcactgtccttactgtgggaataactttagaaggaagtcatacctcattgaacatcagcgaattcacacaggtg

SEQ ID NO: 481221 - DNA, 120 bp, Artificial Sequence
  ENSG00000161298_9 (sequence is synthesized)
aaaaaccttatgtttgcaatcaatgtggaaaggccttccgtcagaagacagccctcacccttcatgagaaaacacatatagaggggaaaccctttatttgtatcgattgtgggaagtcct

SEQ ID NO: 481222 - DNA, 120 bp, Artificial Sequence
  ENSG00000161298_10 (sequence is synthesized)
tccgccagaaggccaccctcactagacatcacaaaacacatacgggggagaaagcctatgaatgtcctcagtgtggaagtgcctttaggaagaagtcatacctcattgatcaccagagaa

SEQ ID NO: 481223 - DNA, 120 bp, Artificial Sequence
  ENSG00000161298_11 (sequence is synthesized)
ctcacacaggagagaaaccgtatcagtgtaatgagtgtgggaaggcatttatccagaagacaaccctcactgttcatcagagaactcacacaggagagaaaccctatatttgcaatgaat

SEQ ID NO: 481224 - DNA, 120 bp, Artificial Sequence
  ENSG00000161298_12 (sequence is synthesized)
gtgggaagtccttctgccaaaagacaaccctcactctccaccagagaattcacacgggggaaaaaccctatatttgtaatgaatgtgggaagtccttccgccagaaggcaatcctcactg

SEQ ID NO: 481225 - DNA, 120 bp, Artificial Sequence
  ENSG00000161298_13 (sequence is synthesized)
ttcatcacagaatacatacaggagaaaaatccaatgggtgtcctcagtgtgggaaagccttcagtaggaaatcaaacctcattcgccatcagaaaactcacacaggcgagaaaccatatg

SEQ ID NO: 481226 - DNA, 120 bp, Artificial Sequence
  ENSG00000161298_14 (sequence is synthesized)
aatgtaaacagtgtgggaagttcttcagttgtaagtcaaacctcattgtccatcagaaaactcacaaggtagaaaccacgggaattcagtaagtaatgtggctttttttgtaaaaaaatg

SEQ ID NO: 481227 - DNA, 120 bp, Artificial Sequence
  ENSG00000161298_15 (sequence is synthesized)
ttaagtcatagtaaaccctgtagatgatgttgcttgcaagcgtaatatccaacagtttaaggtactataccacatggtaacctactgtttgccagcctgtaaaacacacacacacacaca

SEQ ID NO: 481228 - DNA, 120 bp, Artificial Sequence
  ENSG00000161298_16 (sequence is synthesized)
cacacacacacaaatattattagacaaattagatgacaaaaatcattaagaagtccaaactttttttttattactagcttcagcagacaaaaacttcctctgtcaaggtgttataaacat

SEQ ID NO: 481229 - DNA, 120 bp, Artificial Sequence
  ENSG00000161298_17 (sequence is synthesized)
ttaaaatcacattttccatttccatacatatctttttgttcatcagtaataactagttggccaactgactgtggtccatggactacacagtgagtagaggttctttaaaagaaggaggta

SEQ ID NO: 481230 - DNA, 120 bp, Artificial Sequence
  ENSG00000161298_18 (sequence is synthesized)
tgaactgtatttctcattgcaaatacaaaataaaaattagttgttacctcctcacagttgaccatgattctgacttctaacattacaaattagtttttactattataaacctttctataa

SEQ ID NO: 481231 - DNA, 120 bp, Artificial Sequence
  ENSG00000161298_19 (sequence is synthesized)
attggattatatatcatgtattctttcatatacagcttattaccttcatcatgtccgtgagtctaatcattagtacgtgtggcagaagtttatttatttttatccagtatagaattcaat

SEQ ID NO: 481232 - DNA, 120 bp, Artificial Sequence
  ENSG00000161298_20 (sequence is synthesized)
tatatgattatatcacaatttatccattctgctgttgatggacttttacattgtttacagcttagggtcataataaatcatgcttctgagaacatacttgtcttggtgtacatacatgta

SEQ ID NO: 481233 - DNA, 120 bp, Artificial Sequence
  ENSG00000161298_21 (sequence is synthesized)
tttctcttgtgtatatacttaggagtggaatcgctgggtcttagagcatgtgtgtattcagtcagatactggcagacaattcagaactttcaccacatgagataattgacactgaaggga

SEQ ID NO: 481234 - DNA, 120 bp, Artificial Sequence
  ENSG00000161298_22 (sequence is synthesized)
aacagctataaattttatcaatatggtgctggttcaaaccagagaattcatgctgcagggaaactcaatcaatgttattgtgaaaactgggaatgtgaatgtaatatatgtagaaaaaca

SEQ ID NO: 481235 - DNA, 120 bp, Artificial Sequence
  ENSG00000161298_23 (sequence is synthesized)
tttagccacagcccaaatcttccaggcaaatgtaataaacgtgacattgccgttagccacagtaaatgccttatttgaactcaaaaagtctactagaggagaggcatccagcatttccct

SEQ ID NO: 481236 - DNA, 120 bp, Artificial Sequence
  ENSG00000161298_24 (sequence is synthesized)
tgttcaacatcagagaattccaactagagaaaagtcctgtgactgtgttgaagttagggcgtggggaggaatatagtctttacctatggtctgtatctactggtcaggtacaaatgatga

SEQ ID NO: 481237 - DNA, 120 bp, Artificial Sequence
  ENSG00000161298_25 (sequence is synthesized)
atatggaaaagcttatagccatcattcatatattatactacaccagggaattcacataggatgagaactcttcaaatgaaatgattgtaagaatgactttaactgttgctcatttctttt

SEQ ID NO: 481238 - DNA, 120 bp, Artificial Sequence
  ENSG00000161298_26 (sequence is synthesized)
aagaatgactttaactgttgctcatttcttttacaccatcaaagaattaataccaaagaaaggaagattacaaggaaacaaatgggtcttgggacttttttttttttttttttgagacag

SEQ ID NO: 481239 - DNA, 120 bp, Artificial Sequence
  ENSG00000161298_27 (sequence is synthesized)
agctctctttcatgaaagaagtctagccataccgagaccataatgctaggaagtctatgtgtaggccccctggtcaacagctacagctgagctcccagccatcagctagcatcagctgcc

SEQ ID NO: 481240 - DNA, 120 bp, Artificial Sequence
  ENSG00000161298_28 (sequence is synthesized)
aaccatgtaagtgaggcctcttggacatccagtcaagccttcagatgactgtggaccctgctaacacccaactggtaccacaaatgagacctcaagcaagaactgcccagctgaggcctt

SEQ ID NO: 481241 - DNA, 120 bp, Artificial Sequence
  ENSG00000161298_29 (sequence is synthesized)
cccaaattcctggccaacaaaatcatcaggctttttaactacaaacagttttattttttatttaataaaaaagtttttatttaacttgattgttttattaaaagggaaaagtaatttttt

SEQ ID NO: 481242 - DNA, 120 bp, Artificial Sequence
  ENSG00000161298_30 (sequence is synthesized)
aattttttagtatctgttaatatataataaaaataaaggtataagcctgggcttggtggctcatttctgtaatcccagcactttgggaggtgttgggaggatcacttgagcccaggagtt

SEQ ID NO: 481243 - DNA, 77 bp, Artificial Sequence
  ENSG00000161298_31 (sequence is synthesized)
agccaggatgggaggatcacttgggcccgggaggcggaggttgcagtgagccaggatagcaccactgcactccagcc

SEQ ID NO: 481244 - DNA, 120 bp, Artificial Sequence
  ENSG00000161298_32 (sequence is synthesized)
accctgtctcataaataaataaatacataaaggtgtaaatatatggattctagagtcaatgagcaaaggtattgttgttactaataggtgattttggcatgaagaaaaactggccataaa

SEQ ID NO: 481245 - DNA, 120 bp, Artificial Sequence
  ENSG00000161298_33 (sequence is synthesized)
atacagttgaagatttggctgcatttttgccttacgattacataccttaataattacaactcaattgaggggtccatatatattctttctcattttctggcagtaaatcatattcatcat

SEQ ID NO: 481246 - DNA, 120 bp, Artificial Sequence
  ENSG00000161298_34 (sequence is synthesized)
atacttcccaattttgcacacacaaaaaatgaaaatagcccccaaaagaaaggcaggataatgcgatctatcctcaaaagaccccgtgctgtcatttctcaacaaaggcgcagagagaaa

SEQ ID NO: 481247 - DNA, 120 bp, Artificial Sequence
  ENSG00000161298_35 (sequence is synthesized)
aacaaaggcgcagagagaaatcaaggtatggaatctaatgaatgtccgtgaaggaggtacttttgaatgctttaaagaaagtctaaataaagttgcgttttcttttcttttttttttttt

SEQ ID NO: 481248 - DNA, 64 bp, Artificial Sequence
  ENSG00000161298_36 (sequence is synthesized)
tggagtgcaatggcgcaatttcggctcattgcaacctctactgtatttttagtagagacggggt

SEQ ID NO: 481249 - DNA, 120 bp, Artificial Sequence
  ENSG00000161298_37 (sequence is synthesized)
aattgtgttttctaaagctatttacatataagctgccgctccttaggaaaatttggtcctgtggtttatattttggcatgaaacagcattgggctgtattccagaatcctgcttgaagat

SEQ ID NO: 481250 - DNA, 120 bp, Artificial Sequence
  ENSG00000161298_38 (sequence is synthesized)
ttcttttgaagaaatcagaaattttctttgcattttttttatttttttgagacaggttctcagtctgtcacctaggctggagtagagtggtgccattatagctcactgcagacttgaatt

SEQ ID NO: 481251 - DNA, 120 bp, Artificial Sequence
  ENSG00000161298_39 (sequence is synthesized)
gcctcccaagtagctaggactacaggcaggcgccattcctctcagctaatgtttttattttttatacatatggggtctcgttgtgttgcccaggctggtattgaactcctggcctcaagc

SEQ ID NO: 481252 - DNA, 120 bp, Artificial Sequence
  ENSG00000161298_40 (sequence is synthesized)
ggctggtattgaactcctggcctcaagcaatcttccctcttcggcctcctaaaatgctggggttacaggtgtgagccacttcactcactttagagattttcactttatgaattgataaat

SEQ ID NO: 481253 - DNA, 120 bp, Artificial Sequence
  ENSG00000161298_41 (sequence is synthesized)
acagcattgcatcacttaatagggatacattctgagaaatgcatcatgaggcagtgtcatgatcgtgcaagcatcacagagtgctgatacaaaccgagatggtacagcctactaaacacc

SEQ ID NO: 481254 - DNA, 120 bp, Artificial Sequence
  ENSG00000161298_42 (sequence is synthesized)
taggctatatggtagagcctgttgctcctaggctacaaatctgtactgcatgttactgtgctggatactataggcaattgtaacacaatggtaattatttgtatatgtaaacctatctaa

SEQ ID NO: 481255 - DNA, 62 bp, Artificial Sequence
  ENSG00000161298_43 (sequence is synthesized)
atgtaaacctatctaaacacagaaaaggtacagtaaaaatgtggtactatatgtgatctcgg

SEQ ID NO: 481256 - DNA, 67 bp, Artificial Sequence
  ENSG00000161298_44 (sequence is synthesized)
tactataatcttatgagaccaccattatatatgcagtccatcatggaccaaaatgtcatgtggtgca

SEQ ID NO: 481257 - DNA, 120 bp, Artificial Sequence
  ENSG00000161298_45 (sequence is synthesized)
tatatgcagtccatcatggaccaaaatgtcatgtggtgcatgagtatttttcatctaacttatatattgctcaatgaagtttgggcaactctaaggagcaaacatgtttatagaatctaa

SEQ ID NO: 481258 - DNA, 120 bp, Artificial Sequence
  ENSG00000161298_46 (sequence is synthesized)
gtcaacttgacctaaacatatacgacaaaataggagtgattttacaaattcatattttgtagacctaactgcaaggtcataaggcatatgcaaaatgagttcatcagttcagaggactaa

SEQ ID NO: 481259 - DNA, 120 bp, Artificial Sequence
  ENSG00000161298_47 (sequence is synthesized)
caggactccacagagcatacccaggaaatgtttttacttagaagcaaaggatgtggctcagcaaaagaaagggaaggtaagcattagggctcagaatcatctagctgcacattcctcagt

SEQ ID NO: 481260 - DNA, 120 bp, Artificial Sequence
  ENSG00000161298_48 (sequence is synthesized)
ggttttattcacacacagaccgcacactgtctctgaactgaagcactaagacctgtatcaaacttgatttggggagagctgacagcagaacttctctacatgggtttttttgttgtcatt

SEQ ID NO: 481261 - DNA, 120 bp, Artificial Sequence
  ENSG00000161298_49 (sequence is synthesized)
ataggcatgagccaccgtgcccagccactgcatgggtatttatgcttctctgttcactggttacatagtcaagccaggctatctaactggttatgtaagtttaaaaaagttaaaaagcca

SEQ ID NO: 481262 - DNA, 120 bp, Artificial Sequence
  ENSG00000161298_50 (sequence is synthesized)
ggttatgtaagtttaaaaaagttaaaaagccatcataaacaaattggctctgggagtctcccagggaatatcagactttaactagtaccttgtatagctcactggccttatcccaaccaa

SEQ ID NO: 481263 - DNA, 120 bp, Artificial Sequence
  ENSG00000161298_51 (sequence is synthesized)
gagtcagagccagacatctgggcatcgtggagataattttagagctttgcagtctgactgtaaatcagctccatcttataaacatggttcctataactgctgtgtatttcctgataatgt

SEQ ID NO: 481264 - DNA, 120 bp, Artificial Sequence
  ENSG00000161298_52 (sequence is synthesized)
atgtgaacaagcatatctcctcaccctctgtgtccccagtatcagatagtgcacagtacatctcaaatgtgatcatttcttgtcagctaatgcttgaatttctccactcagtttctggtc

SEQ ID NO: 481265 - DNA, 120 bp, Artificial Sequence
  ENSG00000161298_53 (sequence is synthesized)
tagcaatagagccaggcttgccatgtcctgcttcacaagtaatgtgcaacagcaaaagcacaggctccaacactagtctacaacatgcacctgggatgttctagatatttatcagtttat

SEQ ID NO: 481266 - DNA, 70 bp, Artificial Sequence
  ENSG00000161298_54 (sequence is synthesized)
caacatgcacctgggatgttctagatatttatcagtttataatcagggcagtggctcgatcttggctcac

SEQ ID NO: 481267 - DNA, 120 bp, Artificial Sequence
  ENSG00000161298_55 (sequence is synthesized)
ggcgtgagccaccgcacccggcctataatcggacttttcaaaaccctagatatgtgacaataccaagtgctgacaagaatgtggaacaactggaactctttcttttttaacttttgtttt

SEQ ID NO: 481268 - DNA, 120 bp, Artificial Sequence
  ENSG00000161298_56 (sequence is synthesized)
gtggaacaactggaactctttcttttttaacttttgttttagattcaggagtacaggtgtggatttgttactggaactttcatacattgctaataggaaaggcaaaatggtaaagccggt

SEQ ID NO: 481269 - DNA, 120 bp, Artificial Sequence
  ENSG00000161298_57 (sequence is synthesized)
ctggaaaacaatatgccagtctcaaaaagttacacatccaatatgacccagcaatcccacttataagtacttatcctagagaaatgaaaaattatgtgcacacagaaacctgtacatgag

SEQ ID NO: 481270 - DNA, 120 bp, Artificial Sequence
  ENSG00000161298_58 (sequence is synthesized)
tgtttgtaagtattatttataattaaaaaaaaaactagagacaagcaaatgttcttcagtgtgtaaatggatacactgtggtacattcccaagatggaattctactcaacgataacaata

SEQ ID NO: 481271 - DNA, 120 bp, Artificial Sequence
  ENSG00000161298_59 (sequence is synthesized)
atgagctactgaaacatgcagctacatagatgaacctcaaatgcattacgctaaaggaaagaacccagtcccaaaaagttacatactgtatgattccatttatatgacatgctggaaaag

SEQ ID NO: 481272 - DNA, 120 bp, Artificial Sequence
  ENSG00000161298_60 (sequence is synthesized)
gtgaaaatataacaacagaaaacagatcaaatgttgctgagtgtctggggtggggtggggtctgaatacagaggggttgcacgaggcaattctttgaggtgttggaattgttttgtatcc

SEQ ID NO: 481273 - DNA, 120 bp, Artificial Sequence
  ENSG00000161298_61 (sequence is synthesized)
tgcttgtggtcatagataaaaaatctatgcatgtgtaaaaaatagaagtatacatacaaaaaagtgaattgtactgtctgtaatttttttaaataaataaaaatccctagctctgcttca

SEQ ID NO: 481274 - DNA, 120 bp, Artificial Sequence
  ENSG00000161298_62 (sequence is synthesized)
aggaaatccatatgccaggccacttttgaaatattctattgttgatcaaacagtactttgtcctcttttcatatctttcagaaaattcctctttagctcatccaccaacctttaaaatac

SEQ ID NO: 481275 - DNA, 120 bp, Artificial Sequence
  ENSG00000161298_63 (sequence is synthesized)
tggttttcctcagatgctaattggttctcttcttcttcacagtccgtttttctctacgcacaatcagattcactctgaaggctacacttagtgtgattctagtgactctcaaatacccct

SEQ ID NO: 481276 - DNA, 120 bp, Artificial Sequence
  ENSG00000161298_64 (sequence is synthesized)
ctccactctagacctctgtccagagtgtcagaaccgaatattcaacctccagtagctatcaccacctgtatgttccacagacaaagtacatttccaaagcttacctcattacttcctttg

SEQ ID NO: 481277 - DNA, 120 bp, Artificial Sequence
  ENSG00000161298_65 (sequence is synthesized)
gtccagcttacattttcttccgtttcccattttcactttctagtcccagcagccatgcatttgcctatgcagataaaatgcctgtatcttttccactctacagccaatttacgaccatct

SEQ ID NO: 481278 - DNA, 120 bp, Artificial Sequence
  ENSG00000161298_66 (sequence is synthesized)
ctgttgtaatggtggtcatgtaggagcagttgtcctctgtcagcccgctgacacttccttaatctaggagacatttctaaccatggttacttaattgtcatttccacctaacatgtgata

SEQ ID NO: 481279 - DNA, 120 bp, Artificial Sequence
  ENSG00000161298_67 (sequence is synthesized)
agccttttccagtcttcaggagtattacctcaaaacttttatcacataacgtgtgtcaacttatgtttattgatgttctttacattccttaaagcaacagacccaaagtagggcatgcct

SEQ ID NO: 481280 - DNA, 120 bp, Artificial Sequence
  ENSG00000161298_68 (sequence is synthesized)
cacagtagaatgtataagacggtctattggaaggaaataaaatactaacaatttacattcgagagcagtattcattaacaatgtagattttcataaatgcctattgatggtttataaata

SEQ ID NO: 481281 - DNA, 120 bp, Artificial Sequence
  ENSG00000161298_69 (sequence is synthesized)
gctacaatgttgggaatgtgttcagtatatctttaagaccactgttctgtaggaaaaaaaaatctagtatcatgtcataatatccccattgcctatctccatataccttttccttcttag

SEQ ID NO: 481282 - DNA, 120 bp, Artificial Sequence
  ENSG00000161298_70 (sequence is synthesized)
agctcaaagactgtttcctaacatactgtgccttttgctatttcctgatttactaactggtttttttctccccatgaatttttaaaagctgatgccctgtattcctacaaaacaaattcg

SEQ ID NO: 481283 - DNA, 120 bp, Artificial Sequence
  ENSG00000161298_71 (sequence is synthesized)
ttgtgagtacaaaacttttatgtcctcaatgaagcctcggagtacaaaatgaaatttttccttgttttgtgacactttaccttgtacgtatttctgtcattgcatctgtaaaacctacta

SEQ ID NO: 481284 - DNA, 120 bp, Artificial Sequence
  ENSG00000161298_72 (sequence is synthesized)
agtgcatgtatttacatgtatgcccctctcttagcctataacttctcatgagcagggtcagggttttattcattttggtctaccaggcaaccagtcacattcaggacaaatagtgtgatc

SEQ ID NO: 481285 - DNA, 120 bp, Artificial Sequence
  ENSG00000161298_73 (sequence is synthesized)
tcagtatgtttagcatgagattataagtaaatacaaatggatgtattttcagagagaattttatgcaatataaaacataaataaggaaactagtctgaccagtaaacattgtcagtacta

SEQ ID NO: 481286 - DNA, 120 bp, Artificial Sequence
  ENSG00000161298_74 (sequence is synthesized)
gattatatcatcacttgtgtagtgtaaggtattaactttggtaagacattaatgtatacctcatttactaccttgaagttgtatctttatcttacttcaatagttttaaagtcgaaacag

SEQ ID NO: 481287 - DNA, 120 bp, Artificial Sequence
  ENSG00000161298_75 (sequence is synthesized)
tgggccgggggtgaggcttggtgggtgccaggggtgctgaggaggccaaggagggcactgggagctccgttccgggagagctgtctaaggacgcggaaccgggtggggaggccagggagg

SEQ ID NO: 481288 - DNA, 120 bp, Artificial Sequence
  ENSG00000161298_76 (sequence is synthesized)
taaccaagagtccgagccgggcctggaaattctgaggaggaaaccgggaccgcggtatccagacgctccgatctgtacgagccgggcctcgggcgtggtccatgggcgtgaccttgaggg

SEQ ID NO: 481289 - DNA, 120 bp, Artificial Sequence
  ENSG00000161298_77 (sequence is synthesized)
ctggcggcgggtccccgcgcggagcgggcgctgtgtgttcgcgcgcgcgggcgcgcgctgaataggggtggcctcctgcgcccaacctgctgcattttaggactgtttctttttccaaaa

SEQ ID NO: 481290 - DNA, 120 bp, Artificial Sequence
  ENSG00000161298_78 (sequence is synthesized)
gaggagctcaaaagagaaagttcatctagaaatctcaaagccatgtctcaggtgagatgatgtttcctctctttctgaaataactttttttcatggtgtatgaacatgagcttcactgtc

SEQ ID NO: 481291 - DNA, 120 bp, Artificial Sequence
  ENSG00000161298_79 (sequence is synthesized)
ctttaaccttccctgatattgggatttgcttccatgaaattagtcttcagtcagggccagattaggctgaggcaggcaagtggcatgaggtgaaatatttaaggggtaccctcagggctg

SEQ ID NO: 481292 - DNA, 120 bp, Artificial Sequence
  ENSG00000161298_80 (sequence is synthesized)
tacaattcagaactttcaccacatgagagaattcatgctgcaggtacaaatgatgaatatggaaaagcttatagccatcattcatatattatactacaccagggaattcacataggatga

SEQ ID NO: 481293 - DNA, 120 bp, Artificial Sequence
  ENSG00000161298_81 (sequence is synthesized)
accctgtatccagccctgttcacaatttctccattccaaccaaatcaacttaagccttccccaagtgtaccttctggttgtacatattcattgggtatatcattcatcatctcctttctc

SEQ ID NO: 481294 - DNA, 120 bp, Artificial Sequence
  ENSG00000161298_82 (sequence is synthesized)
agtcttctcacaaacaaactgctggaatagaaaggtattgtcttgatttaaatgggaatatatggcttgaatgaatttaacttgtcctgatgctgatttgagacctaagctgtgagtagt

SEQ ID NO: 481295 - DNA, 120 bp, Artificial Sequence
  ENSG00000161298_83 (sequence is synthesized)
agtcccgcgggcccaatcggggacagtcagggctgtcccgggctgtgcacctgctgtgcacacacaccccctgctgtgcacaccccccgcccccccgggaccatcacaggcgcgcccact

SEQ ID NO: 481296 - DNA, 120 bp, Artificial Sequence
  ENSG00000161298_84 (sequence is synthesized)
cacaccaccacacacggacgcagccacagaacggcacacacaaacacaatcacacagtctccctccccagcaggtgacttgcacacaggcctggggcttctgcctccacaaaccctctcc

SEQ ID NO: 481297 - DNA, 120 bp, Artificial Sequence
  ENSG00000161298_85 (sequence is synthesized)
gcgtcccatgaacccaggtcccctgccgtgagctcttctcgcatccagacccgggtcacctcaactcaccacatggaaaacgaacaccaggtcaacggaaaagggagccggggtcctggc

SEQ ID NO: 481298 - DNA, 120 bp, Artificial Sequence
  ENSG00000161298_86 (sequence is synthesized)
agaagcgtagtgccagccgcaatagggcggccgtgggtgcaaacggaggggagcgccggcagctagcaccgcgcggcgactaacgggccgccccggagactcctgggagctcaggcccac

SEQ ID NO: 481299 - DNA, 120 bp, Artificial Sequence
  ENSG00000161328_0 (sequence is synthesized)
ggagtaggagacagcgcctggaggtggagggcgcccagggccgagctgccagggccggacacctaggctgagccctcagccggccaactcgcctggcacaggggcagctctagacgggat

SEQ ID NO: 481300 - DNA, 120 bp, Artificial Sequence
  ENSG00000161328_1 (sequence is synthesized)
ggagaggatgcatcttcagtgtccacacgtggtcaacagataaaagccatggccagaacgttctaagtggctacatgtgcatctgcctgttcacggattccttcgacaaatatttgagca

SEQ ID NO: 481301 - DNA, 120 bp, Artificial Sequence
  ENSG00000161328_2 (sequence is synthesized)
tcccctcctgcgactgtggacagcagaggagcacgcaggccacgtgcaggccacgtgcagcccacagctctggggcgaggcaggccctcaaccgaacacgtatagagacagggtttcacc

SEQ ID NO: 481302 - DNA, 62 bp, Artificial Sequence
  ENSG00000161328_3 (sequence is synthesized)
tgacgtctgcatctttaaggggcaacaccaggtgacatgtgaatggatctgggctgggacag

SEQ ID NO: 481303 - DNA, 120 bp, Artificial Sequence
  ENSG00000161328_4 (sequence is synthesized)
caacaccaggtgacatgtgaatggatctgggctgggacagatcccgtgggcctcggcggagcacctccagcgtccgggtgcgggagctgagctggcaaggcctgcacaacccctgcccac

SEQ ID NO: 481304 - DNA, 120 bp, Artificial Sequence
  ENSG00000161328_5 (sequence is synthesized)
agagcaagggccctggcagtcagagggacagacttggagagcagctggtggaagagtacctgtcccctgcccggctgcaggccctggcccgggtggatgaccttcggctggtgaggacgc

SEQ ID NO: 481305 - DNA, 120 bp, Artificial Sequence
  ENSG00000161328_6 (sequence is synthesized)
tggagatgtgtgtggacactcgtgagggcagcctggggaactttggggtgcacctgcccaacctggaccaactgaagctgaacggcagccacctgggctccctgagggacttgggcacgt

SEQ ID NO: 481306 - DNA, 120 bp, Artificial Sequence
  ENSG00000161328_7 (sequence is synthesized)
ctctgggccacctgcaggtgctgtggctggctcgctgtggcctcgctgacctggatggcatcgcctctttgccagcacttaaggaactctacgcctcctacaacaacatctcggacctga

SEQ ID NO: 481307 - DNA, 120 bp, Artificial Sequence
  ENSG00000161328_8 (sequence is synthesized)
gcccactgtgcctgctggaacaattggaggtgctggacctggagggcaacagcgtggaggacctggggcaggtgcgctacttgcagctgtgcccacgcctggccatgctcaccctggagg

SEQ ID NO: 481308 - DNA, 120 bp, Artificial Sequence
  ENSG00000161328_9 (sequence is synthesized)
gcaacctggtgtgcctacagccggcccctggccccaccaacaaggtgcccaggggctacaactacagggcagaggtgaggaagctcattccccagctgcaggtcctggacgaagtgccgg

SEQ ID NO: 481309 - DNA, 120 bp, Artificial Sequence
  ENSG00000161328_10 (sequence is synthesized)
ccgcacacacaggcccaccggcccccccgcggctgagccaggactggcttgcggtgaaggaggccatcaagaagggcaacggccttcccccgctggactgtccccgtggagcccccatcc

SEQ ID NO: 481310 - DNA, 120 bp, Artificial Sequence
  ENSG00000161328_11 (sequence is synthesized)
cttgaccccgagctgtccctgcctgagacgcagtcccgggcctccaggccctggcccttctccctgctggtccgtgggggccccctgcctgaaggcctgctttctgaggacctggcccca

SEQ ID NO: 481311 - DNA, 120 bp, Artificial Sequence
  ENSG00000161328_12 (sequence is synthesized)
gaagataacaccagcagcctcacccatggtgctggccaagtcctctgtgggaaccccaccaagggcctgcgggagcgtaggcaccagtgccaggccagggagccccccgagcagctgccc

SEQ ID NO: 481312 - DNA, 120 bp, Artificial Sequence
  ENSG00000161328_13 (sequence is synthesized)
caacacaggccaggagatccggccgccagcacttccaccccagagcctgaccctgcagacagctctgacttcctggccttggctgggctcagggcctggagggaacatggcgtgcgcccc

SEQ ID NO: 481313 - DNA, 120 bp, Artificial Sequence
  ENSG00000161328_14 (sequence is synthesized)
ctcccctataggcacccggagtcccaacaggaaggggctgtagccccctggggcccacggagggtccctgaagagcaagtgcaccaggcagagcccaagactccctccagccccccaagc

SEQ ID NO: 481314 - DNA, 120 bp, Artificial Sequence
  ENSG00000161328_15 (sequence is synthesized)
ctggcctcagagccctccgggacctcgagccagcacctggtcccttcacctcccaagcacccaaggccacgagattctggcagcagctccccgcggtggtcgacagacctgcagtccagg

SEQ ID NO: 481315 - DNA, 120 bp, Artificial Sequence
  ENSG00000161328_16 (sequence is synthesized)
gggcgtcggctccgagtcctgggcagctgggggcctggcctgggtgatggggtggctgcagtgcctgtcctgagagccctggaggtggcctcacgcctgagccctcgagcccagggatgt

SEQ ID NO: 481316 - DNA, 120 bp, Artificial Sequence
  ENSG00000161328_17 (sequence is synthesized)
cctggcccaaagccagcaccagatgcagcagctagacctcccagggcagctgaactctctcaccccagccccgtccccacttaatatagcccccactgccaggcttccctgtgctggggc

SEQ ID NO: 481317 - DNA, 120 bp, Artificial Sequence
  ENSG00000161328_18 (sequence is synthesized)
cacgacttgcccacatatgtggtcacagagcacagaatacctgggcgggtgtgttggggggtggaaggagtgcctggccctggggaggaccctcttggtggaggggagtgggggactggg

SEQ ID NO: 481318 - DNA, 120 bp, Artificial Sequence
  ENSG00000161328_19 (sequence is synthesized)
accagccagggaggcagcagaggctggaacccagtttaggcccccaactgggtttggcctggggagggagggtccggctccccagcccttccttagggccaggctttcccgcgggcacgg

SEQ ID NO: 481319 - DNA, 120 bp, Artificial Sequence
  ENSG00000161328_20 (sequence is synthesized)
gggtggggggtggtcacccgagcaggcctgtgagaggcctctcctgctagaattgggcatggccgaggggcaggggctggagctgcgagtccaccactcccttgccggccccagggtaag

SEQ ID NO: 481320 - DNA, 120 bp, Artificial Sequence
  ENSG00000161328_21 (sequence is synthesized)
agccacctcctaggccgcagtggcccaaggtcccagctgctcgcctgaggccgccgggggtgcggtccaggcctcccgtctccgggggatctgtagggttcccgcactgcgatagggcgg

SEQ ID NO: 481321 - DNA, 120 bp, Artificial Sequence
  ENSG00000161328_22 (sequence is synthesized)
cccgttccctcctcttggcgcaggacgccccggaacccaaaccaacatttccagctctcaggtgtacagaaatgcggtttactttgtaggccacgttggttcaataaatgatgcagcgga

SEQ ID NO: 481322 - DNA, 80 bp, Artificial Sequence
  ENSG00000161381_0 (sequence is synthesized)
gctcccggaggccgcagcctccagctccgctcgcgctctcgccgctcctgccggctcgcccggccccgcgctccgccgtc

SEQ ID NO: 481323 - DNA, 120 bp, Artificial Sequence
  ENSG00000161381_1 (sequence is synthesized)
ggccgcagcctgagccagggccccctccctcgtcaggaccggggcagcaagcaggccgggggcaggtccgggcacccaccatgcgaggcgagctctggctcctggtgctggtgctcaggg

SEQ ID NO: 481324 - DNA, 120 bp, Artificial Sequence
  ENSG00000161381_2 (sequence is synthesized)
aggctgcccgggcgctgagcccccagcccggagcaggtcacgatgagggcccaggctctggatgggctgccaaagggaccgtgcggggctggaaccggagagcccgagagagccctgggc

SEQ ID NO: 481325 - DNA, 120 bp, Artificial Sequence
  ENSG00000161381_3 (sequence is synthesized)
atgtgtcagagccggacaggacccagctgagccaggacctgggtgggggcaccctggccatggacacgctgccagataacaggaccagggtggtggaggacaaccacagctattatgtgt

SEQ ID NO: 481326 - DNA, 120 bp, Artificial Sequence
  ENSG00000161381_4 (sequence is synthesized)
cccgtctctatggccccagcgagccccacagccgggaactgtgggtagatgtggccgaggccaaccggagccaagtgaagatccacacaatactctccaacacccaccggcaggcttcga

SEQ ID NO: 481327 - DNA, 120 bp, Artificial Sequence
  ENSG00000161381_5 (sequence is synthesized)
gagtggtcttgtcctttgatttccctttctacgggcatcctctgcggcagatcaccatagcaactggaggcttcatcttcatgggggacgtgatccatcggatgctcacagctactcagt

SEQ ID NO: 481328 - DNA, 120 bp, Artificial Sequence
  ENSG00000161381_6 (sequence is synthesized)
atgtggcgcccctgatggccaacttcaaccctggctactccgacaactccacagttgtttactttgacaatgggacagtctttgtggttcagtgggaccacgtttatctccaaggctggg

SEQ ID NO: 481329 - DNA, 120 bp, Artificial Sequence
  ENSG00000161381_7 (sequence is synthesized)
aagacaagggcagtttcaccttccaggcagctctgcaccatgacggccgcattgtctttgcctataaagagatccctatgtctgtcccggaaatcagctcctcccagcatcctgtcaaaa

SEQ ID NO: 481330 - DNA, 120 bp, Artificial Sequence
  ENSG00000161381_8 (sequence is synthesized)
ccggcctatcggatgccttcatgattctcaatccatccccggatgtgccagaatctcggcgaaggagcatctttgaatatcaccgcatagagctggaccccagcaaggtcaccagcatgt

SEQ ID NO: 481331 - DNA, 120 bp, Artificial Sequence
  ENSG00000161381_9 (sequence is synthesized)
cggccgtggagttcaccccattgccgacctgcctgcagcataggagctgtgacgcctgcatgtcctcagacctgaccttcaactgcagctggtgccatgtcctccagagatgctccagtg

SEQ ID NO: 481332 - DNA, 120 bp, Artificial Sequence
  ENSG00000161381_10 (sequence is synthesized)
gctttgaccgctatcgccaggagtggatggactatggctgtgcacaggaggcagagggcaggatgtgcgaggacttccaggatgaggaccacgactcagcctcccctgacacttccttca

SEQ ID NO: 481333 - DNA, 120 bp, Artificial Sequence
  ENSG00000161381_11 (sequence is synthesized)
gcccctatgatggagacctcaccactacctcctcctccctcttcatcgacagcctcaccacagaagatgacaccaagttgaatccctatgcaggaggagacggccttcagaacaacctgt

SEQ ID NO: 481334 - DNA, 120 bp, Artificial Sequence
  ENSG00000161381_12 (sequence is synthesized)
cccccaagacaaagggcactcctgtgcacctgggcaccatcgtgggcatcgtgctggcagtcctcctcgtggcggccatcatcctggctggaatttacatcaatggccaccccacatcca

SEQ ID NO: 481335 - DNA, 120 bp, Artificial Sequence
  ENSG00000161381_13 (sequence is synthesized)
atgctgcgctcttcttcatcgagcgtagacctcaccactggccagccatgaagtttcgcagccaccctgaccattccacctatgcggaggtggagccctcgggccatgagaaggagggct

SEQ ID NO: 481336 - DNA, 120 bp, Artificial Sequence
  ENSG00000161381_14 (sequence is synthesized)
tcatggaggctgagcagtgctgagaacaccaagtctcccctttgaagactttgaggccacagaaaagacagttaaagcaaagaagagaagtgacttttcctggcctctcccagcatgccc

SEQ ID NO: 481337 - DNA, 120 bp, Artificial Sequence
  ENSG00000161381_15 (sequence is synthesized)
tgggctgagatgagatggtggtttatggctccagagctgctgctcgcttcgtcagcacaccccgaatattgaagagggggccaaaaaacaaccacatggattttttataggaacaacaac

SEQ ID NO: 481338 - DNA, 120 bp, Artificial Sequence
  ENSG00000161381_16 (sequence is synthesized)
ctaatctcatcctgttttgatgcaagggttctcttctgtgtcttgtaaccatgaaacagcagaagaactaacataactaactccatttttgtttaaggggcctttacctattcctgcacc

SEQ ID NO: 481339 - DNA, 120 bp, Artificial Sequence
  ENSG00000161381_17 (sequence is synthesized)
taggctaggataactttagagcactgacataaaacgcaaaaacaggaatcatgccgtttgcaaaactaactctgggattaaaggggaagcatgtaaacagctaactgtttttgttaaaga

SEQ ID NO: 481340 - DNA, 120 bp, Artificial Sequence
  ENSG00000161381_18 (sequence is synthesized)
tttataggaatgaggaggtttggctattgtcacatgacagactgttagccaaggacaaagaagttctgcaaacctcccctggacccttgctggtgtccagatgtctgcggttgtcagccc

SEQ ID NO: 481341 - DNA, 120 bp, Artificial Sequence
  ENSG00000161381_19 (sequence is synthesized)
cttcctttcccccgacctaaacataaaagacaaggcaaagcccgcataattttaagacggttctttaggacattagtccaccatcttcttggtttgctggctctccgaaataaagtccct

SEQ ID NO: 481342 - DNA, 120 bp, Artificial Sequence
  ENSG00000161381_20 (sequence is synthesized)
ttccttgctccaactccttgtctctcaacgtattggctatgacgcagcaagcagaatgaatttggactcagttacaggctgtcaatggtctgctctgtagcagtctcagagcctccccga

SEQ ID NO: 481343 - DNA, 120 bp, Artificial Sequence
  ENSG00000161381_21 (sequence is synthesized)
cccactacctggagatagccagatagccagatgccctgctcctggccacctttaaagcccctgcatatgacacaggttaactaaagtcaagattggggctgctgcattccaggttcccta

SEQ ID NO: 481344 - DNA, 76 bp, Artificial Sequence
  ENSG00000161381_22 (sequence is synthesized)
cagcctggccaacataattaaacttgcctgtatcccagctactcaggaagctgagacacgagaatcacttgaacct

SEQ ID NO: 481345 - DNA, 83 bp, Artificial Sequence
  ENSG00000161381_23 (sequence is synthesized)
cagatcctcatggctatagagttggcattttagccccagcttctgtagctctgaaagcctaaagaaggtattctctccatctg

SEQ ID NO: 481346 - DNA, 120 bp, Artificial Sequence
  ENSG00000161381_24 (sequence is synthesized)
gaaaagaactcaagggggaaactgcatttttaggctttgctctcttaccttgccctttctactcagaaccaataacttctgcatcaaaacatgttacagcctgcatcaagggctttaccc

SEQ ID NO: 481347 - DNA, 120 bp, Artificial Sequence
  ENSG00000161381_25 (sequence is synthesized)
caacctgcagcccagccttccctgggtgagcttgctatgcgcagccacatttaccatgtggggctccctattctgatggcctgttcggtgccgggtttactcactgccctgttctgatgt

SEQ ID NO: 481348 - DNA, 120 bp, Artificial Sequence
  ENSG00000161381_26 (sequence is synthesized)
cagtgcctgtacatacctccaaaggcaggacttgcctgataaatatttttcctcctctgaactggattttataggcattaaagacaagtcgggtggctagagggctccttgagacatacc

SEQ ID NO: 481349 - DNA, 120 bp, Artificial Sequence
  ENSG00000161381_27 (sequence is synthesized)
gacatacctagcagggaactgcaggtggattctgttgagaggcaaagcacctgagtggttgggacacaggcagctggcatgggagggactttttttgagacagggtctcactgtgtcgcc

SEQ ID NO: 481350 - DNA, 120 bp, Artificial Sequence
  ENSG00000161381_28 (sequence is synthesized)
ggatgcccaaagacaccaggttggagaggcacctgccaactacttgctttccctggagcctgcatgtgcctgtggggtggggaggcgtaggggtctacggctgcctgagatgggtgtgca

SEQ ID NO: 481351 - DNA, 120 bp, Artificial Sequence
  ENSG00000161381_29 (sequence is synthesized)
cagtgtgtgaagtacctacctccttgccttgctggactgtcagccagtcgcagggccggccacaagacccatgtctccatctggtcatactccatagctaccaagttaacctgctctaaa

SEQ ID NO: 481352 - DNA, 120 bp, Artificial Sequence
  ENSG00000161381_30 (sequence is synthesized)
tcatactccatagctaccaagttaacctgctctaaactttggagaactggatctgtccaataaacgcttatttggccaagcctgatggctcgtgcctgtactcccagcactttgggaggc

SEQ ID NO: 481353 - DNA, 86 bp, Artificial Sequence
  ENSG00000161381_31 (sequence is synthesized)
aggctgaggtgggagggttgcttgagcccaggggtttgagaccagcttgggcaacaacaacaaaaatgccaggtgtggtggggcca

SEQ ID NO: 481354 - DNA, 85 bp, Artificial Sequence
  ENSG00000161381_32 (sequence is synthesized)
agtgagaccctgtctcctgcttacattgtcagggatcctgtagacaatcattaactctatgagatgcttggttctatttttttgg

SEQ ID NO: 481355 - DNA, 120 bp, Artificial Sequence
  ENSG00000161381_33 (sequence is synthesized)
aatcattaactctatgagatgcttggttctatttttttgggagactttgtccaagtgttttggcttaagaaatccataggcctctcttggtgacacatctctagtactttttgtcataaa

SEQ ID NO: 481356 - DNA, 120 bp, Artificial Sequence
  ENSG00000161381_34 (sequence is synthesized)
caaacaggccatctgccgccaaatacatccactccccatgccactgacatcctatgggtcagccaggcttgctttgactgaggccgaggcatctggaactttctctgcctgcaggggcta

SEQ ID NO: 481357 - DNA, 120 bp, Artificial Sequence
  ENSG00000161381_35 (sequence is synthesized)
gcagcagaggcttcaccgcatcaccaccccttcctccactcctgacattctttcccttcagggatccaaaatggttggccgagctcccagtgggaaaacgtgtgctagagttggggagtg

SEQ ID NO: 481358 - DNA, 120 bp, Artificial Sequence
  ENSG00000161381_36 (sequence is synthesized)
agatgagtggtgctgtccatggaatcaggccacagcaggaactgccccactggccatttgagacacacacaggtggtaaatgctctgctggtgggctgtgcttccctcattcagagagct

SEQ ID NO: 481359 - DNA, 120 bp, Artificial Sequence
  ENSG00000161381_37 (sequence is synthesized)
ctgttacagcccactgtgtcctttagaagcttgaaaggaacccaactctttgctgcactgtcctttttcttcctcaaattcagaccctccttccaccggcacccccctactccaccctca

SEQ ID NO: 481360 - DNA, 120 bp, Artificial Sequence
  ENSG00000161381_38 (sequence is synthesized)
gctcttccttgcctggtttatcaagcagagctgaggccccacgtttccaactctgattgtcacttgcatcttcacaaaggataaaccacggagcaactggaaaaccatcagccaagcgtt

SEQ ID NO: 481361 - DNA, 120 bp, Artificial Sequence
  ENSG00000161381_39 (sequence is synthesized)
cggatgagtctggttattggtccacccccgaccagattcccttacacttaactcacttctttctttggcaatgaccctcatgacatgtataaatgggtatgactaagaagaggctgtgat

SEQ ID NO: 481362 - DNA, 120 bp, Artificial Sequence
  ENSG00000161381_40 (sequence is synthesized)
ctaacatttatttgctgccattttttactctggggagaagcagccccaactcatcactgggaaagaactccccctgcaaaccagctaaatttgataatttaaaccccctgcccctaaaac

SEQ ID NO: 481363 - DNA, 120 bp, Artificial Sequence
  ENSG00000161381_41 (sequence is synthesized)
ttctcacagagctggggagttggtggcaactttccaagtcaaggtcttgcttagaaagtccttcactacatggccaggtgcagtggctcacgcctgtagtcccaggtacttgggagcctg

SEQ ID NO: 481364 - DNA, 120 bp, Artificial Sequence
  ENSG00000161381_42 (sequence is synthesized)
tgcttgagctcaggagttcaaggctgcagagagctatgatcatcccactgcatttgtttaaaaataaatttttaaaatttgtgtgttttatcaggggtctcctgtacagtgtatctgtgt

SEQ ID NO: 481365 - DNA, 120 bp, Artificial Sequence
  ENSG00000161381_43 (sequence is synthesized)
gtgtatctgtgtatgtttgtgtgtgtgtttgtatacagccttgtttaatgttttgagcaataagatatgcacacacaggtattttgttgctaaagagattggacaaggttgtagctgtgc

SEQ ID NO: 481366 - DNA, 120 bp, Artificial Sequence
  ENSG00000161381_44 (sequence is synthesized)
tcaggcttcagcttggtttgttaaattgagagataaacaatgacaagagctgccagccaaccacactattcaaaaagcaaagtgttcaccactaaagctaaccattcatctggttgcagg

SEQ ID NO: 481367 - DNA, 120 bp, Artificial Sequence
  ENSG00000161381_45 (sequence is synthesized)
caaggctaaggctctctctcctctagttcctggaacagactcacagattggcatgaagcactgatcaggggctgcactcagactccctggccaagcaaacctacaccagaagagtcagtg

SEQ ID NO: 481368 - DNA, 120 bp, Artificial Sequence
  ENSG00000161381_46 (sequence is synthesized)
tcacagatatgatgcggccaatctctgtctccaaaaacctacctgaacttaatggtagaattcaaagatctggggactgagggcacccagccttctaaaacacaatgtattcatgtgttt

SEQ ID NO: 481369 - DNA, 120 bp, Artificial Sequence
  ENSG00000161381_47 (sequence is synthesized)
agtgtaaactctctgcatggattctcagtgttaataataaaaggaagcattcttttacaactcctgctgtgtgcaaaagaaagtgcaaaggatttggagtggcattccgaagatcaccac

SEQ ID NO: 481370 - DNA, 120 bp, Artificial Sequence
  ENSG00000161381_48 (sequence is synthesized)
acataccttggttctgatggctgctgaactccgacttcttcgctgagacatgactgtgggaacagcctccagctatctgctcatcagaggtgctttcctcaacctcctgcaccacctcca

SEQ ID NO: 481371 - DNA, 120 bp, Artificial Sequence
  ENSG00000161381_49 (sequence is synthesized)
agagaaacagcctaaaaagaaaccccagctgtttacttatattggtctgtaaatccctggaagtaaaccccatgcatttttatctactgtctgaggacatacaataaatctgagaaagtc

SEQ ID NO: 481372 - DNA, 120 bp, Artificial Sequence
  ENSG00000161381_50 (sequence is synthesized)
cagctccttgccgtcacaagaacgaagtaggtcaggggagggaagaggcatcttcgtgtcctgacctgattccttgccgtctattaaatatcctacattgcgggtcacgatgagggccca

SEQ ID NO: 481373 - DNA, 120 bp, Artificial Sequence
  ENSG00000161381_51 (sequence is synthesized)
acttgagggcagcaagtagctgcagctggaggtagctgcctatctgattctgtttgagagtccgccaagttgggatttaaattagacatcaagaagaatttacagaccggccttgccttg

SEQ ID NO: 481374 - DNA, 120 bp, Artificial Sequence
  ENSG00000161381_52 (sequence is synthesized)
ctttttgctttcgcaggcgagtgaggatggagtcctggcccctgccagtggctcagcctgtgtgtgtacccagggtagaatgcaatgcgagtgagggcgaggagctccgggctgaccctt

SEQ ID NO: 481375 - DNA, 120 bp, Artificial Sequence
  ENSG00000161381_53 (sequence is synthesized)
ctcctggaaaatttctccaatggcgctcagcgttcgcacccttcctctccgcggttttctagtccctaggccccagcccactagaagccaggatgccccctcaccccgtctcccactctc

SEQ ID NO: 481376 - DNA, 120 bp, Artificial Sequence
  ENSG00000161381_54 (sequence is synthesized)
gttattatccttgttcaaaagaaatgataatgaagacacagagaggttagataatttgcacaaggtcacacagctagtaagtggcagagcatagatttcaacccaggcagccagatttca

SEQ ID NO: 481377 - DNA, 120 bp, Artificial Sequence
  ENSG00000161381_55 (sequence is synthesized)
gatcccaaactcttaaccctccgatgccctttgtgaattccttaatagcacttatgtagtggcacagatatcagagagaacttctcttatgatccttattagacatttggggcaactttt

SEQ ID NO: 481378 - DNA, 120 bp, Artificial Sequence
  ENSG00000161381_56 (sequence is synthesized)
taatgattccaactcccacccaacctcttcctgtattggataagtggacccaaaggctctgtcggctttcatctctgagactttgttagaacccaagaccccatggttcgaccttccctg

SEQ ID NO: 481379 - DNA, 62 bp, Artificial Sequence
  ENSG00000161381_57 (sequence is synthesized)
ggacaaccacagctattatgtgtcccgtctctatggccccagcgagccccacagccgggaac

SEQ ID NO: 481380 - DNA, 120 bp, Artificial Sequence
  ENSG00000161381_58 (sequence is synthesized)
cagctcagagtcaaggcgaccttgaggatcactggagctcatgcagtcctgctagcccctacacctactcacatgggcagatgtggccttggtcctggggagctgggtgggaaggaaggc

SEQ ID NO: 481381 - DNA, 120 bp, Artificial Sequence
  ENSG00000161381_59 (sequence is synthesized)
ttacaaagcattcagcatccttcgcatgagactcacagagcctcagaaagaatatgtaggatagaccccaggtccctcaacaaccaggatgaaaacacgtatgtgaattgcctggattct

SEQ ID NO: 481382 - DNA, 120 bp, Artificial Sequence
  ENSG00000161381_60 (sequence is synthesized)
ttccacgggtgattattatggcatcccactggactgcacactacttggggccatgagtgagtgaatcaatgaatgaacagcttgtgttccggaagctccttggcaacacatgcaggcggg

SEQ ID NO: 481383 - DNA, 120 bp, Artificial Sequence
  ENSG00000161381_61 (sequence is synthesized)
aagacagaccacgaggtaccccagatggaggaatgtgcaaagacgccggggctggagctggaatccgtcccgagacttctcaccttgacctcgaggaaggcaggaggtcggagacagggg

SEQ ID NO: 481384 - DNA, 120 bp, Artificial Sequence
  ENSG00000161381_62 (sequence is synthesized)
caggaggagacggtgagtacagaactgcctgccctcagcgtcagacccagcgcctcttggacccaccccagaagagggtgcagcagtcgcctgggctatttttatgagtgcggagaggga

SEQ ID NO: 481385 - DNA, 120 bp, Artificial Sequence
  ENSG00000161381_63 (sequence is synthesized)
gtctaccctagacatttctcatctcagccctgaacctcctgtggttcttctcctggctctctgtccttgaatattcactgcccagaaaggagtgggaggaggggaaggactgagccaggg

SEQ ID NO: 481386 - DNA, 120 bp, Artificial Sequence
  ENSG00000161381_64 (sequence is synthesized)
caggtataggtggggcctgtggccatcccctctgatccccatgggctcatagtcagcaaggggtggagagcagcttctctttcctcactcaggctggcagaggacataaaattgtccgct

SEQ ID NO: 481387 - DNA, 120 bp, Artificial Sequence
  ENSG00000161381_65 (sequence is synthesized)
cccggatgtgccaggcttttcagcagagtctgcaaagcatctttggtgaaaagaaaagtcatgtgcaattagcagcatctgtttgcagaggcactcaaaacacacaggacagtgtatccg

SEQ ID NO: 481388 - DNA, 120 bp, Artificial Sequence
  ENSG00000161381_66 (sequence is synthesized)
ctcaagcaaaacctcctggcttgtacatcaccatagcaggccccaggaatgcgagggaccctgtgtcagggcagggaccccatcatccaagacagttggcagggagagtgcaagacctgc

SEQ ID NO: 481389 - DNA, 120 bp, Artificial Sequence
  ENSG00000161381_67 (sequence is synthesized)
ctggtttctacaaccttccaaaggaggcagctcccgaaagaaggttttcagaacgcagggccttgggagacaggaagccagtcagactcctcgcacaaaccacagggggcaagcagtgct

SEQ ID NO: 481390 - DNA, 120 bp, Artificial Sequence
  ENSG00000161395_0 (sequence is synthesized)
atactcctaagctcctcccccggcggcgagccagggagaaaggatggccggcctggcggcgcggttggtcctgctagctggggcagcggcgctggcgagcggctcccagggcgaccgtga

SEQ ID NO: 481391 - DNA, 120 bp, Artificial Sequence
  ENSG00000161395_1 (sequence is synthesized)
gccggtgtaccgcgactgcgtactgcagtgcgaagagcagaactgctctgggggcgctctgaatcacttccgctcccgccagccaatctacatgagtctagcaggctggacctgtcggga

SEQ ID NO: 481392 - DNA, 120 bp, Artificial Sequence
  ENSG00000161395_2 (sequence is synthesized)
cgactgtaagtatgagtgtatgtgggtcaccgttgggctctacctccaggaaggtcacaaagtgcctcagttccatggcaagtggcccttctcccggttcctgttctttcaagagccggc

SEQ ID NO: 481393 - DNA, 120 bp, Artificial Sequence
  ENSG00000161395_3 (sequence is synthesized)
atcggccgtggcctcgtttctcaatggcctggccagcctggtgatgctctgccgctaccgcaccttcgtgccagcctcctcccccatgtaccacacctgtgtggccttcgcctgggtgtc

SEQ ID NO: 481394 - DNA, 120 bp, Artificial Sequence
  ENSG00000161395_4 (sequence is synthesized)
cctcaatgcatggttctggtccacagttttccacaccagggacactgacctcacagagaaaatggactacttctgtgcctccactgtcatcctacactcaatctacctgtgctgcgtcag

SEQ ID NO: 481395 - DNA, 120 bp, Artificial Sequence
  ENSG00000161395_5 (sequence is synthesized)
gaccgtggggctgcagcacccagctgtggtcagtgccttccgggctctcctgctgctcatgctgaccgtgcacgtctcctacctgagcctcatccgcttcgactatggctacaacctggt

SEQ ID NO: 481396 - DNA, 120 bp, Artificial Sequence
  ENSG00000161395_6 (sequence is synthesized)
ggccaacgtggctattggcctggtcaacgtggtgtggtggctggcctggtgcctgtggaaccagcggcggctgcctcacgtgcgcaagtgcgtggtggtggtcttgctgctgcaggggct

SEQ ID NO: 481397 - DNA, 120 bp, Artificial Sequence
  ENSG00000161395_7 (sequence is synthesized)
gtccctgctcgagctgcttgacttcccaccgctcttctgggtcctggatgcccatgccatctggcacatcagcaccatccctgtccacgtcctctttttcagctttctggaagatgacag

SEQ ID NO: 481398 - DNA, 120 bp, Artificial Sequence
  ENSG00000161395_8 (sequence is synthesized)
cctgtacctgctgaaggaatcagaggacaagttcaagctggactgaagaccttggagcgagtctgccccagtggggatcctgcccccgccctgctggcctcccttctcccctcaaccctt

SEQ ID NO: 481399 - DNA, 120 bp, Artificial Sequence
  ENSG00000161395_9 (sequence is synthesized)
gagatgattttctcttttcaacttcttgaacttggacatgaaggatgtgggcccagaatcatgtggccagcccaccccctgttggccctcaccagccttggagtctgttctagggaaggc

SEQ ID NO: 481400 - DNA, 120 bp, Artificial Sequence
  ENSG00000161395_10 (sequence is synthesized)
ctcccagcatctgggactcgagagtgggcagcccctctacctcctggagctgaactggggtggaactgagtgtgctcttagctctaccgggaggacagctgcctgtttcctccccatcag

SEQ ID NO: 481401 - DNA, 120 bp, Artificial Sequence
  ENSG00000161395_11 (sequence is synthesized)
gtctacctgggagaccagggaccacaggccttagggatacagggggtccccttctgttaccaccccccaccctcctccaggacaccactaggtggtgctggatgcttgttctttggccag

SEQ ID NO: 481402 - DNA, 120 bp, Artificial Sequence
  ENSG00000161395_12 (sequence is synthesized)
ccaaggttcacggcgattctccccatgggatcttgagggaccaagctgctgggattgggaaggagtttcaccctgaccattgccctagccaggttcccaggaggcctcaccatactccct

SEQ ID NO: 481403 - DNA, 120 bp, Artificial Sequence
  ENSG00000161395_13 (sequence is synthesized)
ttcagggccagggctccagcaagcccagggcaaggatcctgtgctgctgtctggttgagagcctgccaccgtgtgtcgggagtgtgggccaggctgagtgcataggtgacagggccgtga

SEQ ID NO: 481404 - DNA, 120 bp, Artificial Sequence
  ENSG00000161395_14 (sequence is synthesized)
gcatgggcctgggtgtgtgtgagctcaggcctaggtgcgcagtgtggagacgggtgttgtcggggaagaggtgtggcttcaaagtgtgtgtgtgcagggggtgggtgtgttagcgtgggt

SEQ ID NO: 481405 - DNA, 120 bp, Artificial Sequence
  ENSG00000161395_15 (sequence is synthesized)
taggggaacgtgtgtgcgcgtgctggtgggcatgtgagatgagtgactgccggtgaatgtgtccacagttgagaggttggagcaggatgagggaatcctgtcaccatcaataatcacttg

SEQ ID NO: 481406 - DNA, 120 bp, Artificial Sequence
  ENSG00000161395_16 (sequence is synthesized)
tggagcgccagctctgcccaaggcgccacctgggcggacagccaggagctctccatggccaggctgcctgtgtgcatgttccctgtctggtgcccctttgcccgcctcctgcaaacctca

SEQ ID NO: 481407 - DNA, 120 bp, Artificial Sequence
  ENSG00000161395_17 (sequence is synthesized)
cagggtccccacacaacagtgccctccagaagcagcccctcggaggcagaggaaggaaaatggggatggctggggctctctccatcctccttttctccttgccttcgcatggctggcctt

SEQ ID NO: 481408 - DNA, 120 bp, Artificial Sequence
  ENSG00000161395_18 (sequence is synthesized)
cccctccaaaacctccattcccctgctgccagcccctttgccatagcctgattttggggaggaggaaggggcgatttgagggagaaggggagaaagcttatggctgggtctggtttcttc

SEQ ID NO: 481409 - DNA, 120 bp, Artificial Sequence
  ENSG00000161395_19 (sequence is synthesized)
ccttcccagagggtcttactgttccagggtggccccagggcaggcaggggccacactatgcctgcgccctggtaaaggtgacccctgccatttaccagcagccctggcatgttcctgccc

SEQ ID NO: 481410 - DNA, 120 bp, Artificial Sequence
  ENSG00000161395_20 (sequence is synthesized)
cacaggaatagaatggagggagctccagaaactttccatcccaaaggcagtctccgtggttgaagcagactggatttttgctctgcccctgaccccttgtccctctttgagggaggggag

SEQ ID NO: 481411 - DNA, 120 bp, Artificial Sequence
  ENSG00000161395_21 (sequence is synthesized)
ctatgctaggactccaacctcagggactcgggtggcctgcgctagcttcttttgatactgaaaacttttaaggtgggagggtggcaagggatgtgcttaataaatcaattccaagcctca

SEQ ID NO: 481412 - DNA, 120 bp, Artificial Sequence
  ENSG00000161395_22 (sequence is synthesized)
aggaaagctactgtggacgccatgcttcattggaccctactctgtgccactctgacctacagccacgttcctcagaacactgagtccccaagactccagaggaggcaggtgttatcattc

SEQ ID NO: 481413 - DNA, 120 bp, Artificial Sequence
  ENSG00000161395_23 (sequence is synthesized)
cccattttgcagaagaggaaccttgagccttgagattccacgagctaaaggaactttcccaaggtcacagagctgagctgggaactgagccatggcagatttggcttcacccattaccct

SEQ ID NO: 481414 - DNA, 120 bp, Artificial Sequence
  ENSG00000161395_24 (sequence is synthesized)
attagtctgaagaggtactgaacctgaggctttggccaaactccagagctgaggactcagctgaggacctgttgcttcagcatgtcaagaataggtggactgggccagttgagggttgcc

SEQ ID NO: 481415 - DNA, 120 bp, Artificial Sequence
  ENSG00000161395_25 (sequence is synthesized)
ctaaataacttgcccaaggacacacaggaaatgcagagccaggaactgaaccctggcagtctggctgtagggcttgcattcttaatgataccactacctcccaaatctgaggaaagggtg

SEQ ID NO: 481416 - DNA, 120 bp, Artificial Sequence
  ENSG00000161395_26 (sequence is synthesized)
gtgagcctgcctgggtggctgcaggggcaaaatcgaaccctgggggcagaaaggggtcacccagccttcccctgggggccttcttcactagtctcccaacacctacgccccccaaccccc

SEQ ID NO: 481417 - DNA, 120 bp, Artificial Sequence
  ENSG00000161395_27 (sequence is synthesized)
aacacatcagctgtcctgggtgaggactctggggtaggactgggggccctggctcctgacaaggagctgtagcacttgctgcccagctgtggcctgtttggtggggagaggggtagtgac

SEQ ID NO: 481418 - DNA, 120 bp, Artificial Sequence
  ENSG00000161405_0 (sequence is synthesized)
aaccccgcgcaccggcaggtcgccggctcctgcccttttcagtctgcgccgacgcggctgccggatcccggggactccccgcgccgggaatctcccgccagctgcgcgctgagtccaggc

SEQ ID NO: 481419 - DNA, 120 bp, Artificial Sequence
  ENSG00000161405_1 (sequence is synthesized)
gacggcaggagcacgtggagaggccgagtagccacagcggcagctccagcccggcccggcagcgacatggaagatatacaaacaaatgcggaactgaaaagcactcaggagcagtctgtg

SEQ ID NO: 481420 - DNA, 120 bp, Artificial Sequence
  ENSG00000161405_2 (sequence is synthesized)
cccgcagaaagtgcagcggttttgaatgactacagtttaaccaaatctcatgaaatggaaaatgtggacagtggagaaggcccagccaatgaagatgaagacataggagatgattcaatg

SEQ ID NO: 481421 - DNA, 120 bp, Artificial Sequence
  ENSG00000161405_3 (sequence is synthesized)
aaagtgaaagatgaatacagtgaaagagatgagaatgttttaaagtcagaacccatgggaaatgcagaagagcctgaaatcccttacagctattcaagagaatataatgaatatgaaaac

SEQ ID NO: 481422 - DNA, 120 bp, Artificial Sequence
  ENSG00000161405_4 (sequence is synthesized)
attaagttggagagacatgttgtctcattcgatagtagcaggccaaccagtggaaagatgaactgcgatgtgtgtggattatcctgcatcagcttcaatgtcttaatggttcataagcga

SEQ ID NO: 481423 - DNA, 120 bp, Artificial Sequence
  ENSG00000161405_5 (sequence is synthesized)
agccatactggtgaacgcccattccagtgtaatcagtgtggggcatcttttactcagaaaggtaacctcctccgccacattaaactgcacacaggggaaaaaccttttaagtgtcacctc

SEQ ID NO: 481424 - DNA, 120 bp, Artificial Sequence
  ENSG00000161405_6 (sequence is synthesized)
tgcaactatgcatgccaaagaagagatgcgctcacggggcatcttaggacacattctgtggagaaaccctacaaatgtgagttttgtggaaggagttacaagcagagaagttcccttgag

SEQ ID NO: 481425 - DNA, 120 bp, Artificial Sequence
  ENSG00000161405_7 (sequence is synthesized)
gagcacaaggagcgctgccgtacatttcttcagagcactgacccaggggacactgcaagtgcggaggcaagacacatcaaagcagagatgggaagtgaaagagctctcgtactggacaga

SEQ ID NO: 481426 - DNA, 120 bp, Artificial Sequence
  ENSG00000161405_8 (sequence is synthesized)
ttagcaagcaatgtggcaaaacgaaaaagctcaatgcctcagaaattcattggtgagaagcgccactgctttgatgtcaactataattcaagttacatgtatgagaaagagagtgagctc

SEQ ID NO: 481427 - DNA, 120 bp, Artificial Sequence
  ENSG00000161405_9 (sequence is synthesized)
atacagacccgcatgatggaccaagccatcaataacgccatcagctatcttggcgccgaagccctgcgccccttggtccagacaccgcctgctcccacctcggagatggttccagttatc

SEQ ID NO: 481428 - DNA, 120 bp, Artificial Sequence
  ENSG00000161405_10 (sequence is synthesized)
agcagcatgtatcccatagccctcacccgggctgagatgtcaaacggtgcccctcaagagctggaaaagaaaagcatccaccttccagagaagagcgtgccttctgagagaggcctctct

SEQ ID NO: 481429 - DNA, 120 bp, Artificial Sequence
  ENSG00000161405_11 (sequence is synthesized)
cccaacaatagtggccacgactccacggacactgacagcaaccatgaagaacgccagaatcacatctatcagcaaaatcacatggtcctgtctcgggcccgcaatgggatgccacttctg

SEQ ID NO: 481430 - DNA, 120 bp, Artificial Sequence
  ENSG00000161405_12 (sequence is synthesized)
aaggaggttccccgctcttacgaactcctcaagcccccgcccatctgcccaagagactccgtcaaagtgatcaacaaggaaggggaggtgatggatgtgtatcggtgtgaccactgccgc

SEQ ID NO: 481431 - DNA, 120 bp, Artificial Sequence
  ENSG00000161405_13 (sequence is synthesized)
gtcctcttcctggactatgtgatgttcacgattcacatgggctgccacggcttccgtgaccctttcgagtgtaacatgtgtggatatcgaagccatgatcggtatgagttctcgtctcac

SEQ ID NO: 481432 - DNA, 120 bp, Artificial Sequence
  ENSG00000161405_14 (sequence is synthesized)
atagccagaggagaacacagagccctgctgaagtgaatatctggtctcagggattgctcctatgtattcagcatcgtttctaaaaaccaatgacctcgcctaacagattgctctcaaaac

SEQ ID NO: 481433 - DNA, 120 bp, Artificial Sequence
  ENSG00000161405_15 (sequence is synthesized)
atactcagttccaaacttcttttcataccatttttagctgtgttcacaggggtagccagggaaacactgtcttccttcagaaattattcgcaggtctagcatattattacttttgtgaaa

SEQ ID NO: 481434 - DNA, 120 bp, Artificial Sequence
  ENSG00000161405_16 (sequence is synthesized)
cctttgttttcccatcagggacttgaattttatggaatttaaaagccaaaaaggtatttggtcattatcttctacagcagtggaatgagtggtcccggagatgtgctatatgaaacattc

SEQ ID NO: 481435 - DNA, 120 bp, Artificial Sequence
  ENSG00000161405_17 (sequence is synthesized)
tttctgagatatatcaaccacacgtggaaaagcctttcagtcatacatgcaaatccacaaagaggaagagctgaccagctgaccttgctgggaagcctcacccttctgcccttcacaggc

SEQ ID NO: 481436 - DNA, 120 bp, Artificial Sequence
  ENSG00000161405_18 (sequence is synthesized)
tgaagggttaagatctaatctccctaatctaaatgacagtctaagagtaagtaaaagaacagccataaaataagtatctgttacgagtaactgaagaccccattctccaagcatcagatc

SEQ ID NO: 481437 - DNA, 120 bp, Artificial Sequence
  ENSG00000161405_19 (sequence is synthesized)
catttcctatcacaacatttttaaaaaatgtcatctgatggcacttctgcttctgtcctttaccttcccatctccagtgaaaagctgagctgctttgggctaaaccagttgtctatagaa

SEQ ID NO: 481438 - DNA, 120 bp, Artificial Sequence
  ENSG00000161405_20 (sequence is synthesized)
gaaaatctatgccagaagaactcatggttttaaatatagaccatcatcgaaactccagaaatttatccactgtggatgatgacatcgctttcctttggtcaaggttggcagagcaagggt

SEQ ID NO: 481439 - DNA, 120 bp, Artificial Sequence
  ENSG00000161405_21 (sequence is synthesized)
ataaagggggaaattgtttggcagcaccaacagaaaacaaacaaacaaaaaacagctacctaaaacttcttgaaagagttcatggagaattggtgatacagacccaaagcaaatttgcca

SEQ ID NO: 481440 - DNA, 120 bp, Artificial Sequence
  ENSG00000161405_22 (sequence is synthesized)
atgatattttccacaaaaaaagtccaaaaagtatggctcagcctccccctccccacaggagaggaattggagatagatggcatgtgtgtttagatcggagttgagctccggaatggggtg

SEQ ID NO: 481441 - DNA, 120 bp, Artificial Sequence
  ENSG00000161405_23 (sequence is synthesized)
aggagggacacctctattgagaggttctccttgatcaggcaggcttcggccctttttttcccatttaaatggaactgctgtattccatgaaaattcctgaaagtctgatcacggttctgc

SEQ ID NO: 481442 - DNA, 120 bp, Artificial Sequence
  ENSG00000161405_24 (sequence is synthesized)
agatgtataagtcatccttgtcactcataatatgtacatactatcaggaggagtgctgttatcatggtaaaattagcactggaataggaggtcacaaaatgctggctaattagctatgtg

SEQ ID NO: 481443 - DNA, 90 bp, Artificial Sequence
  ENSG00000161405_25 (sequence is synthesized)
ctgggacaacaagtgcacaccaccatgtctggctacattttgttctttttgtagagataggggtctcactatgttgcccatgctggtctt

SEQ ID NO: 481444 - DNA, 77 bp, Artificial Sequence
  ENSG00000161405_26 (sequence is synthesized)
cccagctactccggaggctgaggcagaaaaatcgcttaagcctgggaggttgaggttgcggtgagtggagatcacac

SEQ ID NO: 481445 - DNA, 87 bp, Artificial Sequence
  ENSG00000161405_27 (sequence is synthesized)
aacctcagtttcctcatccataaaataggaattagatttcaatgttctcttaggtcccttctagctttaattcatatgtgattatgc

SEQ ID NO: 481446 - DNA, 120 bp, Artificial Sequence
  ENSG00000161405_28 (sequence is synthesized)
tcttaggtcccttctagctttaattcatatgtgattatgcagtaaccacaaggtattttttaaacctcctaatgtatggatattaagcagaagagtatttatatgaatacatgtttcaca

SEQ ID NO: 481447 - DNA, 120 bp, Artificial Sequence
  ENSG00000161405_29 (sequence is synthesized)
ttcctttggtatgaaaatggtgtgttaagtttttcctttaaccactgagttgtgaatgtgaagaaggtggtggagaggaacaaaaaacagaaaggtattttgatcttgccacaaagcata

SEQ ID NO: 481448 - DNA, 120 bp, Artificial Sequence
  ENSG00000161405_30 (sequence is synthesized)
cacacaaattggcacatgcagctgtttgccaaagccttctttttttttttactttttaagaaattatgttagggaaaataaattctgcttccagggacaacttcatggagcctatttaca

SEQ ID NO: 481449 - DNA, 120 bp, Artificial Sequence
  ENSG00000161405_31 (sequence is synthesized)
aattaagagtcagcttaatttgtaacatttctaccagagccaagaatcccaaattcctggtagattagtgttttatttctaaggggcttatgcattcggctccaactcaactcgtctatg

SEQ ID NO: 481450 - DNA, 120 bp, Artificial Sequence
  ENSG00000161405_32 (sequence is synthesized)
tgctgccagtaattaaaatgttccacctcagactgcacaaatggcttatccttctttgtggcatggcgtctgtctcaggaaaaaaggttttatgaaattccatggcaacagtcccaacat

SEQ ID NO: 481451 - DNA, 120 bp, Artificial Sequence
  ENSG00000161405_33 (sequence is synthesized)
gtttgagacttcagctaaaggaatggatgtattttggtgtgtagtcttcagtatatcactgtatttccgtaatactagactccaagctatgccagattgcttattccctttgtgaaagag

SEQ ID NO: 481452 - DNA, 120 bp, Artificial Sequence
  ENSG00000161405_34 (sequence is synthesized)
gagttgctcattacgttcttgaaatatcgcacatcctgttggttcttcaagggacaagagaaagagaatttggaagcagggattagtagaagagaaaacgagggaaaggaagcctttcca

SEQ ID NO: 481453 - DNA, 120 bp, Artificial Sequence
  ENSG00000161405_35 (sequence is synthesized)
aacgagggaaaggaagcctttccaccagattagtgttcaagtctttgcagaggagaccaactttttttgttttcttttgttttgagacagtctctcgctctgttgcccaggctggagtgc

SEQ ID NO: 481454 - DNA, 120 bp, Artificial Sequence
  ENSG00000161405_36 (sequence is synthesized)
caggcatgagctaccgcacccagcctgagaccaccttttgcatctcaagattgtgaaaccaaggcccattccaccagcctggggactctttttatagatatgatcctcctttttcctgtg

SEQ ID NO: 481455 - DNA, 120 bp, Artificial Sequence
  ENSG00000161405_37 (sequence is synthesized)
ttcctgtgactaatgaatttgctgcatgatttctattcttctgaggttagttttctgagtaaggtgaccactcacaaaggcactttctttgtggcattctgagcctagattggggcccat

SEQ ID NO: 481456 - DNA, 120 bp, Artificial Sequence
  ENSG00000161405_38 (sequence is synthesized)
caattccagaaaaaatttatgtgtggaaactctgcatccttaagtcttgaagttgaaccagatatgcagtggttaccatcacacagataaacgctgccttctgtacataccccttatgct

SEQ ID NO: 481457 - DNA, 120 bp, Artificial Sequence
  ENSG00000161405_39 (sequence is synthesized)
gtactaattaacaaaccccttgccagggctggggaggtgagggtgaaggagaatcttagcagaagggcagagtcaggacttgcatctgccactgctgggcactgaagccctggagcagct

SEQ ID NO: 481458 - DNA, 120 bp, Artificial Sequence
  ENSG00000161405_40 (sequence is synthesized)
tcagatagtacctgtactttctcatgcagactccctctgaacaagagccttgtaggcccctctccttcatttcccaccagcctcttatcaggcgggctttccaccatacacccaggaggc

SEQ ID NO: 481459 - DNA, 86 bp, Artificial Sequence
  ENSG00000161405_41 (sequence is synthesized)
cctcttatcaggcgggctttccaccatacacccaggaggccacggtctgaggaacaaccaaacccatgcaaagggccgggcgcgat

SEQ ID NO: 481460 - DNA, 60 bp, Artificial Sequence
  ENSG00000161405_42 (sequence is synthesized)
tgtctcccaggcaaagtttccttgcagccaaggtgacagaactgggctgagggtggaaaa

SEQ ID NO: 481461 - DNA, 120 bp, Artificial Sequence
  ENSG00000161405_43 (sequence is synthesized)
cttgcagccaaggtgacagaactgggctgagggtggaaaagaaacagaaccagtgctccaggtgttttttaattttttaatttatttttattttttttgtatatgtatatatatgtatgt

SEQ ID NO: 481462 - DNA, 120 bp, Artificial Sequence
  ENSG00000161405_44 (sequence is synthesized)
ttttttgtatatgtatatatatgtatgtatattttagaggaccagggtctcactatgttgcctaggccagactcaaactcctgtgctcaagcaatcctgcctcagcctcccaagtagctg

SEQ ID NO: 481463 - DNA, 120 bp, Artificial Sequence
  ENSG00000161405_45 (sequence is synthesized)
agctctccaaatgttttctgtcactacctgaagtgttgcatcggtacttcctacggaaagaaaactaaatagaagtgtctctcccgtgagcccccaccactaccaccagaaaaaaaaaag

SEQ ID NO: 481464 - DNA, 120 bp, Artificial Sequence
  ENSG00000161405_46 (sequence is synthesized)
agagaaaatgaactcatcagtctttagtttcctcaagttattctcccaaaaagacattcgccttggcacagataagccagctaatcttatgctttatgacccactgtgagctgttcctga

SEQ ID NO: 481465 - DNA, 120 bp, Artificial Sequence
  ENSG00000161405_47 (sequence is synthesized)
cacagcttctgactttgtcagtgacaaaatttctcaccttttaaatgcagtgcttaacattttgttaggcccatactcaaaatcggccagatataaaatgacctcagattttgatctcct

SEQ ID NO: 481466 - DNA, 120 bp, Artificial Sequence
  ENSG00000161405_48 (sequence is synthesized)
tcccaagtagctgggactataggcacaccaccatgcacagctaattttttttgtatttttctgcagagatggcgtttcgccatactgcccaggctagtctcaaaatcctgggctcaagca

SEQ ID NO: 481467 - DNA, 120 bp, Artificial Sequence
  ENSG00000161405_49 (sequence is synthesized)
gcccacctcagcctcccaaagtgctggaactacaggcaagagccactgcgcccagccacaacctcagatttctttggcaaacagaaatgtttaaaaacacaaaattttgctcaggtgaaa

SEQ ID NO: 481468 - DNA, 120 bp, Artificial Sequence
  ENSG00000161405_50 (sequence is synthesized)
gtttaaaaacacaaaattttgctcaggtgaaacactgtgttactatcaaatctcacatccacataaagtttttcttttcggctttgtttcgtgaggaacagacagaacaaagtttttcca

SEQ ID NO: 481469 - DNA, 120 bp, Artificial Sequence
  ENSG00000161405_51 (sequence is synthesized)
ggtagcatctgtatcactattattctcctatttcctgtaccacccccacctccccaagccctactgaatgtgaggtttagaatgttttaaggagggtcaggtgcggtggctcacgcctgt

SEQ ID NO: 481470 - DNA, 76 bp, Artificial Sequence
  ENSG00000161405_52 (sequence is synthesized)
gttttaaggaaaaaaatagtactgttacatataatcccaggtgataagaccacaatggaaatgtttaagtcctcac

SEQ ID NO: 481471 - DNA, 120 bp, Artificial Sequence
  ENSG00000161405_53 (sequence is synthesized)
ccaggtgataagaccacaatggaaatgtttaagtcctcactttaaagagtaccccactgagaagaggtatgttggactctagcagagatttggaaactctgggacactcaagatgtgaaa

SEQ ID NO: 481472 - DNA, 120 bp, Artificial Sequence
  ENSG00000161405_54 (sequence is synthesized)
gagcctggctatctgaggactcaaagagtcagcatcgggacttgtgagctcaagaagagaaaagggagtggtgaaactttgtcctaaaagttagcaccaggaacagaagaaaaaaacccg

SEQ ID NO: 481473 - DNA, 120 bp, Artificial Sequence
  ENSG00000161405_55 (sequence is synthesized)
atatatagtgatacctcatcttttagagaatgggaagctatttttgtgttcacacagaaagtatagttcaaaaaacctctatatccagagttcagacaaggagaatgatttgagatataa

SEQ ID NO: 481474 - DNA, 120 bp, Artificial Sequence
  ENSG00000161405_56 (sequence is synthesized)
gtgccgatgaaggaggtcaattttgatctgaaaccagcagctggacctgggccacctcaggaaaaggactctgttctccaaggcagcacgactgaatggttctgagaataagccagggtt

SEQ ID NO: 481475 - DNA, 120 bp, Artificial Sequence
  ENSG00000161405_57 (sequence is synthesized)
caggactcctgaccctttaggaccatggactcagaagagcctgaaggacaattgtgggctttaaacttctgagagcttgtaaagtaacacaagactgtgcctctcccttgccccagctgt

SEQ ID NO: 481476 - DNA, 120 bp, Artificial Sequence
  ENSG00000161405_58 (sequence is synthesized)
agatagtctttgccccaccattgttatgaagatacacagggttttgcagtttgaataaattggatacaagtttcctctttttttttttctttttgagacaaagtctcgctctgtttcccc

SEQ ID NO: 481477 - DNA, 120 bp, Artificial Sequence
  ENSG00000161405_59 (sequence is synthesized)
aggctgagtgcagtggcacaatcaaggcttacttgccgcctcaacctcctgggctcaagcaacgagccatcctcccgtcttagcctcccaactagctgagactacaggcgtgggtcacca

SEQ ID NO: 481478 - DNA, 120 bp, Artificial Sequence
  ENSG00000161405_60 (sequence is synthesized)
aggcgtgaggcaccgcggctggcctgagtttcttcttaatactgtatcacaattgtgggctgtcttatgtgttgatatcgattgagctatttgaaataggaatgttaatgggtgtattaa

SEQ ID NO: 481479 - DNA, 120 bp, Artificial Sequence
  ENSG00000161405_61 (sequence is synthesized)
atttttgtaaggatataacaatatctaccttccaaggatgttgtgaggttttccatgattttgtatatgagctaatgttacctttgaggggtggtgtgcattatgttggatgattgtaaa

SEQ ID NO: 481480 - DNA, 120 bp, Artificial Sequence
  ENSG00000161405_62 (sequence is synthesized)
ttttcagtggaaaatgtaccgtgtcctaaatttaaagacatgaaaaatatcccaagatcatactagatcataatagcaattcctttacaaatgaattatggaggtaactgatctctaaca

SEQ ID NO: 481481 - DNA, 120 bp, Artificial Sequence
  ENSG00000161405_63 (sequence is synthesized)
gtttccttcatgttgttttaatgcacaagggcagaggatctgctgacccttggaaccagcgtgagctaaccacgtgctatagacacttcatggtgtcgcacccagggaagtcaaagcgct

SEQ ID NO: 481482 - DNA, 120 bp, Artificial Sequence
  ENSG00000161405_64 (sequence is synthesized)
ttgctccctcactgtctgtgagtcctcagccattagtaccccaccccccgctgctccaaaacttgagttatttcaaatgtttctcactgttcatctctccactgaccccactccagaaag

SEQ ID NO: 481483 - DNA, 120 bp, Artificial Sequence
  ENSG00000161405_65 (sequence is synthesized)
cctggagagagtcccaagatgccacccaccttccccaatccctcgccacagatctgtgtctatctcacactctgtaagtgccgctttgcttcttcctctcttgaaaagactgagaacaca

SEQ ID NO: 481484 - DNA, 120 bp, Artificial Sequence
  ENSG00000161405_66 (sequence is synthesized)
cattttaacatgttaggaaaatggggcagcctaaaaaatgactgatcccaccgccagtgactcatgtatactccaggctagcagacaaggccctttttggtgggcctgcttctgtgggtt

SEQ ID NO: 481485 - DNA, 120 bp, Artificial Sequence
  ENSG00000161405_67 (sequence is synthesized)
cacagaaaccaaattactgtgggttgcaaagaattagcaggtcatttacaaagcagacatcccttcacccagactgtggttttgcatgctcaggttctcagtctatgagctttggtgcag

SEQ ID NO: 481486 - DNA, 120 bp, Artificial Sequence
  ENSG00000161405_68 (sequence is synthesized)
gatcattttggctactggaaaaaccatagcttattttaaatttctggttgccaaagccaccacacgtgtggtctgtggatgaccattgtctgcagaatgacgaggaaggaacagaatgtg

SEQ ID NO: 481487 - DNA, 120 bp, Artificial Sequence
  ENSG00000161405_69 (sequence is synthesized)
gtttggggctcagggtggccttcccactgggagggaaggcgggagggagcccttgccctgggttttgacacagcctgtgctcacagcctctcctctcatctgcatttctcagaaatgccc

SEQ ID NO: 481488 - DNA, 120 bp, Artificial Sequence
  ENSG00000161405_70 (sequence is synthesized)
tccctgcccagtggtgactttccctcgtcactcctatggagttctacctggagcccagccatgtgtggaactgtgaagtttactcctctgtaaagatggtttaaagaaagtcagcttctg

SEQ ID NO: 481489 - DNA, 120 bp, Artificial Sequence
  ENSG00000161405_71 (sequence is synthesized)
aaatgtaacaatgctaacccttgctggaaccctgtaagaaatagccctgctgatagttttctaggtttatcatgtttgatttttacactgaaaaataaaaaaatcctggtatgtttgaaa

SEQ ID NO: 481490 - DNA, 120 bp, Artificial Sequence
  ENSG00000161405_72 (sequence is synthesized)
acaaggagcgctgccgtacatttcttcagagcactgacccaggggacactggtactggttggggatgggtcgagctttcccatctcggcataagactgcaagatttgaatgtgccctggt

SEQ ID NO: 481491 - DNA, 120 bp, Artificial Sequence
  ENSG00000161405_73 (sequence is synthesized)
ttttcaaaagtgctgttaacataaacagagcagtaaatctggggcaccatgcttttttttcaaagttgttaagaattatatcagtctgcaggtgtcacacgcagttactcagaatcagaa

SEQ ID NO: 481492 - DNA, 120 bp, Artificial Sequence
  ENSG00000161405_74 (sequence is synthesized)
agaaggctgatcgggggttagatctccatctatctatctttttgcaaccaaccacgtccaggctgtttatttaatacttcctcttgctaatgaaggtactggttggggatgggtcgagct

SEQ ID NO: 481493 - DNA, 63 bp, Artificial Sequence
  ENSG00000161405_75 (sequence is synthesized)
ccagccttatttaactcttaaaactcagtttccgcatcatttgaggtcaggagttcgagacca

SEQ ID NO: 481494 - DNA, 120 bp, Artificial Sequence
  ENSG00000161509_0 (sequence is synthesized)
gcatcgcgagtgtccttgagccgcgggtgacggtggctctcgctgctcgcgccccctcctcccgcggggggagcctgatgccacgttccctatgaattatttatcgccggcctaaaaata

SEQ ID NO: 481495 - DNA, 120 bp, Artificial Sequence
  ENSG00000161509_1 (sequence is synthesized)
ccccgaacttcacagcccgagtgaccctccggtggacatgggtggggccctggggccggccctgttgctcacctcgctcttcggtgcctgggcagggctgggtccggggcagggcgagca

SEQ ID NO: 481496 - DNA, 120 bp, Artificial Sequence
  ENSG00000161509_2 (sequence is synthesized)
gggcatgacggtggccgtggtgtttagcagctcagggccgccccaggcccagttccgtgcccgcctcaccccccagagcttcctggacctacccctggagatccagccgctcacagttgg

SEQ ID NO: 481497 - DNA, 120 bp, Artificial Sequence
  ENSG00000161509_3 (sequence is synthesized)
ggtcaacaccaccaaccccagcagcctcctcacccagatctgcggcctcctgggtgctgcccacgtccacggcattgtctttgaggacaacgtggacaccgaggcggtggcccagatcct

SEQ ID NO: 481498 - DNA, 120 bp, Artificial Sequence
  ENSG00000161509_4 (sequence is synthesized)
tgacttcatctcctcccagacccatgtgcccatcctcagcatcagcggaggctctgctgtggtcctcacccccaaggagccgggctccgccttcctgcagctgggcgtgtccctggagca

SEQ ID NO: 481499 - DNA, 120 bp, Artificial Sequence
  ENSG00000161509_5 (sequence is synthesized)
gcagctgcaggtgctgttcaaggtgctggaagagtacgactggagcgccttcgccgtcatcaccagcctgcacccgggccacgcgctcttcctggagggcgtgcgcgccgtcgccgacgc

SEQ ID NO: 481500 - DNA, 120 bp, Artificial Sequence
  ENSG00000161509_6 (sequence is synthesized)
cagccacgtgagttggcggctgctggacgtggtcacgctggagctgggcccgggagggccgcgcgcgcgcacgcagcgcctgctgcgccagctcgacgcgcccgtgtttgtggcctactg

SEQ ID NO: 481501 - DNA, 120 bp, Artificial Sequence
  ENSG00000161509_7 (sequence is synthesized)
ctcgcgcgaggaggccgaggtgctcttcgccgaggcggcgcaggccggtctggtggggcccggccacgtgtggctggtgcccaacctggcgctgggcagcaccgatgcgccccccgccac

SEQ ID NO: 481502 - DNA, 120 bp, Artificial Sequence
  ENSG00000161509_8 (sequence is synthesized)
cttccccgtgggcctcatcagcgtcgtcaccgagagctggcgcctcagcctgcgccagaaggtgcgcgacggcgtggccattctggccctgggcgcccacagctactggcgccagcatgg

SEQ ID NO: 481503 - DNA, 120 bp, Artificial Sequence
  ENSG00000161509_9 (sequence is synthesized)
aaccctgccagccccggccggggactgccgtgttcaccctgggcccgtcagccctgcccgggaggccttctacaggcacctactgaatgtcacctgggagggccgagacttctccttcag

SEQ ID NO: 481504 - DNA, 120 bp, Artificial Sequence
  ENSG00000161509_10 (sequence is synthesized)
ccctggtgggtacctggtccagcccaccatggtggtgatcgccctcaaccggcaccgcctctgggagatggtggggcgctgggagcatggcgtcctatacatgaagtaccccgtgtggcc

SEQ ID NO: 481505 - DNA, 120 bp, Artificial Sequence
  ENSG00000161509_11 (sequence is synthesized)
tcgctacagtgcctctctgcagcctgtggtggacagtcggcacctgacggtggccacgctggaagagcggccctttgtcatcgtggagagccctgaccctggcacaggaggctgtgtccc

SEQ ID NO: 481506 - DNA, 120 bp, Artificial Sequence
  ENSG00000161509_12 (sequence is synthesized)
caacaccgtgccctgccgcaggcagagcaaccacaccttcagcagcggggacgtggccccctacaccaagctctgctgtaagggattctgcatcgacatcctcaagaagctggccagagt

SEQ ID NO: 481507 - DNA, 120 bp, Artificial Sequence
  ENSG00000161509_13 (sequence is synthesized)
ggtcaaattctcctacgacctgtacctggtgaccaacggcaagcatggcaagcgggtgcgcggcgtatggaacggcatgattggggaggtgtactacaagcgggcagacatggccatcgg

SEQ ID NO: 481508 - DNA, 120 bp, Artificial Sequence
  ENSG00000161509_14 (sequence is synthesized)
ctccctcaccatcaatgaggaacgctccgagatcgtagacttctctgtaccctttgtggagacgggcatcagtgtgatggtggctcgcagcaatggcaccgtctccccctcggccttctt

SEQ ID NO: 481509 - DNA, 120 bp, Artificial Sequence
  ENSG00000161509_15 (sequence is synthesized)
ggagccatatagccctgcagtgtgggtgatgatgtttgtcatgtgcctcactgtggtggccatcaccgtcttcatgttcgagtacttcagccctgtcagctacaaccagaacctcaccag

SEQ ID NO: 481510 - DNA, 120 bp, Artificial Sequence
  ENSG00000161509_16 (sequence is synthesized)
aggcaagaagtccgggggcccagctttcactatcggcaagtccgtgtggctgctgtgggcgctggtcttcaacaactcagtgcccatcgagaacccgcggggcaccaccagcaagatcat

SEQ ID NO: 481511 - DNA, 120 bp, Artificial Sequence
  ENSG00000161509_17 (sequence is synthesized)
tccaagagcaatacatcgacactgtgtcgggcctcagtgacaagaagtttcagcggcctcaagatcagtacccacctttccgcttcggcacggtgcccaacggcagcacggagcggaaca

SEQ ID NO: 481512 - DNA, 120 bp, Artificial Sequence
  ENSG00000161509_18 (sequence is synthesized)
tccgcagtaactaccgtgacatgcacacccacatggtcaagttcaaccagcgctcggtggaggacgcgctcaccagcctcaagatggggaagctggatgccttcatctatgatgctgctg

SEQ ID NO: 481513 - DNA, 120 bp, Artificial Sequence
  ENSG00000161509_19 (sequence is synthesized)
tcctcaactacatggcaggcaaggacgagggctgcaagctggtcaccattgggtctggcaaggtctttgctaccactggctacggcatcgccatgcagaaggactcccactggaagcggg

SEQ ID NO: 481514 - DNA, 120 bp, Artificial Sequence
  ENSG00000161509_20 (sequence is synthesized)
ccatagacctggcgctcttgcagttcctgggggacggagagacacagaaactggagacagtgtggctctcagggatctgccagaatgagaagaacgaggtgatgagcagcaagctggaca

SEQ ID NO: 481515 - DNA, 120 bp, Artificial Sequence
  ENSG00000161509_21 (sequence is synthesized)
tcgacaacatggcaggcgtcttctacatgctgctggtggccatggggctggccctgctggtcttcgcctgggagcacctggtctactggaagctgcgccactcggtgcccaactcatccc

SEQ ID NO: 481516 - DNA, 120 bp, Artificial Sequence
  ENSG00000161509_22 (sequence is synthesized)
agctggacttcctgctggctttcagcaggggcatctacagctgcttcagcggggtgcagagcctcgccagcccaccgcggcaggccagcccggacctcacggccagctcggcccaggcca

SEQ ID NO: 481517 - DNA, 120 bp, Artificial Sequence
  ENSG00000161509_23 (sequence is synthesized)
gcgtgctcaagatgctgcaggcagcccgcgacatggtgaccacggcgggcgtaagcagctccctggaccgcgccactcgcaccatcgagaattggggtggcggccgccgtgcgcccccac

SEQ ID NO: 481518 - DNA, 80 bp, Artificial Sequence
  ENSG00000161509_24 (sequence is synthesized)
cgtccccctgcccgaccccgcggtctggccccagcccatgcctgcccacccccgacccgcccccagagccgagccccacg

SEQ ID NO: 481519 - DNA, 80 bp, Artificial Sequence
  ENSG00000161509_25 (sequence is synthesized)
gccgcccctgtccgacgtctcccgagtgtcgcgccgcccagcctgggaggcgcggtggccggtgcggaccgggcactgcg

SEQ ID NO: 481520 - DNA, 120 bp, Artificial Sequence
  ENSG00000161509_26 (sequence is synthesized)
ggaggcacctctcggcctccgagcggcccctgtcgcccgcgcgctgtcactacagctcctttcctcgagccgaccgatccggccgccccttcctcccgctcttcccggagctggaggacc

SEQ ID NO: 481521 - DNA, 120 bp, Artificial Sequence
  ENSG00000161509_27 (sequence is synthesized)
cttcctcccgctcttcccggagctggaggacctgccgctgctcggtccggagcagctggcccggcgggaggccctgctgcacgcggcctgggcccggggctcgcgcccgcgtcacgcttc

SEQ ID NO: 481522 - DNA, 120 bp, Artificial Sequence
  ENSG00000161509_28 (sequence is synthesized)
ggcccagctcgctgcccgctgggtgcaccggccccgcctgcgcccgccccgacggccactcggcctgcaggcgcttggcgcaggcgcagtcgatgtgcttgccgatctaccgggaggcct

SEQ ID NO: 481523 - DNA, 120 bp, Artificial Sequence
  ENSG00000161509_29 (sequence is synthesized)
gccaggagggcgagcaggcaggggcccccgcctggcagcacagacagcacgtctgcctgcacgcccacgcccacctgccattttgctggggggctgtctgtcctcaccttccaccctgtg

SEQ ID NO: 481524 - DNA, 120 bp, Artificial Sequence
  ENSG00000161509_30 (sequence is synthesized)
ccagccacggctcctggctctccggggcctgggggcctctggggcacaggggcaggactctggggctgggcacaggctacagagacagtgggggactggacgagatcagcagggtagccc

SEQ ID NO: 481525 - DNA, 120 bp, Artificial Sequence
  ENSG00000161509_31 (sequence is synthesized)
gtgggacgcaaggcttcccgggaccctgcacctggagacggatctccagtctggagtcagaagtgtgagttatcagccactcaggctccgagccagctggattctctgcctgccactgtc

SEQ ID NO: 481526 - DNA, 120 bp, Artificial Sequence
  ENSG00000161509_32 (sequence is synthesized)
agggttaagcggcaggcaggattgggcttttctggcttctgccatgaaatcctggccatgggaccccagtgacagatgatgtcttccatggtcatcagtgacctcagtagcctcaaatca

SEQ ID NO: 481527 - DNA, 120 bp, Artificial Sequence
  ENSG00000161509_33 (sequence is synthesized)
tggtgagggctgggcttttgctgtcctcttctcacgcagagttctgccaggagggtgtgctgtgggggtcagactcctgaggctctcccttccctggggctagccagttactggtcatgg

SEQ ID NO: 481528 - DNA, 120 bp, Artificial Sequence
  ENSG00000161509_34 (sequence is synthesized)
ctgctgtgggcatggaggctggaacttgtggttgaggcagggccatcccgatccttgctctacctggctagagtttcttctcatcagagcactgggacattaaaccaaccttttacaaca

SEQ ID NO: 481529 - DNA, 120 bp, Artificial Sequence
  ENSG00000161509_35 (sequence is synthesized)
gtgcccacccctccccacacaggccaaagttttaagggcacctacccagataagtccgggctggccatggcccatttccagaggtaaaaccaaggttctggcccggctcatggctcacac

SEQ ID NO: 481530 - DNA, 63 bp, Artificial Sequence
  ENSG00000161509_36 (sequence is synthesized)
gctcacacctgtaatctcaacactttgagaggcttaggccagtggatccgaaaataaaagaat

SEQ ID NO: 481531 - DNA, 120 bp, Artificial Sequence
  ENSG00000161509_37 (sequence is synthesized)
cgaggctctgggacagacaccgcgagggaggcggccggcgcgggctctcgtcgcgggcgcagcgccccttcccctcggagccgggctccgccttcctgcagctgggcgtgtccctggagc

SEQ ID NO: 481532 - DNA, 120 bp, Artificial Sequence
  ENSG00000161509_38 (sequence is synthesized)
gagtcccgcttcttccccttccagctctgccccatctcctttgccccagcctagctctctccttcctgcgacctgggagaatcggagtgggcttccagagtagtggcatcttgcagatgc

SEQ ID NO: 481533 - DNA, 120 bp, Artificial Sequence
  ENSG00000161509_39 (sequence is synthesized)
tggcccgtgcccggctcccgggcttccagagcgcaaagggaagggtaggcagagagggcactgggcgagcaagacctggcgctgggccctggctgcgcaccagccgcctgcgccggtctc

SEQ ID NO: 481534 - DNA, 120 bp, Artificial Sequence
  ENSG00000161509_40 (sequence is synthesized)
tgggggcttcgcccaggatccccgacggcggggaggggaagccccgagtctcctgtttcctgcctacgcgggcagggcggggacacgcggagcaaaggcacccggcaacctgaaccccca

SEQ ID NO: 481535 - DNA, 120 bp, Artificial Sequence
  ENSG00000161509_41 (sequence is synthesized)
aggcctggaaccaggctggggtcgggggtgctttggttctgggaagctgggattagacgggatgggcagggaggtgggggctgagggcatgatgtgggtgatggggagatggttatggga

SEQ ID NO: 481536 - DNA, 120 bp, Artificial Sequence
  ENSG00000161509_42 (sequence is synthesized)
gtgggcagggtgcaggcccaccctctggctgtggggctcaggccccagccctcctcctctctgcttccctcagcttcctaggtcagggtgaagacccagagggccagccgggcatggagg

SEQ ID NO: 481537 - DNA, 120 bp, Artificial Sequence
  ENSG00000161509_43 (sequence is synthesized)
tggtgccatgccctctgggcagtggtagttgacctgtagggtgagcaccagggaaccctgggagccctgggggaggcagaaacggccctgcccttgcagggctcaggggagaacgttcca

SEQ ID NO: 481538 - DNA, 120 bp, Artificial Sequence
  ENSG00000161509_44 (sequence is synthesized)
aacacacattcatcagcagttacaactaggacaagcgttctgaaggaaagacacaggatgctgtgagggagctcactcatggctcatgcatagggtgttggccagggaaagtctctggag

SEQ ID NO: 481539 - DNA, 120 bp, Artificial Sequence
  ENSG00000161509_45 (sequence is synthesized)
aaatgatgtctaggctgagggcctaagggcgagccggtggggagggggagaggcccaggcagagaagcaggtgggatgaaggccccaaggcgaggaaggagctcagagctttggaggaat

SEQ ID NO: 481540 - DNA, 120 bp, Artificial Sequence
  ENSG00000161509_46 (sequence is synthesized)
agagggaaaagcctggagaaggaggcgggggcctggccacctgggaagacatttgggcttttccctaagcaagtgagcagacagggcagcgcaagccggctgtgacagtggccgtggtct

SEQ ID NO: 481541 - DNA, 120 bp, Artificial Sequence
  ENSG00000161509_47 (sequence is synthesized)
gtgcctgccttagccctgtgagcttcctggccctgcccctgttgatctagccactcagggaagagcggaggagagttgagggaagagactgatctgattcgcctttgtttcattaatttt

SEQ ID NO: 481542 - DNA, 120 bp, Artificial Sequence
  ENSG00000161509_48 (sequence is synthesized)
tatatgaagaattttgagtatacattaaaaagtataaggaagactcatatatcccccattcgccctggccatccaccccagcctcaccagcacccccttccccttcttctgtgttaattt

SEQ ID NO: 481543 - DNA, 120 bp, Artificial Sequence
  ENSG00000161509_49 (sequence is synthesized)
gaatcaaagcccaggcatcctcttattccatccataaatatttcagtatgtatccctggcagataagggcttaagaacgtaaaaccaccatacattatcacgtctaaaaaataataaaaa

SEQ ID NO: 481544 - DNA, 120 bp, Artificial Sequence
  ENSG00000161509_50 (sequence is synthesized)
ctcgaattaagagccaaatcgggtccacacgtgccggttggttggtgtggcttctgagtttctctcaacctctgggcccctcctctgtctgtctctcttttttccttgcaatttgtttat

SEQ ID NO: 481545 - DNA, 120 bp, Artificial Sequence
  ENSG00000161509_51 (sequence is synthesized)
tgaagaaactgcgttgcttggcctctgaattttcccttatttgcttttttaaaagattgggacagtggcagcagtgagaccagttacgaggggactgcgctggccccggtgccagccggc

SEQ ID NO: 481546 - DNA, 120 bp, Artificial Sequence
  ENSG00000161509_52 (sequence is synthesized)
agtgccttgggtttttgtggtggcagaggggtggagaggaggagctttcccaccctcagggcttcaaccagggtggcgtttccccgtcctcttggggccccggcataagatctcaggaca

SEQ ID NO: 481547 - DNA, 120 bp, Artificial Sequence
  ENSG00000161509_53 (sequence is synthesized)
ttggctctcaaccctcatcgtgctcttaggaaatacagacgcctggctttgcacctctggaattcagattcagttggtctggggcagcgcttctcagtctagcgggctcaaggatcggct

SEQ ID NO: 481548 - DNA, 120 bp, Artificial Sequence
  ENSG00000161509_54 (sequence is synthesized)
gaagagcttgtgagaatacagatgccaggcggcatacccagcgactccgatccagtcggtgtggggtgcgacctgagaatctgcatttctgacaaactccccagtggtgctgatgctgcg

SEQ ID NO: 481549 - DNA, 120 bp, Artificial Sequence
  ENSG00000161509_55 (sequence is synthesized)
ggtctgcgggccagcgtggtgggctgggggccgggcatgaccatgctactaggcagcggggaaccacattggggcgggagggaggcgcaggccagagggctcccggaatgcggagcatcc

SEQ ID NO: 481550 - DNA, 120 bp, Artificial Sequence
  ENSG00000161509_56 (sequence is synthesized)
cagagggctcccggaatgcggagcatccgccggcgcaagggcgcctgggagctgatggaggggccgaggtcggggaaggggcgggaggaggggctcggccctcccgccccgctcaggccc

SEQ ID NO: 481551 - DNA, 120 bp, Artificial Sequence
  ENSG00000161509_57 (sequence is synthesized)
agctggctggcagtgagtttgggctggccagccacacctcccactagctgcgtgcctggggccacattaccccacctgtctgggccttagtgtcctcatctgaacaaacagcaggtgtca

SEQ ID NO: 481552 - DNA, 120 bp, Artificial Sequence
  ENSG00000161509_58 (sequence is synthesized)
gggtgtggcaaggatcgtggggccaatatagggaagcactttgaacaataaacacaatcaatgccacctgctgtcggtggcggcggtgaggcagaggcagggggtgcctggtccttggca

SEQ ID NO: 481553 - DNA, 120 bp, Artificial Sequence
  ENSG00000161509_59 (sequence is synthesized)
aaccggcaccgcctctgggagatggtgagaagggggtgagcccaggggccctcagtgtcctcttattttgtccccgcctcctcttgtgcccacagctgagcagagagtccctctgtccct

SEQ ID NO: 481554 - DNA, 120 bp, Artificial Sequence
  ENSG00000161509_60 (sequence is synthesized)
tatccaacccctcatcttccaggtctcagctgaaacaaacatctcctccactgggaagcctccaggtgccccggggtgggtgaggtgccctgctctgggctcccataacaccccggcttc

SEQ ID NO: 481555 - DNA, 120 bp, Artificial Sequence
  ENSG00000161509_61 (sequence is synthesized)
cctctactatagaacatttcaagcgctcctatctcctggtcctgcccctgcaggagtaacccatgaccatgctggccagacaggcttgtaaacaatatgcagggacaagtgcttgagtag

SEQ ID NO: 481556 - DNA, 120 bp, Artificial Sequence
  ENSG00000161509_62 (sequence is synthesized)
acgtgtgcaaaagattgtgggattggagatgaggaacaggaattagttctgccttcaaaggaggaaactgggaaagaggtcccagaagatgggatatttgagctgggctgtggaggtttg

SEQ ID NO: 481557 - DNA, 120 bp, Artificial Sequence
  ENSG00000161509_63 (sequence is synthesized)
agtaggagcccaccaggaagaggtgctagcctggaagagacagaggggcagaagggtttggagcatgaagggccttgagtgctcagctaaggacgttctgtcaaagtcaggggggaccag

SEQ ID NO: 481558 - DNA, 120 bp, Artificial Sequence
  ENSG00000161509_64 (sequence is synthesized)
tacagtgagtgagacagggtcaggtctgggctttaggaagatgctgtgggtcagtgtggagctgtatgaacacagggacccgaggctgggggaggctgttgggagcagccctactctgac

SEQ ID NO: 481559 - DNA, 120 bp, Artificial Sequence
  ENSG00000161509_65 (sequence is synthesized)
ctgccccagcatccctaggtgagagagggagattcttggccctggcaggctccacctagagggtgggggctgtagggctggaggccccaggctgaggctgtcaccctccacaggtggggc

SEQ ID NO: 481560 - DNA, 120 bp, Artificial Sequence
  ENSG00000161509_66 (sequence is synthesized)
agcaatacatcgacactgtgtcgggcctcagtgacaagaaggttgtggggccatagctgctgggggtgggggggggcactgagggtggggacaggccgtgagtgggcaggccctggacag

SEQ ID NO: 481561 - DNA, 120 bp, Artificial Sequence
  ENSG00000161509_67 (sequence is synthesized)
tcgagtctggggaatttgacctggaggctggggcaggaagaagcttcagggcctgctgagaaggggttgggggctggggcaagagatggctcagggccaccggctgagaggccttgggta

SEQ ID NO: 481562 - DNA, 120 bp, Artificial Sequence
  ENSG00000161509_68 (sequence is synthesized)
agtctctccctgtcttgggcctcagagtctccatttggaaaacacaggagtggcctggacagcctttaagaccttctgctctgactatgcaagtccacactggggctgggctctggggtg

SEQ ID NO: 481563 - DNA, 120 bp, Artificial Sequence
  ENSG00000161513_0 (sequence is synthesized)
gcggagcagtagctaggaacagatccacttgcaggttgctgctcccagccatggcttcgcgctgctggcgctggtggggctggtcggcgtggcctcggacccggctgcctcccgccggga

SEQ ID NO: 481564 - DNA, 120 bp, Artificial Sequence
  ENSG00000161513_1 (sequence is synthesized)
gcaccccgagcttctgccaccatttctccacacaggagaagaccccccagatctgtgtggtgggcagtggcccagctggcttctacacggcccaacacctgctaaagcacccccaggccc

SEQ ID NO: 481565 - DNA, 120 bp, Artificial Sequence
  ENSG00000161513_2 (sequence is synthesized)
acgtggacatctacgagaaacagcctgtgccctttggcctggtgcgctttggtgtggcgcctgatcaccccgaggtgaagaatgtcatcaacacatttacccagacggcccattctggcc

SEQ ID NO: 481566 - DNA, 120 bp, Artificial Sequence
  ENSG00000161513_3 (sequence is synthesized)
gctgtgccttctggggcaacgtggaggtgggcagggacgtgacggtgccggagctgcaggaggcctaccacgctgtggtgctgagctacggggcagaggaccatcgggccctggaaattc

SEQ ID NO: 481567 - DNA, 120 bp, Artificial Sequence
  ENSG00000161513_4 (sequence is synthesized)
ctggtgaggagctgccaggtgtgtgctccgcccgggccttcgtgggctggtacaacgggcttcctgagaaccaggagctggagccagacctgagctgtgacacagccgtgattctggggc

SEQ ID NO: 481568 - DNA, 120 bp, Artificial Sequence
  ENSG00000161513_5 (sequence is synthesized)
aggggaacgtggctctggacgtggcccgcatcctactgaccccacctgagcacctggagagaacggacatcacgaaggcagccctgggtgtactgaggcagagtcgagtgaagacagtgt

SEQ ID NO: 481569 - DNA, 120 bp, Artificial Sequence
  ENSG00000161513_6 (sequence is synthesized)
ggctagtgggccggcgtggacccctgcaagtggccttcaccattaaggagcttcgggagatgattcagttaccgggagcccggcccattttggatcctgtggatttcttgggtctccagg

SEQ ID NO: 481570 - DNA, 120 bp, Artificial Sequence
  ENSG00000161513_7 (sequence is synthesized)
gctgcttcgaacggccacagagaagccagggccggcggaagctgcccgccaggcatcggcctcccgtgcctggggcctccgctttttccgaagcccccagcaggtgctgccctcaccaga

SEQ ID NO: 481571 - DNA, 120 bp, Artificial Sequence
  ENSG00000161513_8 (sequence is synthesized)
tgggcggcgggcagcaggtgtccgcctagcagtcactagactggagggtgtcgatgaggccacccgtgcagtgcccacgggagacatggaagacctcccttgtgggctggtgctcagcag

SEQ ID NO: 481572 - DNA, 120 bp, Artificial Sequence
  ENSG00000161513_9 (sequence is synthesized)
cattgggtataagagccgccctgtcgacccaagcgtgccctttgactccaagcttggggtcatccccaatgtggagggccgggttatggatgtgccaggcctctactgcagcggctgggt

SEQ ID NO: 481573 - DNA, 120 bp, Artificial Sequence
  ENSG00000161513_10 (sequence is synthesized)
gaagagaggacctacaggtgtcatagccacaaccatgactgacagcttcctcaccggccagatgctgctgcaggacctgaaggctgggttgctcccctctggccccaggcctggctacgc

SEQ ID NO: 481574 - DNA, 120 bp, Artificial Sequence
  ENSG00000161513_11 (sequence is synthesized)
agccatccaggccctgctcagcagccgaggggtccggccagtctctttctcagactgggagaagctggatgccgaggaggtggcccggggccagggcacggggaagcccagggagaagct

SEQ ID NO: 481575 - DNA, 120 bp, Artificial Sequence
  ENSG00000161513_12 (sequence is synthesized)
ggtggatcctcaggagatgctgcgcctcctgggccactgagcccagccccagccccggcccccagcagggaagggatgagtgttgggaggggaagggctgggtccgtctgagtgggactt

SEQ ID NO: 481576 - DNA, 120 bp, Artificial Sequence
  ENSG00000161513_13 (sequence is synthesized)
tgcacctctgctgatcccggccggccctggcttggaggcttggctgctcttccagcgtctctcctccctcctggggaaggtcgcccttgcgcgcaaggttttagctttcagcaactgagg

SEQ ID NO: 481577 - DNA, 120 bp, Artificial Sequence
  ENSG00000161513_14 (sequence is synthesized)
taaccttagggacaggtggaggtgtgggccgatctaaccccttacccatctctctactgctggactgtggagggtcaccaggttgggaacatgctggaaataaaacagctgcaaccaaga

SEQ ID NO: 481578 - DNA, 120 bp, Artificial Sequence
  ENSG00000161513_15 (sequence is synthesized)
gagactgaaggggtgtcttcctgctggcgagatcccggtggtgtacgggggtgggcggagatctgtgcgtgagatgtgaggcttctagggttagagacggaggtcaacaaaggtgaaaag

SEQ ID NO: 481579 - DNA, 120 bp, Artificial Sequence
  ENSG00000161513_16 (sequence is synthesized)
gagagactttgagatctacaggtgtgagacggggtgaatggaggatgatacggaggtctgtggggcgagaggaaagtctgagtcgaaacagggatctgtaggaataagacgggtctatat

SEQ ID NO: 481580 - DNA, 120 bp, Artificial Sequence
  ENSG00000161513_17 (sequence is synthesized)
gggcaatatagcgttttgtggagagagagaggggttagaggagggacaccgtggggagacccacgggggcgagattgggatgatatggaggccgttggaaggatgtgggattctagccga

SEQ ID NO: 481581 - DNA, 120 bp, Artificial Sequence
  ENSG00000161513_18 (sequence is synthesized)
ttggatagggaatgaagtgttgttgggcaggccattggcagtggtgtagtaggttcatgggtgagatgtgggctctggatgaacccacagcctttgggggttcagatgaagtaagagacc

SEQ ID NO: 481582 - DNA, 120 bp, Artificial Sequence
  ENSG00000161513_19 (sequence is synthesized)
acagatccacttgcaggttgctgctcccagccatggcttcgcgctgctggcgctggtggggctggtcggcgtggcctcggacccggctgcctcccgccgggagcaccccgacctttgggg

SEQ ID NO: 481583 - DNA, 120 bp, Artificial Sequence
  ENSG00000161513_20 (sequence is synthesized)
gttcagatgaagtaagagaccctgcaaatgccaaagccttgaggaacaagagaaggaggatgcaggtgagggtgaagcttgggaagttccagcttctgttggatattcaggagaagaccc

SEQ ID NO: 481584 - DNA, 120 bp, Artificial Sequence
  ENSG00000161513_21 (sequence is synthesized)
aagatttttgagcaaggcagtgacatacaacaacagaatagtaatgatagctctcttcttgattgaacactcagagtaggttgcaccccgggctgcctgattactcatttaaccttgagc

SEQ ID NO: 481585 - DNA, 120 bp, Artificial Sequence
  ENSG00000161513_22 (sequence is synthesized)
aggacaccacagggctcttcttttggacagagaagaaactttccccagtgcacagagccagctagtgctagagctgggactggcatccaaggctacctgtttgactccaagcccagagcg

SEQ ID NO: 481586 - DNA, 120 bp, Artificial Sequence
  ENSG00000161513_23 (sequence is synthesized)
agagaatgtccttgttagcggggagcagctagagggacaggagggagggaaggaaggaaggaggaaacctggaagatgaggtcagccacgagagataaggggtaagaacatccggcagac

SEQ ID NO: 481587 - DNA, 120 bp, Artificial Sequence
  ENSG00000161513_24 (sequence is synthesized)
ggagactttggtcaagatgaggagggcagggaggctccctggctggatgacaggacttcatgccgtctgtgcccatgccacccagcttccctcctggggacacagagtggtgagggtggt

SEQ ID NO: 481588 - DNA, 120 bp, Artificial Sequence
  ENSG00000161513_25 (sequence is synthesized)
gcagacttggtccctggagctgccttaccctctaacccctcccattcccgggggacctggcagaatgtcatcaacacatttacccagacggcccattctggccgctgtgccttctggggc

SEQ ID NO: 481589 - DNA, 120 bp, Artificial Sequence
  ENSG00000161513_26 (sequence is synthesized)
gcgcctttggggctggatgggagcgcggggaggcctgcgagcgctgagtaggggtcggagcagagctggggcagggctggagaagggtgagactgaaggggcttctagggttagagacgg

SEQ ID NO: 481590 - DNA, 120 bp, Artificial Sequence
  ENSG00000161526_0 (sequence is synthesized)
ataggagtgagccacgcccgggctgtgggaataagatggcggggaagaagaatgttctgtcgtctctcgcagtttacgcggaagattcagagcccgagtctgatggcgaggctggaatcg

SEQ ID NO: 481591 - DNA, 120 bp, Artificial Sequence
  ENSG00000161526_1 (sequence is synthesized)
aggcggtgggcagcgcggctgaggagaaaggcggattggtatctgatgcctatggggaggatgacttttctcgtctagggggtgatgaagatggttatgaagaagaagaagatgagaaca

SEQ ID NO: 481592 - DNA, 120 bp, Artificial Sequence
  ENSG00000161526_2 (sequence is synthesized)
gtagacagtcggaagatgacgattcagagactgaaaaacctgaggctgatgacccaaaggataatacagaagcagaaaagcgagacccccaggaactcgtggcctccttttctgaaagag

SEQ ID NO: 481593 - DNA, 120 bp, Artificial Sequence
  ENSG00000161526_3 (sequence is synthesized)
ttcggaacatgtcgcctgatgaaatcaagatcccgccagaaccccctggcagatgttcaaatcacttgcaagacaagatccagaagctttatgaacgaaagataaaggagggaatggata

SEQ ID NO: 481594 - DNA, 120 bp, Artificial Sequence
  ENSG00000161526_4 (sequence is synthesized)
tgaactacattatccaaaggaagaaagaatttcggaaccctagcatctacgagaagctgatccagttctgtgccattgacgagcttggcaccaactacccaaaggatatgtttgatcccc

SEQ ID NO: 481595 - DNA, 120 bp, Artificial Sequence
  ENSG00000161526_5 (sequence is synthesized)
atggctggtctgaggactcctactatgaggcattagccaaggcccagaaaattgagatggacaaattggaaaaggccaaaaaggagcgaacaaaaattgagtttgtgacgggcaccaaaa

SEQ ID NO: 481596 - DNA, 120 bp, Artificial Sequence
  ENSG00000161526_6 (sequence is synthesized)
aaggcaccacgaccaacgccacgtccaccaccactaccactgccagcacagctgttgcagatgctcagaagagaaagagcaagtgggattcggctatcccagtgacaacgatagcccagc

SEQ ID NO: 481597 - DNA, 120 bp, Artificial Sequence
  ENSG00000161526_7 (sequence is synthesized)
ccaccatcctcaccaccacagccaccctgccagctgttgtcacggtcaccaccagcgccagcggctccaagaccaccgtcatctctgctgtgggcaccattgtgaagaaggccaagcagt

SEQ ID NO: 481598 - DNA, 120 bp, Artificial Sequence
  ENSG00000161526_8 (sequence is synthesized)
gacctgaggggccaccctaggacttgaaaggaccgtgcagcccagtgaccactgcccagtgggaggcgccactttgtatatttcaggactgggacctactccccagatgccacctgagag

SEQ ID NO: 481599 - DNA, 120 bp, Artificial Sequence
  ENSG00000161526_9 (sequence is synthesized)
gagcttctgtttggcattccagatggaaggacaggcagcacgggagccaggcgctgtggacagggtctgtccacgcaccacctggggtctgccgcctattaaaagtgccgtattcttacc

SEQ ID NO: 481600 - DNA, 120 bp, Artificial Sequence
  ENSG00000161526_10 (sequence is synthesized)
ttgcctcagggttgacaacagggtgatggaggcctgggacgctgttcagaggggtgacccaagaagtcaccgttgttatccgtgtatgcctctgggcatggacaggcgggagtccccgag

SEQ ID NO: 481601 - DNA, 120 bp, Artificial Sequence
  ENSG00000161526_11 (sequence is synthesized)
ccccacgtatgccccatctgccgccttgatcccaaaacccagccagttctcgggtgatggtggagctgtgctcccttgagtgcacttgagcactccccagaccagatcactttttggaca

SEQ ID NO: 481602 - DNA, 120 bp, Artificial Sequence
  ENSG00000161526_12 (sequence is synthesized)
cacccaggaaggcttttgaagtcaagccagtttccagaagggctggggtgagatcctgacctgtgcagagagtggggaggcgtcagcgcctggccagggctgccccagtcctttggtgcc

SEQ ID NO: 481603 - DNA, 120 bp, Artificial Sequence
  ENSG00000161526_13 (sequence is synthesized)
cggtgagcgcagccagcaggagctgagcagcgggggagatgaatcacctcctgccttggcgaggcggcagctcattgtttacaggcaagccctgctcctgggagggctcctgccacccca

SEQ ID NO: 481604 - DNA, 120 bp, Artificial Sequence
  ENSG00000161526_14 (sequence is synthesized)
cccttcctctgtgtgttatctctgccccacagcagcccctgggcagcaccagtggccactgggctccccccggggttgaaacgggtttcccagaccaggggttcagaggagactatttac

SEQ ID NO: 481605 - DNA, 120 bp, Artificial Sequence
  ENSG00000161526_15 (sequence is synthesized)
ccttcatgatctttggcgattctccactggagcggaagggctgtgtgtcaaaagaaggaagccaggctgtgaagggccgtgttgctttcagtgggtgggcagaggtttagaaaggtggtt

SEQ ID NO: 481606 - DNA, 120 bp, Artificial Sequence
  ENSG00000161526_16 (sequence is synthesized)
ctgaaatggcacctggtactcttgtgggacctggggaatataaggaactctgtgcatgaggtttcaaaaataaaaattgagtccactctccccgtacacacacactcgggcacttcagga

SEQ ID NO: 481607 - DNA, 120 bp, Artificial Sequence
  ENSG00000161526_17 (sequence is synthesized)
ggtcagttctcaccccttcctcgatggggctttaaagctctggggagaagagctgctccccactcatgccccagagggactgtgaaaaggcttcctgtgacctccgatggcggcccctca

SEQ ID NO: 481608 - DNA, 120 bp, Artificial Sequence
  ENSG00000161526_18 (sequence is synthesized)
ttggccaagggcactgtggatgttttgtgggaggcagcatggcaccgtggaaagggcagtagacgtggagccggcacctctggtctggattccacttaaaaccagttgagtggtctcaag

SEQ ID NO: 481609 - DNA, 120 bp, Artificial Sequence
  ENSG00000161526_19 (sequence is synthesized)
cccttaacctctgtaagcctgtttcttctctgaaatcacagtaataaagcgtcgtaagatggttgggaagaaccagaggtgacttatgcaaaagctttataaactgtaaagttcctgcca

SEQ ID NO: 481610 - DNA, 120 bp, Artificial Sequence
  ENSG00000161526_20 (sequence is synthesized)
ggatagattagatagcctgggttacgtgtttggtttggtcttaatcttaagagaccatggcagggaaagggactgaggcttctataaaagaaactgacaggtgggaaggatcccacagtc

SEQ ID NO: 481611 - DNA, 120 bp, Artificial Sequence
  ENSG00000161526_21 (sequence is synthesized)
cactttacctcctgttagcctcatctcaggagttggctcctacacccaccgccatgtcccgtggtgctgctccagcagggcggccctgtcttgccttcagtgaagtcctaagcagagaca

SEQ ID NO: 481612 - DNA, 120 bp, Artificial Sequence
  ENSG00000161526_22 (sequence is synthesized)
gagaaaagaacgtaaccttttctgtgcagccctactgggccagtggtagcttctcagaaagagctttgctaagaaactgaggaaccctcagaatgtaaaataaattacagaaatgaaaaa

SEQ ID NO: 481613 - DNA, 120 bp, Artificial Sequence
  ENSG00000161526_23 (sequence is synthesized)
gtgggaataagatggcggggaagaagaatgttctgtcgtctctcgcagtttacgcggaagattcagagcccgagtctgatggcgaggctggaatcgaggcggtgggcagcgcggctggaa

SEQ ID NO: 481614 - DNA, 120 bp, Artificial Sequence
  ENSG00000161526_24 (sequence is synthesized)
gtgactaacttcctgtggctttggggtagacatggtagactccttgtgtggggattgggcctctgcagttgagtccatgagaaggggtgggtgtggtatggtgcggagccttggggaagg

SEQ ID NO: 481615 - DNA, 120 bp, Artificial Sequence
  ENSG00000161526_25 (sequence is synthesized)
gtgagtgggggctggagggagagttaacgaatggtcagtccctgtatgatcagccagctggcgggtgagggaggagctgatgttttcctacaatcagcacccagaaagctgttctctaga

SEQ ID NO: 481616 - DNA, 120 bp, Artificial Sequence
  ENSG00000161526_26 (sequence is synthesized)
gggaaaatgtgagggcattttacagtcccatgtattgttactaacactcttgaacactggtttcctgagagtcactgctacaaagggattgttggtcccctgagagactggcagtctcta

SEQ ID NO: 481617 - DNA, 120 bp, Artificial Sequence
  ENSG00000161526_27 (sequence is synthesized)
tagggctgctgatttatgactgcggcagtctctatagagccgctgatttatgactgcaacctgaagttggtgtggcagtcctccaggcgcgcctccctgcctgctcccagcctcctcttt

SEQ ID NO: 481618 - DNA, 120 bp, Artificial Sequence
  ENSG00000161526_28 (sequence is synthesized)
gcccacctgattggcagggggcagtggctcgaagagatgggttgctaagcagcctggcctggacgtggtgccctgccaggttgaatgaatagctgcagtgttctgaggaatggggaattt

SEQ ID NO: 481619 - DNA, 120 bp, Artificial Sequence
  ENSG00000161526_29 (sequence is synthesized)
ggcctgtcccagcatcaggagggactttctggaaagggggctaagactgagtctaggttcagtgtggggaactgggtggccttcctggcaccttccttttggagccgtggcgtggtgtgc

SEQ ID NO: 481620 - DNA, 120 bp, Artificial Sequence
  ENSG00000161526_30 (sequence is synthesized)
catgtctgtgtaagtggagcctgcggagctctgcacctgtcctcgaaaaggtcttgttgcagggtcttcctgtctcatctcctccctcactcatcagcaggaaaagacatggcgtccagc

SEQ ID NO: 481621 - DNA, 120 bp, Artificial Sequence
  ENSG00000161526_31 (sequence is synthesized)
aactttctgtgaactctgcctctgctgttttgatgatgagcacgtgtggcccttgagattgttgatctaactggctttgaggggctgggtgtcagcaacccagaaatgggggaaacaggt

SEQ ID NO: 481622 - DNA, 120 bp, Artificial Sequence
  ENSG00000161526_32 (sequence is synthesized)
gtgttcttgccattttacacttgagacaatggaggcaagggaagacttgtgacggagggcttggaccgtggctttctcagcattgattttggtttagatgaaacatttactacagaacag

SEQ ID NO: 481623 - DNA, 120 bp, Artificial Sequence
  ENSG00000161526_33 (sequence is synthesized)
tgaaatccagaaaacgtctaagaagcctttgctctcaggtttctgcaggacatgtggatgtagctgtcatgggacactgtttgcattagggattggaggaagcttttctttggagggagt

SEQ ID NO: 481624 - DNA, 120 bp, Artificial Sequence
  ENSG00000161526_34 (sequence is synthesized)
ataaagccagtgtaaagggagctgagagccagagagaggcttccttgagcctggggcctctctgggatccccattctgccacttattaaaggtttgctgcatgcttgctctgaggttcca

SEQ ID NO: 481625 - DNA, 120 bp, Artificial Sequence
  ENSG00000161526_35 (sequence is synthesized)
aagcctcccttctttgaactaaaaataagaagagtatcttgggagcagctagtctgcattttcatctcgggagtctgctgttacaaagcagtcacctcttgcttccttggtaccagcggt

SEQ ID NO: 481626 - DNA, 120 bp, Artificial Sequence
  ENSG00000161526_36 (sequence is synthesized)
agaggtggtgatgtctgggctggccgggcccttgagctctgcactccattcaggcaagcttcctcagacccaggggagagcaacaggcagggtatacgttgcccagttggctgcagcagg

SEQ ID NO: 481627 - DNA, 120 bp, Artificial Sequence
  ENSG00000161526_37 (sequence is synthesized)
cttgctggcttgtgttctcctcagcgatggtgggtttggtcactgaaaaggcatggaggagagaccggcgtggggctcgggagcatccggctgctgcgatgcgggaagaagagggttcgg

SEQ ID NO: 481628 - DNA, 120 bp, Artificial Sequence
  ENSG00000161526_38 (sequence is synthesized)
aggctcgggggtgccagaggcccctgaagcatcagcttacccttagtgttcctggcagtgcttttactttttctccttccttaaaaatcctgagtggtctcagtagagagtagctggttc

SEQ ID NO: 481629 - DNA, 120 bp, Artificial Sequence
  ENSG00000161526_39 (sequence is synthesized)
cagggctcagcaagctcatggcccagcttgttggactcagagggcagaagaatcacattctaaacatgataaggataatacagaagcagaaaagcgagacccccaggaactcgtggcctc

SEQ ID NO: 481630 - DNA, 120 bp, Artificial Sequence
  ENSG00000161526_40 (sequence is synthesized)
ctcagctgagcctggcagcacacacaccccacactcctttccatctccaggttcacaaaagccacaagaagccacggggaggctcctggcctcttactttacctaaggaggccctgaagt

SEQ ID NO: 481631 - DNA, 120 bp, Artificial Sequence
  ENSG00000161526_41 (sequence is synthesized)
tccaggctgcccccaaccctggccccgtgtcatcacccggcgatgctctgagcctctcagcagggcctgtgtgctgagcagacctgctgggttcacggcgctcgtctgctgcttttgccc

SEQ ID NO: 481632 - DNA, 120 bp, Artificial Sequence
  ENSG00000161526_42 (sequence is synthesized)
tcggagacttgtttgctacattgtgcccccctttcctccccgccaattgcagagccttggggggctttgtccgttttgggtcatgggggccctttgtagcctgaagggagggaaatagtt

SEQ ID NO: 481633 - DNA, 120 bp, Artificial Sequence
  ENSG00000161526_43 (sequence is synthesized)
ccctaagagagtgccaggcccagcttgcgctgctcggtgagtgtcttggcctccagagctgccctcagtggctcgcctgggtgctacctattaggtcccacgttagggccctgagcacca

SEQ ID NO: 481634 - DNA, 120 bp, Artificial Sequence
  ENSG00000161526_44 (sequence is synthesized)
cttgttccctggcagtgtggtctgggttcttcagggagcatcagtttggctgggagaccaaactgttatctctgggccttgttccctttgtgaccagtctcagagccgggcatcaggaca

SEQ ID NO: 481635 - DNA, 120 bp, Artificial Sequence
  ENSG00000161526_45 (sequence is synthesized)
ccagctcctcccacttctggctcggcctgaccatcctcaagcagctgcggcctccagaccgcttccctcaccccaagcagaggggctgtggggcctgggcatgctggtggccctctggag

SEQ ID NO: 481636 - DNA, 120 bp, Artificial Sequence
  ENSG00000161526_46 (sequence is synthesized)
gtgctggctgctgggccaggaacgtgggagctggtgcaaggggatagttggggtttctcattcttaacccttgattgaatctcccttctctctctttccctctcccttccaaaccccagg

SEQ ID NO: 481637 - DNA, 120 bp, Artificial Sequence
  ENSG00000161526_47 (sequence is synthesized)
cttgttgcagggacgtgtctgcagcgcctggggaccggagctgtccttcccctgtgcgggcgggcaccgcctcctcctgggtgtgaggaggaggggcctggccaaacggttctgggcatg

SEQ ID NO: 481638 - DNA, 120 bp, Artificial Sequence
  ENSG00000161526_48 (sequence is synthesized)
agttcttttaagagtgaaaagcccctttgggttcttcttagacatctcgccctaccccagatgggcagagcagagttcatttccaatgcctcttttgtgtagtgccaagctcctgtcccc

SEQ ID NO: 481639 - DNA, 120 bp, Artificial Sequence
  ENSG00000161526_49 (sequence is synthesized)
cacgtccaccaccactaccactgccagcacagctgttgcaggtagattgcagagctgccctgcctcctgccacacacatggagccagggtctccctggcttgtttgggcgacagacagca

SEQ ID NO: 481640 - DNA, 120 bp, Artificial Sequence
  ENSG00000161526_50 (sequence is synthesized)
cgtggatctgggcctgggctcagccttgctactttgagaagcacctttggagtctggggtgggccacttcggggtctgctccctagactcccgctggcctgcagggggaagggaaagagg

SEQ ID NO: 481641 - DNA, 120 bp, Artificial Sequence
  ENSG00000161526_51 (sequence is synthesized)
agcacaatgttagataatggaaacagattcctttgggagaataaagaacaagttacctaacaacatatcaggaccttagcttcctcatctggaaagtgaaggggattggattagaggaga

SEQ ID NO: 481642 - DNA, 120 bp, Artificial Sequence
  ENSG00000161526_52 (sequence is synthesized)
ttcggaaccctaggtaagtttcccttgagcctgcagagtttattgagttattaatgttggactaaggactaagacgtccccaaggaggtggtgaggaaaagcccagagcccaaaccatca

SEQ ID NO: 481643 - DNA, 120 bp, Artificial Sequence
  ENSG00000161526_53 (sequence is synthesized)
cccagacttgtcattacactgagtgcctgctggacatggcggactgtgctaacccagccagaggcttgccatttaagatccagaaaaaacacaaagcaattcataccgagacctagacgg

SEQ ID NO: 481644 - DNA, 120 bp, Artificial Sequence
  ENSG00000161526_54 (sequence is synthesized)
ggatgagggagacctggctgagttctcgtccctgctctgagcctaaagcacatgacctctcaagtcccctgtcctcatggaaggaattggactagacaattactgtaggttcatcttcca

SEQ ID NO: 481645 - DNA, 120 bp, Artificial Sequence
  ENSG00000161526_55 (sequence is synthesized)
actctaaaaagctgatttttgcatataggtgagaggtcttaggaccagagcgatgtctggtcttcctccattgaatgttcaagctagtgacatacagggaaaagagcatggcccttgtgt

SEQ ID NO: 481646 - DNA, 120 bp, Artificial Sequence
  ENSG00000161526_56 (sequence is synthesized)
gggtctgagtgtggtaagcccaatccagctgtgcagactgaaggtcagtgagacaaaactcagccgtcaccttgaccctgtgctcctcccggcccctagctaacaggtccatctccctgg

SEQ ID NO: 481647 - DNA, 120 bp, Artificial Sequence
  ENSG00000161526_57 (sequence is synthesized)
gctggatttaaaagttgtgaaggttttgtgtcagccccaggagctggatggttcaggtcccatgcagggacgtggacttgtgcctgctcagcgccggcactgttctttcagcatctacga

SEQ ID NO: 481648 - DNA, 120 bp, Artificial Sequence
  ENSG00000161526_58 (sequence is synthesized)
gggacgtggacttgtgcctgctcagcgccggcactgttctttcagcatctacgagaagctgatccagttctgtgccattgacgagcttggcaccaactacccaaaggtgcgtctggcaca

SEQ ID NO: 481649 - DNA, 120 bp, Artificial Sequence
  ENSG00000161526_59 (sequence is synthesized)
cggggctggagggtgatggggacacccagggtcctttgcttgttccatgggatttgacctgcagccacagaaaggtccacgtggtggcacggctcgttgaaagcacagtccctgtctctt

SEQ ID NO: 481650 - DNA, 120 bp, Artificial Sequence
  ENSG00000161526_60 (sequence is synthesized)
ttgtttgagtccctattgttctgaaatagtccaataaagagattccggtggccggcctggtgcctggcccctgactggtggggacatgtgtggacctgctgctcctggggttcgctggat

SEQ ID NO: 481651 - DNA, 120 bp, Artificial Sequence
  ENSG00000161526_61 (sequence is synthesized)
ctgtggctcagttcgtatgtttggtcaagatctgtcccactgacaaactgtgcaactgtgtggacattttctgggataaaataagctttataaagaaagaacctggagacaactcaggaa

SEQ ID NO: 481652 - DNA, 120 bp, Artificial Sequence
  ENSG00000161526_62 (sequence is synthesized)
tgaacaaatcctgagacacattggatttccagcctttcagattgtgccatatctcctgactagaaaggcgagaggcctggctgaggccaacaacccacttgcattctgcatcccagatgg

SEQ ID NO: 481653 - DNA, 120 bp, Artificial Sequence
  ENSG00000161533_0 (sequence is synthesized)
ggatttagattgtcactgccacctcggtcggtgcttacttcgctgccagctggtcgtcgccatgaacccggacctgcgcagggagcgggattccgccagcttcaacccggagctgcttac

SEQ ID NO: 481654 - DNA, 120 bp, Artificial Sequence
  ENSG00000161533_1 (sequence is synthesized)
acacatcctggacggcagccccgagaaaacccggcgccgccgagagatcgagaacatgatcctgaacgacccagacttccagcatgaggacttgaacttcctcactcgcagccagcgtta

SEQ ID NO: 481655 - DNA, 120 bp, Artificial Sequence
  ENSG00000161533_2 (sequence is synthesized)
tgaggtggctgtcaggaaaagtgccatcatggtgaagaagatgagggagtttggcatcgctgaccctgatgaaattatgtggtttaaaaaactacatttggtcaattttgtggaacctgt

SEQ ID NO: 481656 - DNA, 120 bp, Artificial Sequence
  ENSG00000161533_3 (sequence is synthesized)
gggcctcaattactccatgtttattcctaccttgctgaatcagggcaccactgctcagaaagagaaatggctgctttcatccaaaggactccagataattggcacctacgcccagacgga

SEQ ID NO: 481657 - DNA, 120 bp, Artificial Sequence
  ENSG00000161533_4 (sequence is synthesized)
aatgggccacggaactcaccttcgaggcttggaaaccacagccacgtatgaccctgaaacccaggagttcattctcaacagtcctactgtgacctccattaaatggtggcctggtgggct

SEQ ID NO: 481658 - DNA, 120 bp, Artificial Sequence
  ENSG00000161533_5 (sequence is synthesized)
tggaaagacttcaaatcatgcaatagttcttgcccagctcatcactaaggggaaatgctatggattacatgcctttatcgtacctattcgtgaaatcgggacccataagcctttgccagg

SEQ ID NO: 481659 - DNA, 120 bp, Artificial Sequence
  ENSG00000161533_6 (sequence is synthesized)
aattaccgttggtgacatcggccccaaatttggttatgatgagatagacaatggctacctcaaaatggacaaccatcgtattcccagagaaaacatgctgatgaagtatgcccaggtgaa

SEQ ID NO: 481660 - DNA, 120 bp, Artificial Sequence
  ENSG00000161533_7 (sequence is synthesized)
gcctgatggcacatacgtgaaaccgctgagtaacaagctgacttacgggaccatggtgtttgtcaggtccttccttgtgggagaagctgctcgggctctgtctaaggcgtgcaccattgc

SEQ ID NO: 481661 - DNA, 120 bp, Artificial Sequence
  ENSG00000161533_8 (sequence is synthesized)
catccgatacagcgctgtgaggcaccagtctgaaatcaagccaggtgaaccagaaccacagattttggattttcaaacccagcagtataaactctttccactcctggccactgcctatgc

SEQ ID NO: 481662 - DNA, 120 bp, Artificial Sequence
  ENSG00000161533_9 (sequence is synthesized)
attggtcaaggggacctgagtgaactgcctgagcttcatgccctcaccgctggactgaaggctttcacctcctggactgcaaacactggcattgaagcatgtcggatggcttgtggtggg

SEQ ID NO: 481663 - DNA, 120 bp, Artificial Sequence
  ENSG00000161533_10 (sequence is synthesized)
catggctattctcattgcagtggtcttccaaatatttatgtcaatttcaccccaagctgtacctttgagggagaaaacactgtcatgatgctccagacggctaggttcctgatgaaaagt

SEQ ID NO: 481664 - DNA, 120 bp, Artificial Sequence
  ENSG00000161533_11 (sequence is synthesized)
tatgatcaggtgcactcaggaaagttggtgtgtggcatggtgtcctatttgaacgacctgcccagtcagcgcatccagccacagcaggtagcagtctggccaaccatggtggatatcaac

SEQ ID NO: 481665 - DNA, 120 bp, Artificial Sequence
  ENSG00000161533_12 (sequence is synthesized)
agccccgaaagcctaaccgaagcatataaactccgtgcagccagattagtagaaattgctgcaaaaaaccttcaaaaagaagtgattcacagaaaaagcaaggaggtagcttggaaccta

SEQ ID NO: 481666 - DNA, 120 bp, Artificial Sequence
  ENSG00000161533_13 (sequence is synthesized)
acttctgttgaccttgttcgagcaagtgaggcacattgccactatgtggtagttaagctcttttcagaaaaactcctcaaaattcaagataaagccattcaagctgtcttaaggagttta

SEQ ID NO: 481667 - DNA, 120 bp, Artificial Sequence
  ENSG00000161533_14 (sequence is synthesized)
tgtctgctgtattctctgtatggaatcagtcagaacgcgggggatttccttcaggggagcatcatgacagagcctcagattacacaagtaaaccagcgtgtaaaggagttactcactctg

SEQ ID NO: 481668 - DNA, 120 bp, Artificial Sequence
  ENSG00000161533_15 (sequence is synthesized)
attcgctcagatgctgttgctttggttgatgcatttgattttcaggatgtgacacttggctctgtgcttggccgctatgatgggaatgtgtatgaaaacttgtttgagtgggctaagaac

SEQ ID NO: 481669 - DNA, 120 bp, Artificial Sequence
  ENSG00000161533_16 (sequence is synthesized)
tccccactgaacaaagcagaggtccacgaatcttacaagcacctgaagtcactgcagtccaagctctgaagtgtcacaaggacaagtttaatctgcttcagaaagcgcctgtgtgcaact

SEQ ID NO: 481670 - DNA, 120 bp, Artificial Sequence
  ENSG00000161533_17 (sequence is synthesized)
caaattttgtggaatctttttcgaattcaaatagctatagagcaaatgataaattgacccctttttataaatggagggaaaaaatgaacagatttcagagattaaatgaaaaaaagcaga

SEQ ID NO: 481671 - DNA, 120 bp, Artificial Sequence
  ENSG00000161533_18 (sequence is synthesized)
aattttgtgcaccgagggcggcctgagcctctggatcttcacttgggcatgttcctgcccaccttgcttcaccaggcaactgcggagcagcaggagcgcttcttcatgcccgcctggaac

SEQ ID NO: 481672 - DNA, 120 bp, Artificial Sequence
  ENSG00000161533_19 (sequence is synthesized)
gttaaaccattcagaaaaagcttaagaaatgcgatatgacttccttttgtaatgctgctgatcccagtagactatgacttttgataattagcagaatttaactactgagtagttgattat

SEQ ID NO: 481673 - DNA, 120 bp, Artificial Sequence
  ENSG00000161533_20 (sequence is synthesized)
tttcacattttaattgctaatcactggctatataagtgtttttaagcaaaggtatttttgaagtggtgtagaacccttccaagctttcctgctcagtgttctaccagacttaccctgggg

SEQ ID NO: 481674 - DNA, 120 bp, Artificial Sequence
  ENSG00000161533_21 (sequence is synthesized)
cctggcttaaaagcaggattgaagaaaagggactgggggaaggaaacttattggaaaacttgatgcgaatgagtttctgcttggcacagtctctgcctgcttgctctcctttgctgatgg

SEQ ID NO: 481675 - DNA, 120 bp, Artificial Sequence
  ENSG00000161533_22 (sequence is synthesized)
attgcatttatcaaactattcatgctagcatttttccaacgagggaacttattccgcacgggcctactgtaggaccattgtctcgtgtaattaggaattttccatttgaaggattgctaa

SEQ ID NO: 481676 - DNA, 120 bp, Artificial Sequence
  ENSG00000161533_23 (sequence is synthesized)
attgtcacagtagtaggaagtatagggaaacctctcagctgtggcactgttgtagctttggagtgcagagtgtaactctgggacaatcagatttcacatattctgtcatcttggcataag

SEQ ID NO: 481677 - DNA, 120 bp, Artificial Sequence
  ENSG00000161533_24 (sequence is synthesized)
ccattaaaagcttggagattactgtatttggcattaaaaaaaaatgtcacttaggtcagcactcccagacgtagcacagaaaaaccctttgacacaaaccatgtgttctgatttttggtt

SEQ ID NO: 481678 - DNA, 120 bp, Artificial Sequence
  ENSG00000161533_25 (sequence is synthesized)
cagaaaatattgaaactgtgagttgttttttttttaacaactgggaaaaaacaaaaacaaaaaactatagttagaaaaatggaagttccataggttctatttcttactctatgtatggct

SEQ ID NO: 481679 - DNA, 120 bp, Artificial Sequence
  ENSG00000161533_26 (sequence is synthesized)
ttgttttcagtctatttctaggagctttctctgaatcgctaattgtcctttcagttgaaatctaatttatacaatcattctatacttaaaggttaaatacatcttaattaattttttctt

SEQ ID NO: 481680 - DNA, 120 bp, Artificial Sequence
  ENSG00000161533_27 (sequence is synthesized)
aaagtcaatgtaagtcactttgttttgtttttttttaatctacgccatatgcctcatgaaaccagctgttctagaatcagtcctgagaatatggcttaattccatggaaacataactcct

SEQ ID NO: 481681 - DNA, 120 bp, Artificial Sequence
  ENSG00000161533_28 (sequence is synthesized)
atcttgggacctgacataatatctatctatcctggggaactggtaatatgagacttataggttacagcagaaatgctacatgttgacaaaagccttaatcgttccactgggagaactaat

SEQ ID NO: 481682 - DNA, 120 bp, Artificial Sequence
  ENSG00000161533_29 (sequence is synthesized)
tgataattgtgttaagattgaagattaaccctgtgttaatctcacttgagtctatcctgacagtagttcagattctggaaaatgataaactgacctgctagatgtagaattgtttcaaaa

SEQ ID NO: 481683 - DNA, 120 bp, Artificial Sequence
  ENSG00000161533_30 (sequence is synthesized)
agatgggatgtctttgcaggtttgaggagatcatcgacctgcagagccccctttgacccagtacctcacgttttatttaaaatctaaatctggggccaggcgtggtggctcacgcctgta

SEQ ID NO: 481684 - DNA, 89 bp, Artificial Sequence
  ENSG00000161533_31 (sequence is synthesized)
tacactgcagcctgggtggctgagcgagactccgtctcaaaaaaaaaatctaaatctgacatttgatgctatttttattaatattggaa

SEQ ID NO: 481685 - DNA, 120 bp, Artificial Sequence
  ENSG00000161533_32 (sequence is synthesized)
ctaaatctgacatttgatgctatttttattaatattggaatgttctgtcttgaactttattcaatataatcaagaataaagatagagtaaacgtcactgatttgtactattaagagagaa

SEQ ID NO: 481686 - DNA, 120 bp, Artificial Sequence
  ENSG00000161533_33 (sequence is synthesized)
aaaatatgccacacaactaaacataggtttaaattatgaagaaatttagaatagaggtttattagatttagggaacactaagaacaaaaaaggaaggagtgatacctgcctgagtggaca

SEQ ID NO: 481687 - DNA, 120 bp, Artificial Sequence
  ENSG00000161533_34 (sequence is synthesized)
gctgtaaatcagctgtaattactgcagttgtaccaatagttgtgagtggctccagtcactttaggagtccttggaagtacttggtacacatttgttggctgtaccttaaaggaagtggca

SEQ ID NO: 481688 - DNA, 120 bp, Artificial Sequence
  ENSG00000161533_35 (sequence is synthesized)
agtccagtttgttctctctaccacactagactgccactgacaagtttgggtctgttggattcaaaattttgtaagccattttcacaagtacaaagatacattttaaccttgtcttctcca

SEQ ID NO: 481689 - DNA, 120 bp, Artificial Sequence
  ENSG00000161533_36 (sequence is synthesized)
aaattactgagtaggaattttatttttatctttttgagacagggtatcactgtcacccagactggagtgcagtggtgggatcttggcttactgtgacctctgcctcccgggttcaaatgg

SEQ ID NO: 481690 - DNA, 89 bp, Artificial Sequence
  ENSG00000161533_37 (sequence is synthesized)
tcttggcttactgtgacctctgcctcccgggttcaaatggtcctccctcctcagtctcctgagtagctgggacggttctattttttctg

SEQ ID NO: 481691 - DNA, 120 bp, Artificial Sequence
  ENSG00000161533_38 (sequence is synthesized)
agtgctgagattataggtgtgagccacagcatctggcccagagtgaggagaattaatgagattttttgtgtgtgttagataatattgatttaagcctttttttaaaaagtactctcaacc

SEQ ID NO: 481692 - DNA, 120 bp, Artificial Sequence
  ENSG00000161533_39 (sequence is synthesized)
aatattgatttaagcctttttttaaaaagtactctcaaccaaatacaaaattgaaaatgtgaggtttaatagaaatgtgttggctatttgcaatggattttcttcttgcccaagtgtttg

SEQ ID NO: 481693 - DNA, 120 bp, Artificial Sequence
  ENSG00000161533_40 (sequence is synthesized)
gagttctactttatgctctgtatttaaaaattagtgacctcaaagcagagttgatgacacaggctttggggccctcatgttcttgtctttagaacatatcactactaagtatcagcttat

SEQ ID NO: 481694 - DNA, 120 bp, Artificial Sequence
  ENSG00000161533_41 (sequence is synthesized)
cttcagaacattacaacattcaccgtgttcatatgctttctgagaagtcaccacttgtaatttcagatcacatacacctgaaggcattttatagttcctaaagttaacatgttagatctt

SEQ ID NO: 481695 - DNA, 120 bp, Artificial Sequence
  ENSG00000161533_42 (sequence is synthesized)
taacatgttagatcttttttttccaccccatgagggtctcactctcacccaggctggaatgcagtggtgtgattgtagcacactttggccaccaactcctgggctcaagtgatcctcctg

SEQ ID NO: 481696 - DNA, 120 bp, Artificial Sequence
  ENSG00000161533_43 (sequence is synthesized)
caccacacctggctaattttttatttttttttatttttggaaatagggtatggctatgttgccttgggcccgtcatgaactcctagcctcaggtgaccctcccacctcaggcctcccaaa

SEQ ID NO: 481697 - DNA, 120 bp, Artificial Sequence
  ENSG00000161533_44 (sequence is synthesized)
tcatgaactcctagcctcaggtgaccctcccacctcaggcctcccaaagggttgggattacaggagtgagctactgcactgggccaacatgttaatttttttttttttttttttgagatg

SEQ ID NO: 481698 - DNA, 82 bp, Artificial Sequence
  ENSG00000161533_45 (sequence is synthesized)
ttttttttttgagatggagtctcccaggcgggaatgcaatggtgcgatctcgacttcactgcaatcttcacctcccgggttc

SEQ ID NO: 481699 - DNA, 120 bp, Artificial Sequence
  ENSG00000161533_46 (sequence is synthesized)
acctgccatcacgctcggctaatttttgtattttgagcagagatggagtttcaccatgttggccaggtgatctgcactcccactccccccacacttcccaaagtgctgggattacaggca

SEQ ID NO: 481700 - DNA, 120 bp, Artificial Sequence
  ENSG00000161533_47 (sequence is synthesized)
ttacatcttaattcttggattttcttcactgcagggctttgggtggagaaataaaactcttcaaatgcatgatcttggagatccctgtgaatcaataattctttagacaactgcggctca

SEQ ID NO: 481701 - DNA, 120 bp, Artificial Sequence
  ENSG00000161533_48 (sequence is synthesized)
aaatccctcctttcccttttccgagttattccatccatcttattagaaaggaagtgaattaggtgtaggtggtctgtaacacctgcacatctttttatacgtgtagagggtatgcctggg

SEQ ID NO: 481702 - DNA, 120 bp, Artificial Sequence
  ENSG00000161533_49 (sequence is synthesized)
atatataggttgtcttcaagcagtagctgctactacagctagagagaggaggagtgccaggaaactgatgacctgagaccaagagtcttgttgatgttctgacttagataaaggttttga

SEQ ID NO: 481703 - DNA, 120 bp, Artificial Sequence
  ENSG00000161533_50 (sequence is synthesized)
tcattttcatgaaataatgcagggaagtcatttctgctgtttctttactactccattcttggaggattagaacaagtcacactgtaattgactaaaacgactttttattttaaaatattg

SEQ ID NO: 481704 - DNA, 83 bp, Artificial Sequence
  ENSG00000161533_51 (sequence is synthesized)
tttaaaatattgatggtgttgtcttgctctttcacccagggtagagtgcagtggcgaaatcttggctcactgcaacctctgcc

SEQ ID NO: 481705 - DNA, 81 bp, Artificial Sequence
  ENSG00000161533_52 (sequence is synthesized)
gtgtttttaactgtccacacttactaaattttccagtacttcttcctatggttcatgatagtaaacacagaaacatataag

SEQ ID NO: 481706 - DNA, 120 bp, Artificial Sequence
  ENSG00000161533_53 (sequence is synthesized)
cttcctatggttcatgatagtaaacacagaaacatataaggaacattattagagttaccagatgttagctgttgcatatgtgcacattcctagattcaagggtgtttttgccttaaattt

SEQ ID NO: 481707 - DNA, 120 bp, Artificial Sequence
  ENSG00000161533_54 (sequence is synthesized)
aagtgggtcattggttgtcttgggaagatcatggaaaattcgggattttttagaattctgaaccaaaatatgttttgagtgtttcttagtaaatgtgtgatcttccaccttccacattca

SEQ ID NO: 481708 - DNA, 120 bp, Artificial Sequence
  ENSG00000161533_55 (sequence is synthesized)
gactgcggactacacttcataaatgcctttttatttccagttatggattcaactaaatgactgccttgggagcacataattactttgctacctttttccccctttgctgttgtggctcga

SEQ ID NO: 481709 - DNA, 120 bp, Artificial Sequence
  ENSG00000161533_56 (sequence is synthesized)
gtttggttctcacctgagaagatgcattgagcatatgttgttacccagccctggcttaatggtgtcctgtggggtaggggtgggaggacgaggggcacggggccagagcatgtgaatgga

SEQ ID NO: 481710 - DNA, 120 bp, Artificial Sequence
  ENSG00000161533_57 (sequence is synthesized)
tcatggttggacagctgtgacctgccagcactgcgggtaagcaaaactacaaaccgttctttcctctgtgacattgaataaaccttaataaaattcataattagcacatactagaaaaaa

SEQ ID NO: 481711 - DNA, 120 bp, Artificial Sequence
  ENSG00000161533_58 (sequence is synthesized)
tgaatttttcagcatttattggatgttttgaagttggaaagacttcaaatcatgcaatagttcttgcccagctcatcactaaggggaaatgctatggattacatgcctttatcgtaccta

SEQ ID NO: 481712 - DNA, 120 bp, Artificial Sequence
  ENSG00000161533_59 (sequence is synthesized)
cctggacggcagccccgagaaaacccggcgccgccgagagatcggtgagggcggcgggcgagacctccctcctttcccgagaaaagctggagactccctcgatgcggagtcaggggcgct

SEQ ID NO: 481713 - DNA, 120 bp, Artificial Sequence
  ENSG00000161533_60 (sequence is synthesized)
tacagcgctgtgaggcaccagtctgaaatcaagccagggtaaggatagggtcctagatgggctcagtaccaaaggcctagtttttaccccattcagatcccagaattcccaaatgtcaat

SEQ ID NO: 481714 - DNA, 120 bp, Artificial Sequence
  ENSG00000161533_61 (sequence is synthesized)
acagaagatgcattagcactgcaaaattggctagggtgataactgggcctgtaatttcatatctaggcttccttttcttaagaggaaagacagaaataaccacccttgctataatcagtg

SEQ ID NO: 481715 - DNA, 120 bp, Artificial Sequence
  ENSG00000161533_62 (sequence is synthesized)
ttctgctgctacctgtttgggattctatttttaagttgttaagtcaaaattcaacttcttgttttctcctagacattttccctggaaactggtccagggctctggcctataaacgtcatt

SEQ ID NO: 481716 - DNA, 120 bp, Artificial Sequence
  ENSG00000161533_63 (sequence is synthesized)
cactgttatttcctaaagccttttattattgaacagcttgaaaagatggggtttacagtgcagcggggaaccccattatgttactctgggtctaatgagtaaagactttgttggaaattc

SEQ ID NO: 481717 - DNA, 120 bp, Artificial Sequence
  ENSG00000161542_0 (sequence is synthesized)
gcctctggctctgaggcggcggcgccgggcgctgcgaaggctcggccgctgtagtcagtggtgtggggtgcgcaagggcacggacctcggagctctccccgcttgcgccgagtttctcag

SEQ ID NO: 481718 - DNA, 120 bp, Artificial Sequence
  ENSG00000161542_1 (sequence is synthesized)
cgccttccccacccaaaccggggtctcgcagtcggaagcactcagagtgcagccccgcgcggggccggtcgtaaccgcgccgcgggccggacgatgcccaagaagctgctgctgttgccc

SEQ ID NO: 481719 - DNA, 120 bp, Artificial Sequence
  ENSG00000161542_2 (sequence is synthesized)
ccgccctccgcgtcctcggctttccgcgtcccgcgcgcccgccccgttcccccgccggccatgaacgccgctcgcaccggctaccgagtcttctcggccaactccacggccgcctgcacg

SEQ ID NO: 481720 - DNA, 120 bp, Artificial Sequence
  ENSG00000161542_3 (sequence is synthesized)
gagctggccaagcgcatcacagagcgccttggtgctgaattggggaagtctgttgtatatcaagagaccaatggagaaacaagagttgaaataaaagaatctgttcgtggccaagatatt

SEQ ID NO: 481721 - DNA, 120 bp, Artificial Sequence
  ENSG00000161542_4 (sequence is synthesized)
ttcattatacagacaatacccagagatgtgaatacagctgtgatggagttgctcatcatggcttacgcactgaagactgcctgtgccaggaacattattggggtcatcccctacttcccc

SEQ ID NO: 481722 - DNA, 120 bp, Artificial Sequence
  ENSG00000161542_5 (sequence is synthesized)
tacagcaagcagagcaagatgaggaagaggggttccattgtgtgcaagctgctagcatccatgctggcgaaagcaggtttaactcacattatcactatggatcttcatcaaaaggaaata

SEQ ID NO: 481723 - DNA, 120 bp, Artificial Sequence
  ENSG00000161542_6 (sequence is synthesized)
caaggctttttcagctttcctgtggacaaccttagagcctcacctttcctgcttcagtatatccaggaagaaattccaaattacagaaatgcagtcattgtagctaagtctcctgatgct

SEQ ID NO: 481724 - DNA, 120 bp, Artificial Sequence
  ENSG00000161542_7 (sequence is synthesized)
gcaaagagggcccagtcctatgcggagagactgcgtctgggtttggccgtcattcacggggaagctcagtgcacggaactggacatggacgatggtcgtcactccccgcctatggtcaaa

SEQ ID NO: 481725 - DNA, 120 bp, Artificial Sequence
  ENSG00000161542_8 (sequence is synthesized)
aatgctactgtgcacccaggcctggagttgccattgatgatggccaaagagaagccaccgataactgtagttggagatgttggaggccgcatcgcaatcatcgtggatgacattattgac

SEQ ID NO: 481726 - DNA, 120 bp, Artificial Sequence
  ENSG00000161542_9 (sequence is synthesized)
gatgtggagagttttgttgctgccgcggagatcctgaaagagagaggcgcctataagatctatgttatggccacccacggcatcctgtctgcagaggcccctcgcctgattgaggagtcc

SEQ ID NO: 481727 - DNA, 120 bp, Artificial Sequence
  ENSG00000161542_10 (sequence is synthesized)
tccgtagacgaggtggtggtgacgaatactgtccctcatgaggttcagaagctgcaatgtcccaagataaagactgtggatatcagtttgattctttctgaagccattcggagaatccac

SEQ ID NO: 481728 - DNA, 120 bp, Artificial Sequence
  ENSG00000161542_11 (sequence is synthesized)
aatggagagtccatggcctaccttttccgaaacatcactgtggatgactagctttcacgagggtctcgaccctggacctcctgagggaaacatggaaaaagcagtgccatgagtgataca

SEQ ID NO: 481729 - DNA, 120 bp, Artificial Sequence
  ENSG00000161542_12 (sequence is synthesized)
gtgtttccttgcaagggaggactcgaaacagcctggagttagatatcttcttttgcccggattgatggggaggagggattaaaagagtcaggaagaagacagagctaatggataaatatc

SEQ ID NO: 481730 - DNA, 120 bp, Artificial Sequence
  ENSG00000161542_13 (sequence is synthesized)
ataacatggccttacatgtctgctgtcatcagccctgttccttaaaagttctagctgctttcttaaaaataatctgaaaatcttattgatactaaagaggagttaaaggcacataaagtc

SEQ ID NO: 481731 - DNA, 120 bp, Artificial Sequence
  ENSG00000161542_14 (sequence is synthesized)
gctgagcgcctgtggccctattactatccagttggcctctcccaaatcaacttcaagtcttttatagagaatcgtatttttctttcagaaattgttatgcctacagccattgaaaaatga

SEQ ID NO: 481732 - DNA, 120 bp, Artificial Sequence
  ENSG00000161542_15 (sequence is synthesized)
agcattcatgttgttacatcttccaaggatgtcagattagaaaatagcatcccacctctgggtatctgagtggctctgaagttgcaaataaaataatttgttgtcttgctagtcttttca

SEQ ID NO: 481733 - DNA, 120 bp, Artificial Sequence
  ENSG00000161542_16 (sequence is synthesized)
ttagacagcagaagaccatggatacagaacagcagtcaggtctgtggctggacacaaacactttcccaggttccaccctcttcctaagtgttgaagctaaatccttgttgaatactgtat

SEQ ID NO: 481734 - DNA, 120 bp, Artificial Sequence
  ENSG00000161542_17 (sequence is synthesized)
tttaaatctttaaaaaaaaaaaaaaaaagtctaggtgtggtggctcacacctataatctgagtactttgggaggctgaggcaaggaggattgcttgagcccaggagtttcagaccagcct

SEQ ID NO: 481735 - DNA, 89 bp, Artificial Sequence
  ENSG00000161542_18 (sequence is synthesized)
caaggaggattgcttgagcccaggagtttcagaccagcctgggaaacatggcgaaacccccatgtggtagcatgtgcctgtagttccag

SEQ ID NO: 481736 - DNA, 79 bp, Artificial Sequence
  ENSG00000161542_19 (sequence is synthesized)
gctgaggtgggaggattgcctgagccaaggaggttgaagctgcagtgaactatgattgtaccactgccatccacaggcc

SEQ ID NO: 481737 - DNA, 62 bp, Artificial Sequence
  ENSG00000161542_20 (sequence is synthesized)
tactaaaaatacaaaaattagcctagctaagttaaaagcataaaaagactacaaagaggcca

SEQ ID NO: 481738 - DNA, 70 bp, Artificial Sequence
  ENSG00000161542_21 (sequence is synthesized)
caaaaattagccgggtgttgggggagggattggttgaacccaagaggcagagattgcagtgagctgagat

SEQ ID NO: 481739 - DNA, 84 bp, Artificial Sequence
  ENSG00000161542_22 (sequence is synthesized)
ctccagcccaagactgcaaagaactagttattttgataaccccttaaaggcctactgtgtcccaagttattggaatataatgat

SEQ ID NO: 481740 - DNA, 120 bp, Artificial Sequence
  ENSG00000161542_23 (sequence is synthesized)
taaaggcctactgtgtcccaagttattggaatataatgatgatcgaaaatccttcaattaaataaacagtacctctcaggctgaagtgaaaaatctgaacttgaacagtagttaaaatag

SEQ ID NO: 481741 - DNA, 120 bp, Artificial Sequence
  ENSG00000161542_24 (sequence is synthesized)
tacagttattccttacaatccatgggtgattggttccaggactcaacctcctgcccatggatgtgcaagtccctgatagaaaatggtgtagtatctgcatataagctatgcacatcctgg

SEQ ID NO: 481742 - DNA, 120 bp, Artificial Sequence
  ENSG00000161542_25 (sequence is synthesized)
atgacttgtaatacctactgcaatatcctgtgtagatggtggtcatgctgtattatttagagaatcatgacaggaatctgtacgtgttcagtcgtggttggttaaatctgcagatgcaga

SEQ ID NO: 481743 - DNA, 120 bp, Artificial Sequence
  ENSG00000161542_26 (sequence is synthesized)
gctcacggaggaggctggccatgcatggcacacattcataggttctctttaagtagccttgctgtgcttctgttaggaagttttatttatacgtttttgggaagaatcttgtatggggaa

SEQ ID NO: 481744 - DNA, 120 bp, Artificial Sequence
  ENSG00000161542_27 (sequence is synthesized)
cccgccccacctcctgcacctggggcgggaggcgcgggccttcccagccggacaaagcttggaggtgacggataccgccccccgctccccggttttgcagctgggaggcttggggcggac

SEQ ID NO: 481745 - DNA, 120 bp, Artificial Sequence
  ENSG00000161542_28 (sequence is synthesized)
tctcggtgacctcagccccccgccccgtgactgggtccgcggcctgcctgcctttcgtctccgcagtcccacaccccggggcgggccgagctttctggagccccggagtgcgtgtcttgg

SEQ ID NO: 481746 - DNA, 120 bp, Artificial Sequence
  ENSG00000161542_29 (sequence is synthesized)
ggaaaggggctcagggcttggcttcctttcccacggctggagttgacctgggaatctgaccgccgccactctcaagtctcactgcagtgagacccgcgggcgtggttgtgagttggggga

SEQ ID NO: 481747 - DNA, 120 bp, Artificial Sequence
  ENSG00000161542_30 (sequence is synthesized)
ctcagcgcgccgcctccggcacggcccgcgcccacggccgggccacgagctggttcccgcccgggtcctaggaagcggcaagcgcgcccccgccgctcgtcctaggcgtctggctagaag

SEQ ID NO: 481748 - DNA, 120 bp, Artificial Sequence
  ENSG00000161542_31 (sequence is synthesized)
atttttaaaaaattcttgacgtaggagtgctttttccagtgatgttaattgataaatattgaaaaatctaaaacttgtgactaaaattctagcatatttgatgactagtttggatcatta

SEQ ID NO: 481749 - DNA, 120 bp, Artificial Sequence
  ENSG00000161542_32 (sequence is synthesized)
ctaggaacgatgatccgaatggatccatgtatcctttctcacccaaactcccttgtgccaagtggcagaaacctgtatccaggtgaacatacattaaagtataacctacagataggaaat

SEQ ID NO: 481750 - DNA, 120 bp, Artificial Sequence
  ENSG00000161542_33 (sequence is synthesized)
gagcacagtactcccgtgagaaaattcagcaccttcaccttcatcatgtggattctaggttctttaaaccagctcacctaatcatgcttgagcgttagggccgaaagatgaactgaagat

SEQ ID NO: 481751 - DNA, 120 bp, Artificial Sequence
  ENSG00000161542_34 (sequence is synthesized)
gagctgttccgttttcacaagtaagaatgggtgtccccgtgcagactcgttctgcatgttgacatactttttttcccagctctaaatatctgctggctagtgggtcatgagtcctttgca

SEQ ID NO: 481752 - DNA, 120 bp, Artificial Sequence
  ENSG00000161542_35 (sequence is synthesized)
gtagcacactttatttcagttttcttctcatgtcacagtctatttgaaaaaaaaataaatggaacgctggctatgtgggattcaccagaaacgtgagacaggaaaatgagtgttggcaat

SEQ ID NO: 481753 - DNA, 120 bp, Artificial Sequence
  ENSG00000161542_36 (sequence is synthesized)
ataaataatgcctttgtatgtccctgaaacgttaaatattttcattttatggttaaaaaatgatgccgtagtgatgcgtgggatttcttcctgtcagtttcaccatttccctttgtcctt

SEQ ID NO: 481754 - DNA, 120 bp, Artificial Sequence
  ENSG00000161542_37 (sequence is synthesized)
ccgggccacgagctggttcccgcccgggtcctaggaagcggcaagcgcgcccccgccgctcgtcctaggcgtctggctagaaggcggcgccgcgacctggccgggtgagctgaggcggca

SEQ ID NO: 481755 - DNA, 120 bp, Artificial Sequence
  ENSG00000161542_38 (sequence is synthesized)
ggcaggccgcgaggcgcggagtcccgggcccggccgcgagcgcagtgtctggggcgcgcgaaagcgaccgcgcagcgcagacggaggcgcgggctccgcgcgaactcgtgtcggagcgag

SEQ ID NO: 481756 - DNA, 120 bp, Artificial Sequence
  ENSG00000161542_39 (sequence is synthesized)
gggcgcgcgcggctccgctctcccgggggacccttggtttcacctcgacgccacgacctcgcccccgcgggtgctgtcggcgccgggatgcagcgccccttttgcgcgctctgccctagc

SEQ ID NO: 481757 - DNA, 120 bp, Artificial Sequence
  ENSG00000161542_40 (sequence is synthesized)
ccaccagcttccctctttcttcctcccccgcgctcccacggaggttatttttaacttcccgacgctgcagctgggctaccgagcctgaggccgcctagcgcgctgtcccgggtagagcag

SEQ ID NO: 481758 - DNA, 76 bp, Artificial Sequence
  ENSG00000161542_41 (sequence is synthesized)
tttgcttccagtttgaaatgagccggggcaacatagcaagatcccctctgagaaaaaaaagtgtaaaacatctcat

SEQ ID NO: 481759 - DNA, 120 bp, Artificial Sequence
  ENSG00000161542_42 (sequence is synthesized)
cttccagtttgaaatgagccggggcaacatagcaagatcccctctgagaaaaaaaagtgtaaaacatctcattaatttttatatcaggttgggcgtggtggctcaagcttgtaatcccag

SEQ ID NO: 481760 - DNA, 120 bp, Artificial Sequence
  ENSG00000161542_43 (sequence is synthesized)
tacatacatttttatatcagttacatgttgaaattataatattttgggaattgcataaaataaaatgtattaatttcatctgtttttaatgtggctactagaaaattcaaagtaacatgt

SEQ ID NO: 481761 - DNA, 120 bp, Artificial Sequence
  ENSG00000161542_44 (sequence is synthesized)
atggcatgccttctatttcttttggccaatgctgctgtttctgagagattgcaggttcattgagggggaatttgcatggtttgtttgttttttgtctgtatagtggttttgccaccattt

SEQ ID NO: 481762 - DNA, 120 bp, Artificial Sequence
  ENSG00000161542_45 (sequence is synthesized)
ccagggaattaggttgtgattacatttctctagtgatacatgaatgactgagatcttgtaatttgttttgttttgctagtgatgatggccaaagagaagccaccgataactgtagttgga

SEQ ID NO: 481763 - DNA, 120 bp, Artificial Sequence
  ENSG00000161542_46 (sequence is synthesized)
acccaggcacacagctctgattttccatcagaaatcctctgaaactgagtgcagaagagagtagagtggtgtgtgcattgacagtatgggctagagggtgtttctttcctaccaactcac

SEQ ID NO: 481764 - DNA, 80 bp, Artificial Sequence
  ENSG00000161544_0 (sequence is synthesized)
acacacacacccggcgcgcacagacacacgctccctccctccgcgctctacccctcgcccgcccgccgcgcacgcagccg

SEQ ID NO: 481765 - DNA, 120 bp, Artificial Sequence
  ENSG00000161544_1 (sequence is synthesized)
cgccaccgccgccgccgagcaaagccgggctgggcttggagctgctcatggagaaagtgccaggcgagatggagatcgagcgcagggagcggagcgaggagctgtccgaggcggagagga

SEQ ID NO: 481766 - DNA, 120 bp, Artificial Sequence
  ENSG00000161544_2 (sequence is synthesized)
aggcggtgcaggctatgtgggcccggctctatgccaactgcgaggacgtgggggtggccatcctggtgaggttctttgtgaacttcccctcggccaagcagtacttcagccagttcaagc

SEQ ID NO: 481767 - DNA, 120 bp, Artificial Sequence
  ENSG00000161544_3 (sequence is synthesized)
acatggaggatcccctggagatggagcggagcccccagctgcggaagcacgcctgccgagtcatgggggccctcaacactgtcgtggagaacctgcatgaccccgacaaggtgtcctctg

SEQ ID NO: 481768 - DNA, 120 bp, Artificial Sequence
  ENSG00000161544_4 (sequence is synthesized)
tgctcgcccttgtggggaaagcccacgccctcaagcacaaggtggaaccggtgtacttcaagatcctctctggggtcattctggaggtggtcgccgaggaatttgccagtgacttcccac

SEQ ID NO: 481769 - DNA, 120 bp, Artificial Sequence
  ENSG00000161544_5 (sequence is synthesized)
ctgagacgcagagagcctgggccaagctgcgtggcctcatctacagccacgtgaccgctgcctacaaggaagtgggctgggtgcagcaggtccccaacgccaccaccccaccggccacac

SEQ ID NO: 481770 - DNA, 120 bp, Artificial Sequence
  ENSG00000161544_6 (sequence is synthesized)
tgccctcttcggggccgtaggacccctaactccacccccctccctggcagcacctcgagcagaaggccgagttctgaagaccctccttgacgctccatttctgggtgccaaggaagctgg

SEQ ID NO: 481771 - DNA, 120 bp, Artificial Sequence
  ENSG00000161544_7 (sequence is synthesized)
aggaatccctgactcaacttccccgaaggaggcctctgtggcggccagggtccccccctggagctgctgggaggcggcgctggctgcctggatgctgaccccagcgcggcgggcagagcg

SEQ ID NO: 481772 - DNA, 120 bp, Artificial Sequence
  ENSG00000161544_8 (sequence is synthesized)
acctagctgagcggctggcaggaagcgggacaggtctaggagtcccttagggaataaaccagccccgtttctatcagcccggccagcatgcaggtctccacatcaccatctagagtatca

SEQ ID NO: 481773 - DNA, 120 bp, Artificial Sequence
  ENSG00000161544_9 (sequence is synthesized)
ggccagcatgcaggtctccacatcaccatctagagtatcacgcacacatctaccatatatacagatatattctatatacgagctatatataaatatatatatacatatatatatacacac

SEQ ID NO: 481774 - DNA, 120 bp, Artificial Sequence
  ENSG00000161544_10 (sequence is synthesized)
cggtttggcccacctgtgagtggggcagggaggggttccggttgtgcagagaacagagtgttctggcaaagaggaaatcccacagcagcgcagaggacctgggcctggaggggcagggct

SEQ ID NO: 481775 - DNA, 120 bp, Artificial Sequence
  ENSG00000161544_11 (sequence is synthesized)
ggggcaacccggcttggcggcaaagcccagccccttctcagaccagctccccacattcctgaattccacttccaggcagaaaggagtgggctccccctactccctcagaggaactgactc

SEQ ID NO: 481776 - DNA, 120 bp, Artificial Sequence
  ENSG00000161544_12 (sequence is synthesized)
accggctgtcctagaatgggcaggggcagagcgaagttctgggtgggatgaccgcactgggggaggggcctcagtccagaaacctcgaccgctagctccacctgccttggccaccagggc

SEQ ID NO: 481777 - DNA, 120 bp, Artificial Sequence
  ENSG00000161544_13 (sequence is synthesized)
agccccgggggatccgggctgctgggcagcaggtcggcgggaccacatgcctgggtctcaccctcagctccgagggccgagggctttccccaccccaccctcctcctggccggcagtcgg

SEQ ID NO: 481778 - DNA, 120 bp, Artificial Sequence
  ENSG00000161544_14 (sequence is synthesized)
ccctgtctattcatctgcgtcaggcttgccaggggggccccccgtgtgtgccccttggtcacgtgtgtcgtcttcaaggatgttttgctgctgtggctcctgctgtgtcccctcctggcc

SEQ ID NO: 481779 - DNA, 120 bp, Artificial Sequence
  ENSG00000161544_15 (sequence is synthesized)
catcctcatcctcatcttcatcctcatcctcatctgtgcaaccgcccgtcctccttttctagtttctgatgtttgtaaccagacccagctgtgtcattaaacagacccgttcttgctgta

SEQ ID NO: 481780 - DNA, 120 bp, Artificial Sequence
  ENSG00000161544_16 (sequence is synthesized)
aggatttaatttcagatcaactcatgattccagaacctgagttcttaccctctcggctatgactagagcagggcttgaagggggtgtagagtttgggaaggaagcaagaagcgaggaaga

SEQ ID NO: 481781 - DNA, 120 bp, Artificial Sequence
  ENSG00000161544_17 (sequence is synthesized)
cagaggcctaggagatgaagccgccagcctgagcaagcctggcagatagacatggccagacttggtaggggttctttgtgaacttcccctcggccaagcagtacttcagccagttcaagc

SEQ ID NO: 481782 - DNA, 120 bp, Artificial Sequence
  ENSG00000161544_18 (sequence is synthesized)
gggtggcccgaggagggacgagacaggccggacagaatgcgccacgtttcagaattaatggaaaaagagctcacattggtatcgtgctttgcagtttgtgaaacacttttttacccagtt

SEQ ID NO: 481783 - DNA, 120 bp, Artificial Sequence
  ENSG00000161544_19 (sequence is synthesized)
tatgtcacaagacagacattattcacattttagagaaaaagatccggagctcccatgggccagtagacttgcctgagatcacacagcacgttcgtagcaggacggagactagaacttggg

SEQ ID NO: 481784 - DNA, 120 bp, Artificial Sequence
  ENSG00000161544_20 (sequence is synthesized)
tgcaaattccagcttgtacttaaatacttcctgcgaagttttgactgagacgctgcaacaattcccgagctgtttcatcgtggcaccttcctggtggcaggtggattagcacattgtctg

SEQ ID NO: 481785 - DNA, 120 bp, Artificial Sequence
  ENSG00000161544_21 (sequence is synthesized)
caacccaggaggacttggaggaaagtcccagctctgctgattctagctgagtaaccttggcaaaggtcacctcacttctctctgagtcttattttctcatctgtaaaatgaggaggagga

SEQ ID NO: 481786 - DNA, 120 bp, Artificial Sequence
  ENSG00000161544_22 (sequence is synthesized)
ggaggatcatccaaacatcacgggacttcgttaaatcagtgcttcggggcacttagcacagcgcctggcgcaaggttctttgtgaacttcccctcggccaagcagtacttcagccagttc

SEQ ID NO: 481787 - DNA, 120 bp, Artificial Sequence
  ENSG00000161547_0 (sequence is synthesized)
gtgaggagcgatataaacgggcgcagaggccggctgcccgcccagttgttactcaggtgcgctagcctgcggagcccgtccgtgctgttctgcggcaaggcctttcccagtgtccccacg

SEQ ID NO: 481788 - DNA, 120 bp, Artificial Sequence
  ENSG00000161547_1 (sequence is synthesized)
cggaaggcaactgcctgagaggcgcggcgtcgcaccgcccagagctgaggaagccggcgccagttcgcggggctccgggccgccactcagagctatgagctacggccgcccccctcccga

SEQ ID NO: 481789 - DNA, 120 bp, Artificial Sequence
  ENSG00000161547_2 (sequence is synthesized)
tgtggagggtatgacctccctcaaggtggacaacctgacctaccgcacctcgcccgacacgctgaggcgcgtcttcgagaagtacgggcgcgtcggcgacgtgtacatcccgcgggaccg

SEQ ID NO: 481790 - DNA, 120 bp, Artificial Sequence
  ENSG00000161547_3 (sequence is synthesized)
ctacaccaaggagtcccgcggcttcgccttcgttcgctttcacgacaagcgcgacgctgaggacgctatggatgccatggacggggccgtgctggacggccgcgagctgcgggtgcaaat

SEQ ID NO: 481791 - DNA, 120 bp, Artificial Sequence
  ENSG00000161547_4 (sequence is synthesized)
gtgcaaatggcgcgctacggccgccccccggactcacaccacagccgccggggaccgccaccccgcaggtacgggggcggtggctacggacgccggagccgcagccctaggcggcgtcgc

SEQ ID NO: 481792 - DNA, 120 bp, Artificial Sequence
  ENSG00000161547_5 (sequence is synthesized)
atcccggagtcggagtcgttccaggtctcgcagccgatctcgctacagccgctcgaagtctcggtcccgcactcgttctcgatctcggtcgacctccaagtccagatccgcacgaaggtc

SEQ ID NO: 481793 - DNA, 120 bp, Artificial Sequence
  ENSG00000161547_6 (sequence is synthesized)
caagtccaagtcctcgtcggtctccagatctcgttcgcggtccaggtcccggtctcggtccaggagtcctcccccagtgtccaagagggaatccaaatccaggtcgcgatcgaagagtcc

SEQ ID NO: 481794 - DNA, 120 bp, Artificial Sequence
  ENSG00000161547_7 (sequence is synthesized)
ccccaagtctcctgaagaggaaggagcggtgtcctcttaagaaaatgatgtatcggcaagcagtgtaaacggaggacttggggaaaaaggaccacatagtccatcgaagaagagtccttg

SEQ ID NO: 481795 - DNA, 120 bp, Artificial Sequence
  ENSG00000161547_8 (sequence is synthesized)
caactggctattgaaaaggttattttgtaacatttgtctaactttttacttgtttaagctttgcctcagttggcaaacttcattttatgtgccattttgttgctgttattcaaatttctt

SEQ ID NO: 481796 - DNA, 120 bp, Artificial Sequence
  ENSG00000161547_9 (sequence is synthesized)
gtaatttagtgaggtgaacgacttcagatttcattattggatttggatatttgaggtaaaatttcattttgttatatagtgctgactttttttgtttgaaattaaacagattggtaacct

SEQ ID NO: 481797 - DNA, 120 bp, Artificial Sequence
  ENSG00000161547_10 (sequence is synthesized)
aatttgtggcctcctgacttttaaggaaaacgtgtgcagccattacacacagcctaaagctgtcaagagattgactcagcattgccttcattccttaaaattaaaaacctacaaaagttg

SEQ ID NO: 481798 - DNA, 120 bp, Artificial Sequence
  ENSG00000161547_11 (sequence is synthesized)
gtgtaaatttgtatatgttatttaccttcagatctaaatggtaatctgaacccaaatttgtataaagacttttcaggtgaaaagacttgattttttgaaaggattgtttatcaaacacaa

SEQ ID NO: 481799 - DNA, 120 bp, Artificial Sequence
  ENSG00000161547_12 (sequence is synthesized)
ttctaatctcttctcttatgtatttttgtgcactaggcgcagttgtgtagcagttgagtaatgctggttagctgttaaggtggcgtgttgcagtgcagagtgcttggctgtttcctgttt

SEQ ID NO: 481800 - DNA, 120 bp, Artificial Sequence
  ENSG00000161547_13 (sequence is synthesized)
tctcccgattgctcctgtgtaaagatgccttgtcgtgcagaaacaaatggctgtccagtttattaaaatgcctgacaactgcacttccagtcacccgggccttgcatataaataacggag

SEQ ID NO: 481801 - DNA, 120 bp, Artificial Sequence
  ENSG00000161547_14 (sequence is synthesized)
catacagtgagcacatctagctgatgataaatacacctttttttccctcttccccctaaaaatggtaaatctgatcatatctacatgtatgaacttaacatggaaaatgttaaggaagca

SEQ ID NO: 481802 - DNA, 120 bp, Artificial Sequence
  ENSG00000161547_15 (sequence is synthesized)
aatggttgtaactttgtaagtacttataacatggtgtatctttttgcttatgaatattctgtattataaccattgtttctgtagtttaattaaaacattttcttggtgttagcttttctc

SEQ ID NO: 481803 - DNA, 120 bp, Artificial Sequence
  ENSG00000161547_16 (sequence is synthesized)
aaaatggtaatgtctgggaatccgagacacataaccctaattcataaatgggatttggggtaggtctttttgagtcgtgttaatgtaagaatgactcctatcattaggagtgctgctcgg

SEQ ID NO: 481804 - DNA, 120 bp, Artificial Sequence
  ENSG00000161547_17 (sequence is synthesized)
aggttactcacctttgggagtaatactgaagagaggggtctgcagaaaggatgtgtatgaagcttagataataatggctgtttcgtaaactgtttgagacctattaatgaaaatgactat

SEQ ID NO: 481805 - DNA, 120 bp, Artificial Sequence
  ENSG00000161547_18 (sequence is synthesized)
ttcttgctgtttttatccaacgtctgcattttccccctttaaagctgcggtctcctgtttgataaaagaatattggccagtattgcagattttaactgatttggctgatcctccagggac

SEQ ID NO: 481806 - DNA, 120 bp, Artificial Sequence
  ENSG00000161547_19 (sequence is synthesized)
cagtttctgtgggcgtgtattggagcaggtttgtctttaaatgttaaagatgcactatcctcttagagaaacaatcagttcaactattgttgtactgactgggacttcatattctaatgg

SEQ ID NO: 481807 - DNA, 120 bp, Artificial Sequence
  ENSG00000161547_20 (sequence is synthesized)
atgtggcaaaagaattgcaataagaagcagtgaacatttggaaccccaaaagaaagttacaggtattgcactgggtggggaaaggatagtgtgtctttaactcttaaattgtttggtcct

SEQ ID NO: 481808 - DNA, 120 bp, Artificial Sequence
  ENSG00000161547_21 (sequence is synthesized)
ttaaaaaggaaagggccctaagtagctcagatattaaagtagtattctcaattaccaaatgtttcatttgaaacaatttatcttaatgaaatatagaccaattctctgatctcgagttgt

SEQ ID NO: 481809 - DNA, 120 bp, Artificial Sequence
  ENSG00000161547_22 (sequence is synthesized)
ttttgtttggatacagcccttttttttttctttttttttcttccccttacctttcttcaccttggttatttggccaggaatacgtaaattcaaacttgtacatgctgatggtagcctttg

SEQ ID NO: 481810 - DNA, 120 bp, Artificial Sequence
  ENSG00000161547_23 (sequence is synthesized)
tgaaattttcctaattgggccttttaaaaacatggctgggtggaacatttctgtaccctactggtttgaccagagccttagtaagtacgtgcctgaaactgaaaccatgtgcactttaat

SEQ ID NO: 481811 - DNA, 120 bp, Artificial Sequence
  ENSG00000161547_24 (sequence is synthesized)
cgctacggccgccccccggactcacaccacagccgccggggaccgccaccccgcagccgatcccggagtcggagtcgttccaggtctcgcagccgatctcgctacagccgctcgaagtct

SEQ ID NO: 481812 - DNA, 120 bp, Artificial Sequence
  ENSG00000161551_0 (sequence is synthesized)
gaaacttgcgagtgtcgcgtctgcagtgtgtggggttcgcggggcggcgggtagagttgagcatttttgtcatctgcaaataattttagccaggtggcaagtgtatggactgtggagtaa

SEQ ID NO: 481813 - DNA, 120 bp, Artificial Sequence
  ENSG00000161551_1 (sequence is synthesized)
gaagtacctgcctctgcctctgacttgggttctggcctataggaacaagacattttcagtaatggaagaaggagcttccaggctggggaagatcatcatttccagtggtagcttgacctg

SEQ ID NO: 481814 - DNA, 120 bp, Artificial Sequence
  ENSG00000161551_2 (sequence is synthesized)
agatgatacctgaccaccacttctgggaaggcccagaatagacagaagagagagaacatactagagttgctagcccctaagagttgaacgaaatgggcaaggcccagctgaaataacagg

SEQ ID NO: 481815 - DNA, 120 bp, Artificial Sequence
  ENSG00000161551_3 (sequence is synthesized)
aaacacatgaaaaatgccacgattgtaatgtctgtgaggagagagcaaggcagttcttcaggggaggggtcattgtcattcgaagatgtggctgtgggcttcaccagggaggagtggcag

SEQ ID NO: 481816 - DNA, 120 bp, Artificial Sequence
  ENSG00000161551_4 (sequence is synthesized)
tttttggaccagtctcagaaggtcttgtacaaggaagtaatgttggagaactacatcaacctagtatcaatagggtatcgaggcaccaagccagattcgctcttcaagttggagcaagga

SEQ ID NO: 481817 - DNA, 120 bp, Artificial Sequence
  ENSG00000161551_5 (sequence is synthesized)
gaacccccagggatagcagaaggagcagcccacagtcaaatctgtccaggttttgtaatccagagtagaagatatgcaggaaaagattctgatgcatttggtggatatgggagatcatgc

SEQ ID NO: 481818 - DNA, 120 bp, Artificial Sequence
  ENSG00000161551_6 (sequence is synthesized)
ctccatatcaagcgtgacaaaactcttactggagttaaataccatagatgtgttaaacccagcagccctaaatcacagctcaatgacctacaaaaaatttgtgcaggagggaaaccacat

SEQ ID NO: 481819 - DNA, 120 bp, Artificial Sequence
  ENSG00000161551_7 (sequence is synthesized)
gaatgcagtgtgtgcgggagagccttctccaggaaagcacagcttattcaacatcagagaactgaaagaggagagaaaccccatggatgtggtgaatgtgggaaaacattcatgaggaag

SEQ ID NO: 481820 - DNA, 120 bp, Artificial Sequence
  ENSG00000161551_8 (sequence is synthesized)
attcagctcactgagcatcagagaactcacacaggagagaagccccatgaatgtagtgaatgtggaaaagccttctccagaaagtcacagctcatggtccatcagagaacccatacagga

SEQ ID NO: 481821 - DNA, 120 bp, Artificial Sequence
  ENSG00000161551_9 (sequence is synthesized)
gagaaaccctacagatgcagcaaatgcggaaaagccttcagccggaagtgccggctcaatagacatcagcgatcacatactggagagaaactctatgggtgcagtgtgtgtgggaaagcc

SEQ ID NO: 481822 - DNA, 120 bp, Artificial Sequence
  ENSG00000161551_10 (sequence is synthesized)
ttttctcagaaggcatacctcactgcacaccagagacttcacacaggagataagccttataaatgcagtgattgtggaagaaccttctattttaagtcagacctgaccagacatcagagg

SEQ ID NO: 481823 - DNA, 120 bp, Artificial Sequence
  ENSG00000161551_11 (sequence is synthesized)
attcatacgggagagaaaccttatgaatgtagtgagtgtgaaaaagcctttagaagcaagtcgaagctcattcagcatcagcgtactcacactggagagagaccatattcatgcagagaa

SEQ ID NO: 481824 - DNA, 120 bp, Artificial Sequence
  ENSG00000161551_12 (sequence is synthesized)
ttcactgacggtggagaaaccttcctcaaggagtcatacctccttatacatgagcgaactcatacaagagcaaaagactgtgaacacagtacctatagaaatgccttcctcaggaacccc

SEQ ID NO: 481825 - DNA, 120 bp, Artificial Sequence
  ENSG00000161551_13 (sequence is synthesized)
gccattgttaaacaagagtgagcgcctagtgggcagaaatgtagtgattgtggaacaaccttttccaagaaatcaagcctttgtagttaatcaggaatttgaacagagaataagcctcac

SEQ ID NO: 481826 - DNA, 120 bp, Artificial Sequence
  ENSG00000161551_14 (sequence is synthesized)
aaatgaagtgaatgtggccccatcagtaataaattatatcttgtatcttacagatattgtatcagaataaatcttctgataccagaaaggtgggaaaatctttagtaggaatcctccagc

SEQ ID NO: 481827 - DNA, 120 bp, Artificial Sequence
  ENSG00000161551_15 (sequence is synthesized)
cattatatcccagagagctcatttagggctgaaacactgtggaggcagtggttgtggaggacatttctgtgagaagtcaaacctgttaaacaccattgaaatcatgttgggtagaaatgc

SEQ ID NO: 481828 - DNA, 120 bp, Artificial Sequence
  ENSG00000161551_16 (sequence is synthesized)
agctgttatgaggaagtctttacctggagatgatatctcaattggtatcaaaagaattcttacaggaatatttatgaaagattgtgatggtgcttttagcgctaaattgtgcctcgtgtg

SEQ ID NO: 481829 - DNA, 120 bp, Artificial Sequence
  ENSG00000161551_17 (sequence is synthesized)
ccaaagaaacatagacaactgtagaggcaatggatatggaaaacatttttcgtaaaatatgggagaatttgtagaaaagaaaaactcttgaaagtaagaaatgatggcaactcaccaaat

SEQ ID NO: 481830 - DNA, 120 bp, Artificial Sequence
  ENSG00000161551_18 (sequence is synthesized)
taactcatgtatcatacttttatgtcttgagagtcttggagggacgtgtttaatgaaatcttgaaccccaggaatagtattatgtaatgaaaacctatgaatataacaaatatggaagta

SEQ ID NO: 481831 - DNA, 120 bp, Artificial Sequence
  ENSG00000161551_19 (sequence is synthesized)
aaattgtgttagttttttatgagtgttgcaccaaactaacacaaatttaatggcttaaaacaacacaaaatcattatcttacagttctggaggactgaagtccaaatgcatctcacgggg

SEQ ID NO: 481832 - DNA, 120 bp, Artificial Sequence
  ENSG00000161551_20 (sequence is synthesized)
ctacatcaagctgttgacagggctgcttttctttttggaggctctaggggagcgtctttctttgcccttccagcttctagaagctgcccaaattctgtggtttggggcctcctttcaaaa

SEQ ID NO: 481833 - DNA, 120 bp, Artificial Sequence
  ENSG00000161551_21 (sequence is synthesized)
ccagcaatggccaatcagtcttacatcactcaaacacttgagtgttctgtctccctcttccatgtttgaggacccttgtgattacactgtgaaaacccagataagccaggataatctccc

SEQ ID NO: 481834 - DNA, 120 bp, Artificial Sequence
  ENSG00000161551_22 (sequence is synthesized)
tatcttattatgaggcaagtatgttaagattttattctataatcagagaatcttatgctatgattgttatatgtgagcattatagatgctcttgaaatgttaaaatcacatcagcactgg

SEQ ID NO: 481835 - DNA, 120 bp, Artificial Sequence
  ENSG00000161551_23 (sequence is synthesized)
aaaataactcctaaatgtccaaaaagaacatgagatttatggtgcttgaaatgttgctaaacgtaaatttgtatctattctgaaattatataaattaacctacctggccaggcacagtgg

SEQ ID NO: 481836 - DNA, 63 bp, Artificial Sequence
  ENSG00000161551_24 (sequence is synthesized)
gcaagtttgagaccaccctgggcaacatagcgagactacctctacaaaaaaaaaaaaaaataa

SEQ ID NO: 481837 - DNA, 120 bp, Artificial Sequence
  ENSG00000161551_25 (sequence is synthesized)
cgcgtctgcagtgtgtggggttcgcggggcggcgggtagaggcgagtgtttagagacttcgggtccctgactcgcctccagcagtggagacaggtcatcggtctgttgagcatttttgtc

SEQ ID NO: 481838 - DNA, 120 bp, Artificial Sequence
  ENSG00000161551_26 (sequence is synthesized)
cgcgtctgcagtgtgtggggttcgcggggcggcgggtagaggcgagtgtttagagacttcgggtccctgactcgcctccagcagtggagacaggtcatcggtctggtctgcgtgggcttc

SEQ ID NO: 481839 - DNA, 120 bp, Artificial Sequence
  ENSG00000161551_27 (sequence is synthesized)
tgggaatgtttcaggggcagggagagcgcgcttttttttttctgttgttcgctagcgcgtgaggtccgtgttgcggggagctctcggggagtcctcgctcggagttcgtttcgcagtcgt

SEQ ID NO: 481840 - DNA, 120 bp, Artificial Sequence
  ENSG00000161551_28 (sequence is synthesized)
gttggagttcccagagtctgggagcccatggtctccgcattggaaccagtgcttgggaggtcttcgttgcacagtagcgctagggcgtcgtggtggggaagcgaatcgtgtcagtgttgg

SEQ ID NO: 481841 - DNA, 120 bp, Artificial Sequence
  ENSG00000161551_29 (sequence is synthesized)
agactgctctgggcagttcgtgttcattgcttatcacatgcgtacttaaaaaggggtctgctggtccccttgcttccctgctgctgtatattctgtagaaaatgggttttcaggttcatt

SEQ ID NO: 481842 - DNA, 120 bp, Artificial Sequence
  ENSG00000161551_30 (sequence is synthesized)
gcgacccaagtaataacatccccatcattttaaatactcctccagaaaataactctggtttagtgtatttcatgtttaatgttgggatcaggtgtctaggtattggtataattttattcg

SEQ ID NO: 481843 - DNA, 120 bp, Artificial Sequence
  ENSG00000161551_31 (sequence is synthesized)
tctttaataacatcttgtcaacttcgtattcccatattacatgctctttgagagttttttaaattgctgcagtttcatcaagtggttgctttaatttgggtagaattgatgtagatctag

SEQ ID NO: 481844 - DNA, 120 bp, Artificial Sequence
  ENSG00000161551_32 (sequence is synthesized)
atacaacactttcaggaacatgtgatggatttctattaacccaatatttttatttgtttgactatctgtagtgtttttccatacgtatcttggacatttctggttatgcttatttctaca

SEQ ID NO: 481845 - DNA, 120 bp, Artificial Sequence
  ENSG00000161551_33 (sequence is synthesized)
tagttaatactttttgttgtaaatcgtgactttttttttgcataagacccctccccctttccttttttgttcctaattttacttagttgacaagaacagaagttaaaaatatatatgttt

SEQ ID NO: 481846 - DNA, 120 bp, Artificial Sequence
  ENSG00000161551_34 (sequence is synthesized)
gtattcattcaggagaaggaccctacagatggagggaatgcaggaaagctaagaagaatcacacctcattgcagatctgcattaccgttggaaaacagcagcctcagaaccacagtagcc

SEQ ID NO: 481847 - DNA, 120 bp, Artificial Sequence
  ENSG00000161551_35 (sequence is synthesized)
atgaagaccatcagccttcaaccaccacccttgtatcagaggagacaaataagcttggaaatcctcaaaaagcctcatcctcagagcaatgtcattatatatcttgtcttacagctccat

SEQ ID NO: 481848 - DNA, 120 bp, Artificial Sequence
  ENSG00000161551_36 (sequence is synthesized)
ggcagctcctgtaaaggaaaaaagtatatctcatgtccagaaattcatctttgttgaggatacccttgatgagacattatcagaattgcaggacaaacagatactaaaagtactggccat

SEQ ID NO: 481849 - DNA, 120 bp, Artificial Sequence
  ENSG00000161551_37 (sequence is synthesized)
cttctgaaagctcttgaacatgacaaagttccaaggtttatcatcattcaatgatgtggctgttgacttcacctgggaggagtggaatctattagaccctgttcagaagaacctctacca

SEQ ID NO: 481850 - DNA, 120 bp, Artificial Sequence
  ENSG00000161551_38 (sequence is synthesized)
agccagaagcaatattccagttggggaaagaagaacaaggaatagtagagagagaattcccaagttggtgcagtccagcacgatggaatttagtcgccagaaaatggccatctcgctatc

SEQ ID NO: 481851 - DNA, 120 bp, Artificial Sequence
  ENSG00000161551_39 (sequence is synthesized)
tgtaagaagcatcttccaagactgctgcttccatgtgcacgcctggtttcaaagtctgtagacatcttgtgttccgcgaaggtgctactgagtctgcacaagagcgtgactacggcagtg

SEQ ID NO: 481852 - DNA, 120 bp, Artificial Sequence
  ENSG00000161551_40 (sequence is synthesized)
agtgaagaggttacggaaacctgctagtcctcaagcgaatgtttgtgcgactccagctgtaggtccaccagggatcatggcacgttacatagtggtgccccgaacagcgacagaatcagg

SEQ ID NO: 481853 - DNA, 120 bp, Artificial Sequence
  ENSG00000161551_41 (sequence is synthesized)
ggctctacaagtggcactcaaacaggcgacagtctgaacacgggactatgaggatgtgaatgaagaagatctcctggaatagaggaactgaaattgacaacgcaaatggggaccctggga

SEQ ID NO: 481854 - DNA, 120 bp, Artificial Sequence
  ENSG00000161551_42 (sequence is synthesized)
tgagtcagctggcagcgcacatgaggtcagcgcctaaagagtctgtaaaatcggatggaccgccaatcggagaatgagagctgcccagcctggtcttacattctttcaattaattcataa

SEQ ID NO: 481855 - DNA, 75 bp, Artificial Sequence
  ENSG00000161551_43 (sequence is synthesized)
ctgcccagcctggtcttacattctttcaattaattcataaacagggggatatgcagggagccgaaggcccatggg

SEQ ID NO: 481856 - DNA, 120 bp, Artificial Sequence
  ENSG00000161551_44 (sequence is synthesized)
gactgtgcctgccgccagaaggtttgctgagggcaatcgcttcctgacgccaagctctttgaagttatctactggaacatctagagaatgcagtcttgcaagcctactctggaccaacca

SEQ ID NO: 481857 - DNA, 120 bp, Artificial Sequence
  ENSG00000161551_45 (sequence is synthesized)
actgacctcttcttccaccccccttctcactatcgcttttctctaataaatacagagggccgtgtaaagctcagggccttgtccactagaggcaaggtgcccccggaccccttcttccaa

SEQ ID NO: 481858 - DNA, 120 bp, Artificial Sequence
  ENSG00000161551_46 (sequence is synthesized)
gagtgtcgcgtctgcagtgtgtggggttcgcggggcggcgggtagaggcgagtgtttagagacttcgggtccctgactcgcctccagcagtggagacagttgagcatttttgtcatctgc

SEQ ID NO: 481859 - DNA, 120 bp, Artificial Sequence
  ENSG00000161551_47 (sequence is synthesized)
atttttgcagtatattatagcatggaggtgctgtaatttaaccctgtctgcttttgatagacatttagattattggtaagtttttcattatgagaaacaaaggaataatgaacagtctta

SEQ ID NO: 481860 - DNA, 120 bp, Artificial Sequence
  ENSG00000161551_48 (sequence is synthesized)
ttacatgttgtttcatatctatgctagtactgccttcgtgcttttagggtaggcagaattggtggaattccatggtcctttggtatgtgaaatagccatggtgtgcatacgttgtcatgg

SEQ ID NO: 481861 - DNA, 120 bp, Artificial Sequence
  ENSG00000161551_49 (sequence is synthesized)
agaaaaggatcaagacatgtccccgtccctcttctccgcatcatctattgttatccacctcagattgcattggaattgttattataggggtcattgtcattcgaagatgtggctgtgggc

SEQ ID NO: 481862 - DNA, 120 bp, Artificial Sequence
  ENSG00000161551_50 (sequence is synthesized)
cttttctttcttatttggtgaccactgtacggtcccataaatatttaatggtttagactaaagtattatatgttatagattttttgttgtggtggtaaaatatataacataaaatttacc

SEQ ID NO: 481863 - DNA, 120 bp, Artificial Sequence
  ENSG00000161551_51 (sequence is synthesized)
gtcttaaccataagcgtgcagttcagtgggttaaatgcattcgcgcacatagtgttatgcagccaccaacactaccttctgtcttctaaaactgaaactctgtacccacaaaacaacaac

SEQ ID NO: 481864 - DNA, 120 bp, Artificial Sequence
  ENSG00000161551_52 (sequence is synthesized)
tactcattcccccacttctccccagctcctggtgaccaccattcactttctgtctttaggattttgacttctctaagtacctcgtataagtggaattatatagtgtctgtctttttgtgt

SEQ ID NO: 481865 - DNA, 120 bp, Artificial Sequence
  ENSG00000161551_53 (sequence is synthesized)
ctggcttatttcacttattatgatgttctcaaggtttatccatgttgtagcatgtgccagagtttcctttttaaggctgaataatattcttttgtatatatatataccaccttttgctta

SEQ ID NO: 481866 - DNA, 120 bp, Artificial Sequence
  ENSG00000161551_54 (sequence is synthesized)
tccacttatctgttaaggaacactgggttgcttccatgttttagcgcttgtgaatcatgttgctatgaatatgggtgtacaaataatctctttgagaccctgctttccattctttggggt

SEQ ID NO: 481867 - DNA, 120 bp, Artificial Sequence
  ENSG00000161551_55 (sequence is synthesized)
atatacccagaagtggaattgctgggtgatatggtcattccattgttaattttttgaggaacagttttccacaatgtcagtaccattttacattcccaccaagagtacacagggtcccag

SEQ ID NO: 481868 - DNA, 120 bp, Artificial Sequence
  ENSG00000161551_56 (sequence is synthesized)
tttctccacatctttgccaacaattgttattttctgtttttgtttgtctgtttgtttttttgatagtagccatcctaatgggtatgggtgtgtcacgcagactgttattttcctccctgg

SEQ ID NO: 481869 - DNA, 120 bp, Artificial Sequence
  ENSG00000161551_57 (sequence is synthesized)
cacgaagtggttgtgctcttttcctgagtgaaagagttttgctttatcaaagtgcaaatgctgtggttcctgagacataaccctctccatcttcatccattccccaagcacacgtgccaa

SEQ ID NO: 481870 - DNA, 120 bp, Artificial Sequence
  ENSG00000161551_58 (sequence is synthesized)
cactcaggagagaaaccctataaatgcagtgactgtgggaaagccttccttacaaagacaatgctcattgtacatcacagaactcacacgggagagagaccctatggctgtgatgagtgt

SEQ ID NO: 481871 - DNA, 120 bp, Artificial Sequence
  ENSG00000161551_59 (sequence is synthesized)
ttttatttaatatttttgcatcaaaaaatgaaaagatatcttggattagcttcggaataatccataatccattgctggagagggactgaatggtggtatagataaaacaaaattagatgt

SEQ ID NO: 481872 - DNA, 120 bp, Artificial Sequence
  ENSG00000161551_60 (sequence is synthesized)
gagttcgtcattcttgaagtcacatgatgaatatgtggaatttgagtatactgttcttttgcttgaaatttttcatagtagaaagttaaaaaatttttttgcctatacatttataagaga

SEQ ID NO: 481873 - DNA, 120 bp, Artificial Sequence
  ENSG00000161558_0 (sequence is synthesized)
gcacatgcgcaggaggctcaatgacagtcgagctttggctaaggctccggggaaagggtctagccatgctgcatgtgacccggggggtctgggggtccagggtccgagtatggccactgt

SEQ ID NO: 481874 - DNA, 120 bp, Artificial Sequence
  ENSG00000161558_1 (sequence is synthesized)
tgcccgcgctcctcgggcccccccgggccctctcatcgctggcagccaaaatgggggagtatcgcaagatgtggaaccccagggagccccgcgactgggcccagcagtaccgcgagcgct

SEQ ID NO: 481875 - DNA, 120 bp, Artificial Sequence
  ENSG00000161558_2 (sequence is synthesized)
tcattcccttctccaaggagcagctgctccgcctcctaatacaggaattccactcgagtccggcagagaaggcggctttggaggcgttctcggcccacgtggacttctgcaccctgttcc

SEQ ID NO: 481876 - DNA, 120 bp, Artificial Sequence
  ENSG00000161558_3 (sequence is synthesized)
actaccaccaaatcctggcccggctgcaggccttatatgaccccatcaaccctgacagggagaccctcgatcagccatcactaacggatccccagcgtctgtctaatgagcaggaggtgc

SEQ ID NO: 481877 - DNA, 120 bp, Artificial Sequence
  ENSG00000161558_4 (sequence is synthesized)
ttcgggctctggagcccctgctggcccaggccaacttctccccgctgtctgaggacaccctggcctacgcgctggtggtccaccaccctcaggatgaggtccaggtgacagtaaatttgg

SEQ ID NO: 481878 - DNA, 120 bp, Artificial Sequence
  ENSG00000161558_5 (sequence is synthesized)
atcagtatgtctacattcacttctgggccctgggccagcgagtcgggcagatgcccctgaagtccagcgtgggctccaggcgtggcttcttcaccaagctgccccctgcggagaggagat

SEQ ID NO: 481879 - DNA, 120 bp, Artificial Sequence
  ENSG00000161558_6 (sequence is synthesized)
actttaagcgggtggtcctggcagcccggaccaaacggggacacctggtactgaagagtttcaaggacacgccgctggaaggcctggagcagctgctgccggagctgaaggtgcgcacgc

SEQ ID NO: 481880 - DNA, 120 bp, Artificial Sequence
  ENSG00000161558_7 (sequence is synthesized)
ccaccctgcagcgcgccctgctcaacctcatgctggtagtctccggcgtggcgatcttcgtcaacgtgggcatggtggtgctaaccgacctcaaggtggccacctccctgctgctgctgc

SEQ ID NO: 481881 - DNA, 120 bp, Artificial Sequence
  ENSG00000161558_8 (sequence is synthesized)
tcttcgccatcttcatgggcctgcgggcctccaagatgttcgggcagcggcgcagcgcgcaggcgttggagctggcgcacatgctgtactatcgcagtacgtccaacaactcggagctgc

SEQ ID NO: 481882 - DNA, 120 bp, Artificial Sequence
  ENSG00000161558_9 (sequence is synthesized)
agagacctccaggtggctccggtcggaggtggagaactggctcctagccaagtcaggctgtgaggtgaccttcaacggaactcgggccctggcgcatctgcaggccctgacccccagcat

SEQ ID NO: 481883 - DNA, 120 bp, Artificial Sequence
  ENSG00000161558_10 (sequence is synthesized)
gggattgtacccacccccgggtttccccaaactagacccagtggctccgatcacttccgagcccccgcaagccacgcccagcagtaacatctcctgagtagaacctacctccctgcccag

SEQ ID NO: 481884 - DNA, 120 bp, Artificial Sequence
  ENSG00000161558_11 (sequence is synthesized)
tcagcaggctaggaactaagccccgcctccttcacgacaggctgtcaattacggttattatacttttcactccaacttccaataactgacaggtgattatttttgctgcactgtgtgctt

SEQ ID NO: 481885 - DNA, 120 bp, Artificial Sequence
  ENSG00000161558_12 (sequence is synthesized)
aagcaaagcagccaatcaaagcagctagcagttgttaagtcttccccgccccttcgatgaacagccaatcaaagcgatttagctctgcttctgttccatttcttagtcccaccctcacca

SEQ ID NO: 481886 - DNA, 120 bp, Artificial Sequence
  ENSG00000161558_13 (sequence is synthesized)
taaacatccaagtgtggtttggctgaggagctgagggtgtctgccaatcacagctgctcagctctggcttctgtaaaccgccaggtagaagagttaaagctgcgccctcccgagactata

SEQ ID NO: 481887 - DNA, 120 bp, Artificial Sequence
  ENSG00000161558_14 (sequence is synthesized)
tatcattgtctttttcagcccgctccgggcaaactgcccatcatgtgcaccaaggccgttagccctgcctcctggcaaacgtccagtgacagctgctgggttccatcaactttgggcagc

SEQ ID NO: 481888 - DNA, 120 bp, Artificial Sequence
  ENSG00000161558_15 (sequence is synthesized)
cggttgtcgctgcagggaaggaaccaataagaatttctaaaggaaacctgatcttgctatcaattgctgctgcttaaatggcaggccaactggtcagctgctgatcagggtgtctaggct

SEQ ID NO: 481889 - DNA, 120 bp, Artificial Sequence
  ENSG00000161558_16 (sequence is synthesized)
gaaggagttggagaccttgtgctaggtaggtgaaccagaaaccaccctcgccaccaagactcgctcccaacctggctcccggcaacctcaggtgccttcctcgcccaggtctttcaccct

SEQ ID NO: 481890 - DNA, 120 bp, Artificial Sequence
  ENSG00000161558_17 (sequence is synthesized)
ttctacagaaactacctcggtctggatctccccaccaccagcagcctgtgcaatatttattggtctatcaatttctcccgtctcctgtcccaaagtaataaatcatgtttaataagtctg

SEQ ID NO: 481891 - DNA, 120 bp, Artificial Sequence
  ENSG00000161558_18 (sequence is synthesized)
gcgcttcattcccttctccaaggagcagctgctccgcctcctaatacagagtcttgatgttgtctagtctggagggcagtggcacgatctcgactcactgcagcctccgcctccctggtt

SEQ ID NO: 481892 - DNA, 120 bp, Artificial Sequence
  ENSG00000161558_19 (sequence is synthesized)
cgcgattgaaccgatcccctgtggttggacacagctgatccctggtttcttccccatgattactgagtcgcttttaagatggttgtgcgactgtagagccagagtgagcgtcctaggatt

SEQ ID NO: 481893 - DNA, 120 bp, Artificial Sequence
  ENSG00000161558_20 (sequence is synthesized)
cttggagcctggcccttattttaagtgctggggattcaatagtgaacatgacaggtgaagtgacgccctcatggagccaacattccaagtggggagacaaggaatcaaataaatataaaa

SEQ ID NO: 481894 - DNA, 120 bp, Artificial Sequence
  ENSG00000161558_21 (sequence is synthesized)
aggcaacaggggctttgaggcgagcggatgggctctgcgccctgcctggggtagagacggcttctggagggtgggacgtggaggtggagagggcgcttttcctctagatggcctttgacc

SEQ ID NO: 481895 - DNA, 120 bp, Artificial Sequence
  ENSG00000161558_22 (sequence is synthesized)
ggtgtctgggccccaggcgggaagttgagaaatgggaggcgtgactcatccaaatgctgtcttttcttctcaagggaaagtgagtactacacttgattcccaggggaagagaaaggatgg

SEQ ID NO: 481896 - DNA, 120 bp, Artificial Sequence
  ENSG00000161558_23 (sequence is synthesized)
ggacagttctccccattttccaataaggaaaactgaggctcggagagggaggtccacattctgaagatgcggcacggccaggattccaacaaacaatctgcacgtccaataccagggatc

SEQ ID NO: 481897 - DNA, 120 bp, Artificial Sequence
  ENSG00000161594_0 (sequence is synthesized)
atacaaaagatgtagtagggaaaaggagcgacagctggctaaaggggccccccacaaccctccccgacaccctaggaaagcagcctctctccgctgtcccagggtgccatggagatggag

SEQ ID NO: 481898 - DNA, 120 bp, Artificial Sequence
  ENSG00000161594_1 (sequence is synthesized)
agcgcggcggcctccacacgtttccaccagcctcacatggagaggaagatgagtgcgatggcctgtgagatcttcaacgagcttagactagagggcaagctctgcgacgtggtcatcaag

SEQ ID NO: 481899 - DNA, 120 bp, Artificial Sequence
  ENSG00000161594_2 (sequence is synthesized)
gtcaatggctttgagttcagtgcccataagaacatcctctgtagctgcagttcctactttagagctttgtttacaagtggctggaacaacactgaaaagaaggtatacaacatccctggc

SEQ ID NO: 481900 - DNA, 120 bp, Artificial Sequence
  ENSG00000161594_3 (sequence is synthesized)
atttctcccgacatgatgaagctaatcattgagtatgcatacacccggaccgtgcctatcacaccggacaatgtggagaaactgcttgctgctgcagaccagtttaacatcatgggtatc

SEQ ID NO: 481901 - DNA, 120 bp, Artificial Sequence
  ENSG00000161594_4 (sequence is synthesized)
gtcaggggttgctgcgagttcctcaagtcagagctgtgcttggataattgtatcggcatctgtaagttcacggactactactactgtcctgagctgaggcagaaggcctacatgttcata

SEQ ID NO: 481902 - DNA, 120 bp, Artificial Sequence
  ENSG00000161594_5 (sequence is synthesized)
ctgcacaactttgaggagatggtgaaagtctcggcagaatttttagagctctcggtcactgaacttaaggatatcattgagaaagatgagctcaatgtcaaacaggaagatgctgtattt

SEQ ID NO: 481903 - DNA, 120 bp, Artificial Sequence
  ENSG00000161594_6 (sequence is synthesized)
gaggccattttaaagtggatttctcatgacccccaaaatagaaagcagcacatttcaattttgcttcctaaggttcgcctggccctaatgcatgctgagtacttcatgaacaatgttaag

SEQ ID NO: 481904 - DNA, 120 bp, Artificial Sequence
  ENSG00000161594_7 (sequence is synthesized)
atgaatgactatgtcaaagacagtgaggaatgcaaaccagtcatcattaatgccctaaaggccatgtatgacctcaacatgaatggaccctctaattctgatttcaccaacccactcacc

SEQ ID NO: 481905 - DNA, 120 bp, Artificial Sequence
  ENSG00000161594_8 (sequence is synthesized)
agacagatgggtgaatgttacttgtgaggaagagagtccccgtgcctaccatggggcagcctatttgaaaggctatgtgtatatcattggggggtttgatagtgtagactatttcaatag

SEQ ID NO: 481906 - DNA, 120 bp, Artificial Sequence
  ENSG00000161594_9 (sequence is synthesized)
tgttaagcgttttgacccagtcaagaaaacttggcatcaggtggccccgatgcactccagacgttgctatgtcagtgtgacagtcctcggcaattttatttatgccatgggaggatttga

SEQ ID NO: 481907 - DNA, 120 bp, Artificial Sequence
  ENSG00000161594_10 (sequence is synthesized)
tggctacgtgcgtctaaacactgctgaacgttatgagccagagaccaatcaatggacactcatcgcccccatgcacgaacagaggagtgatgcaagcgccacaacactttatgggaaggt

SEQ ID NO: 481908 - DNA, 120 bp, Artificial Sequence
  ENSG00000161594_11 (sequence is synthesized)
ctacatatgtggtgggtttaatggaaacgagtgcctgttcacagcagaagtgtataacactgaaagtaatcagtggacagtcatagcacccatgagaagcaggaggagtggaataggcgt

SEQ ID NO: 481909 - DNA, 120 bp, Artificial Sequence
  ENSG00000161594_12 (sequence is synthesized)
gattgcttatggagaacatgtatatgcggtaggtggctttgatggagctaatcgacttaggagtgccgaagcctacagccctgtggctaacacttggcgcacaatccccactatgtttaa

SEQ ID NO: 481910 - DNA, 120 bp, Artificial Sequence
  ENSG00000161594_13 (sequence is synthesized)
tcctcgtagcaattttggcatcgaggtggtggatgacctcttgtttgtggtgggtggctttaatggttttaccaccacctttaatgttgagtgctatgatgaaaagaccgatgagtggta

SEQ ID NO: 481911 - DNA, 120 bp, Artificial Sequence
  ENSG00000161594_14 (sequence is synthesized)
tgatgctcatgacatgagtatataccgcagtgctctgagctgctgtgtagtaccagggctggccaatgttgaggaatatgcagctagacgggacaacttcccaggattagcactgcgaga

SEQ ID NO: 481912 - DNA, 120 bp, Artificial Sequence
  ENSG00000161594_15 (sequence is synthesized)
tgaagtaaaatattctgcttcgacaagtaccctacctgtatgagcctcttcatttagctaataaaaagtctaagcaataagaattaattctttttttaaaaaaatgcagtgtttaaactt

SEQ ID NO: 481913 - DNA, 120 bp, Artificial Sequence
  ENSG00000161594_16 (sequence is synthesized)
gaaatttgggttttaggacaggcgaaccaacccgctctccttcaagctcccggccatttcttggggcagagagctaggaggggtccgcggcagagcaaagcgggaaggcccaatgggcag

SEQ ID NO: 481914 - DNA, 120 bp, Artificial Sequence
  ENSG00000161594_17 (sequence is synthesized)
gaagcctctccagccgcccccagcccggccggcccccgcacgccccagagcctcaattgacttggatttccttgagttcggtgtctagggagccaagtgttgggctgtggaaggtagatg

SEQ ID NO: 481915 - DNA, 120 bp, Artificial Sequence
  ENSG00000161609_0 (sequence is synthesized)
acgcgcacctcccccaactcaactgccgttcgtcgttcgtggatgtccgttgtgtcccgagactaggacgtggctccaggagtgctcgggccagctggtccttttcccatccctccccat

SEQ ID NO: 481916 - DNA, 120 bp, Artificial Sequence
  ENSG00000161609_1 (sequence is synthesized)
gaaggagggaggctggtagctttgccagcagctgcgccgcggcaggggtggcccatggacctgcccgagggcccggtgggtggccccactgcggaaatgtacctccgggagcggcctgag

SEQ ID NO: 481917 - DNA, 120 bp, Artificial Sequence
  ENSG00000161609_2 (sequence is synthesized)
gaggcaaggctgggaatgccggtcagcttggaggagcaaatactcaactccacgttcgaagcttgtgaccctcagaggacaggcactgtggctgtggcccaggtgctggcctacctggag

SEQ ID NO: 481918 - DNA, 120 bp, Artificial Sequence
  ENSG00000161609_3 (sequence is synthesized)
gctgtgacaggccagggcccccaggatgcacgcctccaaacattggccaacagcctggaccccaatggggagggccctaaggccactgtggacttggacactttcctggttgtcatgcgt

SEQ ID NO: 481919 - DNA, 120 bp, Artificial Sequence
  ENSG00000161609_4 (sequence is synthesized)
gactggattgctgcctgtcaactacatgggggattagagctggaagaggagaccgccttccagggagccctgacctcccggcaactgccatctggatgcccagaagctgaggagccagcc

SEQ ID NO: 481920 - DNA, 120 bp, Artificial Sequence
  ENSG00000161609_5 (sequence is synthesized)
aacctggagagcttcggaggcgaagaccccagacccgagctacaagccacagctgacctgctgagcagcctggaggacctggagctcagcaaccgacgtctggttggggagaatgccaaa

SEQ ID NO: 481921 - DNA, 120 bp, Artificial Sequence
  ENSG00000161609_6 (sequence is synthesized)
ttgcagcggagcatggagacagctgaggaggggtcagcacgccttggggaggagatcttggctctgcgtaagcagcttcacagcacccagcaggccctgcagtttgccaaggccatggat

SEQ ID NO: 481922 - DNA, 120 bp, Artificial Sequence
  ENSG00000161609_7 (sequence is synthesized)
gaggagctggaggacctgaagactctggccaggagcctggaggaacagaatcgcagccttctggcccaagcccggcaggcggaaaaggagcagcagcatctggtggctgagatggagact

SEQ ID NO: 481923 - DNA, 120 bp, Artificial Sequence
  ENSG00000161609_8 (sequence is synthesized)
ctgcaggaggagaacgggaagctgcttgccgagcgggatggagtgaaaaagagaagtcaggagctggccatggagaaggacactttgaagcggcagctctttgagtgtgaacacctcatt

SEQ ID NO: 481924 - DNA, 120 bp, Artificial Sequence
  ENSG00000161609_9 (sequence is synthesized)
gaagaatacagagtgacgacgcaggaactgaggctggagatttcacgcctggaggagcagctgagtcagacctatgaggggcccgatgagctacctgaaggggcccagctgagaagagtg

SEQ ID NO: 481925 - DNA, 120 bp, Artificial Sequence
  ENSG00000161609_10 (sequence is synthesized)
ggctggaccgagctgctacccccatcgctgggcttggagatcgaggccattcgacagaaacaggaagtggcaactgctgatctctccaaccctctgtgtggggtgtggcagtgggaggaa

SEQ ID NO: 481926 - DNA, 120 bp, Artificial Sequence
  ENSG00000161609_11 (sequence is synthesized)
gtcatccatgagaccagtgaggaaactgagtttccatctgaagccccagctgggggacagagaaacttccagggagagccagcgcaccctgaagaaggaaggaaggagccatccatgtgg

SEQ ID NO: 481927 - DNA, 120 bp, Artificial Sequence
  ENSG00000161609_12 (sequence is synthesized)
ttgaccagaagagaggaagaggaggatgcagagagccaggtcacggctgatctccctgtccctctaggagcccctcgccctggagacatcccagaaaaccctccagagagacctgcgcgg

SEQ ID NO: 481928 - DNA, 120 bp, Artificial Sequence
  ENSG00000161609_13 (sequence is synthesized)
cgggaactccagcaagccctggtgcctgtgatgaaaaagctggtcccagtcaggaggagggcctggggccagctctgcctgcccccacagcggctcagagtcactcgacatccactgatc

SEQ ID NO: 481929 - DNA, 120 bp, Artificial Sequence
  ENSG00000161609_14 (sequence is synthesized)
ccagctcctgtcctgggcctgctgctgctgctgctgctctctgtcctgctgcttggcccgtccccacctcccacctggccccacctccagctctgctacctccagccccctccagtgtga

SEQ ID NO: 481930 - DNA, 120 bp, Artificial Sequence
  ENSG00000161609_15 (sequence is synthesized)
gaggctctacttgcccctcagagcagtgtctagctcaataaatcccctggccctctctccactgggatccccattgttagtccactgttgcgcaggcttaccctagatagagtacagggg

SEQ ID NO: 481931 - DNA, 120 bp, Artificial Sequence
  ENSG00000161609_16 (sequence is synthesized)
atccacatccctgtatttttatgtgaagtctcctagttttttaatgctgacatttcttaacaatagcaaaactcccccagtaatggattaagcactaaggattattccctcacaaaacaa

SEQ ID NO: 481932 - DNA, 120 bp, Artificial Sequence
  ENSG00000161609_17 (sequence is synthesized)
gcctggcgagggcagctgtgggcacacagctaagtctcggttgccttggggtcagggcctcagtgattctcctgtcccctccctcatgctcaggagttggcagttgtagcttcctacatc

SEQ ID NO: 481933 - DNA, 120 bp, Artificial Sequence
  ENSG00000161609_18 (sequence is synthesized)
acatctgcgggaaacggaaatttcttccttcctttttataaagagaggcagtagcctcagtgtgcagtgggtagattcaaatcatattcataataaaagagaagcagttgcctgcccaga

SEQ ID NO: 481934 - DNA, 120 bp, Artificial Sequence
  ENSG00000161609_19 (sequence is synthesized)
gttcgtggatgtccgttgtgtcccgagactaggacgtggctccagggtgttccagaccctggaagggcctctcttcaaagacccgtgtttccagaacggtggcagcgggctcacgtggct

SEQ ID NO: 481935 - DNA, 120 bp, Artificial Sequence
  ENSG00000161609_20 (sequence is synthesized)
tggggagagcaggcactgggggagctgggtgaggacaggcgagcccaggctcgactggtggccccaaggggcgcccgtgcccgctgtgatgatagcagcgcccaggtctctctctagccc

SEQ ID NO: 481936 - DNA, 120 bp, Artificial Sequence
  ENSG00000161609_21 (sequence is synthesized)
ccagagtgcggccactaaggttttgggtcggcctgggtggaatggaggcaggatggggccccccaaactcctgtcactgctgcagggactgcccagagcagctgcaagtggggctggcag

SEQ ID NO: 481937 - DNA, 120 bp, Artificial Sequence
  ENSG00000161609_22 (sequence is synthesized)
ggatgaggaggaggtggcctgggcttgggggaccatgtacatcctgagttggaacccaggggagcagcaggtttggggccatgatgaggagagacctaggggttgcccgacggagagaaa

SEQ ID NO: 481938 - DNA, 120 bp, Artificial Sequence
  ENSG00000161609_23 (sequence is synthesized)
agggacaggaagaggcaggagcttcagagactactcaatgccactctagcctgagggactggaacttagtccgggggcattagggagccatgggaggatcaggagcaggggcaagtcagg

SEQ ID NO: 481939 - DNA, 120 bp, Artificial Sequence
  ENSG00000161609_24 (sequence is synthesized)
atcaaactcccatgagaagccagccggccaaatccaggctgatgtggcaagaatggcagctgcccagggctgtgtgggagccagacacggcccctcgcttcccggaagaggccacgtgaa

SEQ ID NO: 481940 - DNA, 120 bp, Artificial Sequence
  ENSG00000161609_25 (sequence is synthesized)
gccgaagcaggatgcaggagggcgtcccaggcagagacctgggcatgggagcggtccgcagctcagagtggctggagcatcatgtgcgatttggggtgctgaggagtgctcgggccagct

SEQ ID NO: 481941 - DNA, 120 bp, Artificial Sequence
  ENSG00000161609_26 (sequence is synthesized)
accactcccttctgcccccaacaccccagcagcctgtcttggggagacctcagaatgtcagtagtgtgggaatgtccctgaggttatatcacactgtgagaacagccgtggtttacaaga

SEQ ID NO: 481942 - DNA, 120 bp, Artificial Sequence
  ENSG00000161609_27 (sequence is synthesized)
gtgtgaggcatggggtcagcctacatggcttcaggctgaggccacctacataagagtggaccagtgcctcccttctctgtgcctcagttgcctcacctataaagatgaacaaaacaatgg

SEQ ID NO: 481943 - DNA, 120 bp, Artificial Sequence
  ENSG00000161609_28 (sequence is synthesized)
tccttttgctttttctggcgggaaaagctcacgcgcacctcccccaactcaactgccgttcgtcgttcgtggatgtccgttgtgtcccgagactaggacgtggctccagtgtacctccgg

SEQ ID NO: 481944 - DNA, 120 bp, Artificial Sequence
  ENSG00000161609_29 (sequence is synthesized)
gagaagactgggctaaggccccctcttgggggtattgtaagaacaaagtgggtgattatgggaagcttcaggaagaagaacgtggataatggggtgaaggccttttagaatgaggaaaac

SEQ ID NO: 481945 - DNA, 120 bp, Artificial Sequence
  ENSG00000161609_30 (sequence is synthesized)
ttgggggacgttgatggaagagggcagagttttggggtcgtgggataggggagggaggcagccaccatggtggcgtggggcatggctgatgctgtccctatgtccatcccctttggttta

SEQ ID NO: 481946 - DNA, 120 bp, Artificial Sequence
  ENSG00000161609_31 (sequence is synthesized)
ccagctgttcaaggccagggcagggagcctagaagttcacttccagccctgggagagaggctgggccagcccagtggctcctgcagttgaggatctcttcctatgtcatggagcatttgt

SEQ ID NO: 481947 - DNA, 120 bp, Artificial Sequence
  ENSG00000161609_32 (sequence is synthesized)
ctgcagttgaggatctcttcctatgtcatggagcatttgttgagcacctgccatctgcaggtgttgtggctacaacagtagacaaatagaccccaggacgtgtgtgtgtgtgtgtgtgtg

SEQ ID NO: 481948 - DNA, 120 bp, Artificial Sequence
  ENSG00000161609_33 (sequence is synthesized)
atcgcagccttctggcccaagcccggcaggcggtgggtctggcccaggggaaggaaggtgccctctctcttctttgtttcctggagtcagggcggcagagtgtgactatggagtaggaag

SEQ ID NO: 481949 - DNA, 120 bp, Artificial Sequence
  ENSG00000161609_34 (sequence is synthesized)
gggcagaggtcacctggctttctccctctctccaggccctgctcaccctagactttttcaagcttacctgccatccttctcatgacaaaggagacagcaggagccatcagggcttcccag

SEQ ID NO: 481950 - DNA, 120 bp, Artificial Sequence
  ENSG00000161609_35 (sequence is synthesized)
acccattcccccaggccctggttgtgttttcaggggtgggagaagggcaacatgggggcaaggaggctagaaatgaaacctttgtcctctctctggggttggtcaggaaaaggagcagca

SEQ ID NO: 481951 - DNA, 120 bp, Artificial Sequence
  ENSG00000161609_36 (sequence is synthesized)
gagctcacttactgttgagtgaacggacggatgaaagaggtaacaccaaccccattttccagaggaagaaactgaggcccaagagaagttgagtccattgccccagtgtacctccgggag

SEQ ID NO: 481952 - DNA, 120 bp, Artificial Sequence
  ENSG00000161609_37 (sequence is synthesized)
aggcctttgctgtagctaatgagagcgatggtgaggtggggggaggcctggaggctagtgggcggccaggctgctcccaggggaccctcccagccacacacacagggctgcagccaccac

SEQ ID NO: 481953 - DNA, 120 bp, Artificial Sequence
  ENSG00000161609_38 (sequence is synthesized)
accgcaggcctcatagacgtggctacacccccggattgcataaatgcacacgcacatgcgcccacactcgggagaggttgggccggccctccccagccagcctcagaactccctgggggc

SEQ ID NO: 481954 - DNA, 120 bp, Artificial Sequence
  ENSG00000161609_39 (sequence is synthesized)
gtagtgcccgcagcccccctgcctgcagccacacaggccagttcctctgctcctcagagcccagtgcccggtgggggttaagatttccattctcaggcaaggacggggaaagaaacttgg

SEQ ID NO: 481955 - DNA, 120 bp, Artificial Sequence
  ENSG00000161609_40 (sequence is synthesized)
taaggagaggtgaggagccctcagttgtgagctgaggaatgcaggagctgggctggagtctgcctgttgtgggtcaggcactgtcagggcccctggggctcttcagggtccaaaccggcc

SEQ ID NO: 481956 - DNA, 87 bp, Artificial Sequence
  ENSG00000161609_41 (sequence is synthesized)
cgaaatcctagcgaagcccccccatattgtgggagagatacccctgcgtcagggccccccagatcctgaccgtgctcgggccagctg

SEQ ID NO: 481957 - DNA, 120 bp, Artificial Sequence
  ENSG00000161609_42 (sequence is synthesized)
aggtctaggctgtctgtctccctaggaactgaggctggagatttcacgcctggaggagcagctgagtcagacctatgaggggcccgatgagtgagtggaatttcaaggggtaggaggagg

SEQ ID NO: 481958 - DNA, 120 bp, Artificial Sequence
  ENSG00000161610_0 (sequence is synthesized)
cacaattgacagcctcaaggttcctggctttttgaaccaccacagacatctcctttcccggctaccccaccctgagcgccagacaccatgaaccttccttccacaaaggtctcctgggcc

SEQ ID NO: 481959 - DNA, 120 bp, Artificial Sequence
  ENSG00000161610_1 (sequence is synthesized)
gccgtgacgctactgctgctgctgctgctgctgccgcccgcgctgttgtcgtccggggcggctgcacagcccctgcccgactgctgtcgtcaaaagacttgctcttgccgcctctacgag

SEQ ID NO: 481960 - DNA, 120 bp, Artificial Sequence
  ENSG00000161610_2 (sequence is synthesized)
ccatgggccgccgcgcaggcgcagagccagcgccgcgcccctgcctcgggcgccgctgttccgccccggccgccgcctccgtcgcgcccggaggacagtccgggatctgagtcgttcttc

SEQ ID NO: 481961 - DNA, 120 bp, Artificial Sequence
  ENSG00000161610_3 (sequence is synthesized)
cgcccggaggacagtccgggatctgagtcgttcttcgggccctgtcctggcccaggcctctgccctctgcccacccagcgtcagcccccagaaaaaaggcaataaagacgagtctccatt

SEQ ID NO: 481962 - DNA, 120 bp, Artificial Sequence
  ENSG00000161618_0 (sequence is synthesized)
agccccgcccctttgggctggaaccggaggtgtcgctcttcggacctcaaggttccccttaacacagagcgccccgcagtcttcgcggaaagcgttcggggtaggcgatggctgcgacgc

SEQ ID NO: 481963 - DNA, 120 bp, Artificial Sequence
  ENSG00000161618_1 (sequence is synthesized)
gtgcagggccccgcgcccgcgagatcttcacctcgctggagtacggaccggtgccggagagccacgcatgcgcactggcctggctggacacccaggaccggtgcttgggccactatgtga

SEQ ID NO: 481964 - DNA, 120 bp, Artificial Sequence
  ENSG00000161618_2 (sequence is synthesized)
atgggaagtggttaaagcctgaacacagaaattcagtgccttgccaggatcccatcacaggagagaacttggccagttgcctgcaggcacaggccgaggatgtggctgcagccgtggagg

SEQ ID NO: 481965 - DNA, 120 bp, Artificial Sequence
  ENSG00000161618_3 (sequence is synthesized)
cagccaggatggcatttaagggctggagtgcgcaccccggcgtcgtccgggcccagcacctgaccaggctggccgaggtgatccagaagcaccagcggctgctgtggaccctggaatccc

SEQ ID NO: 481966 - DNA, 120 bp, Artificial Sequence
  ENSG00000161618_4 (sequence is synthesized)
tggtgactgggcgggctgttcgagaggttcgagacggggacgtccagctggcccagcagctgctccactaccatgcaatccaggcatccacccaggaggaggcactggcaggctgggagc

SEQ ID NO: 481967 - DNA, 120 bp, Artificial Sequence
  ENSG00000161618_5 (sequence is synthesized)
ccatgggagtaattggcctcatcctgccacccacattctccttccttgagatgatgtggaggatttgccctgccctggctgtgggctgcaccgtggtggccctcgtgcccccggcctccc

SEQ ID NO: 481968 - DNA, 120 bp, Artificial Sequence
  ENSG00000161618_6 (sequence is synthesized)
cggcgcccctcctcctggcccagctggcgggggagctgggccccttcccgggaatcctgaatgtcctcagtggccctgcgtccctggtgcccatcctggcctcccagcctggaatccgga

SEQ ID NO: 481969 - DNA, 120 bp, Artificial Sequence
  ENSG00000161618_7 (sequence is synthesized)
aggtggccttctgcggagccccggaggaagggcgtgcccttcgacggagcctggcgggagagtgtgcggagctgggcctggcgctggggacggagtcgctgctgctgctgacggacacgg

SEQ ID NO: 481970 - DNA, 120 bp, Artificial Sequence
  ENSG00000161618_8 (sequence is synthesized)
cggacgtagactcggccgtggagggtgtcgtggacgccgcctggtccgaccgcggcccgggtggcctcaggctcctcatccaggagtctgtgtgggatgaagccatgagacggctgcagg

SEQ ID NO: 481971 - DNA, 120 bp, Artificial Sequence
  ENSG00000161618_9 (sequence is synthesized)
agcggatggggcggcttcggagtggccgagggctggatggggccgtggacatgggggcccggggggctgccgcatgtgacctggtccagcgctttgtgcgtgaggcccagagccagggtg

SEQ ID NO: 481972 - DNA, 120 bp, Artificial Sequence
  ENSG00000161618_10 (sequence is synthesized)
cacaggtgttccaggctggtgatgtgccttcggaacgcccattctatcccccaaccttggtctccaacctgcccccagcctccccatgtgcccaggtggaggtgccgtggcctgtggtcg

SEQ ID NO: 481973 - DNA, 120 bp, Artificial Sequence
  ENSG00000161618_11 (sequence is synthesized)
tggcctcccccttccgcacagccaaggaggcactgttggtggccaacgggacgccccgcgggggcagcgccagtgtgtggagcgagaggctggggcaggcgctggagctgggctatgggc

SEQ ID NO: 481974 - DNA, 120 bp, Artificial Sequence
  ENSG00000161618_12 (sequence is synthesized)
cagacgggctgtatgagtatctgcggccctcagggacccctgcccggctgtcctgcctctccaagaacctgaactatgacacctttggcctcgctgttccctcaaccctgccggctgggc

SEQ ID NO: 481975 - DNA, 120 bp, Artificial Sequence
  ENSG00000161618_13 (sequence is synthesized)
ctgaaatagggcccagcccagcacccccctatgggctcttcgttgggggccgtttccaggctcctggggcccgaagctccaggcccatccgggattcgtctggcaacctccatggctacg

SEQ ID NO: 481976 - DNA, 120 bp, Artificial Sequence
  ENSG00000161618_14 (sequence is synthesized)
tggctgagggtggagccaaggacatccgaggtgctgtggaggccgctcaccaggctttccctggctgggcgggccagtccccaggagcccgggcagccctgctgtgggccctggcggctg

SEQ ID NO: 481977 - DNA, 120 bp, Artificial Sequence
  ENSG00000161618_15 (sequence is synthesized)
cactggagcgccggaagtctaccctggcctcgaggctggagaggcagggagcggagctcaaggctgcggaggcggaggtggagctgagcgcaagacgacttcgggcgtggggggcccggg

SEQ ID NO: 481978 - DNA, 120 bp, Artificial Sequence
  ENSG00000161618_16 (sequence is synthesized)
tgcaggcccaaggccacaccctgcaggtagccgggctgagaggccctgtgctgcgcctgcgggagccgctgggtgtgctggctgtggtgtgtccggacgagtggcccctgcttgccttcg

SEQ ID NO: 481979 - DNA, 120 bp, Artificial Sequence
  ENSG00000161618_17 (sequence is synthesized)
tgtccctgctggctcccgccctggcctacggcaacactgtggtcatggtgcccagtgcggcctgtcctctgctggccctggaggtctgccaggacatggccaccgtgttcccagcaggcc

SEQ ID NO: 481980 - DNA, 120 bp, Artificial Sequence
  ENSG00000161618_18 (sequence is synthesized)
tggccaacgtggtgacaggagaccgggaccatctgacccgctgcctggccttgcaccaagacgtccaggccatgtggtatttcggatcagcccagggttcccagtttgtcgagtgggcct

SEQ ID NO: 481981 - DNA, 120 bp, Artificial Sequence
  ENSG00000161618_19 (sequence is synthesized)
cggcaggaaacctcaaaccggtgtgggcgagcaggggctgcccgcgggcctgggaccaggaggccgagggggcaggcccagagctggggctgcgagtggcgcggaccaaggccctgtggc

SEQ ID NO: 481982 - DNA, 120 bp, Artificial Sequence
  ENSG00000161618_20 (sequence is synthesized)
tgcctatgggggactgatgcctgagcgccacctactgcattttggacacctcacaccaaggggagatgcaccccacagacacctgggactttccccttctggttcctgtgtctcccaata

SEQ ID NO: 481983 - DNA, 120 bp, Artificial Sequence
  ENSG00000161618_21 (sequence is synthesized)
ttctggttcctgtgtctcccaataaactctctgaccaaccctagctgtgcttctgcgagaagaaagggtgtagcaacttctggcagatatgaggcttttttctttttttttttttttttt

SEQ ID NO: 481984 - DNA, 120 bp, Artificial Sequence
  ENSG00000161618_22 (sequence is synthesized)
ctggagcgcagtggcacaatctcggcccactgcagcctcgacctctggggctcaagggatcctcatgcctcagcctcatatgtagctggggccacagacatgcaccaccacacctggctc

SEQ ID NO: 481985 - DNA, 120 bp, Artificial Sequence
  ENSG00000161618_23 (sequence is synthesized)
gctcgaggccattttagttctgaggttgagcagctcaggagccggctccagcacggtgctgtgtttgtgaaacagagaaaggggacccccgaggaccccagacagggccttaggactctc

SEQ ID NO: 481986 - DNA, 120 bp, Artificial Sequence
  ENSG00000161618_24 (sequence is synthesized)
atatcttcttgtcttctccatctggtggctcttgctctctggttttctctaccttttcatggccccagaatccatatgcagtaaaggaactctctggaataaaattaaagtcctcctata

SEQ ID NO: 481987 - DNA, 120 bp, Artificial Sequence
  ENSG00000161618_25 (sequence is synthesized)
ggtggccttctgcggagccccggaggtaccttcgggacaggggtcgtggcggaacgcggctgggggccgcaaggctcctcctgcggctgaactggggggggtccctaggaagggcgtgcc

SEQ ID NO: 481988 - DNA, 120 bp, Artificial Sequence
  ENSG00000161618_26 (sequence is synthesized)
caaacaggctcctccttttctggaaacacagccccgccctcttagaactcctgttggtaaggggagaaactccttgacaagaaggttttgaggccccgcccttaggactcaagttactaa

SEQ ID NO: 481989 - DNA, 120 bp, Artificial Sequence
  ENSG00000161618_27 (sequence is synthesized)
ggaagaggctgtccttagcaacaggggcctgagagctgcctagcccaaagacctcgtctcaggggacagcccgttgctaaggaccacaccctagatttggaggcccacagtctacgcttt

SEQ ID NO: 481990 - DNA, 120 bp, Artificial Sequence
  ENSG00000161618_28 (sequence is synthesized)
ctttgtttttctattttgagacagaacctcaccctgtcacccagatgcaatcatacctcactgcagccgcaacctcccaggctcaagccaccgtcccacctcagcttcctgagtagctgg

SEQ ID NO: 481991 - DNA, 82 bp, Artificial Sequence
  ENSG00000161618_29 (sequence is synthesized)
caagtagctgagactacaggcactcaccgccatgcccagctaattgttgggggtttttttttagtagagatggggtttcgcc

SEQ ID NO: 481992 - DNA, 89 bp, Artificial Sequence
  ENSG00000161618_30 (sequence is synthesized)
tctcgccatattgtgatcctcccgcctcagccaccccaagtgctgggattacaggagcgagtcaccgcgccccaccgtccactctctta

SEQ ID NO: 481993 - DNA, 120 bp, Artificial Sequence
  ENSG00000161618_31 (sequence is synthesized)
tacaggagcgagtcaccgcgccccaccgtccactctcttaaacctcctgttggtaacagatgtgaacttgttgacaagagccttggggcccattcctttcaacatgggctgttaagggag

SEQ ID NO: 481994 - DNA, 120 bp, Artificial Sequence
  ENSG00000161618_32 (sequence is synthesized)
aggaaattccctaaccactgggtccagtgcttttccctaccatctggaagttctgcttgggaggagctgggcattgtagctgcagagcctgggtccagcctgaagcccctcgtcagtaac

SEQ ID NO: 481995 - DNA, 120 bp, Artificial Sequence
  ENSG00000161634_0 (sequence is synthesized)
cagccagcctttgttgacttaacaggtggctctgaggtgggagaagaggaggaggagaacacaccactggaagactggttcccattggtccctgtcatgcttaaaaaaaggcccagagag

SEQ ID NO: 481996 - DNA, 120 bp, Artificial Sequence
  ENSG00000161634_1 (sequence is synthesized)
gcagtcttgacaccctagatcccaagatctccaaggatttggtggcatacccactccagcacacagaagcatgaggttcatgactctcctcttcctgacagctctggcaggagccctggt

SEQ ID NO: 481997 - DNA, 120 bp, Artificial Sequence
  ENSG00000161634_2 (sequence is synthesized)
caaaaggaaaatgcaggtgaagacccagggttagccagacaggcaccaaagccaaggaagcagagatccagccttctggaaaaaggcctagacggagcaaaaaaagctgtggggggactc

SEQ ID NO: 481998 - DNA, 120 bp, Artificial Sequence
  ENSG00000161634_3 (sequence is synthesized)
ggaaaactaggaaaagatgcagtcgaagatctagaaagcgtgggtaaaggtggggaagagaggttggtctttggggctcctgtgaatctaacctccatccctctgacttctgtgagccgt

SEQ ID NO: 481999 - DNA, 120 bp, Artificial Sequence
  ENSG00000161634_4 (sequence is synthesized)
ccatgacgttaaagacgtccttgactcagtactatagctgtaaggagaagctgagaaatgatacccaggagcagcaggctttacgtcttcagcctaaaacctaaaaaaaaaaaaaaaaaa

SEQ ID NO: 482000 - DNA, 120 bp, Artificial Sequence
  ENSG00000161634_5 (sequence is synthesized)
ctgtgcctatgatccagaggccgcctctgccccaggatcggggaaccataaacaaatggattgtttacagctacagaagcccccttcagagactgccaaatttctgtcctcatccaccaa

SEQ ID NO: 482001 - DNA, 120 bp, Artificial Sequence
  ENSG00000161638_0 (sequence is synthesized)
attcgcctctgggaggtttaggaagcggctccgggtcggtggccccaggacagggaagagcgggcgctatggggagccggacgccagagtcccctctccacgccgtgcagctgcgctggg

SEQ ID NO: 482002 - DNA, 120 bp, Artificial Sequence
  ENSG00000161638_1 (sequence is synthesized)
gcccccggcgccgacccccgctgctgccgctgctgttgctgctgctgccgccgccacccagggtcgggggcttcaacttagacgcggaggccccagcagtactctcggggcccccgggct

SEQ ID NO: 482003 - DNA, 120 bp, Artificial Sequence
  ENSG00000161638_2 (sequence is synthesized)
ccttcttcggattctcagtggagttttaccggccgggaacagacggggtcagtgtgctggtgggagcacccaaggctaataccagccagccaggagtgctgcagggtggtgctgtctacc

SEQ ID NO: 482004 - DNA, 120 bp, Artificial Sequence
  ENSG00000161638_3 (sequence is synthesized)
tctgtccttggggtgccagccccacacagtgcacccccattgaatttgacagcaaaggctctcggctcctggagtcctcactgtccagctcagagggagaggagcctgtggagtacaagt

SEQ ID NO: 482005 - DNA, 120 bp, Artificial Sequence
  ENSG00000161638_4 (sequence is synthesized)
ccttgcagtggttcggggcaacagttcgagcccatggctcctccatcttggcatgcgctccactgtacagctggcgcacagagaaggagccactgagcgaccccgtgggcacctgctacc

SEQ ID NO: 482006 - DNA, 120 bp, Artificial Sequence
  ENSG00000161638_5 (sequence is synthesized)
tctccacagataacttcacccgaattctggagtatgcaccctgccgctcagatttcagctgggcagcaggacagggttactgccaaggaggcttcagtgccgagttcaccaagactggcc

SEQ ID NO: 482007 - DNA, 120 bp, Artificial Sequence
  ENSG00000161638_6 (sequence is synthesized)
gtgtggttttaggtggaccaggaagctatttctggcaaggccagatcctgtctgccactcaggagcagattgcagaatcttattaccccgagtacctgatcaacctggttcaggggcagc

SEQ ID NO: 482008 - DNA, 120 bp, Artificial Sequence
  ENSG00000161638_7 (sequence is synthesized)
tgcagactcgccaggccagttccatctatgatgacagctacctaggatactctgtggctgttggtgaattcagtggtgatgacacagaagactttgttgctggtgtgcccaaagggaacc

SEQ ID NO: 482009 - DNA, 120 bp, Artificial Sequence
  ENSG00000161638_8 (sequence is synthesized)
tcacttacggctatgtcaccatccttaatggctcagacattcgatccctctacaacttctcaggggaacagatggcctcctactttggctatgcagtggccgccacagacgtcaatgggg

SEQ ID NO: 482010 - DNA, 120 bp, Artificial Sequence
  ENSG00000161638_9 (sequence is synthesized)
acgggctggatgacttgctggtgggggcacccctgctcatggatcggacccctgacgggcggcctcaggaggtgggcagggtctacgtctacctgcagcacccagccggcatagagccca

SEQ ID NO: 482011 - DNA, 120 bp, Artificial Sequence
  ENSG00000161638_10 (sequence is synthesized)
cgcccacccttaccctcactggccatgatgagtttggccgatttggcagctccttgacccccctgggggacctggaccaggatggctacaatgatgtggccatcggggctccctttggtg

SEQ ID NO: 482012 - DNA, 120 bp, Artificial Sequence
  ENSG00000161638_11 (sequence is synthesized)
gggagacccagcagggagtagtgtttgtatttcctgggggcccaggagggctgggctctaagccttcccaggttctgcagcccctgtgggcagccagccacaccccagacttctttggct

SEQ ID NO: 482013 - DNA, 120 bp, Artificial Sequence
  ENSG00000161638_12 (sequence is synthesized)
ctgcccttcgaggaggccgagacctggatggcaatggatatcctgatctgattgtggggtcctttggtgtggacaaggctgtggtatacaggggccgccccatcgtgtccgctagtgcct

SEQ ID NO: 482014 - DNA, 120 bp, Artificial Sequence
  ENSG00000161638_13 (sequence is synthesized)
ccctcaccatcttccccgccatgttcaacccagaggagcggagctgcagcttagaggggaaccctgtggcctgcatcaaccttagcttctgcctcaatgcttctggaaaacacgttgctg

SEQ ID NO: 482015 - DNA, 120 bp, Artificial Sequence
  ENSG00000161638_14 (sequence is synthesized)
actccattggtttcacagtggaacttcagctggactggcagaagcagaagggaggggtacggcgggcactgttcctggcctccaggcaggcaaccctgacccagaccctgctcatccaga

SEQ ID NO: 482016 - DNA, 120 bp, Artificial Sequence
  ENSG00000161638_15 (sequence is synthesized)
atggggctcgagaggattgcagagagatgaagatctacctcaggaacgagtcagaatttcgagacaaactctcgccgattcacatcgctctcaacttctccttggacccccaagccccag

SEQ ID NO: 482017 - DNA, 120 bp, Artificial Sequence
  ENSG00000161638_16 (sequence is synthesized)
tggacagccacggcctcaggccagccctacattatcagagcaagagccggatagaggacaaggctcagatcttgctggactgtggagaagacaacatctgtgtgcctgacctgcagctgg

SEQ ID NO: 482018 - DNA, 120 bp, Artificial Sequence
  ENSG00000161638_17 (sequence is synthesized)
aacctcactttccatgcccagaatgtgggtgagggtggcgcctatgaggctgagcttcgggtcaccgcccctccagaggctgagtactcaggactcgtcagacacccagggaacttctcc

SEQ ID NO: 482019 - DNA, 120 bp, Artificial Sequence
  ENSG00000161638_18 (sequence is synthesized)
agcctgagctgtgactactttgccgtgaaccagagccgcctgctggtgtgtgacctgggcaaccccatgaaggcaggagccagtctgtggggtggccttcggtttacagtccctcatctc

SEQ ID NO: 482020 - DNA, 120 bp, Artificial Sequence
  ENSG00000161638_19 (sequence is synthesized)
cgggacactaagaaaaccatccagtttgacttccagatcctcagcaagaatctcaacaactcgcaaagcgacgtggtttcctttcggctctccgtggaggctcaggcccaggtcaccctg

SEQ ID NO: 482021 - DNA, 120 bp, Artificial Sequence
  ENSG00000161638_20 (sequence is synthesized)
aacggtgtctccaagcctgaggcagtgctattcccagtaagcgactggcatccccgagaccagcctcagaaggaggaggacctgggacctgctgtccaccatgtctatgagctcatcaac

SEQ ID NO: 482022 - DNA, 120 bp, Artificial Sequence
  ENSG00000161638_21 (sequence is synthesized)
caaggccccagctccattagccagggtgtgctggaactcagctgtccccaggctctggaaggtcagcagctcctatatgtgaccagagttacgggactcaactgcaccaccaatcacccc

SEQ ID NO: 482023 - DNA, 120 bp, Artificial Sequence
  ENSG00000161638_22 (sequence is synthesized)
attaacccaaagggcctggagttggatcccgagggttccctgcaccaccagcaaaaacgggaagctccaagccgcagctctgcttcctcgggacctcagatcctgaaatgcccggaggct

SEQ ID NO: 482024 - DNA, 120 bp, Artificial Sequence
  ENSG00000161638_23 (sequence is synthesized)
gagtgtttcaggctgcgctgtgagctcgggcccctgcaccaacaagagagccaaagtctgcagttgcatttccgagtctgggccaagactttcttgcagcgggagcaccagccatttagc

SEQ ID NO: 482025 - DNA, 120 bp, Artificial Sequence
  ENSG00000161638_24 (sequence is synthesized)
ctgcagtgtgaggctgtgtacaaagccctgaagatgccctaccgaatcctgcctcggcagctgccccaaaaagagcgtcaggtggccacagctgtgcaatggaccaaggcagaaggcagc

SEQ ID NO: 482026 - DNA, 120 bp, Artificial Sequence
  ENSG00000161638_25 (sequence is synthesized)
tatggcgtcccactgtggatcatcatcctagccatcctgtttggcctcctgctcctaggtctactcatctacatcctctacaagcttggattcttcaaacgctccctcccatatggcacc

SEQ ID NO: 482027 - DNA, 120 bp, Artificial Sequence
  ENSG00000161638_26 (sequence is synthesized)
gccatggaaaaagctcagctcaagcctccagccacctctgatgcctgagtcctcccaatttcagactcccattcctgaagaaccagtccccccaccctcattctactgaaaaggaggggt

SEQ ID NO: 482028 - DNA, 120 bp, Artificial Sequence
  ENSG00000161638_27 (sequence is synthesized)
ctgggtacttcttgaaggtgctgacggccagggagaagctcctctccccagcccagagacatacttgaagggccagagccaggggggtgaggagctggggatccctcccccccatgcact

SEQ ID NO: 482029 - DNA, 120 bp, Artificial Sequence
  ENSG00000161638_28 (sequence is synthesized)
gtgaaggacccttgtttacacataccctcttcatggatgggggaactcagatccagggacagaggccccagcctccctgaagcctttgcattttggagagtttcctgaaacaacttggaa

SEQ ID NO: 482030 - DNA, 120 bp, Artificial Sequence
  ENSG00000161638_29 (sequence is synthesized)
agataactaggaaatccattcacagttctttgggccagacatgccacaaggacttcctgtccagctccaacctgcaaagatctgtcctcagccttgccagagatccaaaagaagccccca

SEQ ID NO: 482031 - DNA, 120 bp, Artificial Sequence
  ENSG00000161638_30 (sequence is synthesized)
gctaagaacctggaacttggggagttaagacctggcagctctggacagccccaccctggtgggccaacaaagaacactaactatgcatggtgccccaggaccagctcaggacagatgcca

SEQ ID NO: 482032 - DNA, 120 bp, Artificial Sequence
  ENSG00000161638_31 (sequence is synthesized)
cacaaggatagatgctggcccagggcccagagcccagctccaaggggaatcagaactcaaatggggccagatccagcctggggtctggagttgatctggaacccagactcagacattggc

SEQ ID NO: 482033 - DNA, 120 bp, Artificial Sequence
  ENSG00000161638_32 (sequence is synthesized)
acctaatccaggcagatccaggactatatttgggcctgctccagacctgatcctggaggcccagttcaccctgatttaggagaagccaggaatttcccaggaccctgaaggggccatgat

SEQ ID NO: 482034 - DNA, 120 bp, Artificial Sequence
  ENSG00000161638_33 (sequence is synthesized)
ggcaacagatctggaacctcagcctggccagacacaggccctccctgttccccagagaaaggggagcccactgtcctgggcctgcagaatttgggttctgcctgccagctgcactgatgc

SEQ ID NO: 482035 - DNA, 120 bp, Artificial Sequence
  ENSG00000161638_34 (sequence is synthesized)
tgcccctcatctctctgcccaacccttccctcaccttggcaccagacacccaggacttatttaaactctgttgcaagtgcaataaatctgacccagtgcccccactgaccagaactagaa

SEQ ID NO: 482036 - DNA, 120 bp, Artificial Sequence
  ENSG00000161638_35 (sequence is synthesized)
ttccttaagttcctgggtgcagttctggctaattccaacagagggcgctgtcttctcacttcaacctccctgagcgttgaaaccaggaggggttaggaagaaaggatcctgatctggggc

SEQ ID NO: 482037 - DNA, 120 bp, Artificial Sequence
  ENSG00000161638_36 (sequence is synthesized)
ttgctgtaagaggtgatttcttgacttcttacagatctgattgtggggtcctttggtgtggacaaggctgtggtatacaggtatgagctccaaagggagatgaggggacaacctgggtgg

SEQ ID NO: 482038 - DNA, 120 bp, Artificial Sequence
  ENSG00000161638_37 (sequence is synthesized)
aacgggaagctccaagccgcagctctgcttcctcgggacctcagatcctggtaagtcaggcagggaatgaggtgtggaccaaagtgttgagtactctggggttctcagggccatcacaag

SEQ ID NO: 482039 - DNA, 120 bp, Artificial Sequence
  ENSG00000161638_38 (sequence is synthesized)
gtctactcatctacatcctctacaaggtcagccacatcctgcttgtgacttggccaccctctcatcaggctctgcccttgacctggcacagtcccaagtatctacctctagaccagttca

SEQ ID NO: 482040 - DNA, 120 bp, Artificial Sequence
  ENSG00000161638_39 (sequence is synthesized)
aaagggcctggaggtgagatcctgaacactggcatggggaagaggagcagattcagaggaccaaggctgaggggttggggaaggttgctgggggcctgcaagaggcaatgaggatgtgcc

SEQ ID NO: 482041 - DNA, 120 bp, Artificial Sequence
  ENSG00000161638_40 (sequence is synthesized)
tatagctagggttgagggtcacaaggcccaaagttacctcaaaatcctctggaggaaaaaggactttcatccactgtgtttctttctgcctgaactatcccttctttgtttcccggcata

SEQ ID NO: 482042 - DNA, 120 bp, Artificial Sequence
  ENSG00000161638_41 (sequence is synthesized)
cccctagggcccagttatgtgccacctcctctaggaagccttcttcaaaccttttcctctgggcccgaatgcctgttttatagttcatttactcattaacatctaattaaataagtgact

SEQ ID NO: 482043 - DNA, 120 bp, Artificial Sequence
  ENSG00000161638_42 (sequence is synthesized)
gtactgaacactgttaggcccaggaaatattgcaccaaacagaactgacaaggtctccacgttcatggaacttacattctagtgaagggtgatagacatagaaaagaaaaagagaaggag

SEQ ID NO: 482044 - DNA, 120 bp, Artificial Sequence
  ENSG00000161638_43 (sequence is synthesized)
aaaaattaacagggattgaaaggtgatgaagtgaagagttaataagctgtagggacactatttaaattggatcatagaaaaacctcttgaagacgtcacagctgaactgaggcctgaaag

SEQ ID NO: 482045 - DNA, 120 bp, Artificial Sequence
  ENSG00000161638_44 (sequence is synthesized)
tgtctataagactcagggatgagcattccaaaccaagggaacatccagtgcaaaaacaggaacacagacctaattatttacttaagcatctcctccagtgtgatctccaagaaccaagtt

SEQ ID NO: 482046 - DNA, 120 bp, Artificial Sequence
  ENSG00000161638_45 (sequence is synthesized)
ttcctcatttccatattttaaccctgagctcagtgccttgcgcataggaggtggacagttggatgaatcaataaagagatagatgaaagaataggttgaagctgctctggaacccaggtg

SEQ ID NO: 482047 - DNA, 120 bp, Artificial Sequence
  ENSG00000161638_46 (sequence is synthesized)
gggagaagggacctgggaagacagaggcctgggtattgggggggcagggccatggaaagagaagagcctacagcccaggaatgggtctaaacttcccctctcaaggctgccctgctcccc

SEQ ID NO: 482048 - DNA, 120 bp, Artificial Sequence
  ENSG00000161638_47 (sequence is synthesized)
gaagcagacatagggtggaactacctggcatagaggtgggaatatgagggcaaagctgaagagggagctagggacagtggtctgcgtctctaaggaatgcctgcccctgggtgtcctgta

SEQ ID NO: 482049 - DNA, 120 bp, Artificial Sequence
  ENSG00000161638_48 (sequence is synthesized)
gggagggtggccacacagaactgagggcacctcctgaagggaaaaagactgggggactccagtgaagggcttgggactcttgtaggggctgagaaagggagaccttctgtcagaggagct

SEQ ID NO: 482050 - DNA, 120 bp, Artificial Sequence
  ENSG00000161638_49 (sequence is synthesized)
gggaagcaggctgccagggcctctgaaacaatgaggatggtcggaattgggccctaagcagacaaagggagatgagagaggctgaggagcagggccactaagtctccagagtcccctgac

SEQ ID NO: 482051 - DNA, 120 bp, Artificial Sequence
  ENSG00000161638_50 (sequence is synthesized)
ctaacttcaggagctctccctcttcagcctacccatctcctattcctctggaccctgccttctctcccctccattctcaccactggccctcacagacccctcctcactctcctcttccgt

SEQ ID NO: 482052 - DNA, 120 bp, Artificial Sequence
  ENSG00000161638_51 (sequence is synthesized)
cccctcggacctgtcctctctgctgcttccatcccctatacctcctgggccactcctccccgcctcagtatacctggtcttcttggaaaatacccccagctcttgtgacctctaccataa

SEQ ID NO: 482053 - DNA, 120 bp, Artificial Sequence
  ENSG00000161638_52 (sequence is synthesized)
tgatttccaagactcacattttcctcctacacgccccaaggctgggtggctgggcagccggatgcctgggtcttggcccagggaggggatttggcttgggaggagagtatataggctaga

SEQ ID NO: 482054 - DNA, 120 bp, Artificial Sequence
  ENSG00000161638_53 (sequence is synthesized)
tgagagaccctgaggctccacaggaccttggcgctccagaagctatacatctaatctcagcagggtcagtgtgctggtgggagcacccaaggctaataccagccagccaggagtgctgca

SEQ ID NO: 482055 - DNA, 120 bp, Artificial Sequence
  ENSG00000161638_54 (sequence is synthesized)
cagaatgtgggtgagggtggcgcctatgaggctgagcttcgggtcaccgcccctccagaggctgagtactcaggactcgtcagacacccaggggtgagatgagactctcgagtgggattt

SEQ ID NO: 482056 - DNA, 120 bp, Artificial Sequence
  ENSG00000161638_55 (sequence is synthesized)
ccagtttgacttccagatcctcaggtagggagtgagtgtgtctaggctggggctgagctggggacggaagggagggctgggcgccattctcactggctgcactccagcacctcagtcttg

SEQ ID NO: 482057 - DNA, 120 bp, Artificial Sequence
  ENSG00000161638_56 (sequence is synthesized)
cctccatcccacagcaagaatctcaacaactcgcaaagcgacgtggtttcctttcggctctccgtggaggctcaggcccaggtcaccctgaacgggtcagtgccaggcaaaatggggtct

SEQ ID NO: 482058 - DNA, 120 bp, Artificial Sequence
  ENSG00000161638_57 (sequence is synthesized)
gagagagactcaggaagaatgagcccaaaatagggaaagatcacaaccccagccagacgatggggaaccctatgtcctctggatcccaagagaggatgtgctaaccaactttcccctacc

SEQ ID NO: 482059 - DNA, 120 bp, Artificial Sequence
  ENSG00000161638_58 (sequence is synthesized)
atgcagaggacacacattctggcgcttgggcatcagtttcctgtgtccaggttacagaggagtcctaattctattgaccccacattcactcttggcaggggccgccccatcgtgtccgct

SEQ ID NO: 482060 - DNA, 120 bp, Artificial Sequence
  ENSG00000161640_0 (sequence is synthesized)
cgaggctcctcctctgtggatggtcactgcccctccaccaggcttcctgctggaggagtttccttcccagccaggccggcccagaagccagatggtcccgggacaggcccagccccagag

SEQ ID NO: 482061 - DNA, 120 bp, Artificial Sequence
  ENSG00000161640_1 (sequence is synthesized)
cccagagatgctgctgctgcccctgctgctgcccgtgctgggggcggggtccctgaacaaggatcccagttacagtcttcaagtgcagaggcaggtgccggtgccggagggcctgtgtgt

SEQ ID NO: 482062 - DNA, 120 bp, Artificial Sequence
  ENSG00000161640_2 (sequence is synthesized)
catcgtgtcttgcaacctctcctacccccgggatggctgggacgagtctactgctgcttatggctactggttcaaaggacggaccagcccaaagacgggtgctcctgtggccactaacaa

SEQ ID NO: 482063 - DNA, 120 bp, Artificial Sequence
  ENSG00000161640_3 (sequence is synthesized)
ccagagtcgagaggtggaaatgagcacccgggaccgattccagctcactggggatcccggcaaagggagctgctccttggtgatcagagacgcgcagagggaggatgaggcatggtactt

SEQ ID NO: 482064 - DNA, 120 bp, Artificial Sequence
  ENSG00000161640_4 (sequence is synthesized)
ctttcgggtggagagaggaagccgtgtgagacatagtttcctgagcaatgcgttctttctaaaagtaacagccctgactaagaagcctgatgtctacatccccgagaccctggagcccgg

SEQ ID NO: 482065 - DNA, 120 bp, Artificial Sequence
  ENSG00000161640_5 (sequence is synthesized)
gcagccggtgacggtcatctgtgtgtttaactgggctttcaagaaatgtccagccccttctttctcctggacgggggctgccctctcccctagaagaaccagaccaagcacctcccactt

SEQ ID NO: 482066 - DNA, 120 bp, Artificial Sequence
  ENSG00000161640_6 (sequence is synthesized)
ctcagtgctcagcttcacgcccagcccccaggaccacgacaccgacctcacctgccatgtggacttctccagaaagggtgtgagcgcacagaggaccgtccgactccgtgtggcctatgc

SEQ ID NO: 482067 - DNA, 120 bp, Artificial Sequence
  ENSG00000161640_7 (sequence is synthesized)
ccccaaagaccttattatcagcatttcacatgacaacacgtcagccctggaactccagggaaacgtcatatatctggaagttcagaaaggccagttcctgcggctcctctgtgctgctga

SEQ ID NO: 482068 - DNA, 120 bp, Artificial Sequence
  ENSG00000161640_8 (sequence is synthesized)
cagccagccccctgccacgctgagctgggtcctgcaggacagagtcctctcctcgtcccacccctggggccccagaaccctggggctggagctgcgtggggtaagggccggggattcagg

SEQ ID NO: 482069 - DNA, 120 bp, Artificial Sequence
  ENSG00000161640_9 (sequence is synthesized)
gcgctacacctgccgagcggagaacaggcttggctcccagcagcaagccctggacctctctgtgcagtatcctccagagaacctgagagtgatggtttcccaagcaaacaggacagtcct

SEQ ID NO: 482070 - DNA, 120 bp, Artificial Sequence
  ENSG00000161640_10 (sequence is synthesized)
ggaaaacctcgggaacggcacatccctcccggtcctggagggccaaagcctgcgcctggtctgtgtcacccacagcagccccccagccaggctgagctggacccggtggggacagaccgt

SEQ ID NO: 482071 - DNA, 120 bp, Artificial Sequence
  ENSG00000161640_11 (sequence is synthesized)
gggcccctcccagccctcagaccccggggtcctggagctgccacccattcaaatggagcacgaaggagagttcacctgccacgctcagcaccctctgggctcccagcacgtctctctcag

SEQ ID NO: 482072 - DNA, 120 bp, Artificial Sequence
  ENSG00000161640_12 (sequence is synthesized)
cctctccgtgcactaccctccacagctgctgggcccctcctgctcctgggaggctgagggtctgcactgcagctgctcctcccaggccagcccggccccctctctgcgctggtggcttgg

SEQ ID NO: 482073 - DNA, 120 bp, Artificial Sequence
  ENSG00000161640_13 (sequence is synthesized)
gctcagccgggccctgggccaacagctccctgagcctccatggagggctcagctccggcctcaggctccgctgtaaggcctggaacgtccacggggcccagagtggctctgtcttccagc

SEQ ID NO: 482074 - DNA, 120 bp, Artificial Sequence
  ENSG00000161640_14 (sequence is synthesized)
tgctaccagggaagctggagcatgggggaggacttggcctgggggctgccctgggagctggcgtcgctgccctgctcgctttctgttcctgccttgtcgtcttcagggtgaagatctgca

SEQ ID NO: 482075 - DNA, 120 bp, Artificial Sequence
  ENSG00000161640_15 (sequence is synthesized)
ggaaggaagctcgcaagagggcagcagctgagcaggacgtgccctccaccctgggacccatctcccagggtcaccagcatgaatgctcggcaggcagctcccaagaccacccgcccccag

SEQ ID NO: 482076 - DNA, 120 bp, Artificial Sequence
  ENSG00000161640_16 (sequence is synthesized)
gtgcagccacctacaccccggggaagggggaagagcaggagctccactatgcctccctcagcttccagggcctgaggctctgggagcctgcggaccaggaggcccccagcaccaccgagt

SEQ ID NO: 482077 - DNA, 120 bp, Artificial Sequence
  ENSG00000161640_17 (sequence is synthesized)
actcggagatcaagatccacacaggacagcccctgaggggcccaggctttgggcttcaattggagagggagatgtcagggatggttccaaagtgaagaggtctccatggcaacaggacac

SEQ ID NO: 482078 - DNA, 120 bp, Artificial Sequence
  ENSG00000161640_18 (sequence is synthesized)
cagcaagtgtgtgggagtcgcactggtgtgacggccagaactggactcagatttcagccccatccccaatgaagagcttgagtttgaagattatactttttttgagacagggtctgactc

SEQ ID NO: 482079 - DNA, 120 bp, Artificial Sequence
  ENSG00000161640_19 (sequence is synthesized)
tgtcctccaggccagagtccagtggtgcaatctcagctcactgtagcctcaacctgccaggttgaagtgagcctcccatttcagcctcccaagtagctgggactacaattgtgagccacc

SEQ ID NO: 482080 - DNA, 85 bp, Artificial Sequence
  ENSG00000161640_20 (sequence is synthesized)
tcagcctcccaagtagctgggactacaattgtgagccaccatgccaggctcattgtccctggctggtctcagactcctgggctca

SEQ ID NO: 482081 - DNA, 120 bp, Artificial Sequence
  ENSG00000161640_21 (sequence is synthesized)
cagacgtgagccaccacagctggctgaagattatactttcaattcagagcgagtttgaagatgacactttgaggcatcgtgtctatggttcattactacagaagcttctctggatgtgta

SEQ ID NO: 482082 - DNA, 120 bp, Artificial Sequence
  ENSG00000161640_22 (sequence is synthesized)
aagcacaggaaaccaggcagaggaggcacagggtgctctccagaacgagaagccagctcctggagttgtttgctgcaactgccattccccgttgatgaccatgctcttccttcagaagag

SEQ ID NO: 482083 - DNA, 120 bp, Artificial Sequence
  ENSG00000161640_23 (sequence is synthesized)
gccattccccgttgatgaccatgctcttccttcagaagagggagagtgagaggaccaagtccaagtggttcccatttgaacatttaaaaaaaaaaaaaaggctgggcatggtggctcacg

SEQ ID NO: 482084 - DNA, 120 bp, Artificial Sequence
  ENSG00000161642_0 (sequence is synthesized)
attgctctggagccagcaggggaagtgtgtacactatgtgcactgagggtgacacttctgagtgtgggggccctggctagggagtgggactggcaggcttgggtggggttcccaagcttt

SEQ ID NO: 482085 - DNA, 120 bp, Artificial Sequence
  ENSG00000161642_1 (sequence is synthesized)
aatcttcctaccccacagaatgttttctctgcccttcaggcagcctgagccgggcagggcccctgcctctgctacggcagcccccgatcatgcagcccccactggacctcaagcagatcc

SEQ ID NO: 482086 - DNA, 120 bp, Artificial Sequence
  ENSG00000161642_2 (sequence is synthesized)
tgcccttcccactcgagccagcccctacccttggcctcttcagcaactacagcaccatggaccctgtgcagaaggctgtgctctcccacacttttgggggacccttgctcaagaccaagc

SEQ ID NO: 482087 - DNA, 120 bp, Artificial Sequence
  ENSG00000161642_3 (sequence is synthesized)
ggcccgtcatttcctgtaatatctgtcaaatccgcttcaattctcagagccaggctgaggcgcactacaaaggtaatcgccacgcccgacgagtcaaaggcattgaggctgccaagacca

SEQ ID NO: 482088 - DNA, 120 bp, Artificial Sequence
  ENSG00000161642_4 (sequence is synthesized)
gaggcagggagcctggcgtccgagaacctggagacccagctcccccaggcagcaccccaacaaatggggatggtgtagcaccccgtccagtttccatggagaatggactggggccagccc

SEQ ID NO: 482089 - DNA, 120 bp, Artificial Sequence
  ENSG00000161642_5 (sequence is synthesized)
caggatccccagagaaacagcctggctccccatcccctcccagcattccggagactggtcagggtgtaaccaagggtgaaggggggactccagccccggcttccttgcctgggggtagca

SEQ ID NO: 482090 - DNA, 120 bp, Artificial Sequence
  ENSG00000161642_6 (sequence is synthesized)
aggaagaggaggagaaagccaagcggctgctctactgtgctctgtgcaaggtggctgtgaactccctgtcccagcttgaggcacataacaaaggtactaagcacaagacaattctggagg

SEQ ID NO: 482091 - DNA, 120 bp, Artificial Sequence
  ENSG00000161642_7 (sequence is synthesized)
cccgaagtgggctcgggcccatcaaagcttaccctcggctggggcctcccaccccgggggaaccagaggctcctgcccaggaccgaactttccactgtgagatctgcaatgtcaaggtca

SEQ ID NO: 482092 - DNA, 120 bp, Artificial Sequence
  ENSG00000161642_8 (sequence is synthesized)
actcggaggtccaactgaaacagcacatctccagccggcggcaccgagacggcgtggccgggaagcccaacccactactgagccgtcacaagaagtctaggggcgccggggagctggcgg

SEQ ID NO: 482093 - DNA, 120 bp, Artificial Sequence
  ENSG00000161642_9 (sequence is synthesized)
gcacgctgactttctccaaggagctgcccaagtccctggcgggcggcctgctccccagccccctggcggtggctgcagtgatggcagcggcagcaggctcgccgctgtccctgcgcccgg

SEQ ID NO: 482094 - DNA, 120 bp, Artificial Sequence
  ENSG00000161642_10 (sequence is synthesized)
cgatcactcaccctctgcttcacccggcccccggacccatccgaactgcgcacggacccatcctcttctccccgtactgacctcaaccctgaacccctcccattcaactccccacctcca

SEQ ID NO: 482095 - DNA, 120 bp, Artificial Sequence
  ENSG00000161642_11 (sequence is synthesized)
gccgggacccaggcgtccgggctcccagcccgcccctcctcccggcactccctaaatgatctctccttccccccccccaccccgagatacggggttccaggaaaggggaggggtagcggg

SEQ ID NO: 482096 - DNA, 120 bp, Artificial Sequence
  ENSG00000161642_12 (sequence is synthesized)
ggaggggggcttcagaagggggggaacaccccagatctcagggaaccccgccccctgcctttccctctcccctagaaaagggggggccgtctcacccccgagcccccttggagacacccc

SEQ ID NO: 482097 - DNA, 120 bp, Artificial Sequence
  ENSG00000161642_13 (sequence is synthesized)
ccctcccaaaagccatgtccatccagcccttccccccaaacctagcacaaaacggggttcacaagccatggtcggggtccgggggggacagaaatggattttcttggcaataagcggact

SEQ ID NO: 482098 - DNA, 120 bp, Artificial Sequence
  ENSG00000161642_14 (sequence is synthesized)
ctgggactccggctccctaccccaaactgaagcgcttccgtgaacacccccgtcctccgtagggggaggggagcaggcgggatcctgggtccctcataagcactttggttttaccgcctg

SEQ ID NO: 482099 - DNA, 120 bp, Artificial Sequence
  ENSG00000161642_15 (sequence is synthesized)
caacctcactgtgcccgccccgcaccatgccctagccccaggtctagccgggcccattgcagggggcagcacttgggggcatctccggcacttgggtgggaccaaggagatgccaccata

SEQ ID NO: 482100 - DNA, 120 bp, Artificial Sequence
  ENSG00000161642_16 (sequence is synthesized)
gacctttccctcgccttcttcctccctagtccgggttccattcttttcaccagcacccatcgcccaaggggtaccgaggggggcaaggggtgtccagtccaagcccacccccgcctcgcc

SEQ ID NO: 482101 - DNA, 120 bp, Artificial Sequence
  ENSG00000161642_17 (sequence is synthesized)
ttccgcaaaactgtgagcaaaaagcaatagaagcctcgcccccgcccttccccttcgcaggattcgccgagtctgtagcctccccgatccaagttcctagacctcatggctgtcccctcc

SEQ ID NO: 482102 - DNA, 120 bp, Artificial Sequence
  ENSG00000161642_18 (sequence is synthesized)
caccagtcacctccactgcacaactcgggcgggggtgtgacacctctcccccacccccgactccgtggtttccgtatcgtcaacccttcagccgccgacccgggaggggtctggcctaca

SEQ ID NO: 482103 - DNA, 120 bp, Artificial Sequence
  ENSG00000161642_19 (sequence is synthesized)
ctggtcttccccttcccatcaactctttctgcttgacaatgtagcaacccaggccccccacccacggtcctcccctttttcctctccctgacaataaagtctgaatttgttctgccctcc

SEQ ID NO: 482104 - DNA, 120 bp, Artificial Sequence
  ENSG00000161642_20 (sequence is synthesized)
gggcagaaccaagggaaggggacgctgtcaggcccaggcccctggggggccagggccaggccactgcctgggggcagcaggcatcagaaactaaaggatgaatcacccacttgactctct

SEQ ID NO: 482105 - DNA, 120 bp, Artificial Sequence
  ENSG00000161642_21 (sequence is synthesized)
tcttcctggggcgataccaagctttaggatcccctgggggaaagcaaaaccagaagaagagggtggccaggggcttgaggctgggagtcctgctggttcagcaggcagcctgcagaaaag

SEQ ID NO: 482106 - DNA, 120 bp, Artificial Sequence
  ENSG00000161642_22 (sequence is synthesized)
ggcagaaccaagggaaggggacgctgtcaggcccaggcccctggggggccagggccaggccactgcctgggggcagcaggcatcagaaactaaaggcagcctgagccgggcagggcccct

SEQ ID NO: 482107 - DNA, 120 bp, Artificial Sequence
  ENSG00000161642_23 (sequence is synthesized)
agagttcatggctccactgcctctagcagaggtatttaaagcgatgagcatggataagcttgaagagttcagcagggtgttgaactgcatcctgcatctgattggcaggatttaaactga

SEQ ID NO: 482108 - DNA, 80 bp, Artificial Sequence
  ENSG00000161642_24 (sequence is synthesized)
gcggccccccagcccgggtccgccaccccgggccatggagccgcggcccccagggtctcgcaggatggaccctgtgcaga

SEQ ID NO: 482109 - DNA, 120 bp, Artificial Sequence
  ENSG00000161647_0 (sequence is synthesized)
ccagcggcggcccaggctctgggcactcgcgcggctcccgttcgcggagcacacatcccggcgcgacgaggttccttcggagagcgagcgggagtcggtgctcggcctcctgcggggagc

SEQ ID NO: 482110 - DNA, 120 bp, Artificial Sequence
  ENSG00000161647_1 (sequence is synthesized)
agcccgaggaatctgcagggagaggtcgggaggtgacaacgccagcatgccagtgctatcggaggactctggtttgcatgaaaccctggccctgctgacctcccagctcagacctgactc

SEQ ID NO: 482111 - DNA, 120 bp, Artificial Sequence
  ENSG00000161647_2 (sequence is synthesized)
caaccacaaggaggagatgggcttcctgagggatgttttcagtgaaaaaagcctcagttacttaatgaagattcatgagaagcttcgctattatgaaaggcaaagtccaaccccagttct

SEQ ID NO: 482112 - DNA, 120 bp, Artificial Sequence
  ENSG00000161647_3 (sequence is synthesized)
gcacagcgctgtggccctcgctgaggacgtgatggaggagttgcaggccgcctccgtgcacagtgatgagagggagctgctccagctgctgtccaccccgcacctgagggctgtgctcat

SEQ ID NO: 482113 - DNA, 120 bp, Artificial Sequence
  ENSG00000161647_4 (sequence is synthesized)
ggtacatgacacggttgcccagaagaattttgaccccgttctcccgcctctgcctgacaatatcgatgaggattttgatgaggaatcggtgaagatcgtccgcttggtgaagaacaagga

SEQ ID NO: 482114 - DNA, 120 bp, Artificial Sequence
  ENSG00000161647_5 (sequence is synthesized)
acccctgggtgccaccatccggcgggacgagcactcaggggctgttgtggtggccaggatcatgcgaggaggcgcagcagacaggagcggcctggtccacgttggagatgagctccgaga

SEQ ID NO: 482115 - DNA, 120 bp, Artificial Sequence
  ENSG00000161647_6 (sequence is synthesized)
agtgaacgggatcgcagtcctgcacaagcggcccgacgagatcagccagattctggcccagtcccagggatccatcaccctaaaaatcatcccagccacccaggaggaagatcgcttaaa

SEQ ID NO: 482116 - DNA, 120 bp, Artificial Sequence
  ENSG00000161647_7 (sequence is synthesized)
ggagagcaaggtgttcatgcgcgccctcttccactacaaccctcgggaggaccgggccatcccttgccaggaggcgggcctgcccttccagcgcaggcaggtcctggaggtggtgagcca

SEQ ID NO: 482117 - DNA, 120 bp, Artificial Sequence
  ENSG00000161647_8 (sequence is synthesized)
ggacgaccccacgtggtggcaggccaagcgagtcggggacaccaaccttcgagccggcctcatcccctccaaggggttccaggagagacgactaagctaccggagagccgcgggcaccct

SEQ ID NO: 482118 - DNA, 120 bp, Artificial Sequence
  ENSG00000161647_9 (sequence is synthesized)
aagcccccctatgatcagccttgtgacaaagagacctgtgactgtgagggctacctcaaagggcactatgtggctggtcttcggaggagcttccggctgggctgtagggagagactgggt

SEQ ID NO: 482119 - DNA, 120 bp, Artificial Sequence
  ENSG00000161647_10 (sequence is synthesized)
ggctcgcaggaaggaaagatgtcctccggagctgagtctccggagctgctgacttacgaagaggtggccaggtaccaacaccagcccggagagcggccccgcctggtggttctgatcggg

SEQ ID NO: 482120 - DNA, 120 bp, Artificial Sequence
  ENSG00000161647_11 (sequence is synthesized)
tctctgggagcccgactgcacgagctgaagcaaaaggtggtggctgagaacccacagcactttggcgtcgctgttccacataccaccaggccccgaaagagccatgagaaggaaggagtg

SEQ ID NO: 482121 - DNA, 120 bp, Artificial Sequence
  ENSG00000161647_12 (sequence is synthesized)
gaatatcactttgtgtctaagcaagcatttgaggccgacttacatcacaacaagttcctggaacatggtgaatataaggaaaatctgtatggaaccagcctggaggccattcaggctgtt

SEQ ID NO: 482122 - DNA, 120 bp, Artificial Sequence
  ENSG00000161647_13 (sequence is synthesized)
atggccaaaaacaaagtttgtttggtggatgtggagccagaagcactgaaacaactgaggacctcagaatttaaaccctatattatatttgtaaagcctgcaattcaggaaaaaagaaaa

SEQ ID NO: 482123 - DNA, 120 bp, Artificial Sequence
  ENSG00000161647_14 (sequence is synthesized)
acgccacctatgtccccagcttgtgaggacacagcagccccatttgatgagcagcagcaagagatggccgcttctgccgccttcatagaccggcattacgggcacctggtagacgccgtg

SEQ ID NO: 482124 - DNA, 120 bp, Artificial Sequence
  ENSG00000161647_15 (sequence is synthesized)
ctggtgaaggaggatctccagggtgcctacagccagctcaaagtggtcttagagaagctgagcaaggacactcactgggtacctgttagttgggtcaggtaactttatcccagaacatcc

SEQ ID NO: 482125 - DNA, 120 bp, Artificial Sequence
  ENSG00000161647_16 (sequence is synthesized)
aagctggacgggaccttgaagatcatctagtccagactccctcattttaccatcaaggaatctcaagcgcagagagggagagaattctccacaaattccatcatcgagaagagtataagt

SEQ ID NO: 482126 - DNA, 120 bp, Artificial Sequence
  ENSG00000161647_17 (sequence is synthesized)
gggaagtcttgtttgttgttggtttttgtctgttgtttttcactgcacctctttggatcatgatttgaaaggggcatatcagaaaacaacacatttcatttattaaagtatcacaggcaa

SEQ ID NO: 482127 - DNA, 120 bp, Artificial Sequence
  ENSG00000161647_18 (sequence is synthesized)
catcagggagtcagttagcagagtggttaagggtataagctgggcatttggcagagagaccgattctggctgtgctctctactggttgtgggtcactgtgcacagtgctgaacctctccg

SEQ ID NO: 482128 - DNA, 120 bp, Artificial Sequence
  ENSG00000161647_19 (sequence is synthesized)
tgcctcagttttctcagctgcaaaaggaaaagcctccttttgcctacatcaaagagttgttgtgtgaatcagtgatacgcctgcctggaaaggcacagtgcctgatacagggacatgcaa

SEQ ID NO: 482129 - DNA, 120 bp, Artificial Sequence
  ENSG00000161647_20 (sequence is synthesized)
aggcaaagtggccttatggtgtgcccctaacagtgtgcccggggtatggggtggcagcaggaggaggggaacttcccttccatctgcctctcttagaccttctcctcagcacagccttcc

SEQ ID NO: 482130 - DNA, 120 bp, Artificial Sequence
  ENSG00000161647_21 (sequence is synthesized)
ttccttcccctggttccctttcacaaggcccctcctgggtcctgggtcctgggtgtgaatcctggctctgcctccttccagctgtgcaaccttggacaagccatcagatcatctgagttt

SEQ ID NO: 482131 - DNA, 120 bp, Artificial Sequence
  ENSG00000161647_22 (sequence is synthesized)
ccatttcctttcctttaacgttgggatagagtttctttctcaaccaatgtgtggttatcattggcatgctaacatctggaaaagggtaaagcccttcagaagtgtaaggggattttaagg

SEQ ID NO: 482132 - DNA, 120 bp, Artificial Sequence
  ENSG00000161647_23 (sequence is synthesized)
tataaaatgcttggctgaaaacctccatggtccattctggggagttgaagtcaaaactgaaattgtgaaaagccccaatcatagcttggtcccctttatcctcaggattcctcccctgac

SEQ ID NO: 482133 - DNA, 120 bp, Artificial Sequence
  ENSG00000161647_24 (sequence is synthesized)
ctgacactctgctaacttctgatggttttgggggcagaaacaggatgagatctgaaaagaggaggcccactgtttaaagccctctctgggctgggctcagtagttcacacctgtaatccc

SEQ ID NO: 482134 - DNA, 120 bp, Artificial Sequence
  ENSG00000161647_25 (sequence is synthesized)
ggggacaccaaccttcgagccggcctcatcccctccaaggggttccaggagaggcgattctgagatgccgaagtctgagaacgaagctctgtctcctcgggaaccccagacccatctcca

SEQ ID NO: 482135 - DNA, 120 bp, Artificial Sequence
  ENSG00000161647_26 (sequence is synthesized)
tcgcgcggctcccgttcgcggagcacacatcccggcgcgacgaggttccttcggagagcgagcgggagtcggtgctcggcctcctgcggggagcagcccgaggcttactgaaagcttcca

SEQ ID NO: 482136 - DNA, 120 bp, Artificial Sequence
  ENSG00000161647_27 (sequence is synthesized)
cgccgctgtttcttcatcaataaaatgggaacattcgcagtcatttctcaggactttgtgcagacaaaaagtttatcatagaaatcaccccacacaatgcttggcacatcgaggacactc

SEQ ID NO: 482137 - DNA, 120 bp, Artificial Sequence
  ENSG00000161647_28 (sequence is synthesized)
gattgtcagggatggcactccagggagggcccggggttagggcgagggaggattcaggctgggaagaagtaggcagtgggctggagggggcatcaggggtcttgtctgagctcatggact

SEQ ID NO: 482138 - DNA, 120 bp, Artificial Sequence
  ENSG00000161647_29 (sequence is synthesized)
ttgtgggtggtagtggttaatttatacagtactgattcgcagaatgtttaagctttttaaacatagtgacgcttagtagtttttttggaagctaacttgttttatccaaggggattttac

SEQ ID NO: 482139 - DNA, 120 bp, Artificial Sequence
  ENSG00000161647_30 (sequence is synthesized)
atgtaactgaagttcccctgtcttcaagcactaaaacgttgatcttaaccttttttttgaagtgcttgcctggtaatagaaaacgggttctctgcctattttaaaatagtgaatatacgt

SEQ ID NO: 482140 - DNA, 120 bp, Artificial Sequence
  ENSG00000161647_31 (sequence is synthesized)
aaattttctctggaaggctgaggcacacttcaccatcaacatgaattactgtactatcctgtactgcagtggtgccttcagggactcgaggaatgtaaggttgcctttcccctttctaaa

SEQ ID NO: 482141 - DNA, 120 bp, Artificial Sequence
  ENSG00000161647_32 (sequence is synthesized)
taccctcagattcctaacatcgagcccatgctttgtttgatttgttctattccatccattgtcccttttgttactgacagttgccttggtcctagccagtccctgccatgagatcatagg

SEQ ID NO: 482142 - DNA, 120 bp, Artificial Sequence
  ENSG00000161647_33 (sequence is synthesized)
ggttcccattgtgctagatcttgggaaaccagatgactctccctgtcaaaactatggctacgtcactgtaaaccatttctgtcaagaataaaagtatgtagacccagagtgtgggcctaa

SEQ ID NO: 482143 - DNA, 120 bp, Artificial Sequence
  ENSG00000161649_0 (sequence is synthesized)
acagttcccagcgtctgctcccacggtgtccagcgcccagaatgcggcttctggtcctgctatggggttgcctgctgctcccaggttatgaagccctggagggcccagaggaaatcagcg

SEQ ID NO: 482144 - DNA, 120 bp, Artificial Sequence
  ENSG00000161649_1 (sequence is synthesized)
ggttcgaaggggacactgtgtccctgcagtgcacctacagggaagagctgagggaccaccggaagtactggtgcaggaagggtgggatcctcttctctcgctgctctggcaccatctatg

SEQ ID NO: 482145 - DNA, 120 bp, Artificial Sequence
  ENSG00000161649_2 (sequence is synthesized)
cagaagaagaaggccaggagacaatgaagggcagggtgtccatccgtgacagccgccaggagctctcgctcattgtgaccctgtggaacctcaccctgcaagacgctggggagtactggt

SEQ ID NO: 482146 - DNA, 120 bp, Artificial Sequence
  ENSG00000161649_3 (sequence is synthesized)
gtggggtcgaaaaacggggccccgatgagtctttactgatctctctgttcgtctttccaggaccctgctgtcctccctccccttctcccaccttccagcctctggctacaacacgcctgc

SEQ ID NO: 482147 - DNA, 120 bp, Artificial Sequence
  ENSG00000161649_4 (sequence is synthesized)
agcccaaggcaaaagctcagcaaacccagcccccaggattgacttctcctgggctctacccggcagccaccacagccaagcaggggaagacaggggctgaggcccctccattgccaggga

SEQ ID NO: 482148 - DNA, 120 bp, Artificial Sequence
  ENSG00000161649_5 (sequence is synthesized)
cttcccagtacgggcacgaaaggacttctcagtacacaggaacctctcctcacccagcgacctctcctcctgcagggagctcccgcccccccatgcagctggactccacctcagcagagg

SEQ ID NO: 482149 - DNA, 120 bp, Artificial Sequence
  ENSG00000161649_6 (sequence is synthesized)
acaccagtccagctctcagcagtggcagctctaagcccagggtgtccatcccgatggtccgcatactggccccagtcctggtgctgctgagccttctgtcagccgcaggcctgatcgcct

SEQ ID NO: 482150 - DNA, 120 bp, Artificial Sequence
  ENSG00000161649_7 (sequence is synthesized)
tctgcagccacctgctcctgtggagaaaggaagctcaacaggccacggagacacagaggaacgagaagttctgcctctcacgcttgactgcggaggaaaaggaagccccttcccaggccc

SEQ ID NO: 482151 - DNA, 120 bp, Artificial Sequence
  ENSG00000161649_8 (sequence is synthesized)
ctgagggggacgtgatctcgatgcctcccctccacacatctgaggaggagctgggcttctcgaagtttgtctcagcgtagggcaggaggccctcctggccaggccagcagtgaagcagta

SEQ ID NO: 482152 - DNA, 120 bp, Artificial Sequence
  ENSG00000161649_9 (sequence is synthesized)
tggctggctggatcagcaccgattcccgaaagctttccacctcagcctcagagtccagctgcccggactccagggctctccccaccctccccaggctctcctcttgcatgttccagcctg

SEQ ID NO: 482153 - DNA, 120 bp, Artificial Sequence
  ENSG00000161649_10 (sequence is synthesized)
acctagaagcgtttgtcagccctggagcccagagcggtggccttgctcttccggctggagactgggacatccctgataggttcacatccctgggcagagtaccaggctgctgaccctcag

SEQ ID NO: 482154 - DNA, 120 bp, Artificial Sequence
  ENSG00000161649_11 (sequence is synthesized)
gacaaggctcagtggatctggtctgagtttcaatctgccaggaactcctgggcctcatgcccagtgtcggaccctgccttcctcccactccagaccccaccttgtcttccctccctggcg

SEQ ID NO: 482155 - DNA, 120 bp, Artificial Sequence
  ENSG00000161649_12 (sequence is synthesized)
tcctcagacttagtcccacggtctcctgcatcagctggtgatgaagaggagcatgctggggtgagactgggattctggcttctctttgaaccacctgcatcccagcccttcaggaagcct

SEQ ID NO: 482156 - DNA, 120 bp, Artificial Sequence
  ENSG00000161649_13 (sequence is synthesized)
gtgaaaaacgtgattcctgggccccaccaagacccaccaaaaccatctctggggcttggtgcaggactctgaatttctaacaatgcccagtgactgtcgcacttgagtttgagggccagt

SEQ ID NO: 482157 - DNA, 120 bp, Artificial Sequence
  ENSG00000161649_14 (sequence is synthesized)
gggcctgatgaacgctcagacccctccagcttagagtctgcatttgggctgtgacgtctcccacctgccccaataagatctgctctgtctgcgacaccaagatccagctggggactcccc

SEQ ID NO: 482158 - DNA, 120 bp, Artificial Sequence
  ENSG00000161649_15 (sequence is synthesized)
tgaggcctgcctaagtccaggccttggtcaggtcaggtgcacattgcagggataagcccaggaccggcagagagtggttgcctttccatttgccctccctggccatgccttcttgccttt

SEQ ID NO: 482159 - DNA, 120 bp, Artificial Sequence
  ENSG00000161649_16 (sequence is synthesized)
ggaaaaatgatgaagaaaaccttggctccttccttgtctggaaagggttacttgcctatgggttctggtggctagagagaaaagtagaaaaccagagtgcacgtaggtgtctaacacaga

SEQ ID NO: 482160 - DNA, 120 bp, Artificial Sequence
  ENSG00000161649_17 (sequence is synthesized)
ggagagtaggaacagggcggatacctgaaggtgactccgagtccagccccctggagaaggggtcgggggtgggggtaaagtagcacaactactattttttttctttttccattattattg

SEQ ID NO: 482161 - DNA, 85 bp, Artificial Sequence
  ENSG00000161649_18 (sequence is synthesized)
tagcacaactactattttttttctttttccattattattgttttttaagacagaatctcgtgcaaactccgcctcctgggttcaa

SEQ ID NO: 482162 - DNA, 120 bp, Artificial Sequence
  ENSG00000161649_19 (sequence is synthesized)
tacaggcatgagccactgtgtctggccctatttcctttaaaaagtgaaattaagagttgttcagtatgcaaaacttggaaagatggaggagaaaaagaaaaggaagaaaaaaatgtcacc

SEQ ID NO: 482163 - DNA, 120 bp, Artificial Sequence
  ENSG00000161649_20 (sequence is synthesized)
aaaaatgtcacccatagtctcaccagagactatcattatttcgttttgttgtacttccttccactcttttcttcttcacataatttgccggtgttctttttacagagcaattatcttgta

SEQ ID NO: 482164 - DNA, 120 bp, Artificial Sequence
  ENSG00000161649_21 (sequence is synthesized)
tatacaactttgtatcctgccttttccaccttatcgttccatcactttattccagcacttctctgtgttttacagacctttttataaataaaatgttcatcagctgcatattccatccta

SEQ ID NO: 482165 - DNA, 120 bp, Artificial Sequence
  ENSG00000161649_22 (sequence is synthesized)
tttctctcagtttgaagcaaatcgcctttcagaacgcccaggggtcagggagctgttagagatgcactctccagggccccagacccagctgaaccctccaggggtggggtccagggactc

SEQ ID NO: 482166 - DNA, 120 bp, Artificial Sequence
  ENSG00000161649_23 (sequence is synthesized)
tggcagtgctacaaactctagtgtgcttttacaaaagatgagactgaggcccagagagggtaaaggtcttgcccatggtcacacagcaggtggtggcccaaacagagaacaggacccaga

SEQ ID NO: 482167 - DNA, 120 bp, Artificial Sequence
  ENSG00000161649_24 (sequence is synthesized)
agaggaacgagaagttctgcctctcacgcttgaactccctgatgttttctctgagcctgccttggctctgagaccaaggtggtgtggctgctctgggacccaggctgagggtggtgctct

SEQ ID NO: 482168 - DNA, 120 bp, Artificial Sequence
  ENSG00000161649_25 (sequence is synthesized)
ggggaccaggggcaagagaataagggtccctgtgcccattgtctggagctgggaacctgccccaaggctactgctgcaagaagagactgtgccctccgaggccagcactccaacggaggg

SEQ ID NO: 482169 - DNA, 120 bp, Artificial Sequence
  ENSG00000161649_26 (sequence is synthesized)
cattgccttctttcctggcgccagtgaggacaaaagactcaggcctggtcaccccaaggagggtctggggtggaaatgggactttgggctgtggcttaggaagcagctgttgttgtctca

SEQ ID NO: 482170 - DNA, 120 bp, Artificial Sequence
  ENSG00000161649_27 (sequence is synthesized)
agctgcagagggaagagggaggggtggtggggcataatcctggtaccaacattatgggcactgagtcctcagggagatcatgcaggtcaagcaccgagcaaggcttggggcacagaagga

SEQ ID NO: 482171 - DNA, 120 bp, Artificial Sequence
  ENSG00000161649_28 (sequence is synthesized)
gccgcctgagtcttggccattgtctcactcttgctgcccgaggtcacaccagtagtagatgtcagagcaggaccggacccagatctgtccagggctgggctcggcgcctttcctttctgc

SEQ ID NO: 482172 - DNA, 120 bp, Artificial Sequence
  ENSG00000161649_29 (sequence is synthesized)
atttccataggctgggtacaagatagacatatcaggggataaagaagactcctcgcctggtgtcagagatattcctgaggcctcccgaggctgggccaaccattgctgcattccagaccc

SEQ ID NO: 482173 - DNA, 120 bp, Artificial Sequence
  ENSG00000161649_30 (sequence is synthesized)
agcccacagcatcaccctggacatgctggcctcgccctgcttgtgccctcaactctcccctcctggcctccacctccccagatattgaagtccagccacaggtgctagagtgcctgggaa

SEQ ID NO: 482174 - DNA, 120 bp, Artificial Sequence
  ENSG00000161649_31 (sequence is synthesized)
ccagcctctgggtaggatgcctgaaggagggatcgttaaatgcagggacactagggggccggggctggagctatggggcctgggtaggggataaagcacctctctgggagcccagaaccc

SEQ ID NO: 482175 - DNA, 120 bp, Artificial Sequence
  ENSG00000161649_32 (sequence is synthesized)
caagtggacctgctgagctaaggagaaagaagccagagagggcccaggggagtgggagccttggtctgctggccagtgtgggcgaggtacatctttgtatccccatttcacggatgaggg

SEQ ID NO: 482176 - DNA, 120 bp, Artificial Sequence
  ENSG00000161649_33 (sequence is synthesized)
actgaggctccaagagactaagtgatttgcccaagatctcacagcaggaagtgatggaactgggattcaaacacaagtcgtttccagctttgatgtctgctttattcctctcctagcccc

SEQ ID NO: 482177 - DNA, 120 bp, Artificial Sequence
  ENSG00000161649_34 (sequence is synthesized)
atagctgggacctatcccaatcccaggcccatccctaccaccatagcccctattttttttttattcctttatccatggatctttaatttgaggaaataaagttaaacttgccaaatagca

SEQ ID NO: 482178 - DNA, 120 bp, Artificial Sequence
  ENSG00000161649_35 (sequence is synthesized)
cctgatcgccttctgcagccacctgctcctgtggagaaaggaagggaattcattgccagctccttgtgtgggaaccaactgccaggggcagtgcaggaccaagcacttgaatttgagcag

SEQ ID NO: 482179 - DNA, 120 bp, Artificial Sequence
  ENSG00000161649_36 (sequence is synthesized)
acattgtaaccccactcctgccactgggtctctagagctgctcagccccttccataggctggggctcaaatcccagctctgccactttttagctgtgtgacgtcaggcaagtcacctaac

SEQ ID NO: 482180 - DNA, 120 bp, Artificial Sequence
  ENSG00000161652_0 (sequence is synthesized)
catgcctctggctttgacccttctgctgctctcgggcttgggcgcccccggaggctggggctgcctgcagtgcgaccccttggtgctggaggccctgggtcacctgcgctccgccctcat

SEQ ID NO: 482181 - DNA, 120 bp, Artificial Sequence
  ENSG00000161652_1 (sequence is synthesized)
ccccagtcgcttccagttggagcagctgcaggcgcgcgccggggccgtgctgatgggcatggaggggcctttcttccgggactacgcgctgaacgtgtttgtggggaaagtggagacaaa

SEQ ID NO: 482182 - DNA, 120 bp, Artificial Sequence
  ENSG00000161652_2 (sequence is synthesized)
tcaactggaccttgtggcgtcctttgtcaagaaccaaacgcagcacttaatgggtaactctctgaaagatgagcctctgctggaagagctggtgaccctcagggcgaatgtgatcaagga

SEQ ID NO: 482183 - DNA, 120 bp, Artificial Sequence
  ENSG00000161652_3 (sequence is synthesized)
aagttttaatttcatatgaattaaaagcctgcaaccccaaactttgccgcttgctaaaagaagaggtgttggactgtttacattgccagaggatcactcccaagtgtatccacaaaaagt

SEQ ID NO: 482184 - DNA, 120 bp, Artificial Sequence
  ENSG00000161652_4 (sequence is synthesized)
actgctttgtcgaccggcaaccccgcgtggccctgcagtaccagatggacagcaaatacccgaggaaccaggcgctgttgggcatcctcatttctgtgtctctggctgtctttgtcttcg

SEQ ID NO: 482185 - DNA, 120 bp, Artificial Sequence
  ENSG00000161652_5 (sequence is synthesized)
tggtcatcgtggtctcggcttgtacatacagacaaaaccgaaaactcctgctgcagtaggacggtggtttgggggtaaggagaaaggaaaataaatttaataaaattggtgacaaatcca

SEQ ID NO: 482186 - DNA, 89 bp, Artificial Sequence
  ENSG00000161652_6 (sequence is synthesized)
atttctgtgtctctggctgtctttgtcttcgtggtcatcgtggtctcatggagtctcgctctgtgcgaccttggctcactgcaaccgct

SEQ ID NO: 482187 - DNA, 120 bp, Artificial Sequence
  ENSG00000161652_7 (sequence is synthesized)
agtagctgggactacagggcttgtacatacagacaaaaccgaaaactcctgctgcagtaggacggtggtttgggggtaaggagaaaggaaaataaatttaataaaattggtgacaaatcc

SEQ ID NO: 482188 - DNA, 66 bp, Artificial Sequence
  ENSG00000161652_8 (sequence is synthesized)
cagcacttaatgggtaactctctgaaacaggtggatcgcctgaggtcaggaattcaagactagcct

SEQ ID NO: 482189 - DNA, 71 bp, Artificial Sequence
  ENSG00000161652_9 (sequence is synthesized)
gaggttgcagtgagcattgaaaaaaaaaaaaaaaattctagtagtcacatttttaaaaagcacatctcaat

SEQ ID NO: 482190 - DNA, 120 bp, Artificial Sequence
  ENSG00000161652_10 (sequence is synthesized)
aaaattctagtagtcacatttttaaaaagcacatctcaattcagactagcctatttcaagtgttcagtagccatgtgtggctagtggctaccacactggacagtgcacgtctaggtaata

SEQ ID NO: 482191 - DNA, 120 bp, Artificial Sequence
  ENSG00000161652_11 (sequence is synthesized)
taccacactggacagtgcacgtctaggtaatatataaagccatatggattgaaatcatgaaggagtgagtgtagacacaaaaaagaagaggtcgggtgcggtggctcacgtctgtaatcc

SEQ ID NO: 482192 - DNA, 120 bp, Artificial Sequence
  ENSG00000161653_0 (sequence is synthesized)
agacagactgccactcttggggggcaagagttggttgtcgtcatggcgacggcgctgatggctgtggttctgcgggcagctgctgtagccccgaggctgagaggccggggaggcactggg

SEQ ID NO: 482193 - DNA, 80 bp, Artificial Sequence
  ENSG00000161653_1 (sequence is synthesized)
accagcccggggcgccggctcagcaccgcctggtcgcagccccagcccccgcccgaggagtacgcgggcgcggacgacgt

SEQ ID NO: 482194 - DNA, 120 bp, Artificial Sequence
  ENSG00000161653_2 (sequence is synthesized)
gacgacgtctcccagtcgcccgtcgccgaggagccgtcgtgggtgccgagtcccaggcccccggtgccccacgagtccccagagcctccttcgggccgctcgctggtgcagcgggacatc

SEQ ID NO: 482195 - DNA, 120 bp, Artificial Sequence
  ENSG00000161653_3 (sequence is synthesized)
caggccttcctgaaccagtgcggggccagccctggggaggcgcgccactggctcacgcagttccagacctgccatcactccgcggacaagcccttcgccgtcatcgaggtggacgaggag

SEQ ID NO: 482196 - DNA, 120 bp, Artificial Sequence
  ENSG00000161653_4 (sequence is synthesized)
gtgctcaagtgccagcagggcgtatccagtctggcctttgccctggccttcttgcagcgcatggacatgaagccgctggtggtcctggggctgccggcccctacggctccctcgggctgt

SEQ ID NO: 482197 - DNA, 120 bp, Artificial Sequence
  ENSG00000161653_5 (sequence is synthesized)
ctttccttctgggaggccaaggcgcagctggccaagagctgcaaggtgctggtagacgcgcttcgacacaacgccgccgctgctgtgccattttttggcggcgggtctgtgctacgcgct

SEQ ID NO: 482198 - DNA, 120 bp, Artificial Sequence
  ENSG00000161653_6 (sequence is synthesized)
gccgagccggctccccatgccagctacggcggcatcgtctcggtggagacagacctgctgcagtggtgcctggagtcgggcagcatccccatcctgtgccccatcggggagacggccgcg

SEQ ID NO: 482199 - DNA, 120 bp, Artificial Sequence
  ENSG00000161653_7 (sequence is synthesized)
cgccgctccgtgcttctcgactccctggaggtgaccgcgtcgctggccaaggcgctgcggcccaccaaaatcatcttcctcaataacacaggcggcctgcgcgacagcagtcataaggtc

SEQ ID NO: 482200 - DNA, 120 bp, Artificial Sequence
  ENSG00000161653_8 (sequence is synthesized)
gcagatgcggctcatcgtggacgtgctcagccgcctgccccaccactcctcggccgtcatcaccgccgctagcacgctgctcactgagctctttagcaacaaggggtccgggaccctgtt

SEQ ID NO: 482201 - DNA, 120 bp, Artificial Sequence
  ENSG00000161653_9 (sequence is synthesized)
caagaacgccgagcgaatgctacgggtgcgcagcctggacaagctggaccagggccgtctagtggacctggtcaacgccagcttcggcaagaagctcagggacgactacctggcctcgct

SEQ ID NO: 482202 - DNA, 120 bp, Artificial Sequence
  ENSG00000161653_10 (sequence is synthesized)
gcgcccgcggctgcactccatctacgtctccgaggggtacaacgccgccgccattctgaccatggagcccgtcctggggggcaccccgtacctggacaaatttgtggtgagctccagccg

SEQ ID NO: 482203 - DNA, 120 bp, Artificial Sequence
  ENSG00000161653_11 (sequence is synthesized)
ccagggccaaggctccggccagatgctgtgggagtgcctgcggcgggaccttcagacacttttctggcgctcccgggtcaccaaccccatcaatccctggtacttcaaacacagtgatgg

SEQ ID NO: 482204 - DNA, 120 bp, Artificial Sequence
  ENSG00000161653_12 (sequence is synthesized)
cagcttctccaacaagcagtggatcttcttctggtttggcctggctgatatccgggactcctatgagttggtcaaccacgccaagggactgccagactcctttcacaagccagcttctga

SEQ ID NO: 482205 - DNA, 120 bp, Artificial Sequence
  ENSG00000161653_13 (sequence is synthesized)
cccaggcagctgaccctcaccatggacactacaggccctggaatggccagggtggaccaaaagccatgccagctgggcatgaccccaggcagccagccacaggctgaagggggcttgttg

SEQ ID NO: 482206 - DNA, 120 bp, Artificial Sequence
  ENSG00000161653_14 (sequence is synthesized)
gctgagtgatctgcagaggagaaagcagccccagctctgcccagaggaggcgctgaagtgggacaagcacaggaaagaaggggaccagtctaggaccccaactcgactcactctaaagct

SEQ ID NO: 482207 - DNA, 120 bp, Artificial Sequence
  ENSG00000161653_15 (sequence is synthesized)
acaaccaaatggccttcgattttcaacctggggattaggggaggggagggtgccttccagggctctactcaggactaaccctaagggtgagctagtttctgtgcctctgtgctatgtttt

SEQ ID NO: 482208 - DNA, 120 bp, Artificial Sequence
  ENSG00000161653_16 (sequence is synthesized)
gaggctcccttacccaaaataatacccctgcctgcgtgatattctaccattcattttaattcctttgggtcttgcagtttttcaggaggccttgattaaaatgcaaatacttgtctgaga

SEQ ID NO: 482209 - DNA, 120 bp, Artificial Sequence
  ENSG00000161653_17 (sequence is synthesized)
tagcaacaagggtgagggcggtgggcgggccggggactgggtcccgggagtgagtactggccggggctgggtgtctgcggtcaggaggagcggcttctcctcctgtccaggagccgtagg

SEQ ID NO: 482210 - DNA, 120 bp, Artificial Sequence
  ENSG00000161653_18 (sequence is synthesized)
gggaggcggggggtgtcacagcaatggctcctgctgctgccgaaacccgggggaggtgagagaggaggagacccagtgtactggaagggaactccgaaggaattaaaggaatgggcggga

SEQ ID NO: 482211 - DNA, 120 bp, Artificial Sequence
  ENSG00000161653_19 (sequence is synthesized)
ctaggggggagaaggaggggccccccggtgggcggggccaggggcgggaccataagggaggtgttcgaccgggagagatgggcggggcttaggtgggtgggccgggtcagcggcgggaga

SEQ ID NO: 482212 - DNA, 120 bp, Artificial Sequence
  ENSG00000161653_20 (sequence is synthesized)
cagacttcaaggagcgaggcaagactaacggaagtgggtggggctccaggcgacaggaggaacttggggcacaatctctgcctggggaaagcatctccttgaatgaaaatcacagacaaa

SEQ ID NO: 482213 - DNA, 120 bp, Artificial Sequence
  ENSG00000161653_21 (sequence is synthesized)
tctatgcagaccactgaaatcatttcactgtggaggtctcccaaagacggaaattgtcccaccagcgcctgtcctacctgcagtccccaccaggctgcgcaaacggccctccagccagac

SEQ ID NO: 482214 - DNA, 80 bp, Artificial Sequence
  ENSG00000161654_0 (sequence is synthesized)
aggatcccgccccaaccagcgccaggccacgccccggcgtgtgacgcaagcacgctccgtgcgcgccgtcgcgtcgcggc

SEQ ID NO: 482215 - DNA, 120 bp, Artificial Sequence
  ENSG00000161654_1 (sequence is synthesized)
cgccgccggccgcggctgcactcccaagatggcggctcctccgggcgagtacttcagcgttgggagccaggtgtcgtgccggacgtgccaggagcagcggctgcagggcgaggtggtagc

SEQ ID NO: 482216 - DNA, 120 bp, Artificial Sequence
  ENSG00000161654_2 (sequence is synthesized)
ctttgactaccaatccaaaatgctggctttaaaatgtccctcttccagtggaaagcccaaccatgcagacatcttgctcataaacttacagtatgtttcagaagtggaaataattaatga

SEQ ID NO: 482217 - DNA, 120 bp, Artificial Sequence
  ENSG00000161654_3 (sequence is synthesized)
ccgaacagaaacccctcctcccctagcttcactcaatgttagtaagcttgccagcaaagcacggacagagaaggaggagaagctgagccaggcctatgcaatcagtgctggtgtctctct

SEQ ID NO: 482218 - DNA, 120 bp, Artificial Sequence
  ENSG00000161654_4 (sequence is synthesized)
agagggccagcagctcttccagaccattcacaagaccattaaagactgtaaatggcaagaaaaaaacatcgtagtcatggaagaagttgttattacacccccatatcaagtggaaaactg

SEQ ID NO: 482219 - DNA, 120 bp, Artificial Sequence
  ENSG00000161654_5 (sequence is synthesized)
taaaggcaaagaggggagtgcactgagccatgtacgcaaaatagttgaaaaacattttagagacgtggaaagccaaaagatactgcaacgttcacaagcccagcaaccacagaaggaggc

SEQ ID NO: 482220 - DNA, 120 bp, Artificial Sequence
  ENSG00000161654_6 (sequence is synthesized)
tgccctgtcatcctgagtccgtacacatggaggactcttccagcatccagccaaggaggcgctggtggtggcttcagcggaggcaggccgggggagggaagggatcctatatgtcctgtt

SEQ ID NO: 482221 - DNA, 120 bp, Artificial Sequence
  ENSG00000161654_7 (sequence is synthesized)
ggctcttaacaaagggtcagcatttccaaatcttagacttgaacaaacaaaacacccaacaaaaaagaacaagagaataatttaaaagttgaatcattacttgactaacagacttcggtc

SEQ ID NO: 482222 - DNA, 120 bp, Artificial Sequence
  ENSG00000161654_8 (sequence is synthesized)
caccatgtccttttcacagccctcttctggaacagtcaccttgttaattttatttttgaaaattattttcccactctgccctttacttctgactttcctttcctagtttgttcctgccat

SEQ ID NO: 482223 - DNA, 120 bp, Artificial Sequence
  ENSG00000161654_9 (sequence is synthesized)
ttctgaatgattgaaagaaacttttacatcttttcttccaaaataaaagtaacaagctgactgtgattcttaaattgagaccagagcagcaaacgtctcactttaaatttttgttttctt

SEQ ID NO: 482224 - DNA, 120 bp, Artificial Sequence
  ENSG00000161654_10 (sequence is synthesized)
ctttttttttttttttttgcacagggcatggcttgaattagttttatttttcttaactttaaatatatatatgaaaatatatattaaaatgttctctaaatattttctgcttcttgcagg

SEQ ID NO: 482225 - DNA, 120 bp, Artificial Sequence
  ENSG00000161654_11 (sequence is synthesized)
tattttctgcttcttgcaggtctctttttactagatcatggctgttcttcccacctcatccctctgaaaataaaaatgtattgccctccccaccatccatcatagccaggccactaactt

SEQ ID NO: 482226 - DNA, 120 bp, Artificial Sequence
  ENSG00000161654_12 (sequence is synthesized)
gacttggtgcaagagattcttgctgcgaactttgtagagccagtgtgcagatagaatttggctttgagggttcctgatggctttttagtctttaactgtgtgtgtaccagtctcacattt

SEQ ID NO: 482227 - DNA, 120 bp, Artificial Sequence
  ENSG00000161654_13 (sequence is synthesized)
ggcccaaacctcaggattctccctctgcctgtcttacttcatggtactagaagaccttcctcgccactctctccacatgagagagtcagctgccctttctcctgtgcctctgcaggaaga

SEQ ID NO: 482228 - DNA, 120 bp, Artificial Sequence
  ENSG00000161654_14 (sequence is synthesized)
actctcttgcatggcacatctcagctcctcattgagggatagttttctttgataagaaacctggagtccatttactctgacctctctttaaatctatatccagagccactagcccaggaa

SEQ ID NO: 482229 - DNA, 120 bp, Artificial Sequence
  ENSG00000161654_15 (sequence is synthesized)
aaacttgggtgacccgtaatttctcttctcctgctgtccttttgctcttacgccccaccccaactccccttaaattttacaggcttatgacagtttgtatgtgctcagccaatgagcaga

SEQ ID NO: 482230 - DNA, 120 bp, Artificial Sequence
  ENSG00000161654_16 (sequence is synthesized)
aaacctggaaagaatttctggactttagcccaccagtttgtctggttgactaacctgctgagagctaaaattggcacccattgccccgtgccttcaggcagtctcctggggcagagtatg

SEQ ID NO: 482231 - DNA, 120 bp, Artificial Sequence
  ENSG00000161654_17 (sequence is synthesized)
ccaccatccgaatatcaggcactgagtgggatgtgggtgatgctcacatgactggctagagctttgggggtggggtgggggttaactactatttttttggccatgatctctttccccttc

SEQ ID NO: 482232 - DNA, 120 bp, Artificial Sequence
  ENSG00000161654_18 (sequence is synthesized)
cttttttttttaattaaataaatggatcaaattaaataattcaagccctgccttcaaaatgaaattttttttttagtattatttagcaaaaacaataaaacccaaatttttttaaccatc

SEQ ID NO: 482233 - DNA, 120 bp, Artificial Sequence
  ENSG00000161654_19 (sequence is synthesized)
agcagtaaatagcaccgtccttggaaataggcagactgtttttgctagttgtggaaccgtggacaagtttagtctaaaacttagtttatgtaaaaggaggacattgattcctacctcaaa

SEQ ID NO: 482234 - DNA, 120 bp, Artificial Sequence
  ENSG00000161654_20 (sequence is synthesized)
ctcctttcttcagcttaggtcctgactgttggcaagaatgaagatgaatcctattctgagtctctttcctctcttccaccctagcttgccagcaaagcacggacagagaaggaggagaag

SEQ ID NO: 482235 - DNA, 120 bp, Artificial Sequence
  ENSG00000161664_0 (sequence is synthesized)
gtggctcctcagagcaagggaggtagtcgggtcgagggaacctggctctgcccaggtgccactgcccaaacccctgggccccatccatggcaagagagaccttccccttcacctcctcca

SEQ ID NO: 482236 - DNA, 120 bp, Artificial Sequence
  ENSG00000161664_1 (sequence is synthesized)
tgctgcgctctctccgcctgcagcaggagtggctggaatgggaggaccggcggcgggcggctgcccagcagtgccggagccgcaggtgcccgtcaagtccccgggcccgactcactaggc

SEQ ID NO: 482237 - DNA, 120 bp, Artificial Sequence
  ENSG00000161664_2 (sequence is synthesized)
ctcaccgttcctgccgagacccagctgtccaccaagccctcttctccggcaacctgcagcaggtccaagccctgttccaagatgaagaggccgccaacatgattgtggagactgtgagca

SEQ ID NO: 482238 - DNA, 120 bp, Artificial Sequence
  ENSG00000161664_3 (sequence is synthesized)
accagctggcctggtcggctgaacaggggttctgggtgctgacccccaagaccaagcagacggcacccctcgccatcgctacagcccgaggctacacagactgtgctcgacacctgatcc

SEQ ID NO: 482239 - DNA, 120 bp, Artificial Sequence
  ENSG00000161664_4 (sequence is synthesized)
ggcagggagctgagctggatgcccgtgtcgggggtcgcgctgccttgcatgaggcctgtgcccgagcccagtttgactgtgtgcggctgctgctgaccttcggagccaaggctaatgtgc

SEQ ID NO: 482240 - DNA, 120 bp, Artificial Sequence
  ENSG00000161664_5 (sequence is synthesized)
tgactgaggagggcacgactcctttgcacctctgcacgatccccgagtccttgcagtgcgccaagttgctgctggaagcaggagcgacggtgaacctggcagcaggcgagagccaggaga

SEQ ID NO: 482241 - DNA, 120 bp, Artificial Sequence
  ENSG00000161664_6 (sequence is synthesized)
cgcccctgcacgtggcggcggcgcgcggcctggagcaacatgtggctctgtacctggagcatggcgccgacgtgggcctgcgcaccagccagggcgagactgcgctgaacacggcgtgcg

SEQ ID NO: 482242 - DNA, 120 bp, Artificial Sequence
  ENSG00000161664_7 (sequence is synthesized)
ctggggccgagggcccaggtagctgcaggcgacaccaggctgcggcgcgccggctcctggaggctggagctgatgcccgggcggccgggcgcaagcgccacacgccgctgcacaacgctt

SEQ ID NO: 482243 - DNA, 120 bp, Artificial Sequence
  ENSG00000161664_8 (sequence is synthesized)
aggccgtccaggactcccccaactgggagcctgaagtccttttcgccgcactgctggactacggggcgcagccagtgcgccctgagatgctgaaacactgcgccaacttccctcgggccc

SEQ ID NO: 482244 - DNA, 120 bp, Artificial Sequence
  ENSG00000161664_9 (sequence is synthesized)
tggaagtcctgcttaatgcctatccttgtgtcccatcctgtgagacctgggtggaggcggtgctcccagagctgtggaaggagcacgaagccttctacagctcggccctgtgcatggtga

SEQ ID NO: 482245 - DNA, 120 bp, Artificial Sequence
  ENSG00000161664_10 (sequence is synthesized)
accagccaaggcagctgcagcacctggcccgactagctgtgcgcgctcggttgggaagccgctgccggcagggtgccacccggctgccactgcccccgctcctcagggactacctgctgc

SEQ ID NO: 482246 - DNA, 120 bp, Artificial Sequence
  ENSG00000161664_11 (sequence is synthesized)
tgcgtgtggaggggtgcatccagtgaaccccatgtcaggctgtcccatggtgtgttctgcccctcccacctgtccccgcctccaactgcggaggaccagttcctggccctcttttctttt

SEQ ID NO: 482247 - DNA, 87 bp, Artificial Sequence
  ENSG00000161664_12 (sequence is synthesized)
taccacctaggttcaagcgattcttgtgccccaaacttccgagtagctgggactacaggcatgagtcaccacacctggctgattttg

SEQ ID NO: 482248 - DNA, 66 bp, Artificial Sequence
  ENSG00000161664_13 (sequence is synthesized)
taggttcaagcgattcttgtgccccaaacttccgagtagctgggactacaggcatgagtcaccaca

SEQ ID NO: 482249 - DNA, 120 bp, Artificial Sequence
  ENSG00000161664_14 (sequence is synthesized)
ttacaggcatgagccactgcgcctggttgcctgcccctcttttctgtactccacgtgctgtcctggtccacctcactcctccatgggcttcttgagacacctgctgacctctagccggac

SEQ ID NO: 482250 - DNA, 120 bp, Artificial Sequence
  ENSG00000161664_15 (sequence is synthesized)
tgacctctagccggacctgagcttcagaccctctctccagcaggaagggctgcagactcggcctgttcccagactcggccttcacctcccttctcctcctgtgtttaagtggatggcccc

SEQ ID NO: 482251 - DNA, 120 bp, Artificial Sequence
  ENSG00000161664_16 (sequence is synthesized)
tctatccatccaggtcccatgccaagaaccagtgattctagtggcccaccacctccctctcctgccacccttatacctgttcagcctcctaaagagggacaaactctgtctctgcgtgca

SEQ ID NO: 482252 - DNA, 120 bp, Artificial Sequence
  ENSG00000161671_0 (sequence is synthesized)
ggctcttggctcacagccgtcccttcgctggtgggaagaagccgagatggcggcagccagcgctggggcaacccggctgctcctgctcttgctgatggcggtagcagcgcccagtcgagc

SEQ ID NO: 482253 - DNA, 120 bp, Artificial Sequence
  ENSG00000161671_1 (sequence is synthesized)
ccggggcagcggctgccgggccgggactggtgcgcgaggggctggggcggaaggtcgagagggcgaggcctgtggcacggtggggctgctgctggagcactcatttgagatcgatgacag

SEQ ID NO: 482254 - DNA, 120 bp, Artificial Sequence
  ENSG00000161671_2 (sequence is synthesized)
tgccaacttccggaagcggggctcactgctctggaaccagcaggatggtaccttgtccctgtcacagcggcagctcagcgaggaggagcggggccgactccgggatgtggcagccctgaa

SEQ ID NO: 482255 - DNA, 120 bp, Artificial Sequence
  ENSG00000161671_3 (sequence is synthesized)
tggcctgtaccgggtccggatcccaaggcgacccggggccctggatggcctggaagctggtggctatgtctcctcctttgtccctgcgtgctccctggtggagtcgcacctgtcggacca

SEQ ID NO: 482256 - DNA, 120 bp, Artificial Sequence
  ENSG00000161671_4 (sequence is synthesized)
gctgaccctgcacgtggatgtggccggcaacgtggtgggcgtgtcggtggtgacgcaccccgggggctgccggggccatgaggtggaggacgtggacctggagctgttcaacacctcggt

SEQ ID NO: 482257 - DNA, 120 bp, Artificial Sequence
  ENSG00000161671_5 (sequence is synthesized)
gcagctgcagccgcccaccacagccccaggccctgagacggcggccttcattgagcgcctggagatggaacaggcccagaaggccaagaacccccaggagcagaagtccttcttcgccaa

SEQ ID NO: 482258 - DNA, 120 bp, Artificial Sequence
  ENSG00000161671_6 (sequence is synthesized)
atactggatgtacatcattcccgtcgtcctgttcctcatgatgtcaggagcgccagacaccgggggccagggtgggggtgggggtgggggtggtggtgggggtagtggccggtgagggcc

SEQ ID NO: 482259 - DNA, 120 bp, Artificial Sequence
  ENSG00000161671_7 (sequence is synthesized)
caggctggtcagcgtcccgtcttgcacacccaggggcctccctttctgctggagtcccctgtgtcctcagccatcccaagaagggtttgctggtccctcctttccccccgtcccacgagg

SEQ ID NO: 482260 - DNA, 120 bp, Artificial Sequence
  ENSG00000161671_8 (sequence is synthesized)
ccacctgggccagccccttgtcctctgccttctgctggcagaggagcagctggactggggcctttggcacagcagccggtgtctcctgcgcccgcctcccccatggccccatgcagcccc

SEQ ID NO: 482261 - DNA, 120 bp, Artificial Sequence
  ENSG00000161671_9 (sequence is synthesized)
aggggcttcccccctgcccatggagtagagcccgagatcctggccactatgccagttctgacctcgcatccccctaccccgagcccatgcagtctgggaacatgccgccttctctccagc

SEQ ID NO: 482262 - DNA, 120 bp, Artificial Sequence
  ENSG00000161671_10 (sequence is synthesized)
ctctgtgcctttgttccaggtggtctcaccctcctgtccctggctgggctaggtggtcctgtccaggctcctgcagcgcccccctcactttgacactggactaggatgcagcctcccttc

SEQ ID NO: 482263 - DNA, 120 bp, Artificial Sequence
  ENSG00000161671_11 (sequence is synthesized)
tgtgtccccttgagggtaccctgggtcccctcatcaggggcagaggcatgaaagagtcggggctggatggccgggggcttctgggcccgacgcctagtgcagcccctggggtcgtggttt

SEQ ID NO: 482264 - DNA, 120 bp, Artificial Sequence
  ENSG00000161671_12 (sequence is synthesized)
gacatttgtctgcctggtgcaaacaaggaatccttgcctttaaggtgacaggccctccacaggcttccagacttgaaggaaaaggtttaagaaagaaaacaaaaccaacagttagtggag

SEQ ID NO: 482265 - DNA, 120 bp, Artificial Sequence
  ENSG00000161671_13 (sequence is synthesized)
tcaaagcccagacactgtaaatagaaccccctccaccaccccccgccgcccagcatcctacctggactgcggtgctacgagggcctgcgggcctttgctgtgtgccaccctccctgtaag

SEQ ID NO: 482266 - DNA, 120 bp, Artificial Sequence
  ENSG00000161671_14 (sequence is synthesized)
tctatttaaaaacatcgacgatacattgaaatgtgtgaacgttttgaaaagctacagcttccagcagccaaaagcaactgttgttttggcaagacggtcctgatgtacaagcttgattga

SEQ ID NO: 482267 - DNA, 120 bp, Artificial Sequence
  ENSG00000161671_15 (sequence is synthesized)
aattcactgctcacttgatacgttattcagaaacccaaggaatggctgtccccatcctcatgtggctgtgtggagctcagctgtgttgtgtggcagtttattaaactgtcccccagatcg

SEQ ID NO: 482268 - DNA, 120 bp, Artificial Sequence
  ENSG00000161671_16 (sequence is synthesized)
acacgcagctagcctcctgcattgtatggttataaatagcaccctagtgagtgctgtcgtccagtctctcttgggtgtggtttgaatgatctcgggatgcatgactaaaatggaattacg

SEQ ID NO: 482269 - DNA, 120 bp, Artificial Sequence
  ENSG00000161671_17 (sequence is synthesized)
atggcagatcggaaacgcgtttataaacaagtgatggtttgtgagtcgactgtcaagaccaggaggtggtgcaccgtgggaggttgccttccctcccatcacttctttttgtttttgagt

SEQ ID NO: 482270 - DNA, 120 bp, Artificial Sequence
  ENSG00000161671_18 (sequence is synthesized)
ctttttgtttttgagtcagggtcttgctctgttacccaagctggagtgcagtggcggtaccttgactcactgcgacctccacctctcaggctcagcgattctcccacctcagcctcctga

SEQ ID NO: 482271 - DNA, 68 bp, Artificial Sequence
  ENSG00000161671_19 (sequence is synthesized)
cacctcagcctcctgagtagctggaattgtaggcgtgcaccaccacgcgcagctagtgaactgctgga

SEQ ID NO: 482272 - DNA, 120 bp, Artificial Sequence
  ENSG00000161671_20 (sequence is synthesized)
cgtgagccaccgcgcctggcctatttttggtaactttaataaagaagatagtcttagcattgctaacttctgtttctttctccacctgcaggagatagcttatgctttttctgtcttcat

SEQ ID NO: 482273 - DNA, 120 bp, Artificial Sequence
  ENSG00000161671_21 (sequence is synthesized)
tccacctgcaggagatagcttatgctttttctgtcttcattccatgtgaatcctgcttcattcttttcctagaggattccagaaatatttactaatgctttttttttttttttttttttt

SEQ ID NO: 482274 - DNA, 120 bp, Artificial Sequence
  ENSG00000161671_22 (sequence is synthesized)
tctcagctcactgcaacctccgcttcctgagtttaagcgattctcctgcatcagcctcccaaatagcggggattgcaggcgcccgccaacacacctggctaatttttgtattgttagtag

SEQ ID NO: 482275 - DNA, 120 bp, Artificial Sequence
  ENSG00000161671_23 (sequence is synthesized)
ggcatgagccactgcgccaggcctactgatgctttttgggaagtgttcccaacttggagtcctggtccctgtgtctgatctgcagatgtcttctaccccggcactgggggaacatcttat

SEQ ID NO: 482276 - DNA, 120 bp, Artificial Sequence
  ENSG00000161671_24 (sequence is synthesized)
ttttcctgggttaaacattgggatctttataaacctgattatgtcctttccctctaagtctcggttgctttcaggctggcagggttactctgttgggtattccaggaaatgcctgagctc

SEQ ID NO: 482277 - DNA, 120 bp, Artificial Sequence
  ENSG00000161671_25 (sequence is synthesized)
cttcaggctcccctagcgttctgttcttattaaacttttcttccccgtctggccggtccttggggaacccactcactattttattttattgaccgggttatccagggatgaagtatgaaa

SEQ ID NO: 482278 - DNA, 120 bp, Artificial Sequence
  ENSG00000161671_26 (sequence is synthesized)
ctcaaaagatagagtaggttggccaggcatagtgattcatgcttgtagtcccagctgtttgggaggctgagacaggaggatcgcttgagccccagagttcgatgcttcctgagctgtgat

SEQ ID NO: 482279 - DNA, 120 bp, Artificial Sequence
  ENSG00000161671_27 (sequence is synthesized)
tgggtgacagagtgagaccctgtctccagaatagacaaaagatgcagtggaatccacgtccagaaactgtatgctcactctgggctccagcacccacttcccctccctggaggcagcctg

SEQ ID NO: 482280 - DNA, 120 bp, Artificial Sequence
  ENSG00000161671_28 (sequence is synthesized)
ccctccctggaggcagcctgagttttctgtcccctggtatgctgcagatactctccacagaaacaagcagatgcacatgtcaacagttttgcaagtgttgctcttttcccccaccttctt

SEQ ID NO: 482281 - DNA, 120 bp, Artificial Sequence
  ENSG00000161671_29 (sequence is synthesized)
ttgacatagctggggcagtttccatctctggtataaggtgccatcttattccatctctggtgtaagagtgtgttgctggatttgagtagttctaagcagcactgcaggagtccccctgtt

SEQ ID NO: 482282 - DNA, 120 bp, Artificial Sequence
  ENSG00000161671_30 (sequence is synthesized)
ctgctgcatcattttgcacacatatgtgtctgtggaagacatggcccggtggggccccaccttgctgggggagagggatgtgtgtgtgatggtggtgcatgcttcccccttgctactcca

SEQ ID NO: 482283 - DNA, 120 bp, Artificial Sequence
  ENSG00000161671_31 (sequence is synthesized)
ggtgtctgccccatcccttcaccctggaggttccagacagcccctcttcaccagcgattccccaactcatctccagctcagatcccacccctgatctccagactcatggccccagctgcc

SEQ ID NO: 482284 - DNA, 120 bp, Artificial Sequence
  ENSG00000161671_32 (sequence is synthesized)
tcctgggctccttccccaggatgtgcctcaggggccactaaaggagccagtgcctcccacctgcccggatcgggtgctcctccagggatctttgttccagtgagtggtgccatcacctgc

SEQ ID NO: 482285 - DNA, 120 bp, Artificial Sequence
  ENSG00000161671_33 (sequence is synthesized)
ccaacctcatggaccagagcactgccctgtcccaatcacgttctcctatgcaccaccatacctacccctaaagttcttcctggcctcatcccgtcacctctgtctccatggccttggtcc

SEQ ID NO: 482286 - DNA, 120 bp, Artificial Sequence
  ENSG00000161671_34 (sequence is synthesized)
cagctcaagcctcgtcctctgccacctggaccatcggcccagcctcctctttggcctcccagcccccaacatccccccctcagtccatccccctaatggagagcttcctgacactagagc

SEQ ID NO: 482287 - DNA, 120 bp, Artificial Sequence
  ENSG00000161671_35 (sequence is synthesized)
tgacctcactactcccctgctcacagccctccgcgtggcctctcacctcccccaggatagagtcccaacccatccttctgtgtctcctcctctctgtgtccactgtcctgaccctaactc

SEQ ID NO: 482288 - DNA, 120 bp, Artificial Sequence
  ENSG00000161671_36 (sequence is synthesized)
aatcctcattctctgcctcctggaccctcatcctagcctcgtgacttctggtctaagatgtgagagcacctggcaaggtaaatgctccaggaggggttgctccctcccatttcctgccac

SEQ ID NO: 482289 - DNA, 120 bp, Artificial Sequence
  ENSG00000161671_37 (sequence is synthesized)
cagaaaatgttatcggctgcgtggcattgcgaaagccttcctcttcccagcctagggtttcatgtgggcatttaggtgctcccagtacatagttgcatggcaaacaatcctaaaatatac

SEQ ID NO: 482290 - DNA, 88 bp, Artificial Sequence
  ENSG00000161671_38 (sequence is synthesized)
gtctactggaaactataggctcctttttttttggtgggtggggggcaggtgtgtttgtgggatggagtttcactttggctcaatgcaa

SEQ ID NO: 482291 - DNA, 120 bp, Artificial Sequence
  ENSG00000161671_39 (sequence is synthesized)
aagtgctgggattacatgtgtgagccaccgcccctggcctctgtaggcttctttaacccatcagagagactccctggtaaggattaggggctaattactggtgcctcttcagctgtcagt

SEQ ID NO: 482292 - DNA, 120 bp, Artificial Sequence
  ENSG00000161671_40 (sequence is synthesized)
ctcttcagctgtcagtccatcctcctttatttgtacccaccttccagtcagcaaggcacaacaatgttgttacaaaggaaacaaactcaatttggcccatttcctggaaatgcaatctcc

SEQ ID NO: 482293 - DNA, 120 bp, Artificial Sequence
  ENSG00000161671_41 (sequence is synthesized)
caaacaggtttgtgtgaaccaaattccattttcctttgtttcccatgtgcagtcccagttgcatttccatgggagccaatccacccacccatagaatgacttgaaaatgtgtgaagttca

SEQ ID NO: 482294 - DNA, 120 bp, Artificial Sequence
  ENSG00000161671_42 (sequence is synthesized)
gaagtttcataccaagaagtttgctgagcatgatgtttgtatattgattaggagtaaaaatgttcatttttacaaaatattacaacttctccctctcccctccttccacccagtatcccc

SEQ ID NO: 482295 - DNA, 120 bp, Artificial Sequence
  ENSG00000161671_43 (sequence is synthesized)
tgttcctcccccaggcattctggtcactgttcctttttgttgagatcattctcggtgtctcatatagctgggttgcagctccgttctttgccaggaggtggtaatagaggattccacgca

SEQ ID NO: 482296 - DNA, 120 bp, Artificial Sequence
  ENSG00000161671_44 (sequence is synthesized)
ctcagaatgcctcaggccggcgcctgtggcttctctcaatggagggaagtgtcctgcagggggcgctgttggtccttcaggcaaggtcgggttccctcgaagtctctgtcttagcagttg

SEQ ID NO: 482297 - DNA, 120 bp, Artificial Sequence
  ENSG00000161671_45 (sequence is synthesized)
ctggtcttcagaaacattgggcaccaattttctcatttctgaaatggaattcaggtgaggtcccctcagtgctgaggtgcttcatgttgtcagaggaagagttgggaagggagcggaatg

SEQ ID NO: 482298 - DNA, 120 bp, Artificial Sequence
  ENSG00000161671_46 (sequence is synthesized)
gagcagaaaggcgtcatccgctgctcactgagctcagataggaggccagggatcggcagattcaggagcccactcctggccaaccccaggggccccacccagtcctgtccctgctcctta

SEQ ID NO: 482299 - DNA, 120 bp, Artificial Sequence
  ENSG00000161671_47 (sequence is synthesized)
cgtgctgtgtatctttaggcaagttgcttcctgtctctgagcgtcgtctttgtttccgccttcctgggcctacggcaggcctgattcctccaggcagtgtccagagttccggacagatgg

SEQ ID NO: 482300 - DNA, 120 bp, Artificial Sequence
  ENSG00000161671_48 (sequence is synthesized)
aaaaggaagagagaatgggtgtcacaaaggtctgtccactcctgggcctcaggcttgggggccctgctcagggctagcctgtttgggcctcggtatggactcctgcctcctggtcaggac

SEQ ID NO: 482301 - DNA, 120 bp, Artificial Sequence
  ENSG00000161671_49 (sequence is synthesized)
ctggaaacctgggagcaggcaaggcaggaacaggagagggaggcaaaggcccaccaggcagggatgcaggggccacctggagacggaggagacggggctcccgggagggaggccagtggg

SEQ ID NO: 482302 - DNA, 120 bp, Artificial Sequence
  ENSG00000161671_50 (sequence is synthesized)
agtgagagcttgaaggagagagagccaggagaggagacaggtccagagaggagggaaaggaaaggacagggcagagacagagaaaccagagagagggaaggaagagagacccaaggggga

SEQ ID NO: 482303 - DNA, 120 bp, Artificial Sequence
  ENSG00000161671_51 (sequence is synthesized)
gagacagggaaggaagagggaggtgagaagaggaagaggcagattcagaggagagaggagagaaaagaggtggaaatcaaacaggagaaagagggaggagaggagggaggagagagtgta

SEQ ID NO: 482304 - DNA, 62 bp, Artificial Sequence
  ENSG00000161671_52 (sequence is synthesized)
ccagagcaggaggggagagaggaagagggagaaagaaggaaacagtgtagggggtcagaagt

SEQ ID NO: 482305 - DNA, 120 bp, Artificial Sequence
  ENSG00000161671_53 (sequence is synthesized)
aagagggagaaagaaggaaacagtgtagggggtcagaagtggaaagagaagaaaaaacagaagaggaaagaaagacgagggggtgaaaaaagggacaggaaggaagagagggagagggtg

SEQ ID NO: 482306 - DNA, 120 bp, Artificial Sequence
  ENSG00000161671_54 (sequence is synthesized)
ggtgccatggctggtgagctcggagaagagggaagcagagaaacgggtgaaggagggagcgtcctagggagaagtgggtgggggagagggtgttgggggagaagagggtgggggagaggg

SEQ ID NO: 482307 - DNA, 120 bp, Artificial Sequence
  ENSG00000161671_55 (sequence is synthesized)
ggccccgggagagggagggatggaggagcggggagctccagccagagaagaggaaagagaaaggagagagctaggaactgggaaggaaaagagctaggaggagaccatgagacagaaaga

SEQ ID NO: 482308 - DNA, 120 bp, Artificial Sequence
  ENSG00000161671_56 (sequence is synthesized)
gaagagggtgaagagagaggatagtggctgggaggagagaggaggagggaggagcacagagggagaggagaggaaacagccagagaatctgctagaagggagagaggagagagaagagcc

SEQ ID NO: 482309 - DNA, 120 bp, Artificial Sequence
  ENSG00000161671_57 (sequence is synthesized)
ggacagggagagcagaagtgagaaaaaggagggtggccacagagaggacagcgagaaaaagagaacaggaagaggggaaaagagaagaaatgggagagggaagaagggtgggagagaaaa

SEQ ID NO: 482310 - DNA, 120 bp, Artificial Sequence
  ENSG00000161671_58 (sequence is synthesized)
cggaacagagagggggcacagacagcggactggaccgagagggagatggagcggtgcggagggggagagagaaagagggagggaaggagggtaggagagggctggagataggggaaaaga

SEQ ID NO: 482311 - DNA, 120 bp, Artificial Sequence
  ENSG00000161671_59 (sequence is synthesized)
gaaaaggagggtaggagagggctggagagagaagggaagttaagaagggaaggagagagacagacattagggaagaaggaaaggagaaaggaaaaaatacaaaaaagggcagagagaaaa

SEQ ID NO: 482312 - DNA, 120 bp, Artificial Sequence
  ENSG00000161671_60 (sequence is synthesized)
gaacaggccgggcatggtgcctcgcacctgtggtcccagcactttgagaggctaaggcaggaggatcactggagcctgggaggtggaggctgcactactgcactccagcgggtgagtgag

SEQ ID NO: 482313 - DNA, 120 bp, Artificial Sequence
  ENSG00000161671_61 (sequence is synthesized)
cgagaaaaaaagcagaaaggaaagaagaggtgcatgagtgtggaagagcaatatggagagaaagaagggagagaggattggaagtagcgacagaggaccatgcccctccagctgaggagg

SEQ ID NO: 482314 - DNA, 120 bp, Artificial Sequence
  ENSG00000161671_62 (sequence is synthesized)
gggcgcccctaagacagcgtcagcccagagaccggggcaggaagcaggaacgtgaagcaggttaggagccagtgtgaggcacggagagggccgggtagctgggcggcgggggtgtcgtgg

SEQ ID NO: 482315 - DNA, 120 bp, Artificial Sequence
  ENSG00000161671_63 (sequence is synthesized)
gcacagcccaggctactgcggggacaggctgccagacccggcgggtccaggttgggaactcggccatgcagcagaaacgttccctgcctcaacagggcgcagccaccccggggccatctc

SEQ ID NO: 482316 - DNA, 120 bp, Artificial Sequence
  ENSG00000161671_64 (sequence is synthesized)
tgtgacccagggagagaaaggacaacgaatgggactagacgaggatggggaggaacagagcagctgtggaaggtgcggcagagaagggcccaggagaaaggaggaagggaaggagctgga

SEQ ID NO: 482317 - DNA, 120 bp, Artificial Sequence
  ENSG00000161671_65 (sequence is synthesized)
ggggcgggagaacaggagacagaacaggacagagacagctgcccgggaggatgggagaacagaaagagggaggaaacgccgagcactgacctgggggaggggagtaaagagaagtgaagg

SEQ ID NO: 482318 - DNA, 120 bp, Artificial Sequence
  ENSG00000161671_66 (sequence is synthesized)
gggattggaagggaactggagaatgagagaagcaacaggcggggtgcgtgtaggagggcgggagagccaatgacaagacagaaaaggcagagaaagcaaagcaagaccagactcctcatc

SEQ ID NO: 482319 - DNA, 120 bp, Artificial Sequence
  ENSG00000161671_67 (sequence is synthesized)
cggtaacactgtgtcaggtcattgccctcccaccccgcccccaaccccataactgaaaacaagtaggaacctggataaaatagtcttaacaattttttttttgagacggagtcttgctgt

SEQ ID NO: 482320 - DNA, 120 bp, Artificial Sequence
  ENSG00000161671_68 (sequence is synthesized)
gcgttgagccaccgtggccggcccttaaaagcatcaaactacatacaagaccgtaaggaagctgtgggtcaacgcggagggacgtgggaacccatcccggtgaagcggcagcgtcacgtc

SEQ ID NO: 482321 - DNA, 120 bp, Artificial Sequence
  ENSG00000161671_69 (sequence is synthesized)
ctttctcccagggatctgttggtcggagacatctggactttcatgtggacagcctgagtgacagggggacccaggggcctcacctgggctacctggggtgggtggaccctccactgtgcc

SEQ ID NO: 482322 - DNA, 120 bp, Artificial Sequence
  ENSG00000161671_70 (sequence is synthesized)
aaggtgcagcctgggctcggaggaacatgccctccgcctagtccctgacatccttttcacatccaacacgcagagcaggggcgtgagggagcaggcaagcagggaagggaaagacaatga

SEQ ID NO: 482323 - DNA, 120 bp, Artificial Sequence
  ENSG00000161671_71 (sequence is synthesized)
gcaagagccagcgggacggtggggcggatggcagaggcttcgctgctggaaaatcagacgcagagtacgaaacgcctgtgctcactatgttaataataataataaaaggcaaaaaaccag

SEQ ID NO: 482324 - DNA, 120 bp, Artificial Sequence
  ENSG00000161671_72 (sequence is synthesized)
cgggactggtgcgcgaggggtgagtgctctttagctgtgcatagcgggcgcggtctacggatgtcgcaggtcttgggtctttaggctggggcggaaggtcgagagggcgaggcctgtggc

SEQ ID NO: 482325 - DNA, 120 bp, Artificial Sequence
  ENSG00000161671_73 (sequence is synthesized)
gtccgggcggttgaaatgaaagaggcaaggtgaagccgggcgcggtggctcatctgtcatcccaacgcttagggaggccgaggcgggaggattgctctaggccaggagttcaagaccagc

SEQ ID NO: 482326 - DNA, 120 bp, Artificial Sequence
  ENSG00000161671_74 (sequence is synthesized)
cagcgctggggcaacccggctgctcctgctcttgctgatggcgcactcatttgagatcgatgacagtgccaacttccggaagcggggctcactgctctggaaccagcaggatggtacctt

SEQ ID NO: 482327 - DNA, 120 bp, Artificial Sequence
  ENSG00000161671_75 (sequence is synthesized)
cctccgggcctcctgtgtgtcctggtacctgggctgaggcttgtttgcaggaagagggtatggaagtgtggtcaggggaggtcgggccagctctagggcgcagggtcctgggggaggtct

SEQ ID NO: 482328 - DNA, 120 bp, Artificial Sequence
  ENSG00000161671_76 (sequence is synthesized)
cggcctgagctaggttggagccatgaggctggagaggaagggaacagtggaggtttcaaaggaaccagggaggcttggaaaggaggggcgagcaggttcttcagggggttgtacaggaag

SEQ ID NO: 482329 - DNA, 120 bp, Artificial Sequence
  ENSG00000161671_77 (sequence is synthesized)
gagagaggagtgggtccgggagggatgtggcccagggaggggcattgggggcagcagggtgcctgggaggcctcctggagctgaggagggaggggcctgtgctgccagcagcaggtctga

SEQ ID NO: 482330 - DNA, 120 bp, Artificial Sequence
  ENSG00000161671_78 (sequence is synthesized)
tgaggcgtggggtggggaggctggggacagccggaggaggtggcttccacccaggcctctggtccattgagtgtggagactggtgttaggttgtggcacaggagcccaggcaggccaagg

SEQ ID NO: 482331 - DNA, 120 bp, Artificial Sequence
  ENSG00000161671_79 (sequence is synthesized)
ccagcgaagaggtctgtgtggcccgaggcaggctaggaggatgctgaggctgggatggctgagccctgctgtgctgagtgccctgcctgagggcctcacccgctccgcctggatagtcca

SEQ ID NO: 482332 - DNA, 120 bp, Artificial Sequence
  ENSG00000161671_80 (sequence is synthesized)
acagttgtgctgcagggaactgaggcccagaggctgagcccttgcctgctgggccctgccctgctgcccactcgagcgccctcccactccctgctggccctcaggccccacggcagccca

SEQ ID NO: 482333 - DNA, 120 bp, Artificial Sequence
  ENSG00000161671_81 (sequence is synthesized)
ctggccctgacctgcgctccctccctccccagtggcacatcatcctggggggggccgtgttgctcacagccctgcgtcctgctgcgccagggcccgcgccaccgccacaggaggcctgag

SEQ ID NO: 482334 - DNA, 120 bp, Artificial Sequence
  ENSG00000161677_0 (sequence is synthesized)
ttcctaggcccgacggccgacttcagggccacgcggcccgggcgttccgtgtggagcaggagtcccgcggggccccacgggagtcgtagtccggcgcgcggggatcaccgggagctgtag

SEQ ID NO: 482335 - DNA, 120 bp, Artificial Sequence
  ENSG00000161677_1 (sequence is synthesized)
tccgtcccgcctgcccagtcagcgcggtgttgcccgccccgcactcggagcccagagccgccgcccaggaaggggatgcggaaacccctggctcggtggagcggagaggcaggcgggcag

SEQ ID NO: 482336 - DNA, 120 bp, Artificial Sequence
  ENSG00000161677_2 (sequence is synthesized)
gagccgaggacggcatgtcccaggccccgggagcacagccgagcccacccaccgtgtaccacgaacggcagcgcctggagctgtgtgctgtccacgccctcaacaacgttctgcagcagc

SEQ ID NO: 482337 - DNA, 120 bp, Artificial Sequence
  ENSG00000161677_3 (sequence is synthesized)
agctctttagccaggaggctgccgatgagatctgcaagaggttggccccagactcccggctgaaccctcatcgcagcctcctgggcaccggcaactatgatgtcaatgtgatcatggccg

SEQ ID NO: 482338 - DNA, 120 bp, Artificial Sequence
  ENSG00000161677_4 (sequence is synthesized)
acaggaggaggcccctgtcccagctggccctgccccaggtactggggctgatcctgaacctgccctcgcccgtgtcgctggggctgctgtcactgccgctgcgccggcggcactgggtgg

SEQ ID NO: 482339 - DNA, 120 bp, Artificial Sequence
  ENSG00000161677_5 (sequence is synthesized)
ccctgcgccaggtggacggtgtctactacaacctggactccaagctgcgggcgcccgaggccctgggggatgaggacggagtcagggccttcctggcggctgcgctggcccagggcctgt

SEQ ID NO: 482340 - DNA, 120 bp, Artificial Sequence
  ENSG00000161677_6 (sequence is synthesized)
gcgaggtgctgctggtagtgaccaaggaggtggaggagaagggcagctggctgcggacagactgaccatggctgaccatcggcgcccacagcgcagtccctgcgcatccccctccggctg

SEQ ID NO: 482341 - DNA, 120 bp, Artificial Sequence
  ENSG00000161677_7 (sequence is synthesized)
cgcacactgcatgcctgggaaaggccagcacttcatggaccctggggaggccccgccccctccccacacccctgctccccactgccgctgctgcctcaataaatctgctgatttgctgcc

SEQ ID NO: 482342 - DNA, 120 bp, Artificial Sequence
  ENSG00000161677_8 (sequence is synthesized)
ggacttggggacagggcagagtcagggcaggagagacaggacttggggacagggcagagttggggcaggagaggcaggacttggggacagggcagagtcggggcaggagaggcaggactt

SEQ ID NO: 482343 - DNA, 120 bp, Artificial Sequence
  ENSG00000161677_9 (sequence is synthesized)
ggggacagggcagagtcagggcaggagagacaggacttggggacagggcagaattggggcaggagaggcaggacttgggggtggatgagttgtggggtctgaagcggggagagtcaaagg

SEQ ID NO: 482344 - DNA, 120 bp, Artificial Sequence
  ENSG00000161677_10 (sequence is synthesized)
gagcagcagagctctggcggagtgacccacctgggtctcgccgccaggcaggcgctgagccttgggggctttcttctgctccgcgctcacttgcctaagctagacgctgggactctgggg

SEQ ID NO: 482345 - DNA, 120 bp, Artificial Sequence
  ENSG00000161681_0 (sequence is synthesized)
gtcgccccgtggccccacaatgacccacagccccgcgacaagcgaggacgaggaacgccacagtgccagcgagtgtcccgaggggggctcagagtccgacagctccccagacgggccagg

SEQ ID NO: 482346 - DNA, 120 bp, Artificial Sequence
  ENSG00000161681_1 (sequence is synthesized)
tcgaggcccccgggggacccggggccagggcagtggggcacctggtagcctggcctctgttagaggcctccagggccgctcaatgtccgtcccagacgacgcccacttcagcatgatggt

SEQ ID NO: 482347 - DNA, 120 bp, Artificial Sequence
  ENSG00000161681_2 (sequence is synthesized)
cttcaggattggcatcccggacctgcaccagacaaaatgccttcgcttcaaccccgatgccaccatctggacggccaagcagcaggtgctctgtgccctgagcgagagcctgcaggatgt

SEQ ID NO: 482348 - DNA, 120 bp, Artificial Sequence
  ENSG00000161681_3 (sequence is synthesized)
gctcaactatggcctgttccaaccggccacctccggccgcgatgccaacttcctggaggaggagaggctgctgcgggagtacccccagtcctttgagaagggggtcccctacctggagtt

SEQ ID NO: 482349 - DNA, 120 bp, Artificial Sequence
  ENSG00000161681_4 (sequence is synthesized)
ccgatacaagacccgagtttacaaacagaccaacctggatgagaagcagctggccaagttgcacacgaagacggggttgaagaagttcctggagtatgtgcagctcgggacatctgacaa

SEQ ID NO: 482350 - DNA, 120 bp, Artificial Sequence
  ENSG00000161681_5 (sequence is synthesized)
ggtggcgcggctgctggacaaggggctggaccccaattaccatgactcggattcgggagagacccccttgacactggcggcccagaccgaaggctctgtagaggtgattcgaaccctgtg

SEQ ID NO: 482351 - DNA, 120 bp, Artificial Sequence
  ENSG00000161681_6 (sequence is synthesized)
cctgggcggggcccacattgacttccgggcccgggatggcatgaccgcactgcataaggccgcatgcgcccgacactgcctggcactcacggcgctcctggaccttgggggttcccccaa

SEQ ID NO: 482352 - DNA, 120 bp, Artificial Sequence
  ENSG00000161681_7 (sequence is synthesized)
ctacaaggaccgtcgggggctgacccctctgttccacacggccatggtgggtggtgacccccgatgctgcgagctgctcctgttcaacagggcccagctgggcatagctgatgagaacgg

SEQ ID NO: 482353 - DNA, 120 bp, Artificial Sequence
  ENSG00000161681_8 (sequence is synthesized)
ctggcaggaaatccaccaggcctgccagcggggtcactctcagcacctggagcatctgcttttctacggggctgagcctggagcccagaacgcctcggggaacacggctctgcacatctg

SEQ ID NO: 482354 - DNA, 120 bp, Artificial Sequence
  ENSG00000161681_9 (sequence is synthesized)
cgccctctacaacaaggagacctgtgccaggatcctcctgtatcgaggtgccgacaaggatgtgaagaacaacaacggacagacccccttccaggtggcagtgattgctgggaattttga

SEQ ID NO: 482355 - DNA, 120 bp, Artificial Sequence
  ENSG00000161681_10 (sequence is synthesized)
gctgggggagctgatccgaaaccaccgagaacaggatgtggtgcccttccaggagtcccccaagtacgcggcccggcgacgggggcccccaggcacagggctgacggtgcccccggcgct

SEQ ID NO: 482356 - DNA, 120 bp, Artificial Sequence
  ENSG00000161681_11 (sequence is synthesized)
gctgcgggccaacagtgacaccagcatggcgctgcccgactggatggtgttctccgccccgggggccgcgtcctctggggcccctggccctacctcagggtcccagggccagtcgcagcc

SEQ ID NO: 482357 - DNA, 120 bp, Artificial Sequence
  ENSG00000161681_12 (sequence is synthesized)
ctcggcccccaccaccaagctcagcagcgggaccctccgaagtgccagcagcccccggggtgccagggcccgctctccatcccgagggaggcaccctgaggacgccaagaggcagccccg

SEQ ID NO: 482358 - DNA, 120 bp, Artificial Sequence
  ENSG00000161681_13 (sequence is synthesized)
ggacaccccgggaagggccagccgggggcacggggggctcagggggccccgggggctccctgggcagccgcgggaggcggaggaagctctactcagcggtacccggacgctccttcatgg

SEQ ID NO: 482359 - DNA, 120 bp, Artificial Sequence
  ENSG00000161681_14 (sequence is synthesized)
acccggacgctccttcatggctgtgaagtcctaccaggcccaagccgagggggagatctccctgagcaagggcgagaagatcaaagtacttagcatcggggaaggaggcttctgggaagg

SEQ ID NO: 482360 - DNA, 120 bp, Artificial Sequence
  ENSG00000161681_15 (sequence is synthesized)
ccaggtcaaaggtcgtgttggctggttcccctctgactgcctggaagaagtggcgaatcgctctcaggagagcaagcaagaaagccgcagtgacaaggcaaagagactcttccggcatta

SEQ ID NO: 482361 - DNA, 120 bp, Artificial Sequence
  ENSG00000161681_16 (sequence is synthesized)
taccgtgggctcctacgacagctttgatgccccaagcttaatggatgggattggcccagggagcgattacatcattaaggagaagacagtcttgctgcagaagaaggacagtgaggggtt

SEQ ID NO: 482362 - DNA, 120 bp, Artificial Sequence
  ENSG00000161681_17 (sequence is synthesized)
tgggttcgtgctccggggggccaaggcgcagacccccatcgaggagttcacccccaccccggccttcccggcgctgcagtacctggagtcggtggacgagggtggcgtggcatggcgagc

SEQ ID NO: 482363 - DNA, 120 bp, Artificial Sequence
  ENSG00000161681_18 (sequence is synthesized)
tggactgcgaatgggagacttcctcatcgaggtgaacgggcagaatgtggtgaaggtcggccaccgacaggtggtgaacatgatccgccaagggggcaacacgctgatggtgaaggtggt

SEQ ID NO: 482364 - DNA, 120 bp, Artificial Sequence
  ENSG00000161681_19 (sequence is synthesized)
gatggtcaccaggcacccggacatggatgaggcagtgcacaagaaagcaccccagcaggccaagcggctgccgcccccaaccatctccctgcgttccaaatctatgacctcagagctgga

SEQ ID NO: 482365 - DNA, 120 bp, Artificial Sequence
  ENSG00000161681_20 (sequence is synthesized)
ggagatggagtacgagcagcagccggcgccggtgcccagcatggagaaaaagcggaccgtgtatcagatggctctcaacaaactggacgaaatcctggccgcagctcaacagaccatcag

SEQ ID NO: 482366 - DNA, 120 bp, Artificial Sequence
  ENSG00000161681_21 (sequence is synthesized)
tgcaagcgaaagccctggtcccggtggcctcgcgtccctgggcaaacaccgacccaaaggtttctttgccactgagtcgagcttcgatccccaccaccgtgcccagccaagttacgagcg

SEQ ID NO: 482367 - DNA, 120 bp, Artificial Sequence
  ENSG00000161681_22 (sequence is synthesized)
tccttctttcctgcctccaggacctgggttgatgctccggcaaaaatctatcggtgcggcagaagatgacagaccttacctagcacccccagccatgaaattcagccgcagcctgtctgt

SEQ ID NO: 482368 - DNA, 120 bp, Artificial Sequence
  ENSG00000161681_23 (sequence is synthesized)
gcctggttcggaggacattcccccgccacccaccacgtccccaccggagcctccctacagcacacctccagtcccctcctcctcagggcgcctcaccccctcccctcggggagggccctt

SEQ ID NO: 482369 - DNA, 120 bp, Artificial Sequence
  ENSG00000161681_24 (sequence is synthesized)
caaccctggctctggtggccccctccccgcctcctcccctgcatcctttgacgggccctcccctcccgacactcgcgtggggagccgcgagaagagcctgtaccacagtgggcccctgcc

SEQ ID NO: 482370 - DNA, 120 bp, Artificial Sequence
  ENSG00000161681_25 (sequence is synthesized)
cccggcccaccaccacccgccccaccaccaccaccaccacgccccgccccctcagccccaccaccaccacgcccacccccctcatcctcccgagatggagacaggcggctctcccgacga

SEQ ID NO: 482371 - DNA, 120 bp, Artificial Sequence
  ENSG00000161681_26 (sequence is synthesized)
ctcatcctcccgagatggagacaggcggctctcccgacgaccctccaccccgcctggctctggggccccagcccagcctgcgaggctggaggggcggcgggcccagcccgaccccggggg

SEQ ID NO: 482372 - DNA, 120 bp, Artificial Sequence
  ENSG00000161681_27 (sequence is synthesized)
ttccagctgcccccgcgggcggccagcgcagccatgtacgtgcccgcccgctcgggccgcggccgcaagggcccgctggtcaagcagaccaaggtggaaggcgagccccagaagggcggc

SEQ ID NO: 482373 - DNA, 120 bp, Artificial Sequence
  ENSG00000161681_28 (sequence is synthesized)
gcgccgtcgcccacgtccccggcctccccgcagccgccgcccgccgtggccgcgccctcggagaagaactccatccccatccccaccatcatcatcaaggccccgtccaccagtagcagc

SEQ ID NO: 482374 - DNA, 120 bp, Artificial Sequence
  ENSG00000161681_29 (sequence is synthesized)
tcatcatcaaggccccgtccaccagtagcagcggccgcagcagccagggcagcagcaccgaggcggagccccccacccagccggagcccacgggaggcggcggcggcggcggctcctcgc

SEQ ID NO: 482375 - DNA, 120 bp, Artificial Sequence
  ENSG00000161681_30 (sequence is synthesized)
cctcgcccagcggcccggccacgctggacttcacgagccagttcggggccgccctggtgggggcggcccggagggaggggggctggcagaatgaggcgcgccggcgctccacgctgttcc

SEQ ID NO: 482376 - DNA, 120 bp, Artificial Sequence
  ENSG00000161681_31 (sequence is synthesized)
gaatgaggcgcgccggcgctccacgctgttcctgtccaccgacgcgggggacgaggacggcggggacggcgggctgggcacaggggcggccccgggcccgcggctgcgccactccaaatc

SEQ ID NO: 482377 - DNA, 120 bp, Artificial Sequence
  ENSG00000161681_32 (sequence is synthesized)
gacgagggcatgttctccgccgagccctacctccgactggagtctgcgggcagcggcgcgggctacggcggctacggggccggtagccgagcctacgggggtggcgggggcagcagcgcc

SEQ ID NO: 482378 - DNA, 120 bp, Artificial Sequence
  ENSG00000161681_33 (sequence is synthesized)
ttcaccagcttcctgcccccgcgacccctggtgcacccgctgaccggcaaggccctggatcccgcctccccgctggggctggccctggccgcccgcgagcgagcgctgaaggagtcctcg

SEQ ID NO: 482379 - DNA, 80 bp, Artificial Sequence
  ENSG00000161681_34 (sequence is synthesized)
cgccccgctacgaggccccgccgcccaccccgcaccaccactcgccccacgcccaccacgagccagtgctgcgtctctgg

SEQ ID NO: 482380 - DNA, 120 bp, Artificial Sequence
  ENSG00000161681_35 (sequence is synthesized)
ccaccacgagccagtgctgcgtctctggggggcctccccgccggaccctgcgcgccgggagctggggtacagggccgggctgggcagccaggagaagtcccttcccgccagcccgcccgc

SEQ ID NO: 482381 - DNA, 120 bp, Artificial Sequence
  ENSG00000161681_36 (sequence is synthesized)
ccgcccaccgctcccggggtggggcccctcctgctgcagctggggacggagcccccggccccgcaccccggagtaagcaagccctggaggtccgcagcccccgaagaacccgagcggctg

SEQ ID NO: 482382 - DNA, 120 bp, Artificial Sequence
  ENSG00000161681_37 (sequence is synthesized)
ccgctgcacgtgcggttccttgaaaactgccagccccgggcccctgtgacgagcggaaggggtcccccctcggaggacgggccgggggtcccgccgcccagcccacgccggtccgtgccc

SEQ ID NO: 482383 - DNA, 120 bp, Artificial Sequence
  ENSG00000161681_38 (sequence is synthesized)
ccctccccgacctccccgagggccagcgaagagaacgggctgcccctgctggtcctgccgcctcccgccccctcggtggatgtggaagatggcgaattccttttcgtggaaccgctgcct

SEQ ID NO: 482384 - DNA, 120 bp, Artificial Sequence
  ENSG00000161681_39 (sequence is synthesized)
ccgcctctggaattctccaacagcttcgaaaagccagagtcgcccctcacgcctgggcctccccacccgctgcccgacacacctgcccctgccaccccgttaccccctgtgccacccccg

SEQ ID NO: 482385 - DNA, 120 bp, Artificial Sequence
  ENSG00000161681_40 (sequence is synthesized)
gctgtggccgcagcccctcccaccctggactccaccgcatccagcctgacatcctatgacagcgaggtggccaccctgacccagggggcctccgccgctcctggggacccccatccacca

SEQ ID NO: 482386 - DNA, 120 bp, Artificial Sequence
  ENSG00000161681_41 (sequence is synthesized)
ggcccgcctgccccagcagcaccggctcccgctgccccacagcctggcccggaccctccgcctggcacggattctggcatcgaggaggtggacagtcggagcagcagtgaccacccactg

SEQ ID NO: 482387 - DNA, 120 bp, Artificial Sequence
  ENSG00000161681_42 (sequence is synthesized)
gagaccatcagcagcgcctccacgctgagcagcctatctgccgaaggtggtggcagcgcagggggtgggggcggggctggggccggtgtggccagtgggccggagcttctggacacctat

SEQ ID NO: 482388 - DNA, 120 bp, Artificial Sequence
  ENSG00000161681_43 (sequence is synthesized)
gtggcctacctggacggccaggcctttgggggcagcagtactcccggcccgccataccctcctcagctcatgactccctctaagctccggggccgggcgctaggagccagcggaggcctg

SEQ ID NO: 482389 - DNA, 120 bp, Artificial Sequence
  ENSG00000161681_44 (sequence is synthesized)
cggcctggccccagcgggggactccgagaccctgttacccccaccagccccaccgtctcggtgacaggggctggaaccgatgggctgctggccctgcgtgcttgttcaggaccccccacg

SEQ ID NO: 482390 - DNA, 120 bp, Artificial Sequence
  ENSG00000161681_45 (sequence is synthesized)
gcaggcgtggcggggggtccggtggctgtagagccagaagtcccaccggtgcccttgccgacggcctcctctctgccccggaagctgctgccctgggaggagggcccgggcccaccgcca

SEQ ID NO: 482391 - DNA, 120 bp, Artificial Sequence
  ENSG00000161681_46 (sequence is synthesized)
ccacctctgcccgggcccttggcccagcctcaggcctcagccttggccacagtaaaagccagcatcatcagtgaactcagctccaagcttcagcagtttgggggctcctcggcagctggc

SEQ ID NO: 482392 - DNA, 120 bp, Artificial Sequence
  ENSG00000161681_47 (sequence is synthesized)
ggcgctctgccctgggcccgaggaggcagtgggggaggcggagacagccaccacgggggagccagctatgtccccgagaggacctcctccctgcagcggcagagactctccgacgactcc

SEQ ID NO: 482393 - DNA, 120 bp, Artificial Sequence
  ENSG00000161681_48 (sequence is synthesized)
cagtcctcactcctctccaagcctgtcagcagcctgtttcagaactggcccaaaccacctctgccgccactccccaccggaacaggggtctcccctacagccgctgcggccccaggggcc

SEQ ID NO: 482394 - DNA, 120 bp, Artificial Sequence
  ENSG00000161681_49 (sequence is synthesized)
acctcaccctcagcctcctcctcctccacgtccacccgccacctccagggcgtggagttcgagatgcggccccctctgctccgccgggcccccagcccctcgctgctgcccgcctcggag

SEQ ID NO: 482395 - DNA, 120 bp, Artificial Sequence
  ENSG00000161681_50 (sequence is synthesized)
cacaaggtcagccctgcgcccaggccctcgtccctgcccatcctgccttccggacccctctacccaggcctctttgacatccgtggctccccaactggaggggcaggaggctcggctgac

SEQ ID NO: 482396 - DNA, 120 bp, Artificial Sequence
  ENSG00000161681_51 (sequence is synthesized)
cccttcgccccagtctttgtgccgccacacccggggatatccggggggctcgggggagccttgtcaggggcctcgcgctccctctcaccgacccgcctgctctcgctgcccccggacaag

SEQ ID NO: 482397 - DNA, 120 bp, Artificial Sequence
  ENSG00000161681_52 (sequence is synthesized)
ccgtttggcgctaaacctctggggttctggaccaagttcgacgtggctgattggctggagtggctgggtttggcggagcaccgagcccagttcctggaccacgagatcgatggctcccac

SEQ ID NO: 482398 - DNA, 120 bp, Artificial Sequence
  ENSG00000161681_53 (sequence is synthesized)
ctgcccgccttgaccaaggaggactacgtcgatctaggtgtgaccagggtgggccaccgcatgaacatcgaccgggctctcaaattcttcctggagaggtgatggctggcctggacggac

SEQ ID NO: 482399 - DNA, 120 bp, Artificial Sequence
  ENSG00000161681_54 (sequence is synthesized)
cagccccgtccacagaactcttgagcctgctggcctcttgacctctgacccctgactgtcattctctccccgggccagggactctgttcaaactgcgccctgccctcatctcccaaggcc

SEQ ID NO: 482400 - DNA, 120 bp, Artificial Sequence
  ENSG00000161681_55 (sequence is synthesized)
cgccctctacaacaaggtctgcctagcagcggccaccccaggcccctcacatccccgatagccgcctcccccagggccaagctcagacactcctcttgactgcatctctgcaccctccac

SEQ ID NO: 482401 - DNA, 87 bp, Artificial Sequence
  ENSG00000161681_56 (sequence is synthesized)
gctcagacactcctcttgactgcatctctgcaccctccacttcttcactatttccaccctttcatccagtcattcctccattcattc

SEQ ID NO: 482402 - DNA, 120 bp, Artificial Sequence
  ENSG00000161681_57 (sequence is synthesized)
agctgggtgctggggacaaagtgttgagctcatggcctagcagagggcagacaacatagtttgctgctacagtccagagtgctcagagcaaagtcacagggaatccagatccctgcggga

SEQ ID NO: 482403 - DNA, 120 bp, Artificial Sequence
  ENSG00000161681_58 (sequence is synthesized)
atgcaattaatggccctggagcagaggtttgggtctgggttgccgggtgggggacagcctctgtgtctcatgatgtcttctccactccccccaccacccccccatttctcctgcctccct

SEQ ID NO: 482404 - DNA, 120 bp, Artificial Sequence
  ENSG00000161681_59 (sequence is synthesized)
ccgagaacaggatgtgggtgagtgacagggagctcggactgcacagagaacctggggcggttgaggtttcatggtgggatgggggagttgggggacctgacttgggggccaggataggat

SEQ ID NO: 482405 - DNA, 120 bp, Artificial Sequence
  ENSG00000161681_60 (sequence is synthesized)
tgtctttctccctcatgcctctctcccaccatctcttgcccccgcatggccccctgcttgccttttctcccctaacatctgccccccgccgccactgtgccctctcagtgcccttccagg

SEQ ID NO: 482406 - DNA, 80 bp, Artificial Sequence
  ENSG00000161682_0 (sequence is synthesized)
gacaatcgcgctgagcgggcgccgcagcgggagcgggagccggagctgcgaggcgcggcgcagagctggggctgcgcggg

SEQ ID NO: 482407 - DNA, 120 bp, Artificial Sequence
  ENSG00000161682_1 (sequence is synthesized)
gcgagtggccccagcgtcctcgcgcggctgttgccgctgctggggctgctgctcggcagcgcctcccgggctcccggcaagtcgccgccggagccccccagcccgcaggagatcctgatc

SEQ ID NO: 482408 - DNA, 120 bp, Artificial Sequence
  ENSG00000161682_2 (sequence is synthesized)
gccccccagcccgcaggagatcctgatcaaggtgcaggtgtatgtgagcggggagctggtgcccctggcccgggcctcagtggatgtgtttgggaaccggactctgctggcagctggcac

SEQ ID NO: 482409 - DNA, 120 bp, Artificial Sequence
  ENSG00000161682_3 (sequence is synthesized)
cacagactcagagggtgtggccaccctgcccctcagttatcgcttgggcacctgggtgctggtcactgctgcccgccctggcttcctcaccaactctgtgccctggcgtgttgacaagct

SEQ ID NO: 482410 - DNA, 120 bp, Artificial Sequence
  ENSG00000161682_4 (sequence is synthesized)
gcccttgtatgcgtctgtcagcctctacctgctccctgagcggccggccacgctcatcctctatgaggacctggtgcacattctcctaggctctcccggtgcccgctcccagcccttggt

SEQ ID NO: 482411 - DNA, 120 bp, Artificial Sequence
  ENSG00000161682_5 (sequence is synthesized)
gcagttccagcgccgggctgcccgcctgcctgtcagctccacctacagccagctctgggcgtcacttacgcctgccagcacccagcaggaaatgcgggctttccctgccttcctgggcac

SEQ ID NO: 482412 - DNA, 120 bp, Artificial Sequence
  ENSG00000161682_6 (sequence is synthesized)
tgaggcctccagctcaggcaatggctcctggctggagctgatgcccctgactgctgtgagcgtgcacctgctgacaggtaatgggacagaggtgccgctctcaggccccattcacctgtc

SEQ ID NO: 482413 - DNA, 120 bp, Artificial Sequence
  ENSG00000161682_7 (sequence is synthesized)
cctgcccgtgccctccgagactcgtgccctcaccgtgggcaccagcattccagcctggagatttgaccccaagagtgggctgtgggtgcgcaatggcactggtgtaatccggaaggaagg

SEQ ID NO: 482414 - DNA, 120 bp, Artificial Sequence
  ENSG00000161682_8 (sequence is synthesized)
ccggcagctctactggaccttcgtctccccccagctggggtactgggtggccgccatggcctcccccacggctgggctggtcaccatcacgtcgggcatccaggacatcggcacctacca

SEQ ID NO: 482415 - DNA, 120 bp, Artificial Sequence
  ENSG00000161682_9 (sequence is synthesized)
caccatcttcttgctcaccatcctggcagccctggccctgctggtgcttatcctgctgtgtctgctcatctactactgccggaggcgctgcctgaagccgaggcaacagcaccgcaagct

SEQ ID NO: 482416 - DNA, 120 bp, Artificial Sequence
  ENSG00000161682_10 (sequence is synthesized)
gcagctctcggggccctctgacggtaacaaacgagaccaggccacctcgatgtcccagctccacctcatctgtgggggacccctggaacccgccccgtcgggggaccccgaggctccgcc

SEQ ID NO: 482417 - DNA, 120 bp, Artificial Sequence
  ENSG00000161682_11 (sequence is synthesized)
tccaggccccctccactcggccttctccagctcccgggacttggcctcctcccgggatgacttcttccgcaccaagccgcgctctgccagccgcccggccgccgagccttcgggtgcccg

SEQ ID NO: 482418 - DNA, 80 bp, Artificial Sequence
  ENSG00000161682_12 (sequence is synthesized)
cgggggcgagagcgccgggctcaagggcgctcgctcggccgagggccccggcgggctggagcccggcctagaggagcacc

SEQ ID NO: 482419 - DNA, 120 bp, Artificial Sequence
  ENSG00000161682_13 (sequence is synthesized)
cttcgaccactacctgggccacaagggggcggccgagggcaagacccccgacttcctgctgtcgcagtcggtggaccagctggcgcggccgccgtcgctgggccaggcggggcagctcat

SEQ ID NO: 482420 - DNA, 120 bp, Artificial Sequence
  ENSG00000161682_14 (sequence is synthesized)
cttctgcggctccatcgaccacctcaaggacaacgtctaccgcaacgtcatgcccaccctggtgatccccgcgcactacgtgcgcctcggcggcgaggcgggcgccgccggcgtgggcga

SEQ ID NO: 482421 - DNA, 120 bp, Artificial Sequence
  ENSG00000161682_15 (sequence is synthesized)
cggcgagggctggggggccgggcgcgcggcgcccgtcagtggctcagtcaccatccctgtgctattcaacgagtccaccatggcgcagctcaacggggagctgcaggccctgaccgagaa

SEQ ID NO: 482422 - DNA, 120 bp, Artificial Sequence
  ENSG00000161682_16 (sequence is synthesized)
gaagctgctggaactgggcgtgaagccgcacccgcgcgcctggttcgtgtccctcgacgggcgctccaactcgcaagtgcgccactcttacatcgacctgcaggcgggcggcggggcacg

SEQ ID NO: 482423 - DNA, 120 bp, Artificial Sequence
  ENSG00000161682_17 (sequence is synthesized)
ctcttacatcgacctgcaggcgggcggcggggcacgcagcaccgacgccagcctggactcgggcgtagatgtccacgaggcgcggcccgcgcgccgccggcccgcgagggaggagcggga

SEQ ID NO: 482424 - DNA, 120 bp, Artificial Sequence
  ENSG00000161682_18 (sequence is synthesized)
gcccccgcgcctggcgctcagcgaggacacggagcccagcagcagcgagagccgcacgggcctctgctctccggaggacaactcgctgacgccgctgctggacgaggtggcggcgcccga

SEQ ID NO: 482425 - DNA, 120 bp, Artificial Sequence
  ENSG00000161682_19 (sequence is synthesized)
cggggccgcagccgcggggacagctcccgcagcagcgccagcgagctgcggcgcgactcgctcaccagcccggaggacgagctgggggcggaggtgggcgacgaggcgggagacaagaag

SEQ ID NO: 482426 - DNA, 120 bp, Artificial Sequence
  ENSG00000161682_20 (sequence is synthesized)
ggtgggcgacgaggcgggagacaagaagagcccgtggcagcggcgggaggagcggccgctgatggtgttcaacgtcaagtagcgcccgcgcagggcctggcaccgcccctcccgcgcggg

SEQ ID NO: 482427 - DNA, 120 bp, Artificial Sequence
  ENSG00000161682_21 (sequence is synthesized)
cacccagggtgcgcgccccgggggcccgcgggggccctcgcgcgtagctcccagccccaggccggagaggggcccaggggccttggagctgttccgtggttggtgctgggtcgtgtcttg

SEQ ID NO: 482428 - DNA, 120 bp, Artificial Sequence
  ENSG00000161682_22 (sequence is synthesized)
cttgcaagggaccctgtgtctgcctccaagccggggaggagggggggtccagacccccacggggaggtgccggggaggagggctggggggaagcagtgcctgtgtagacgtggctgtaca

SEQ ID NO: 482429 - DNA, 120 bp, Artificial Sequence
  ENSG00000161682_23 (sequence is synthesized)
tagaaagctctattgtgggaaagcaggaggggtgacccagcctcagctgctagtgtgagggctgggaagggagggggcgttctttgtggacccctgggaggggagggggtgctgcttgct

SEQ ID NO: 482430 - DNA, 120 bp, Artificial Sequence
  ENSG00000161682_24 (sequence is synthesized)
gactagcccatctctgggctacgatgtcacagggctggtggctgggacagctctggggactagggggtaatgtgatacagccgatgtgggcagcagcaaatataaaactggtgaggttaa

SEQ ID NO: 482431 - DNA, 120 bp, Artificial Sequence
  ENSG00000161682_25 (sequence is synthesized)
tctcccggtaaggctccccctcacccacgccaactcttcttccttcccctgacctaggtgtagagacctccactgtcctatattagctgggtgtccttgggcaagtcacttcacctctct

SEQ ID NO: 482432 - DNA, 120 bp, Artificial Sequence
  ENSG00000161682_26 (sequence is synthesized)
gagccataatttgctcatttgtaagacgtggaaggttagtgcctacatcatcaaattggagtaagaaatcacaaagtgaaaaaacacagtacagaaggtgttcaataaatgtttacagtt

SEQ ID NO: 482433 - DNA, 120 bp, Artificial Sequence
  ENSG00000161682_27 (sequence is synthesized)
gaagacccgctctttgcctttggacgttcacagacaagtaggaagacagatcattgcaagccctgaaatagttccagagcaggcagggcagtggagtggagggcagctgctttcagtgct

SEQ ID NO: 482434 - DNA, 120 bp, Artificial Sequence
  ENSG00000161692_0 (sequence is synthesized)
aaactgaagccgcggccgaaaacgccaagagattgatgctgtagctgccctgagataaccaggactgtggaatcgggaagagctcatggagctcgcgaatgtaatacggaggcctctgag

SEQ ID NO: 482435 - DNA, 120 bp, Artificial Sequence
  ENSG00000161692_1 (sequence is synthesized)
gaaggagtacggaggccgagaaggagccggcatttgatgagcgaaccgggaaagggagacgattgcctcgagctggagagttccatggctgagagtaggctccgggccccggacctagga

SEQ ID NO: 482436 - DNA, 120 bp, Artificial Sequence
  ENSG00000161692_2 (sequence is synthesized)
gtttccaggtgtctaggaaaatgccagaagaactcaccaggtgccaggaagcatcccttttccggaaagtccttttacttggatctgcctgctggcaagaatctccagtttttgacgggg

SEQ ID NO: 482437 - DNA, 120 bp, Artificial Sequence
  ENSG00000161692_3 (sequence is synthesized)
gccattcagcaactgggtggggtaattgagggttttctgagcaaagaagtaagttacatcgtgtccagccgcagagaagtaaaggcagagagcagtgggaaaagccatagaggctgccct

SEQ ID NO: 482438 - DNA, 120 bp, Artificial Sequence
  ENSG00000161692_4 (sequence is synthesized)
agccctagccccagtgaggtcagagtggaaacatcggccatggttgatccaaaaggcagccaccccaggccttcacggaaacccgttgactcggtgcctctaagcagagggaaggagctg

SEQ ID NO: 482439 - DNA, 120 bp, Artificial Sequence
  ENSG00000161692_5 (sequence is synthesized)
ctgcagaaggctatcagaaaccaggggagcatcagtggaggaggcagtgggggcagcagcagcctcctgaccaatgcccgctcttggggagtgaggattctgcacgtggatgaaatgatg

SEQ ID NO: 482440 - DNA, 120 bp, Artificial Sequence
  ENSG00000161692_6 (sequence is synthesized)
atgcacgtgcaacagctgtctcttgcgtctttatgtgtgaaaaaacaacagccaaagaagccagagggaacatgtccagcagcagagtcaagaacacggaaagtggccagactgaaggcc

SEQ ID NO: 482441 - DNA, 120 bp, Artificial Sequence
  ENSG00000161692_7 (sequence is synthesized)
ccgttcctcaaaatcgaagatgaaagcaggaagtttcgtcctttccatcatcagtttaaatcctttcctgaaatttcttttcttggacccaaagatgcaagtccctttgaggccccgacg

SEQ ID NO: 482442 - DNA, 120 bp, Artificial Sequence
  ENSG00000161692_8 (sequence is synthesized)
accctgggcagcatgcaccataccagagaatccaaggatggagagccaagcccacgatcagctgcccacaccatgcccaggaggaagaaaggctactgcgagtgctgtcaggaggccttc

SEQ ID NO: 482443 - DNA, 120 bp, Artificial Sequence
  ENSG00000161692_9 (sequence is synthesized)
gaggagctccatgtgcatcttcagagtgcccagcaccggagctttgccctggaagcccatctatatgcagaagtggacaggatcattgctcagctcagccacagctttgcagacatccct

SEQ ID NO: 482444 - DNA, 120 bp, Artificial Sequence
  ENSG00000161692_10 (sequence is synthesized)
ttccaggctggcctccccaggtggtcaggttccccagcttctgattgtgaccctctctgtcctgagactctgcacccccatcagccctcccatcccagggcagcatctcccaggataagg

SEQ ID NO: 482445 - DNA, 120 bp, Artificial Sequence
  ENSG00000161692_11 (sequence is synthesized)
aaagaagacagctgccaggcatcagtgacccaaggcagggctgcgggccagcagcgatggacagaatcactagatggtgtgatgggacctcctgcaagtcacacatgtgtgagtgccaca

SEQ ID NO: 482446 - DNA, 120 bp, Artificial Sequence
  ENSG00000161692_12 (sequence is synthesized)
ttgcccaagggctccagggagcagggctgcctctgtccctgcccagcctcctttacccagtctcatctggtcacttccttggctctgctgcctggggagtggtcgcctgcagaggacatg

SEQ ID NO: 482447 - DNA, 120 bp, Artificial Sequence
  ENSG00000161692_13 (sequence is synthesized)
cccctccatccctcccaagaaaactcctttgccccggcggacattcctgttaagggcccactcctcttccctgaagccagaccgtggcttatgtctgcacgctgctgggttcgtcccttt

SEQ ID NO: 482448 - DNA, 120 bp, Artificial Sequence
  ENSG00000161692_14 (sequence is synthesized)
ccttttgtgacatggggttgcctcattccccatgacaccacccctctgcatgaggaagtttccccttgcccctgtctcagacttggatacctttacctgctgctcacacaaagcctgtgg

SEQ ID NO: 482449 - DNA, 120 bp, Artificial Sequence
  ENSG00000161692_15 (sequence is synthesized)
tgccgggttcgggtgccctcattgtcaactgcaggacccattccccgaacctcacatccgtgtacccttgccttcccctcctatctcaatgatcatgaccttggacatctctgccaggcc

SEQ ID NO: 482450 - DNA, 120 bp, Artificial Sequence
  ENSG00000161692_16 (sequence is synthesized)
aaaccccaaggctggaacactcctcagccatttctccattgcggcttcctggctgtagactcaggttagaggtgaacccagaacacctgagacttgacccaggatggatgggtgctgctt

SEQ ID NO: 482451 - DNA, 120 bp, Artificial Sequence
  ENSG00000161692_17 (sequence is synthesized)
gatgtgaatgaggtcccgcagtggctccttggcgtgagcactgctcagactcctttccactccagccccctttccacatcgcaccagatgacttttacccagacccagtgggcattgcct

SEQ ID NO: 482452 - DNA, 120 bp, Artificial Sequence
  ENSG00000161692_18 (sequence is synthesized)
tatcttgcagtcagtcccttttcaacatgttgccgtttctttctgaagaggtgtcctccctccacaagtcacactgtctgtccctggccctccagcccacctcgccaaccactcttgttg

SEQ ID NO: 482453 - DNA, 120 bp, Artificial Sequence
  ENSG00000161692_19 (sequence is synthesized)
gtttccttctcagacttgccacctttcccctctgccccaaaatgccatgctcctctcctggaaaacacttgagttgattcagtaaatcgacttcaaatacttgaaggctcccaccttctg

SEQ ID NO: 482454 - DNA, 120 bp, Artificial Sequence
  ENSG00000161692_20 (sequence is synthesized)
ttctctggctccttcctgcggtctatacctaccgcctcctcttcacctccttcccttccacacttccttcctgggtagctctgcctgaagcattccactaagatcatctattccaaggtc

SEQ ID NO: 482455 - DNA, 120 bp, Artificial Sequence
  ENSG00000161692_21 (sequence is synthesized)
atggacaggctactggtgaccaaagttggttccttttctcctttctttcctccttgaagcctggctcccttggtcgcagcagcccctcagtggcctggttctcctgtccccctgcccttc

SEQ ID NO: 482456 - DNA, 120 bp, Artificial Sequence
  ENSG00000161692_22 (sequence is synthesized)
ctcaccattgcccattccctcgttcgttcattcagcacaggccttgccgtctgccctgagtcagctccgagacacctgaagagccctccagccctaactactttactcagactaggtccc

SEQ ID NO: 482457 - DNA, 120 bp, Artificial Sequence
  ENSG00000161692_23 (sequence is synthesized)
caggcctttgttcttgcctcttctcgctgagcctttcacttctcggcagatgtgaccgattggtagctccaccccaactcccttctgctgggtggaatgcaggagctagctgcctccaac

SEQ ID NO: 482458 - DNA, 120 bp, Artificial Sequence
  ENSG00000161692_24 (sequence is synthesized)
tcactgtgacctcagaaaaatgcctttattactcgggcctcagtttcctcgtctttaagtaaggggcttggatgagatgatttcaggaccctttccaataataaaatactgtgactgcca

SEQ ID NO: 482459 - DNA, 120 bp, Artificial Sequence
  ENSG00000161692_25 (sequence is synthesized)
gccggtggtctccagcatagggagggatttcactcttcttcccaggttcttctgaagcacccacacaaaatgcacactctgcgatatgtagtattgtcattatttccttcttctacatca

SEQ ID NO: 482460 - DNA, 120 bp, Artificial Sequence
  ENSG00000161692_26 (sequence is synthesized)
ggatgccgggaaggggagaaagaaaggcggaaggggtcgttaatagctgaggcgaggtgcggagtcgtggagggggcttaggaagtgaccagcgggagacgattgcctcgagctggagag

SEQ ID NO: 482461 - DNA, 120 bp, Artificial Sequence
  ENSG00000161692_27 (sequence is synthesized)
aagaagacagctgccaggcatcaggtatcccagagcaggatgggacagtggacagcacgcaggcaccagctgaacgtgcagggactggtgaggtacctggacctatagcaagctgccagg

SEQ ID NO: 482462 - DNA, 120 bp, Artificial Sequence
  ENSG00000161692_28 (sequence is synthesized)
acctgggggtgtcagttgatgtgtttgtggaccccccagggataccagtgtccaggagccctgcttgccaatgcctcctgcctagctctggttttatggaactctcctctggcccagacc

SEQ ID NO: 482463 - DNA, 120 bp, Artificial Sequence
  ENSG00000161692_29 (sequence is synthesized)
caccaggacaactagtggcaagcgtcttccctctcttccccttacaggccatgagtccaggctcctcgcctccctccagcccttgtgccactcacagacctgcctctctctcccagaccc

SEQ ID NO: 482464 - DNA, 120 bp, Artificial Sequence
  ENSG00000161692_30 (sequence is synthesized)
cttcccctggcagcccacagacagaccagcagagttctgggccacacagccctcctggctggggaaagggtggcccccagggcctgaggattctgagtgtacagccactggccctgtatc

SEQ ID NO: 482465 - DNA, 120 bp, Artificial Sequence
  ENSG00000161692_31 (sequence is synthesized)
ccaggaggctggccagctcctcagctgccccacagctccaggctggccatcagctcccctgtactcagctaccagtgtgcagccctcgggagcacctgtagagagcaggtctacctccct

SEQ ID NO: 482466 - DNA, 120 bp, Artificial Sequence
  ENSG00000161692_32 (sequence is synthesized)
cctgcagcccctgccagccagtgcgggagccagctgttcccgatgcctctgggccccccagcctctccaggtgccctgtctccctgtctcccagccctggtcccaaccccagccccagcc

SEQ ID NO: 482467 - DNA, 120 bp, Artificial Sequence
  ENSG00000161692_33 (sequence is synthesized)
ccagccccatgctggcagagagctgctcctacgagtccccaaggtgcttggctcttcacagggccaggcagctccagattgaagggccacagatacaacttactcctctgctgggtgctg

SEQ ID NO: 482468 - DNA, 120 bp, Artificial Sequence
  ENSG00000161692_34 (sequence is synthesized)
cacacccggccagggctgaccaggacgcaggaggggcagaaccccaggacttccccaaaagagctagaaggaggcccgggcctggcctttgaagtccagcaagcagctgtcacgctcagc

SEQ ID NO: 482469 - DNA, 120 bp, Artificial Sequence
  ENSG00000161692_35 (sequence is synthesized)
tccatggagctgacagagccacccctcccactggccaggtctttgggagagaatctgggctgggggctgccctctcctacccctgcctcctgccatgttcctgaccaggcagagtctaca

SEQ ID NO: 482470 - DNA, 120 bp, Artificial Sequence
  ENSG00000161692_36 (sequence is synthesized)
gtgggcttgcccagctgaggctggccgcccacgccaggaggcagaggcgaagttggcatggggagggaccacaaaggagctggggcagcaggagtcctggcccggcttcctggccctcca

SEQ ID NO: 482471 - DNA, 120 bp, Artificial Sequence
  ENSG00000161692_37 (sequence is synthesized)
caggcccttgcctctctgcagagccgcgggttagctgttggtgtgctccacccccaaccccggcctcctttctcacgagcatgtggccgctcctgctttccaaaatgactgtgtttgtcc

SEQ ID NO: 482472 - DNA, 120 bp, Artificial Sequence
  ENSG00000161692_38 (sequence is synthesized)
cctcccccagccccccacgctcccgcacacagatcctcaggaacatatgaagcagaggaggggcttgggctgcaccactcacagagctccctcccccaggcacttagttggggcccagca

SEQ ID NO: 482473 - DNA, 120 bp, Artificial Sequence
  ENSG00000161692_39 (sequence is synthesized)
ctgacctttcccctgagcccaggatgtggccagagccccctctgggacccctctcgccccttctctgcctcctcagcttgagctgcctgcccgaagttcggctgttccggggccagtgtg

SEQ ID NO: 482474 - DNA, 120 bp, Artificial Sequence
  ENSG00000161692_40 (sequence is synthesized)
tcacctgccaacttccacatcaccctcctccctcgctccctcctctccttccccaaggacctccccccatttctggcagccaagccattaatctggagacagaaatgggtttgctatcga

SEQ ID NO: 482475 - DNA, 120 bp, Artificial Sequence
  ENSG00000161692_41 (sequence is synthesized)
ttctgacttgatttccttccctgcctttctctgttagaggagtgctagcatgtttagcccttgctggtctttcacctgagggtacagctgagtagttcacacagcatggcctccctcaca

SEQ ID NO: 482476 - DNA, 120 bp, Artificial Sequence
  ENSG00000161692_42 (sequence is synthesized)
gccacagctcttcagtggtgccttaaagtccttagcaagccatgaggcaccttctgttcaaagatgagttgtattcaatgctgcaaaagagcatgacacccgctcaggtgctgttccagg

SEQ ID NO: 482477 - DNA, 120 bp, Artificial Sequence
  ENSG00000161692_43 (sequence is synthesized)
gatagaggacccagtccttaacctccgctgtcaggagatgcagaggggatgtgtagccagaaggtggcaggcaaggctggagtgattcagtgggctggcccagcgagtttagtcctgcag

SEQ ID NO: 482478 - DNA, 120 bp, Artificial Sequence
  ENSG00000161692_44 (sequence is synthesized)
gccacctccaactctggagcctaccaagagaactgtggggatgtgggatgtggcgggacagggttgctgggtacagaagccagacttcttttacaagtaactctaggctgggtgtggtgg

SEQ ID NO: 482479 - DNA, 88 bp, Artificial Sequence
  ENSG00000161692_45 (sequence is synthesized)
aacatggcgaaaccccatctctaccgaaaaattagcagggtgtggtggcacgcacctgtagtccccgctacgcaggtggctgaagcag

SEQ ID NO: 482480 - DNA, 120 bp, Artificial Sequence
  ENSG00000161692_46 (sequence is synthesized)
ggaggagttaaggtgatcttgtgagaagagtcatgctggtgacatcaggaggggtacatggctgtgatgggggaggtggtgctgctggactgagccagtggagggggaagatctgcagct

SEQ ID NO: 482481 - DNA, 120 bp, Artificial Sequence
  ENSG00000161692_47 (sequence is synthesized)
agcatagtttcatgctcagtgaggatgatggtcaccgtgtttgttgtgtacttactgtgctgagagctttcctcgcagaggccctcccaacgaacagctctctcagaagcatctgttcct

SEQ ID NO: 482482 - DNA, 120 bp, Artificial Sequence
  ENSG00000161692_48 (sequence is synthesized)
tcctggtcacgaggtggccagagcacaatgtataggcagaccagtggtccttcctctcccaatgtggccatgtggaggacaggatgtcttcctgggggttgggatggactctctgggcac

SEQ ID NO: 482483 - DNA, 120 bp, Artificial Sequence
  ENSG00000161692_49 (sequence is synthesized)
tgtactctctctcctacctgcctccctgcagtccctcccatggatgactcaggcctcccagaagcaatttctatctgtccccttcactttcaggccttggggagtctctgctcctacctg

SEQ ID NO: 482484 - DNA, 120 bp, Artificial Sequence
  ENSG00000161692_50 (sequence is synthesized)
actctgtgttgtaatttcaggggagcatcagtggaggaggcagtgggggcagcagcagcctcctgaccaatgcccgctcttggggagtgaggattctgcacgtggatggtaccctttctg

SEQ ID NO: 482485 - DNA, 120 bp, Artificial Sequence
  ENSG00000161692_51 (sequence is synthesized)
tgctgggctcctgtggagggagaattggtgactttgaccaggagtgtcagcttttagaaggatcatggtcatgtgagcttctggtcaccggaagccagaaatactcagctgccatgttga

SEQ ID NO: 482486 - DNA, 120 bp, Artificial Sequence
  ENSG00000161692_52 (sequence is synthesized)
tccacaaaggtgggaggatgtggggaagggggaaagcggtgaggacgcagagtgcaggctgtggcctcggcatcccgcaggaggtccctagaacatgccgtttcatgtcacctgctacag

SEQ ID NO: 482487 - DNA, 120 bp, Artificial Sequence
  ENSG00000161692_53 (sequence is synthesized)
acatgccgtttcatgtcacctgctacagctctcccccagctagtatgatgatcctgttttacaaatgcagaaatgatcttaatattcatgaccactggccaggcgaggtggctcacacct

SEQ ID NO: 482488 - DNA, 80 bp, Artificial Sequence
  ENSG00000161714_0 (sequence is synthesized)
cttcgctcgccgcctcgctcagagccggggccgggccagagcggcgccccgctgccctgtccccgcgtgcagaccccggg

SEQ ID NO: 482489 - DNA, 120 bp, Artificial Sequence
  ENSG00000161714_1 (sequence is synthesized)
gaggagcccccggtggccgcccaggtcgcagcccaagtcgcggcgccggtcgctctcccgtccccgccgactccctccgatggcggcaccaagaggcccgggctgcgggcgctgaagaag

SEQ ID NO: 482490 - DNA, 120 bp, Artificial Sequence
  ENSG00000161714_2 (sequence is synthesized)
cccgggctgcgggcgctgaagaagatgggcctgacggaggacgaggacgtgcgcgccatgctgcggggctcccggctccgcaagatccgctcgcgcacgtggcacaaggagcggctgtac

SEQ ID NO: 482491 - DNA, 120 bp, Artificial Sequence
  ENSG00000161714_3 (sequence is synthesized)
cggctgcaggaggacggcctgagcgtgtggttccagcggcgcatcccgcgtgcgccatcgcagcacatcttcttcgtgcagcacatcgaggcggtccgcgagggccaccagtccgagggc

SEQ ID NO: 482492 - DNA, 120 bp, Artificial Sequence
  ENSG00000161714_4 (sequence is synthesized)
ctgcggcgcttcgggggtgccttcgcgccagcgcgctgcctcaccatcgccttcaagggccgccgcaagaacctggacctggcggcgcccacggctgaggaagcgcagcgctgggtgcgc

SEQ ID NO: 482493 - DNA, 120 bp, Artificial Sequence
  ENSG00000161714_5 (sequence is synthesized)
ggtctgaccaagctccgcgcgcgcctggacgccatgagccagcgcgagcggctagaccactggatccactcctatctgcaccgggctgactccaaccaggacagcaagatgagcttcaag

SEQ ID NO: 482494 - DNA, 120 bp, Artificial Sequence
  ENSG00000161714_6 (sequence is synthesized)
gagatcaagagcctgctgagaatggtcaacgtggacatgaacgacatgtacgcctacctcctcttcaaggagtgtgaccactccaacaacgaccgtctagagggggctgagatcgaggag

SEQ ID NO: 482495 - DNA, 120 bp, Artificial Sequence
  ENSG00000161714_7 (sequence is synthesized)
ttcctgcggcggctgctgaagcggccggagctggaggagatcttccatcagtactcgggcgaggaccgcgtgctgagtgcccctgagctgctggagttcctggaggaccagggcgaggag

SEQ ID NO: 482496 - DNA, 120 bp, Artificial Sequence
  ENSG00000161714_8 (sequence is synthesized)
ggcgccacactggcccgcgcccagcagctcattcagacctatgagctcaacgagacagccaagcagcatgagctgatgacactggatggcttcatgatgtacctgttgtcgccggagggg

SEQ ID NO: 482497 - DNA, 120 bp, Artificial Sequence
  ENSG00000161714_9 (sequence is synthesized)
gctgccttggacaacacccacacgtgtgtgttccaggacatgaaccagccccttgcccactacttcatctcttcctcccacaacacctatctgactgactcccagatcggggggcccagc

SEQ ID NO: 482498 - DNA, 120 bp, Artificial Sequence
  ENSG00000161714_10 (sequence is synthesized)
agcaccgaggcctatgttagggcctttgcccagggatgccgctgcgtggagctggactgctgggaggggccaggaggggagcccgtcatctatcatggccataccctcacctccaagatt

SEQ ID NO: 482499 - DNA, 120 bp, Artificial Sequence
  ENSG00000161714_11 (sequence is synthesized)
ctcttccgggacgtggtccaagccgtgcgcgaccatgccttcacgctgtccccttaccctgtcatcctatccctggagaaccactgcgggctggagcagcaggctgccatggcccgccac

SEQ ID NO: 482500 - DNA, 120 bp, Artificial Sequence
  ENSG00000161714_12 (sequence is synthesized)
ctctgcaccatcctgggggacatgctggtgacacaggcgctggactccccaaatcccgaggagctgccatccccagagcagctgaagggccgggtcctggtgaagggaaagaagttgccc

SEQ ID NO: 482501 - DNA, 120 bp, Artificial Sequence
  ENSG00000161714_13 (sequence is synthesized)
gctgctcggagcgaggatggccgggctctgtcggatcgggaggaggaggaggaggatgacgaggaggaagaagaggaggtggaggctgcagcgcagaggcggctggccaagcagatctcc

SEQ ID NO: 482502 - DNA, 120 bp, Artificial Sequence
  ENSG00000161714_14 (sequence is synthesized)
ccggagctgtcggccctggctgtgtactgccacgccacccgcctgcggaccctgcaccctgcccccaacgccccacaaccctgccaggtcagctccctcagcgagcgcaaagccaagaaa

SEQ ID NO: 482503 - DNA, 120 bp, Artificial Sequence
  ENSG00000161714_15 (sequence is synthesized)
ctcattcgggaggcagggaacagctttgtcaggcacaatgcccgccagctgacccgcgtgtacccgctggggctgcggatgaactcagccaactacagtccccaggagatgtggaactcg

SEQ ID NO: 482504 - DNA, 120 bp, Artificial Sequence
  ENSG00000161714_16 (sequence is synthesized)
ggctgtcagctggtggccttgaacttccagacgccaggctacgagatggacctcaatgccgggcgcttcctagtcaatgggcagtgtggctacgtcctaaaacctgcctgcctgcggcaa

SEQ ID NO: 482505 - DNA, 120 bp, Artificial Sequence
  ENSG00000161714_17 (sequence is synthesized)
cctgactcgacctttgaccccgagtacccaggacctcccagaaccactctcagcatccaggtgctgactgcacagcagctgcccaagctgaatgccgagaagccacactccattgtggac

SEQ ID NO: 482506 - DNA, 120 bp, Artificial Sequence
  ENSG00000161714_18 (sequence is synthesized)
cccctggtgcgcattgagatccatggggtgcccgcagactgtgcccggcaggagactgactacgtgctcaacaatggcttcaacccccgctgggggcagaccctgcagttccagctgcgg

SEQ ID NO: 482507 - DNA, 120 bp, Artificial Sequence
  ENSG00000161714_19 (sequence is synthesized)
gctccggagctggcactggtccggtttgtggtggaagattatgacgccacctcccccaatgactttgtgggccagtttacactgcctcttagcagcctaaagcaagggtaccgccacata

SEQ ID NO: 482508 - DNA, 120 bp, Artificial Sequence
  ENSG00000161714_20 (sequence is synthesized)
cacctgctttccaaggacggggcctcactgtcaccagccacgctcttcatccaaatccgcatccagcgctcctgagggcccacctcactcgccttggggttctgcgagtgccagtccaca

SEQ ID NO: 482509 - DNA, 120 bp, Artificial Sequence
  ENSG00000161714_21 (sequence is synthesized)
tcccctgcagagccctctcctcctctggagtcaggtggtgggagtaccagccccccagcccacccacttggcccactcagcccattcaccaggcgctggtctcacctgggtgctgagggc

SEQ ID NO: 482510 - DNA, 120 bp, Artificial Sequence
  ENSG00000161714_22 (sequence is synthesized)
tgcctgggcccctcctgaagaacagaaaggtgttcatgtgacttcagtgagctccaaccctggggccctgagatggccccagctcctcttgtcctcagcccacccctcattgtgacttat

SEQ ID NO: 482511 - DNA, 120 bp, Artificial Sequence
  ENSG00000161714_23 (sequence is synthesized)
gaggagcaagcctgttgctgccaggagacttggggagcaggacacttgtgggccctcagttcccctctgtcctcccgtgggccatcccagcctccttcccccagaggagcgcagtcactc

SEQ ID NO: 482512 - DNA, 120 bp, Artificial Sequence
  ENSG00000161714_24 (sequence is synthesized)
cacttggccccgaccccgagcttagcccctaagccctcctttaccccaggccttcctggactcctccctccagctccggaacctgagctccccttcccttctcaaagcaagaagggagcg

SEQ ID NO: 482513 - DNA, 90 bp, Artificial Sequence
  ENSG00000161714_25 (sequence is synthesized)
cttcccttctcaaagcaagaagggagcgctgaggcatgaagccctggggaaactggcagtaggttttggtttttattttttgagacagga

SEQ ID NO: 482514 - DNA, 86 bp, Artificial Sequence
  ENSG00000161714_26 (sequence is synthesized)
agctgggactacaggcacaggccaccaaacctggctaatgtttaaattttatgtagagatggcggggggggcgctcctgacctcaa

SEQ ID NO: 482515 - DNA, 83 bp, Artificial Sequence
  ENSG00000161714_27 (sequence is synthesized)
cctgccccagcatggcctggccgtaggtttgtaactgtttcatagaagagccctggagaagacagtagaatgagcctatctag

SEQ ID NO: 482516 - DNA, 120 bp, Artificial Sequence
  ENSG00000161714_28 (sequence is synthesized)
agaagagccctggagaagacagtagaatgagcctatctagtttaaaaaataaagaagcacgttgatttcaccaccgccactccctgagcacctctatgctgccacccccacaggcccatg

SEQ ID NO: 482517 - DNA, 120 bp, Artificial Sequence
  ENSG00000161714_29 (sequence is synthesized)
aggagggacagggctggatgagtttcttgggcctctcccctcaacagggcatggacttggctaagacagccagggggtggcagcaggagatgccacagctctaaatagcccgatccctgc

SEQ ID NO: 482518 - DNA, 120 bp, Artificial Sequence
  ENSG00000161714_30 (sequence is synthesized)
agctctaaatagcccgatccctgctcctggcttaaagctgctgcgagtatcacaagactgtctgaggatgccaattcagcaggtcagcgcctccccacaacacacacacacacacacaca

SEQ ID NO: 482519 - DNA, 120 bp, Artificial Sequence
  ENSG00000161714_31 (sequence is synthesized)
ggggccttgaatgaggaggagacaggagtctgagggaccctcagactgccactctccaggcttggctgggctcaaggcccctgtctgctcagtagggcaaatcccaaggacacgggcttc

SEQ ID NO: 482520 - DNA, 120 bp, Artificial Sequence
  ENSG00000161714_32 (sequence is synthesized)
ccttcctccagccagccagccttttacacaaaggctggaaacgctgcttgggccgcctctatagaaatgccaggagagcgcactggacactaggcgacagaatctggagaaaatcctgca

SEQ ID NO: 482521 - DNA, 120 bp, Artificial Sequence
  ENSG00000161714_33 (sequence is synthesized)
cccgcccctgccagcagggtgaaatgtggaggcctggtgttttaggttctgccagccaacagtgccggcactggacaagggcagaacttgacattagtccccagagggtggcctggaact

SEQ ID NO: 482522 - DNA, 120 bp, Artificial Sequence
  ENSG00000161714_34 (sequence is synthesized)
gggctgggataggccttgaactggccccaagccccacagaaaccaaaacacagggctggggcagactccaccttctagcaactccaagaactaatgcagaaagtggcagtgtcccccgct

SEQ ID NO: 482523 - DNA, 120 bp, Artificial Sequence
  ENSG00000161714_35 (sequence is synthesized)
ccttcatgctgggagtggcgtttggctctggttaatttgtgtgtctgaaagaggataatcagaatcaaaagggcccagaaggaatgggccgagccaggcgggccgggccaggcagcccgg

SEQ ID NO: 482524 - DNA, 120 bp, Artificial Sequence
  ENSG00000161714_36 (sequence is synthesized)
gcatctggcactcagggctgtcagagggtcaggctgccaaactgcagcctcaggatgggaggcacagtgaggctaagtccagttttagcaaatgaagagccattagcattgcccagcccc

SEQ ID NO: 482525 - DNA, 120 bp, Artificial Sequence
  ENSG00000161714_37 (sequence is synthesized)
tgcagagccaggtctggccaggggctggctggggggtctgggtcaggtgagcaccagacccagggctgagtgcccatcctgcttggcttctctggtttcgtatctggtaccaagaggaag

SEQ ID NO: 482526 - DNA, 120 bp, Artificial Sequence
  ENSG00000161714_38 (sequence is synthesized)
gggtgaaggctaggatgagggcccaatactgagaaggctgccttgaaagggcaagagtcttttttttttttcttttgagacaaagtcttgctcgtcccccaggatggagtgcgatggcgt

SEQ ID NO: 482527 - DNA, 120 bp, Artificial Sequence
  ENSG00000161714_39 (sequence is synthesized)
caggcgtgagccactgcacccagccaaaagggcaagagtctttaaggaagtgaactgggaagcagaagcaagggagaaatcacagggttttttttttgtttgtttttttgagatggagtc

SEQ ID NO: 482528 - DNA, 120 bp, Artificial Sequence
  ENSG00000161714_40 (sequence is synthesized)
gcctgaaatcacagctttttatcccagaggcccatgggtagaaacaacacatagggctatgttctctcagcccaaagctaagggcaggaaaaaaggcatgggccataggagcctgagtga

SEQ ID NO: 482529 - DNA, 120 bp, Artificial Sequence
  ENSG00000161714_41 (sequence is synthesized)
cttggtttgggacaggagggttggggggctttagaggggtcaggcaggtcctgtgtcctctcagtttccctggaaaggggcttggaggcaccagtcatggacctgaaaggatcagggggt

SEQ ID NO: 482530 - DNA, 120 bp, Artificial Sequence
  ENSG00000161714_42 (sequence is synthesized)
cagggaatgggtaagttccagaggatgagaagagggggaatgggaagtcttaaacacagctactggggcccagcaacttgccatgttaaaatgcacccctagtgactcaaagaaccaccc

SEQ ID NO: 482531 - DNA, 120 bp, Artificial Sequence
  ENSG00000161714_43 (sequence is synthesized)
ggccagtggtgcaggaggagagatgtggcacctgggcacagtgggaaggcacggggcctgcacctccaccagaggagccactgctgacctggaccaagggggctgctctgtgcccagcta

SEQ ID NO: 482532 - DNA, 120 bp, Artificial Sequence
  ENSG00000161714_44 (sequence is synthesized)
gggaagcctgggccggctcctgtgctgaggtgctcaggtgctggctgagagcccagttgctgctctaacttggagtgaacctgggtcaatagcagctcgtctctggcgggtgggaagggt

SEQ ID NO: 482533 - DNA, 120 bp, Artificial Sequence
  ENSG00000161714_45 (sequence is synthesized)
ctgacaacaccaagtttgccctggaagaagggcagccttaaaggaaggcctttggaagctggcctggtgctgtgggcttgagggactttgtgtccaagccctgtcgtcctggctccagcc

SEQ ID NO: 482534 - DNA, 120 bp, Artificial Sequence
  ENSG00000161714_46 (sequence is synthesized)
taggctccagcactccatttcttccactgccacctgctgaccaggaataccaggacagaaggttttgttcagctgctttctttattagaaacaagtgagatgtattgagcagaacaacaa

SEQ ID NO: 482535 - DNA, 120 bp, Artificial Sequence
  ENSG00000161714_47 (sequence is synthesized)
gtgtgcgcccatgtctctgccggacccaggccaccggccgcagaaacgctgccacctggacgtcccccacttcgcgcacgcactctggtgcttgcatataaatagcctgacggaggacga

SEQ ID NO: 482536 - DNA, 120 bp, Artificial Sequence
  ENSG00000161714_48 (sequence is synthesized)
gtccaggctggtcttgaactcctgggctaaaagaatcctcctgccttggattcccaaagtgctgggattacaggtgcctgacggaggacgaggacgtgcgcgccatgctgcggggctccc

SEQ ID NO: 482537 - DNA, 120 bp, Artificial Sequence
  ENSG00000161714_49 (sequence is synthesized)
acctctgcaccatcctgggggacatgctggtgacacaggcgctggactccccaaatcccgaggagctgccatccccagagccagcccctcacaaggcggtggttgaataactgactgact

SEQ ID NO: 482538 - DNA, 120 bp, Artificial Sequence
  ENSG00000161714_50 (sequence is synthesized)
acggatgcccacccacgggttgacgtcgcggacaactacaccgcgggtgccgggctggggtgccggcctgtccaagcctcgaacccagaaccagttgctggggactccaggctcggctcc

SEQ ID NO: 482539 - DNA, 120 bp, Artificial Sequence
  ENSG00000161791_0 (sequence is synthesized)
ccgtccgccttgcttcggtgcggctgtccgctacgctgcctccgccctcgccgcgcgcccccgccagcgggactccagggaacccccggcgccctcgacggggccgaggagtcgggactc

SEQ ID NO: 482540 - DNA, 120 bp, Artificial Sequence
  ENSG00000161791_1 (sequence is synthesized)
actcggggagccggcgctgagggaggagcctggtcggagccgcggagccgaaagctccggagcgtggaggtggggggccgaggcccctgagggggccccgccgcgatgggcaacctggag

SEQ ID NO: 482541 - DNA, 120 bp, Artificial Sequence
  ENSG00000161791_2 (sequence is synthesized)
agcgccgagggggtcccgggagagcccccctctgtcccgttgttgctgccgcccggcaagatgccgatgcctgagccctgtgagctggaggaaaggttcgccctggtgctgagctccatg

SEQ ID NO: 482542 - DNA, 120 bp, Artificial Sequence
  ENSG00000161791_3 (sequence is synthesized)
aacctgcctccagacaaggcccggctcctgcggcagtatgacaatgagaagaaatgggatctgatctgtgaccaggaacgattccaggtgaagaatcctccccacacttacattcagaaa

SEQ ID NO: 482543 - DNA, 120 bp, Artificial Sequence
  ENSG00000161791_4 (sequence is synthesized)
ctccagagcttcttggaccccagtgtaactcggaagaagttcaggaggagggtgcaggagtcaaccaaagtactaagggagctggagatctctcttcgcaccaaccacattgggtgggtg

SEQ ID NO: 482544 - DNA, 120 bp, Artificial Sequence
  ENSG00000161791_5 (sequence is synthesized)
cgggaatttctgaatgatgaaaacaaaggcctggatgtactggtggattacctgtcctttgcccagtgttctgtcatgtttgactttgagggtctggaaagtggtgacgatggtgcattt

SEQ ID NO: 482545 - DNA, 120 bp, Artificial Sequence
  ENSG00000161791_6 (sequence is synthesized)
gacaaactccggtcctggagcaggtcaatcgaggacctgcagccacccagcgccctgtcggcccccttcaccaacagcctcgctcgctctgcgcgccagtctgtgctccggtatagcact

SEQ ID NO: 482546 - DNA, 120 bp, Artificial Sequence
  ENSG00000161791_7 (sequence is synthesized)
ctccctgggcgcagggccctgaagaactcccgcctagtgagccagaaggatgacgtccacgtctgtatcctttgtctcagagccatcatgaactatcagtacggattcaacctggtcatg

SEQ ID NO: 482547 - DNA, 120 bp, Artificial Sequence
  ENSG00000161791_8 (sequence is synthesized)
tcccacccccatgctgtcaatgagattgcacttagcctcaataacaagaatccaaggaccaaagcccttgtcttagagcttctggcagctgtgtgtttggtgcgaggaggtcacgaaatc

SEQ ID NO: 482548 - DNA, 120 bp, Artificial Sequence
  ENSG00000161791_9 (sequence is synthesized)
atccttgctgcctttgacaatttcaaagaggtatgcaaggagctgcaccgctttgagaagctgatggagtatttccggaatgaggacagcaatattgacttcatggtggcctgcatgcag

SEQ ID NO: 482549 - DNA, 120 bp, Artificial Sequence
  ENSG00000161791_10 (sequence is synthesized)
ttcatcaacatcgtggtgcactcggtggaggacatgaacttccgggtccacctgcagtatgagtttaccaagctggggctagaggagttcctgcagaagtcaaggcacacagagagcgag

SEQ ID NO: 482550 - DNA, 120 bp, Artificial Sequence
  ENSG00000161791_11 (sequence is synthesized)
aagctgcaggtgcagattcaggcatatctggacaacgtgtttgatgtcgggggtttgttggaggatgctgagaccaagaatgtagccctggagaaggtggaggagttggaggagcatgtg

SEQ ID NO: 482551 - DNA, 120 bp, Artificial Sequence
  ENSG00000161791_12 (sequence is synthesized)
tcccatctcacagagaagcttctggacctagagaatgaaaacatgatgcgggtggcagaactagagaagcagctgctacagcgggagaaggaactagagagcatcaaggagacatatgag

SEQ ID NO: 482552 - DNA, 120 bp, Artificial Sequence
  ENSG00000161791_13 (sequence is synthesized)
aacacaagccaccaggtgcacaccctgcggaggctcattaaagagaaggaggaggcctttcagcgtcgatgtcatttggagccaaatgtccggggcctggagtctgtggacagtgaggcc

SEQ ID NO: 482553 - DNA, 120 bp, Artificial Sequence
  ENSG00000161791_14 (sequence is synthesized)
ctggccagagtaggccctgcagagctgagtgagggcatgccaccctccgacctggaccttctggctccagccccaccccctgaggaggtcctgcctcttcctccaccaccagctccgccc

SEQ ID NO: 482554 - DNA, 120 bp, Artificial Sequence
  ENSG00000161791_15 (sequence is synthesized)
ttgccccctccacctcccccattaccagacaagtgtcccccagccccacctctccctggtgctgcaccctctgtggtgttgacagtgggcctgtcagccattcgaattaagaaacctatc

SEQ ID NO: 482555 - DNA, 120 bp, Artificial Sequence
  ENSG00000161791_16 (sequence is synthesized)
aagaccaagttccggctgcctgtcttcaactggacagcactgaaacccaaccagatcagtggcactgtcttcagcgaacttgatgatgagaagatcttggaggacctggatcttgataag

SEQ ID NO: 482556 - DNA, 120 bp, Artificial Sequence
  ENSG00000161791_17 (sequence is synthesized)
tttgaagaattattcaagacaaaagcgcagggccctgcccttgacctcatctgctccaaaaacaagacagcgcaaaaagctgccagcaaggtgactctgttggaagccaatcgtgccaag

SEQ ID NO: 482557 - DNA, 120 bp, Artificial Sequence
  ENSG00000161791_18 (sequence is synthesized)
aacctggccatcaccctacgcaaggctggccgctcggctgaggagatctgcagggccattcatacgtttgacttgcagacactacctgtggacttcgtggagtgcctgatgcgcttcctg

SEQ ID NO: 482558 - DNA, 120 bp, Artificial Sequence
  ENSG00000161791_19 (sequence is synthesized)
cccacagaggctgaggtaaagctgctgcggcaatatgagcgggagcggcagcccctggaggagttggcagctgaggaccgcttcatgctgctcttcagcaaggtggaacggttgacccag

SEQ ID NO: 482559 - DNA, 120 bp, Artificial Sequence
  ENSG00000161791_20 (sequence is synthesized)
cgaatggctggcatggccttcctggggaacttccaggataacctgcagatgctcacaccgcaactcaatgccatcattgcggcgtccgcttccgtcaagtcttcacagaagctgaagcag

SEQ ID NO: 482560 - DNA, 120 bp, Artificial Sequence
  ENSG00000161791_21 (sequence is synthesized)
atgttggagatcatacttgcactggggaactacatgaacagcagcaagcggggagctgtgtatggcttcaagctccagagcctggatctgctgctggataccaagtccactgaccggaag

SEQ ID NO: 482561 - DNA, 120 bp, Artificial Sequence
  ENSG00000161791_22 (sequence is synthesized)
atgacactgcttcatttcatcgccttgacagtgaaggagaaatacccagacctggctaacttctggcatgagctgcactttgttgagaaggctgcagcagtgtccctggagaacgtgctg

SEQ ID NO: 482562 - DNA, 120 bp, Artificial Sequence
  ENSG00000161791_23 (sequence is synthesized)
ctggacgtgaaggagctgggccggggcatggagctgattcggcgtgagtgcagcatccatgacaacagcgtcctccggaacttcctcagtaccaatgaaggcaaactagacaagctccag

SEQ ID NO: 482563 - DNA, 120 bp, Artificial Sequence
  ENSG00000161791_24 (sequence is synthesized)
cgggacgccaagacggctgaggaggcctacaatgcagttgtgcgctactttggcgagagtcccaagactacacctccttctgtattcttcccagtatttgtccgattcattcgttcttac

SEQ ID NO: 482564 - DNA, 120 bp, Artificial Sequence
  ENSG00000161791_25 (sequence is synthesized)
aaggaagcagaacaagagaatgaagcccgcaagaagcaggaggaggtaatgcgggagaagcagctggctcaggaagccaagaaactggatgccaagaccccatcccagcggaacaagtgg

SEQ ID NO: 482565 - DNA, 120 bp, Artificial Sequence
  ENSG00000161791_26 (sequence is synthesized)
caacagcaggagttaatagcagagttgaggcggcgccaggccaaggaacaccggcctgtttatgaggggaaggatggtaccatcgaggacatcatcacaggcctccactgccagcctatg

SEQ ID NO: 482566 - DNA, 120 bp, Artificial Sequence
  ENSG00000161791_27 (sequence is synthesized)
gttgttcgccaccaagccaggagtgctgcaccgcccagtggtccccctcgggctccaggcccccactgagaccctctcggaggcagaagcacttcacccctcagagtcctacaagtccaa

SEQ ID NO: 482567 - DNA, 120 bp, Artificial Sequence
  ENSG00000161791_28 (sequence is synthesized)
ccagtggacctggaattggccaagggctcaggagagggctgtgttgctctctcaaccatgtccgccccagctcttgaggctggatctttctacttgtgccactatgggcactaggtctgt

SEQ ID NO: 482568 - DNA, 120 bp, Artificial Sequence
  ENSG00000161791_29 (sequence is synthesized)
aggtccctggtgcttccagtactgcactttgcccccaaggtctttgacttcatttcctgaagggtcaccaagggtcagctcagggctaggaaaaaccatttccagccttagcctaaacag

SEQ ID NO: 482569 - DNA, 120 bp, Artificial Sequence
  ENSG00000161791_30 (sequence is synthesized)
ggcacatagatctctcccactagagcccagagggatgagaggagagagcaactgttctttctttttttttcccttcctttttgcaggcccatggtcagctctggtctagatgtatctagg

SEQ ID NO: 482570 - DNA, 120 bp, Artificial Sequence
  ENSG00000161791_31 (sequence is synthesized)
cttagggagccctgggaccctgccagtctcagttcatctcttaccaggagcaaggccctctgaagcatgggccgtgccagctgtgccctagtgataagggtaagaggagagatgtcaggc

SEQ ID NO: 482571 - DNA, 120 bp, Artificial Sequence
  ENSG00000161791_32 (sequence is synthesized)
tcactgcccttatttctctgcccatttcattctaggctcacactgtccttgtcaaggtgggcagaagagcagaggtcttctctgcaccaaccactctctgcagatggctggagaaagggt

SEQ ID NO: 482572 - DNA, 120 bp, Artificial Sequence
  ENSG00000161791_33 (sequence is synthesized)
tttttttttttttttttttttttggcaggggacaaggagcatggtggtcttggctatttgcttaccttcccgtttctcctctgcccctggaagggaatgtgggggcccacttttttgtac

SEQ ID NO: 482573 - DNA, 120 bp, Artificial Sequence
  ENSG00000161791_34 (sequence is synthesized)
ccctggaagggaatgtgggggcccacttttttgtacatgtaccacctccctttcctcttactgtacataaacctcagactctccccctctcaacaaaggcttgatgcaccaggcctgact

SEQ ID NO: 482574 - DNA, 120 bp, Artificial Sequence
  ENSG00000161791_35 (sequence is synthesized)
ttgtctcctctttctgagcttagggggctagggtggccatttagtctgacctgggctatggggatagaaaagaaatctttggggcactgcatctgttttggaggagatgagatcagaact

SEQ ID NO: 482575 - DNA, 120 bp, Artificial Sequence
  ENSG00000161791_36 (sequence is synthesized)
ctggggaaaggagaaccggctaggtgggctctagccacacaaagggaagcaggcctgccatgagacactagtgccctctgctgggcatgtgtccagtccccagcctgccccagtagcaca

SEQ ID NO: 482576 - DNA, 120 bp, Artificial Sequence
  ENSG00000161791_37 (sequence is synthesized)
tggaaaagagtcactggccatgttataaatattgttatttaaaaaacaaaaaacaaaacacacgtacattaggtcctgggtggaggaagaagtggtggagcctcagggccagggcaggca

SEQ ID NO: 482577 - DNA, 120 bp, Artificial Sequence
  ENSG00000161791_38 (sequence is synthesized)
ggagcaggcactgatgctagagggtgatgaccctgccctctgccacccaggctgcgtccaacagcctgtgactcttccctggagaccccttctctcacacttttatctactggcatcacc

SEQ ID NO: 482578 - DNA, 120 bp, Artificial Sequence
  ENSG00000161791_39 (sequence is synthesized)
caccccacatggcatataccacccatctctggtctggggctgagggcaaggactgcactagtccagggagtaggggacccttgaacaccaagagcaaccttgagaggtgccaacaatggt

SEQ ID NO: 482579 - DNA, 120 bp, Artificial Sequence
  ENSG00000161791_40 (sequence is synthesized)
gtgctgggggtggggttactttagaaaaagtggacacagaccagactaaggaagaagtctgaggcagacggtgagggtggcccaggagccatggcctcacacagacccgaggcagagaac

SEQ ID NO: 482580 - DNA, 120 bp, Artificial Sequence
  ENSG00000161791_41 (sequence is synthesized)
agctcattgggtcactggtgatcatccagctgctgtaggagtgtccgccgccgcctctccagctcaccctcactcagctcactttctgacgtgtcccagcctgtctgttggagcaaaggc

SEQ ID NO: 482581 - DNA, 120 bp, Artificial Sequence
  ENSG00000161791_42 (sequence is synthesized)
acagttcacccttagcctgcactaagggccgtggaagcttgaccagcgtgctgactggcctagggcccctgcccctcaccttctccttcttgattccaaagcctggggaacggttaggga

SEQ ID NO: 482582 - DNA, 120 bp, Artificial Sequence
  ENSG00000161791_43 (sequence is synthesized)
gctctgcctgttggagctccctgtccttgtcctgttcttgttctttctcatcgctctccttgccagctttctcctcagggtctgtctcactctcaggactattctgtaagagtccagagc

SEQ ID NO: 482583 - DNA, 120 bp, Artificial Sequence
  ENSG00000161791_44 (sequence is synthesized)
ccacctcctcagttcctgtggatagcctgggaggcaggtagaacagaactcacaaaatagcaggggcttaggtagaagttccttcactcaccgacttgtgtcttctcttcttagttttct

SEQ ID NO: 482584 - DNA, 120 bp, Artificial Sequence
  ENSG00000161791_45 (sequence is synthesized)
tttttggtttcttggctttccgaaggccatgatctagagatagaaaaatccctactaagtcccaacaggagaaagacaggctctttttctttgttctagcccctctgttcattcttcaca

SEQ ID NO: 482585 - DNA, 120 bp, Artificial Sequence
  ENSG00000161791_46 (sequence is synthesized)
ggcaggaacctcatgctctgaggaagtctaagtccagttttccttctccagcttcttgcttgggcaggtagaggaagttctttctacttccacaggtgcagccctcccaatccagtctac

SEQ ID NO: 482586 - DNA, 120 bp, Artificial Sequence
  ENSG00000161791_47 (sequence is synthesized)
cctcaaaggagctggggcttgtggagggcatcctctcagtctgggacaacagttctccagcttctacgctcacagcaactgcttacctgctccaagaagatgggaggaaggggagccccg

SEQ ID NO: 482587 - DNA, 120 bp, Artificial Sequence
  ENSG00000161791_48 (sequence is synthesized)
tcctccaagggcagcacccccactttcaactgaatcaagtgaggaagagggctcagagcctgactctgaggggttccgcctcctccgcttggggggccggagagatggtgggggcagctc

SEQ ID NO: 482588 - DNA, 120 bp, Artificial Sequence
  ENSG00000161791_49 (sequence is synthesized)
ctcttcttctgactcagagccctgggcagatcagcagatacatgtcagtgcagaggttctctgccctccagaagccctcgtctgggaattcgagagaggaggaggacccagggccaaagg

SEQ ID NO: 482589 - DNA, 120 bp, Artificial Sequence
  ENSG00000161791_50 (sequence is synthesized)
aatcctcaaacttccctccaagggagatattgtaaggggaaaacaaagtgtttatttccccaaaacaacccagcttcaccccatgtcccttctacacgcttactcactgagggtgagtgg

SEQ ID NO: 482590 - DNA, 120 bp, Artificial Sequence
  ENSG00000161791_51 (sequence is synthesized)
gaacgcttgtgatggtgcttcttgcctttcctgccatgctttcggcctttggtgtggaggtgctggcattcagtctgctagaggcagaggaagaagggtgaggacagcaccagacttagc

SEQ ID NO: 482591 - DNA, 120 bp, Artificial Sequence
  ENSG00000161791_52 (sequence is synthesized)
atctggctttgcctccctttctcagactagagccttctgcctatcccagggatcctcaggcctccccttccttagctggccaggagtgccctaagggtaagagggaggccactgaggtct

SEQ ID NO: 482592 - DNA, 120 bp, Artificial Sequence
  ENSG00000161791_53 (sequence is synthesized)
ctgttgaactggtctaatgagttcaagggcctgaggcagatccagaggacaagcctgcctcacctccagcacctgtaggaactcccggaagagccggatccgctccgactccagggtgat

SEQ ID NO: 482593 - DNA, 120 bp, Artificial Sequence
  ENSG00000161791_54 (sequence is synthesized)
ctgctcaaaggctgagtcacacacaaaacgctcacggaccttgaacgaggagagcactgctgatcagactaggccccactcagcctggcctggacaccgccatgagcacagggcagggct

SEQ ID NO: 482594 - DNA, 120 bp, Artificial Sequence
  ENSG00000161791_55 (sequence is synthesized)
ggggcagagaaaggaagggaactggagctggcccagggctgtgacgtgactggggtgggccctcagtggtgaagcaccgctgccctcaggcttgaggggtgcttggggccaggctacgct

SEQ ID NO: 482595 - DNA, 120 bp, Artificial Sequence
  ENSG00000161791_56 (sequence is synthesized)
cctgacctcttcccaggcagtgcctagctccagagcaggcacagcctgcctcagcatgcttcgaaaggcagcttccctgcgccgcatcctgcgtgcctcctccttctcccgctccctctc

SEQ ID NO: 482596 - DNA, 120 bp, Artificial Sequence
  ENSG00000161791_57 (sequence is synthesized)
ccgtgcctctgctttctccagcagctgaggaaagaagggacacggaacagggtcacccaggagggtggatgccaggtcccactcaggcataccttaggaggtggaaagttagggtctggg

SEQ ID NO: 482597 - DNA, 120 bp, Artificial Sequence
  ENSG00000161791_58 (sequence is synthesized)
cttctaccaccatcccctgaattgggaatatagtcagtgggacagtgagtgagaaggaatggagcaagacacagatgaattagagaacttcccacgccccgcccagcccctcacactatt

SEQ ID NO: 482598 - DNA, 120 bp, Artificial Sequence
  ENSG00000161791_59 (sequence is synthesized)
gaaggtcagcttgatgttgcctgcgtccagtgcggcagccctcttgtcaaagcttatgacgtgggcgaagtcctcaaaggccgtgttcacctccacgcagaagccccggtcctgtgggta

SEQ ID NO: 482599 - DNA, 120 bp, Artificial Sequence
  ENSG00000161791_60 (sequence is synthesized)
cagcagtgcatgaagcaggggcaccacgtgcctgaggccaaagctggcaggcagagtggtcacattacagatggtcaagaaggcccttgcctctggaagagatccacaggactgtggtct

SEQ ID NO: 482600 - DNA, 120 bp, Artificial Sequence
  ENSG00000161791_61 (sequence is synthesized)
gcattagaaaccaagttatccaagtcctcatcacttgacaattaagcccccatgcctacccttggtttggatgtcacacagagctgaaggggttgggagatgtctcccaactgctgatta

SEQ ID NO: 482601 - DNA, 120 bp, Artificial Sequence
  ENSG00000161791_62 (sequence is synthesized)
atgctgagtttctcaaaattaacttttgttcctttggcttaaagctctggccccagctgggccctcctgctgctcagcagtgcttccatgcattctcaatcaacatttgctggcccctac

SEQ ID NO: 482602 - DNA, 120 bp, Artificial Sequence
  ENSG00000161791_63 (sequence is synthesized)
cctttgggtctatttattgagtgcttactatgtaccaggtaccatgatgagtgtttcacacattatctcatttaatcctcttggttctacatttaagaataggtcctagtatcctaattt

SEQ ID NO: 482603 - DNA, 120 bp, Artificial Sequence
  ENSG00000161791_64 (sequence is synthesized)
tacacagaaggagaaaccaaggttcagagaaactagagcacttgcccaaggtctcacagctgatatacggctgggcaagaaccctaccctgggggggctctctatccccaaagtgtctgc

SEQ ID NO: 482604 - DNA, 120 bp, Artificial Sequence
  ENSG00000161791_65 (sequence is synthesized)
tttcaagcaccacacccacccagatgacttagtccatgggagaaacggaggccaccaggtgtgcagctccccaccaatactaaaaacatgtccacaggccaggctctatgcttctcattt

SEQ ID NO: 482605 - DNA, 120 bp, Artificial Sequence
  ENSG00000161791_66 (sequence is synthesized)
aggcctcacaacattccagtgaagcagaggcttagaaaagtgatctcagttggcccaagatgacatgagtggtaaatgaagccactggagttcaaagtctggctctcacgtcagttaagc

SEQ ID NO: 482606 - DNA, 120 bp, Artificial Sequence
  ENSG00000161791_67 (sequence is synthesized)
acaggccagattccctttctctccctccacatagctctcacctcctctggcctttttgctgatggcagaggtgtgctcctctttcttctttccaagggtacttcctcaaccctgctacag

SEQ ID NO: 482607 - DNA, 120 bp, Artificial Sequence
  ENSG00000161791_68 (sequence is synthesized)
tccttatcaacacagcattcattctcagggaattgaaagctccaagtcacccttgttactggctccttccatcaagcagacacctcacctaacctggaacatcctttccaccatgctctc

SEQ ID NO: 482608 - DNA, 120 bp, Artificial Sequence
  ENSG00000161791_69 (sequence is synthesized)
cccttcatcaagctaactacctctgctcttttccattgtttcaaaacctcttgaaatgcagcagaaaggaaaaggaataaacatttattgagaacctattagacactttacagatgttat

SEQ ID NO: 482609 - DNA, 120 bp, Artificial Sequence
  ENSG00000161791_70 (sequence is synthesized)
ttaattctcacaaccttacctatgaattatccctgatttacaggtgagcaaacaggctcagagacacggaacttacggaggtctcagagccaataagcaaccaggagtaatctgactcta

SEQ ID NO: 482610 - DNA, 120 bp, Artificial Sequence
  ENSG00000161791_71 (sequence is synthesized)
aaacatgtgctgcccccatgccacctccatgactctactctcccaaaggttgcttgtgtctactagccaaatccaaggccgccttctttgtcctcactcatctggtcctcagtgcctcta

SEQ ID NO: 482611 - DNA, 120 bp, Artificial Sequence
  ENSG00000161791_72 (sequence is synthesized)
ccacttacttcttcaacactcccctctccaggtcacaccctctctgaccttttattctcttgcatatgcatgttcctgagaacagcacttagtcctctttcactacccaatctgtactcc

SEQ ID NO: 482612 - DNA, 120 bp, Artificial Sequence
  ENSG00000161791_73 (sequence is synthesized)
ctcgcaatctcatccttcatctctcctgattttcaaacatcctagactggatatttcagacacttaaaattcaacagatctcaagagaatatatttctcatgagcatcctccatggatct

SEQ ID NO: 482613 - DNA, 120 bp, Artificial Sequence
  ENSG00000161791_74 (sequence is synthesized)
ccctgacccggatctgtctgcctgttctaagtccagggctctttgcattatcctatgggatgaaaggcaccatcatggtctgcctggctgtggaaagcaagagggactcctgggctcatc

SEQ ID NO: 482614 - DNA, 120 bp, Artificial Sequence
  ENSG00000161791_75 (sequence is synthesized)
tgccctccataggcaggaacccaaatggggaaagaggaagggaactgtctaaaaaagttgctttctcaggttgtgtggagagacaggactcagtgaggataggcccctacaggcctatca

SEQ ID NO: 482615 - DNA, 120 bp, Artificial Sequence
  ENSG00000161791_76 (sequence is synthesized)
accagccactctgtggctaaaagttaattgtccaataaaatttagctatcccaggataaggcatttctactttatacgattattctgttttaaaatatatttgctttgagagtaattccc

SEQ ID NO: 482616 - DNA, 120 bp, Artificial Sequence
  ENSG00000161791_77 (sequence is synthesized)
caaatagaattcctattttctacagccttgctcttcttgttttatccttatcaatagtgccatcatccactgccctgacacctctgattccttcctttccctccatttcacaaaatctat

SEQ ID NO: 482617 - DNA, 120 bp, Artificial Sequence
  ENSG00000161791_78 (sequence is synthesized)
caattctacttagtgactctatcccactggtgttgaattctcccttttttttttaaacagcagaaacagtttattaaaatagaaatcttatgtagaacctttatgcataaaaaagattca

SEQ ID NO: 482618 - DNA, 120 bp, Artificial Sequence
  ENSG00000161791_79 (sequence is synthesized)
agctgcttcacttgaaaacaggaagcagcaccaaatccccccatactcaactccaacccttgcttgtctcaaggcacctacatagaaacccagagtgtctcagaagaacagctggagcgc

SEQ ID NO: 482619 - DNA, 120 bp, Artificial Sequence
  ENSG00000161791_80 (sequence is synthesized)
tacagcctgctctcttctgctgtccccactgcccccggctaggatcacctcctacaagattcctgcacagcctactgacttttctccctgctcaccctcttccatccctctaacccagct

SEQ ID NO: 482620 - DNA, 120 bp, Artificial Sequence
  ENSG00000161791_81 (sequence is synthesized)
cctagcatctagtgcttcttggacttttgtaccaagtagccccaacagtaggagagaggtctggggataagtgaaatgaatatgactatttgaattaccactatcagttttagtatcttg

SEQ ID NO: 482621 - DNA, 120 bp, Artificial Sequence
  ENSG00000161791_82 (sequence is synthesized)
aggcttcaagaactgctctacctagcaccaccaccttccctaaggacataagtacgtactctagactgaaaggttctactatacaccatctaatctgatcattccccggttcctcattac

SEQ ID NO: 482622 - DNA, 120 bp, Artificial Sequence
  ENSG00000161791_83 (sequence is synthesized)
ttacgagagaaaaatccaaatttcttattttagcattcaaggcactttacatgcagggctctacttccaagctggggcatgtggttccagagaaagagaggatacctcaggacagtatga

SEQ ID NO: 482623 - DNA, 120 bp, Artificial Sequence
  ENSG00000161791_84 (sequence is synthesized)
tacatcttacctaatggtaagtaatttaaaatattaaatttatattaaataggtaatatggtgttaaaatgcaacacctacgtgaatttgtaaggcaaaacagtacttcaaagaaatgta

SEQ ID NO: 482624 - DNA, 120 bp, Artificial Sequence
  ENSG00000161791_85 (sequence is synthesized)
tatgcagtgagacatttctagctttatttccagatccctttcaacccaggtaccatttaatctctgtaattaggtgtactctggtggaacactcaccattttttagatgaggaaacaggg

SEQ ID NO: 482625 - DNA, 120 bp, Artificial Sequence
  ENSG00000161791_86 (sequence is synthesized)
tcagaaaggtcaagtgacctatccaaggtcacacaactagcaagcagttaagctagacttttactgtaggcagtctgcctccagtcccgctcctaaccactgtactgtattatctcctca

SEQ ID NO: 482626 - DNA, 120 bp, Artificial Sequence
  ENSG00000161791_87 (sequence is synthesized)
aatgcattagaatcttcacttccataaagaaatatgctctttgtttttttcttttggaacacaaggtttagtccatcactcactcacttttccacttttgataagatgtaaatattgaga

SEQ ID NO: 482627 - DNA, 120 bp, Artificial Sequence
  ENSG00000161791_88 (sequence is synthesized)
actatttctcttctccagtagaagaagagcaacaggccatgtgtgatggtaaatggcagctgacacttgcgacagtatcaagaaggcactaaggaatggtgagaaggatgacttgccctt

SEQ ID NO: 482628 - DNA, 120 bp, Artificial Sequence
  ENSG00000161791_89 (sequence is synthesized)
tctaaagtggcatctcagcttgagtctgcagaatgccttgcaaatccagctcagtactgctagataatccatattgacaagagaagctaaagattcagattttctatgtgaagtttcctg

SEQ ID NO: 482629 - DNA, 120 bp, Artificial Sequence
  ENSG00000161791_90 (sequence is synthesized)
gttttaaaatgttagcaacaaattccaaatttttacagaacactgtacaggccagaaagaacaatctgtgtgctaccagtttacaattagctatgcttcttcctcctcagacctggcatg

SEQ ID NO: 482630 - DNA, 120 bp, Artificial Sequence
  ENSG00000161791_91 (sequence is synthesized)
ccctttccacccccttgcctttgctcttagtaccccgtgtacactccaacctcttccacctacaaatttctaaatgcacagttcaaatgttagttcttcagattcctgtctctgtaataa

SEQ ID NO: 482631 - DNA, 120 bp, Artificial Sequence
  ENSG00000161791_92 (sequence is synthesized)
cacttgcccctttgtataacagttctcatgtatatcttcctattagaccatgagctcctgtggtagaaattgtgtattcattactgtatccctagtgtgcagtaaaggatcacagtagat

SEQ ID NO: 482632 - DNA, 120 bp, Artificial Sequence
  ENSG00000161791_93 (sequence is synthesized)
atctgctgaaccaagctgtaatgcttctgcaaaacaggacttatcagggagtcctctgcagggagtgtgccctgcatccatcctgtatccatccataaccccagcctccctcaccttaag

SEQ ID NO: 482633 - DNA, 120 bp, Artificial Sequence
  ENSG00000161791_94 (sequence is synthesized)
gatgtccttaatgatcttcttttcatcatggaatcgtgccttcaactcctccacatagaacttgaataagtccagaggggtggagcctgtaaggagggagggaggggggcctggcgggcg

SEQ ID NO: 482634 - DNA, 120 bp, Artificial Sequence
  ENSG00000161791_95 (sequence is synthesized)
gcagcttcccaaggcctgggggctgggccgaggacaggagccggtagtagggggtgcagagaggctggcagggcaggaagccaggccagagaagggggagcctggctgccttacccggct

SEQ ID NO: 482635 - DNA, 120 bp, Artificial Sequence
  ENSG00000161791_96 (sequence is synthesized)
ggcccagcatgttggcaaagcggacatcagtgctgactgctggatatagctccatccaggtggacatagagtgcagctgccctgtctcatgcagctcgtccaggaaggtctgagcaggga

SEQ ID NO: 482636 - DNA, 120 bp, Artificial Sequence
  ENSG00000161791_97 (sequence is synthesized)
gaggccagttatagggagagtgagacagggaggcagagccacagactgagggggaagagagggaatggcagaggaagaggcagggacaatcaagattgaggaaatgcaggcaagagaggc

SEQ ID NO: 482637 - DNA, 120 bp, Artificial Sequence
  ENSG00000161791_98 (sequence is synthesized)
agagatgaagagatgcagatggaaggctgagaacaatgcaaaaagagagaaagtaaatacacagagagggacagaacaaaaaggtgagaacaagccagtcccgggatgcaaagaaacaga

SEQ ID NO: 482638 - DNA, 120 bp, Artificial Sequence
  ENSG00000161791_99 (sequence is synthesized)
aacctgcctgcagtaacccctagcactaccaccaccactgccacccccaagctgagggaataaactctgcctgtcgggtgccccaccaagggaaataaacatggcctagctgccaagtca

SEQ ID NO: 482639 - DNA, 120 bp, Artificial Sequence
  ENSG00000161791_100 (sequence is synthesized)
tgcctgtagggtgctctctactggcagtttctgggtggtgcatacatctagtctccctagaagagcacagtccagaattgaggaggtacagcagaaacagactgcaggcagagagaggtc

SEQ ID NO: 482640 - DNA, 120 bp, Artificial Sequence
  ENSG00000161791_101 (sequence is synthesized)
tcatagagcttggacagggctaggcacagaaagaacaggcagcgtatccagaagggggcagggaatgggtgaagaggttgtgctctagggcagagctgagctctgatctagaaaggacag

SEQ ID NO: 482641 - DNA, 120 bp, Artificial Sequence
  ENSG00000161791_102 (sequence is synthesized)
caaagatacctggaaggcctcccgattcttgcgttgttggcgtcgctcccgaagccgggcccgctcccgttcctcctcctcttccctctccaaagctcggatgtgctcctcaaaacagat

SEQ ID NO: 482642 - DNA, 120 bp, Artificial Sequence
  ENSG00000161791_103 (sequence is synthesized)
cagtgcatcttccttgtccatgtctaaagacaggcaggaggttccgcgggcattgtcccagcaggataccctctcagaccccagcacccctaatgtttcaacgatgctgtcctacaggtg

SEQ ID NO: 482643 - DNA, 120 bp, Artificial Sequence
  ENSG00000161791_104 (sequence is synthesized)
ctagggatacccagggtggtgggggaagggcctggagggggctctgtgggagcagccactgcaatggtagttcttaagaggggatcattaattgtataagaataaataagcaagtattca

SEQ ID NO: 482644 - DNA, 120 bp, Artificial Sequence
  ENSG00000161791_105 (sequence is synthesized)
agtgtccctttcacggcccgtactgccaagcggggctcacgcttcttctgtgatgcagcccaccatgatgagtcaaactgttagcccccaaggttggggcccgacaggcctccactgcca

SEQ ID NO: 482645 - DNA, 120 bp, Artificial Sequence
  ENSG00000161791_106 (sequence is synthesized)
actggaagaagatggcggctagacaacaaatttccaccgcaaatgtcaacgacccagccgccgactgagcccagaacagcgttcttctcccgcctctccattttcacacgcagccagatg

SEQ ID NO: 482646 - DNA, 120 bp, Artificial Sequence
  ENSG00000161791_107 (sequence is synthesized)
gttaagcttctctcctcccaaacgttttttcccctgcctctgtcgggtaagggcttcctcatccctcaatgcctggtccaactatgatctccctcaccccgactcttaacagacccactt

SEQ ID NO: 482647 - DNA, 120 bp, Artificial Sequence
  ENSG00000161791_108 (sequence is synthesized)
ttctgtcatgtgagtaccaccccggggctgaagttggggaccagttgggggaggacatagttccattctactttgataaggaagggtgagagttcaacaatgaagatggaaatgggaatc

SEQ ID NO: 482648 - DNA, 120 bp, Artificial Sequence
  ENSG00000161791_109 (sequence is synthesized)
ctggacaggaaggagtagcccaagcagtggtgtggaagtaggcaggcaagcccggagatgtctggggatcagtgaagaatggcacttggctggagtagaagataagatgcattttggaga

SEQ ID NO: 482649 - DNA, 120 bp, Artificial Sequence
  ENSG00000161798_0 (sequence is synthesized)
gctgccgccgggcccccgcggccaccatgaagaaggaggtgtgctccgtggccttcctcaaggccgtgttcgcagagttcttggccaccctcatcttcgtcttctttggcctgggctcgg

SEQ ID NO: 482650 - DNA, 120 bp, Artificial Sequence
  ENSG00000161798_1 (sequence is synthesized)
ccctcaagtggccgtcggcgctgcctaccatcctgcagatcgcgctggcgtttggcctggccataggcacgctggcccaggccctgggacccgtgagcggcggccacatcaaccccgcca

SEQ ID NO: 482651 - DNA, 120 bp, Artificial Sequence
  ENSG00000161798_2 (sequence is synthesized)
tcaccctggccctcttggtgggcaaccagatctcgctgctccgggctttcttctacgtggcggcccagctggtgggcgccattgccggggctggcatcctctacggtgtggcaccgctca

SEQ ID NO: 482652 - DNA, 120 bp, Artificial Sequence
  ENSG00000161798_3 (sequence is synthesized)
atgcccggggcaatctggccgtcaacgcgctcaacaacaacacaacgcagggccaggccatggtggtggagctgattctgaccttccagctggcactctgcatcttcgcctccactgact

SEQ ID NO: 482653 - DNA, 120 bp, Artificial Sequence
  ENSG00000161798_4 (sequence is synthesized)
cccgccgcaccagccctgtgggctccccagccctgtccattggcctgtctgtcaccctgggccaccttgtcggaatctacttcactggctgctccatgaacccagcccgctcttttggcc

SEQ ID NO: 482654 - DNA, 120 bp, Artificial Sequence
  ENSG00000161798_5 (sequence is synthesized)
tcatgaatcggttcagccccgctcactgggttttctgggtagggcccatcgtgggggcggtcctggctgccatcctttacttctacctgctcttccccaactccctgagcctgagtgagc

SEQ ID NO: 482655 - DNA, 120 bp, Artificial Sequence
  ENSG00000161798_6 (sequence is synthesized)
gtgtggccatcatcaaaggcacgtatgagcctgacgaggactgggaggagcagcgggaagagcggaagaagaccatggagctgaccacccgctgaccagtgtcaggcaggggccagcccc

SEQ ID NO: 482656 - DNA, 120 bp, Artificial Sequence
  ENSG00000161798_7 (sequence is synthesized)
tcagcccctgagccaagggggaaaagaagaaaaagtacctaacacaagcttcctttttgcacaaccggtcctcttggctgaggaggaggagctggtcaccctggctgcacagttagagag

SEQ ID NO: 482657 - DNA, 120 bp, Artificial Sequence
  ENSG00000161798_8 (sequence is synthesized)
gggagaaggaacccatgatgggactcctggggtaggggccaggggctggggtctgctggggacaggtctctctgggacagacctcagagattgtgaatgcagtgccaagctcacaggctg

SEQ ID NO: 482658 - DNA, 120 bp, Artificial Sequence
  ENSG00000161798_9 (sequence is synthesized)
caagggccaggccagaaaagggcgggcctgcagcctgcaccccccaccttccccaacccttcctcaagagctgaagggatcccagcccctaggtgggcagaggcagaccctccccagagc

SEQ ID NO: 482659 - DNA, 120 bp, Artificial Sequence
  ENSG00000161798_10 (sequence is synthesized)
tccttaggaagaagacagactggttcattgaatgccgccttatttatttctggtgaggatgcatgcgtggggctgctggtgtttagagtgggggctacccaataaatcactgatactcac

SEQ ID NO: 482660 - DNA, 120 bp, Artificial Sequence
  ENSG00000161798_11 (sequence is synthesized)
cactgactcccgccgcaccagccctgtgggctccccagccctgtccattggcctgtctgtcaccctgggccaccttgtcggagtgagcagtaccgacattgggctggggtgagggtgggg

SEQ ID NO: 482661 - DNA, 120 bp, Artificial Sequence
  ENSG00000161798_12 (sequence is synthesized)
caggcactcaaggcaaataatggagccctggagcggagcccacttcagatggatgagtccagcagagtttaaggcctggatttagggctcctggactctggccctactgggccccagaat

SEQ ID NO: 482662 - DNA, 120 bp, Artificial Sequence
  ENSG00000161798_13 (sequence is synthesized)
tgatccccccaaaacctctgggctgaggaaagatgggagtaagtaggaggtgggatgggacaggaatcaaacccaacctcagagcagagaagagaggagggcgtagttaagggtccatgg

SEQ ID NO: 482663 - DNA, 120 bp, Artificial Sequence
  ENSG00000161800_0 (sequence is synthesized)
gttttcaaaccggagctgtgggcgcggcgctgctctgccgttgggtgaggcgcggagcgaagtgaagggtggcccaggtggggccaggctgactgaaaaagatggatactatgatgctga

SEQ ID NO: 482664 - DNA, 120 bp, Artificial Sequence
  ENSG00000161800_1 (sequence is synthesized)
atgtgcggaatctgtttgagcagcttgtgcgccgggtggagattctcagtgaaggaaatgaagtccaatttatccagttggcgaaggactttgaggatttccgtaaaaagtggcagagga

SEQ ID NO: 482665 - DNA, 120 bp, Artificial Sequence
  ENSG00000161800_2 (sequence is synthesized)
ctgaccatgagctggggaaatacaaggatcttttgatgaaagcagagactgagcgaagtgctctggatgttaagctgaagcatgcacgtaatcaggtggatgtagagatcaaacggagac

SEQ ID NO: 482666 - DNA, 120 bp, Artificial Sequence
  ENSG00000161800_3 (sequence is synthesized)
agagagctgaggctgactgcgaaaagctggaacgacagattcagctgattcgagagatgctcatgtgtgacacatctggcagcattcaactaagcgaggagcaaaaatcagctctggctt

SEQ ID NO: 482667 - DNA, 120 bp, Artificial Sequence
  ENSG00000161800_4 (sequence is synthesized)
ttctcaacagaggccaaccatccagcagcaatgctgggaacaaaagactatcaaccattgatgaatctggttccattttatcagatatcagctttgacaagactgatgaatcactggatt

SEQ ID NO: 482668 - DNA, 120 bp, Artificial Sequence
  ENSG00000161800_5 (sequence is synthesized)
gggactcttctttggtgaagactttcaaactgaagaagagagaaaagaggcgctctactagccgacagtttgttgatggtccccctggacctgtaaagaaaactcgttccattggctctg

SEQ ID NO: 482669 - DNA, 120 bp, Artificial Sequence
  ENSG00000161800_6 (sequence is synthesized)
cagtagaccaggggaatgaatccatagttgcaaaaactacagtgactgttcccaatgatggcgggcccatcgaagctgtgtccactattgagactgtgccatattggaccaggagccgaa

SEQ ID NO: 482670 - DNA, 120 bp, Artificial Sequence
  ENSG00000161800_7 (sequence is synthesized)
ggaaaacaggtactttacaaccttggaacagtgactccaccctgaacagcaggcagctggagccaagaactgagacagacagtgtgggcacgccacagagtaatggagggatgcgcctgc

SEQ ID NO: 482671 - DNA, 120 bp, Artificial Sequence
  ENSG00000161800_8 (sequence is synthesized)
atgactttgtttctaagacggttattaaacctgaatcctgtgttccatgtggaaagcggataaaatttggcaaattatctctgaagtgtcgagactgtcgtgtggtctctcatccagaat

SEQ ID NO: 482672 - DNA, 120 bp, Artificial Sequence
  ENSG00000161800_9 (sequence is synthesized)
gtcgggaccgctgtccccttccctgcattcctaccctgataggaacacctgtcaagattggagagggaatgctggcagactttgtgtcccagacttctccaatgatcccctccattgttg

SEQ ID NO: 482673 - DNA, 120 bp, Artificial Sequence
  ENSG00000161800_10 (sequence is synthesized)
tgcattgtgtaaatgagattgagcaaagaggtctgactgagacaggcctgtataggatctctggctgtgaccgcacagtaaaagagctgaaagagaaattcctcagagtgaaaactgtac

SEQ ID NO: 482674 - DNA, 120 bp, Artificial Sequence
  ENSG00000161800_11 (sequence is synthesized)
ccctcctcagcaaagtggatgatatccatgctatctgtagccttctaaaagactttcttcgaaacctcaaagaacctcttctgacctttcgccttaacagagcctttatggaagcagcag

SEQ ID NO: 482675 - DNA, 120 bp, Artificial Sequence
  ENSG00000161800_12 (sequence is synthesized)
agtggctcagagtccacatactaaaatggatgttgccaatctggctaaagtctttggccctacaatagtggcccatgctgtgcccaatccagacccagtgacaatgttacaggacatcaa

SEQ ID NO: 482676 - DNA, 120 bp, Artificial Sequence
  ENSG00000161800_13 (sequence is synthesized)
gcgtcaacccaaggtggttgagcgcctgctttccttgcctctggagtattggagtcagttcatgatggtggagcaagagaacattgaccccctacatgtcattgaaaactcaaatgcctt

SEQ ID NO: 482677 - DNA, 120 bp, Artificial Sequence
  ENSG00000161800_14 (sequence is synthesized)
ttcaacaccacagacaccagatattaaagtgagtttactgggacctgtgaccactcctgaacatcagcttctcaagactccttcatctagttccctgtcacagagagtccgttccaccct

SEQ ID NO: 482678 - DNA, 120 bp, Artificial Sequence
  ENSG00000161800_15 (sequence is synthesized)
caccaagaacactcctagatttgggagcaaaagcaagtctgccactaacctaggacgacaaggcaacttttttgcttctccaatgctcaagtgaagtcacatctgcctgttacttcccag

SEQ ID NO: 482679 - DNA, 120 bp, Artificial Sequence
  ENSG00000161800_16 (sequence is synthesized)
cattgactgactataagaaaggacacatctgtactctgctctgcagcctcctgtactcattactacttttagcattctccaggcttttactcaagtttaattgtgcatgagggttttatt

SEQ ID NO: 482680 - DNA, 120 bp, Artificial Sequence
  ENSG00000161800_17 (sequence is synthesized)
aaaactatatatatctccccttccttctcctcaagtcacataatatcagcactttgtgctggtcattgttgggagcttttagatgagacatctttccaggggtagaagggttagtatgga

SEQ ID NO: 482681 - DNA, 120 bp, Artificial Sequence
  ENSG00000161800_18 (sequence is synthesized)
attggttgtgattctttttggggaagggggttattgttcctttggcttaaagccaaatgctgctcatagaatgatctttctctagtttcatttagaactgatttccgtgagacaatgaca

SEQ ID NO: 482682 - DNA, 120 bp, Artificial Sequence
  ENSG00000161800_19 (sequence is synthesized)
gaaaccctacctatctgataagattagcttgtctcagggtgggaagtgggagggcagggcaaagaaaggattagaccagaggatttaggatgcctccttctaagaaccagaagttctcat

SEQ ID NO: 482683 - DNA, 120 bp, Artificial Sequence
  ENSG00000161800_20 (sequence is synthesized)
tccccattatgaactgagctataatatggagctttcataaaaatgggatgcattgaggacagaactagtgatgggagtatgcgtagctttgatttggatgattaggtctttaatagtgtt

SEQ ID NO: 482684 - DNA, 120 bp, Artificial Sequence
  ENSG00000161800_21 (sequence is synthesized)
gagtggcacaaccttgtaaatgtgaaagtacaactcgtatttatctctgatgtgctgctggctgaactttgggttcatttggggtcaaagccagtttttcttttaaaattgaattcattc

SEQ ID NO: 482685 - DNA, 120 bp, Artificial Sequence
  ENSG00000161800_22 (sequence is synthesized)
tgatgcttggcccccatacccccaaccttgtccagtggagcccaacttctaaaggtcaatatatcatcctttggcatcccaactaacaataaagagtaggctataagggaagattgtcaa

SEQ ID NO: 482686 - DNA, 120 bp, Artificial Sequence
  ENSG00000161800_23 (sequence is synthesized)
tattttgtggtaagaaaagctacagtcattttttctttgcactttggatgctgaaatttttcccatggaacatagccacatctagatagatgtgagctttttcttctgttaaaattattc

SEQ ID NO: 482687 - DNA, 120 bp, Artificial Sequence
  ENSG00000161800_24 (sequence is synthesized)
ttaatgtctgtaaaaacgattttcttctgtagaatgtttgacttcgtattgacccttatctgtaaaacacctatttgggataatatttggaaaaaaagtaaatagctttttcaaaatgaa

SEQ ID NO: 482688 - DNA, 120 bp, Artificial Sequence
  ENSG00000161800_25 (sequence is synthesized)
gcgaagtgaagggtggcccaggtggggccaggctgactgaatgtatctcctagctatggactaaataatacatggggggaaataaacaagtattcatgagggtgaaaatgtgacccagca

SEQ ID NO: 482689 - DNA, 120 bp, Artificial Sequence
  ENSG00000161800_26 (sequence is synthesized)
ggaaaattacaactattttcaattgacgttgaataggatgagtcatggaatttaagtgatttactgaagattatactactggtagatagaagagctaaagaaagatggatactatgatgc

SEQ ID NO: 482690 - DNA, 120 bp, Artificial Sequence
  ENSG00000161800_27 (sequence is synthesized)
aaactggcaaaattattatattaatcaataggcttgacttgaagaaccacattttcttgttggtcagtcacttgctaatgaactgacatgctctttcctatttgttttctgctccaagtg

SEQ ID NO: 482691 - DNA, 120 bp, Artificial Sequence
  ENSG00000161800_28 (sequence is synthesized)
gtacgtcacaccgtagagggacggcgcgggaggaataaatttctctgtgattggttggtgaaggttttcaaaccggagctgtgggcgcggcgctgctctgccgttggaaagatggatact

SEQ ID NO: 482692 - DNA, 120 bp, Artificial Sequence
  ENSG00000161800_29 (sequence is synthesized)
ttgtgtgtccattttacagctggagaagccgagatccagaaaggacccccaagttgtgggcagaataaatctacagcagcttttaactattaaaccaacttagattttggtagtctttca

SEQ ID NO: 482693 - DNA, 120 bp, Artificial Sequence
  ENSG00000161800_30 (sequence is synthesized)
ggtgaggcgcggagcgaagtgaagggtggcccaggtggggccaggctgactgaagagagccaaaggaaatcaacatttgaattgactacccaatgtcctgcccctgtttctgtcctgtag

SEQ ID NO: 482694 - DNA, 120 bp, Artificial Sequence
  ENSG00000161800_31 (sequence is synthesized)
cttagaaccctctggaggcggggattggatgtattgggtagtttcttactgctgcataccgaggaccagagaactgcttgtgtcatgctttacctttgaattgctagcccactggcataa

SEQ ID NO: 482695 - DNA, 120 bp, Artificial Sequence
  ENSG00000161800_32 (sequence is synthesized)
ctttagtttttcttgaaactgtttttttacatagccattagttctcacttttggctatgataacagattactgtttatctcccagttaaaattggagctaaaatttagaaggagcaaaat

SEQ ID NO: 482696 - DNA, 120 bp, Artificial Sequence
  ENSG00000161800_33 (sequence is synthesized)
tttctctgtgattggttggtgaaggttttcaaaccggagctgtgggcgcggcgctgctctgccgttgggtgaggcgcggagcgaagtgaagggtggcccaggtggggccaggctgactga

SEQ ID NO: 482697 - DNA, 120 bp, Artificial Sequence
  ENSG00000161800_34 (sequence is synthesized)
gcggaacccagcgaaggcgagagaatgaagacacgcatcgggctgtggccagacggttggcagccagggacctagccaagcctccctgcccccgacgcccgcgtccagggatcgtcgatg

SEQ ID NO: 482698 - DNA, 120 bp, Artificial Sequence
  ENSG00000161800_35 (sequence is synthesized)
acagttcgcctgtcgggacatcggatcaggcggccgcccctggggagatgagcaagtcaagccacagctgacctgtgaaaggccgtgtaacagtgactggaagaaccaggaagcctaaac

SEQ ID NO: 482699 - DNA, 120 bp, Artificial Sequence
  ENSG00000161800_36 (sequence is synthesized)
tggggccaggctgactgaagtgagtagtgggggtgccagaccaggtgcgtctgccgctggattgtgataggaagcagagtgttcgtgtgaatttatccagttggcgaaggactttgagga

SEQ ID NO: 482700 - DNA, 120 bp, Artificial Sequence
  ENSG00000161800_37 (sequence is synthesized)
gaagtgaagggtggcccaggtggggccaggctgactgaagtgagtagtgggggtgccagaccaggtgcgtctgccgctggattgtgataggaagcagagtgttcgtgtgatggatactat

SEQ ID NO: 482701 - DNA, 120 bp, Artificial Sequence
  ENSG00000161800_38 (sequence is synthesized)
gctctgccgttgggtgaggcgcggagcgaagtgaagggtggcccaggtggggccaggctgactgaagtgagtagtgggggtgccagaccaggtgcgtctgccgctggattgtgataggaa

SEQ ID NO: 482702 - DNA, 120 bp, Artificial Sequence
  ENSG00000161807_0 (sequence is synthesized)
atgggacccagaaaccaaacagctgtttcagaatttcttctcatgaaagtgacagaggacccagaactgaagttaatccctttcagcctgttcctgtccatgtacctggtcaccatcctg

SEQ ID NO: 482703 - DNA, 120 bp, Artificial Sequence
  ENSG00000161807_1 (sequence is synthesized)
tcccacctccacacccccatgtacttccttctctttaatctctcctttactgacatctgtttaaccacaaccacagtcccaaagatcctagtgaacatccaagctcagaatcagagtatc

SEQ ID NO: 482704 - DNA, 120 bp, Artificial Sequence
  ENSG00000161807_2 (sequence is synthesized)
atcctagtgaacatccaagctcagaatcagagtatcacttacacaggctgcctcacccagatctgtcttgtcttggtttttgctggcttggaaagttgctttcttgcagtcatggcctac

SEQ ID NO: 482705 - DNA, 120 bp, Artificial Sequence
  ENSG00000161807_3 (sequence is synthesized)
actatggatgccctggttcagagtctgatggtattgcagctgtccttctgcaaaaacgttgaaatccctttgttcttctgtgaagtcgttcaggtcatcaagctcgcctgttctgacacc

SEQ ID NO: 482706 - DNA, 120 bp, Artificial Sequence
  ENSG00000161807_4 (sequence is synthesized)
ctcatcaacaacatcctcatatattttgcaagtagtgtatttggtgcaattcctctctctggaataattttctcttattctcaaatagtcacctctgttctgagaatgccatcagcaaga

SEQ ID NO: 482707 - DNA, 120 bp, Artificial Sequence
  ENSG00000161807_5 (sequence is synthesized)
ggaaagtataaagcgttttccacctgtggctgtcacctctctgttttttccttgttctatgggacagcttttggggtgtacattagttctgctgttgctgagtcttcccgaattactgct

SEQ ID NO: 482708 - DNA, 120 bp, Artificial Sequence
  ENSG00000161807_6 (sequence is synthesized)
gtggcttcagtgatgtacactgtggtccctcaaatgatgaaccccttcatctacagcctgagaaataaggagatgaagaaagctttgaggaaacttattggtaggctgtttcctttttag

SEQ ID NO: 482709 - DNA, 120 bp, Artificial Sequence
  ENSG00000161813_0 (sequence is synthesized)
agccgggtccactgccgggtggaggggcaaggcgagtgtgtgtccttatcctagcaattggggcgcgggcctgtgagccagttggagttgcggcggcgggaacgattgggctgagcagag

SEQ ID NO: 482710 - DNA, 120 bp, Artificial Sequence
  ENSG00000161813_1 (sequence is synthesized)
gacgacatgttgcttttcgtggagcaggtagcatctaaaggaactggtttaaatcctaatgccaaagtatggcaagaaattgctcctggaaatactgatgccaccccagtaactcatgga

SEQ ID NO: 482711 - DNA, 120 bp, Artificial Sequence
  ENSG00000161813_2 (sequence is synthesized)
actgaaagctcttggcatgaaatagcagctacatcaggtgctcatcctgagggtaatgcagagctctcagaagatatatgtaaagaatatgaagtaatgtattcttcatcttgtgaaacc

SEQ ID NO: 482712 - DNA, 120 bp, Artificial Sequence
  ENSG00000161813_3 (sequence is synthesized)
acaagaaatactacaggcattgaagaatcaactgatgggatgattttaggaccagaagatctgagttaccaaatatatgatgtttccggagaaagcaattcagcagtttctacagaagac

SEQ ID NO: 482713 - DNA, 120 bp, Artificial Sequence
  ENSG00000161813_4 (sequence is synthesized)
ctaaaagaatgtctgaagaaacaattagaattctgtttttcacgagaaaatttgtcaaaggatctttacttgatatctcaaatggatagtgatcagttcatcccaatttggacagttgcc

SEQ ID NO: 482714 - DNA, 120 bp, Artificial Sequence
  ENSG00000161813_5 (sequence is synthesized)
aacatggaagaaataaaaaagttgactacagaccctgatctaattcttgaagtgttaagatcttctcccatggtacaagttgatgagaagggtgagaaagtgagaccaagtcataagcgt

SEQ ID NO: 482715 - DNA, 120 bp, Artificial Sequence
  ENSG00000161813_6 (sequence is synthesized)
tgtattgtaattcttagagagattcctgaaacaacaccaatagaggaagtgaaaggtttgttcaaaagtgaaaactgccccaaagtgataagctgtgagtttgcacacaatagcaactgg

SEQ ID NO: 482716 - DNA, 120 bp, Artificial Sequence
  ENSG00000161813_7 (sequence is synthesized)
tatatcactttccagtcagacacagatgcacaacaggcttttaaatacttaagagaagaagttaaaacatttcagggcaagccaattatggcaaggataaaagccatcaatacatttttt

SEQ ID NO: 482717 - DNA, 120 bp, Artificial Sequence
  ENSG00000161813_8 (sequence is synthesized)
gctaagaatggttatcgattaatggattctagtatctatagtcaccccattcaaactcaagcacagtatgcctccccagtctttatgcagcctgtatataatcctcaccaacagtactcg

SEQ ID NO: 482718 - DNA, 120 bp, Artificial Sequence
  ENSG00000161813_9 (sequence is synthesized)
gtctatagtattgtgcctcagtcttggtctccaaatcctacaccttactttgaaacaccactggctccctttcccaatggtagttttgtgaatggctttaattcgccaggatcttataaa

SEQ ID NO: 482719 - DNA, 120 bp, Artificial Sequence
  ENSG00000161813_10 (sequence is synthesized)
acaaatgctgctgctatgaatatgggtcgaccattccaaaaaaatcgtgtgaagcctcagtttaggtcatctggtggttcagaacactcaacagagggctctgtatccttgggggatgga

SEQ ID NO: 482720 - DNA, 120 bp, Artificial Sequence
  ENSG00000161813_11 (sequence is synthesized)
cagttgaacagatatagttcaagaaactttccagctgaacggcataaccccacagtaactgggcatcaggagcaaacttaccttcagaaggagacttccactttgcaggtggaacagaat

SEQ ID NO: 482721 - DNA, 120 bp, Artificial Sequence
  ENSG00000161813_12 (sequence is synthesized)
ggggactatggtaggggcaggagaactctcttcagaggtcgaagacgacgagaagatgacaggatctcaagacctcatccttcaacagctgaatcaaaggctccaacaccaaagtttgac

SEQ ID NO: 482722 - DNA, 120 bp, Artificial Sequence
  ENSG00000161813_13 (sequence is synthesized)
ttattagcctcaaattttccacctttacctggaagttcatcaagaatgccaggtgaactcgttttggagaataggatgtctgatgttgttaaaggtgtctacaaagaaaaggataatgaa

SEQ ID NO: 482723 - DNA, 120 bp, Artificial Sequence
  ENSG00000161813_14 (sequence is synthesized)
gagttgacaattagttgcccagtgcctgcagatgagcagacagaatgcacttctgcccagcaactcaatatgagtaccagttctccatgtgctgctgagcttactgcattaagcacaact

SEQ ID NO: 482724 - DNA, 120 bp, Artificial Sequence
  ENSG00000161813_15 (sequence is synthesized)
cagcaagaaaaggatctaatagaagattcctctgttcagaaggatggtctcaatcagacaactataccagtttctcctccaagtactacaaagccatcgagggcaagtactgcttcacca

SEQ ID NO: 482725 - DNA, 120 bp, Artificial Sequence
  ENSG00000161813_16 (sequence is synthesized)
tgtaataataacataaatgcagctacagctgtggctctacaggaaccccgaaagttaagttatgctgaagtgtgccagaagccccctaaagagccatcttcagttcttgtgcagccacta

SEQ ID NO: 482726 - DNA, 120 bp, Artificial Sequence
  ENSG00000161813_17 (sequence is synthesized)
cgggaacttcgctccaatgtggtgtctcccaccaaaaatgaagacaatggagctcctgagaactccgttgagaaaccacatgagaagccagaagcaagggctagtaaggattattctggc

SEQ ID NO: 482727 - DNA, 120 bp, Artificial Sequence
  ENSG00000161813_18 (sequence is synthesized)
ttccgaggcaatataatccccaggggagcagcaggaaaaatcagggaacagagacgccagtttagccatagggctatacctcagggagtgactcgacgtaatggcaaagagcaatatgtg

SEQ ID NO: 482728 - DNA, 120 bp, Artificial Sequence
  ENSG00000161813_19 (sequence is synthesized)
ccacccagatcaccaaagtaaaaaacaacaaaactattcaaaaacttcactctcttcccattaaacttgaactgtggctatattgaactgttttggaggggagggggtagccaggaagga

SEQ ID NO: 482729 - DNA, 120 bp, Artificial Sequence
  ENSG00000161813_20 (sequence is synthesized)
aacaagagaaagtacgtccatttcattatggattttggagttgtgagtgataggatcccaaaattcatctctaatgtggtttttaaatgctggaggattccaatcaatataaatatatat

SEQ ID NO: 482730 - DNA, 120 bp, Artificial Sequence
  ENSG00000161813_21 (sequence is synthesized)
atatatatacacacacatatataaaaagtataatttttctatttttgtttttggttttaatttgcagagatttgctgccaggaatcaattttgagggttcagatttagcttggaagaaaa

SEQ ID NO: 482731 - DNA, 120 bp, Artificial Sequence
  ENSG00000161813_22 (sequence is synthesized)
aaaagaaacatacatccttcagtataggagatgagggaatgagagaaaatattttttgaagaagcatttctgtaaaattagaaattactttttttaatctatttaaagtttggcttgaag

SEQ ID NO: 482732 - DNA, 120 bp, Artificial Sequence
  ENSG00000161813_23 (sequence is synthesized)
aatgccatctctgactatatggccttgtattgcaaagcggatcagtggctggggtgcctgttgtgggtgtgagtgtgtacaagagcgattgaagccaaatctgttgtcatgttagtaaat

SEQ ID NO: 482733 - DNA, 120 bp, Artificial Sequence
  ENSG00000161813_24 (sequence is synthesized)
gatttgaaaactgaatgtaatacttgagtagatttttttttctagtttgaaatttagtctgtctttttgaccttactaatatttcatttaacaagttgtaaaactctgattgtacttaga

SEQ ID NO: 482734 - DNA, 120 bp, Artificial Sequence
  ENSG00000161813_25 (sequence is synthesized)
gatgtgactaccaatcagtttgatactcaaggaaagggggttattcaagaaattgaaaatttcatcttggacctcagtgcataggtcaaatggatttcagaggtttaaacttccctgtga

SEQ ID NO: 482735 - DNA, 120 bp, Artificial Sequence
  ENSG00000161813_26 (sequence is synthesized)
cacagaaaagcaaaataaccaactacctactcaattgtgtgtttgtaattgctttgagcagtctagtcaaatcatataaattgttctaaatttcagaattgaacattgaagtattaactc

SEQ ID NO: 482736 - DNA, 120 bp, Artificial Sequence
  ENSG00000161813_27 (sequence is synthesized)
ttctgttcacacatttagaattttagctcccaagatggtagggcagactgaccgtacagtaatttatttgtcgttagtgttaaagattaagcatagtaactgactcttaagtgttaaata

SEQ ID NO: 482737 - DNA, 120 bp, Artificial Sequence
  ENSG00000161813_28 (sequence is synthesized)
atgtagaagtaaaaaaattttttttaaaggcttaatttgggaggggggacttatttctgtttacagtgtattaccttccttccctcctcttctccccccacacccaacaaaatacagttt

SEQ ID NO: 482738 - DNA, 120 bp, Artificial Sequence
  ENSG00000161813_29 (sequence is synthesized)
ggaattcactgaaacagtaccagcaagtcatgagattttttagtaaagatgagaaagatggttgaagaaaattagtgcataatttctcagtgaataaagttgtagctctcatatactaaa

SEQ ID NO: 482739 - DNA, 120 bp, Artificial Sequence
  ENSG00000161813_30 (sequence is synthesized)
tagacaagtttacatgctgttatttagaaaatgactaaaatattaaaaaccgtgttgtgttaatctgttttaagtcataccatgttcagagttctatgtaaggtgggttttatttttctt

SEQ ID NO: 482740 - DNA, 120 bp, Artificial Sequence
  ENSG00000161813_31 (sequence is synthesized)
ttaagggatagtttgtaatagtaagaactgtcccatatgttagtaaattacatatgtacaaattgaaactgtaaattgtgaacactggaaagcaccattgtgacatagagtaaacatctt

SEQ ID NO: 482741 - DNA, 120 bp, Artificial Sequence
  ENSG00000161813_32 (sequence is synthesized)
agtaatatattaaagtgaatgtaaatggtggttaaaattacattactgtgaaattcatcttccaactctaagttaagctttggagatacatgttagtggttaactgttaagagctttgaa

SEQ ID NO: 482742 - DNA, 120 bp, Artificial Sequence
  ENSG00000161813_33 (sequence is synthesized)
aacactgcacatatctgtacaagccagaattactatttctttgacttattattagcttggcagttgcttttgatttgattgttttatgacatggtatactactatatttactcagtttga

SEQ ID NO: 482743 - DNA, 120 bp, Artificial Sequence
  ENSG00000161813_34 (sequence is synthesized)
aactattcatttctacacactatttttaaaaattgcctactaggtgaaacataacaataaaactacctgtgctgaaatttgggggaagtttaggtcctttaaaaaaacatattaatcatt

SEQ ID NO: 482744 - DNA, 120 bp, Artificial Sequence
  ENSG00000161813_35 (sequence is synthesized)
gactacatctatgataaaagtgcttattttggtttactaagataatgcagttggtggaaatgataaacgttttaagtgttaacatcctttgaatgcgttggatttcagagaataaacatt

SEQ ID NO: 482745 - DNA, 120 bp, Artificial Sequence
  ENSG00000161813_36 (sequence is synthesized)
ttgtaaaaatcacttggtaaggattataaacttaattactgcacttaaaatgaaacattactttttttaaacaatgtgtcacaaatgtaggtctgtattacttgtatgcttgtgtgactt

SEQ ID NO: 482746 - DNA, 120 bp, Artificial Sequence
  ENSG00000161813_37 (sequence is synthesized)
actgttagtccagctctaaaaatttaaaggttgtaattgaaatacaagaaaagagccttcttttagaagaaagcaagtatatttttgcttttacttcaaatgttatttaaagtagaaatt

SEQ ID NO: 482747 - DNA, 120 bp, Artificial Sequence
  ENSG00000161813_38 (sequence is synthesized)
taatttgtagatataacctttaaaaattttctcattaagacaatgtttttaatttaatttgcctcattacatctaatagttcccatttgatggcatgtatagggaagagtgagagagtgt

SEQ ID NO: 482748 - DNA, 120 bp, Artificial Sequence
  ENSG00000161813_39 (sequence is synthesized)
gtgtgtgtgtatgtgtgtgtaatatttatatatattcacagtatgtatttagcatttattttattacagcagatttaaagtttgtatctaaataatgcctatgagttgtgtgaagctctt

SEQ ID NO: 482749 - DNA, 120 bp, Artificial Sequence
  ENSG00000161813_40 (sequence is synthesized)
ggcttttttccaacgttactttgtaactaatgagggtggatgttcattgtagtttatttatttggttctttagatggaggaatttaaaaaatcaaatttttctcttcacctttatgactt

SEQ ID NO: 482750 - DNA, 120 bp, Artificial Sequence
  ENSG00000161813_41 (sequence is synthesized)
gacatttccttgatctgttggaggctaaaagtaggtataaatgatattgaatgttgggtatagtgatactctgccatagttcttactgcatgaagagaacaagagtcacacaagttcacc

SEQ ID NO: 482751 - DNA, 120 bp, Artificial Sequence
  ENSG00000161813_42 (sequence is synthesized)
actttgcacttcatagagaaggtacatagagacattgcaaaacctgtctccatttgctatcctgataattaaggttttcataatacctagggcctgtctctgagtaattttaattttgcc

SEQ ID NO: 482752 - DNA, 120 bp, Artificial Sequence
  ENSG00000161813_43 (sequence is synthesized)
aaatacactgacatttaaaatagtgatccatctaaatttttttcagctgggttttgaggaatataagagctttcaatgataaaggtttgttgtagttgtcttatgtgctgaatttgcaga

SEQ ID NO: 482753 - DNA, 120 bp, Artificial Sequence
  ENSG00000161813_44 (sequence is synthesized)
tgatcagatgctgtgcagaattctgatttatttttgtttcctaaaattaagatagcttgaatattatttcacattcctttttcttttttaaataaacaggtttgctttggaaaggcttaa

SEQ ID NO: 482754 - DNA, 120 bp, Artificial Sequence
  ENSG00000161813_45 (sequence is synthesized)
tgatggaatgttagcatcttcactagggtaaagaagaacaaaaagaatgttgctggaacgtaaaatagtatttaaaagttaatgaacacttctctagttttcttagttatggccttaata

SEQ ID NO: 482755 - DNA, 120 bp, Artificial Sequence
  ENSG00000161813_46 (sequence is synthesized)
attagtctcttggcttaaatgtccactggttttactttgacacagttgaacaacactggggttaagtctctggtatttaggctggcaatatatatattaaccatattttaaaagtaccaa

SEQ ID NO: 482756 - DNA, 120 bp, Artificial Sequence
  ENSG00000161813_47 (sequence is synthesized)
ttttgtttttacagaaaagataaaactcaaaagagaacagtgtattccttctgaggggcttttataaattattaactataatatatgatggattttttcctaattttttatatttcctta

SEQ ID NO: 482757 - DNA, 120 bp, Artificial Sequence
  ENSG00000161813_48 (sequence is synthesized)
caattttggtggccattaatttaactttaggcttttgggcatatgctagtctgagcttccgaaaagatacatatatgtttcccttttcattagctgaatgaggatattttaagaagttga

SEQ ID NO: 482758 - DNA, 120 bp, Artificial Sequence
  ENSG00000161813_49 (sequence is synthesized)
aagagaatttattttcaagttgtgagtaaatcctcctttgaaattcacctgattattagataacttaaagtttatttttaaaagctgacaactttttatgaatcttcgagttgacagttc

SEQ ID NO: 482759 - DNA, 120 bp, Artificial Sequence
  ENSG00000161813_50 (sequence is synthesized)
ctaaaagcgtaactcagatattaatgggctgtgtattaaatggttttattttcagttttgcagcacagaacactgttgaaatatccatatcaacttgatttttttaacctaattcaggtg

SEQ ID NO: 482760 - DNA, 120 bp, Artificial Sequence
  ENSG00000161813_51 (sequence is synthesized)
tcctttgcatctcttaaatgttgggggtgggggtcagagccagttatccggcttctgttttgtcgattgcttagatttgttcctgttgtcaaaactgttacccccaaaattggtgtgaca

SEQ ID NO: 482761 - DNA, 120 bp, Artificial Sequence
  ENSG00000161813_52 (sequence is synthesized)
catgctcatgcataaaatgttaaaatgagtacatccttgtatttgtatttgttttcaacatcgccaaggtgctatgggaaattaacaaaattagaaaaaaaataaaattattaaaaagca

SEQ ID NO: 482762 - DNA, 120 bp, Artificial Sequence
  ENSG00000161813_53 (sequence is synthesized)
cttatcctagcaattggggcgcgggcctgtgagccagttggagttgcggcggcgggaacgattgggctgagcagaggacgacatgttgcttttcgtggaggtagcatctaaaggaactgg

SEQ ID NO: 482763 - DNA, 120 bp, Artificial Sequence
  ENSG00000161813_54 (sequence is synthesized)
aaaacctttgataataatgtgatcatcctgaataattgaagaacatgatcttcataataattaaatgagcatttaattattggtatatggttatattaaataaatacgttattttcagaa

SEQ ID NO: 482764 - DNA, 120 bp, Artificial Sequence
  ENSG00000161813_55 (sequence is synthesized)
cagatgcacaacaggcttttatacttaagagaagaagttaaaacatttcagggcaagccaattatggctccctttcccaatggtagttttgtgaatggctttaattcgccaggatcttat

SEQ ID NO: 482765 - DNA, 120 bp, Artificial Sequence
  ENSG00000161813_56 (sequence is synthesized)
gcttttcgtggagtgagaatcagagcgtctactgcacctttcagatgaccgggtgccgtggctcaacacctataatcccagcacttgggatgggaggctaagcaggtagcatctaaagga

SEQ ID NO: 482766 - DNA, 120 bp, Artificial Sequence
  ENSG00000161813_57 (sequence is synthesized)
gctcacaacactctaggaagctatgggaggtgaggcccgtagtggagaagaattgaaggagaaaaacggagggctgttctggtgtggcgcatttatggggttaagtggcatgggatttct

SEQ ID NO: 482767 - DNA, 120 bp, Artificial Sequence
  ENSG00000161813_58 (sequence is synthesized)
tggcgcatttatggggttaagtggcatgggatttctgtttctgatagtaaatagacgggctcactttgttaccccggctggagtgcggtgtcacgatctcggctcactgtaacctccacc

SEQ ID NO: 482768 - DNA, 120 bp, Artificial Sequence
  ENSG00000161813_59 (sequence is synthesized)
actttccgggccgtacacgccgcggaaccggcagataggctgacacagcacctgggccgagcaggcctgcagcttccctctgcgcgctcacaacactctaggaagctatgggagcaggta

SEQ ID NO: 482769 - DNA, 120 bp, Artificial Sequence
  ENSG00000161813_60 (sequence is synthesized)
acatgttgcttttcgtggagatgacaaaaccgagccccagaggttaaagtaactttacttagtaaaagtaaagtagtttaactgggatttagatccaggtcatgctgatgtcaaatcatg

SEQ ID NO: 482770 - DNA, 120 bp, Artificial Sequence
  ENSG00000161813_61 (sequence is synthesized)
tgcttttcgtggagcatttatggggttaagtggcatgggatttctgtttctgatagtaaataggtaagcggtaaatgattccgaagaaaactccgagatgcaagaaagaacgatgaacaa

SEQ ID NO: 482771 - DNA, 120 bp, Artificial Sequence
  ENSG00000161813_62 (sequence is synthesized)
gcaatgtttgttgtcaggctcagtaataaggtttggtggattttttgtttgttttgtttttactaagtgtatatgaacagtttaatctagaattcgtaaaaacactttgacctttgagtt

SEQ ID NO: 482772 - DNA, 120 bp, Artificial Sequence
  ENSG00000161813_63 (sequence is synthesized)
ggtaatgcatgtaacagacttgggattcagattttttttaataataaaagagaatagaaaaaatatttcatgacaccagtctctgacaaatctggtgactaatttccatttagtatgtta

SEQ ID NO: 482773 - DNA, 120 bp, Artificial Sequence
  ENSG00000161813_64 (sequence is synthesized)
aatgggtagcattttagagaatgaattctttgaagatataaatgttgttaactgaattgtgtaataaatgttgggatgtatgttattcaggtttttaaaggatttttgaaatgacaccca

SEQ ID NO: 482774 - DNA, 120 bp, Artificial Sequence
  ENSG00000161813_65 (sequence is synthesized)
agaactacagtgcacaacagacagtagctaacatttattgcacatttaatatcacaaactctgttcctaagggctttacatattttatcagttacttttttcagaaccctttataggtgc

SEQ ID NO: 482775 - DNA, 120 bp, Artificial Sequence
  ENSG00000161835_0 (sequence is synthesized)
ggcatcccccagccgccgccagccccgccgaggggagccagcgccgtctctgaggggcgtccggcgccggagccatgaccctccgccgactcaggaagctgcagcagaaggaggaggcgg

SEQ ID NO: 482776 - DNA, 120 bp, Artificial Sequence
  ENSG00000161835_1 (sequence is synthesized)
gcccggactcccgactcggaagtcgcgcccgccgctccggtcccgaccccgggaccccctgccgcagccgccacccctgggcccccagcggacgagctgtacgcggcgctggaggactat

SEQ ID NO: 482777 - DNA, 120 bp, Artificial Sequence
  ENSG00000161835_2 (sequence is synthesized)
acgcggcgctggaggactatcaccctgccgagctgtaccgcgcgctcgccgtgtccgggggcaccctgccccgccgaaagggctcaggattccgctggaagaatctcagccagagtcctg

SEQ ID NO: 482778 - DNA, 120 bp, Artificial Sequence
  ENSG00000161835_3 (sequence is synthesized)
aacagcagcggaaagtgctgacgttggagaaggaggataaccagaccttcggctttgagatccagacttatggccttcaccaccgggaggagcagcgtgtggaaatggtgacctttgtct

SEQ ID NO: 482779 - DNA, 120 bp, Artificial Sequence
  ENSG00000161835_4 (sequence is synthesized)
gccgagttcatgagtctagccctgcccagctggctgggctcacaccaggggacaccatcgccagcgtcaatggcctgaatgtggaaggcatccggcatcgagagattgtggacatcatta

SEQ ID NO: 482780 - DNA, 120 bp, Artificial Sequence
  ENSG00000161835_5 (sequence is synthesized)
aggcgtcaggcaatgttctcagactggaaactctatatgggacatcaattcggaaggcagaactggaggctcgtctgcagtacctgaagcaaaccctgtatgagaagtggggagagtaca

SEQ ID NO: 482781 - DNA, 120 bp, Artificial Sequence
  ENSG00000161835_6 (sequence is synthesized)
ggtccctaatggtgcaggagcagcggctggtgcatggcctggtggtgaaggaccccagcatctacgacacgctggagtcggtgcgctcctgcctctacggcgcgggcctgctcccgggct

SEQ ID NO: 482782 - DNA, 120 bp, Artificial Sequence
  ENSG00000161835_7 (sequence is synthesized)
cgctgcccttcgggcctctgctcgccgtgcccgggcgtccccgcggaggcgcccgacgggccaggggcgacgccgacgacgccgtctaccacacgtgcttcttcggggactccgagccgc

SEQ ID NO: 482783 - DNA, 120 bp, Artificial Sequence
  ENSG00000161835_8 (sequence is synthesized)
gcgccgggcgcgctctggactgaggctcgcgagcaggccctatgcggccccggcctgcgcaaaaccaagtaccgcagcttccgccggcggctgctcaagttcatccccggactcaaccgc

SEQ ID NO: 482784 - DNA, 120 bp, Artificial Sequence
  ENSG00000161835_9 (sequence is synthesized)
tccctggaggaggaggagagccagctgtaggggcgggggcgggcagggaggtatttatttatttattcgcaacagccagcgctaaaagagggggaggccgagccaagaggaccccaggag

SEQ ID NO: 482785 - DNA, 120 bp, Artificial Sequence
  ENSG00000161835_10 (sequence is synthesized)
cccagagcagcgggagagggtccttcctagcctcggcccgccgggtcggttcctggctggtgtctgctgagggagtggggggcccagccccttctcttctcccccgccaaaccacagtgg

SEQ ID NO: 482786 - DNA, 120 bp, Artificial Sequence
  ENSG00000161835_11 (sequence is synthesized)
gagctggggcagggggagagccaggcaatcgggggccaaagatgggggtgctcgcctacagtctgcatctgtagtgccttgtggggtatccaggaacaccctcccagcaggggatgggaa

SEQ ID NO: 482787 - DNA, 120 bp, Artificial Sequence
  ENSG00000161835_12 (sequence is synthesized)
ccctgtcccatgaagccctctcctcagctttacttgctcccccgcccttagccttggggagaaatggcccgtggtgggctgaccccccaccctccacacacacagttccatgacccagcg

SEQ ID NO: 482788 - DNA, 120 bp, Artificial Sequence
  ENSG00000161835_13 (sequence is synthesized)
ggcccccaggggcatcaggtgctggtcctcctccctcctggcctcgacccctaagggcttcgcccctcccaggggcctgtaactaagtcgggtcctgccaggcagggggcctgtgttctg

SEQ ID NO: 482789 - DNA, 120 bp, Artificial Sequence
  ENSG00000161835_14 (sequence is synthesized)
tgccccttgggagacaggaactggcgagttcaggtggggtggggacagcacagactgttccaccgttgtgcatattgttgcttctgaaccacaaactgtataaatggatggttttttgca

SEQ ID NO: 482790 - DNA, 120 bp, Artificial Sequence
  ENSG00000161835_15 (sequence is synthesized)
ttctgtgtgtttggatcgagtatgagagatgtcagaggagatctacagagaaccatgaggagttggaggagggagttcaggagtattccctggagttactacccacccttctcccctttc

SEQ ID NO: 482791 - DNA, 120 bp, Artificial Sequence
  ENSG00000161835_16 (sequence is synthesized)
ttcctcttccttttccttctttgagaaggccagaaagaagaatggatagaatctgggctttggatctaggcaaatttgccatgtactgtgtgatcttgcacagccccatctacaaaatga

SEQ ID NO: 482792 - DNA, 120 bp, Artificial Sequence
  ENSG00000161835_17 (sequence is synthesized)
taatggtgcaggagcagcggctggtgcatggtgagtagatcccggggtgtgaggggccacttgttctgctacagacaccccatctgcgcttccccctcagaactggcgggttctagtaaa

SEQ ID NO: 482793 - DNA, 120 bp, Artificial Sequence
  ENSG00000161835_18 (sequence is synthesized)
gaacggtttactagtaaacctccacagtaaagcaaggtttgttgagctactactactttgggtactgccgcagccacatttctggttattctcacactagccctctgcaggtaagtaaca

SEQ ID NO: 482794 - DNA, 120 bp, Artificial Sequence
  ENSG00000161835_19 (sequence is synthesized)
gatagtgtcatcttcactttacagaggggaacaccagggctcaaagagtttgtgtcaattatttccgaggcccgtttgtgctaagcggcccccataaggatctgagtgataattcctgat

SEQ ID NO: 482795 - DNA, 120 bp, Artificial Sequence
  ENSG00000161847_0 (sequence is synthesized)
ttagccaacggggcaaggggggcgggaaggaggtggggtttctcccagccaatcgacgggcgcgccctcgttgccgctctatgccgctccgccccggctcgctggtcccagaaggcgccg

SEQ ID NO: 482796 - DNA, 120 bp, Artificial Sequence
  ENSG00000161847_1 (sequence is synthesized)
ggtttcccaagatggcggcggacgtgtccgttactcaccggcccccgctgagccctaagtctggggccgaagtcgaagccggcgatgccgcggagcgccgggcgccggaagaagagctgc

SEQ ID NO: 482797 - DNA, 120 bp, Artificial Sequence
  ENSG00000161847_2 (sequence is synthesized)
cgcctctagatccagaagagatccggaaacgcctggaacacaccgagcgccagttccgtaaccgccgcaagatactgatccggggcctcccgggggacgtgaccaaccaggaagtacatg

SEQ ID NO: 482798 - DNA, 120 bp, Artificial Sequence
  ENSG00000161847_3 (sequence is synthesized)
acctgctcagtgactatgagctcaaatactgttttgtggacaaatacaaagggacagccttcgtgaccctgctgaatggggagcaggccgaggccgcaatcaatgctttccaccagagcc

SEQ ID NO: 482799 - DNA, 120 bp, Artificial Sequence
  ENSG00000161847_4 (sequence is synthesized)
gcctgcgggagcgtgaactgtcggtgcagctgcagcccacggatgccctgctgtgtgtggccaacctgccccccagcctcacacagcagcagttcgaggagctggtgcggcccttcggca

SEQ ID NO: 482800 - DNA, 120 bp, Artificial Sequence
  ENSG00000161847_5 (sequence is synthesized)
gcctggagcgctgcttcctggtctacagtgagcgcactggccaatccaagggctatggctttgctgagtacatgaagaaggactcggctgcccgtgccaagtcggacctgctgggcaagc

SEQ ID NO: 482801 - DNA, 120 bp, Artificial Sequence
  ENSG00000161847_6 (sequence is synthesized)
cgctgggaccacgcaccctctacgtgcactggacggatgccgggcaactgacgcctgcccttctccactcccgctgcctctgtgtggaccgcctgccacctggcttcaacgatgtggacg

SEQ ID NO: 482802 - DNA, 120 bp, Artificial Sequence
  ENSG00000161847_7 (sequence is synthesized)
ctctgtgccgggcgctgtcagctgtccacagccccaccttctgccagctggcgtgcggccaggatgggcagctgaagggcttcgcggtgctggagtatgagacggctgagatggcggagg

SEQ ID NO: 482803 - DNA, 120 bp, Artificial Sequence
  ENSG00000161847_8 (sequence is synthesized)
aggcacagcagcaggcggacggcctgtccctggggggcagccacctgcgagtctccttctgcgcccctgggccccccggccgcagtatgctggccgctctcatcgctgcccaggccacgg

SEQ ID NO: 482804 - DNA, 120 bp, Artificial Sequence
  ENSG00000161847_9 (sequence is synthesized)
ccctcaatcgggggaagggactcctccccgagcccaacatcctgcagctgctcaacaacctgggcccatccgcgtccctccagctgctgctcaaccccctgctccatggcagtgcggggg

SEQ ID NO: 482805 - DNA, 120 bp, Artificial Sequence
  ENSG00000161847_10 (sequence is synthesized)
ggaagcagggcctcctgggtgcccccccagccatgccgctgctcaatgggccagccctgtccacggcgctgttgcagctcgccctgcagacccagggccagaagaagcccggcatcctgg

SEQ ID NO: 482806 - DNA, 120 bp, Artificial Sequence
  ENSG00000161847_11 (sequence is synthesized)
gaagaagcccggcatcctgggagactcacccctgggcgccctccagcctggggcccagccagccaaccccctcctcggggagctgcctgcaggagggggcctgcccccggagctgccgcc

SEQ ID NO: 482807 - DNA, 120 bp, Artificial Sequence
  ENSG00000161847_12 (sequence is synthesized)
ccctgctgccatccgtgcttggccctgctgggggtgaccgggaggccctgggcttgggtcccccagcggcccagctcactcctccccccgcccctgtggggctccgaggctctggcctca

SEQ ID NO: 482808 - DNA, 120 bp, Artificial Sequence
  ENSG00000161847_13 (sequence is synthesized)
gaggcctccagaaagacagtgggcctctgccgacgccccctggggtctcactgctgggggagccccccaaggactaccggattcccctgaatccctacctgaacctacacagcctgctcc

SEQ ID NO: 482809 - DNA, 120 bp, Artificial Sequence
  ENSG00000161847_14 (sequence is synthesized)
cagcagcagcagcaaagccttccagctcaagtcccgcctgctcagccccctcagcagcgcccgcctgccccccgaaccaggactgtctgacagctacagcttcgactacccctcggacat

SEQ ID NO: 482810 - DNA, 120 bp, Artificial Sequence
  ENSG00000161847_15 (sequence is synthesized)
gggacctcggcggctcttctcccacccacgggaaccagcccttgggcctcacggacccagccgacacaagatgtcccccccgcccagtggcttcggcgaacggagcagcggtgggagtgg

SEQ ID NO: 482811 - DNA, 120 bp, Artificial Sequence
  ENSG00000161847_16 (sequence is synthesized)
cgggggccccctgtctcacttctattcaggctcgcccacttcctacttcaccagcggcctgcaggctggcctcaagcagagccacctcagtaaggcaatcggctcttccccgctggggtc

SEQ ID NO: 482812 - DNA, 120 bp, Artificial Sequence
  ENSG00000161847_17 (sequence is synthesized)
cggagaagggctcctgggcctcagccccgggcctaatggtcacagccacctgctgaagaccccactgggcggccagaaacgcagctttgcccacctgctgccctcgcccgagcccagccc

SEQ ID NO: 482813 - DNA, 120 bp, Artificial Sequence
  ENSG00000161847_18 (sequence is synthesized)
agaaggcagctatgtgggccagcactcccagggcctcggcggccactacgcggactcctacctgaagcggaagaggattttctaagtggctggcaccagagataactcaagggcctgcac

SEQ ID NO: 482814 - DNA, 120 bp, Artificial Sequence
  ENSG00000161847_19 (sequence is synthesized)
caaatcgcttttgggttttctgatgttttgttttgtgttttttttaaaccattttctctctttcggtaatagaaaaatctctgaaagactttactgaccaatcagccggagccccaggag

SEQ ID NO: 482815 - DNA, 120 bp, Artificial Sequence
  ENSG00000161847_20 (sequence is synthesized)
cccaaggggtgtgggggagtctggaggcctcattatgtctctggcttgctccccacgctgaaaccctgcagccttaagagagaggggccccggcctgctctccctccctccccccatctc

SEQ ID NO: 482816 - DNA, 120 bp, Artificial Sequence
  ENSG00000161847_21 (sequence is synthesized)
ctcctccgctgtgcccgtctctccggagccctcctgcctcattgctcctgtaattttggcctttcgagtgccttggaggtttccctgacctcccgtgaagatacagagactgtctccttt

SEQ ID NO: 482817 - DNA, 120 bp, Artificial Sequence
  ENSG00000161847_22 (sequence is synthesized)
ttttttaactttgacaactgacttctgtttccttttctaagttttatttttcaaaccaccccggacagcccccagctctgattccttcaaggcccggcctgtccgggccaccattccaca

SEQ ID NO: 482818 - DNA, 120 bp, Artificial Sequence
  ENSG00000161847_23 (sequence is synthesized)
ccttgcggtttgaaacagctgtttttcccacatttgctgcaggcatggctgtctcctgcccctgcctgcccatctggcctataccccagccgtggggcccggggtccctgccgcagcccc

SEQ ID NO: 482819 - DNA, 120 bp, Artificial Sequence
  ENSG00000161847_24 (sequence is synthesized)
ctccccttctgatgccttaaaagctgggccccaggccctgctggccagagccacagatgccaagctctgggagcttgactatggaccaaacagctctggcctagggattgggccacccta

SEQ ID NO: 482820 - DNA, 120 bp, Artificial Sequence
  ENSG00000161847_25 (sequence is synthesized)
cccaggatctccaccctggggacagtagaaggggaaagccttcatcttggcgaaccggccccaccaccccctcctacccgggcctccgtgcagagatgggctttctctgccagtcccctg

SEQ ID NO: 482821 - DNA, 120 bp, Artificial Sequence
  ENSG00000161847_26 (sequence is synthesized)
ctgtctgtctgtgggagtcggacattgtgcccatctcccggagcctctgctgtcactcgcttgttgaagatgaattcttgaattctgcctgcccacccccggccagatccctggagctgg

SEQ ID NO: 482822 - DNA, 120 bp, Artificial Sequence
  ENSG00000161847_27 (sequence is synthesized)
cctccttccagcccagtgccagaaaccagcactccatgaagataaactctgggcccgcccaccagcaggacctgtcgacctgaggtgaccctgggccttgcccccagccaactgggccac

SEQ ID NO: 482823 - DNA, 120 bp, Artificial Sequence
  ENSG00000161847_28 (sequence is synthesized)
cagcttccctcccttgactctgggggtccacatccactccaaggggactattcccccgaccccaccccagtctccccacacggacctttgctgaattaaagtttgtaagtaaatggtttt

SEQ ID NO: 482824 - DNA, 120 bp, Artificial Sequence
  ENSG00000161847_29 (sequence is synthesized)
aatggtcacagccacctgctgaaggtacgggcagggggtggggacatgcagggctgggaagccccggccccccagcggcccctgacccgccccgccctgccctctgtctccagaccccac

SEQ ID NO: 482825 - DNA, 120 bp, Artificial Sequence
  ENSG00000161847_30 (sequence is synthesized)
ctggctgtgccctgggggcgcagaaccagggtgagggcgactcccccaaacccctgcctttcccacccacatccccatccccctctggcaattgctcatgatggttcgccatctttccct

SEQ ID NO: 482826 - DNA, 120 bp, Artificial Sequence
  ENSG00000161847_31 (sequence is synthesized)
ccattctgagagcgcccctggacttggtgcctggggtggggtcaggggacctggacacgcccatttacagcctgaaactgggtgtgggctgggagcgccgctgctgggcaccagtttgtg

SEQ ID NO: 482827 - DNA, 120 bp, Artificial Sequence
  ENSG00000161847_32 (sequence is synthesized)
aatagactctgctcggaagctctatagacatgcctgggaaaaaactccaggtctatcccctcagtgtgtgcacacacacacacgcacacctagaaacacaggtatacatatagactcaca

SEQ ID NO: 482828 - DNA, 120 bp, Artificial Sequence
  ENSG00000161847_33 (sequence is synthesized)
catacaaagatgcaaatatacacacagagacatagacacacaaagacataagacaaagacacacacatagacacagacacacatatagacacaagacagactcatgcacacagaaacaaa

SEQ ID NO: 482829 - DNA, 120 bp, Artificial Sequence
  ENSG00000161847_34 (sequence is synthesized)
gacacagatatacacgcacacacacacacagacacacacacacatagacatacacccatgctccgtcctgtctggtgtggttccctggattctaagtcaggtgtgtctgtctggtggtaa

SEQ ID NO: 482830 - DNA, 120 bp, Artificial Sequence
  ENSG00000161847_35 (sequence is synthesized)
ctgacagaatatgtgagcctgtgggtctggccttctgtgactaaaagtggctgaaacactgtgtggctgtcccattccatgtggctgcagttgatactgtgctgcaatcattggccaggg

SEQ ID NO: 482831 - DNA, 120 bp, Artificial Sequence
  ENSG00000161847_36 (sequence is synthesized)
aactggggcctggagctcaggagaccctcggtcaccatggctgatgggacagtgatagagttggagtgtggcgggcactggggaaccctgtgcctgtctgcccaggatcggccgtgccct

SEQ ID NO: 482832 - DNA, 120 bp, Artificial Sequence
  ENSG00000161847_37 (sequence is synthesized)
ggagttggggtgtgtctgccaagactctgggccacacctgtctgcttccctgggccaccctgcccccatctgcaactgtctgtgctctgtccctagaagcccggcatcctgggagactca

SEQ ID NO: 482833 - DNA, 120 bp, Artificial Sequence
  ENSG00000161847_38 (sequence is synthesized)
cccctgggcgccctccagcctggggcccagccagccaaccccctcctcggggagctgcctgcaggtaacgcagaccctgcccacacggtgtcccccagccacttccccttccttccctgc

SEQ ID NO: 482834 - DNA, 120 bp, Artificial Sequence
  ENSG00000161847_39 (sequence is synthesized)
gtgagtgacccaacctctgggtcccagcgcccttgtccatcagttgggtgccctccactcagggcccagggatgagctctgctcagtggccagcatggatttgtctcttgacccctgggc

SEQ ID NO: 482835 - DNA, 120 bp, Artificial Sequence
  ENSG00000161847_40 (sequence is synthesized)
cctggtccaggtgggagctggagggccctggggagaggggtcctgtgagcctgggcccctgaaatcctccttccctccctaggagggggcctgcccccggagctgccgccccggcgaggg

SEQ ID NO: 482836 - DNA, 120 bp, Artificial Sequence
  ENSG00000161849_0 (sequence is synthesized)
agagggactcccagctccagctcacccattctacacttgctcttttgctcccaaccaggaagccatcatgtcttgccgctcctaccgagtcagctctggtcaccgggtgggcaacttcag

SEQ ID NO: 482837 - DNA, 120 bp, Artificial Sequence
  ENSG00000161849_1 (sequence is synthesized)
ctcttgttcagcaatgacaccacagaacctgaatcgcttccgggccaactctgtctcctgttggagtgggcctggattccggggccttggcagctttggtagtcggagtgtcatcacctt

SEQ ID NO: 482838 - DNA, 120 bp, Artificial Sequence
  ENSG00000161849_2 (sequence is synthesized)
tggatcgtactcaccccggatagcagctgtaggctctcggcccatccactgtggagtccgctttggtgctggctgtgggatgggttttggtgatgggagaggtgttggtctggggcctag

SEQ ID NO: 482839 - DNA, 120 bp, Artificial Sequence
  ENSG00000161849_3 (sequence is synthesized)
ggctgacagctgtgttggtctgggctttggagctggcagtggcattggctatggctttggtggccctggctttggttacagagttggaggggttggagtcccagcagccccatctatcac

SEQ ID NO: 482840 - DNA, 120 bp, Artificial Sequence
  ENSG00000161849_4 (sequence is synthesized)
agctgtgactgtgaacaagagcctactgacccccctcaacctggagattgaccccaatgcccagagggtgaagaaggatgagaaggagcaaatcaagaccctcaacaacaagtttgcctc

SEQ ID NO: 482841 - DNA, 120 bp, Artificial Sequence
  ENSG00000161849_5 (sequence is synthesized)
cttcattgacaaggttcggttcctagagcagcagaataagctcctagagaccaagtggagcttcctccaagagcagaaatgtatcaggagcaatctggagccactcttcgagagctacat

SEQ ID NO: 482842 - DNA, 120 bp, Artificial Sequence
  ENSG00000161849_6 (sequence is synthesized)
caccaacctgcggaggcagttggaggtgctggtcagtgatcaggcccggctccaggctgagaggaaccacctgcaggatgtcctagagggcttcaagaagaagtatgaagaggaagtggt

SEQ ID NO: 482843 - DNA, 120 bp, Artificial Sequence
  ENSG00000161849_7 (sequence is synthesized)
atgtcgggccaatgctgagaatgagtttgtggctctgaagaaggatgtggatgcagctttcatgaacaagtctgatctcgaggccaacgtggataccctaactcaggaaattgactttct

SEQ ID NO: 482844 - DNA, 120 bp, Artificial Sequence
  ENSG00000161849_8 (sequence is synthesized)
acgtcggtcattgtgaagatggacaacagccgtgacctgaaccttgatgggatcattgctgaggtcaaggcccagtatgaggaggtggccaggcgcagccgggctgatgctgaggcctgg

SEQ ID NO: 482845 - DNA, 120 bp, Artificial Sequence
  ENSG00000161849_9 (sequence is synthesized)
taccagaccaagtatgaagagatgcaggtgacagctggccaacactgtgacaacctgcgcaacatacggaacgagatcaacgaactgacccgcctgatccagaggcttaaggcagagatt

SEQ ID NO: 482846 - DNA, 120 bp, Artificial Sequence
  ENSG00000161849_10 (sequence is synthesized)
gagcacgccaaggctcagcgtgccaagttggaggctgcagtggccgaggccgagcagcagggcgaggcgaccctcagtgatgccaaatgcaagctggcagatctggagtgtgccctgcag

SEQ ID NO: 482847 - DNA, 120 bp, Artificial Sequence
  ENSG00000161849_11 (sequence is synthesized)
caggccaagcaggacatggcgcggcagctgtgcgagtaccaggagctgatgaatgccaagctgggcctggacatcgagatcgccacctacaggcgcctgctggagggcgaggagagccgg

SEQ ID NO: 482848 - DNA, 120 bp, Artificial Sequence
  ENSG00000161849_12 (sequence is synthesized)
ctctgtgaaggtgttggaccagtaaacatatccgtcagcagctcccggggcggcctggtgtgcgggcctgagcctttggttgccggctccaccctctcccgcggcggggtcaccttctca

SEQ ID NO: 482849 - DNA, 120 bp, Artificial Sequence
  ENSG00000161849_13 (sequence is synthesized)
ggtagcagcagcgtctgtgccaccagtggggtcctggcttcctgtggccccagcctgggtggagcccgggtcgccccggccactggggacctgctgagcactggcacaaggagtggctcc

SEQ ID NO: 482850 - DNA, 120 bp, Artificial Sequence
  ENSG00000161849_14 (sequence is synthesized)
atgctcatcagcgaggcctgtgtccccagcgtcccctgccccctgcccacccaggggggcttcagcagctgcagcggcggccgcagctccagcgtccgctttgtgtccaccaccacctcc

SEQ ID NO: 482851 - DNA, 120 bp, Artificial Sequence
  ENSG00000161849_15 (sequence is synthesized)
tgccggaccaagtactgagagcccagccccagacagctgctgcccagagaagaaccagctccacggctcctgcttctgcccccagggttcgtgggctctgggcttgacggtctccagctc

SEQ ID NO: 482852 - DNA, 120 bp, Artificial Sequence
  ENSG00000161849_16 (sequence is synthesized)
ccctttctgccaggaagccaccccttagcactcccccgattattctgcctggccccatgtcctcttggaggatttttctgccatgtagatgctccattagcagttccagctaagctggct

SEQ ID NO: 482853 - DNA, 120 bp, Artificial Sequence
  ENSG00000161850_0 (sequence is synthesized)
gggaagctgagcctgacttgatcatcctgccccggttctttcctccagggccgcatttctctgcctctctctcctgccatgtcgtaccactctttccagccaggctccaggtgtggcagt

SEQ ID NO: 482854 - DNA, 120 bp, Artificial Sequence
  ENSG00000161850_1 (sequence is synthesized)
cagagtttcagctcatactcggctgtcatgccccggatggtcacccactatgcagtgagcaaggggccatgccggcccgggggtggtaggggcctccgagctctgggctgccttggctca

SEQ ID NO: 482855 - DNA, 120 bp, Artificial Sequence
  ENSG00000161850_2 (sequence is synthesized)
cggagcctgtgcaacgtgggctttgggaggccccgggtagcctccaggtgtggaggtaccctgcctggcttcgggtaccgactgggagccacctgtgggccttctgcctgcatcacccct

SEQ ID NO: 482856 - DNA, 120 bp, Artificial Sequence
  ENSG00000161850_3 (sequence is synthesized)
gtcaccatcaatgagagcctgctggtcccactggcactggagatagacccgactgtgcagagggtaaagagggatgagaaggagcagatcaagtgcctcaacaaccgtttcgcatctttc

SEQ ID NO: 482857 - DNA, 120 bp, Artificial Sequence
  ENSG00000161850_4 (sequence is synthesized)
atcaacaaggtccgtttcctggagcagaagaacaagctgctggagaccaagtggaacttcatgcagcagcagaggtgctgccagaccaacatcgagcccatcttcgagggctatatcagc

SEQ ID NO: 482858 - DNA, 120 bp, Artificial Sequence
  ENSG00000161850_5 (sequence is synthesized)
gcccttcggcggcagctggactgtgtgtccggggaccgcgtgaggctagagtcagagctctgcagcctccaggctgcactggagggctacaagaaaaaatacgaagaggagctctccctg

SEQ ID NO: 482859 - DNA, 120 bp, Artificial Sequence
  ENSG00000161850_6 (sequence is synthesized)
cgtccctgtgttgagaatgagtttgttgccttgaagaaggacgtggacacagccttcctgatgaaggctgacctggagaccaacgcagaggcactcgtgcaggagatcgacttcctgaaa

SEQ ID NO: 482860 - DNA, 120 bp, Artificial Sequence
  ENSG00000161850_7 (sequence is synthesized)
agcctgtatgaggaggagatctgcctgctccagtctcagatctctgagacctcggtcattgtgaagatggacaacagccgggagctggacgtggacggcatcatcgctgagatcaaggcg

SEQ ID NO: 482861 - DNA, 120 bp, Artificial Sequence
  ENSG00000161850_8 (sequence is synthesized)
cagtatgacgacatcgccagccgcagcaaagccgaagcagaggcctggtaccagtgccggtatgaggagctgagagtcacagctgggaaccactgtgacaacctccgcaaccgtaagaac

SEQ ID NO: 482862 - DNA, 120 bp, Artificial Sequence
  ENSG00000161850_9 (sequence is synthesized)
gagatcctggaaatgaataaactgatccagcggctgcagcaagaaaccgagaatgtcaaagcccagcgctgcaaacttgagggtgccatagctgaggcagagcagcagggcgaggcggct

SEQ ID NO: 482863 - DNA, 120 bp, Artificial Sequence
  ENSG00000161850_10 (sequence is synthesized)
ctcaatgatgccaagtgcaagctggcagggctggaggaggctctgcagaaggccaagcaggacatggcctgcctgctcaaggaatatcaggaggtgatgaactccaagctgggcctggac

SEQ ID NO: 482864 - DNA, 120 bp, Artificial Sequence
  ENSG00000161850_11 (sequence is synthesized)
ctgctggagggtgaagagcacaggctgtgcgaaggcatcgggcccgtgaatatctcagtgagcagctccaaaggcgccttcctgtacgagccatgtggggtcagcacgcctgtcctcagc

SEQ ID NO: 482865 - DNA, 120 bp, Artificial Sequence
  ENSG00000161850_12 (sequence is synthesized)
actggcgtcctcaggagcaatgggggctgcagcatcgtgggcactggtgaactctatgtcccctgcgagccccaggggctactgagctgtgggagcgggcggaaatccagcatgacgcta

SEQ ID NO: 482866 - DNA, 120 bp, Artificial Sequence
  ENSG00000161850_13 (sequence is synthesized)
ggagctgggggcagctcccccagccacaagcattagcatgatccgagacatccaggagacagagcccctgccccatggccctggatgtcacactcccaccagggctgaagacaaggatgt

SEQ ID NO: 482867 - DNA, 120 bp, Artificial Sequence
  ENSG00000161850_14 (sequence is synthesized)
tccaaaaccccacctccctttattgactccacattcccctccagtgttccctccttgagagctgagctgcccctaggacccctcctttgcctcatgagtcaccttccactcacctgtgtg

SEQ ID NO: 482868 - DNA, 120 bp, Artificial Sequence
  ENSG00000161850_15 (sequence is synthesized)
cagaccctcagctaggcccagatggtggggacagacggcagagaaagagcatgcattgctcttaaccgcagaatggcaataacccccaaaaggtcaaatgggcacaccacagttctgctc

SEQ ID NO: 482869 - DNA, 120 bp, Artificial Sequence
  ENSG00000161850_16 (sequence is synthesized)
tgtggatcatcccatggaagtttcctcacaaagtcagctcctctcccaccacaggctcacactgcccttactttaggctctcatgcccctaagaaaagtgaatttcctttaacaccgcct

SEQ ID NO: 482870 - DNA, 120 bp, Artificial Sequence
  ENSG00000161850_17 (sequence is synthesized)
gaaacatgcacactgcaaatatcaaaaggagacacccccaaatcccactctaaattccaaagccaagtgccacgatttcaggatcagtcaggacctgccaatgtcctctcagcacagaga

SEQ ID NO: 482871 - DNA, 120 bp, Artificial Sequence
  ENSG00000161850_18 (sequence is synthesized)
atcaagaggtggcctttgggcagtagatttactttctcaggtatgttgaacccaaactgtgagaataaatctttctcctgagctcacattggcaggtgatgtcaggccaatgcctagaac

SEQ ID NO: 482872 - DNA, 120 bp, Artificial Sequence
  ENSG00000161850_19 (sequence is synthesized)
aaagggcaaagggatatggaatgtttactggacagttggaaaaccaaaaacagataccattttctcaatggaatcagttccccctccacccatccccttctgtacatagccgccccttcc

SEQ ID NO: 482873 - DNA, 120 bp, Artificial Sequence
  ENSG00000161850_20 (sequence is synthesized)
tgttccccaaccctttagctccttttgctttgagtctgatatgacagtgatgtggggctgccccagctgacttggaggccctggctcaggagctcatagatggaggaggtgtgggctgac

SEQ ID NO: 482874 - DNA, 120 bp, Artificial Sequence
  ENSG00000161850_21 (sequence is synthesized)
tacctcccagaagcccctcatgccaagcctgtcccactggggctccagggcctctgccctgaacatctgggcttctgttcaaaataaacctactctgttcatggattatagcaatcagga

SEQ ID NO: 482875 - DNA, 120 bp, Artificial Sequence
  ENSG00000161860_0 (sequence is synthesized)
gcagagggtgcgagcttgaaggcgggaaaatacggaatggagcgacagggagtggacgtgccccatgtgaaatgcaaagaccaggaaccgcagcccttgggggagagcaaggagcatccg

SEQ ID NO: 482876 - DNA, 120 bp, Artificial Sequence
  ENSG00000161860_1 (sequence is synthesized)
cggtgggaagagaactgcgaggaggaagctggtggagggccagctagtgccagttgccagctgacggtcctggaagggaagtcgggactctacttctcctctctggactcaagcattgac

SEQ ID NO: 482877 - DNA, 120 bp, Artificial Sequence
  ENSG00000161860_2 (sequence is synthesized)
atcctgcagaagagagcccaggagctgatcgaaaacatcaacaagagccggcaaaaggaccatgcactcatgaccaacttcaggaacagcctgaagaccaaggtttcggatctgacagag

SEQ ID NO: 482878 - DNA, 120 bp, Artificial Sequence
  ENSG00000161860_3 (sequence is synthesized)
aaattagaggagaggatctatcagatttataatgaccacaacaagatcatccaggaaaagctccaagagttcacccagaaaatggcaaagatcagccatttggagacagagctcaaacaa

SEQ ID NO: 482879 - DNA, 120 bp, Artificial Sequence
  ENSG00000161860_4 (sequence is synthesized)
gtctgccacagcgtggagactgtgtacaaagacctgtgtctccagcctgagcagagcctaagactcagatgggggccagaccactctaggggaaagtccccaccacgtcccggcaactca

SEQ ID NO: 482880 - DNA, 120 bp, Artificial Sequence
  ENSG00000161860_5 (sequence is synthesized)
gccactgcttcagaagtacagaccaacagagatggtgaatgctgacagctgccgggagactcacgccttagtgacagtctccaggagaagactgtgaggccaccatttgggccacactga

SEQ ID NO: 482881 - DNA, 120 bp, Artificial Sequence
  ENSG00000161860_6 (sequence is synthesized)
gaaattgtttttcatggttctataatgcatcttggcagaaaaaaacaaaaacccaaagctccttgtgctgaactcccaaaatgtagcaagtccagcccctgccataggcccaggcttcgt

SEQ ID NO: 482882 - DNA, 120 bp, Artificial Sequence
  ENSG00000161860_7 (sequence is synthesized)
gctccccacccttggcaagttctccccacccccagccccacagtttattaaatgtttgattttcaacctggccacgcttccttgccacagaggctgaaagcacccctgagctccaaggaa

SEQ ID NO: 482883 - DNA, 120 bp, Artificial Sequence
  ENSG00000161860_8 (sequence is synthesized)
acacagcaagccctttcttaccctcgggagggataggagggacagcacatcggaagagcagtcacttgcctcagctgacctctgcccatctgaagccgcctctcccagagaatcccacac

SEQ ID NO: 482884 - DNA, 120 bp, Artificial Sequence
  ENSG00000161860_9 (sequence is synthesized)
cccatgccctggtgtctcatcctttgctcctccccagctccttgaagcagaaggcagattgtagcctcctttttagagccaattctgtttacttcctaaagtacaaacctatttttttta

SEQ ID NO: 482885 - DNA, 64 bp, Artificial Sequence
  ENSG00000161860_10 (sequence is synthesized)
aagattacaggcatgagcgactacacctggccgcttcctgtactctgagaagtcaggtttcttg

SEQ ID NO: 482886 - DNA, 120 bp, Artificial Sequence
  ENSG00000161860_11 (sequence is synthesized)
caaagacctgtgtctccagcctgagagcctaagactcagatgggggccagaccactctaggggaaagtccccaccacgtcccggcaactcacagcccccagacgtgttcgtttcttctgt

SEQ ID NO: 482887 - DNA, 120 bp, Artificial Sequence
  ENSG00000161888_0 (sequence is synthesized)
caaatttgcgcgggttggagcctggcgtagtcatggccgccttccgcgacatagaggaggtgagccaggggctgctcagcctgctgggcgccaaccgcgcggaggcgcagcagcgacggc

SEQ ID NO: 482888 - DNA, 120 bp, Artificial Sequence
  ENSG00000161888_1 (sequence is synthesized)
tgctggggcgccacgagcaggtggtggagcggctgctggaaacgcaagacggtgccgagaagcagctgcgagagatcctcaccatggagaaggaagtggcccagagccttctcaatgcga

SEQ ID NO: 482889 - DNA, 120 bp, Artificial Sequence
  ENSG00000161888_2 (sequence is synthesized)
aggagcaggtgcaccagggaggcgtggagctgcagcagctggaagctgggcttcaggaggctggggaggaggacacccgtctgaaggccagcctccttcagctcaccagagagctggaag

SEQ ID NO: 482890 - DNA, 120 bp, Artificial Sequence
  ENSG00000161888_3 (sequence is synthesized)
agctcaaggagattgaggcggatctggagcgacaggagaaggaggtcgacgaggacacgacagtcacaatcccctcggccgtgtacgtggctcaactttaccaccaagttagtaaaattg

SEQ ID NO: 482891 - DNA, 120 bp, Artificial Sequence
  ENSG00000161888_4 (sequence is synthesized)
agtgggattatgagtgtgagccagggatggtcaaaggcatccatcatggccccagtgtggcccagcccatccacctggacagcacccagctctccaggaaattcatcagcgactacctct

SEQ ID NO: 482892 - DNA, 120 bp, Artificial Sequence
  ENSG00000161888_5 (sequence is synthesized)
ggagtctggtggacaccgagtggtagccaggagcctcgtggctgcgtcttgcacccagcgggcatctgccgtggtcagatccatttcaaatgaaatgtggggacatagatcttttttttt

SEQ ID NO: 482893 - DNA, 60 bp, Artificial Sequence
  ENSG00000161888_6 (sequence is synthesized)
ccacacccagctaattttttgtatttggtagagatgggccttggcctcccaaagtgctag

SEQ ID NO: 482894 - DNA, 61 bp, Artificial Sequence
  ENSG00000161888_7 (sequence is synthesized)
cgccttggcctcccaaagtgctaggattccaggcgtgagccatcgtgcccagctagacgtc

SEQ ID NO: 482895 - DNA, 69 bp, Artificial Sequence
  ENSG00000161888_8 (sequence is synthesized)
tttttttttttttttttactggatttctttttctcctgattttcggcctcagctcctagagtggcctca

SEQ ID NO: 482896 - DNA, 120 bp, Artificial Sequence
  ENSG00000161888_9 (sequence is synthesized)
tttctcctgattttcggcctcagctcctagagtggcctcagctaggtaaccaacgggagtcgacttatctatgccaggcctgcagtttcacatctgtgacgggatgggacaaatgacacc

SEQ ID NO: 482897 - DNA, 120 bp, Artificial Sequence
  ENSG00000161888_10 (sequence is synthesized)
gtggtattcgatgacagctcccaggtacttcaaggttggcccttactcattcagggggtatgtttgagtgccacggtgtgcccagactctgctaggcaccagagagacaagatacgagtg

SEQ ID NO: 482898 - DNA, 120 bp, Artificial Sequence
  ENSG00000161888_11 (sequence is synthesized)
acatggttctcctcccactgctgacggaggaattaacacaaaagcagacaacactctagaactggagagaggtccagattgcgacaggagccacaccagagtgtgcaggcttcatggagg

SEQ ID NO: 482899 - DNA, 82 bp, Artificial Sequence
  ENSG00000161888_12 (sequence is synthesized)
gcgacaggagccacaccagagtgtgcaggcttcatggaggacagaagcgacttttgtgccgggacttaaaaagataaggagt

SEQ ID NO: 482900 - DNA, 120 bp, Artificial Sequence
  ENSG00000161888_13 (sequence is synthesized)
ggcaagaccccatctctacaaaaaaattaaaaaatttggcctggtgtggtggctcatgcctgtgatcctagcactttgggagttaaaatacaacacttcccagctgcccttatagttaag

SEQ ID NO: 482901 - DNA, 120 bp, Artificial Sequence
  ENSG00000161888_14 (sequence is synthesized)
cagctgcccttatagttaaggtctggccagtgaaatgtatgtggaaatgttacatgacacttctagaaggattcttaaaagacaaatacaccctttcttcccccttcctatttcctggaa

SEQ ID NO: 482902 - DNA, 120 bp, Artificial Sequence
  ENSG00000161888_15 (sequence is synthesized)
tgtgggtgtgatggctggagccctggcagccatactgccacgtgtacagacgagtgccgtcctttagggatgacaggagcctggttccctgatgatggcagagccagatatcagcacaaa

SEQ ID NO: 482903 - DNA, 120 bp, Artificial Sequence
  ENSG00000161888_16 (sequence is synthesized)
cttatttaaatgggagagagaaggggagaaccaatctcaacttctaccttgtgtaagctgctggttttgggggttttctatgacagataccaaaataaaccctaactgaacatgtactcc

SEQ ID NO: 482904 - DNA, 120 bp, Artificial Sequence
  ENSG00000161888_17 (sequence is synthesized)
agccagggatggtcaaaggcagtatcctttttggggagccattttaacccttgtgcactgtaggtagggacataaaatggtgcatagcaggaccctgtaaaaattagccgggtgtggtgg

SEQ ID NO: 482905 - DNA, 120 bp, Artificial Sequence
  ENSG00000161888_18 (sequence is synthesized)
ggactacaggtgtgcgccatcgcatccggctggattgtgtcacggtggagagaaactcaaaacttcctggagagaaatggaggtgtcatcctggtccccccgggcctgtttctcttatcc

SEQ ID NO: 482906 - DNA, 120 bp, Artificial Sequence
  ENSG00000161896_0 (sequence is synthesized)
agacctcccgcaccagggctctggtgaacagcaaatgctccacgctgggacgggccattgcctgatgcctgtacatggtgggcactgagagacaagattcctgggccctgccttccatac

SEQ ID NO: 482907 - DNA, 120 bp, Artificial Sequence
  ENSG00000161896_1 (sequence is synthesized)
actccccacgatctcggaggaagctctgaggaccccgctgagaacccacagacaggaggacaactgcgctatgacagcaataaaggccaagaaggagaaagttgaggaccgctgacagcc

SEQ ID NO: 482908 - DNA, 120 bp, Artificial Sequence
  ENSG00000161896_2 (sequence is synthesized)
ccgtgtgctgttgggagctgccctttctacttcaaaccttcctctagcagactgtgcagggaccccccaccaccaccatctgccgccatggttgtgcaaaacagcgcagacgccggggac

SEQ ID NO: 482909 - DNA, 120 bp, Artificial Sequence
  ENSG00000161896_3 (sequence is synthesized)
atgagggcaggcgtgcagctggagcccttcctgcaccaggtcggggggcacatgagcgtgatgaagtatgacgagcatacggtgtgcaagcccctcgtctcccgggagcagaggttctat

SEQ ID NO: 482910 - DNA, 120 bp, Artificial Sequence
  ENSG00000161896_4 (sequence is synthesized)
gaatccctgccgctggccatgaagcggttcaccccacagtacaaaggtaccgtcacagtgcacctctggaaagacagcacaggccatctcagcttggttgccaacccagtgaaggagagc

SEQ ID NO: 482911 - DNA, 120 bp, Artificial Sequence
  ENSG00000161896_5 (sequence is synthesized)
caggagcccttcaaggtctccacagagtcggcggcggtggccatatggcagacgctccagcagaccaccggcagcaatggcagcgactgcacccttgcccagtggccgcatgcccagctg

SEQ ID NO: 482912 - DNA, 120 bp, Artificial Sequence
  ENSG00000161896_6 (sequence is synthesized)
gcacgctcacccaaggagagcccggccaaggctcttctgaggtccgagccccacctcaacactccagccttctcgctggtggaagacaccaacggaaaccaggttgagaggaagagcttc

SEQ ID NO: 482913 - DNA, 120 bp, Artificial Sequence
  ENSG00000161896_7 (sequence is synthesized)
aacccgtggggcctgcaatgccaccaggcccacctgacccgcctgtgctccgagtacccagagaacaagcggcatcggttcttgttgctggaaaatgtagtgtcacagtacacgcatccc

SEQ ID NO: 482914 - DNA, 120 bp, Artificial Sequence
  ENSG00000161896_8 (sequence is synthesized)
tgtgtcctggatctgaagatggggacccggcagcacggcgatgatgcatcggaggagaagaaggcccgccacatgaggaagtgtgcgcagagcacctcagcctgcctgggtgtgcgcatc

SEQ ID NO: 482915 - DNA, 120 bp, Artificial Sequence
  ENSG00000161896_9 (sequence is synthesized)
tgcggcatgcaggtttatcaaacagataagaagtactttctctgcaaagacaagtactatggaagaaaactctcagtggaggggttcagacaagccctctatcagttcctacataatgga

SEQ ID NO: 482916 - DNA, 120 bp, Artificial Sequence
  ENSG00000161896_10 (sequence is synthesized)
ctctctccttgtcatctatgatgggcaggaaccaccagaaagagccccaggcagcccgcatcctcacgaggctccccaggcagcccacggtagctctcccggtggtctcaccaaggttga

SEQ ID NO: 482917 - DNA, 120 bp, Artificial Sequence
  ENSG00000161896_11 (sequence is synthesized)
catccgcatgattgactttgctcataccacatacaagggctactggaatgagcacaccacctacgatggaccagaccctggctatatttttggcctggaaaacctcatcaggatcctgca

SEQ ID NO: 482918 - DNA, 120 bp, Artificial Sequence
  ENSG00000161896_12 (sequence is synthesized)
ggatatccaagagggagaatgaaacttcctgggcttatctggattcttctgggctatagatctcaaatagagacctgttggttgctagggtagtccagacaccccttagatgtcttcata

SEQ ID NO: 482919 - DNA, 120 bp, Artificial Sequence
  ENSG00000161896_13 (sequence is synthesized)
atagtcctatctaccttcaaaaaccatctctatatatggcagactatattaacagctgctgaacaaatcagctctggaggtgattccacatcccctggcattatgctctaatgctgctca

SEQ ID NO: 482920 - DNA, 120 bp, Artificial Sequence
  ENSG00000161896_14 (sequence is synthesized)
tcggagaacagacagccaggataaagtggcaccttctggagtacactggagggggcagcccaagttagaggccagcattgctgacattctggaatatttgcatctaaaaatgtttactcg

SEQ ID NO: 482921 - DNA, 120 bp, Artificial Sequence
  ENSG00000161896_15 (sequence is synthesized)
ttgccatgctgcagtccgcacaagctgtgaggcagaaaacttgacttgaagcagccttgaagagtgagttcatgagctcatggtttttctccttgtatggactgctcgctccaagggcag

SEQ ID NO: 482922 - DNA, 120 bp, Artificial Sequence
  ENSG00000161896_16 (sequence is synthesized)
gcagagctcatgaatgcctcttatcttcctaagcggagttttaggtgacacaggatgaagcagaagagatctacccatctcatctgctctgcacccagcttctaagtggacaaagccaag

SEQ ID NO: 482923 - DNA, 120 bp, Artificial Sequence
  ENSG00000161896_17 (sequence is synthesized)
cccaggcatgagctctggcaaagcaagaccccagattctccatttttgcctgtggaaaggagggtccctttacaggcttttttttcctttttttcccccaaaatctcttaaaatgaggaa

SEQ ID NO: 482924 - DNA, 120 bp, Artificial Sequence
  ENSG00000161896_18 (sequence is synthesized)
tctcttagcagactttggagttccccattctgccacattctgaccatgagacgcggcttgcagtgggggtgaacgcacataaaaagggaccactgacgtcctgctctactctctgctttc

SEQ ID NO: 482925 - DNA, 120 bp, Artificial Sequence
  ENSG00000161896_19 (sequence is synthesized)
tatttatttattttgggggtgggttggggagtcagaagaacctggaggacggaggaaaccaggggcaatgtttacaagactggtggacaagtgtaaatatggaataagaacaaacagttc

SEQ ID NO: 482926 - DNA, 120 bp, Artificial Sequence
  ENSG00000161896_20 (sequence is synthesized)
taattaattccttcttctgcagtatggaaacctattacgatgcccttgagtcaagcactgagatacgttacccaattagggaaataaatttgttaataaaattgctgaggtcaccagtga

SEQ ID NO: 482927 - DNA, 120 bp, Artificial Sequence
  ENSG00000161896_21 (sequence is synthesized)
actccccacgatctcggaggaagctctggctggctacctggtagacaatcgctgccaatccgtccaagtccaggggcaagggagtttccactgctgtgccacaggctgcactgaaggccc

SEQ ID NO: 482928 - DNA, 120 bp, Artificial Sequence
  ENSG00000161896_22 (sequence is synthesized)
ttgcctgatgcctgtacatggtgggcactgagagacaagattcctgggccctgccttccatacactccccacgatctcggaggaagctctggctggccaggagtctgccccacggaggtg

SEQ ID NO: 482929 - DNA, 120 bp, Artificial Sequence
  ENSG00000161904_0 (sequence is synthesized)
gcggcgtcctggccatggccggcctgtcggacctggaactgcggcgggagctgcaggccctgggcttccagccaggacccatcaccgacaccacccgggatgtctaccgcaacaagctgc

SEQ ID NO: 482930 - DNA, 120 bp, Artificial Sequence
  ENSG00000161904_1 (sequence is synthesized)
caagctgcgccgcctgcggggcgaggcccggctgcgcgacgaggagcggctgcgggaggaggcccggccgcggggcgaggagcggttacgggaagaggcccggttacgcgaggatgcgcc

SEQ ID NO: 482931 - DNA, 120 bp, Artificial Sequence
  ENSG00000161904_2 (sequence is synthesized)
cccggcccgccgcggcctctccgcgggcggagccctggctctcccagccggcctcgggctcggcctacgcgacccctggggcctacggtgatatccggccctccgcggcttcctgggtag

SEQ ID NO: 482932 - DNA, 120 bp, Artificial Sequence
  ENSG00000161904_3 (sequence is synthesized)
gtagggagccgcggcctcgcctatcctgcccgcccggcgcaactcaggcgccgcgcctcggtccggggcagctccgaggaggacgaggacgcccggacgcccgacagggccacgcagggc

SEQ ID NO: 482933 - DNA, 80 bp, Artificial Sequence
  ENSG00000161904_4 (sequence is synthesized)
gtctcgcggcccgccgctggtgggcagcgtctcccgccccggcgcggctgccttcctccctcctcggtcccgacccgcgc

SEQ ID NO: 482934 - DNA, 120 bp, Artificial Sequence
  ENSG00000161904_5 (sequence is synthesized)
cgagggcccggcctgaggtggggcgccggctggagcgctggctctctcggcttctgctctgggccagcctagggctactgctcgtcttcctgggcatcctttgggtgaagatgggcaagc

SEQ ID NO: 482935 - DNA, 120 bp, Artificial Sequence
  ENSG00000161904_6 (sequence is synthesized)
cctcagcgccgcaggaggcggaggacaacatgaagttattgccagtggactgtgagagaaaaacagatgagttctgtcaggccaagcagaaggcagccttgctggagctgctgcatgaac

SEQ ID NO: 482936 - DNA, 120 bp, Artificial Sequence
  ENSG00000161904_7 (sequence is synthesized)
tctacaatttcctggccatccaagctggtaattttgagtgtggaaatccagagaatctaaaaagcaaatgcattcctgttatggaagcccaagaatatatagccaatgtgaccagcagct

SEQ ID NO: 482937 - DNA, 120 bp, Artificial Sequence
  ENSG00000161904_8 (sequence is synthesized)
cctccgccaagtttgaagccgcactgacctggatactgagcagtaacaaggacgtgggcatctggttgaaaggagaagaccagtctgaattggtgacgactgtggacaaggtggtctgcc

SEQ ID NO: 482938 - DNA, 120 bp, Artificial Sequence
  ENSG00000161904_9 (sequence is synthesized)
tggaatctgcccacccccgcatgggtgttggctgccgcctgagccgggccttgctcactgctgtcaccaacgtgctcatcttcttctggtgcttggcttttttgtgggggctcctaattc

SEQ ID NO: 482939 - DNA, 120 bp, Artificial Sequence
  ENSG00000161904_10 (sequence is synthesized)
tcctaaaatatcggtggcgaaagttagaagaggaggaacaagccatgtatgagatggtgaagaagattatagacgtggtccaggaccattacgtggactgggagcaggacatggagcgct

SEQ ID NO: 482940 - DNA, 120 bp, Artificial Sequence
  ENSG00000161904_11 (sequence is synthesized)
atccatatgtaggcatcctgcacgtgcgcgacagcttgatccctccacagagccggaggcgcatgaagcgtgtctgggaccgagctgtggagttcctggcctccaacgaatcccggatcc

SEQ ID NO: 482941 - DNA, 120 bp, Artificial Sequence
  ENSG00000161904_12 (sequence is synthesized)
ttccttctctgactcagagcgataagccccgggcggggacttgttcccggtcagcctgtcccaggacagcccactccagaggcacaggagggtcaccaggcctgcggtgctgaattcaca

SEQ ID NO: 482942 - DNA, 120 bp, Artificial Sequence
  ENSG00000161904_13 (sequence is synthesized)
cttgccttgactttcagtctcgtcctgacacgattccaaaggtctgccatactcttcagaggagttcggctcgcaggaaaatgtgggcttcctttaaagggagggggagaagccagggtg

SEQ ID NO: 482943 - DNA, 120 bp, Artificial Sequence
  ENSG00000161904_14 (sequence is synthesized)
atagcccagactctgccctgttgtgctggcagaaacggggagaagggttgagttttcatgaatagaaaacaagagcagcagctgtcaggcccagctgacaagcgtggggctggtgggctg

SEQ ID NO: 482944 - DNA, 120 bp, Artificial Sequence
  ENSG00000161904_15 (sequence is synthesized)
gggcatggccacgccagggagtctgtcacctgggaggtggggcagggatggtgtttcgggtggcgggatggggagcagcttggtccatgtgccttcagggggttgttacttgagagctcc

SEQ ID NO: 482945 - DNA, 120 bp, Artificial Sequence
  ENSG00000161904_16 (sequence is synthesized)
agggtgaagggagaaagcctgtgctctggctggctgggcctctatcctgaagagggaaggtgctagaaattagaacaagtgactgtaggggggaccgtctagaaacaccaggcccagaca

SEQ ID NO: 482946 - DNA, 120 bp, Artificial Sequence
  ENSG00000161904_17 (sequence is synthesized)
cacggtccctcaggtcaggaggagtgagcagccggcacagcctcctgggaggatcccgaagtagggactggggctgagagcagagaggagggtcgggcagccccagggcgggcgggcccg

SEQ ID NO: 482947 - DNA, 120 bp, Artificial Sequence
  ENSG00000161904_18 (sequence is synthesized)
cctcagtgttgcttctcacagaagctgcgactctagaccaggcctgcagccagaacgccgattccgggagcttgggagccctgcgtcagggcccagagcctcgcacttgctgtgtgcgaa

SEQ ID NO: 482948 - DNA, 120 bp, Artificial Sequence
  ENSG00000161904_19 (sequence is synthesized)
gatcgccttgctttactgtgaccacagccccgacgcggggctgtttaacaagaacttcagcgcagccggcgtttctgttaccccggccgcggctcttggcggcgggagaggcgcagtggc

SEQ ID NO: 482949 - DNA, 120 bp, Artificial Sequence
  ENSG00000161904_20 (sequence is synthesized)
tggctgcaggctgccccctgccggccacaagggagcagcgtccgcgccgccgcccaccggccctcccgccagctcctcagcctgctccctgggaggcaggctccagaagcaccccgacgg

SEQ ID NO: 482950 - DNA, 120 bp, Artificial Sequence
  ENSG00000161904_21 (sequence is synthesized)
ccttattaagtgcgagaagcctctccagcgagtcttccccgtgtgtcctcatctgcggcaggcaggagagggggagcaaacaggaaattccacagctgcctccagaaacattaaccaccc

SEQ ID NO: 482951 - DNA, 120 bp, Artificial Sequence
  ENSG00000161904_22 (sequence is synthesized)
ctctctagtcttactggtattttttgtttccttaataaagctccagtctccctcatttgagcaatactctcatttcctctgatgtctggatgatcggcagggcaggaatctgagcgctgg

SEQ ID NO: 482952 - DNA, 120 bp, Artificial Sequence
  ENSG00000161904_23 (sequence is synthesized)
ccccgtggtgaggccatgttctcataatcaggctccagccagaaaaataagaaacaccgcaacaggcttcagtatcagggctgaaactgctggatgaataaactatttattaaaaacgga

SEQ ID NO: 482953 - DNA, 120 bp, Artificial Sequence
  ENSG00000161904_24 (sequence is synthesized)
ttgatccctccacagagccggtgagtccctggctggggcgctgggtgtgaggtaagatggggtccgaccccactgagctccccagaaggaaacccagagccttgcatcagatgtcagctg

SEQ ID NO: 482954 - DNA, 120 bp, Artificial Sequence
  ENSG00000161904_25 (sequence is synthesized)
agggcagtgcagaccccagggccaagagtggctctgctcccactcctgctgctccccagcatgctcggctctttatggcaggatgagctagaaaagacatatgaaagcacaatcccacac

SEQ ID NO: 482955 - DNA, 120 bp, Artificial Sequence
  ENSG00000161904_26 (sequence is synthesized)
ctctgtagagagaacactggcagtggtgataccagttaggaggccttgggctccaagtaatagcagctccctcccccagggcacaagtagtgaaggatctcctcagtctctgtaagtgga

SEQ ID NO: 482956 - DNA, 120 bp, Artificial Sequence
  ENSG00000161904_27 (sequence is synthesized)
gagttaagcagggaaggcccatttgatcccgttttacagacgaggagacagaggttcagagtggttgagttgcccaagaaacttgagctaatcattttcagctgggacaaggacccagct

SEQ ID NO: 482957 - DNA, 120 bp, Artificial Sequence
  ENSG00000161904_28 (sequence is synthesized)
atcgtaattcctaatccaggatttggatacccttacattttgctgtctgcattttaaaagtgccttccttagatgacatctttctaatccccacccttggcttgtgaagttattgccagt

SEQ ID NO: 482958 - DNA, 120 bp, Artificial Sequence
  ENSG00000161904_29 (sequence is synthesized)
attatagacgtggtccaggaccattacgtggactgggagcaggacatggagcgctatccatatgtaggcatcctgcacgtgcgcgacagcttgatccctccacagagccggcgcatgaag

SEQ ID NO: 482959 - DNA, 120 bp, Artificial Sequence
  ENSG00000161904_30 (sequence is synthesized)
acaactggattgggaaagggagaggaggaaccgaatcgagaggccatctacgtggtccaggcaggcctggcaagggcaggaagagtcctagtgggaaaaggaggatgctagaagccacct

SEQ ID NO: 482960 - DNA, 120 bp, Artificial Sequence
  ENSG00000161904_31 (sequence is synthesized)
gtgtctcaggggacccctggggtcaagatcaactttgaagtaggaggatctggctgtgttaggggaaggcgacaggcttcagttcagtttcaaagttttaaaatatgaccttcagctgct

SEQ ID NO: 482961 - DNA, 120 bp, Artificial Sequence
  ENSG00000161904_32 (sequence is synthesized)
cccttccccagcatgcagaaacacactcactggccacccgaagtcccccaggctgtgctgggtcagggcagtcaggccacgcacacgtgttaaatagtgtatgcgtgcgtggccctgcac

SEQ ID NO: 482962 - DNA, 120 bp, Artificial Sequence
  ENSG00000161904_33 (sequence is synthesized)
cctccctgctctcggggagtcaggcaaaccacagcacaggagcgaggaccaagggctatggcaggtcaccaaatctggggccatttcatcaaacaaaaggcccccaggggctgagggctt

SEQ ID NO: 482963 - DNA, 120 bp, Artificial Sequence
  ENSG00000161904_34 (sequence is synthesized)
cccaggggagatggcccctgggctggaccggggaggttgggcaggactaagtgggaggctgccagctccatcctatgggagcaggcctccaaagccactcgggggagctgccccttggcg

SEQ ID NO: 482964 - DNA, 120 bp, Artificial Sequence
  ENSG00000161904_35 (sequence is synthesized)
tgctgtgctgaggccccactgcccagcacacagacatcctcttcctccaaggggcccctcaagacaatagacctggcattccaggtcgcctgcctgtgtcatgagtcagaatccccgtgg

SEQ ID NO: 482965 - DNA, 120 bp, Artificial Sequence
  ENSG00000161904_36 (sequence is synthesized)
tgcccatggcctccctgcctttcttttttctcaggctgtgtttatttatagtgccattccggtaccttccgaagctatctgtctgattcttttagggatcaattgcaaagagaccttgct

SEQ ID NO: 482966 - DNA, 120 bp, Artificial Sequence
  ENSG00000161904_37 (sequence is synthesized)
attgggcagctttttagtcatttaatgcaaaatgccacactgctttgcaggtcaggttttaatgatctggaatcgatccaagctaagtggcttttgatcttgctgcagagtgaagatgcc

SEQ ID NO: 482967 - DNA, 120 bp, Artificial Sequence
  ENSG00000161904_38 (sequence is synthesized)
ccacagaagccaggagccgctgggcaacatgctccttattagagctgatggcttgattcttgctgcattttttagtctgtttcagagtgatttttcctttgtgtttgagcatgtgtggtt

SEQ ID NO: 482968 - DNA, 120 bp, Artificial Sequence
  ENSG00000161904_39 (sequence is synthesized)
gaagccgcactgacctggatactgagcagtaacaaggacgtgggcatctggtgagtgtgggcagggtggcgacgcagcatgggtgcctgcaaccactgtcctcgctcgtcagctaacacc

SEQ ID NO: 482969 - DNA, 120 bp, Artificial Sequence
  ENSG00000161904_40 (sequence is synthesized)
cgtgctccaacagagctgtctcaggtctgaagctggaggctgggtctcccagcagaatcatgtgggttaggatggaagtggggcaacaaaagcaagaagcatttggaatgcagtgtaagg

SEQ ID NO: 482970 - DNA, 120 bp, Artificial Sequence
  ENSG00000161904_41 (sequence is synthesized)
agcagcttcaagatgagacacaaaatccaggtgttaggatgttagcctggtgttccagctaaatcctgtctcaggtaactcagtctgtgcctttctcattcatcaacaacaccacatggt

SEQ ID NO: 482971 - DNA, 120 bp, Artificial Sequence
  ENSG00000161904_42 (sequence is synthesized)
ttgttggggaaggcatttttctgcacttcccctcctcgggagctagtttttatttgtagatgaaattattctttctgtatgttggttttacttactatggaaatcgcataaggaaatact

SEQ ID NO: 482972 - DNA, 120 bp, Artificial Sequence
  ENSG00000161904_43 (sequence is synthesized)
ggattttattctgaccaggcagtttctgcctcatttttatcactggtgagcactgttagaaaaggtagcaaaccctttcatgaggctgaaaggctgtatctggcggctcagcccaggggg

SEQ ID NO: 482973 - DNA, 120 bp, Artificial Sequence
  ENSG00000161904_44 (sequence is synthesized)
aggggcgtgtcagccaacagccaggcagccttgagagacctgtcccctgctggcagagcagcatcacttccccacttcccactctcggtgtttgtgggggtctctgttcaggttatagct

SEQ ID NO: 482974 - DNA, 120 bp, Artificial Sequence
  ENSG00000161904_45 (sequence is synthesized)
cttgatattaaaacgtctctagagttttgttcttttcctctctaatccacccaaattactaattccatcagcactgcatccagcagaagcccctcgggcagctccacctcaagctggata

SEQ ID NO: 482975 - DNA, 120 bp, Artificial Sequence
  ENSG00000161904_46 (sequence is synthesized)
actggatgcatggcacgattaaaatttgttggcttaaaaaaaaaaaaaagctgccctgagtagctgagcaattttcctgtgttagaaaaggcggaggagaatacggattttatcctcagc

SEQ ID NO: 482976 - DNA, 120 bp, Artificial Sequence
  ENSG00000161904_47 (sequence is synthesized)
agcagcgctcactgaagctgctaacacagaagaatgatgacactcaccttttcatgttggggaaggcagcctggagggtggcagagccgctcaggatgaccatattgaaagtgggtcctg

SEQ ID NO: 482977 - DNA, 120 bp, Artificial Sequence
  ENSG00000161904_48 (sequence is synthesized)
agaaatcaggacacttgggatgccagccattccagcatgcagcctcaagagcatgatattctcgccctgggtcacctagctggaagaaggctctggtgtccccacctctgcaggtcctga

SEQ ID NO: 482978 - DNA, 120 bp, Artificial Sequence
  ENSG00000161904_49 (sequence is synthesized)
cattccccatgagcctcacggattccccatgagcctcatggatgccccatgatctttacacttaaacagcttatgtgcctccttgtcaccgaggaaaagtgcaacctcccagattctgtc

SEQ ID NO: 482979 - DNA, 120 bp, Artificial Sequence
  ENSG00000161904_50 (sequence is synthesized)
tttcagttcttgccatgcaattgcaaagctagtgattcagtaaacatttccatttctctatgctgggaggtgggaatccaatttacagtttaatctcctgcatgctgagagaggctgtca

SEQ ID NO: 482980 - DNA, 120 bp, Artificial Sequence
  ENSG00000161904_51 (sequence is synthesized)
aagacctgacagggggacgttgctttagcggtaggggttcaagcctgctgccgtctttaaagctttattcattctaagtagccaatgtgggaaatttctggaaagaatgcagccaggata

SEQ ID NO: 482981 - DNA, 120 bp, Artificial Sequence
  ENSG00000161904_52 (sequence is synthesized)
ccaagcctattctataagcaagtagaggccttgcgtccccactttccttcgcttcctcctgtttgaagtggggcttgcactgcctctccttggagctttccaacatgttcagagccctgt

SEQ ID NO: 482982 - DNA, 120 bp, Artificial Sequence
  ENSG00000161904_53 (sequence is synthesized)
tgcttctccagggtctttctcaggcagttaacccaatatttatcaactctctccctaggcccagcacttggcagaatttttttctattttgtaaaagtatgagatattccttgctgttta

SEQ ID NO: 482983 - DNA, 120 bp, Artificial Sequence
  ENSG00000161904_54 (sequence is synthesized)
gtatttgacagtgtggctggagaagtaaagatggacagacggacccctcccacccacccctccttgctgaccacttgtcccgtgcctttccagttctgtcaggccaagcagaaggcagcc

SEQ ID NO: 482984 - DNA, 120 bp, Artificial Sequence
  ENSG00000161904_55 (sequence is synthesized)
agaacagggttttggggctgtggaggacacgggagagggcttccttaatccagcagcagaataatgttccagctgctccgcccagacgccgaactaaccttctcccgcgccctcccacag

SEQ ID NO: 482985 - DNA, 120 bp, Artificial Sequence
  ENSG00000161904_56 (sequence is synthesized)
ttggcttggtaatgctttactccctccaaatgttgtgagtagtctctttttgtattcctttctcaacccacacttaatttcctctgtgtttcttttcttggtctcagtgaagttattgcc

SEQ ID NO: 482986 - DNA, 120 bp, Artificial Sequence
  ENSG00000161905_0 (sequence is synthesized)
catctttgagcaagatgggtctctaccgcatccgcgtgtccactggggcctcgctctatgccggttccaacaaccaggtgcagctgtggctggtcggccagcacggggaggcggcgctcg

SEQ ID NO: 482987 - DNA, 120 bp, Artificial Sequence
  ENSG00000161905_1 (sequence is synthesized)
ggaagcgactgtggcccgcacggggcaaggagacagaactcaaggtggaagtaccggagtatctggggccgctgctgtttgtgaaactgcgcaaacggcacctccttaaggacgacgcct

SEQ ID NO: 482988 - DNA, 120 bp, Artificial Sequence
  ENSG00000161905_2 (sequence is synthesized)
ggttctgcaactggatctctgtgcagggccccggagccggggacgaggtcaggttcccttgttaccgctgggtggagggcaacggcgtcctgagcctgcctgaaggcaccggccgcactg

SEQ ID NO: 482989 - DNA, 120 bp, Artificial Sequence
  ENSG00000161905_3 (sequence is synthesized)
tgggcgaggaccctcagggcctgttccagaaacaccgggaagaagagctggaagagagaaggaagttgtaccggtggggaaactggaaggacgggttaattctgaatatggctggggcca

SEQ ID NO: 482990 - DNA, 120 bp, Artificial Sequence
  ENSG00000161905_4 (sequence is synthesized)
aactatatgacctccctgtggatgagcgatttctggaagacaagagagttgactttgaggtttcgctggccaaggggctggccgacctcgctatcaaagactctctaaatgttctgactt

SEQ ID NO: 482991 - DNA, 120 bp, Artificial Sequence
  ENSG00000161905_5 (sequence is synthesized)
gctggaaggatctagatgacttcaaccggattttctggtgtggtcagagcaagctggctgagcgcgtgcgggactcctggaaggaagatgccttatttgggtaccagtttcttaatggcg

SEQ ID NO: 482992 - DNA, 120 bp, Artificial Sequence
  ENSG00000161905_6 (sequence is synthesized)
ccaaccccgtggtgctgaggcgctctgctcaccttcctgctcgcctagtgttccctccaggcatggaggaactgcaggcccagctggagaaggagctggagggaggcacactgttcgaag

SEQ ID NO: 482993 - DNA, 120 bp, Artificial Sequence
  ENSG00000161905_7 (sequence is synthesized)
ctgacttctccctgctggatgggatcaaggccaacgtcattctctgtagccagcagcacctggctgcccctctagtcatgctgaaattgcagcctgatgggaaactcttgcccatggtca

SEQ ID NO: 482994 - DNA, 120 bp, Artificial Sequence
  ENSG00000161905_8 (sequence is synthesized)
tccagctccagctgccccgcacaggatccccaccacctccccttttcttgcctacggatcccccaatggcctggcttctggccaaatgctgggtgcgcagctctgacttccagctccatg

SEQ ID NO: 482995 - DNA, 120 bp, Artificial Sequence
  ENSG00000161905_9 (sequence is synthesized)
agctgcagtctcatcttctgaggggacacttgatggctgaggtcattgttgtggccaccatgaggtgcctgccgtcgatacatcctatcttcaagcttataattccccacctgcgataca

SEQ ID NO: 482996 - DNA, 120 bp, Artificial Sequence
  ENSG00000161905_10 (sequence is synthesized)
ccctggaaattaacgtccgggccaggactgggctggtctctgacatgggaattttcgaccagataatgagcactggtgggggaggccacgtgcagctgctcaagcaagctggagccttcc

SEQ ID NO: 482997 - DNA, 120 bp, Artificial Sequence
  ENSG00000161905_11 (sequence is synthesized)
cgaccgggggctcctgggagtgaagtcttccttctatgcccaagatgcgctgcggctctgggaaatcatctatcggtatgtggaaggaatcgtgagtctccactataagacagacgtggc

SEQ ID NO: 482998 - DNA, 120 bp, Artificial Sequence
  ENSG00000161905_12 (sequence is synthesized)
tgtgaaagacgacccagagctgcagacctggtgtcgagagatcactgaaatcgggctgcaaggggcccaggaccgagggtttcctgtctctttacaggctcgggaccaggtttgccactt

SEQ ID NO: 482999 - DNA, 120 bp, Artificial Sequence
  ENSG00000161905_13 (sequence is synthesized)
tgtcaccatgtgtatcttcacctgcaccggccaacacgcctctgtgcacctgggccagctggactggtactcttgggtgcctaatgcaccctgcacgatgcggctgcccccgccaaccac

SEQ ID NO: 483000 - DNA, 120 bp, Artificial Sequence
  ENSG00000161905_14 (sequence is synthesized)
caaggatgcaacgctggagacagtgatggcgacactgcccaacttccaccaggcttctctccagatgtccatcacttggcagctgggcagacgccagcccgttatggtggctgtgggcca

SEQ ID NO: 483001 - DNA, 120 bp, Artificial Sequence
  ENSG00000161905_15 (sequence is synthesized)
gcatgaggaggagtatttttcgggccctgagcctaaggctgtgctgaagaagttcagggaggagctggctgccctggataaggaaattgagatccggaatgcaaagctggacatgcccta

SEQ ID NO: 483002 - DNA, 120 bp, Artificial Sequence
  ENSG00000161905_16 (sequence is synthesized)
cgagtacctgcggcccagcgtggtggaaaacagtgtggccatctaagcgtcgccaccctttggttatttcagcccccatcacccaagccacaagctgaccccttcgtggttatagccctg

SEQ ID NO: 483003 - DNA, 120 bp, Artificial Sequence
  ENSG00000161905_17 (sequence is synthesized)
ccctcccaagtcccaccctcttcccatgtcccaccctccctagaggggcaccttttcatggtctctgcacccagtgaacacattttactctagaggcatcacctgggaccttactcctct

SEQ ID NO: 483004 - DNA, 120 bp, Artificial Sequence
  ENSG00000161905_18 (sequence is synthesized)
ttccttccttcctcctttcctatcttccttcctctctctcttcctctttcttcattcagatctatatggcaaatagccacaattatataaatcatttcaagactagaatagggggatata

SEQ ID NO: 483005 - DNA, 120 bp, Artificial Sequence
  ENSG00000161905_19 (sequence is synthesized)
gactagaatagggggatataatacatattactccacaccttttatgaatcaaatatgatttttttgttgttgttaagacagagtctcactttgacacccaggctggagtgcagtggtgcc

SEQ ID NO: 483006 - DNA, 88 bp, Artificial Sequence
  ENSG00000161905_20 (sequence is synthesized)
tcatgcccagctaatatttttttattttcgtggagacggggcctcactatgttgcctaggctggaaataggattttgaacccaaattg

SEQ ID NO: 483007 - DNA, 120 bp, Artificial Sequence
  ENSG00000161905_21 (sequence is synthesized)
atgttgcctaggctggaaataggattttgaacccaaattgagtttaacaataataaaaagttgttttacgctaaagatggaaaagaactaggactgaactattttaaataaaatattggc

SEQ ID NO: 483008 - DNA, 120 bp, Artificial Sequence
  ENSG00000161905_22 (sequence is synthesized)
gtgaccacagggaggagaaagtgaaggcaggagcgcaccttcccacctgccgtccccgtcccctcagaaccgagtcctggggccacctgctcggcgcggtccctctctctctggctcagt

SEQ ID NO: 483009 - DNA, 120 bp, Artificial Sequence
  ENSG00000161905_23 (sequence is synthesized)
ccccgcaccccgatacgtctcctcctctcagaggctccgaggaagggcgtgggcgctggagggagcagggctcagccgggtgcccctcccgccaggccccaccggggctgagcctcttct

SEQ ID NO: 483010 - DNA, 120 bp, Artificial Sequence
  ENSG00000161905_24 (sequence is synthesized)
actccctgctctcgccaggacaccgccttttggactggggctgaattctgccccttgaagctctgctccttggagctgggggccccagcggtaggcggagttgattggagacctgccacc

SEQ ID NO: 483011 - DNA, 120 bp, Artificial Sequence
  ENSG00000161905_25 (sequence is synthesized)
gccctcctcccctgaccccacgtgagctgctgatgcttccagcacccatacttgatttccttcctgccccacaggtggggaaactggaaggacgggttaattctgaatatggctggggcc

SEQ ID NO: 483012 - DNA, 120 bp, Artificial Sequence
  ENSG00000161911_0 (sequence is synthesized)
cagtgcccaggcaagcccaggagttgacatttctctgcccagccatgggcctcaccctgctcttgctgctgctcctgggactagaaggtcagggcatagttggcagcctccctgaggtgc

SEQ ID NO: 483013 - DNA, 120 bp, Artificial Sequence
  ENSG00000161911_1 (sequence is synthesized)
tgcaggcacccgtgggaagctccattctggtgcagtgccactacaggctccaggatgtcaaagctcagaaggtgtggtgccggttcttgccggaggggtgccagcccctggtgtcctcag

SEQ ID NO: 483014 - DNA, 120 bp, Artificial Sequence
  ENSG00000161911_2 (sequence is synthesized)
ctgtggatcgcagagctccagcgggcaggcgtacgtttctcacagacctgggtgggggcctgctgcaggtggaaatggttaccctgcaggaagaggatgctggcgagtatggctgcatgg

SEQ ID NO: 483015 - DNA, 120 bp, Artificial Sequence
  ENSG00000161911_3 (sequence is synthesized)
tggatggggccagggggccccagattttgcacagagtctctctgaacatactgcccccagaggaagaagaagagacccataagattggcagtctggctgagaacgcattctcagaccctg

SEQ ID NO: 483016 - DNA, 120 bp, Artificial Sequence
  ENSG00000161911_4 (sequence is synthesized)
aacccagccaggatgagaagagcatccccttgatctggggtgctgtgctcctggtaggtctgctggtggcagcggtggtgctgtttgctgtgatggccaagaggaaacaagggaacaggc

SEQ ID NO: 483017 - DNA, 120 bp, Artificial Sequence
  ENSG00000161911_5 (sequence is synthesized)
ttggtgtctgtggccgattcctgagcagcagagtttcaggcatgaatccctcctcagtggtccaccacgtcagtgactctggaccggctgctgaattgcctttggatgtaccacacatta

SEQ ID NO: 483018 - DNA, 120 bp, Artificial Sequence
  ENSG00000161911_6 (sequence is synthesized)
ggcttgactcaccaccttcatttgacaataccacctacaccagcctacctcttgattccccatcaggaaaaccttcactcccagctccatcctcattgccccctctacctcctaaggtcc

SEQ ID NO: 483019 - DNA, 120 bp, Artificial Sequence
  ENSG00000161911_7 (sequence is synthesized)
tggtctgctccaagcctgtgacatatgccacagtaatcttcccgggagggaacaagggtggagggacctcgtgtgggccagcccagaatccacctaacaatcagactccatccagctaag

SEQ ID NO: 483020 - DNA, 120 bp, Artificial Sequence
  ENSG00000161911_8 (sequence is synthesized)
catgaggaccatccctaggggttctgtgcatccatccagccagctcatgccctaggatccttaggatatctgagcaaccagggactttaagatctaatccaatgtcctaactttactagg

SEQ ID NO: 483021 - DNA, 120 bp, Artificial Sequence
  ENSG00000161911_9 (sequence is synthesized)
gaaagtgacgctcagacatgactgagatgtcttggggaagacctccctgcacccaactcccccactggttcttctaccattacacactgggctaaataaaccctaataatgatgtgcaaa

SEQ ID NO: 483022 - DNA, 120 bp, Artificial Sequence
  ENSG00000161911_10 (sequence is synthesized)
gtgggtgtagtcacaaccaggtaaagacataaagagccagtgccatttcctgatctgtggagtgacaggcccctaaagaacatcccagcctcccctttctgtgtttcttcctggggtcct

SEQ ID NO: 483023 - DNA, 120 bp, Artificial Sequence
  ENSG00000161911_11 (sequence is synthesized)
ctccttccttggctccactcctccagtccctcagacctcaacaggatattgaagcctgcccatatgggcatgcactcattaaatgtttccttctgactccattcctggcctgacagagga

SEQ ID NO: 483024 - DNA, 120 bp, Artificial Sequence
  ENSG00000161911_12 (sequence is synthesized)
cagtgcccaggcaagcccaggagttgacatttctctgcccagccatgggcctcaccctgctcttgctgctgctcctgggactagaagaggaagaagaagagacccataagattggcagtc

SEQ ID NO: 483025 - DNA, 120 bp, Artificial Sequence
  ENSG00000161914_0 (sequence is synthesized)
acttccggtctggctcctaacaacgggggaggctggtaaccagggtgggggggatggcggagcgggcgctagagcccgaggcggaggcggaggctgaggcgggcgcgggcggggaggcag

SEQ ID NO: 483026 - DNA, 120 bp, Artificial Sequence
  ENSG00000161914_1 (sequence is synthesized)
cagccgaggagggcgcagcgggccgaaaggcgcggggccggccgcgactcacggagtcggaccgggcccggcgacggctcgagtcccggaagaagtacgacgtgcggcgcgtgtacctgg

SEQ ID NO: 483027 - DNA, 120 bp, Artificial Sequence
  ENSG00000161914_2 (sequence is synthesized)
gcgaggcgcacgggccctgggtggacctgcggcgccgcagcggctggagcgacgccaagctcgccgcctacctcatctctctggagcgcggccagcggagcggccgccacgggaagcctt

SEQ ID NO: 483028 - DNA, 120 bp, Artificial Sequence
  ENSG00000161914_3 (sequence is synthesized)
gggagcaggtccccaaaaagccaaagcggaagaaaaggcggcgacgcaacgtgaactgcctgaagaacgtggtgatctggtacgaggaccacaagcaccgctgcccgtacgagccgcacc

SEQ ID NO: 483029 - DNA, 120 bp, Artificial Sequence
  ENSG00000161914_4 (sequence is synthesized)
tggcggagctagaccccacttttggcctgtacaccacggccgtgtggcagtgcgaagctggccaccgctacttccaggacctgcattcgcccctgaagcccctcagcgactcagaccctg

SEQ ID NO: 483030 - DNA, 120 bp, Artificial Sequence
  ENSG00000161914_5 (sequence is synthesized)
acagtgacaaagtgggcaatgggctggtggctggcagctctgactcatccagctctggctctgcctctgactctgaggagtctcctgagggccagccggtcaaggctgcggcagcggcag

SEQ ID NO: 483031 - DNA, 120 bp, Artificial Sequence
  ENSG00000161914_6 (sequence is synthesized)
cggcagcgacgcccaccagcccggtgggcagcagcgggctcatcactcaggagggcgtgcacattccctttgacgtccaccacgtggaaagcctggccgagcagggtaccccgctgtgct

SEQ ID NO: 483032 - DNA, 120 bp, Artificial Sequence
  ENSG00000161914_7 (sequence is synthesized)
ccaacccagcaggcaatgggcctgaagccctggagacagtggtgtgcgtgccggtgcctgtgcaagtgggtgcgggccccagcgccctctttgagaacgtgccccaggaggccctgggtg

SEQ ID NO: 483033 - DNA, 120 bp, Artificial Sequence
  ENSG00000161914_8 (sequence is synthesized)
caggcagcggtgtccccggcagtggactgggcgaggaggtgccctgtgccatgatggagggtgtggcagcctacacccagacagagcccgagggtagccagcctagcaccatggacgcca

SEQ ID NO: 483034 - DNA, 120 bp, Artificial Sequence
  ENSG00000161914_9 (sequence is synthesized)
ccgcagtagcaggcatcgagaccaagaaagagaaggaggacctgtgcttgctaaagaaggaggagaaggaggagccagtagccccggagctggcaacaacggtgcctgagagcgcagagc

SEQ ID NO: 483035 - DNA, 120 bp, Artificial Sequence
  ENSG00000161914_10 (sequence is synthesized)
ctgaggcagaggcggacggggaggagctggacggcagcgacatgtcagccatcatctatgaaatccccaaggagcctgagaagaggcggcggagcaagcggtcgcgggtgatggatgctg

SEQ ID NO: 483036 - DNA, 120 bp, Artificial Sequence
  ENSG00000161914_11 (sequence is synthesized)
acggcctgctcgagatgttccactgcccatacgagggctgcagccaagtctacgtggccctcagcagcttccagaaccacgtcaatcttgtgcatcggaaaggaaagaccaaagtgtgcc

SEQ ID NO: 483037 - DNA, 120 bp, Artificial Sequence
  ENSG00000161914_12 (sequence is synthesized)
ctcatcctggctgtggcaagaagttctatttatccaaccacctgcggcggcacatgatcatccattcaggtgtccgtgaattcacctgcgagacctgcggcaagtccttcaagaggaaga

SEQ ID NO: 483038 - DNA, 120 bp, Artificial Sequence
  ENSG00000161914_13 (sequence is synthesized)
accacctggaggtacatcggcgcacccacaccggcgagacccccctgcagtgcgagatctgtggctaccagtgccggcagcgcgcgtcgctcaactggcacatgaagaagcacactgcgg

SEQ ID NO: 483039 - DNA, 120 bp, Artificial Sequence
  ENSG00000161914_14 (sequence is synthesized)
aggtgcagtacaacttcacgtgcgatcgctgcgggaagcgcttcgagaagctggacagcgtcaagttccacacgctcaaaagccacccggatcacaagcccacctgacccacctgaccac

SEQ ID NO: 483040 - DNA, 120 bp, Artificial Sequence
  ENSG00000161914_15 (sequence is synthesized)
tgaccgcccctatttattcgtccgctcggacaccacgcccgggcttgccggggcctggacagctgcgagggccgcccggaccgcgggccggaaggaggcgcccccgccccgccccagagc

SEQ ID NO: 483041 - DNA, 120 bp, Artificial Sequence
  ENSG00000161914_16 (sequence is synthesized)
tgggccccctgggcaggttccccaccccgccccaccgcatccttctcggagctggtgcctggggctgcattgctggaactgtgtcaagagagcagagtgagattaaagagcgagaaagga

SEQ ID NO: 483042 - DNA, 120 bp, Artificial Sequence
  ENSG00000161914_17 (sequence is synthesized)
gcggccgccacggacggagactgaggctcagaggggacaagacctgcttgaggtcacacaggcagttgagagcagagctgagtcttgaacttgggtctggctgatacccaagactgtccc

SEQ ID NO: 483043 - DNA, 120 bp, Artificial Sequence
  ENSG00000161914_18 (sequence is synthesized)
ctctggctctggcactggggcagagcagggacacgatgggccaggctgagtccttcgtggccttgccctctttgcgtccttacagagcttgagtggggaggcagtccctctttatggagc

SEQ ID NO: 483044 - DNA, 120 bp, Artificial Sequence
  ENSG00000161914_19 (sequence is synthesized)
ccgcagtagcaggcatcgagaccaagaaaggtctgggggacctgtcgtggcctctggccaggggtggttgggcctgggaggggccgggcgaggaatggccctcgaagtgggcacctcggc

SEQ ID NO: 483045 - DNA, 120 bp, Artificial Sequence
  ENSG00000161914_20 (sequence is synthesized)
cttgtaactaaccaggccctgggggggcagccccgccccctcaccggtctcatcctcccccgcttagttccccacctggcctgggactctggacaccctggggcactcagccctgccctt

SEQ ID NO: 483046 - DNA, 120 bp, Artificial Sequence
  ENSG00000161914_21 (sequence is synthesized)
cttgaagttctggtgccccatctgggactccgtatggccccattcccacaaccctagatccaacacatccgggggacccttcacaacctggactgcactcccctaaacctatttctgtga

SEQ ID NO: 483047 - DNA, 120 bp, Artificial Sequence
  ENSG00000161914_22 (sequence is synthesized)
tgtggatggagtttttcccttcctgccttatatgttgatgtgatgattgagttaaaataggcaaagagcttagaagagtgcctggcaggtagtgggttccctaagtattaacttttacga

SEQ ID NO: 483048 - DNA, 120 bp, Artificial Sequence
  ENSG00000161920_0 (sequence is synthesized)
acttccggaacaagcgtcgcgtttctgaggagaaactcttggtgagaattcccagagtgataatggctacctacagcctggcgaacgagagactacgcgctctggaagacattgaacggg

SEQ ID NO: 483049 - DNA, 120 bp, Artificial Sequence
  ENSG00000161920_1 (sequence is synthesized)
aaatcggcgccatccttcagaatgcaggtactgtgatcctagaattgtccaaggaaaaaactaacgagcggctcctagaccggcaggcggcggccttcaccgcttcagtgcaacacgtgg

SEQ ID NO: 483050 - DNA, 120 bp, Artificial Sequence
  ENSG00000161920_2 (sequence is synthesized)
aggcggagctgtcagctcagatccgctacctcacccaggtggccacagggcagccccatgagggctccagctactcttcgaggaaggactgtcagatggctctgaagcgagtggactatg

SEQ ID NO: 483051 - DNA, 120 bp, Artificial Sequence
  ENSG00000161920_3 (sequence is synthesized)
tgggaacatgtagggtggggagtatgagcaccaacataccctgctggtcaaagtaccctaggacaaaggggcaaatggtgggcatggaaaaactgaagcccgagcctgcccacagctatg

SEQ ID NO: 483052 - DNA, 120 bp, Artificial Sequence
  ENSG00000161920_4 (sequence is synthesized)
ctttggcctctccagcagggtgctcctgctctgcactccagaaacaccctgacaggctcagagaggagatggaaactgacatacccaacccacttcctcaaacacttcatgctgctgccc

SEQ ID NO: 483053 - DNA, 120 bp, Artificial Sequence
  ENSG00000161920_5 (sequence is synthesized)
cagccttcccgcagacttggcctaatgaaaatacatacttcttcattcggagagacaaaacaagaactagagttttaatgataataaaagcaataataataaaagcaataacaataaaaa

SEQ ID NO: 483054 - DNA, 120 bp, Artificial Sequence
  ENSG00000161920_6 (sequence is synthesized)
aacaaattcaaactcagggaagaaatgagacgagacctgatgcctggttggagttagggtaaaggagatggtgctccattgatagtctgtcttgtaggtggccacagggcagccccatga

SEQ ID NO: 483055 - DNA, 120 bp, Artificial Sequence
  ENSG00000161920_7 (sequence is synthesized)
cggagctgtcagctcagatccgctacctcacccaggtcggtgtgtctggggggttctgcgagcgaaccccagctctgggtcaaagcctcaggcttgggtgatccagggtggagcattaac

SEQ ID NO: 483056 - DNA, 120 bp, Artificial Sequence
  ENSG00000161921_0 (sequence is synthesized)
gcaggtgcgcgcggccggggctggcggcgactctctccaccgggccgcccgggaggctcatgcagcgcggctgggtcccgcggcgcccggatcggggaagtgaaagtgcctcggaggagg

SEQ ID NO: 483057 - DNA, 120 bp, Artificial Sequence
  ENSG00000161921_1 (sequence is synthesized)
gaagtgaaagtgcctcggaggaggagggccggtccggcagtgcagccgcctcacaggtcggcggacgggccaggcgggcggcctcctgaaccgaaccgaatcggctcctcgggccgtcgt

SEQ ID NO: 483058 - DNA, 120 bp, Artificial Sequence
  ENSG00000161921_2 (sequence is synthesized)
cctcccgcccctcctcgcccgccgccggagttttctttcggtttcttccaagattcctggccttccctcgacggagccgggcccagtgcgggggcgcagggcgcgggagctccacctcct

SEQ ID NO: 483059 - DNA, 120 bp, Artificial Sequence
  ENSG00000161921_3 (sequence is synthesized)
cggctttccctgcgtccagaggctggcatggcgcgggccgagtactgagcgcacggtcggggcacagcagggccggggggtgcagctggctcgcgcctcctctccggccgccgtctcctc

SEQ ID NO: 483060 - DNA, 120 bp, Artificial Sequence
  ENSG00000161921_4 (sequence is synthesized)
cggtccccggcgaaagccattgagacaccagctggacgtcacgcgccggagcatgtctgggagtcagagcgaggtggctccatccccgcagagtccgcggagccccgagatgggacggga

SEQ ID NO: 483061 - DNA, 120 bp, Artificial Sequence
  ENSG00000161921_5 (sequence is synthesized)
cttgcggcccgggtcccgcgtgctcctgctcctgcttctgctcctgctggtgtacctgactcagccaggcaatggcaacgagggcagcgtcactggaagttgttattgtggtaaaagaat

SEQ ID NO: 483062 - DNA, 120 bp, Artificial Sequence
  ENSG00000161921_6 (sequence is synthesized)
ttcttccgactccccgccatcggttcagttcatgaatcgtctccggaaacacctgagagcttaccatcggtgtctatactacacgaggttccagctcctttcctggagcgtgtgtggggg

SEQ ID NO: 483063 - DNA, 120 bp, Artificial Sequence
  ENSG00000161921_7 (sequence is synthesized)
caacaaggacccatgggttcaggaattgatgagctgtcttgatctcaaagaatgtggacatgcttactcggggattgtggcccaccagaagcatttacttcctaccagccccccaatttc

SEQ ID NO: 483064 - DNA, 120 bp, Artificial Sequence
  ENSG00000161921_8 (sequence is synthesized)
tcaggcctcagagggggcatcttcagatatccacacccctgcccagatgctcctgtccaccttgcagtccactcagcgccccaccctcccagtaggatcactgtcctcggacaaagagct

SEQ ID NO: 483065 - DNA, 120 bp, Artificial Sequence
  ENSG00000161921_9 (sequence is synthesized)
tggcagctgggcctgaggctggggagaaccagaagcagccggaaaaaaatgctggtcccacagccaggacatcagccacagtgccagtcctgtgcctcctggccatcatcttcatcctca

SEQ ID NO: 483066 - DNA, 120 bp, Artificial Sequence
  ENSG00000161921_10 (sequence is synthesized)
ccgcagccctttcctatgtgctgtgcaagaggaggagggggcagtcaccgcagtcctctccagatctgccggttcattatatacctgtggcacctgactctaatacctgagccaagaatg

SEQ ID NO: 483067 - DNA, 120 bp, Artificial Sequence
  ENSG00000161921_11 (sequence is synthesized)
gaagcttgtgaggagacggactctatgttgcccaggctgttatggaactcctgagtcaagtgatcctcccaccttggcctctgaaggtgcgaggattataggcgtcacctaccacatcca

SEQ ID NO: 483068 - DNA, 120 bp, Artificial Sequence
  ENSG00000161921_12 (sequence is synthesized)
gcctacacgtatttgttaatatctaacataggactaaccagccactgccctctcttaggcccctcatttaaaaacggttatactataaaatctgcttttcacactgggtgataataactt

SEQ ID NO: 483069 - DNA, 79 bp, Artificial Sequence
  ENSG00000161921_13 (sequence is synthesized)
tactataaaatctgcttttcacactgggtgataataacttggacaaattctatgtgtattttgttttgttttgctttgc

SEQ ID NO: 483070 - DNA, 77 bp, Artificial Sequence
  ENSG00000161921_14 (sequence is synthesized)
ccctatgtgtgttttttaactactaaaaattatttttgtaatgattgagtcttctttatggaaacaactggcctcag

SEQ ID NO: 483071 - DNA, 120 bp, Artificial Sequence
  ENSG00000161921_15 (sequence is synthesized)
gtaatgattgagtcttctttatggaaacaactggcctcagcccttgcgcccttactgtgattcctggcttcattttttgctgatggttccccctcgtcccaaatctctctcccagtacac

SEQ ID NO: 483072 - DNA, 120 bp, Artificial Sequence
  ENSG00000161921_16 (sequence is synthesized)
cagttgttcctcccccacctcagccctctcctgcatcctcctgtacccgcagcgaaggcctgggctttcccaccctccctccttagcaggtgccgtgctgggacaccatacgggttggtt

SEQ ID NO: 483073 - DNA, 120 bp, Artificial Sequence
  ENSG00000161921_17 (sequence is synthesized)
tcacctcctcagtcccttgcctaccccagtgagagtctgatcttgtttttattgttattgcttttattattattgcttttattatcattaaaactctagttcttgttttgtctctccgaa

SEQ ID NO: 483074 - DNA, 120 bp, Artificial Sequence
  ENSG00000161921_18 (sequence is synthesized)
tgataacctccctgactcactcttccctctgttggagctcagaacatgacactccaaaacatggcaccttggtaattacgaaaacagcagaaaatgtggacatgcttactcggggattgt

SEQ ID NO: 483075 - DNA, 120 bp, Artificial Sequence
  ENSG00000161921_19 (sequence is synthesized)
aaagccagccagccgcctggggttggggacagaggcccggggacgcctggctccgggcgggattatggatgttgtcgggggcgtgatgatgtgtgggttgagcctggcgctctgaccctg

SEQ ID NO: 483076 - DNA, 120 bp, Artificial Sequence
  ENSG00000161921_20 (sequence is synthesized)
ggtccaccgagaggctgtcatggggctgtggattggatgccagggaacagcggagtggggaccctgggcctgggaatgggtgccgaccacctccgtcccgcgcaggcaatggcaacgagg

SEQ ID NO: 483077 - DNA, 120 bp, Artificial Sequence
  ENSG00000161929_0 (sequence is synthesized)
actgtctctagcagtgggtgaaggcctgtgagtgaggaatgcctctcaccagctgtgcctgagctgcagcactccagccactgctgtctccttagctgctcacatatggatactttcaca

SEQ ID NO: 483078 - DNA, 120 bp, Artificial Sequence
  ENSG00000161929_1 (sequence is synthesized)
gttcaggattccactgcaatgagctggtggaggaataatttctggatcatcttagctgtggccatcatcgttgtctctgtgggtctgggcctcatcctgtactgtgtctgtaagtggcag

SEQ ID NO: 483079 - DNA, 120 bp, Artificial Sequence
  ENSG00000161929_2 (sequence is synthesized)
cttagacgaggcaagaaatgggaaattgccaagcccctgaaacacaagcaagtagatgaagaaaagatgtatgagaatgttcttaatgagtcgccagttcaattaccgcctctgccaccg

SEQ ID NO: 483080 - DNA, 120 bp, Artificial Sequence
  ENSG00000161929_3 (sequence is synthesized)
aggaattggccttctctagaagactcttccccacaggaagccccaagtcagccgcccgctacatactcactggtaaataaagttaaaaataagaagactgtttccatcccaagctacatt

SEQ ID NO: 483081 - DNA, 120 bp, Artificial Sequence
  ENSG00000161929_4 (sequence is synthesized)
gagcctgaagatgactatgacgatgttgaaatccctgcaaatactgaaaaagcatcattttgaaacagccatttcttctttttggcaaaactgaagagggttcacacaacttattttaaa

SEQ ID NO: 483082 - DNA, 120 bp, Artificial Sequence
  ENSG00000161929_5 (sequence is synthesized)
acaatcaagaatggttgaacttcagtaggtctctgggccctgaaagccagtggtgattttatgaagctctataagataaagcacttcccaaaccttagatgaagacacccctgcgatcgg

SEQ ID NO: 483083 - DNA, 120 bp, Artificial Sequence
  ENSG00000161929_6 (sequence is synthesized)
atgactgcagccagaggagacacatgggtgctcggctctgaggacttagaggggtcagccttgtgctgttgaggaaactttccatgggaaggaccacggggctccatggctcccacctgt

SEQ ID NO: 483084 - DNA, 120 bp, Artificial Sequence
  ENSG00000161929_7 (sequence is synthesized)
gggaaactactcatttcttggcattctttcccccttcattccctttggtttgcatggttctgagtgatattaaatctcagcatttggttgtgcagaccctcccaggctcccatccccagc

SEQ ID NO: 483085 - DNA, 120 bp, Artificial Sequence
  ENSG00000161929_8 (sequence is synthesized)
aaggccctcaccaagcatgctggtctttaccctctcaccccacccacctcctgcactgtgaggctgtgggtgagttacagctgagtgctctcgtgcccaggttcccacaccacatctcgc

SEQ ID NO: 483086 - DNA, 120 bp, Artificial Sequence
  ENSG00000161929_9 (sequence is synthesized)
gagtttgcaagggcagggagtaccttttgttctcgtgaaccctccccacctagacaccctgcaaaccccagtgcctttatatgatgtaggccaaattgaccatagagatttgagttttca

SEQ ID NO: 483087 - DNA, 120 bp, Artificial Sequence
  ENSG00000161929_10 (sequence is synthesized)
aagttgtactgtaacaatggacaaaggacaaaagttaccttctgatttacacctagaagcatcattttgcaataggtgtgttgggggtgctacaggaaaaatacatttcccccaggacaa

SEQ ID NO: 483088 - DNA, 120 bp, Artificial Sequence
  ENSG00000161929_11 (sequence is synthesized)
atcatggggaacaggaaagaaaaggggcatgtaacaatggcatatacaagatgagagttcagggggcttaatatcccctgtccatcattttcatcagtacttactcgagttctaggaaaa

SEQ ID NO: 483089 - DNA, 120 bp, Artificial Sequence
  ENSG00000161929_12 (sequence is synthesized)
cagcctcaagccccttccttccagatcactgtccctgggcatctgggaggaggcagaaggtccactgtgatgtgctgcagccaatgagatgggccagggacatgggcagatgtcttgtta

SEQ ID NO: 483090 - DNA, 120 bp, Artificial Sequence
  ENSG00000161929_13 (sequence is synthesized)
aacaagtgtcctaatggggtcaacaaggcccgagtcagctttataggctcttagacctcatcaattccttctagctgatcgccagagccctaggacttgactcattctaactatactcac

SEQ ID NO: 483091 - DNA, 120 bp, Artificial Sequence
  ENSG00000161929_14 (sequence is synthesized)
aagatgctggtttctaagtgacctctgggaaatctggcaaatgaacagccttgcagagagagcactgtgaacctggaaaggcctgagagtgactcagatttccctcaagagatgggaaaa

SEQ ID NO: 483092 - DNA, 120 bp, Artificial Sequence
  ENSG00000161929_15 (sequence is synthesized)
tgtgttcctcccattttcaagctttctccctcaatcaacgctggagcactggggacctgggcttcctccctggttctctctttccagactctatgaaggcttccaccttgctattaatac

SEQ ID NO: 483093 - DNA, 120 bp, Artificial Sequence
  ENSG00000161929_16 (sequence is synthesized)
aaaataaataaataaataaataaataaaccctccttatgttaggccagtagttatctaactatggccttatgggactctggtatcccaccagccaaagagaggactcttcccaaattata

SEQ ID NO: 483094 - DNA, 120 bp, Artificial Sequence
  ENSG00000161929_17 (sequence is synthesized)
aaattatagaacaaaaataagccaaaggattggagtgtttcaaacacatgctttcgtcttataaatgttctgtaaaccctccatgactatgacaaaagttaaaaacaaatgccagacaaa

SEQ ID NO: 483095 - DNA, 120 bp, Artificial Sequence
  ENSG00000161929_18 (sequence is synthesized)
gggattacaggtgtgagacaccacgcccgtcccctatgaaggtgtcttagatagctcaggctgctgtaacaaaaataccatagactggggtgcttacacaacagaaatttgttttctcgt

SEQ ID NO: 483096 - DNA, 120 bp, Artificial Sequence
  ENSG00000161929_19 (sequence is synthesized)
ttgctatgtccccacaaatggcctttccttggtgcattcaagctggggaagagcatcagggagtcagatttctggtgtttcttcttacaaggacactgatcctgttggatcaaggcctca

SEQ ID NO: 483097 - DNA, 120 bp, Artificial Sequence
  ENSG00000161929_20 (sequence is synthesized)
tccctatggccacatatagcctcactgggggttaaggcttgaacacctgaattttggggggacacaaacattcagtctgtaacactaggatttatagatgcagcatcctgattattttat

SEQ ID NO: 483098 - DNA, 74 bp, Artificial Sequence
  ENSG00000161929_21 (sequence is synthesized)
aacactaggatttatagatgcagcatcctgattattttatttttgaggcagagtcttggtttctccacttccta

SEQ ID NO: 483099 - DNA, 120 bp, Artificial Sequence
  ENSG00000161929_22 (sequence is synthesized)
tacaggcatgagccaccacacacagccagcatcctgtttaaaagagatagccagaggccaggcacagtggcatatgcttgtaataccaacactttggaaggccagggcgggctgatgact

SEQ ID NO: 483100 - DNA, 120 bp, Artificial Sequence
  ENSG00000161929_23 (sequence is synthesized)
gccagggcgggctgatgacttgagctcaggagtctgagaacagcctgggcaacatggcaaaatcctatctttacaaaaattagccagcgtgatggtgcacacttatagtcccagctactt

SEQ ID NO: 483101 - DNA, 89 bp, Artificial Sequence
  ENSG00000161929_24 (sequence is synthesized)
acttagggatcgcttgagcctgggaggtctgcagtgagccacgatagcatcactgcacctggacgacagagtgagaccctgtctcaaaa

SEQ ID NO: 483102 - DNA, 120 bp, Artificial Sequence
  ENSG00000161929_25 (sequence is synthesized)
aaagcaaaaagggggcagcataagtaccgacgcacccaatagcctgatataagggtgtaaattcatgttcaaatcccagcttggaacataaacagaaagaaacatggggtgtcactaggc

SEQ ID NO: 483103 - DNA, 120 bp, Artificial Sequence
  ENSG00000161929_26 (sequence is synthesized)
ctttcacttcctatcagaaaaactctgcctggttcctttgactggaatgttcttccttaagctctttgcctcgctggattttcctcatccttcagatgtcagctcagaagttaccacctc

SEQ ID NO: 483104 - DNA, 120 bp, Artificial Sequence
  ENSG00000161940_0 (sequence is synthesized)
gagaccccgccccccttaagaagagaagccgcggcccctgcaggacgggggcctgtgtcgctatgggttcccccgccgccccggagggagcgctgggctacgtccgcgagttcactcgcc

SEQ ID NO: 483105 - DNA, 120 bp, Artificial Sequence
  ENSG00000161940_1 (sequence is synthesized)
actcctccgacgtgctgggcaacctcaacgagctgcgcctgcgcgggatcctcactgacgtcacgctgctggttggcgggcaacccctcagagcacacaaggcagttctcatcgcctgca

SEQ ID NO: 483106 - DNA, 120 bp, Artificial Sequence
  ENSG00000161940_2 (sequence is synthesized)
gtggcttcttctattcaattttccggggccgtgcgggagtcggggtggacgtgctctctctgcccgggggtcccgaagcgagaggcttcgcccctctattggacttcatgtacacttcgc

SEQ ID NO: 483107 - DNA, 120 bp, Artificial Sequence
  ENSG00000161940_3 (sequence is synthesized)
gcctgcgcctctctccagccactgcaccagcagtcctagcggccgccacctatttgcagatggagcacgtggtccaggcatgccaccgcttcatccaggccagctatgaacctctgggca

SEQ ID NO: 483108 - DNA, 120 bp, Artificial Sequence
  ENSG00000161940_4 (sequence is synthesized)
tctccctgcgccccctggaagcagaacccccaacacccccaacggcccctccaccaggtagtcccaggcgctccgaaggacacccagacccacctactgaatctcgaagctgcagtcaag

SEQ ID NO: 483109 - DNA, 120 bp, Artificial Sequence
  ENSG00000161940_5 (sequence is synthesized)
gcccccccagtccagccagccctgaccccaaggcctgcaactggaaaaagtacaagtacatcgtgctaaactctcaggcctcccaagcagggagcctggtcggggagagaagttctggtc

SEQ ID NO: 483110 - DNA, 88 bp, Artificial Sequence
  ENSG00000161940_6 (sequence is synthesized)
ctgaagaaggacccattcctggtccccagagcaggctctctccaactgctgccactgtgcagttcaaatgtggggctccagccagtac

SEQ ID NO: 483111 - DNA, 120 bp, Artificial Sequence
  ENSG00000161940_7 (sequence is synthesized)
ctgccactgtgcagttcaaatgtggggctccagccagtaccccctacctcctcacatcccaggctcaagacacctctggatcaccctctgaacgggctcgtccactaccgggaagtgaat

SEQ ID NO: 483112 - DNA, 120 bp, Artificial Sequence
  ENSG00000161940_8 (sequence is synthesized)
ttttcagctgccagaactgtgaggctgtggcagggtgctcatcggggctggactccttggttcctggggacgaagacaaaccctataagtgtcagctgtgccggtcttcgttccgctaca

SEQ ID NO: 483113 - DNA, 120 bp, Artificial Sequence
  ENSG00000161940_9 (sequence is synthesized)
agggcaaccttgccagtcatcgtacagtgcacacaggggaaaagccttaccactgctcaatctgcggagcccgttttaaccggccagcaaacctgaaaacgcacagccgcatccattcgg

SEQ ID NO: 483114 - DNA, 120 bp, Artificial Sequence
  ENSG00000161940_10 (sequence is synthesized)
gagagaagccgtataagtgtgagacgtgcggctcgcgctttgtacaggtggcacatctgcgggcgcacgtgctgatccacaccggggagaagccctacccttgccctacctgcggaaccc

SEQ ID NO: 483115 - DNA, 120 bp, Artificial Sequence
  ENSG00000161940_11 (sequence is synthesized)
gcttccgccacctgcagaccctcaagagccacgttcgcatccacaccggagagaagccttaccactgcgacccctgtggcctgcatttccggcacaagagtcaactgcggctgcatctgc

SEQ ID NO: 483116 - DNA, 120 bp, Artificial Sequence
  ENSG00000161940_12 (sequence is synthesized)
gccagaaacacggagctgctaccaacaccaaagtgcactaccacattctcggggggccctagctgagcgcaggcccaggccccacttgcttcctgcgggtgggaaagctgcaggcccagg

SEQ ID NO: 483117 - DNA, 120 bp, Artificial Sequence
  ENSG00000161940_13 (sequence is synthesized)
ccttgcttccctatcaggcttgggcataggggtgtgccaggccactttggtatcagaaattgccaccctcttaatttctcactggggagagcaggggtggcagatcctggctagatctgc

SEQ ID NO: 483118 - DNA, 120 bp, Artificial Sequence
  ENSG00000161940_14 (sequence is synthesized)
tgaggagagagctagctaggggctgggaaaggggagagattggagtcctggtctccctaagggaatagccctccacctgtggcccccattgcattcagtttatctgtaaatataatttat

SEQ ID NO: 483119 - DNA, 120 bp, Artificial Sequence
  ENSG00000161940_15 (sequence is synthesized)
tgaggcctttgggtggcaccggggccttcattcgattgcatttcccactcccctcttccacaagtgtgattaaaagtgaccagaaacacagaaggtgagatcacagctctgctggcagag

SEQ ID NO: 483120 - DNA, 120 bp, Artificial Sequence
  ENSG00000161940_16 (sequence is synthesized)
attactagcccttggctctctcgtttggcttgggtattttatattatttctgtcataacttttatctttagaattgttctttctcctgtttgtttgcttgttagtttgtttaaaatggaa

SEQ ID NO: 483121 - DNA, 120 bp, Artificial Sequence
  ENSG00000161940_17 (sequence is synthesized)
aaaggggttctctgtgttctgcccctgtaattctaggtctggaacctttatttgttctagggcagctctgggaacatgcgggattgtggaattgggtcaggaaccctctctggtattctg

SEQ ID NO: 483122 - DNA, 120 bp, Artificial Sequence
  ENSG00000161940_18 (sequence is synthesized)
gatgttgtaggttctctagcagtctagaaatggatacagacatttctctgttcttcaagggtgataggaaccattatgttgagcccaaaatggaagtaataataaatgcctcctggaggc

SEQ ID NO: 483123 - DNA, 120 bp, Artificial Sequence
  ENSG00000161940_19 (sequence is synthesized)
tgtgggtgtgggggattctgtatctggattccgtatcactccaagtggaggctggcaggtttttctgcaagatggtccagaatctaaaatgtcccattaatctggtcacttgggtttggc

SEQ ID NO: 483124 - DNA, 120 bp, Artificial Sequence
  ENSG00000161940_20 (sequence is synthesized)
tctgctgtatccatctatagtggtagagacccaccagggctcaagtggagtccatcatcctcccacgggggcctgttcttagcactgagttgatcgctccatgggggagagatcagacat

SEQ ID NO: 483125 - DNA, 120 bp, Artificial Sequence
  ENSG00000161940_21 (sequence is synthesized)
tccttatcagagatgatgtgaccttttctgactctgcccagtctctatgaatgttatggcctagggaagaatcatgaaactctttagcttgattagatggtaaacagtgttaacccatcc

SEQ ID NO: 483126 - DNA, 120 bp, Artificial Sequence
  ENSG00000161940_22 (sequence is synthesized)
tttactacagaggcatatgggtttgaatgttacctggggttctctctattgagttgagccccttcttcctttagtgggttttggacatcttctggcaagtgtccagatgccagaaccttc

SEQ ID NO: 483127 - DNA, 120 bp, Artificial Sequence
  ENSG00000161940_23 (sequence is synthesized)
ttttcctctagaagggatggtgcttggtaaccttaccttttaaaagctgggtctgtgacctggtcttcccatccctgcattcctgtctggaaccagtgaatgcattagaaccttccatag

SEQ ID NO: 483128 - DNA, 120 bp, Artificial Sequence
  ENSG00000161940_24 (sequence is synthesized)
gaaaagaaaaggggctgagttccattctgggtttgctgtagtttggttgggattattgttggcattacagatgtaaaagattgactagcccataggccaaaggcctgttctagttgacca

SEQ ID NO: 483129 - DNA, 120 bp, Artificial Sequence
  ENSG00000161940_25 (sequence is synthesized)
agtttcaagtaggattaagaggttggttgaggggtgcagtttctggtgtaggccaggtaggtagaaagtgaggaacagggttgcctcttggctgggtggagtctctgaaatgttagaaga

SEQ ID NO: 483130 - DNA, 120 bp, Artificial Sequence
  ENSG00000161940_26 (sequence is synthesized)
agcgctgaagccttgattgatagttctgccccttgttgccctggggcttatctgattatgggacgagggtagaaagtaagaagcacttttgaatttgtggggtagaacttcaacaataag

SEQ ID NO: 483131 - DNA, 120 bp, Artificial Sequence
  ENSG00000161940_27 (sequence is synthesized)
tcagttctagtggctgtcgcctggggactagtgagaaagctactcttctccctcttccctctttctccccatggccccactgcagaattaaagaaggaagaagggaaggcggaggagtct

SEQ ID NO: 483132 - DNA, 120 bp, Artificial Sequence
  ENSG00000161940_28 (sequence is synthesized)
ataagaaggaatcatgatttctatttagcagattggatgggcaggtggagaatgcctgggggtagaaatgttagatcttgcaacatcagatccttggaataaagaagcctctctgtgctg

SEQ ID NO: 483133 - DNA, 120 bp, Artificial Sequence
  ENSG00000161940_29 (sequence is synthesized)
accacgaaccagtgacttcatgaagtttctccggagccacctgcatcctgctgctctgaagtcacttcctgcctgaggtgtggaggctgcagggagaaaccaggaagccactaataatat

SEQ ID NO: 483134 - DNA, 120 bp, Artificial Sequence
  ENSG00000161940_30 (sequence is synthesized)
caagaggccggggcgtgcatctgtgctggagatcttaatgctggcgacatgcctccatcaccaaggaagatggataagagttgggtcccgtaaagaccacaggggctggaggtggcactg

SEQ ID NO: 483135 - DNA, 120 bp, Artificial Sequence
  ENSG00000161940_31 (sequence is synthesized)
agaagactgagttagaactaacgggccagcccaccctcccccagcaagggtatcttgaatctatccagggtccagtgcatgcatctctcccaccctttcccctgtcctgtgtgtgtgctg

SEQ ID NO: 483136 - DNA, 120 bp, Artificial Sequence
  ENSG00000161940_32 (sequence is synthesized)
ggtgcggaggtcactaattctgatattaccttcctctgggccttaaattcctcatctgtgaaaaagtcagttaccatgatctctgcagctacctccaacattgaaagtttgtagttgtct

SEQ ID NO: 483137 - DNA, 120 bp, Artificial Sequence
  ENSG00000161940_33 (sequence is synthesized)
gagaagccgtataagtgtgagacgtgcggctcgcgctttgtacaggtacggagccagcctccaagtggcttccaaggcaaacctgcaagaggtggggtgggccaatagggagggttctgt

SEQ ID NO: 483138 - DNA, 120 bp, Artificial Sequence
  ENSG00000161940_34 (sequence is synthesized)
caagggagcgagggtgtcgtagagggcagaatgaacaagaagaattaggagggaggctgcgtgtgccggggctaggggctggaagtcctggctctagttgcacctcggaaggaaaaggca

SEQ ID NO: 483139 - DNA, 120 bp, Artificial Sequence
  ENSG00000161944_0 (sequence is synthesized)
tactgtccaaagtcccaggccaggaggtgccaggttagagcttggacactcagaccctccagtgcaggccttgcccggaccagcccctcctccactctcctctcccctgtgagctccacc

SEQ ID NO: 483140 - DNA, 120 bp, Artificial Sequence
  ENSG00000161944_1 (sequence is synthesized)
tgccccagttctcctggctttaacccctccttggccaaggccagggttgcctgcgggagccaggtgtccgctctccacacctttcacagccccagccctcagagcaacctcagcccagcc

SEQ ID NO: 483141 - DNA, 120 bp, Artificial Sequence
  ENSG00000161944_2 (sequence is synthesized)
cagcccagctccagctccagctccagcccgggccccatcatggccaaggactttcaagatatccagcagctgagctcggaggaaaatgaccatcctttccatcaagggccacctcctgcc

SEQ ID NO: 483142 - DNA, 120 bp, Artificial Sequence
  ENSG00000161944_3 (sequence is synthesized)
cagcccctggcacagcgtctctgctccatggtctgcttcagtctgcttgccctgagcttcaacatcctgctgctggtggtcatctgtgtgactgggtcccaaagtgcacagctgcaagcc

SEQ ID NO: 483143 - DNA, 120 bp, Artificial Sequence
  ENSG00000161944_4 (sequence is synthesized)
gagctgcggagcctgaaggaagctttcagcaacttctcctcgagcaccctgacggaggtccaggcaatcagcacccacggaggcagcgtgggtgacaagatcacatccctaggagccaag

SEQ ID NO: 483144 - DNA, 120 bp, Artificial Sequence
  ENSG00000161944_5 (sequence is synthesized)
tgcgcttcgtggcctgccagatggagctcctccacagcaacggctcccaaaggacctgctgccccgtcaactgggtggagcaccaaggcagctgctactggttctctcactccgggaagg

SEQ ID NO: 483145 - DNA, 120 bp, Artificial Sequence
  ENSG00000161944_6 (sequence is synthesized)
cctgggctgaggcggagaagtactgccagctggagaacgcacacctggtggtcatcaactcctgggaggagcagaaattcattgtacaacacacgaaccccttcaatacctggataggtc

SEQ ID NO: 483146 - DNA, 120 bp, Artificial Sequence
  ENSG00000161944_7 (sequence is synthesized)
tcacggacagtgatggctcttggaaatgggtggatggcacagactataggcacaactacaagaactgggctgtcactcagccagataattggcacgggcacgagctgggtggaagtgaag

SEQ ID NO: 483147 - DNA, 120 bp, Artificial Sequence
  ENSG00000161944_8 (sequence is synthesized)
actgtgttgaagtccagccggatggccgctggaacgatgacttctgcctgcaggtgtaccgctgggtgtgtgagaaaaggcggaatgccaccggcgaggtggcctgaccccagcacacct

SEQ ID NO: 483148 - DNA, 120 bp, Artificial Sequence
  ENSG00000161944_9 (sequence is synthesized)
ctggctaacccataccccacacctgcccagctctggcttctctgttgaggattttgaggaaaggaagaaacactgagacaggggtatggggaagagctgagcaaagagagaaaggaggta

SEQ ID NO: 483149 - DNA, 120 bp, Artificial Sequence
  ENSG00000161944_10 (sequence is synthesized)
gtttaagagtccctgaccctggaggactgagatcccacctccttctgtaattcattgtaattattataatcgtcagcctcttcaatggcgtaggaaagaagaaacaaatgcttgaatctc

SEQ ID NO: 483150 - DNA, 120 bp, Artificial Sequence
  ENSG00000161944_11 (sequence is synthesized)
gaaacagcagcaggacctgaaagcaggtcagagagcctccggggtgtgtgcgcatgtgcgtgcatgtgtacgtgtgcggtgtgtgtagtgtgtacgtgtgcggtgtgtgtagtgtgcacg

SEQ ID NO: 483151 - DNA, 120 bp, Artificial Sequence
  ENSG00000161944_12 (sequence is synthesized)
tgtgcgtgcgtgcgtgtgtgtgcctgcaagcatgtgtatctgtgtctctctccgtatgtgtggtgtgatatgtcatggatctgtgtgtggtgtgtagtgtggtgtatatgtgtgtgttgt

SEQ ID NO: 483152 - DNA, 120 bp, Artificial Sequence
  ENSG00000161944_13 (sequence is synthesized)
gtgtgtatgcatgtgtggtggtgtgtgtgagatgagtctgtgtgtgtgcggtatggtatatgtgtgtgtacgcatgtgatgtgtgtggtgtgtctcttggtgtgtttgtgtgtgtgtgat

SEQ ID NO: 483153 - DNA, 120 bp, Artificial Sequence
  ENSG00000161944_14 (sequence is synthesized)
ctggtctcgaactcctgacctcagtttctctactcacctgggccaccacctagagcaagttgcctcatctctccgaggctccgcttccgaaccctgtgaaatgggagtaacagaagtcct

SEQ ID NO: 483154 - DNA, 120 bp, Artificial Sequence
  ENSG00000161944_15 (sequence is synthesized)
ttccgaaccctgtgaaatgggagtaacagaagtcctgcctcgtgggggtgttgtgctgtgataaatgaagaaacaccttggagaatttagggcagtggctgggcctgaggacagtgtttg

SEQ ID NO: 483155 - DNA, 120 bp, Artificial Sequence
  ENSG00000161944_16 (sequence is synthesized)
tgttgcctgggctggggcagggtctgggccggacggggctctctgaggttggattcctcctgcgaggagagctgtttttctgcaaagccccttcctcctcctgctgaagcttctggattt

SEQ ID NO: 483156 - DNA, 120 bp, Artificial Sequence
  ENSG00000161944_17 (sequence is synthesized)
gagaggctttactctccaggagagtgaagcgagttgggccagagctgagagtctggtggccgagcccacaggaagctggggtctgtggttcagatgccggattgggcaagagtagagaac

SEQ ID NO: 483157 - DNA, 120 bp, Artificial Sequence
  ENSG00000161944_18 (sequence is synthesized)
gtgtccgctctccacacctttcacagatcctacccaggccaccaccccgaacccctccgaccctgcgttccatcccaccatcaacctccacgtgaatctgcacctctgccccagccccag

SEQ ID NO: 483158 - DNA, 120 bp, Artificial Sequence
  ENSG00000161955_0 (sequence is synthesized)
ccgagggtcttccaccctcgccctgaccctggacactgcccagcttggccccccatcctgctcctggcacaatgccctctagccagccaaccttccctcccccaaccctggggccgcccc

SEQ ID NO: 483159 - DNA, 120 bp, Artificial Sequence
  ENSG00000161955_1 (sequence is synthesized)
agggttcctgcgcactgcctgttcctcctgggtgtcactggcagccctgtccttcctagagggactggaacctaattctcctgaggctgagggagggtggagggtctcaaggcaacgctg

SEQ ID NO: 483160 - DNA, 120 bp, Artificial Sequence
  ENSG00000161955_2 (sequence is synthesized)
gccccacgacggagtgccaggagcactaacagtacccttagcttgctttcctcctccctcctttttattttcaagttcctttttatttctccttgcgtaacaaccttcttcccttctgca

SEQ ID NO: 483161 - DNA, 120 bp, Artificial Sequence
  ENSG00000161955_3 (sequence is synthesized)
ccactgcccgtacccttacccgccccgccacctccttgctaccccactcttgaaaccacagctgttggcagggtccccagctcatgccagcctcatctcctttcttgctagcccccaaag

SEQ ID NO: 483162 - DNA, 120 bp, Artificial Sequence
  ENSG00000161955_4 (sequence is synthesized)
ggcctccaggcaacatggggggcccagtcagagagccggcactctcagttgccctctggttgagttggggggcagctctgggggccgtggcttgtgccatggctctgctgacccaacaaa

SEQ ID NO: 483163 - DNA, 120 bp, Artificial Sequence
  ENSG00000161955_5 (sequence is synthesized)
cagagctgcagagcctcaggagagaggtgagccggctgcaggggacaggaggcccctcccagaatggggaagggtatccctggcagagtctcccggagcagagttccgatgccctggaag

SEQ ID NO: 483164 - DNA, 120 bp, Artificial Sequence
  ENSG00000161955_6 (sequence is synthesized)
cctgggagaatggggagagatcccggaaaaggagagcagtgctcacccaaaaacagaagaagcagcactctgtcctgcacctggttcccattaacgccacctccaaggatgactccgatg

SEQ ID NO: 483165 - DNA, 120 bp, Artificial Sequence
  ENSG00000161955_7 (sequence is synthesized)
tgacagaggtgatgtggcaaccagctcttaggcgtgggagaggcctacaggcccaaggatatggtgtccgaatccaggatgctggagtttatctgctgtatagccaggtcctgtttcaag

SEQ ID NO: 483166 - DNA, 120 bp, Artificial Sequence
  ENSG00000161955_8 (sequence is synthesized)
aggagactctattccgatgtataagaagtatgccctcccacccggaccgggcctacaacagctgctatagcgcaggtgtcttccatttacaccaaggggatattctgagtgtcataattc

SEQ ID NO: 483167 - DNA, 120 bp, Artificial Sequence
  ENSG00000161955_9 (sequence is synthesized)
cccgggcaagggcgaaacttaacctctctccacatggaaccttcctggggtttgtgaaactgtgattgtgttataaaaagtggctcccagcttggaagaccagggtgggtacatactgga

SEQ ID NO: 483168 - DNA, 120 bp, Artificial Sequence
  ENSG00000161955_10 (sequence is synthesized)
gacagccaagagctgagtatataaaggagagggaatgtgcaggaacagaggcgtcttcctgggtttggctccccgttcctcacttttcccttttcattcccaccccctagactttgattt

SEQ ID NO: 483169 - DNA, 120 bp, Artificial Sequence
  ENSG00000161955_11 (sequence is synthesized)
tacggatatcttgcttctgttccccatggagctccgaattcttgcgtgtgtgtagatgaggggcgggggacgggcgccaggcattgtccagacctggtcggggcccactggaagcatcca

SEQ ID NO: 483170 - DNA, 120 bp, Artificial Sequence
  ENSG00000161955_12 (sequence is synthesized)
gaacagcaccaccatctagcggccgctcgagggaagcacccgccggttggccgaagtccacgaagccgccctctgctagggaaaacccctggttctccatgccacacctctctccaggtg

SEQ ID NO: 483171 - DNA, 120 bp, Artificial Sequence
  ENSG00000161955_13 (sequence is synthesized)
ccctctgcctcttcaccccacaagaagccttatcctacgtccttctctccatctatcggaccccagtttccatcactatctccagagatgtagctattatgcgcccgtctacagggggtg

SEQ ID NO: 483172 - DNA, 120 bp, Artificial Sequence
  ENSG00000161955_14 (sequence is synthesized)
cccgacgatgacggtgccttcgcagtcaaattactcttcgggtcccaaggtttggctttcacgcgctccattgccccggcgtggcaggccattccaagcccttccgggctggaactggtg

SEQ ID NO: 483173 - DNA, 120 bp, Artificial Sequence
  ENSG00000161955_15 (sequence is synthesized)
tcggaggagcctcgggtgtatcgtacgccctggtgttggtgttgcctcactcctctgagctcttctttctgatcaagccctgcttaaagttaaataaaatagaatgaatgataccccggc

SEQ ID NO: 483174 - DNA, 120 bp, Artificial Sequence
  ENSG00000161955_16 (sequence is synthesized)
agaactcagccagtttcttgcttccgtgcccctggttctcctccccatcgagcccacccctcctttcccaccttcagtcacccctagtgaactgccccagcgatctctgctgtgcttgac

SEQ ID NO: 483175 - DNA, 120 bp, Artificial Sequence
  ENSG00000161955_17 (sequence is synthesized)
ccggaaccctgtgtgctggggaggaatcccgcagtggccggggggcttgaggccgctgctttgtctcttcgtccagagccttatagcagcactctgtcctgcacctggttcccattaacg

SEQ ID NO: 483176 - DNA, 120 bp, Artificial Sequence
  ENSG00000161955_18 (sequence is synthesized)
ccggaaccctgtgtgctggggaggaatcccgcagtggccggggggcttgaggccgctgctttgtctcttcgtccagagccttatgtaagagcttttctcgggaaacaggaagtcctgctt

SEQ ID NO: 483177 - DNA, 120 bp, Artificial Sequence
  ENSG00000161956_0 (sequence is synthesized)
gtgacgtactaatcgtgcgccaccgctgccggtgggcccggggctcgcgggaggggaaggaggagggggggaggagtggcggcggcggcggtggcgctggtggcggcggtggcggaggtg

SEQ ID NO: 483178 - DNA, 120 bp, Artificial Sequence
  ENSG00000161956_1 (sequence is synthesized)
gaggtggaggtggaagctgaagctgaagcagagccagaggcggcgcggcggggtgctcggcggcgcggcacgcggcccagaagcgttggaatcctgaattgagacggctgcgcctaaaga

SEQ ID NO: 483179 - DNA, 120 bp, Artificial Sequence
  ENSG00000161956_2 (sequence is synthesized)
cagcaggagtggcggggccgccgccgtcgccggagagatgagccgggaagcttgaggccggagacgcccgccttcgggcccgtccgcccggcttccccgctcccgggtactggaagatga

SEQ ID NO: 483180 - DNA, 120 bp, Artificial Sequence
  ENSG00000161956_3 (sequence is synthesized)
aagagactatacaagggaccgggtcctgggggcctgagcctcctggacccggcatacccccagcttactcaagtcccaggcgggagcgtcttcgttggcccccacctcccaaaccccgac

SEQ ID NO: 483181 - DNA, 120 bp, Artificial Sequence
  ENSG00000161956_4 (sequence is synthesized)
tcaagtcaggtggagggtttgggccagatcctgggtcagggaccacagtgccagccagacgcctccctgtcccccgaccctcttttgatgcctcagcaagtgaagaggaggaagaagagg

SEQ ID NO: 483182 - DNA, 120 bp, Artificial Sequence
  ENSG00000161956_5 (sequence is synthesized)
aggaggaggaggatgaagatgaagaggaggaagtggcagcttggaggctgcccccaagatggagtcagctgggaacctcccagcggccccgcccttcccgccccactcatcgaaaaacct

SEQ ID NO: 483183 - DNA, 120 bp, Artificial Sequence
  ENSG00000161956_6 (sequence is synthesized)
gctcacagcgccgccgccgagccatgagagccttccggatgctgctctactcaaaaagcacctcgctgacattccactggaagctttgggggcgccaccggggccggcggcggggcctcg

SEQ ID NO: 483184 - DNA, 120 bp, Artificial Sequence
  ENSG00000161956_7 (sequence is synthesized)
cacaccccaagaaccatctttcaccccagcaagggggtgcgacgccacaggtgccatccccctgttgtcgttttgactccccccgggggccacctccaccccggctgggtctgctaggtg

SEQ ID NO: 483185 - DNA, 120 bp, Artificial Sequence
  ENSG00000161956_8 (sequence is synthesized)
ctctcatggctgaggatggggtgagagggtctccaccagtgccctctgggccccccatggaggaagatggactcaggtggactccaaagtctcctctggaccctgactcgggcctccttt

SEQ ID NO: 483186 - DNA, 120 bp, Artificial Sequence
  ENSG00000161956_9 (sequence is synthesized)
catgtactctgcccaacggttttgggggacaatctgggccagaaggggagcgcagcttggcaccccctgatgccagcatcctcatcagcaatgtgtgcagcatcggggaccatgtggccc

SEQ ID NO: 483187 - DNA, 120 bp, Artificial Sequence
  ENSG00000161956_10 (sequence is synthesized)
aggcctggggagaaagccggccagcacagccccctgcgagaggagcatgtgacctgcgtacagagcatcttggacgaattccttcaaacgtatggcagcctcatacccctcagcactgat

SEQ ID NO: 483188 - DNA, 120 bp, Artificial Sequence
  ENSG00000161956_11 (sequence is synthesized)
gaggtagtagagaagctggaggacattttccagcaggagttttccaccccttccaggaagggcctggtgttgcagctgatccagtcttaccagcggatgccaggcaatgccatggtgagg

SEQ ID NO: 483189 - DNA, 120 bp, Artificial Sequence
  ENSG00000161956_12 (sequence is synthesized)
ggcttccgagtggcttataagcggcacgtgctgaccatggatgacttggggaccttgtatggacagaactggctcaatgaccaggtgatgaacatgtatggagacctggtcatggacaca

SEQ ID NO: 483190 - DNA, 120 bp, Artificial Sequence
  ENSG00000161956_13 (sequence is synthesized)
gtccctgaaaaggtgcatttcttcaatagtttcttctatgataaactccgtaccaagggttatgatggggtgaaaaggtggaccaaaaacgtggacatcttcaataaggagctactgcta

SEQ ID NO: 483191 - DNA, 120 bp, Artificial Sequence
  ENSG00000161956_14 (sequence is synthesized)
atccccatccacctggaggtgcattggtccctcatctctgttgatgtgaggcgacgcaccatcacctattttgactcgcagcgtaccctaaaccgccgctgccctaagcatattgccaag

SEQ ID NO: 483192 - DNA, 120 bp, Artificial Sequence
  ENSG00000161956_15 (sequence is synthesized)
tatctacaggcagaggcggtaaagaaagaccgactggatttccaccagggctggaaaggttacttcaaaatgaatgtggccaggcagaataatgacagtgactgtggtgcttttgtgttg

SEQ ID NO: 483193 - DNA, 120 bp, Artificial Sequence
  ENSG00000161956_16 (sequence is synthesized)
cagtactgcaagcatctggccctgtctcagccattcagcttcacccagcaggacatgcccaaacttcgtcggcagatctacaaggagctgtgtcactgcaaactcactgtgtgagcctcg

SEQ ID NO: 483194 - DNA, 120 bp, Artificial Sequence
  ENSG00000161956_17 (sequence is synthesized)
taccccagaccccaagcccataaatgggaagggagacatgggagtcccttcccaagaaactccagttcctttcctctcttgcctcttcccactcacttccctttggtttttcatatttaa

SEQ ID NO: 483195 - DNA, 120 bp, Artificial Sequence
  ENSG00000161956_18 (sequence is synthesized)
atgtttcaatttctgtatttttttttctttgagagaatacttgttgatttctgatgtgcagggggtggctacagaaaagcccctttcttcctctgtttgcaggggagtgtggccctgtgg

SEQ ID NO: 483196 - DNA, 120 bp, Artificial Sequence
  ENSG00000161956_19 (sequence is synthesized)
cctgggtggagcagtcatcctcccccttccccgtgcagggagcaggaaatcagtgctgggggtggtgggcggacaataggatcactgcctgccagatcttcaaacttttatatatatata

SEQ ID NO: 483197 - DNA, 80 bp, Artificial Sequence
  ENSG00000161956_20 (sequence is synthesized)
tatatatatatatatatataaaaatatataaatgccacggtcctgctctggtcaataaaggatcctttgttgatacgtaa

SEQ ID NO: 483198 - DNA, 120 bp, Artificial Sequence
  ENSG00000161956_21 (sequence is synthesized)
gttttcatttctaaatgctaatcctttttctttcttcctgtctatgagtaggaactctctctccatccctgtagaatctcttggacatgtttatctcatgcttatggggtccccatttct

SEQ ID NO: 483199 - DNA, 120 bp, Artificial Sequence
  ENSG00000161956_22 (sequence is synthesized)
tggagtgggattgacattggtggattctgcttcagtgtatccttcttgcggtcttatttgcatgcatgagtcaactgtgtgcatcccattgtgctttccccaggccagtctctcatgccc

SEQ ID NO: 483200 - DNA, 120 bp, Artificial Sequence
  ENSG00000161956_23 (sequence is synthesized)
ttccaccccttccaggtgaggcttgaaagccctccttgaaagaagggctggggccttggggatgtggagagaatactgctgccttttcttccatagggctgtagttggggaggaggaagc

SEQ ID NO: 483201 - DNA, 120 bp, Artificial Sequence
  ENSG00000161956_24 (sequence is synthesized)
ctctgcaggcaggtgccaaatccttggaagctgatgggagagtctttacctgggaccctgaaatgttctacctgagtagtcatgtttatctttctggggagtgggcctttcgcaggtcct

SEQ ID NO: 483202 - DNA, 120 bp, Artificial Sequence
  ENSG00000161956_25 (sequence is synthesized)
cagaaggacccatcatgagccagaaaaaagggagtcagttagaatttgtattccagggagtagtaggtatttctgtgtgccccagctgcatcatcttttgtgtgactccacccttggcct

SEQ ID NO: 483203 - DNA, 120 bp, Artificial Sequence
  ENSG00000161956_26 (sequence is synthesized)
gaggaacttctgcagttttaagcagctttttaagctcctttcatctctttcattttacacagagagggtctctgtttcagggagagaggtggtagtggtagtgtattaatttcaaatccg

SEQ ID NO: 483204 - DNA, 120 bp, Artificial Sequence
  ENSG00000161956_27 (sequence is synthesized)
taatcttgggctctggatttatcagttgttttcctttctgccagtatttagtgtttttcgctatggccagccccaaggattgggatgggttcctattgtaactattgtaaaacaagattt

SEQ ID NO: 483205 - DNA, 120 bp, Artificial Sequence
  ENSG00000161958_0 (sequence is synthesized)
gagtcggggcctgagcgtcaagagcatgccctagtgagcgggctcctctgggggagcccagcgcgctccgggcgcctgccggtttgggggtgtctcctcccggggcgctatggcggcgct

SEQ ID NO: 483206 - DNA, 120 bp, Artificial Sequence
  ENSG00000161958_1 (sequence is synthesized)
ggccagtagcctgatccggcagaagcgggaggtccgcgagcccgggggcagccggccggtgtcggcgcagcggcgcgtgtgtccccgcggcaccaagtccctttgccagaagcagctcct

SEQ ID NO: 483207 - DNA, 120 bp, Artificial Sequence
  ENSG00000161958_2 (sequence is synthesized)
catcctgctgtccaaggtgcgactgtgcggggggcggcccgcgcggccggaccgcggcccggagcctcagctcaaaggcatcgtcaccaaactgttctgccgccagggtttctacctcca

SEQ ID NO: 483208 - DNA, 120 bp, Artificial Sequence
  ENSG00000161958_3 (sequence is synthesized)
ggcgaatcccgacggaagcatccagggcaccccagaggataccagctccttcacccacttcaacctgatccctgtgggcctccgtgtggtcaccatccagagcgccaagctgggtcacta

SEQ ID NO: 483209 - DNA, 120 bp, Artificial Sequence
  ENSG00000161958_4 (sequence is synthesized)
catggccatgaatgctgagggactgctctacagttcgccgcatttcacagctgagtgtcgctttaaggagtgtgtctttgagaattactacgtcctgtacgcctctgctctctaccgcca

SEQ ID NO: 483210 - DNA, 120 bp, Artificial Sequence
  ENSG00000161958_5 (sequence is synthesized)
gcgtcgttctggccgggcctggtacctcggcctggacaaggagggccaggtcatgaagggaaaccgagttaagaagaccaaggcagctgcccactttctgcccaagctcctggaggtggc

SEQ ID NO: 483211 - DNA, 120 bp, Artificial Sequence
  ENSG00000161958_6 (sequence is synthesized)
catgtaccaggagccttctctccacagtgtccccgaggcctccccttccagtccccctgccccctgaaatgtagtccctggactggaggttccctgcactcccagtgagccagccaccac

SEQ ID NO: 483212 - DNA, 120 bp, Artificial Sequence
  ENSG00000161958_7 (sequence is synthesized)
cacaacctgtctcccagtcctgctctcacccctgctgccacacacatgccctgagcagccaggtcccactaggtgctctaccctgagggagcctaggggctgactgtgacttccgaggct

SEQ ID NO: 483213 - DNA, 120 bp, Artificial Sequence
  ENSG00000161958_8 (sequence is synthesized)
gctgagacccttagatctttgggcctaggagggagtcagagagggggatgtctgaagatggtcctggctgatcacttctttctttccacactcacacaacgccatgccttttcctgagat

SEQ ID NO: 483214 - DNA, 120 bp, Artificial Sequence
  ENSG00000161958_9 (sequence is synthesized)
ggcgctgggagttcccacatggacagccagggcataaacacttcccaccccggctcagccagttcctggagtcctgtgccccttttcattgccactgagccatttctagattcactggag

SEQ ID NO: 483215 - DNA, 120 bp, Artificial Sequence
  ENSG00000161958_10 (sequence is synthesized)
tctggaacactggacaccctcgccagggccacttctgcactagggctctgtgctggaacccaggcatgctgccagccttttctctggatctgtcaggcctctgtcattgactcagatgga

SEQ ID NO: 483216 - DNA, 120 bp, Artificial Sequence
  ENSG00000161958_11 (sequence is synthesized)
cccctggtttccaagtagaaagaggctagatttgggccttgtctagctgttggctttggcctgaaccggaaccagtctcagatgaccacgggtttaaccttcttatcccagagacaccca

SEQ ID NO: 483217 - DNA, 120 bp, Artificial Sequence
  ENSG00000161958_12 (sequence is synthesized)
attctagagctttatggagccgtacttccccctgaatcctagctctaggacatagatcatgactctcagcccttttacccaggatggagctggggcctgtatagccatattattgttcta

SEQ ID NO: 483218 - DNA, 120 bp, Artificial Sequence
  ENSG00000161958_13 (sequence is synthesized)
agtaagttctagccccaccctcccgccttcttgagtgatacctattacggatgagttctggaaaagacccagctatgattcataaaaacacttctggatgaatcaagaaccatttcttgt

SEQ ID NO: 483219 - DNA, 120 bp, Artificial Sequence
  ENSG00000161958_14 (sequence is synthesized)
ttttcctagataattctctaaaaatatgattcttccatatagaatgctaagcttatttttacatgcagtttctagctccttcaacccagctgaggtcgtgccagggagacagagtctgga

SEQ ID NO: 483220 - DNA, 120 bp, Artificial Sequence
  ENSG00000161958_15 (sequence is synthesized)
gaagggcagaggaattttggaaggatccctggctcatagtagggaagctgggatgggggaggggtcaaaattatggcatgactgaacctgcatctgtgttgggtggacatgaatacttag

SEQ ID NO: 483221 - DNA, 120 bp, Artificial Sequence
  ENSG00000161958_16 (sequence is synthesized)
ctacctcagcaggaattccttccaggtcccctttaaagctgaggtccttagagtaatatgtccttaataaaaaggacaaatggatacagccttgaccctcccagtgaggagaccccaatt

SEQ ID NO: 483222 - DNA, 120 bp, Artificial Sequence
  ENSG00000161958_17 (sequence is synthesized)
cagcaataagtctcacccttctcccctacaggtcaggccaagaagggtgaaggcctcttgcactccagacctcatacgccccaacagcttctaattggatagaacttgctttaccttaca

SEQ ID NO: 483223 - DNA, 120 bp, Artificial Sequence
  ENSG00000161958_18 (sequence is synthesized)
gctcacaacctcagctgggttttaggtacccaaaaagggcctgtctagattttttcagaaaaacgtggagtgctaggggcagcctggaaaagatggggaacctgctagtgaactaggagg

SEQ ID NO: 483224 - DNA, 120 bp, Artificial Sequence
  ENSG00000161958_19 (sequence is synthesized)
gagacttccatagcctcagacttggatagggtaggctgagggggccctaagggagggactaaggctccaaggcaggtcacttttccttaggctgttctacttctggcttgttgcaagagg

SEQ ID NO: 483225 - DNA, 120 bp, Artificial Sequence
  ENSG00000161958_20 (sequence is synthesized)
agtagatgccccctcacccacacaaaccccactcagtctccacccaactcctggcactgctcccaggggatcgggtctccactccagctttctcaattaaagacgatttatacaactgaa

SEQ ID NO: 483226 - DNA, 120 bp, Artificial Sequence
  ENSG00000161958_21 (sequence is synthesized)
aactgctgtcgccgccgccgccgccgcctcagcttcccacagccgctgccgctgccgccgctctgcctggtccagccaccggcccagtgctctgacttcgccggaccggggagctctgca

SEQ ID NO: 483227 - DNA, 120 bp, Artificial Sequence
  ENSG00000161958_22 (sequence is synthesized)
gagacaccctcactccttcccgagggtccgggacgcctagccgggcgtggggggaagctccgtttgcgggggacagggagggaggagcctggagccgaagccagcgccacccgtcgccgg

SEQ ID NO: 483228 - DNA, 120 bp, Artificial Sequence
  ENSG00000161958_23 (sequence is synthesized)
ctctgaagaatagggcccggctgaggggctccccgaaagtggaagggggtgggccaggacgacaaagtccctgccagactgtgcctcagtttcccttctcttttgtccataacccggagt

SEQ ID NO: 483229 - DNA, 120 bp, Artificial Sequence
  ENSG00000161958_24 (sequence is synthesized)
ctccttattttcgaggtcaaggggaaggcttgaggggctgcctggcgccccgaaagcctcgtagttcctgctcgtccccccttcccaacacagcagtccccacccccatcgtcctccgcc

SEQ ID NO: 483230 - DNA, 120 bp, Artificial Sequence
  ENSG00000161958_25 (sequence is synthesized)
tacgtgccggttctcgcgattctttcaatctggagcggaggggcccgggggtttccagatgcctgggtcaccccaaggatttctgcagctccagccgcacgcccccccccagcccccgcc

SEQ ID NO: 483231 - DNA, 120 bp, Artificial Sequence
  ENSG00000161958_26 (sequence is synthesized)
tgccccggttctcccgctcctccacgcctgggctcggttcctcctggtcgagctctgctggctccgagccaatctccccagctctccctcgggtgtccttgcagctacctcgccagccag

SEQ ID NO: 483232 - DNA, 120 bp, Artificial Sequence
  ENSG00000161958_27 (sequence is synthesized)
ccctctatgcgccctcctcctgtgacctgcgcttcaagaacggagctgggcacccctcccataacccccgcgccactccgaaatcgggtcccgtaggctcaggggaccctacgctggcag

SEQ ID NO: 483233 - DNA, 120 bp, Artificial Sequence
  ENSG00000161958_28 (sequence is synthesized)
gaactcagacacagttcacggctagagatgggcgccgactcgggggtcgtaccacctacaaggggggacagggaagtcggcagagagcaagcgatgggggaggagagttgtgagagttag

SEQ ID NO: 483234 - DNA, 120 bp, Artificial Sequence
  ENSG00000161958_29 (sequence is synthesized)
aattggtccccgtccatgtacgacagtcagggagtccctctggccctgctcccgcccgctcccagctcccctaagggtagccacctcgcgccctcctccccgcgccaccggctgcccata

SEQ ID NO: 483235 - DNA, 120 bp, Artificial Sequence
  ENSG00000161958_30 (sequence is synthesized)
gtggtacaatccgcagcccaccctctgagtaggaccgggcccccacgtgactcagcctgcctctccatctcctcagctcccaccccccatatccttggtaaggtcccccttaccccaggc

SEQ ID NO: 483236 - DNA, 120 bp, Artificial Sequence
  ENSG00000161958_31 (sequence is synthesized)
gagttacctggccgaaggggagaggctgagcctcagggagaactgggcccccgggagccagcggactgacagacagacagacagacagacagatgggtcagtgtcagacaggccggcgct

SEQ ID NO: 483237 - DNA, 120 bp, Artificial Sequence
  ENSG00000161958_32 (sequence is synthesized)
actcctgagggagagcccctaccctgtggtcaatttgctgctgccaagatcccccaccttcgcaaacacgctgccccttcagtacccctgctggtctccctctgtccctgccttttgata

SEQ ID NO: 483238 - DNA, 120 bp, Artificial Sequence
  ENSG00000161958_33 (sequence is synthesized)
tatctctcccctccctcctcccccactccttcccccttctggttgagctgtagggtaggaattaagccatttaaataaatttcaataaattacactgaaagctcctggttataggaaaca

SEQ ID NO: 483239 - DNA, 120 bp, Artificial Sequence
  ENSG00000161958_34 (sequence is synthesized)
gaagggacccacaccagctttcccaggagtgaaagagaggtgggagagagcgtgcttggaggataagagagctggggccctgggaccctcttccttcctttcattctcctttcttccctc

SEQ ID NO: 483240 - DNA, 120 bp, Artificial Sequence
  ENSG00000161958_35 (sequence is synthesized)
taatcctgccaagtgtaggaatgtttctgggaacggagatgtcattttcaaagatgaatgtctctctctccagagcctcagctcaaaggcatcgtcaccaaactgttctgccgccagggt

SEQ ID NO: 483241 - DNA, 120 bp, Artificial Sequence
  ENSG00000161958_36 (sequence is synthesized)
gggactgctctacagttcggtgagacaatgaggctgagtggccgggaaatactggggactccccttcctcaatttgtcccttgagggaatgacaaccttcctcaactacagacattttgc

SEQ ID NO: 483242 - DNA, 120 bp, Artificial Sequence
  ENSG00000161958_37 (sequence is synthesized)
tctccagtccccactccttgcacacccccaaaacagccccaggttctttgaatgtccaactctttctgccttttagggcccctacttcttatcccacctcctccagattttgtcattact

SEQ ID NO: 483243 - DNA, 120 bp, Artificial Sequence
  ENSG00000161958_38 (sequence is synthesized)
cacttccctagagtcatccaggataggggatagtgagagactgggagtacagtggagagaaggaatcttattgcaagacccctaaaagtctagttcttttttttttttttaaatagtgac

SEQ ID NO: 483244 - DNA, 120 bp, Artificial Sequence
  ENSG00000161958_39 (sequence is synthesized)
gttcttagccctcagccctcttccttgtcctccctttgctcccaggtcctacatggactcagaagttgtcctccccctcccccaaaaaggatttgtgctttccatgagctcctttctgcc

SEQ ID NO: 483245 - DNA, 120 bp, Artificial Sequence
  ENSG00000161958_40 (sequence is synthesized)
ctctgagtaggaccgggcccccacgtgactcagcctgcctctccatctcctcagctcccaccccccatatccttgatgaatgtctctctctccagagcctcagctcaaaggcatcgtcac

SEQ ID NO: 483246 - DNA, 120 bp, Artificial Sequence
  ENSG00000161958_41 (sequence is synthesized)
tctgagtaggaccgggcccccacgtgactcagcctgcctctccatctcctcagctcccaccccccatatccttgagcctcagctcaaaggcatcgtcaccaaactgttctgccgccaggg

SEQ ID NO: 483247 - DNA, 120 bp, Artificial Sequence
  ENSG00000161960_0 (sequence is synthesized)
cctagtttctaaggatcatgtctgcgagccaggattcccgatccagagacaatggccccgatgggatggagcccgaaggcgtcatcgagagtaactggaatgagattgttgacagctttg

SEQ ID NO: 483248 - DNA, 120 bp, Artificial Sequence
  ENSG00000161960_1 (sequence is synthesized)
atgacatgaacctctcggagtcccttctccgtggcatctacgcgtatggttttgagaagccctctgccatccagcagcgagccattctaccttgtatcaagggttatgatgtgattgctc

SEQ ID NO: 483249 - DNA, 120 bp, Artificial Sequence
  ENSG00000161960_2 (sequence is synthesized)
aagcccaatctgggactgggaaaacggccacatttgccatatcgattctgcagcagattgaattagatctaaaagccacccaggccttggtcctagcacccactcgagaattggctcagc

SEQ ID NO: 483250 - DNA, 120 bp, Artificial Sequence
  ENSG00000161960_3 (sequence is synthesized)
agatacagaaggtggtcatggcactaggagactacatgggcgcctcctgtcacgcctgtatcgggggcaccaacgtgcgtgctgaggtgcagaaactgcagatggaagctccccacatca

SEQ ID NO: 483251 - DNA, 120 bp, Artificial Sequence
  ENSG00000161960_4 (sequence is synthesized)
tcgtgggtacccctggccgtgtgtttgatatgcttaaccggagatacctgtcccccaaatacatcaagatgtttgtactggatgaagctgacgaaatgttaagccgtggattcaaggacc

SEQ ID NO: 483252 - DNA, 120 bp, Artificial Sequence
  ENSG00000161960_5 (sequence is synthesized)
agatctatgacatattccaaaagctcaacagcaacacccaggtagttttgctgtcagccacaatgccttctgatgtgcttgaggtgaccaagaagttcatgagggaccccattcggattc

SEQ ID NO: 483253 - DNA, 120 bp, Artificial Sequence
  ENSG00000161960_6 (sequence is synthesized)
ttgtcaagaaggaagagttgaccctggagggtatccgccagttctacatcaacgtggaacgagaggagtggaagctggacacactatgtgacttgtatgaaaccctgaccatcacccagg

SEQ ID NO: 483254 - DNA, 120 bp, Artificial Sequence
  ENSG00000161960_7 (sequence is synthesized)
ccatgcatggagatatggaccaaaaggaacgagacgtgattatgagggagtttcgttctggctctagcagagttttgattaccactgacctgctggccagaggcattgatgtgcagcagg

SEQ ID NO: 483255 - DNA, 120 bp, Artificial Sequence
  ENSG00000161960_8 (sequence is synthesized)
tttctttagtcatcaactatgaccttcccaccaacagggaaaactatatccacagaatcggtcgaggtggacggtttggccgtaaaggtgtggctattaacatggtgacagaagaagaca

SEQ ID NO: 483256 - DNA, 120 bp, Artificial Sequence
  ENSG00000161960_9 (sequence is synthesized)
agaggactcttcgagacattgagaccttctacaacacctccattgaggaaatgcccctcaatgttgctgacctcatctgaggggctgtcctgccacccagccccagccagggctcaatct

SEQ ID NO: 483257 - DNA, 120 bp, Artificial Sequence
  ENSG00000161960_10 (sequence is synthesized)
ctgggggctgaggagcagcaggaggggggagggaagggagccaagggatggacatcttgtcattttttttctttgaataaatgtcactttttgaggcaaaagaaggaaccgtgaacattt

SEQ ID NO: 483258 - DNA, 120 bp, Artificial Sequence
  ENSG00000161960_11 (sequence is synthesized)
tagacacccttttctttggggtaggctcttgccccaggcgccggctcttctcccaaaaaaaaaaaaaaaacactaatccatttccctaacctagtaacctccagatcccagaggctctcc

SEQ ID NO: 483259 - DNA, 120 bp, Artificial Sequence
  ENSG00000161960_12 (sequence is synthesized)
tcacctcagctgagctcctttgaaagtgattcaagggactatgtcactcagcctcatttgctggaccaaatctggagggagaacccctaaaacccctaagtgaggttgcccagggggttg

SEQ ID NO: 483260 - DNA, 120 bp, Artificial Sequence
  ENSG00000161960_13 (sequence is synthesized)
tccccaggtggggggaagcaggggagagaaaatggtagccatttttacattgttttgtatagtatttattgattcaggaaacaaacacaaaattctgaataaaatgacttggaaactgcc

SEQ ID NO: 483261 - DNA, 120 bp, Artificial Sequence
  ENSG00000161960_14 (sequence is synthesized)
ctagtttctaaggatcatgtctgcgagccaggattcccgatccagagacaatggccccgatgggatggagcccgaaggcgtcatcgaggtgagactggagaaatggaattctgtcctccc

SEQ ID NO: 483262 - DNA, 120 bp, Artificial Sequence
  ENSG00000161960_15 (sequence is synthesized)
ccattacaactttcagccgtatagagttagagtggcctcttgattgatttcccagatcatctagaagcagctggtttccctaaagggaggagggttgtaagctctgaggcttttgttagt

SEQ ID NO: 483263 - DNA, 120 bp, Artificial Sequence
  ENSG00000161960_16 (sequence is synthesized)
tggtgtgtttgcccgctgccagcctgttgtgggtctgcccgtcagaagtgtcctacttgaagccagggttcctggaacccaggtgcctacctggtctgctgcatatttgttttctcttcc

SEQ ID NO: 483264 - DNA, 120 bp, Artificial Sequence
  ENSG00000161960_17 (sequence is synthesized)
agaagggaggatccaaggtgattccctctccaaggggacatcagtgcctctcaggaaagtagcagcttggaatagaatctggcatgcctaaggcctttggggaactgggatgcttatttc

SEQ ID NO: 483265 - DNA, 120 bp, Artificial Sequence
  ENSG00000161960_18 (sequence is synthesized)
ctctgccttccttggctgcccacatggatgcctaagtgtcttccctccgggatagagtgtcctccgtgcacatgctgaagagttgtctttcttgacgtaggccagaggcattgatgtgca

SEQ ID NO: 483266 - DNA, 120 bp, Artificial Sequence
  ENSG00000161960_19 (sequence is synthesized)
aggtttctttagtcatcaactatgaccttcccaccaacagggaaaactatatccacaggtaagcgtagatctggaacactcccctaccccttcacacctggccctccctgggcttaaagc

SEQ ID NO: 483267 - DNA, 120 bp, Artificial Sequence
  ENSG00000161960_20 (sequence is synthesized)
gaccagagaagtcttctctgatcaccaccttgggaggaagacatgggtgccctaacactctcgagacctgctgggttaattaaaagctatttcttacccaaacgtaaccattgcttcctc

SEQ ID NO: 483268 - DNA, 120 bp, Artificial Sequence
  ENSG00000161960_21 (sequence is synthesized)
cacccatttcctgagtcaaatgggaaagctgttgggtgaagcctggctggctgggcaagtttgactgtgttctgaataagcaccttcactatgggctaagagatcccttggtgtgggggt

SEQ ID NO: 483269 - DNA, 120 bp, Artificial Sequence
  ENSG00000161960_22 (sequence is synthesized)
gatcttacagtagtcagagcagatggacagtccttttcacccttgcttaatagccagagctgtttcatgcctggggcacacacaattctaatgctggactttttcctgggtcatgctgca

SEQ ID NO: 483270 - DNA, 120 bp, Artificial Sequence
  ENSG00000161960_23 (sequence is synthesized)
aggggatgtcctaccctccgatctgggaggtgaagggcgggacttccagcgcgctggtgctgcggtgggaggtgcacgcgcttgggctttaagcggctgggtcgggcccacgtggacccg

SEQ ID NO: 483271 - DNA, 120 bp, Artificial Sequence
  ENSG00000161960_24 (sequence is synthesized)
gcggcaagcaccacctctgggcaccgtgagcgcggcggcacgcctgccggcctgtcttcagaaagggtcacccccttatgtcgggggtggcctggcctgagccgctgcctgcatggggca

SEQ ID NO: 483272 - DNA, 120 bp, Artificial Sequence
  ENSG00000161960_25 (sequence is synthesized)
tcgtgggtacccctggccgtgtgtttgatatgcttaaccggagatacctgtgtgagtaattcggttctccaatcccctgggtcactttgctcttgtgcacgctttccagtctttcagcgt

SEQ ID NO: 483273 - DNA, 120 bp, Artificial Sequence
  ENSG00000161960_26 (sequence is synthesized)
ctagtttctaaggatcatgtctgcgagccaggattcccggactgagcctaaccccgaggagcggccgcgtgaggcaccaggagcccacccggcgccgggcgggcgggtccattttgccgc

SEQ ID NO: 483274 - DNA, 120 bp, Artificial Sequence
  ENSG00000161960_27 (sequence is synthesized)
agttttgattaccactgacctgctgtgtcttccctccgggatagagtgtcctccgtgcacatgctgaagagttgtctttcttgacgtaggccagaggcattgatgtgcagcaggtttctt

SEQ ID NO: 483275 - DNA, 120 bp, Artificial Sequence
  ENSG00000161960_28 (sequence is synthesized)
ccgtgcccatgcctggttcatgccttggacacataggtttcctttaaagaggtggtattgtagccagcttatatttgcatctacagccatgtttctagtccagcttggtgtgcaatacta

SEQ ID NO: 483276 - DNA, 120 bp, Artificial Sequence
  ENSG00000161960_29 (sequence is synthesized)
gatgagttaataactggtccttgtttctgatctggttcccattgtgtaactgtgttgattgggaaggtagtttgtgagccatgaaatgcttggttcattggttgcttattgacctcatta

SEQ ID NO: 483277 - DNA, 120 bp, Artificial Sequence
  ENSG00000161960_30 (sequence is synthesized)
ctagtttctaaggatcatgtctgcgagccaggattcccgatccagagacaatggccccgatgggatggagcccgaaggcgtcatcgagctttaatttctttgcatcccctagagtaactg

SEQ ID NO: 483278 - DNA, 120 bp, Artificial Sequence
  ENSG00000161960_31 (sequence is synthesized)
atgttctgtggcaggggcagtgattattctgggtgtggataatgtaagaagttacagcagagctccattctaaggcacttggctctcagttttctcagagtgaacatgcctcgtagcttg

SEQ ID NO: 483279 - DNA, 120 bp, Artificial Sequence
  ENSG00000161960_32 (sequence is synthesized)
cttgggtcctatggcaggagtgcaataggacatggatatgcatcacctgttctataaaactggttgctggctgggtgtggtggctcaactcgtataatcccaacactttgggaggccaag

SEQ ID NO: 483280 - DNA, 73 bp, Artificial Sequence
  ENSG00000161960_33 (sequence is synthesized)
aacatagtgaaaccccgtttatcccagctactcgggaagctcaggcaggagaatttaacccaggaggtggagg

SEQ ID NO: 483281 - DNA, 60 bp, Artificial Sequence
  ENSG00000161960_34 (sequence is synthesized)
agccaggcatggtggcgtgtgccttttatcccagctactcgggaagctcaggcaggagaa

SEQ ID NO: 483282 - DNA, 120 bp, Artificial Sequence
  ENSG00000161960_35 (sequence is synthesized)
ctcaacagcaacacccaggtgagggcagtcttgcttgaatagctaatgattcttgaaaaatagtaagtgccaggggaaccatatactggattcttgagcctttttatgcatctgcttcag

SEQ ID NO: 483283 - DNA, 120 bp, Artificial Sequence
  ENSG00000161960_36 (sequence is synthesized)
tgtgccgggggagggacggcgcgcggggttccggagcattctgacggtaccactcgcgagaggcgggggtgcctggtccttagatccagtcacttcgtcgcggctaaaacacgggtcggg

SEQ ID NO: 483284 - DNA, 120 bp, Artificial Sequence
  ENSG00000161960_37 (sequence is synthesized)
ccatgcgtgtcatctgagcctctggcttccctgccagtgcagccctggcagtgtcctacttcccagggctgttgtctgcctggcgggaaggtcctgggcaaaggatcagtctttgtactc

SEQ ID NO: 483285 - DNA, 120 bp, Artificial Sequence
  ENSG00000161960_38 (sequence is synthesized)
tgagagcagactacttggctcctctctgttttttatcagcgaagttggatatatctctcccacatttccctaatcatatgctatatattggctttttttttcttctctagcccccaaata

SEQ ID NO: 483286 - DNA, 120 bp, Artificial Sequence
  ENSG00000161960_39 (sequence is synthesized)
ggagggtatccgccagttctacatcaacgtggaacgagaggtggggcccagtgcaggaggcgggcctggtagtgagttgttgggtatagcccctgactgatttttgtcccccaacctcca

SEQ ID NO: 483287 - DNA, 120 bp, Artificial Sequence
  ENSG00000161970_0 (sequence is synthesized)
gcgggagcgggtaaggattcggcgggcaagcgggtgtaatcagcagccatccgttcttgggcatggtggcttccgaccgcggggaccccgagagtctcttgtcggccgagtagcagccag

SEQ ID NO: 483288 - DNA, 120 bp, Artificial Sequence
  ENSG00000161970_1 (sequence is synthesized)
gaaggagagactgggatggttttttatctgttgctttcttaaatcaagggccgccgggccggagatggatggagggaccggggatttgggaactcgaaaacgagctgagggaagggagcc

SEQ ID NO: 483289 - DNA, 120 bp, Artificial Sequence
  ENSG00000161970_2 (sequence is synthesized)
tgtggaaatagactggagtctgggtagtgtcgtttcctagagaatggtctcgaagtaacttctcgccaaaatgaagtttaatccctttgtgacttccgaccgaagcaagaatcgcaaaag

SEQ ID NO: 483290 - DNA, 120 bp, Artificial Sequence
  ENSG00000161970_3 (sequence is synthesized)
tcccctctttccaaagagctgagacagaagtacaacgtgcgatccatgcccatccgaaaggatgatgaagttcaggttgtacgtggacactataaaggtcagcaaattggcaaagtagtc

SEQ ID NO: 483291 - DNA, 120 bp, Artificial Sequence
  ENSG00000161970_4 (sequence is synthesized)
caggtttacaggaagaaatatgttatctacattgaacgggtgcagcgggaaaaggctaatggcacaactgtccacgtaggcattcaccccagcaaggtggttatcactaggctaaaactg

SEQ ID NO: 483292 - DNA, 120 bp, Artificial Sequence
  ENSG00000161970_5 (sequence is synthesized)
gacaaagaccgcaaaaagatcctcgaacggaaagccaaatctcgccaagtaggaaaggaaaagggcaaatacaaggaagaaaccattgagaagatgcaggaataaagtaatcttatatac

SEQ ID NO: 483293 - DNA, 120 bp, Artificial Sequence
  ENSG00000161970_6 (sequence is synthesized)
accggaagcagcgtgtagttctcttcccttttgcggccatcaccgaagcgggagcggagtctttttaactttttatttagccaaaatgaagtttaatccctttgtgacttccgaccgaag

SEQ ID NO: 483294 - DNA, 120 bp, Artificial Sequence
  ENSG00000161970_7 (sequence is synthesized)
tttgatgcaaaagtctttagtccgtaaacatatacagaaaacacccgaataaaacaaaaaataaaaagtttcgagcttcggttgataggcccttccgatcaaacagtttttgttgaagtt

SEQ ID NO: 483295 - DNA, 120 bp, Artificial Sequence
  ENSG00000161970_8 (sequence is synthesized)
gcacaacatgacactgcctatgatcattctagactatcaagataaaatcattgcggttatttgtttggaagctggatgagattttggtcatttaagagtctttttaactttttatttagc

SEQ ID NO: 483296 - DNA, 120 bp, Artificial Sequence
  ENSG00000161970_9 (sequence is synthesized)
gctcccaaagagtggcaagatgagttgagccagggaccaaaaaacagtaagtaagctgcttttcagtttttaattgtattatttggtgaaaatcttttttttttttttttttgagatgaa

SEQ ID NO: 483297 - DNA, 120 bp, Artificial Sequence
  ENSG00000161970_10 (sequence is synthesized)
tcaacttcttacaggttgccgaagtgggctcttttttttaaccttttaatataatgatagggtgaatggtgtatgcatgagtttgtttacttgatttacaaggttaatcttttattcaaa

SEQ ID NO: 483298 - DNA, 120 bp, Artificial Sequence
  ENSG00000161970_11 (sequence is synthesized)
tcttcccttttgcggccatcaccgaagcgggagcggcttagaagagagattgcattcctgagaaagatgcttctgagactcttgctcccaaagagtggcaagatgagttgagccagggac

SEQ ID NO: 483299 - DNA, 120 bp, Artificial Sequence
  ENSG00000161970_12 (sequence is synthesized)
tttgagaatgcttgagagaaggaaattatggcaattattgttgacatgattgtttacagagcaaggccatagaaatagtccttgattttacatgtgctggaaaaaaacattttaaagtaa

SEQ ID NO: 483300 - DNA, 120 bp, Artificial Sequence
  ENSG00000161970_13 (sequence is synthesized)
aattctaataccatttaaaatgtttctgacatcaaagtgttaacggtcattatgtttctgttagtttgtttttgagacagtcttgctctttcacccaggccggagtgcagtggcacaatc

SEQ ID NO: 483301 - DNA, 89 bp, Artificial Sequence
  ENSG00000161970_14 (sequence is synthesized)
ccaagtggtagctgtgactacatgcgtgcaccactacacccggctaatttttgtacttcttagtacaaagtttcaccatgttggccagg

SEQ ID NO: 483302 - DNA, 73 bp, Artificial Sequence
  ENSG00000161970_15 (sequence is synthesized)
gcctgtcccattatgtatattaggcaacgagtgaaaacgccatctcaaaaaaaaaaaaagaaaaaaaataaag

SEQ ID NO: 483303 - DNA, 120 bp, Artificial Sequence
  ENSG00000161970_16 (sequence is synthesized)
tagagaatggtctcgaagtaacttctcggtaaagtcttcacggaatttccagaccacacttgcccactgggaggcttttaggacccgagacgtgtgcaggcttttccaggttcggccaaa

SEQ ID NO: 483304 - DNA, 120 bp, Artificial Sequence
  ENSG00000161973_0 (sequence is synthesized)
gttgctaggtaaccacatctcccataactgccccagcacatcgtcctgagccgcccaacctgtctccagccaccttctgtggagtctcaaactccatcatctgtgggaccctgtaggccg

SEQ ID NO: 483305 - DNA, 120 bp, Artificial Sequence
  ENSG00000161973_1 (sequence is synthesized)
aagggagaaacaagagtgcagccaccacccctgagccacctgtggctctgctacccacaatttcactgtgaagagtcagctgcctgggccgtgaggtcactgccaccatgagtctgggca

SEQ ID NO: 483306 - DNA, 120 bp, Artificial Sequence
  ENSG00000161973_2 (sequence is synthesized)
tcatggaagaggaagacctggccgagtacttccggctgcagtatggggagcggctgctgcagatgctccagaaactccccaatgttgagggggcgtcggagtccccatccatctggctac

SEQ ID NO: 483307 - DNA, 120 bp, Artificial Sequence
  ENSG00000161973_3 (sequence is synthesized)
tggagaagaaaaaggagacagaaatcatgcatcaaactatggtgcagaagaagaagatgtttcagcgcagaatggaaaccctgaacctgcgctgggaggaactgggcgttaaggaagccc

SEQ ID NO: 483308 - DNA, 120 bp, Artificial Sequence
  ENSG00000161973_4 (sequence is synthesized)
aactgaaggctcacatccagaagtctgagcagttcatccaggagaacgaccagaaacggatccgcgccatgaagaaagccaacaaggagcgagaactcaagtgccagcacatgcaggagc

SEQ ID NO: 483309 - DNA, 120 bp, Artificial Sequence
  ENSG00000161973_5 (sequence is synthesized)
agcgccaagctgaaggactactacatcttcaacaagtacctagagaaggtggtggagaactccgagttcgaggagatccatgaggtgattgcacgctacaagacgctggtgagcatgcgc

SEQ ID NO: 483310 - DNA, 120 bp, Artificial Sequence
  ENSG00000161973_6 (sequence is synthesized)
cacgacctcatgcagtctgcgcaggaaggccaggagaagattgagcgcgccaaggcccggctggcgcgctacatggaggaaaaggatgatgagatcctgcagcaaaacaatgagctggca

SEQ ID NO: 483311 - DNA, 120 bp, Artificial Sequence
  ENSG00000161973_7 (sequence is synthesized)
aggctgcagatgcgctttgaccgtgcccgcagcaatgtcatcttctgggaatctcgctgggcgcacatccagaacaccgcagccaagaagaccctcctgcttggcaccattaagatggcc

SEQ ID NO: 483312 - DNA, 120 bp, Artificial Sequence
  ENSG00000161973_8 (sequence is synthesized)
acgctgaacctcttccagatcgtgagcaagcacctgaaggaggtgactgaggtggcactggaggacacccacaagcagctggacatgatccagcaatttatccaagaccggtcggacatc

SEQ ID NO: 483313 - DNA, 120 bp, Artificial Sequence
  ENSG00000161973_9 (sequence is synthesized)
tgggcagaggtgaaaaagaaggaacaacagcgagtccggatttaaggaggcagccttgttccagaatgtcctgagacagagatcgtgaaagaagaagtcgtgagcctgcggtccagtcag

SEQ ID NO: 483314 - DNA, 120 bp, Artificial Sequence
  ENSG00000161973_10 (sequence is synthesized)
tccagctcgggaccgatgcctgctgtgccttcctgctgagggacacctgcttattttcccccgtgggcctcactctatccctgaaaacagtgaatgttatatgaagtttgttctcaagtt

SEQ ID NO: 483315 - DNA, 120 bp, Artificial Sequence
  ENSG00000161973_11 (sequence is synthesized)
aacctcgcgcctcctcgcgactccacccctgccgccgctaagcacctcctttctttctctgctcttcttcaccaaggcccggcccctccctcaccctcacccacacctgaaccccaggga

SEQ ID NO: 483316 - DNA, 120 bp, Artificial Sequence
  ENSG00000161973_12 (sequence is synthesized)
ggccctaagagcagggcgcccgcacaaggccgctcctccacccgatgccccttctcagccacactcaccagaaactgcctctggccctgggctccatggcaaccagcatctaaccaggcc

SEQ ID NO: 483317 - DNA, 120 bp, Artificial Sequence
  ENSG00000161980_0 (sequence is synthesized)
ggagcctgcggagttcgagaccatgctgctgttctgccccggctgcgggaacgggctgatcgtggaggagggacaacgctgccaccgcttcgcctgcaacacgtgcccctacgtgcacaa

SEQ ID NO: 483318 - DNA, 120 bp, Artificial Sequence
  ENSG00000161980_1 (sequence is synthesized)
catcacccgcaaggtaacaaatcggaagtacccaaaactgaaagaagtggatgatgtgcttggtggagcagctgcctgggagaatgttgactctactgcagagtcgtgtcccaaatgcga

SEQ ID NO: 483319 - DNA, 120 bp, Artificial Sequence
  ENSG00000161980_2 (sequence is synthesized)
acatcctcgtgcttacttcatgcagcttcagacccgctctgcagatgagccgatgaccaccttctacaagtgctgcaatgctcagtgtggacaccgctggagggattagggccaggatgg

SEQ ID NO: 483320 - DNA, 120 bp, Artificial Sequence
  ENSG00000161980_3 (sequence is synthesized)
cccagctgccctagtgtgtgcttgccttgtccctcggggtagatgcttagctggcagtatgagttgtgtgtcctgagggtctttgctagtgtggtggaaagataaaccttttgaggtgaa

SEQ ID NO: 483321 - DNA, 120 bp, Artificial Sequence
  ENSG00000161980_4 (sequence is synthesized)
gagccagggggtcaggaaatatggcctatctgccaggcagggtggatgaagtcatgaatgtctgggagtttttctgtgtggggaggagacagagacccataactaaatatgctctgtgta

SEQ ID NO: 483322 - DNA, 120 bp, Artificial Sequence
  ENSG00000161980_5 (sequence is synthesized)
ccaatcaacactcttaaatatttgtactgtttgtaaaacttagtacatgtccctaaatatttaactgttacttgtaaacttgtgtaatttattatttattttaatcaaaattctgaatat

SEQ ID NO: 483323 - DNA, 120 bp, Artificial Sequence
  ENSG00000161980_6 (sequence is synthesized)
ttcatttaaatgaaagttggaatattgccttctcagtgttttaaatagcttaagaggtagaaagcaaaccccaaatcacagtgatcccagaatagactacatacttacatttgaacaggc

SEQ ID NO: 483324 - DNA, 120 bp, Artificial Sequence
  ENSG00000161980_7 (sequence is synthesized)
tacgaaaatgttaatcaccgggatttcaatttctttctttattcctattcttactcccttattcatttttttgaacctcccctgatttgcttcctcgggttgctttaaatgtataagata

SEQ ID NO: 483325 - DNA, 64 bp, Artificial Sequence
  ENSG00000161980_8 (sequence is synthesized)
gactacaggcatgcaccaccacacctggcaactcctgacctcagataatctgtctgcctcggcc

SEQ ID NO: 483326 - DNA, 68 bp, Artificial Sequence
  ENSG00000161980_9 (sequence is synthesized)
gtttctccatgttggtcgggctggtctccaactcctgacctcagataatctgcaccaatctttacatt

SEQ ID NO: 483327 - DNA, 120 bp, Artificial Sequence
  ENSG00000161980_10 (sequence is synthesized)
gttagaatatgttggtgctacgtcagtcttaatgtttgcatgctactccagtttgtactgtgttgtgggagtttggagtttgaaactacgggaagagtgaactctttgtttttttttttt

SEQ ID NO: 483328 - DNA, 120 bp, Artificial Sequence
  ENSG00000161981_0 (sequence is synthesized)
cagttcctgcgcgtgcgcgcttggcctccctagtgcgggctggcagtgcgggcagagcccggctgagaggggcggccctggaggagacggaggccgcgggtgggcccgaggcgcaagagg

SEQ ID NO: 483329 - DNA, 120 bp, Artificial Sequence
  ENSG00000161981_1 (sequence is synthesized)
aagatgaggacgaagaagaggcgctgccgcactccgaggccatggacgtgttccaggagggtctggctatggtggtgcaggacccgctgctctgcgatctgccgatccaggttactctgg

SEQ ID NO: 483330 - DNA, 120 bp, Artificial Sequence
  ENSG00000161981_2 (sequence is synthesized)
aagaagtcaactcccaaatagccctagaatacggccaggcaatgacggtccgagtgtgcaagatggatggagaagtaatgcccgtggttgtagtgcagagtgccacagtcctggacctga

SEQ ID NO: 483331 - DNA, 120 bp, Artificial Sequence
  ENSG00000161981_3 (sequence is synthesized)
agaaggccatccagagatacgtgcagctcaagcaggagcgtgaagggggcattcagcacatcagctggtcctacgtgtggaggacgtaccatctgacctctgcaggagagaaactcacgg

SEQ ID NO: 483332 - DNA, 120 bp, Artificial Sequence
  ENSG00000161981_4 (sequence is synthesized)
agaaagaagctccgagactacggcatccggaatcgagacgaggtttccttcatcaaaaagctgaggcaaaagtgagcctccagacaggacaaccctcttcatcactggtggctgagcttt

SEQ ID NO: 483333 - DNA, 120 bp, Artificial Sequence
  ENSG00000161981_5 (sequence is synthesized)
ttcccagcaggaatgggtcctcgaatcatcgtgcctctttcacagaaaggacgttgtggtggcctcaccccaggcatgcccaacagtaactgtcagcataaacctgggggccctcaggac

SEQ ID NO: 483334 - DNA, 120 bp, Artificial Sequence
  ENSG00000161981_6 (sequence is synthesized)
taggacagggtgagccagtgctccctcctttcatgtacttggcctgagactgacctctccctaggtccaaatgccctagtcacatggcagacccacggcctggcccactgtataaaataa

SEQ ID NO: 483335 - DNA, 120 bp, Artificial Sequence
  ENSG00000161981_7 (sequence is synthesized)
acctgtttgcttcttagtttgaaaagtagaaagccacagtaacctgggtagcaaagactgagattgccccatcacagaggtgagttaaggggagagaattggtacaggcgagtcctatag

SEQ ID NO: 483336 - DNA, 120 bp, Artificial Sequence
  ENSG00000161981_8 (sequence is synthesized)
tccaagatggcgccacaccaccaaagccttgaggccacaccactccccaaaccacacaactgtgttaccatgatctccacagcaaggaggaaataaaagcagagcggctttagggtttgc

SEQ ID NO: 483337 - DNA, 120 bp, Artificial Sequence
  ENSG00000161981_9 (sequence is synthesized)
gcacgatgagagatcgtccaggaggcggtgttgatgcggcaaagggcaacaggaagggcattaggacttgaaatcggagacgcacgcaggggagggagtcagtgtcggaacctggtaggc

SEQ ID NO: 483338 - DNA, 120 bp, Artificial Sequence
  ENSG00000161981_10 (sequence is synthesized)
cctgggagaactccggcttttcgtctgcgtgagctggagaagagccgaaggtttctgcgcacagcacggacctgcgtgcctcagctttaaggaaatcaccgtggccgccgctgtgaacgc

SEQ ID NO: 483339 - DNA, 120 bp, Artificial Sequence
  ENSG00000161981_11 (sequence is synthesized)
agagaagggcgcgagcgtgggagcaggaacccaaggcggtgggaaacggtggggctttctgagtgtattggaaagtagagcccacagatctgctgcagaccagaaaggggcgcgagaaag

SEQ ID NO: 483340 - DNA, 120 bp, Artificial Sequence
  ENSG00000161981_12 (sequence is synthesized)
agcggacagaggcagacgccggggctggcggcgatggagcagcagtcggaggacgcggaaggcctgcgagagtcgcccgcgcccagcgccggccttcgggtcccaccttgcgggtgatgt

SEQ ID NO: 483341 - DNA, 120 bp, Artificial Sequence
  ENSG00000161981_13 (sequence is synthesized)
tgtgcacgtaggggcacgtgttgcaggcgaagcggtggcagcgttgtccctcctccacgatcagcccgttcccgcagccggggcagaacagcagcatggtctcgaactccgcaggctcca

SEQ ID NO: 483342 - DNA, 120 bp, Artificial Sequence
  ENSG00000161981_14 (sequence is synthesized)
actcccggcagctcccactgccgctcagcgccgatgcgccgcccgcctcgagctcacattggtcctggcagccttcccgccacaccaaccaaccaatagacagggcgattctgcgctccc

SEQ ID NO: 483343 - DNA, 120 bp, Artificial Sequence
  ENSG00000161981_15 (sequence is synthesized)
gtgagccaccgcgcccggccaattttaaatgttttatattttgctcatcatggatattttaattgccttgtatttcttaaatgttgtattaaaatatttattgttattaccgtgttttgc

SEQ ID NO: 483344 - DNA, 120 bp, Artificial Sequence
  ENSG00000161981_16 (sequence is synthesized)
tgccccggtaaattttgcacacctgccttactcagtcccgaagcctggcctgggtcctgatgatcagggatatactcagcgtgaactgacaggcctctacccacccctgggggcaggtcc

SEQ ID NO: 483345 - DNA, 120 bp, Artificial Sequence
  ENSG00000161981_17 (sequence is synthesized)
tcatgtgagtttattctcttgcctgtttcttagcacctctttcccccagagactctgtccactatggacattaaaatgtgagtggaacatgagattggggctctgatgaattgggaaacc

SEQ ID NO: 483346 - DNA, 120 bp, Artificial Sequence
  ENSG00000161981_18 (sequence is synthesized)
ataacgtacaggcaaccacccttccttgcccttcgtaaaatggagcaccactttttggccactatcggcttgttctttgttgttgctcaaggtggtaaagagagccagggttcccacttc

SEQ ID NO: 483347 - DNA, 120 bp, Artificial Sequence
  ENSG00000161981_19 (sequence is synthesized)
ctcaagcaggagcgtgaagggggcattcagcacatcagctggtaagtggaacaacattcccttcattatagcccttcgtggggctagtgcccttcttggcactgtcaccaggcaccacct

SEQ ID NO: 483348 - DNA, 120 bp, Artificial Sequence
  ENSG00000161981_20 (sequence is synthesized)
ggaaacagctctcagctctgcatgagtacagcaccactgaagtgatgagctccctgtcacaagagtgatgagctccctgtcacagacagtgcgggtcgttctgtgcctgggactcctgcc

SEQ ID NO: 483349 - DNA, 120 bp, Artificial Sequence
  ENSG00000161981_21 (sequence is synthesized)
tcggccatccccaacattctgctcttccatcggcatcaccccatccgagctgctgggtatcttcacttggggacactgtcgggaatttccagtgtgtctggaagtggcctccctagtttt

SEQ ID NO: 483350 - DNA, 120 bp, Artificial Sequence
  ENSG00000161981_22 (sequence is synthesized)
ggatggtacacctgtaggggctcccatccccttctcacctgggtgctgtcagccctcactctcctattggatcaactatcctgttcactgagtctcaacactgtcgcctgttgcattagc

SEQ ID NO: 483351 - DNA, 120 bp, Artificial Sequence
  ENSG00000161981_23 (sequence is synthesized)
gcctcagacccaatctgcacattgtacagaacagcccaggtagggaggacagctgccccaggtcccataggactgcatgcctcaagcccacgtcatgcagagccactcagctcaccctgc

SEQ ID NO: 483352 - DNA, 80 bp, Artificial Sequence
  ENSG00000161992_0 (sequence is synthesized)
aacttcgggaggtgcgagcggcgtcggggggacgcgggcggcggcggaggctgcgggagtcgctgccgctcgagggaccg

SEQ ID NO: 483353 - DNA, 80 bp, Artificial Sequence
  ENSG00000161992_1 (sequence is synthesized)
cgtccgcggggtccgagtcgcggccggcgcggggcggggaggggcgggaagtttgcgccctacacgcggcctcgcagact

SEQ ID NO: 483354 - DNA, 120 bp, Artificial Sequence
  ENSG00000161992_2 (sequence is synthesized)
gacttggcggctccgctcccggccgggcgcaggtggccatggtgcccggccctgcctcatagcaggctgccatgtcgcgggaggcgggctcatgccgcgtgggcacaggggcgagggcgc

SEQ ID NO: 483355 - DNA, 120 bp, Artificial Sequence
  ENSG00000161992_3 (sequence is synthesized)
tcggaagcccaagaagccacactacatcccgcggccctggggcaaaccctacaactacaaatgcttccagtgccccttcacctgcctggagaagtcacacctctacaaccacatgaagta

SEQ ID NO: 483356 - DNA, 120 bp, Artificial Sequence
  ENSG00000161992_4 (sequence is synthesized)
cagcctctgcaaggactccctgtccctgctgctagactccccagactgggcgtgccgccgtggctccaccacgcctaggccccacgcacccaccccagaccgccctggggagtccgaccc

SEQ ID NO: 483357 - DNA, 120 bp, Artificial Sequence
  ENSG00000161992_5 (sequence is synthesized)
cggcaggcaaccccagggagcacggcccacaggtgctgcccccgcgcctgacctcgtggtcgccgacatccactccctgcactgtggcggaggccccaagtccagggccaaggggtcccc

SEQ ID NO: 483358 - DNA, 120 bp, Artificial Sequence
  ENSG00000161992_6 (sequence is synthesized)
agggccaccaccccctgtggctagggccacccggaagggtcccggccccagtgggctcctgcctgagtcgtggaagccggggatgggaggggacccaaggggcgtgggtgcgggggacat

SEQ ID NO: 483359 - DNA, 120 bp, Artificial Sequence
  ENSG00000161992_7 (sequence is synthesized)
ggcctcagcaggccctgagggcagcgtcccctgctatcccccgcctgccccaggggagttccctgaggcccacagcctccacctgtctctgctgggcgtcaactacccgctcagccccgg

SEQ ID NO: 483360 - DNA, 120 bp, Artificial Sequence
  ENSG00000161992_8 (sequence is synthesized)
cctcttctcctacttggggccctcactggccgctgcagcccatgtgcccttcctggcctcggccagccccctgctgcccccggccacggccttcccagccgtgcagccccctcagcgccc

SEQ ID NO: 483361 - DNA, 120 bp, Artificial Sequence
  ENSG00000161992_9 (sequence is synthesized)
cctgtctcccccaggagcccctctgggactccggctcctggcctgctgaaggtgccagttccagggctggggccctggccccgagtcacccccagggacccagggcaggagggggagctg

SEQ ID NO: 483362 - DNA, 120 bp, Artificial Sequence
  ENSG00000161992_10 (sequence is synthesized)
gagcgggcagcccagagtgaccccaggaggaggctgtccctgggaagcaggctggagcttccgaaggcatcccccagcctgacaaggttctgttcccggagcagcctgcccaccggctcc

SEQ ID NO: 483363 - DNA, 120 bp, Artificial Sequence
  ENSG00000161992_11 (sequence is synthesized)
tctgtgatgctgtggcctgaggacggggatccaggcggccctgagacccccggccctgagggccccctccccctgcagccacggggcccagtgccaggaagcccggagcatgtgggcgag

SEQ ID NO: 483364 - DNA, 120 bp, Artificial Sequence
  ENSG00000161992_12 (sequence is synthesized)
gacctgacccgagccctcggtgactacgccagggtggagcagcgcctgggacagttggggcccgcggggggcctggccccgagacccctgcgggagcagctgggcaagatccgcctggag

SEQ ID NO: 483365 - DNA, 120 bp, Artificial Sequence
  ENSG00000161992_13 (sequence is synthesized)
ctgctcaccattcaccaggcgctggagcaggccgtgaggccgccagacgcacccctcgacctctctgtgaaacgtgcgcccgccaaggggccccaggctcttggagaggcgtgggggcgg

SEQ ID NO: 483366 - DNA, 120 bp, Artificial Sequence
  ENSG00000161992_14 (sequence is synthesized)
cccgagctgggtcccgtgttgaccgggggcacccccgagccacccggcatgctgggccctgcagcgccccaacccttctctggccacaccaccaagtgtgaggccgactccagcgtccca

SEQ ID NO: 483367 - DNA, 120 bp, Artificial Sequence
  ENSG00000161992_15 (sequence is synthesized)
cccccagggctccccctcgcagccccagatgaccctgtcattcctggcagtggctggggcacctgtgttgcgacgaggagttcccagacccctgaggctgtctgtggcctgcagagcccc

SEQ ID NO: 483368 - DNA, 120 bp, Artificial Sequence
  ENSG00000161992_16 (sequence is synthesized)
cagggcgccgaggtctgacctgcagcgcctgaggtctgactgtctctgcctgcagcatgccggcccctctcctgcagcccctgcccctcacctgcctgggacctgccccgcctccgcatg

SEQ ID NO: 483369 - DNA, 120 bp, Artificial Sequence
  ENSG00000161992_17 (sequence is synthesized)
catgtggatagacccccacgggccgtggccaacgcttgtccctggggccacacagggacactggaggtcacagttatttattgatcacaattgtggacattaaaacagaaactgttcaca

SEQ ID NO: 483370 - DNA, 120 bp, Artificial Sequence
  ENSG00000161996_0 (sequence is synthesized)
actctgcgctgggcgcgcggaggcctaggcgggaagctcgagcggcggcgccatggcccgagcgtggcagcacccgttcctcaacgtcttcagacacttccgggtggacgagtggaagcg

SEQ ID NO: 483371 - DNA, 120 bp, Artificial Sequence
  ENSG00000161996_1 (sequence is synthesized)
ctccgccaagcagggggacgtggccgtggtcacggacaagaccctgaagggcgccgtgtatcgcattcggggctcagtctctgccgccaactacatccagctccctaagagcagcaccca

SEQ ID NO: 483372 - DNA, 120 bp, Artificial Sequence
  ENSG00000161996_2 (sequence is synthesized)
gtctctggggctgacgggacgatacctgtatgtgctctttcggcccctgcccagcaagcacttcgtcatccacctcgatgtgtcctccaaggacaaccaagtcatccgtgtgtctttctc

SEQ ID NO: 483373 - DNA, 120 bp, Artificial Sequence
  ENSG00000161996_3 (sequence is synthesized)
caacctcttcaaggagtttaagtctacggccacgtggctccagtttcccttggtcctggaggccaggacacctcagagagatctggtgggtttggccccctccggagcccgctggacctg

SEQ ID NO: 483374 - DNA, 120 bp, Artificial Sequence
  ENSG00000161996_4 (sequence is synthesized)
cctgcagctcgatctgcaggacgttctcctggtctacctgaaccggtgctacggccatctcaagagcatcaggctgtgcgccagcctgctggtcaggaacctgtacaccagtgacctgtg

SEQ ID NO: 483375 - DNA, 120 bp, Artificial Sequence
  ENSG00000161996_5 (sequence is synthesized)
ctttgagcctgccatctctggggcccagtgggcaaagctgcccgtgactcctatgcctcgggaaatggcattccctgtgcccaagggagagagctggcatgaccgctacatccacgtccg

SEQ ID NO: 483376 - DNA, 120 bp, Artificial Sequence
  ENSG00000161996_6 (sequence is synthesized)
gtttccaagtgagagcttgaaagtgccttccaagccgattgagaagagctgttcccctcctgaggcagtcctcctggggccggggccacagcctctcccttgcccggtggcctccagcaa

SEQ ID NO: 483377 - DNA, 120 bp, Artificial Sequence
  ENSG00000161996_7 (sequence is synthesized)
acctgtgcggttcagtgtgtctccagtggtccagacgcccagccccacagcctccggccgggccgccttggcacccaggcccttcccggaggtcagcctgtcccaagagcgctcagacgc

SEQ ID NO: 483378 - DNA, 120 bp, Artificial Sequence
  ENSG00000161996_8 (sequence is synthesized)
ctccaacgcggatggccccggtttccatagccttgagccctgggcccagctggaggcctctgacatccacacggctgctgccggcacccacgtgttgactcacgagtcggctgaggtgcc

SEQ ID NO: 483379 - DNA, 120 bp, Artificial Sequence
  ENSG00000161996_9 (sequence is synthesized)
cgtggcccgcaccggctcctgcgaaggcttcctcccagacccagtcctgaggctcaagggcgtcatcggctttgggggccacggcaccagacaggccctgtggaccccagacggggcggc

SEQ ID NO: 483380 - DNA, 120 bp, Artificial Sequence
  ENSG00000161996_10 (sequence is synthesized)
tgtcgtgtacccctgccatgcggtcatcgtcgtcctgctcgtggacacgggggagcagcgcttcttccttggccacacagacaaggtctccgccctggcgctggatggcagcagctcact

SEQ ID NO: 483381 - DNA, 120 bp, Artificial Sequence
  ENSG00000161996_11 (sequence is synthesized)
attggcctcggcccaggcaagggcccctagtgtgatgcggctctgggacttccagaccgggcggtgcttgtgcctgttccggagcccaatgcacgttgtctgctctctcagcttctctga

SEQ ID NO: 483382 - DNA, 120 bp, Artificial Sequence
  ENSG00000161996_12 (sequence is synthesized)
cagcggggcccttctctgcggggttggcaaggaccaccacgggaggacgatggtggtggcctggggcaccggccaggtgggcctcggtggcgaggtggtcgttctggcaaaggcgcacac

SEQ ID NO: 483383 - DNA, 120 bp, Artificial Sequence
  ENSG00000161996_13 (sequence is synthesized)
tgactttgacgtccaggccttccgggtcaccttttttgatgaaaccaggatggcgtcgtgcgggcagggcagtgtgcggctctggcggctgcgtggcggggtgctgcgttcctgccccgt

SEQ ID NO: 483384 - DNA, 120 bp, Artificial Sequence
  ENSG00000161996_14 (sequence is synthesized)
ggacttaggggagcaccacgcgctgcagttcaccgacctggccttcaagcaggcccgggacggctgcccggagccctcggctgccatgctcttcgtgtgcagccgcagtggccacatctt

SEQ ID NO: 483385 - DNA, 120 bp, Artificial Sequence
  ENSG00000161996_15 (sequence is synthesized)
ggagattgactgtcagcgcatggtcgtgcggcatgcccgccgcctgctccccacacggactccaggcggtccccacccacagaagcagaccttcagctcaggccccggcattgccatcag

SEQ ID NO: 483386 - DNA, 120 bp, Artificial Sequence
  ENSG00000161996_16 (sequence is synthesized)
cagcctcagcgtctccccggccatgtgtgctgtgggctctgaggacggcttcttgcggctctggcccctggacttctcctcggtgctcctggaggcagagcacgagggccccgtcagctc

SEQ ID NO: 483387 - DNA, 120 bp, Artificial Sequence
  ENSG00000161996_17 (sequence is synthesized)
agtctgtgtcagccccgatggcctccgtgtgctgtctgccacctcctcgggccacctgggcttcctggacacgctgtcccgggtgtaccacatgctggctcgctcccacaccgccccggt

SEQ ID NO: 483388 - DNA, 120 bp, Artificial Sequence
  ENSG00000161996_18 (sequence is synthesized)
gttggccctcgccatggagcagaggcggggacagctggccaccgtgtcccaggaccgtaccgtccgcatctgggacctggccaccctgcagcagctatacgacttcacatcatcagagga

SEQ ID NO: 483389 - DNA, 120 bp, Artificial Sequence
  ENSG00000161996_19 (sequence is synthesized)
cgccccgtgcgctgtcaccttccaccccacaaggccaacctttttctgtggctttagcagtggggccgtgcgctccttcagcctggaggccgctgaggtcctggtggaacacacgtgcca

SEQ ID NO: 483390 - DNA, 120 bp, Artificial Sequence
  ENSG00000161996_20 (sequence is synthesized)
ccgaggagctgtcaccggcctgaccgccacccctgacggccgcctgctcttcagctcctgctcccagggctccctggcccagtacagctgtgcggacccccagtggcatgtcctccgagt

SEQ ID NO: 483391 - DNA, 120 bp, Artificial Sequence
  ENSG00000161996_21 (sequence is synthesized)
ggcagcggacatggtatgcccggatgcccccgcgagccccagcgccctggcagtcagcagggatggccgcctgctggcctttgtgggaccctccaggtgcacagtgacagtcatgggctc

SEQ ID NO: 483392 - DNA, 120 bp, Artificial Sequence
  ENSG00000161996_22 (sequence is synthesized)
ggcctcccttgatgagctgctgcgagttgacatcggcactctggacctggccagcagccgcctggactcagccatggctgtgtgctttggccctgcagctctgggccacctgctggtgtc

SEQ ID NO: 483393 - DNA, 120 bp, Artificial Sequence
  ENSG00000161996_23 (sequence is synthesized)
tggtgctggatgctgtgtcgggccgcatcatccgggagctgcccggtgtccaccctgagccctgcccctccttgacgctcagtgaggacgcccgcttcctgctgattgccgccggccgga

SEQ ID NO: 483394 - DNA, 120 bp, Artificial Sequence
  ENSG00000161996_24 (sequence is synthesized)
ccatcaaggtgtgggactacgccacacaggccagcccaggcccccaggtgtacatcggccactcggaacccgtgcaggctgtggccttctctcctgaccagcagcaggtcctcagcgcag

SEQ ID NO: 483395 - DNA, 120 bp, Artificial Sequence
  ENSG00000161996_25 (sequence is synthesized)
gggacgccgtcttcctctgggatgtcctggcccctactgagagcgaccaaagcttccccggggcccccccagcctgcaagacaggcccgggcgcaggaccgctggaggacgcagcgtcca

SEQ ID NO: 483396 - DNA, 120 bp, Artificial Sequence
  ENSG00000161996_26 (sequence is synthesized)
gggccagcgagctcccccggcagcaggtccccaagccatgtcaggcatctccaccacggctgggcgtctgtgccaggcctcccgaaggtggcgatggcgccagggacaccaggaattcgg

SEQ ID NO: 483397 - DNA, 120 bp, Artificial Sequence
  ENSG00000161996_27 (sequence is synthesized)
gggccccacgcaccacctacctggcttcctgcaaggccttcacgcctgccagggtcagctgcagcccccactctgccaagggcacttgcccgcctcccgccagcggtgggtggctgcgtc

SEQ ID NO: 483398 - DNA, 120 bp, Artificial Sequence
  ENSG00000161996_28 (sequence is synthesized)
tgaaggctgtcgtcggttacagcgggaatgggcgggccaacatggtctggaggccggacacaggcttctttgcctacacgtgcggccgcctggtggtggtggaggacctgcactctggcg

SEQ ID NO: 483399 - DNA, 120 bp, Artificial Sequence
  ENSG00000161996_29 (sequence is synthesized)
cccagcagcactggtccggccactctgcggagatctccacgctggccctcagccacagtgcccaggtcctggcctctgcctcgggccgaagcagcacgaccgcccattgtcagatccgcg

SEQ ID NO: 483400 - DNA, 120 bp, Artificial Sequence
  ENSG00000161996_30 (sequence is synthesized)
tctgggacgtgtctggcggcctctgccagcatctcattttcccccatagcaccaccgtgctggccctggccttctcaccagatgacaggcttcttgtcacactgggggaccacgatggcc

SEQ ID NO: 483401 - DNA, 120 bp, Artificial Sequence
  ENSG00000161996_31 (sequence is synthesized)
gcaccctcgccctgtggggcacggccacctatgacctcgtgtcctccacccgcctcccggagccggtgcatggtgtggccttcaacccctgggacgccggcgagctcacctgtgtgggcc

SEQ ID NO: 483402 - DNA, 120 bp, Artificial Sequence
  ENSG00000161996_32 (sequence is synthesized)
agggcactgtcaccttctggctccttcagcagcgtggggcagacatcagccttcaggtgcgtcgagagccagtcccagaggcagtgggggctggagagctgacctcgctctgctacgggg

SEQ ID NO: 483403 - DNA, 120 bp, Artificial Sequence
  ENSG00000161996_33 (sequence is synthesized)
cacctcccctgctctattgtggcaccagctctggccaggtctgtgtctgggacacgcgtgccggccgctgcttcttgtcctgggaggcggatgacggtggcattgggctgttgctgttct

SEQ ID NO: 483404 - DNA, 120 bp, Artificial Sequence
  ENSG00000161996_34 (sequence is synthesized)
cgggttctcgattggtcagcggcagcagcacggggcggctgcgcctgtgggccgtgggggctgtgtcggagctgaggtgcaagggctcaggcgccagttctgtgttcatggaacacgagc

SEQ ID NO: 483405 - DNA, 120 bp, Artificial Sequence
  ENSG00000161996_35 (sequence is synthesized)
tggtgctggacggggctgtggtgagtgccagcttcgatgacagcgtggacatgggcgtcgtgggcaccacggcgggcacgctgtggtttgtcagctgggccgagggcaccagcacacgtc

SEQ ID NO: 483406 - DNA, 120 bp, Artificial Sequence
  ENSG00000161996_36 (sequence is synthesized)
tcatcagtggccacaggagcaaggtgaacgaggtggtcttcagccccggggagtcccactgcgccacatgcagtgaggatgggagtgtgcgggtgtgggccttggccagcatggagcttg

SEQ ID NO: 483407 - DNA, 120 bp, Artificial Sequence
  ENSG00000161996_37 (sequence is synthesized)
tgatccagttccaggtgctgaaccagagctgcctctgcctggcatggagccccccgtgctgtggccgccctgagcagcagcggctagcggctggctacggtgacggctccctgcgcatct

SEQ ID NO: 483408 - DNA, 120 bp, Artificial Sequence
  ENSG00000161996_38 (sequence is synthesized)
tcagcgtctcccgcacggccatggagctcaagatgcacccccacccggtggcgctgaccactgttgccttctccaccgatggtcagactgtcctctctggagacaaggatgggctcgtgg

SEQ ID NO: 483409 - DNA, 120 bp, Artificial Sequence
  ENSG00000161996_39 (sequence is synthesized)
ctgtgagccacccctgcacagggacaaccttccgtgtgctgagtgaccaccagggcgccccaatctctaccatctgtgtcacgtgcaaagagtgtgaagacttaggggtggagggcacag

SEQ ID NO: 483410 - DNA, 120 bp, Artificial Sequence
  ENSG00000161996_40 (sequence is synthesized)
acctatggctggctgccagtggggaccagcgggtcagcgtctgggcctccgactggctgcggaaccactgtgagcttgtggactggttgagtttcccaatgcctgccaccacggagactc

SEQ ID NO: 483411 - DNA, 120 bp, Artificial Sequence
  ENSG00000161996_41 (sequence is synthesized)
agggccacctgccaccctccctcgctgccttctgcccttgggatggggcgctcctgatgtacgtgggccccggtgtttacaaggaggtgatcatctacaacctctgccagaagcaggtgg

SEQ ID NO: 483412 - DNA, 120 bp, Artificial Sequence
  ENSG00000161996_42 (sequence is synthesized)
tggagaagataccactgcccttttttgccatgtccctgagcctgtcccccgggacccacctcctggctgttggctttgctgagtgcatgctgaggctggtagactgtgccatggggactg

SEQ ID NO: 483413 - DNA, 120 bp, Artificial Sequence
  ENSG00000161996_43 (sequence is synthesized)
cccaagactttgccggccacgacaacgcagtgcacctgtgcaggtttacaccgtccgccaggctgctcttcacggccgcccgcaacgagatccttgtgtgggaggtccccggcctctgag

SEQ ID NO: 483414 - DNA, 120 bp, Artificial Sequence
  ENSG00000161996_44 (sequence is synthesized)
atgcagcagggactgtggtggtgggcatcacgcctggtcatgccaggcacctggacacaggcttggcagaggcgccaggttgtcaatggcctcatgctgggacaggccaggattcacgta

SEQ ID NO: 483415 - DNA, 120 bp, Artificial Sequence
  ENSG00000161996_45 (sequence is synthesized)
aatcgcctggagcaagctgttgtaaatttggcgccctgtgaatactttcatacctgttgcccttttgcctaagaaatctttaatgtttctatcttgtaataaacatgggcatttattgca

SEQ ID NO: 483416 - DNA, 120 bp, Artificial Sequence
  ENSG00000161996_46 (sequence is synthesized)
acgtgcggccgcctggtggtggtggaggacctgcactctggcgcccagcagcactggtccggccactctgcggagatctccacgctggccctcagccacagtgcccaggtgcccgcctgc

SEQ ID NO: 483417 - DNA, 120 bp, Artificial Sequence
  ENSG00000161996_47 (sequence is synthesized)
atcgccctcctcctctcccagggccaccgtgcccggcagaacccagctcccggaccggtgcgggttctcaccaccaaagacggagcagacggccaccccagcctccactccagccagcca

SEQ ID NO: 483418 - DNA, 120 bp, Artificial Sequence
  ENSG00000161996_48 (sequence is synthesized)
tgtccctgactggggcttgcagccagtgccccgcccccgcaaaggccgccctgcagaccggccgcctgctagcccctccaagggacaggcttgggtgtggcctgggcctcactggctgct

SEQ ID NO: 483419 - DNA, 120 bp, Artificial Sequence
  ENSG00000161996_49 (sequence is synthesized)
gtcgagtacgggcatgggcccagaagccccagctccatgggctttctcttcttccaccgggagggcacagccaggtcctgagatgcaatgctgagggccctgcctcggctggggacccag

SEQ ID NO: 483420 - DNA, 120 bp, Artificial Sequence
  ENSG00000161996_50 (sequence is synthesized)
ctggctcttgtcatcggccttgagacccattgttctctccttccctgcaccctgaggtccagttctgtgttcatggaacacgagctggtgctggacggggctgtggtgagtgccagcttc

SEQ ID NO: 483421 - DNA, 120 bp, Artificial Sequence
  ENSG00000161996_51 (sequence is synthesized)
cccggggctctgctgtcagccgccctggctcctggctgcacagggtgccacggggccaagtggcatatccagagccctggggcggctgatgccagggcggcccgcggggcagcctcacgg

SEQ ID NO: 483422 - DNA, 120 bp, Artificial Sequence
  ENSG00000161996_52 (sequence is synthesized)
aagggcccggtgggacgtgggtagtgtgtgaagcccctcagcctgggtcccgcctagcctaagagtggtggcctcgagggagctgcatcttgcagccgtgtggagcctgggactttgagc

SEQ ID NO: 483423 - DNA, 120 bp, Artificial Sequence
  ENSG00000161996_53 (sequence is synthesized)
ggaatgcgactgcatggcgcgctcgctgcaacctcagtctgcagcctgctagggacgcacggccacactcctgtctttcagcctcagtctgcagcctgctagggacgcacggccacactc

SEQ ID NO: 483424 - DNA, 120 bp, Artificial Sequence
  ENSG00000161996_54 (sequence is synthesized)
ctgtctttcagcctcagtctgcagcctgctagggacgcacggccacactcctgtctttcagcctcagtctgtagcctgctagggatgcacggccacgctcctgtctttgaggtgctgtca

SEQ ID NO: 483425 - DNA, 120 bp, Artificial Sequence
  ENSG00000161996_55 (sequence is synthesized)
gaacagctttctcctcggtatcccgccgggtttgactggctagtgggcttgctttggtttggactcacccagatctagtgcagggacacacacgggggccggcattgctcctttccgcca

SEQ ID NO: 483426 - DNA, 120 bp, Artificial Sequence
  ENSG00000161996_56 (sequence is synthesized)
tgtggagttggccggggccagaggcacatgctctggtttggacagcccggccctgggggctggaataggaaatgcctgcgtccctttaccctgcccaggggccaacacccccagcctagc

SEQ ID NO: 483427 - DNA, 120 bp, Artificial Sequence
  ENSG00000161996_57 (sequence is synthesized)
aatggcggaagtggcaccgttgccaggcagccgttgcctggcgtcgcggggcgtactctgcgctgggcgcgcggaggcctaggcgggaagctcgagcggcggcgccatggcccgaggtag

SEQ ID NO: 483428 - DNA, 120 bp, Artificial Sequence
  ENSG00000161996_58 (sequence is synthesized)
gtagcgcgcggctggcgggggtcccgaggatcccgggttccggggttccggggtccagggtcggcggccggagcgctcagggcccccgcctaggccctgaggccagagtccccgctcagg

SEQ ID NO: 483429 - DNA, 120 bp, Artificial Sequence
  ENSG00000161996_59 (sequence is synthesized)
cagggtcccgtctgccgggcgcccaccctcgggctcccggagcttggcttccctcgggcgcccggcctcgtcccgccagcctagctggcgttggcgtcgccggggaaggcgcggagagcc

SEQ ID NO: 483430 - DNA, 120 bp, Artificial Sequence
  ENSG00000161996_60 (sequence is synthesized)
tggtccccgaggcccggcccagccccgcagtggccccggctcgcgtggccgagtcccctgacgcccggcgcccgctccccgcagcgtggcagcacccgttcctcaacgtcttcagacact

SEQ ID NO: 483431 - DNA, 120 bp, Artificial Sequence
  ENSG00000161996_61 (sequence is synthesized)
ctgatgcacgcagacagctggaagggtcttggttttctgaaactccagcttcatgtgaccctgggtccctgctctgtgtcctccctgtggtggggctccctgcactctggtgttcatgcc

SEQ ID NO: 483432 - DNA, 120 bp, Artificial Sequence
  ENSG00000161996_62 (sequence is synthesized)
gcccccgtgccctgcacaaaaaccaccaccagcagctcacatttcacgtctcggcttttcggccatcggagtcggtttaagccagcgtttacacacctcgcctcgttctctctgctggtg

SEQ ID NO: 483433 - DNA, 120 bp, Artificial Sequence
  ENSG00000161996_63 (sequence is synthesized)
atgcggttgtaagattttcacgtggcagagcccctgcagctgacccacgcttgggcatcaatggcacctccacacagccgaagcacccggcatcttggtgggggcacctttttaaacatt

SEQ ID NO: 483434 - DNA, 81 bp, Artificial Sequence
  ENSG00000161996_64 (sequence is synthesized)
ccctccctgacctccccgccagctggactccagccatcctcctgcctcagcttcccagatagctgggccacaggcgtgtgc

SEQ ID NO: 483435 - DNA, 120 bp, Artificial Sequence
  ENSG00000161996_65 (sequence is synthesized)
cctccctgacctccccgccagctggactccagccatcctcctgcctcagcttcccagatagctgggccacaggcgtgtgccaccacacctggctaacttttttttttttttttttttgag

SEQ ID NO: 483436 - DNA, 70 bp, Artificial Sequence
  ENSG00000161996_66 (sequence is synthesized)
acgagctgctttttatccaccttccggcttgcgggggggtttgtacttctctgcgaatgggttgcagtgc

SEQ ID NO: 483437 - DNA, 120 bp, Artificial Sequence
  ENSG00000161996_67 (sequence is synthesized)
gcgggggggtttgtacttctctgcgaatgggttgcagtgctcagcattgcgggtctctgtagaagtcccaaagcttcaggatgagaagatggaggggctggtttccttccactctccacg

SEQ ID NO: 483438 - DNA, 120 bp, Artificial Sequence
  ENSG00000161996_68 (sequence is synthesized)
gccgcacgctcagaggctggtctccgcatgagagaaaagccacctccgggtggggctcggctgggccttgcagaatcgaggtggccccgactggccctgccgtgcgggctcagcctgggc

SEQ ID NO: 483439 - DNA, 120 bp, Artificial Sequence
  ENSG00000161996_69 (sequence is synthesized)
agcaaggtgagggacttccagcctgggcagaggcggggcagccgaacctggtgccctccctgcctgccggctccatctccaccagcccagatgattccaagtcctgccgtcactggctcg

SEQ ID NO: 483440 - DNA, 120 bp, Artificial Sequence
  ENSG00000161996_70 (sequence is synthesized)
cagcggccgccttggggttcccagcggggaagtcttgggtgtgcacgtcccctcaaagccgtcccggttgtgtctgcacaagcgagccgcctggcaggccttgcaggtcttctcaaactg

SEQ ID NO: 483441 - DNA, 88 bp, Artificial Sequence
  ENSG00000161996_71 (sequence is synthesized)
tattgctttgcaattgtcaaagaaatcacatcagtccgggcgtggtggttcatgcctgtgatcccagcactctgggaggccaaggcag

SEQ ID NO: 483442 - DNA, 120 bp, Artificial Sequence
  ENSG00000161996_72 (sequence is synthesized)
gggcctcggtggcgaggtggtcgttctggcaaaggcgcacactgactttgacgtccaggccttccgggtcaccttttttgatgaaaccaggtgatgcagccgcccatccacgatgttggg

SEQ ID NO: 483443 - DNA, 120 bp, Artificial Sequence
  ENSG00000161996_73 (sequence is synthesized)
agagggtctgggcccggagtgggggccgaggcccgagcacctccccctggcttggctgtgcgtctctgcgtctcccggtgggtcagggcgctgcgagctgcggcagtgctcagtcctcat

SEQ ID NO: 483444 - DNA, 120 bp, Artificial Sequence
  ENSG00000161996_74 (sequence is synthesized)
agcctgggcgacagagactccatctcaaaggaaaaaaaaaagatgaaaaaccccacatcgtctgtccctgcacctcccatagactggctttgctgactcagtctcatgggattgttctct

SEQ ID NO: 483445 - DNA, 120 bp, Artificial Sequence
  ENSG00000161996_75 (sequence is synthesized)
gagaagataccactgcccttttttgccatgtccctgagcctgtcccccgggacccacctcctggctgttggctttgctggtttacaccgtccgccaggctgctcttcacggccgcccgca

SEQ ID NO: 483446 - DNA, 120 bp, Artificial Sequence
  ENSG00000161996_76 (sequence is synthesized)
ggttacagcgggaatgggcgggccaacatggtctggaggccggacacaggtgggggccaagagcctacccccacccccagccaagatgcggccgcgcgtggtccagccgtctccacccca

SEQ ID NO: 483447 - DNA, 120 bp, Artificial Sequence
  ENSG00000161996_77 (sequence is synthesized)
aggccaggacctggtggcaaatgagcgccagccatcagtgtggggctctgttctcccggtagcgcctcctggcgctccagccgaggcttctttgcctacacgtgcggccgcctggtggtg

SEQ ID NO: 483448 - DNA, 120 bp, Artificial Sequence
  ENSG00000161996_78 (sequence is synthesized)
ggtctccttcctcgcagggcacttgcccgcctcccgccagcggtgggtggctgcgtctgaaggctgtcgtcggttacagcgggaatgggcgggccaacatggtctggaggccggacacag

SEQ ID NO: 483449 - DNA, 120 bp, Artificial Sequence
  ENSG00000161996_79 (sequence is synthesized)
tttttttaatgaagtgcatcgtgttcccacttgcacttaaagttcacatttggtgccaggctgtattgcttcttctcactggtgagtggcagctgtgtctcctttctgccagtccagcag

SEQ ID NO: 483450 - DNA, 120 bp, Artificial Sequence
  ENSG00000161996_80 (sequence is synthesized)
acggatgtgcctccaacggtctcctcttgttcagcctcctggcaaggagcagagctggcgggaggcggctttggggaagaatctctgtccacaaagagtaaggcagggcttctgctcacc

SEQ ID NO: 483451 - DNA, 120 bp, Artificial Sequence
  ENSG00000161996_81 (sequence is synthesized)
cccaatgcgtcagccccaggtggtctgtgggggaccctcgaaggtctggcagtgcaactggagtcccagcttccaccttaccacagccagcaggagccacccaggaccagggcagtcttc

SEQ ID NO: 483452 - DNA, 120 bp, Artificial Sequence
  ENSG00000161996_82 (sequence is synthesized)
ccactctgggggactcctcagggcgggggaggcctggatctggtgcaggcccacacctggacacacatgccggtttcctggtgcaccgactgggtcctgtgggggggcgtggccgcctca

SEQ ID NO: 483453 - DNA, 120 bp, Artificial Sequence
  ENSG00000161999_0 (sequence is synthesized)
atggctggcggatgggcccaaggttcccggcgtgcagcgcggctgcctgagggcggcaggctcatggcgccggcgtcgcggttgctcgcgctctgggcgctggcggctgtggctctaccc

SEQ ID NO: 483454 - DNA, 120 bp, Artificial Sequence
  ENSG00000161999_1 (sequence is synthesized)
ggcggagggcgacggcgggtggcgcccgggcgggccgggggccgtggcggaggaggagcgctgcacggtggagcgtcgggccgacctcacctacgcggagttcgtgcagcagtacgcctt

SEQ ID NO: 483455 - DNA, 120 bp, Artificial Sequence
  ENSG00000161999_2 (sequence is synthesized)
tacgccttcgtcaggcccgtcatcctgcagggactcacggacaactcgaggttccgggccctgtgctcccgcgacaggttgctggcttcgtttggggacagagtggtccggctgagcacc

SEQ ID NO: 483456 - DNA, 120 bp, Artificial Sequence
  ENSG00000161999_3 (sequence is synthesized)
cacaaagtggacttgcccttccaggagtatgtggagcagctgctgcacccccaggaccccacctccctgggcaatgacaccctgtacttcttcggggacaacaacttcaccgagtgggcc

SEQ ID NO: 483457 - DNA, 120 bp, Artificial Sequence
  ENSG00000161999_4 (sequence is synthesized)
tctctctttcggcactactccccacccccatttggcctgctgggaaccgctccagcttacagctttggaatcgcaggagctggctcgggggtgcccttccactggcatggacccgggtac

SEQ ID NO: 483458 - DNA, 120 bp, Artificial Sequence
  ENSG00000161999_5 (sequence is synthesized)
tcagaagtgatctacggtcgtaagcgctggttcctttacccacctgagaagacgccagagttccaccccaacaagaccacgctggcctggctccgggacacatacccagccctgccaccg

SEQ ID NO: 483459 - DNA, 120 bp, Artificial Sequence
  ENSG00000161999_6 (sequence is synthesized)
tctgcacggcccctggagtgtaccatccgggctggtgaggtgctgtacttccccgaccgctggtggcatgctacgctcaaccttgacaccagcgtcttcatctccaccttcctcggctag

SEQ ID NO: 483460 - DNA, 120 bp, Artificial Sequence
  ENSG00000161999_7 (sequence is synthesized)
cacacaccagcacgtcccacctcgtgctcacggattttattacacagatagtggcggcaatggcctcagcccagcccaccctcacctgcttttccagcccacaaagggggacgatcacgg

SEQ ID NO: 483461 - DNA, 120 bp, Artificial Sequence
  ENSG00000161999_8 (sequence is synthesized)
cccagcaaaagcgatgctgagaggggaaacagtccagagtccaacagcagaacttgggggaagcggtcggggtggccaggaacataaactatgtataggggccgggggcttctgcccagg

SEQ ID NO: 483462 - DNA, 120 bp, Artificial Sequence
  ENSG00000161999_9 (sequence is synthesized)
gccaggtagggcagggaacctcagtagtcctccacccagccattctcagagatgaatgcgtcaataacctccttcatagccaagttggggatgagctgttcctgggtcagggggctccgg

SEQ ID NO: 483463 - DNA, 120 bp, Artificial Sequence
  ENSG00000161999_10 (sequence is synthesized)
gtcacggggtcaaaatgacccacacgctgcagtgacaagaagggcagagggcagtcatggggcccaggaccatgccactggccctgctcccccagccgcaggcctcacctgcaggtgctc

SEQ ID NO: 483464 - DNA, 120 bp, Artificial Sequence
  ENSG00000161999_11 (sequence is synthesized)
ctcgatgtccttgcggtcgtaggtgatgccactgggcgtgatgcacggctcccgcatcagctcaaagctgatcttgccacacaggtagtcggggatgtctcgcttctgtggcacaggggc

SEQ ID NO: 483465 - DNA, 120 bp, Artificial Sequence
  ENSG00000161999_12 (sequence is synthesized)
acacggtcagaggctgaaaaggggcactgcacgagcacctgccagccatcggcagcaagcgacacacactcaccttcctcttctcatccacctgagaaaaaagctcgtccatgtccgcca

SEQ ID NO: 483466 - DNA, 120 bp, Artificial Sequence
  ENSG00000161999_13 (sequence is synthesized)
tgtacttgtcctgtgaagagttgagtgctgtgcttgggggagacaccccacctccctcctccatggggcacagacccaacacaaggcggggatgctcccacgccacgtgcacacacacag

SEQ ID NO: 483467 - DNA, 120 bp, Artificial Sequence
  ENSG00000161999_14 (sequence is synthesized)
acccacatgtgggtggggggcaccctcacgtgcttggcctcaatgcaggcctgctgggcccggacgtggctgtcgtcctcatcaccctcgtggtttcgctggcactcttccagctccctg

SEQ ID NO: 483468 - DNA, 120 bp, Artificial Sequence
  ENSG00000161999_15 (sequence is synthesized)
ggggttgaccaggagccggtcagagatggacctggccagatgtctgaccacaccccaatctcagagctaacatccacacttccccacatttcctgcttgccagtaaagccttcgataaac

SEQ ID NO: 483469 - DNA, 120 bp, Artificial Sequence
  ENSG00000161999_16 (sequence is synthesized)
tggtaaccggcggcgcccatagtcgctctcggggcggccttcccagtgcctcccgtagaggcctcttccggggcgggccaaaggaggtcacttccggggtccgtcccggttcccggccgt

SEQ ID NO: 483470 - DNA, 120 bp, Artificial Sequence
  ENSG00000161999_17 (sequence is synthesized)
tcgggccgacctcacctacgcggagttcgtgcagcagtacgccttcgtcaggcccgtcatcctgcagggactcacggacaactcggtgagcgcgtgcccgtccgtccccggccactctcg

SEQ ID NO: 483471 - DNA, 120 bp, Artificial Sequence
  ENSG00000161999_18 (sequence is synthesized)
gttcaccggcccgtctgccccgaccgcccaaggccgccttcccctgacctcgcgcgcacgcgtggggctggggcggcgaggctggcggtccggcctggccgcgactctgcccttctttcc

SEQ ID NO: 483472 - DNA, 120 bp, Artificial Sequence
  ENSG00000162004_0 (sequence is synthesized)
agaggccttggcaacgcacttagcagtgccagtggcagcagcagccatggggaagccgggcgtggaggcagcaccgggctcggagctggccagggttccctagcctatggagcacgcagc

SEQ ID NO: 483473 - DNA, 120 bp, Artificial Sequence
  ENSG00000162004_1 (sequence is synthesized)
caccacaggccccaggcctggacctccctctcggcgggtggagaatgttgtgctacgagccaaggactggctgccaggagctcctgggggcaccgcagtgtgggccaccagcttggaagc

SEQ ID NO: 483474 - DNA, 120 bp, Artificial Sequence
  ENSG00000162004_2 (sequence is synthesized)
agaggtcccaccagatctagcgctcaataaggagcagcagctgcagatctccaaggagctggtcgacattcagatcacaacccaccacctacatgagcagcatgaggctgaaatcttcca

SEQ ID NO: 483475 - DNA, 120 bp, Artificial Sequence
  ENSG00000162004_3 (sequence is synthesized)
gctgaagagtgagatccttcggctggagagccgggtactggagctggagctgcgaggagatggcaccagccagggctgtgcagtcccagtggagtctgaccccaggcatccccgggcagc

SEQ ID NO: 483476 - DNA, 120 bp, Artificial Sequence
  ENSG00000162004_4 (sequence is synthesized)
agcccaagagctcagacacaaagcccaggtgcctggacactctgatgaccacagattccaggtgcagcccaagaacaccatgaaccccgagaatgagcagcacaggctggggagcggcct

SEQ ID NO: 483477 - DNA, 120 bp, Artificial Sequence
  ENSG00000162004_5 (sequence is synthesized)
gcagggggaagtgaagtgggcgctggagcatcaggaggcccggcagcaggcactggtgacgcgtgtggcaaccctgggccggcagctgcagggagcccgagaggaggccagggcagccgg

SEQ ID NO: 483478 - DNA, 120 bp, Artificial Sequence
  ENSG00000162004_6 (sequence is synthesized)
ccgtcaggcagaggctgaaaatgcccggctgcagctgcagctcaagaaactgaaggatgagtacgtcctacggctgcaacactgcgcctggcaggcagtggagcacgcagatggtgcagg

SEQ ID NO: 483479 - DNA, 120 bp, Artificial Sequence
  ENSG00000162004_7 (sequence is synthesized)
ccaagcgccagccaccacggccctccggacattcctggaggcgactctggaggacatccgggcagcgcaccgcagccgtgagcagcagctggcccgggctgcccgcagctaccacaagag

SEQ ID NO: 483480 - DNA, 120 bp, Artificial Sequence
  ENSG00000162004_8 (sequence is synthesized)
gctggtggatctgagccgcaggcatgaagagctactggttgcctacagggcacctgggaacccccaagctatttttgacatagccagcttggacctggaaccattgcccgtgcccctggt

SEQ ID NO: 483481 - DNA, 120 bp, Artificial Sequence
  ENSG00000162004_9 (sequence is synthesized)
cactgacttcagccatcgggaggaccagcacggcgggcctggggcactgctctcatccccaaaaaagagacccggtggagcctcccaggggggaacatcagagccacagggcctggacgc

SEQ ID NO: 483482 - DNA, 120 bp, Artificial Sequence
  ENSG00000162004_10 (sequence is synthesized)
tgcatcctgggcccagatccaccagaagctccgggacttctcccgcagcacccagagctggaacgggagcgggcacagctgctggtccgggccacgatggctgaagagcaactttctgag

SEQ ID NO: 483483 - DNA, 120 bp, Artificial Sequence
  ENSG00000162004_11 (sequence is synthesized)
ctacaggagtacgtggaccagcacctgggcaggtacaagcacgaaatcctgaggctgaggaagctggcaggtgcaggggacccctggaaagtgggggctgtgcctccagccaagccccag

SEQ ID NO: 483484 - DNA, 120 bp, Artificial Sequence
  ENSG00000162004_12 (sequence is synthesized)
catccaaggaccggcagccactaggccgtctcccaaggagcagagcagagcagagctcctcagccagcacagaaccctcccacccagccccccataaaacatgagtcaggatagaaccca

SEQ ID NO: 483485 - DNA, 120 bp, Artificial Sequence
  ENSG00000162004_13 (sequence is synthesized)
ccagcctcagtgcatgggggacggggggtgcaggcccaggacacgtgccctgcatgggcatgcacacgcacatggcatctgtgggtctcagcctgcctctgagtgctgcgcgcccctgag

SEQ ID NO: 483486 - DNA, 120 bp, Artificial Sequence
  ENSG00000162004_14 (sequence is synthesized)
ccaggttaccatgagcatatggagagcctggctgggaaaggccagagggaagcctcagcaggggcctcagtgaaactggggctcacccaccccttagctttccctgccctcccttccatt

SEQ ID NO: 483487 - DNA, 120 bp, Artificial Sequence
  ENSG00000162004_15 (sequence is synthesized)
ggccccatcctggagcagagagaacccctgatcgtgggcctgctgagcctcacccccgtgtcttcagggcaaccctgggccggcagctgcagggagcccgagaggaggccagggcagccg

SEQ ID NO: 483488 - DNA, 120 bp, Artificial Sequence
  ENSG00000162004_16 (sequence is synthesized)
ggcagcgactggccacacaggctgtggtgaggctctgccctgactgcttggagacctggagggtgggggccccagaagctcagccggggtccactctcagggcacaggtggagggctgct

SEQ ID NO: 483489 - DNA, 120 bp, Artificial Sequence
  ENSG00000162004_17 (sequence is synthesized)
cgcctggcaggcagtggtgagccctgcaggagcaccctgaggcctagggagcccaagcctggcctgggtgtgctggatagcttcagggagaccccagggccccggcactgctcagcctgc

SEQ ID NO: 483490 - DNA, 120 bp, Artificial Sequence
  ENSG00000162004_18 (sequence is synthesized)
cctacaggtgggccccgctgggatgggaggtgtcaggcatctgtgggtctctaagcctctgtgcctcaaaggcttggtgtgcagcaggagtggccccagacagacactagcctaccctga

SEQ ID NO: 483491 - DNA, 120 bp, Artificial Sequence
  ENSG00000162004_19 (sequence is synthesized)
cctgcaccctggggcccccagttgctccaccaagcccccgccagacagggtctggtcacagcaatgcactcagtggcacatccccaccctggggtccctccgtgggtcccggcgacactg

SEQ ID NO: 483492 - DNA, 120 bp, Artificial Sequence
  ENSG00000162004_20 (sequence is synthesized)
ataatcacaggaaagagaagaggggctgctgcaggtggagctggccttgaacacggaggatcagggagagcacacctgagggaggtttccgctgagacctggaggacgcgaggggtggga

SEQ ID NO: 483493 - DNA, 120 bp, Artificial Sequence
  ENSG00000162004_21 (sequence is synthesized)
gcagggcgcctggtgaccgggccagcccttgcctctgggcctccatgttcccagctgtacaatgggcagggctccccaaggaccatttcctggggtttagggcacacccgtgtgggggtg

SEQ ID NO: 483494 - DNA, 120 bp, Artificial Sequence
  ENSG00000162004_22 (sequence is synthesized)
gcatccctgttgatgctggagtcactgtctgggctggccttgtggtttagccctcccccagcagccagcagaccccctgggcccgggctgtccctatacacggatggctccaaggcctgg

SEQ ID NO: 483495 - DNA, 120 bp, Artificial Sequence
  ENSG00000162004_23 (sequence is synthesized)
ggggggcgccacaggagcacggggggggcccatgcctccctcactcactcccaggtgtcccctcccggctctgggaacctgactcagcacggtcacgtctgtccctgtgtcaccatgcca

SEQ ID NO: 483496 - DNA, 120 bp, Artificial Sequence
  ENSG00000162004_24 (sequence is synthesized)
gctctcaaaaccactcctcctttcctctcccctcacaggggcctggacgctgcatcctgggcccagatccaccagaagctccgggacttctcccgcagcacccaggtaggaggcaagggc

SEQ ID NO: 483497 - DNA, 120 bp, Artificial Sequence
  ENSG00000162004_25 (sequence is synthesized)
gcccctggtcactgacttcagccatcgggaggaccaggtgaggctagagacccccagaagctccaggcccgggtgccccccacccacccactgccccacactggccccaggcctcatcct

SEQ ID NO: 483498 - DNA, 120 bp, Artificial Sequence
  ENSG00000162004_26 (sequence is synthesized)
gggctcaacagagacctcagccccgggcctctgaggggcttgccttgttcagccaactgaaacgtccccaccacaaacctctgtagcacggcgggcctggggcactgctctcatccccaa

SEQ ID NO: 483499 - DNA, 120 bp, Artificial Sequence
  ENSG00000162004_27 (sequence is synthesized)
cgtggaccagcacctgggcaggtgggcagagggagctgggtgtgaccccagggccctggtctggttggaatgaaggatgatggctgcctcaggcgctaaaagcagacctgtccacagctg

SEQ ID NO: 483500 - DNA, 120 bp, Artificial Sequence
  ENSG00000162004_28 (sequence is synthesized)
aggaagccctcccgacgccccggctgagccagtcgtttccgagttctccggcccctgatggggacgtctgcgcccctcttctcaggccagaggtgcagagatatacttcccccgtcccgg

SEQ ID NO: 483501 - DNA, 120 bp, Artificial Sequence
  ENSG00000162004_29 (sequence is synthesized)
ggctcagccagcactgctaggtacacagaaggtgtccagcgagtgtagctcagggcatcctgcgggcgggctgccgctccgttccgcgtgctcgtccgctgcgcccaggctgggcgcttt

SEQ ID NO: 483502 - DNA, 120 bp, Artificial Sequence
  ENSG00000162004_30 (sequence is synthesized)
gcctggacctccctctcggcgggtggagaatgtgagtcctctgggacttgccgctcctgccatggggttgaagtctgcccgttcccccaaaggccaggagggtgcaggttcctgcaccct

SEQ ID NO: 483503 - DNA, 120 bp, Artificial Sequence
  ENSG00000162004_31 (sequence is synthesized)
gcctaatttcagccaggagagggacttttacagctcagccaggcagggaggcgggactggtgactgcatgggagtggggccacagcccagcctgggacccacctggggaatgggtggcgg

SEQ ID NO: 483504 - DNA, 120 bp, Artificial Sequence
  ENSG00000162004_32 (sequence is synthesized)
cggcggtgcgcgtgcccggtggggcgccacgcgcacgctccgaccccgccgcgcccggcgctggcacctcctccaggaagccctcccgacgccccggctgagccagtcgtttccgagttc

SEQ ID NO: 483505 - DNA, 120 bp, Artificial Sequence
  ENSG00000162006_0 (sequence is synthesized)
atggccgcagccgtcaccattcctggcccccgcattggtgccctgcagagctcaggcctcaccctcctgctgtcccttgctgcccactgctctgggccccaggccaaggttctttcccca

SEQ ID NO: 483506 - DNA, 120 bp, Artificial Sequence
  ENSG00000162006_1 (sequence is synthesized)
ggagggctggatgccagcggggccaacctgtgggccagtgccaactgctccctgctgcaaggcttctggtgccagccggccagccagctgccccgggaccagctctcagccctaatccag

SEQ ID NO: 483507 - DNA, 120 bp, Artificial Sequence
  ENSG00000162006_2 (sequence is synthesized)
aggctggccttgctgcaggtccccctccaggcctggcagctcagctgcttggccaacctggcgtcacggtgcggcctccaggacgacttcacgctccacccacccaacctgctgctcttc

SEQ ID NO: 483508 - DNA, 120 bp, Artificial Sequence
  ENSG00000162006_3 (sequence is synthesized)
tacaacctgagccaggtgcgggaagccgactgccgggccttcatccgccgtgccgcccagggggacgtggagctgctgagccatctacccgaccagagggtcgccctgtggcgtgcggct

SEQ ID NO: 483509 - DNA, 120 bp, Artificial Sequence
  ENSG00000162006_4 (sequence is synthesized)
gtggcctgcctggtgggcgctggcctgcgactcagcgcctccgaccagcaactgctcggggccctggtgtgtgacatggacgcgtccagcatcggtgccgcagacccccacatgctggag

SEQ ID NO: 483510 - DNA, 120 bp, Artificial Sequence
  ENSG00000162006_5 (sequence is synthesized)
aacctgcggcgctgcccccggctgaccgctgcccagcgcattgcccttaactcactgctggccggtgggaagacctcgctcgggccccctggctcctggacactggaggggctacaggcc

SEQ ID NO: 483511 - DNA, 120 bp, Artificial Sequence
  ENSG00000162006_6 (sequence is synthesized)
ctggggcccctggccacatacatcagccctcacctgtgggcgcaggtgcaggaggccgtgggcctgggcttcttccgcagcgtggtggcttcgtgccaggtgggaaggctcggccagcgc

SEQ ID NO: 483512 - DNA, 120 bp, Artificial Sequence
  ENSG00000162006_7 (sequence is synthesized)
gaggccaggtgcttcgtcaccagcttcctggagtccaagaccaaaccagtgtcctccaggcccaggctcagcacaggcaacatcacggccgccacgctgcgggacgacctcttcctggtg

SEQ ID NO: 483513 - DNA, 120 bp, Artificial Sequence
  ENSG00000162006_8 (sequence is synthesized)
ttgcagcacctgctgcccactgagtgccagcatgtggtcaaggccaagctcgcacagatctacccacaaggcctcccggaggatcagctgcggctcatcacctcgctggtctacctctac

SEQ ID NO: 483514 - DNA, 120 bp, Artificial Sequence
  ENSG00000162006_9 (sequence is synthesized)
tcccgcaccgagatcggccagtggagcatcacctcccaggacacggtcatggctctgctggcctccgacgtggccctggagaaccagacagaggctgtgctgcagaagtttctggagcac

SEQ ID NO: 483515 - DNA, 120 bp, Artificial Sequence
  ENSG00000162006_10 (sequence is synthesized)
aatggcacagtctccggtgccctgctgctggccatcgggggcacccgcctgtgctggatgagtcctcaccagatccagaccatccatccccaggagctccggctggccggggccctggac

SEQ ID NO: 483516 - DNA, 120 bp, Artificial Sequence
  ENSG00000162006_11 (sequence is synthesized)
ctctcctcctgcccccagagccggaaggacgtgctctacaccaaggcccatgagaccttcggcagcagcgggaccctagctgcctactaccgcctcatgcgcccctacctcggcggctcc

SEQ ID NO: 483517 - DNA, 120 bp, Artificial Sequence
  ENSG00000162006_12 (sequence is synthesized)
cctggtggagcccagcccccctcacccgtccccccaggcggcgccccggtggaggagctgcggcacctggcccacgccaacatctccatggacatcgacaccttcaccagcctgaacccc

SEQ ID NO: 483518 - DNA, 120 bp, Artificial Sequence
  ENSG00000162006_13 (sequence is synthesized)
ctcgagctgcagagcctggatgttggcaacgtgactgcgctgctgggccacaacgtgggagaccttcagaaggcccgcagccaccccaccgtcagggcctggctgcgcagcctcaacagc

SEQ ID NO: 483519 - DNA, 120 bp, Artificial Sequence
  ENSG00000162006_14 (sequence is synthesized)
tccaccctgggccagctcggcctggacgccagccccaccagccccactggcccagcccacggcaccagggggccccccagcaccacccaccaagtgctccatctggtccacacctcgggc

SEQ ID NO: 483520 - DNA, 120 bp, Artificial Sequence
  ENSG00000162006_15 (sequence is synthesized)
ctgcccacgaacgatgcccaggcctccacctcaggcagcctgtgggcccccctggggtacctgcccctggcgatggccctgccttgcagcctcctgtgcctgctgcactgggggacttgc

SEQ ID NO: 483521 - DNA, 120 bp, Artificial Sequence
  ENSG00000162006_16 (sequence is synthesized)
atcctggtttctgtggacagcgttgcctcagggtggctgggttcacaggggtcaggtgcaggaaaaacagaggtgttagattcagctggacgcccacttgggctgacgggccagctctag

SEQ ID NO: 483522 - DNA, 120 bp, Artificial Sequence
  ENSG00000162006_17 (sequence is synthesized)
tcctggacccactgcccttggccccagcaccttcctgccctgggacgtctcagccaggatgaccagtgcacgccgccgcacagacgtgggccccagagtgggtgccctgcagagctcagg

SEQ ID NO: 483523 - DNA, 120 bp, Artificial Sequence
  ENSG00000162009_0 (sequence is synthesized)
atgcctgcatgtgctggttcagggactcaccaccctggcgtcctcccttcttctcttgcagagcctgacgcaccccagggctgccgccatggagcccctgttcccagcctccacgcccag

SEQ ID NO: 483524 - DNA, 120 bp, Artificial Sequence
  ENSG00000162009_1 (sequence is synthesized)
ctggaacgcctcctccccgggggctgcctctggaggcggtgacaacaggacgctggtggggccggcgccctcggcaggggcccgggcggtgctggtgcccgtgctgtacctgctggtgtg

SEQ ID NO: 483525 - DNA, 120 bp, Artificial Sequence
  ENSG00000162009_2 (sequence is synthesized)
tgcggccgggctgggcgggaacacgctggtcatctacgtggtgctgcgcttcgccaagatgaagaccgtcaccaacatctacattctcaacctggcagtggccgacgtcctgtacatgct

SEQ ID NO: 483526 - DNA, 120 bp, Artificial Sequence
  ENSG00000162009_3 (sequence is synthesized)
ggggctgcctttcctggccacgcagaacgccgcgtccttctggcccttcggccccgtcctgtgccgcctggtcatgacgctggacggcgtcaaccagttcaccagtgtcttctgcctgac

SEQ ID NO: 483527 - DNA, 120 bp, Artificial Sequence
  ENSG00000162009_4 (sequence is synthesized)
agtcatgagcgtggaccgctacctggcagtggtgcacccgctgagctcggcccgctggcgccgcccgcgtgtggccaagctggcgagcgccgcggcctgggtcctgtctctgtgcatgtc

SEQ ID NO: 483528 - DNA, 120 bp, Artificial Sequence
  ENSG00000162009_5 (sequence is synthesized)
ctgcaacgccagctggccggagcccgtggggctgtggggcgccgtcttcatcatctacacggccgtgctgggcttcttcgcgccgctgctggtcatctgcctgtgctacctgctcatcgt

SEQ ID NO: 483529 - DNA, 120 bp, Artificial Sequence
  ENSG00000162009_6 (sequence is synthesized)
ggtgaaggtgagggcggcgggcgtgcgcgtgggctgcgtgcggcggcgctcggagcggaaggtgacgcgcatggtgttggtggtggtgctggtgtttgcgggatgttggctgcccttctt

SEQ ID NO: 483530 - DNA, 120 bp, Artificial Sequence
  ENSG00000162009_7 (sequence is synthesized)
caccgtcaacatcgtcaacctggccgtggcgctgccccaggagcccgcctccgccggcctctacttcttcgtggtcatcctctcctacgccaacagctgtgccaaccccgtcctctacgg

SEQ ID NO: 483531 - DNA, 120 bp, Artificial Sequence
  ENSG00000162009_8 (sequence is synthesized)
cttcctctctgacaacttccgccagagcttccagaaggttctgtgcctccgcaagggctctggtgccaaggacgctgacgccacggagccgcgtccagacaggatccggcagcagcagga

SEQ ID NO: 483532 - DNA, 120 bp, Artificial Sequence
  ENSG00000162009_9 (sequence is synthesized)
ggccacgccacccgcgcaccgcgccgcagccaacgggcttatgcagaccagcaagctgtgagagtgcaggcggggggtgggcggccccgtgtcacccccaggagcggaggttgcactgcg

SEQ ID NO: 483533 - DNA, 120 bp, Artificial Sequence
  ENSG00000162009_10 (sequence is synthesized)
gtgacccccacccatgacctgccagtcaggatgctccccggcggtggtgtgaggacagagctggctgaagccaggctggggtagacacagggcagtaggttccccaccgtgaccgaccat

SEQ ID NO: 483534 - DNA, 120 bp, Artificial Sequence
  ENSG00000162032_0 (sequence is synthesized)
agagcctgtgttttcttctagattctttccaccatggccagacgcccccggaacagcagggcctggcacttcgtcctgagtgcagcccgccgagacgcagatgcccgggccgtggctcta

SEQ ID NO: 483535 - DNA, 120 bp, Artificial Sequence
  ENSG00000162032_1 (sequence is synthesized)
gcaggctccactaactggggctacgactctgatgggcagcacagcgactcggactccgaccccgagtactccacgctgccgccatccatccccagtgcggtgcccgtgaccggcgagtcc

SEQ ID NO: 483536 - DNA, 120 bp, Artificial Sequence
  ENSG00000162032_2 (sequence is synthesized)
ttctgtgactgtgctgggcagagcgaggcctccttctgtagcagcctgcactcggcccaccggggcagggactgccgctgcggagaggaagacgagtatttcgactgggtctgggatgac

SEQ ID NO: 483537 - DNA, 120 bp, Artificial Sequence
  ENSG00000162032_3 (sequence is synthesized)
ttaaataagtcatcagccaccctgctgagctgtgacaaccgtaaggtcagcttccacatggagtacagctgcggcacagcggccatccggggcaccaaggagctgggggagggccagcac

SEQ ID NO: 483538 - DNA, 120 bp, Artificial Sequence
  ENSG00000162032_4 (sequence is synthesized)
ttctgggagatcaagatgacctctcccgtctacggcaccgacatgatggtgggcatcgggacgtcggatgtggacctggacaaataccgccacacgttctgcagcctgctgggcagggat

SEQ ID NO: 483539 - DNA, 120 bp, Artificial Sequence
  ENSG00000162032_5 (sequence is synthesized)
gaggacagctggggcctctcctacacgggcctcctccaccacaagggcgacaagaccagcttctcatcgcggttcggccagggctccatcattggcgtgcacctggacacctggcacggc

SEQ ID NO: 483540 - DNA, 120 bp, Artificial Sequence
  ENSG00000162032_6 (sequence is synthesized)
tttttcaagaacaggaagtgtataggtgtggcagccaccaagctgcagaacaagagattctacccgatggtgtgctccacggcggcccggagcagcatgaaggtcacccgctcctgtgcc

SEQ ID NO: 483541 - DNA, 120 bp, Artificial Sequence
  ENSG00000162032_7 (sequence is synthesized)
agcgccacttccctccagtacctgtgctgccaccgcctgcgccagctgcggccagactcgggagacacgctggagggtctgccgctgccgccgggcctcaagcaggtgctacacaacaag

SEQ ID NO: 483542 - DNA, 120 bp, Artificial Sequence
  ENSG00000162032_8 (sequence is synthesized)
ctgggctgggtcctgagcatgagttgcagccgccgcaaggctccagtgtccgatccccaggcagcgacctccgcccaccccagcagtcgcgagcctcggccctgccagaggaagcgctgc

SEQ ID NO: 483543 - DNA, 120 bp, Artificial Sequence
  ENSG00000162032_9 (sequence is synthesized)
cgccggacctgactgacttcccagtggaactgccttcttgggctgggacagcccctttcctctgtcccttctttctctgtcccttccttccagccacactccagggcggagttggatgag

SEQ ID NO: 483544 - DNA, 120 bp, Artificial Sequence
  ENSG00000162032_10 (sequence is synthesized)
gcccgtccggagggagccatctcttgctcccgaggctgggacagtcctttctgtgggggctctagggcccctctgctgctgtgctgggtggggaagcggctgccctgagccccaggtctt

SEQ ID NO: 483545 - DNA, 120 bp, Artificial Sequence
  ENSG00000162032_11 (sequence is synthesized)
gtgggaggctgcgaggacgagagcctggctggagcccgcgttgctgttcccacagggcctcggtttttcctaacttgctctgcatgctgtcagcggctgccccgccgtcatagacttaaa

SEQ ID NO: 483546 - DNA, 120 bp, Artificial Sequence
  ENSG00000162032_12 (sequence is synthesized)
gcacgggccgacgtctcgggctctgggcgggcgcgctgaccttgcgggcgcggcggtagcagcgcggccagggcgccgcctttgttcctctccggagggccgcgcccgagagaggcttcc

SEQ ID NO: 483547 - DNA, 80 bp, Artificial Sequence
  ENSG00000162032_13 (sequence is synthesized)
cccgagagaggcttccccggtgccgccgactccggaacccgcgcgcccgcgggagggaacagccaggccgggctgccgcc

SEQ ID NO: 483548 - DNA, 80 bp, Artificial Sequence
  ENSG00000162032_14 (sequence is synthesized)
gcctccctggaaccccacccggggcccagcgggcgttgccagccgcgagcccggcgcaggggtcggccctggaaggctag

SEQ ID NO: 483549 - DNA, 120 bp, Artificial Sequence
  ENSG00000162032_15 (sequence is synthesized)
gcgggaaccccggagctggcgagggaggtgccaggcaggtggcctgggaagcgcagacctggccctcgcagccttttgcattttataccataacagcggccagcgctgagcaggttttaa

SEQ ID NO: 483550 - DNA, 120 bp, Artificial Sequence
  ENSG00000162032_16 (sequence is synthesized)
gatttgtgtttcacgaggagccctggcggtagcgagcggaggggaaggcgagctgcgcggcccaggagacggtggcgggaggaggatgcaggcgggtgcggcggtcgggccgggcgtgag

SEQ ID NO: 483551 - DNA, 120 bp, Artificial Sequence
  ENSG00000162032_17 (sequence is synthesized)
gggaaggtgtcggggagcggtcacggtgcttctggcatgaggaactgggaggccggagatgccatttgtcaaaccggacgacagaggaggagcgagtggaggttttagatgcctgcggga

SEQ ID NO: 483552 - DNA, 120 bp, Artificial Sequence
  ENSG00000162032_18 (sequence is synthesized)
gcaggcaggcagacattacctgaacacggaatcagtcggagaaaaagatgcttctgaggctagaggaccagtccaaacctgggcctgtctcctggatgcaccgcattcacacagcgactc

SEQ ID NO: 483553 - DNA, 120 bp, Artificial Sequence
  ENSG00000162032_19 (sequence is synthesized)
gcccagcccctgctgggactgcactgcgggcgggcctgggggtgggcagggcagagccccatggagctctcagggctgccccagcctgggcctctcttgcagatttcgactgggtctggg

SEQ ID NO: 483554 - DNA, 120 bp, Artificial Sequence
  ENSG00000162032_20 (sequence is synthesized)
acagcctcaggggtgacaggacctcagaacacactgcattcttcactgtgctttctcctctgaaacacatggtgcatggagaggttggcagttgcttttggttcattcaacagaaattct

SEQ ID NO: 483555 - DNA, 120 bp, Artificial Sequence
  ENSG00000162032_21 (sequence is synthesized)
cgcgcgagctttgtctccaaccgcttgggaactgaccaataggaacgttggattaggactgacagttcctgaaacctctcggcaatagctttgtcacccgactcccgccccctctcccga

SEQ ID NO: 483556 - DNA, 120 bp, Artificial Sequence
  ENSG00000162039_0 (sequence is synthesized)
gctgaggacggggcggggcctcgcgctaacggtcgcgcggccgtcgcacctgcacgaggctgtggcccgagcgtcctgtggagaagccgcgaagcgcgggcgacccgggggtcgggcggg

SEQ ID NO: 483557 - DNA, 120 bp, Artificial Sequence
  ENSG00000162039_1 (sequence is synthesized)
ccaggtccgcgaggccgcggcggcagctgtgcaggcccggggagcagccggccgggcgagcctcggattaaaaaaatggcaaactcctttgcagcgaggattttcactaccctttcagat

SEQ ID NO: 483558 - DNA, 120 bp, Artificial Sequence
  ENSG00000162039_2 (sequence is synthesized)
ctgcagacaaatatggctaatctgaaagttatcggtatagttattgggaaaacagatgtcaaaggctttccagacagaaaaaatattggatcagaaaggtacactttcagcttcaccatt

SEQ ID NO: 483559 - DNA, 120 bp, Artificial Sequence
  ENSG00000162039_3 (sequence is synthesized)
cgggattcaccagcacattttgtaaatgcagcttcctggggcaatgaagattacatcaagtctctttctgacagctttagggttggtgactgtgtgataattgaaaatcctctgatccaa

SEQ ID NO: 483560 - DNA, 120 bp, Artificial Sequence
  ENSG00000162039_4 (sequence is synthesized)
agaaaggaaatagaaagagaagaaaaattcagccctgcaactcctagcaactgtaaactgttgctcagtgagaatcactcaacagtaaaagtttgttccagttatgaagtggacacaaag

SEQ ID NO: 483561 - DNA, 120 bp, Artificial Sequence
  ENSG00000162039_5 (sequence is synthesized)
ttactttctttgatacatttacctgttaaagagtctcatgattattattcactgggtgacattgttgcaaatggacacagtcttaatgggaggattattaacgtgcttgcagctgtgaaa

SEQ ID NO: 483562 - DNA, 120 bp, Artificial Sequence
  ENSG00000162039_6 (sequence is synthesized)
tcggttggagagccaaaatactttacaacttcagaccggagaaaaggccagaggtgtgaagttagactctatgatgaaacagagtcgtcttttgcgatgacatgttgggataatgaatcc

SEQ ID NO: 483563 - DNA, 120 bp, Artificial Sequence
  ENSG00000162039_7 (sequence is synthesized)
ccattattacaactaatccagatataccagaagctaacattctgctgaattttatacgagaaaataaagaaacgaatgttctggatgatgaaattgacagttatttcaaagaatccataa

SEQ ID NO: 483564 - DNA, 120 bp, Artificial Sequence
  ENSG00000162039_8 (sequence is synthesized)
atttaagtacaatagttgatgtctacacagttgaacaattaaagggaaaagctttgaagaatgaaggaaaagctgatccttcctatggcatcctttatgcctacatttccacactcaaca

SEQ ID NO: 483565 - DNA, 120 bp, Artificial Sequence
  ENSG00000162039_9 (sequence is synthesized)
ttgatgatgaaactacaaaagtagttcgaaatagatgttccagctgtggttatattgtaaatgaagcatctaacatgtgcacaacttgcaacaaaaactccttggactttaaatctgtct

SEQ ID NO: 483566 - DNA, 120 bp, Artificial Sequence
  ENSG00000162039_10 (sequence is synthesized)
ttctcagtttccatgtgctgattgatctgactgatcacacaggcacccttcattcctgtagtctcacaggaagtgttgctgaggagactttgggctgcacgttcgttctatcacacagag

SEQ ID NO: 483567 - DNA, 120 bp, Artificial Sequence
  ENSG00000162039_11 (sequence is synthesized)
caaggagtggattgaaaattagtgtactctcgtgcaagcttgcagatcctactgaggcaagcagaaacttgtctggacaaaaacatgtttaaaacggtctatcattttgaactctggaaa

SEQ ID NO: 483568 - DNA, 120 bp, Artificial Sequence
  ENSG00000162039_12 (sequence is synthesized)
agtataagagttttaactccctttaaaatggaatattaatttgaaaattatggggaaaattgcattttgtttacatgtggtgaacatgtttctagaaattgttatggtggaggtggtctg

SEQ ID NO: 483569 - DNA, 120 bp, Artificial Sequence
  ENSG00000162039_13 (sequence is synthesized)
ggtgagtctgaaggcctctctcatctgacctcccttcttagaaggcctcctactgtctttgccttgtctcctcccaagttggaaaatgtttacatgaattaataaacagatttaatcttc

SEQ ID NO: 483570 - DNA, 120 bp, Artificial Sequence
  ENSG00000162039_14 (sequence is synthesized)
ctttgggctgcacggtacatgagtttcttgcaatgacagatgaacagaaaacagcattaaagtggcaatttctcttggaaagaagcaaaatttatttaaaattcgttctatcacacagag

SEQ ID NO: 483571 - DNA, 120 bp, Artificial Sequence
  ENSG00000162039_15 (sequence is synthesized)
accgtcttacacaataccaaccgcccatcaggttgtttcaaaggctttcagccactgactaatagaaaaagagactgcatacaacgtttcattcatgttttgctaggctagatacatttg

SEQ ID NO: 483572 - DNA, 120 bp, Artificial Sequence
  ENSG00000162039_16 (sequence is synthesized)
ttgtagcggtctcatatttgtaagtccgtggaaaaacctgaaagtatttttttcttgaaaatttttttgaaaaaaaagtaaaatgtcattaggagtgagaatcaggaatgatggattcac

SEQ ID NO: 483573 - DNA, 80 bp, Artificial Sequence
  ENSG00000162040_0 (sequence is synthesized)
acaagccgggcacccacggactgagcggcgcgcgggccgagatgcgcgcccgcctgctgcccccgctcccgggcctggag

SEQ ID NO: 483574 - DNA, 80 bp, Artificial Sequence
  ENSG00000162040_1 (sequence is synthesized)
cgctctgcgggcgtcccgcgcgccgatgctgctcgtggccctggtgctcggcgcctactgcctctgcgccctccccggcc

SEQ ID NO: 483575 - DNA, 120 bp, Artificial Sequence
  ENSG00000162040_2 (sequence is synthesized)
gcccccgcgccctccgagccgtccagctccgtccaccgcccgggagcacccggcctgcctttggccagcggtcccggccgccggcgcttcccgcaagcgctcatcgttggcgtgaagaag

SEQ ID NO: 483576 - DNA, 120 bp, Artificial Sequence
  ENSG00000162040_3 (sequence is synthesized)
tcccgcaagcgctcatcgttggcgtgaagaagggcggcacgcgcgccctgctggagtttctgcggctgcaccccgacgtccgcgcgctgggctctgagccccacttcttcgacaggtgct

SEQ ID NO: 483577 - DNA, 120 bp, Artificial Sequence
  ENSG00000162040_4 (sequence is synthesized)
acgagcgcggcctcgcctggtaccggagtctgatgccccgaaccctggatgggcagatcaccatggagaagacccccagctacttcgtgacgcgagaggccccccgccgcatccacgcca

SEQ ID NO: 483578 - DNA, 120 bp, Artificial Sequence
  ENSG00000162040_5 (sequence is synthesized)
accccgtgacccgggccatctccgactacgcccagacgctctccaagaccccgggcctgcccagcttccgcgccctggccttccgccacggcctgggccccgtggacacagcctggagcg

SEQ ID NO: 483579 - DNA, 120 bp, Artificial Sequence
  ENSG00000162040_6 (sequence is synthesized)
ccgtccgcatcggcctgtacgcccagcacctggaccactggctgcgctacttccccctgtcccacttcctgttcgtcagcggggagcgtctggtcagcgacccggccggagaggtcggcc

SEQ ID NO: 483580 - DNA, 120 bp, Artificial Sequence
  ENSG00000162040_7 (sequence is synthesized)
gcgtgcaggacttcctgggcctgaaacgggtcgtcacggacaagcacttctacttcaacgccaccaagggcttcccctgcctcaagaaggcccagggcggcagccgtccccgctgcctgg

SEQ ID NO: 483581 - DNA, 120 bp, Artificial Sequence
  ENSG00000162040_8 (sequence is synthesized)
gcaagtccaagggccggccacacccacgcgtgccccaggccctggtccggcgcctgcaggagttctaccggcccttcaaccgcaggttctaccagatgacgggccaggacttcggctggg

SEQ ID NO: 483582 - DNA, 120 bp, Artificial Sequence
  ENSG00000162040_9 (sequence is synthesized)
gctgagcggcaccctggggatgctcagcaccttgattgacacccgctcgcctggccagagcgggctgcgtgcacatgctgggcagagaggaatatttaagaaataaagcttggacccaga

SEQ ID NO: 483583 - DNA, 120 bp, Artificial Sequence
  ENSG00000162062_0 (sequence is synthesized)
agaggcggcaaattgcaaggagacgccgccgccttcatgctgccggcgggctgctcgcgccggctggtggccgagctgcagggcgccctggacgcctgcgcacagcgacaattgcaattg

SEQ ID NO: 483584 - DNA, 120 bp, Artificial Sequence
  ENSG00000162062_1 (sequence is synthesized)
gagcagagcctgcgcgtttgccgtcggctgctgcatgcctgggaaccaactgggacccgggctttgaagccacctccagggccagaaactaatggagaggacccccttccagcatgcaca

SEQ ID NO: 483585 - DNA, 120 bp, Artificial Sequence
  ENSG00000162062_2 (sequence is synthesized)
cccagtccacaagacctcaaagagttggagtttctgacccaggcactggagaaggctgtacgagttcgaagaggcatcactaaggccggagagagagacaaggcccccagcctgaaatct

SEQ ID NO: 483586 - DNA, 120 bp, Artificial Sequence
  ENSG00000162062_3 (sequence is synthesized)
aggtccattgtcacctcttctggcacgacagcctccgccccaccgcattccccaggccaagctggtggccatgcttcagacacgagacccaccaagggcctccgccagaccacggtgcct

SEQ ID NO: 483587 - DNA, 120 bp, Artificial Sequence
  ENSG00000162062_4 (sequence is synthesized)
gccaagggccaccctgagcgccggctgctgtcagtgggggatgggacccgtgttgggatgggagcccgaacccccaggcctggggcgggcctcagggaccagcaaatggccccatccgct

SEQ ID NO: 483588 - DNA, 120 bp, Artificial Sequence
  ENSG00000162062_5 (sequence is synthesized)
gctcctcaggccccagaagccttcacactcaaggagaaggggcacctgctgcggctgcctgcggcattcaggaaagcagcttcccagaactcgagcctgtgggcccagctcagttccaca

SEQ ID NO: 483589 - DNA, 120 bp, Artificial Sequence
  ENSG00000162062_6 (sequence is synthesized)
ggccccagcccaggctcagtgctgtggaggtggaggcggaggcggggcgcctgcggaaggcctgctcgctgctgagactgcgcatgagggaggagctctcggcagcccccatggactgga

SEQ ID NO: 483590 - DNA, 120 bp, Artificial Sequence
  ENSG00000162062_7 (sequence is synthesized)
tgcaggagtaccgctgcctgctcacgctggaggggctgcaggccatggtgggccagtgtctgcacaggctgcaggagctgcgtgcagcggtggcggaacagccaccaagaccatgtcctg

SEQ ID NO: 483591 - DNA, 120 bp, Artificial Sequence
  ENSG00000162062_8 (sequence is synthesized)
tggggaggccccccggagcctcgccgtcctgtgggggtagagcggagcctgcatggagcccccagctgcttgtctactccagcacccaggagctgcagaccctggcggccctcaagctgc

SEQ ID NO: 483592 - DNA, 120 bp, Artificial Sequence
  ENSG00000162062_9 (sequence is synthesized)
gagtggctgtgctggaccagcagatccacttggaaaaggtcctgatggctgaactcctccccctggtaagcgctgcacagccgcaggggccgccctggctggccctgtgccgggctgtgc

SEQ ID NO: 483593 - DNA, 120 bp, Artificial Sequence
  ENSG00000162062_10 (sequence is synthesized)
acagcctgctctgcgagggaggagcacgtgtccttaccatcctgcgggatgaacctgcagtctgagcctttcccatgctgccctcggcctgttcagatggggattgggggtgtcttccct

SEQ ID NO: 483594 - DNA, 120 bp, Artificial Sequence
  ENSG00000162062_11 (sequence is synthesized)
ggcactgtgctcggggacccagagatgcctgtgcttccctgggaaacctggtgaactggaccaggtggcctcactggctcttctcaggacaactaagcctgctggtcagggctggctttc

SEQ ID NO: 483595 - DNA, 120 bp, Artificial Sequence
  ENSG00000162062_12 (sequence is synthesized)
agccttcctaaggctcctggactccagaggccagcggggagcctttcctggctccctctgttttctctcactgtagaccaaagagccgcttgtgtgatattaaagccactttagaaagca

SEQ ID NO: 483596 - DNA, 80 bp, Artificial Sequence
  ENSG00000162062_13 (sequence is synthesized)
atgctgccggcgggctgctcgcgccggtgaggcctgcgcggcaggagggggtgggaggatgcgggcgggccggtagccag

SEQ ID NO: 483597 - DNA, 120 bp, Artificial Sequence
  ENSG00000162062_14 (sequence is synthesized)
ccagcagatccacttggaaaaggtgcttctggaagaggaggtgggggtgcaacagaggtccgcagccttgaggacccgagggtaggggcttgactgctccaccccccaggacccaggagg

SEQ ID NO: 483598 - DNA, 120 bp, Artificial Sequence
  ENSG00000162062_15 (sequence is synthesized)
atgggggcaagcctggggtctgtgtgtgtgggttgggaagtgcatgggtcagacggggctgggacggcaggagggagcctggagcctcagaaggagggaggagggctgaagcatgggggc

SEQ ID NO: 483599 - DNA, 120 bp, Artificial Sequence
  ENSG00000162062_16 (sequence is synthesized)
acttcggagctgtgggttgtcagtgccaccctccttaccctgcaggctctgagctgggggcctgccgcggggcccggcggccccctcgggtctgtttgggctgggccctgcctcctggcc

SEQ ID NO: 483600 - DNA, 120 bp, Artificial Sequence
  ENSG00000162062_17 (sequence is synthesized)
ttctctctaatggggcagcactggacgatgcttctcctatggccactctggaagccctatccaagggggctcatccttggtggggtcgggtgtgggagaggggcaagaagcctcatccct

SEQ ID NO: 483601 - DNA, 120 bp, Artificial Sequence
  ENSG00000162062_18 (sequence is synthesized)
actcaaggagaaggggtaggtttcccggaccctcactggagggacttctgtctctgcctcctcagaccctggctagcaaggagcctgggatttggggtgacagggaaggcagggcatcga

SEQ ID NO: 483602 - DNA, 120 bp, Artificial Sequence
  ENSG00000162062_19 (sequence is synthesized)
gccctgtggcatacccctgaggctcatgctcagaagctggcagaatgaagcagctgtgtggtggtgtccaggttggcaccatcaggtcagggaagtactggagcctgtcctcctctcttc

SEQ ID NO: 483603 - DNA, 120 bp, Artificial Sequence
  ENSG00000162062_20 (sequence is synthesized)
ctgcgcgtttgccgtcggctgctgcatgcctggtacgcggaccccggacccactggccagacctccctcgggccctcagagtcccgccccgagcgcccagggctgggagaccgggcgcag

SEQ ID NO: 483604 - DNA, 120 bp, Artificial Sequence
  ENSG00000162063_0 (sequence is synthesized)
aggcgggctccggcggcagcgacgcgagcgcggcgatggggagcggcggcgtggtccactgtaggtgtgccaagtgtttctgttatcctacaaagcgaagaataaggaggaggccccgaa

SEQ ID NO: 483605 - DNA, 120 bp, Artificial Sequence
  ENSG00000162063_1 (sequence is synthesized)
acctgaccatcttgagtctccccgaagatgtgctctttcacatcctgaaatggctttctgtagaggacatcctggccgtccgagctgtacactcccagctgaaggacctggtggacaacc

SEQ ID NO: 483606 - DNA, 120 bp, Artificial Sequence
  ENSG00000162063_2 (sequence is synthesized)
acgccagtgtgtgggcatgtgccagcttccaggagctgtggccgtctccagggaacctgaagctctttgaaagggctgctgaaaaggggaatttcgaagctgctgtgaagctgggcatag

SEQ ID NO: 483607 - DNA, 120 bp, Artificial Sequence
  ENSG00000162063_3 (sequence is synthesized)
cctacctctacaatgaaggcctgtctgtgtctgatgaggcccgcgcagaagtgaatggcctgaaggcctctcgcttcttcagtctcgctgagcggctgaatgtgggtgccgcacctttca

SEQ ID NO: 483608 - DNA, 120 bp, Artificial Sequence
  ENSG00000162063_4 (sequence is synthesized)
tctggctcttcatccgccctccgtggtcggtgagcggaagctgctgcaaggccgtggttcacgagagcctcagggcagagtgccagctgcagaggactcacaaagcatccatattgcact

SEQ ID NO: 483609 - DNA, 120 bp, Artificial Sequence
  ENSG00000162063_5 (sequence is synthesized)
gcttgggcagagtgctgagtctgttcgaggatgaggagaagcagcagcaggcccatgacctgtttgaggaggctgctcatcagggatgtctgaccagctcctacctcctctgggaaagcg

SEQ ID NO: 483610 - DNA, 120 bp, Artificial Sequence
  ENSG00000162063_6 (sequence is synthesized)
acaggaggacagatgtgtcagatcctgggcgatgcctccacagcttccgaaaactcagggactacgctgccaaaggctgctgggaagcgcagctgtctttagccaaagcctgtgcaaatg

SEQ ID NO: 483611 - DNA, 120 bp, Artificial Sequence
  ENSG00000162063_7 (sequence is synthesized)
caaaccagcttggactggaggtgagagcttccagtgagatcgtctgccagctatttcaggcttcccaggctgtcagtaaacaacaagtcttctccgtgcagaagggactcaatgacacaa

SEQ ID NO: 483612 - DNA, 120 bp, Artificial Sequence
  ENSG00000162063_8 (sequence is synthesized)
tgaggtacattctgatcgactggctggtggaagttgccaccatgaaggacttcacaagcctgtgcctgcacctgaccgtggagtgtgtggaccggtacctgcggaggaggctggtgccgc

SEQ ID NO: 483613 - DNA, 120 bp, Artificial Sequence
  ENSG00000162063_9 (sequence is synthesized)
ggtacaggctccagctgctgggcatcgcctgcatggtcatctgcacccggtttatcagtaaagagatcctgaccatccgggaggccgtatggctcacggacaacacttacaagtacgagg

SEQ ID NO: 483614 - DNA, 120 bp, Artificial Sequence
  ENSG00000162063_10 (sequence is synthesized)
acctggtgagaatgatgggcgagatcgtctccgccttggaagggaagattcgagtccccactgtggtggattacaaggaggtcctgctgacgctagtccctgtggagctgagaacccagc

SEQ ID NO: 483615 - DNA, 120 bp, Artificial Sequence
  ENSG00000162063_11 (sequence is synthesized)
acctgtgcagcttcctctgcgagctctccctgctgcacaccagcctgtccgcctacgccccagcccgcctggctgccgcagccctgctcctggccagactgacgcacgggcagacacagc

SEQ ID NO: 483616 - DNA, 120 bp, Artificial Sequence
  ENSG00000162063_12 (sequence is synthesized)
cctggaccactcagctgtgggacctcaccggattctcctatgaagacctcattccctgcgtcttgagcctccataagaagtgcttccatgatgacgcccccaaggactacaggcaagtct

SEQ ID NO: 483617 - DNA, 120 bp, Artificial Sequence
  ENSG00000162063_13 (sequence is synthesized)
ctctgaccgccgtgaagcagcggtttgaggacaagcgctatggagaaatcagccaggaagaggtgctgagctacagccagttgtgtgctgcattaggagtgacacaagacagccccgacc

SEQ ID NO: 483618 - DNA, 120 bp, Artificial Sequence
  ENSG00000162063_14 (sequence is synthesized)
ccccgactttcctcagcacaggggagatccacgccttcctcagctctccctcggggcggagaaccaaacggaagcgggagaacagcctccaggaagacagaggcagcttcgttaccaccc

SEQ ID NO: 483619 - DNA, 120 bp, Artificial Sequence
  ENSG00000162063_15 (sequence is synthesized)
ccactgcggagctgtccagccaggaggagacgctgctgggcagcttcctcgactggagcctggactgctgctctggctatgaaggcgaccaggagagtgagggcgagaaggagggcgacg

SEQ ID NO: 483620 - DNA, 120 bp, Artificial Sequence
  ENSG00000162063_16 (sequence is synthesized)
tgacagctcccagcggcatcctcgatgtcaccgtggtctacctgaacccagaacagcattgctgccaggaatccagtgatgaggaggcttgtccagaggacaagggaccccaggacccac

SEQ ID NO: 483621 - DNA, 120 bp, Artificial Sequence
  ENSG00000162063_17 (sequence is synthesized)
caacccctggacccaaacccctggtccgcaccagccgggagccagggaaggacgtcacgacctcagggtactcctccgtcagcaccgcaagtcccacaagctccgtggacggtggcttgg

SEQ ID NO: 483622 - DNA, 120 bp, Artificial Sequence
  ENSG00000162063_18 (sequence is synthesized)
gggccctgccccaacctacctcagtgctgtccctggacagtgactcgcacacacagccctgccaccatcaggccaggaagtcatgtttacagtgtcgtcccccaagtcccccggagagca

SEQ ID NO: 483623 - DNA, 120 bp, Artificial Sequence
  ENSG00000162063_19 (sequence is synthesized)
gtgttccccagcaacaggtgaagcggataaacctatgcatacacagtgaggaggaggacatgaacctgggccttgtgaggctgtaagtgtgtcagcacatttgccgcagtggatgtgtac

SEQ ID NO: 483624 - DNA, 120 bp, Artificial Sequence
  ENSG00000162063_20 (sequence is synthesized)
tgagggggctggaggcgaagggtgggagcatagcataggaacgctgcatagaccatggaggcctttgcgcagagagcagagaggatgacttgcggccaccaagtttctgtctccgcggga

SEQ ID NO: 483625 - DNA, 120 bp, Artificial Sequence
  ENSG00000162063_21 (sequence is synthesized)
gtcccgtgcaagccatcagaatgttgaaatgagggtgaagagctcagatccctctctttggaaagtttagcctggaagcagttggccacactgtgtggagggcacctctctgtcccttcc

SEQ ID NO: 483626 - DNA, 120 bp, Artificial Sequence
  ENSG00000162063_22 (sequence is synthesized)
gtgtctcactgtctctggaagcttcagcccatgtgtgtcctggtgttcccagccccaccagagccccgtgccgggagctgacagctttcacgcttaaggcacgtgtgacctgggtagtca

SEQ ID NO: 483627 - DNA, 120 bp, Artificial Sequence
  ENSG00000162063_23 (sequence is synthesized)
gacaccacttgagcccctgcccacatctgctggtttggggcttcagtggggagctgacagctgtgagcacaccactgtcccctcatccacctcggcctgcatggggcacccacttccttc

SEQ ID NO: 483628 - DNA, 120 bp, Artificial Sequence
  ENSG00000162063_24 (sequence is synthesized)
tgggtggggcttccatggtaagggggcctgcgtccctgcacactgcgaggactgccttggccacaggcccactccctacgacacgtgactcgttttagagctctgtcccagaggcgttcg

SEQ ID NO: 483629 - DNA, 120 bp, Artificial Sequence
  ENSG00000162063_25 (sequence is synthesized)
tatgtgacccacagatggcgtcaatgtgaacacctctctttgtgctgaatttctgggccattcttttcctgtcttatttctaaatttccttcttccaagatgaaaacaaaagaaaaactt

SEQ ID NO: 483630 - DNA, 120 bp, Artificial Sequence
  ENSG00000162063_26 (sequence is synthesized)
aaaacagaaggtattaaaaaaacaagagattcccaccattatttaggttcacctgcaaaacaaaaatcttactccagcccctcaatgccatcctgacacactttatgcaaaaagaatttt

SEQ ID NO: 483631 - DNA, 120 bp, Artificial Sequence
  ENSG00000162063_27 (sequence is synthesized)
cccagataggctagccagaaaaaacttcaagtcctctgtaacatctgaggtgaccaagaggcagaagagcagagcagtcgggggccgtgtcctggctgatcccaactgcagctctgctgt

SEQ ID NO: 483632 - DNA, 120 bp, Artificial Sequence
  ENSG00000162063_28 (sequence is synthesized)
gggggcccgtgggagggaggcagacccctgggctttcctgctggccacggagactctgctcctgcatggaaagggagcctgggagccagcagcccacgcctggggagcctgcctggggcc

SEQ ID NO: 483633 - DNA, 120 bp, Artificial Sequence
  ENSG00000162063_29 (sequence is synthesized)
atgtgaccatggcctctccctgggaacgggctgaccacaacacaccctgctgccatccacttctgtttactctgcaaatgtaagaaagaaccacttggccagaagtgtcccccagatgct

SEQ ID NO: 483634 - DNA, 90 bp, Artificial Sequence
  ENSG00000162063_30 (sequence is synthesized)
taagaaagaaccacttggccagaagtgtcccccagatgcttttttttttttttttttggagacagttttgctcttgtctcccctcaactc

SEQ ID NO: 483635 - DNA, 85 bp, Artificial Sequence
  ENSG00000162063_31 (sequence is synthesized)
taacctccgcctcccggataagcacccaaccacgcccagctaatttttgtattttcggtagagacgggatttcaccatgttggcc

SEQ ID NO: 483636 - DNA, 120 bp, Artificial Sequence
  ENSG00000162063_32 (sequence is synthesized)
tacaggcatgagccacggcgcctggcccccaaatgctcttgaaccggaaacccagggatgggagatgctcactgagctgctgcttttatgtgtgctggtgctatgtgtgttcatgtccgc

SEQ ID NO: 483637 - DNA, 120 bp, Artificial Sequence
  ENSG00000162063_33 (sequence is synthesized)
tgctggtgctatgtgtgttcatgtccgcggcagctgtctttttgctactataagggaattctggccaccctgggtggggtgtggtcggggtgagaacccaagcgttggaactgtagaccc

SEQ ID NO: 483638 - DNA, 120 bp, Artificial Sequence
  ENSG00000162063_34 (sequence is synthesized)
gtcctgtcgactgtgtgcccctgggcatgtgtgagcctcagtttcctcatctgtaaggggggcaatgatacctacctcacaggggtgttgtgaggattaaatgtgaggaggatagtggca

SEQ ID NO: 483639 - DNA, 120 bp, Artificial Sequence
  ENSG00000162063_35 (sequence is synthesized)
ccgtaagtcctcaccccacctgcatgttggcgcttcagataagtgtgagcctttggccctatgaagaagtggtccccgtgttagcagttcagttgctgtccttgctctatccgatggcct

SEQ ID NO: 483640 - DNA, 120 bp, Artificial Sequence
  ENSG00000162063_36 (sequence is synthesized)
gcctccccattccctctcaggagctcgtgcccagatgtaccctgctgagggacctgctaatgatactctgactttgcaggttacgaaagtcgcctcttgttttagcaaaccctttaattt

SEQ ID NO: 483641 - DNA, 120 bp, Artificial Sequence
  ENSG00000162063_37 (sequence is synthesized)
cagttggcaaagagtgactgagccagagcctcagcacgggggctgtttgggctccctgccctgtgcgccatgagcacgcagacctgcctgtggatgctggccctctccttggccatcctc

SEQ ID NO: 483642 - DNA, 120 bp, Artificial Sequence
  ENSG00000162063_38 (sequence is synthesized)
ttagaactctcgagacagagttcagcgtgccctgtaacacagagccaggcttctaaacgggaagcaggtacaggcaggttagaactggcctggtgcctggatcccttcatccccagaggc

SEQ ID NO: 483643 - DNA, 120 bp, Artificial Sequence
  ENSG00000162063_39 (sequence is synthesized)
acactgggatgtagcctcccacatttgtacttctaaacgatctggtgtcttgctgggagagagtccctacctggccggctggcagaattgtgactgacagggaccatgagcaacaccctc

SEQ ID NO: 483644 - DNA, 120 bp, Artificial Sequence
  ENSG00000162063_40 (sequence is synthesized)
ctccagaatcaggggagccgaggtcctacccctaccctcccatcaaagagcagttcccagacataaaattcacacaccatacagttcacccctctaaagcctgcaattctgtggtttttt

SEQ ID NO: 483645 - DNA, 120 bp, Artificial Sequence
  ENSG00000162063_41 (sequence is synthesized)
aggatattcacagggttgtgcagccattgccactgtctaattttagaatattctcctcgtcccaaaaagaacccccacccctgccctggacccattaccaggggtcaggcggtggttccc

SEQ ID NO: 483646 - DNA, 120 bp, Artificial Sequence
  ENSG00000162063_42 (sequence is synthesized)
agctggagggagggtgggacatgaagcgtcgcggggtctccttcccctgaccttcagaatccaggcttccgggaggaccacagcaggggcattgatcacaatgacccacctgttctagac

SEQ ID NO: 483647 - DNA, 120 bp, Artificial Sequence
  ENSG00000162063_43 (sequence is synthesized)
agaaaagacaggtgcccccatcctggagggctctactctcctgaaacacagctgctttgcactatggtgggcttcaggcattacactttccaccaagaccatggagagctttccacattc

SEQ ID NO: 483648 - DNA, 120 bp, Artificial Sequence
  ENSG00000162063_44 (sequence is synthesized)
gtgagtctgggcgaggggcagcacctgcgaggccacctgcagggtcccaggacacaggaagaccccgagggtagatcctggaccctggaaagtcaggagcctaagggaagtgaagatgca

SEQ ID NO: 483649 - DNA, 120 bp, Artificial Sequence
  ENSG00000162063_45 (sequence is synthesized)
gaaaactgagagtgcagatatggggaacgcatctggaaatcagctggcacagaggaggaagcctgagagccagggtgggctgtggagttctgggtacacgtgctgacagctggaaacatg

SEQ ID NO: 483650 - DNA, 120 bp, Artificial Sequence
  ENSG00000162063_46 (sequence is synthesized)
tgtggagttctgggtacacgtgctgacagctggaaacatggggctgaggctgcatggggcagtgggagctcaagacacaaatctggccaggtgtggtggctcacgcctgtcatcctagca

SEQ ID NO: 483651 - DNA, 89 bp, Artificial Sequence
  ENSG00000162063_47 (sequence is synthesized)
aaatctagttagccaggggtggtggtgcatacctatagtcccagctactcaggaggctgcggtgggaggatcgcttgagcctgggaggt

SEQ ID NO: 483652 - DNA, 87 bp, Artificial Sequence
  ENSG00000162063_48 (sequence is synthesized)
tgcatacctatagtcccagctactcaggaggctgccttgcaatgagccgtgactatgccaatgcactccagcctgggtgacagagca

SEQ ID NO: 483653 - DNA, 120 bp, Artificial Sequence
  ENSG00000162063_49 (sequence is synthesized)
gcgctggtgcgctacgcgtgcagcatcggcgtgaacatcatccgggccagaccctgcgctgggcctgcatgcggcactgcaccaaggagcccccgagcgctgagagcccacaccccgtcc

SEQ ID NO: 483654 - DNA, 120 bp, Artificial Sequence
  ENSG00000162065_0 (sequence is synthesized)
gggctctccggggtgggcacagggcgacagctcggcgggggcggggccgagcacgcgcgtgcgcagaaaggccggcgcggcaggctgaggagaaagcggcgcgcggagggtgtgagatgg

SEQ ID NO: 483655 - DNA, 120 bp, Artificial Sequence
  ENSG00000162065_1 (sequence is synthesized)
ggtgtgagatggcagacaggtttgcaggaaaccctcagaaagggggctggaggatttagccactctgtcctccccttccggcagtccagggcctcctcccgagcacagcggcgctatgga

SEQ ID NO: 483656 - DNA, 120 bp, Artificial Sequence
  ENSG00000162065_2 (sequence is synthesized)
ctctccaggatacaactgcttcgtggacaaagacaagatggacgctgccatccaggacctggggcccaaggagctgagctgcactgaactgcaggaactgaagcagctggcgcgccaggg

SEQ ID NO: 483657 - DNA, 120 bp, Artificial Sequence
  ENSG00000162065_3 (sequence is synthesized)
ctactgggcccaaagccacgccctgcggggaaaggtgtaccagcgcctgatccgggacattccctgccgcacggtcacgcctgacgccagcgtgtacagcgacatcgtgggcaagatcgt

SEQ ID NO: 483658 - DNA, 120 bp, Artificial Sequence
  ENSG00000162065_4 (sequence is synthesized)
gggcaagcacagcagcagctgcctgccgctgcccgagttcgtggacaacacgcaggtgcccagctactgcctgaatgcacgcggcgagggggccgtgcgcaagatcctcctgtgcctggc

SEQ ID NO: 483659 - DNA, 120 bp, Artificial Sequence
  ENSG00000162065_5 (sequence is synthesized)
caaccagttccccgacatctccttctgccccgccctgccggccgtggtggccctgctgctgcactacagcatcgacgaggccgagtgcttcgagaaggcctgccgcatcctggcctgcaa

SEQ ID NO: 483660 - DNA, 120 bp, Artificial Sequence
  ENSG00000162065_6 (sequence is synthesized)
tgaccccggcaggaggctgatcgaccagagcttcctggcctttgagtcgtcctgcatgacgtttggggacctggtgaacaagtactgccaggcggcccacaagctgatggtggccgtgtc

SEQ ID NO: 483661 - DNA, 120 bp, Artificial Sequence
  ENSG00000162065_7 (sequence is synthesized)
ggaggatgtcctgcaggtctatgcggactggcagcgctggctgtttggggagctgcccctctgctacttcgcccgggtctttgacgtcttcctggtggagggctacaaggtgctgtaccg

SEQ ID NO: 483662 - DNA, 120 bp, Artificial Sequence
  ENSG00000162065_8 (sequence is synthesized)
cgtggcgctggccatcctcaagttcttccacaaggtgagggccgggcagccgctggagtcggacagcgtgaagcaggacatccgcacgttcgtcagagacatcgcgaagacggtgtcccc

SEQ ID NO: 483663 - DNA, 120 bp, Artificial Sequence
  ENSG00000162065_9 (sequence is synthesized)
tgagaagctgctggagaaagcgttcgccatccgcctcttctcccgcaaggagatccagctcctgcagatggccaatgagaaagccctgaagcagaagggcatcaccgtgaagcagaagag

SEQ ID NO: 483664 - DNA, 120 bp, Artificial Sequence
  ENSG00000162065_10 (sequence is synthesized)
gcagtttgtacacttggccgtccatgcagagaacttccgctcggagatcgtcagcgtgagggagatgagagacatctggtcctgggtccccgagcgctttgccctgtgccagccccttct

SEQ ID NO: 483665 - DNA, 120 bp, Artificial Sequence
  ENSG00000162065_11 (sequence is synthesized)
gctgttctcctccctgcagcacgggtacagcctggccaggttctacttccagtgtgaaggacatgagcctaccctcttgctcatcaagaccacgcagaaggaggtgtgtggtgcttacct

SEQ ID NO: 483666 - DNA, 120 bp, Artificial Sequence
  ENSG00000162065_12 (sequence is synthesized)
gtccacagactggagtgagagaaataagtttggaggcaaactgggcttctttgggaccggagaatgctttgtgtttaggctgcagcctgaggtgcagcgctacgagtgggtggtgatcaa

SEQ ID NO: 483667 - DNA, 120 bp, Artificial Sequence
  ENSG00000162065_13 (sequence is synthesized)
gcaccccgagctgaccaagcccccacccttgatggctgccgagcccaccgccccactcagccactccgcctcctcagaccccgctgaccgcctctcgcccttcctggccgctcgccactt

SEQ ID NO: 483668 - DNA, 120 bp, Artificial Sequence
  ENSG00000162065_14 (sequence is synthesized)
caacctgccctccaagaccgagtccatgttcatggcggggggcagcgactgcctcatcgtcgggggaggaggcggccaggcgctctacatcgatggggacctgaaccggggccgcacaag

SEQ ID NO: 483669 - DNA, 120 bp, Artificial Sequence
  ENSG00000162065_15 (sequence is synthesized)
ccactgcgacaccttcaacaaccagcccctctgctccgagaacttcctcattgctgccgtggaggcctggggcttccaggaccctgacacccagtgacggcctgtgccacggtgactgag

SEQ ID NO: 483670 - DNA, 120 bp, Artificial Sequence
  ENSG00000162065_16 (sequence is synthesized)
ccgtggtggggcggtgggccgaggctgggctgccgcctcgggcagcagagagcagatgaaacccccatgtggtaggcagggttgggggacggcaggaccccatggccaagcctggcgttg

SEQ ID NO: 483671 - DNA, 120 bp, Artificial Sequence
  ENSG00000162065_17 (sequence is synthesized)
cctggacctgctgctgcctctacctggggtttgggctgggcttccccagtccacctgcatctgggtcagagctggagggcctgctgtgcccccagccccacccagagctggcataggaag

SEQ ID NO: 483672 - DNA, 120 bp, Artificial Sequence
  ENSG00000162065_18 (sequence is synthesized)
taccttcctcctccgtggaggcttccatagcccaaggccttgggagtgtctgggtcttgctgcccctgagcctctctaggcagcctgagcccctggggtgggagtacaacggcagtggga

SEQ ID NO: 483673 - DNA, 120 bp, Artificial Sequence
  ENSG00000162065_19 (sequence is synthesized)
acgtgcagctaagggtgggcctgtggtgccccctgctggtgccgcatagcatcgcgccctcctgagcagggccctgcagcctggctggctggcgactgaatcccagcgtagatcccgaga

SEQ ID NO: 483674 - DNA, 120 bp, Artificial Sequence
  ENSG00000162065_20 (sequence is synthesized)
acagactggcacccttgggcctgccccctggcggaccccaccccctgtcctgggcgtttgccccagttccctccccaggcctcctgggccacctctcacattaacccttcttggctgcct

SEQ ID NO: 483675 - DNA, 120 bp, Artificial Sequence
  ENSG00000162065_21 (sequence is synthesized)
ctgaggctcccctgggctgcgtttgggagctgctgggtgggaggaggagggtgggatttgtgctgggctccacccccagggagggtgggagctggagggggatgtcacatgtccttgtgt

SEQ ID NO: 483676 - DNA, 120 bp, Artificial Sequence
  ENSG00000162065_22 (sequence is synthesized)
ttctgcagagcctgaagcttttgctgggcctccctgcgtgttcccatctgaagaggtagccccgggagaggccctcagggaccgacccagaccagcaagctccatttccaggggtctgcc

SEQ ID NO: 483677 - DNA, 120 bp, Artificial Sequence
  ENSG00000162065_23 (sequence is synthesized)
cagagaagcctggacccagggggcttctcagctcccctcccttccagcccaggcctccttgagctcctgtagcctctgcagctgcccatttcacctctttgtcattgcaatgacctgggg

SEQ ID NO: 483678 - DNA, 120 bp, Artificial Sequence
  ENSG00000162065_24 (sequence is synthesized)
cccagggtcacgcccaagcccctctttgtggcatgctcatctcagtgcagccccaactgcttctctgcaccaggccccgtgccctcccctggccctggccacacagcacctccttggcca

SEQ ID NO: 483679 - DNA, 120 bp, Artificial Sequence
  ENSG00000162065_25 (sequence is synthesized)
ccttgcatggatgcatgtcctccctctgtccctcttgtggtgctgtggctggccacgtgtcagggttttctgtgagcctctcaccttacagcctttgggcccctgggcccctgccctgcc

SEQ ID NO: 483680 - DNA, 120 bp, Artificial Sequence
  ENSG00000162065_26 (sequence is synthesized)
tgagccctgcgctggccagacgcaggtaggtgccaggggaggccttgcctctgggcactatagggggcagccccctgccttgtgacctccctccatgccccatgacctccttcaactcgt

SEQ ID NO: 483681 - DNA, 120 bp, Artificial Sequence
  ENSG00000162065_27 (sequence is synthesized)
gcctgggtcacagaggcaggtaccagcagtcctgcccccacccccgtccctgctggcctccagccagtgccacttggagtcccctgcaccgtgccactttccatccccacaccattgcct

SEQ ID NO: 483682 - DNA, 120 bp, Artificial Sequence
  ENSG00000162065_28 (sequence is synthesized)
gctcctcccatggggctttagcctcccctgaccatctgctcatgtagcctctgactgggcgcacagtggtgcaggaggaaggaccgggaaccctgtgtggctttgggcaagctgacaaac

SEQ ID NO: 483683 - DNA, 120 bp, Artificial Sequence
  ENSG00000162065_29 (sequence is synthesized)
ccgtctggaactcagtttccccagctgtgaaatggggccagtccccatgccctgctgtcctcctcacaggactgttgagaggctcgcagggggatggggtgaatccctctcacggggaga

SEQ ID NO: 483684 - DNA, 120 bp, Artificial Sequence
  ENSG00000162065_30 (sequence is synthesized)
ggtatgggagggaagtcgccactcatctcagcccaccgcagccctccaggcccccgcctgagcccctgaggccctcatctgtaccgccagctttggtgttcattaaacatggtcttgctg

SEQ ID NO: 483685 - DNA, 120 bp, Artificial Sequence
  ENSG00000162065_31 (sequence is synthesized)
catcaactccagggctccaagctgagtctgatctcttcagccagaggggcctccgggggcttcctgggcctacagccaagcaggtgtgggaggctgcccgctgtagtgctcacccacatt

SEQ ID NO: 483686 - DNA, 120 bp, Artificial Sequence
  ENSG00000162065_32 (sequence is synthesized)
ctatgactggaatgctgcaagcctcttccagagggagccctccaggagcagggaagtcatatccgtggaccatttgtaggtttccctctgcaaacttcctgaactgggtggtgatttttc

SEQ ID NO: 483687 - DNA, 120 bp, Artificial Sequence
  ENSG00000162065_33 (sequence is synthesized)
tggcgagttaagtccagcaggttctgcgtggctgcccccagggggccccacccgggccttccagtgatctggaccaggaagacggattgctgctgggtcatgatttccacatcatgagcg

SEQ ID NO: 483688 - DNA, 120 bp, Artificial Sequence
  ENSG00000162065_34 (sequence is synthesized)
aagttctttgttttttgtgtgcatgcaaaatattgtttctttaaatttaatatcttttcctaacttttctactaacctagaaggtatgtgtgattattatcttttttattcttatcactg

SEQ ID NO: 483689 - DNA, 120 bp, Artificial Sequence
  ENSG00000162065_35 (sequence is synthesized)
tacttgttagtatctgatattaggtattcccaaatagaacataatttattttgttaatgttctctatttcttcttgattatttattagctttggatgttaaaaattagccaaaagtggct

SEQ ID NO: 483690 - DNA, 120 bp, Artificial Sequence
  ENSG00000162065_36 (sequence is synthesized)
gctctgcctatgaagtagccattctttgtttaaaaaaaaaaaaagccaacatttgttgaaactgcataataaattatcatttgtttttagaaacattcaaagaattattttttgattttt

SEQ ID NO: 483691 - DNA, 120 bp, Artificial Sequence
  ENSG00000162065_37 (sequence is synthesized)
caggcgtgagccaccgcgcctagcctattttttaatttttttgaatagaccactttgtgctgaataaatgtttaacatttatttttaaaacaacaattgcacctaatttaaaatagttta

SEQ ID NO: 483692 - DNA, 120 bp, Artificial Sequence
  ENSG00000162065_38 (sequence is synthesized)
acctaatttaaaatagtttattaaatgaattcattaaagcagattatatgcctttggggcttcagaaaatcagtttaagcaaaagaacttatgagagtaagtcatttgtacttgaatttt

SEQ ID NO: 483693 - DNA, 120 bp, Artificial Sequence
  ENSG00000162065_39 (sequence is synthesized)
ttcagagttttaatgaactaaagtattttaatttttctatttttgtaagccgcatacttcattttttgagtttttcagtggaatttgttttaaaacgttttgaagatttcagaggccttc

SEQ ID NO: 483694 - DNA, 120 bp, Artificial Sequence
  ENSG00000162065_40 (sequence is synthesized)
atatttctcttatccactttctgaacccataaagcctttgcagtctccttgagtagtttatatttagtaatttagttgtgtacctttttattttgaagtaatttttgatttgcagaagag

SEQ ID NO: 483695 - DNA, 120 bp, Artificial Sequence
  ENSG00000162065_41 (sequence is synthesized)
ttgcagagacggtacagggtttccatgtaccctcaccttcccccaagtcaatatcaaaacaaagaaataagcattgttgcattgctgttaactaaaccacaggcctattgagattgtccc

SEQ ID NO: 483696 - DNA, 120 bp, Artificial Sequence
  ENSG00000162065_42 (sequence is synthesized)
ttacaggcgtgagcaaccgcgcccagccgagattgccccgtttttttcccactgtccaggaatcgatttaatttttacagttgtttactttctcacatttttactaagtccagaatatca

SEQ ID NO: 483697 - DNA, 120 bp, Artificial Sequence
  ENSG00000162065_43 (sequence is synthesized)
ttactttctcacatttttactaagtccagaatatcatcaaactcacaaaaccactggtcaaaaaaacccaaatggccactaattaggcaatacagcacctgcctcaaatttgggttcata

SEQ ID NO: 483698 - DNA, 88 bp, Artificial Sequence
  ENSG00000162065_44 (sequence is synthesized)
aattaggcaatacagcacctgcctcaaatttgggttcatatagatttttttcctccctttttgtggagaacatagtcttgactcaagc

SEQ ID NO: 483699 - DNA, 120 bp, Artificial Sequence
  ENSG00000162065_45 (sequence is synthesized)
gcgtgagctgctgtgcccagctcatccagattcttgctggttctctttctcagcctaaatgtcttgtttgcgtggagaaattatcaaatgaagcaggagtgccaaacaagcctcataggc

SEQ ID NO: 483700 - DNA, 120 bp, Artificial Sequence
  ENSG00000162065_46 (sequence is synthesized)
tcttcaccctacaacatctatgttaggtagaaaagtatgtggatttttaaaaatcatctggtataaagagtttttaagaactatcttcatcatcttagtatcagattgtgcttgagaagt

SEQ ID NO: 483701 - DNA, 120 bp, Artificial Sequence
  ENSG00000162065_47 (sequence is synthesized)
taggtacaatgtaatgtgattcattgctaaaaacaaaatgcctcccacaattgcagactcactcattttaccaaactatggaatttgtcaacaccttttcttgggaccaaggaagcaaag

SEQ ID NO: 483702 - DNA, 120 bp, Artificial Sequence
  ENSG00000162065_48 (sequence is synthesized)
tcagtggataccgtgtcctgtagacatgtcacttgtgataaggcacggacaacatgaactggcaaaaacattggcatttggtcaaatgcttatgagctaaggatagaagggaaaaaatag

SEQ ID NO: 483703 - DNA, 120 bp, Artificial Sequence
  ENSG00000162065_49 (sequence is synthesized)
ttgtgtgaatgattttacctcttagttcttacgaaggatggttatcgggctggaaaaatgtttattggactgatgctttggagcctctcaatgaatgtaataaaaaaaatgtgtagtgag

SEQ ID NO: 483704 - DNA, 120 bp, Artificial Sequence
  ENSG00000162065_50 (sequence is synthesized)
cacaaatgtatggatttgcagcacaatccaactttgaaaatgtgaaaataagtgagttagtgatatgtttggttggtgttaatttgagtcctaaataaaatcgagaactggtaaaagaag

SEQ ID NO: 483705 - DNA, 120 bp, Artificial Sequence
  ENSG00000162065_51 (sequence is synthesized)
ttgtggtcaccagcgagtctctccactgaggcgacaggtacatgtctgtcgcatttgcagccgtggccggtgagaacggcagcattccctgatccgtcttgttttcttttgttcctagtg

SEQ ID NO: 483706 - DNA, 120 bp, Artificial Sequence
  ENSG00000162065_52 (sequence is synthesized)
cctgctgtgtggacagctacactcagcaaagtcttagggagacttagaggagtcaccatgaagaatcagtgtcagacgtttcatcaggaatccctgtcaaggccgggtgtggtggctcac

SEQ ID NO: 483707 - DNA, 120 bp, Artificial Sequence
  ENSG00000162065_53 (sequence is synthesized)
acccgtaatcccaagactttaggaggctgagccctgcacagatgccccctccctgtccagttcctccagtgagaccgaggctgctgggggccctccctgcagctgctgtggagcctctgc

SEQ ID NO: 483708 - DNA, 120 bp, Artificial Sequence
  ENSG00000162065_54 (sequence is synthesized)
ctgccgtcacgtgagctgcctctgcccactctatgctcctgggttcctcttccccagactggccacgggggtggccccttcctgccaagccctctttctttgctcctctgaacaccttcc

SEQ ID NO: 483709 - DNA, 120 bp, Artificial Sequence
  ENSG00000162065_55 (sequence is synthesized)
ttcagtaccttcaggggactgttggggcagcacctgtcccgggtctgagaggcctcctggtctgctagcctggcaggaagcttggcccccaacacagccacaggctctctggcaccaggt

SEQ ID NO: 483710 - DNA, 120 bp, Artificial Sequence
  ENSG00000162065_56 (sequence is synthesized)
ttctttcagttcctctgaactgaaagcctctgtttcccggcctttgcgcgtgctatttgccactcctcatgcctgggccctagtgtccctcccaggatttccctgagctccccgctgagg

SEQ ID NO: 483711 - DNA, 120 bp, Artificial Sequence
  ENSG00000162065_57 (sequence is synthesized)
acctgagacaggtgttggctggtctccccaccccctgtcctaaagactgtcagtctcaaggggcaggagtgcctagcactgcagaatgaactgaagcccctgtgggttggtgtgcgctgc

SEQ ID NO: 483712 - DNA, 120 bp, Artificial Sequence
  ENSG00000162065_58 (sequence is synthesized)
tgctgtgcgtccagggtgatcagagattctccaggtgtgctcctggggcctgtggtggcgggacacccccttcccacacccgccacgctccctgcagtaactcttgcacttactgtaagt

SEQ ID NO: 483713 - DNA, 120 bp, Artificial Sequence
  ENSG00000162065_59 (sequence is synthesized)
gctcggactgtcttgtgcttgacattaggacacacactcaggccagaattgggcaagattgtccctgagcggggcgtgcagagcgctctggcctgggaggtggggcgcagggctgcttcc

SEQ ID NO: 483714 - DNA, 120 bp, Artificial Sequence
  ENSG00000162065_60 (sequence is synthesized)
tcctgcaggccagctcactgtggggctggtgtctgcccagagcttggccaggcagtgccgccccctcccttcctgccgcctctaccagcagccttccctcaggctgctttccgggcctag

SEQ ID NO: 483715 - DNA, 120 bp, Artificial Sequence
  ENSG00000162065_61 (sequence is synthesized)
tctgtggcaggtgtccagggcacagtcttccctctagcctgccatgaaactgtttcatttttcttttaaaaaaattgaagtgaaattgacatactatccaaccatttgaacgaccccaga

SEQ ID NO: 483716 - DNA, 120 bp, Artificial Sequence
  ENSG00000162065_62 (sequence is synthesized)
cagaggtggtggttgcatgaatgagcatgttgtggaaccaccacctccagttccatggcatttccccactcctaaaggaaaacctggccccagcaagcagctgctccccatgcctctcta

SEQ ID NO: 483717 - DNA, 67 bp, Artificial Sequence
  ENSG00000162065_63 (sequence is synthesized)
aacctggccccagcaagcagctgctccccatgcctctctatcttatgactttgggtttcattttcat

SEQ ID NO: 483718 - DNA, 87 bp, Artificial Sequence
  ENSG00000162065_64 (sequence is synthesized)
tgcccgaccagtctgtgacttacttaaatacagactggatcatgtttctcccctgctctatgccctctcttcatctttcaagtccta

SEQ ID NO: 483719 - DNA, 120 bp, Artificial Sequence
  ENSG00000162065_65 (sequence is synthesized)
ctcccctgctctatgccctctcttcatctttcaagtcctaattcagagatcacctcttctgcgacccaccgagctagtcccagcacctccttcccttgtcccccctgcttctaggaacca

SEQ ID NO: 483720 - DNA, 120 bp, Artificial Sequence
  ENSG00000162065_66 (sequence is synthesized)
cacttctggtgcggcattggctgtaccgttggggacgctactgctccctggtaggctgccaggtcttgagggtagggactctaacttgtctttgtctggcaggggcctcactcagcacct

SEQ ID NO: 483721 - DNA, 120 bp, Artificial Sequence
  ENSG00000162065_67 (sequence is synthesized)
ggcacaatagtaggtgctcagggaactgaatgaatggatcagggtctgaggcgggcaagggctgcggcggtgagccctgaccccctgggtggagtgtgaggaggccgtgttggccttcag

SEQ ID NO: 483722 - DNA, 120 bp, Artificial Sequence
  ENSG00000162065_68 (sequence is synthesized)
ggtgcaccctgaaaccagacatggggtccaggctgcctagggctgagcgtttatctgacacccgttctgaaaaacctggtcgtggtgcaggtgcagcccccggccctggtcatttggaag

SEQ ID NO: 483723 - DNA, 120 bp, Artificial Sequence
  ENSG00000162065_69 (sequence is synthesized)
tttgtgtccaaaaaaacccaatggctactatagcacctgtgagccaatggggtcctccacctgcccacctgcctgcagaagaaacgccgaacactgctgcctagtggtcagggccggctg

SEQ ID NO: 483724 - DNA, 120 bp, Artificial Sequence
  ENSG00000162065_70 (sequence is synthesized)
gactccctgcccaccccactgggtcctcaaagaggagggcccactcaggcccttttccatcaaccctgaaagcttggggtgagcgagaagggggagctgccctgtccttggggtcattgc

SEQ ID NO: 483725 - DNA, 120 bp, Artificial Sequence
  ENSG00000162065_71 (sequence is synthesized)
agtcgtctgcctccaacctcttgccccctcagtgcctgctgtccagcgggagcagctcagggctccacctcccctgccgccctcgactttggggagcctccttgcaccaagcagcttgta

SEQ ID NO: 483726 - DNA, 120 bp, Artificial Sequence
  ENSG00000162065_72 (sequence is synthesized)
aagcagcttgtacggtgccgagtcctacttgcaccacgttgtctttacctctggcattttattttatttaaacatgggaggcagagcttgcggtgagctgagattgcgccactgcaatcc

SEQ ID NO: 483727 - DNA, 120 bp, Artificial Sequence
  ENSG00000162065_73 (sequence is synthesized)
tggtttgctgtgtttggggcctgctgtcacagcactgggagccttggagagagatggggagctgggatccccaggaggtgagagccaggactgagggggggccttggtctgtggtgggaa

SEQ ID NO: 483728 - DNA, 120 bp, Artificial Sequence
  ENSG00000162065_74 (sequence is synthesized)
tgcagagagctgggaagctcacgcctgacaagccccctttcttggggtagagtgggtgggacggggcagctgtgagctggagaggagagggtgtcggtgaggagtgctgcgaaggatgcc

SEQ ID NO: 483729 - DNA, 120 bp, Artificial Sequence
  ENSG00000162065_75 (sequence is synthesized)
aggtggcaccgggggctgggccactggaaaccgctgagcaggcggcaggacttctccctctcccctcggccgttctcgtgcctcgggctcacttcctcgtgcagtttatccatatggctg

SEQ ID NO: 483730 - DNA, 120 bp, Artificial Sequence
  ENSG00000162065_76 (sequence is synthesized)
agacaggagcgtggggttggcgggcgggagttggggcttggcaagacggtccaggctgagctggcaagagagaaaagccagagtggctggtggatgcggggagtcacagctccgagtggg

SEQ ID NO: 483731 - DNA, 120 bp, Artificial Sequence
  ENSG00000162065_77 (sequence is synthesized)
aggagggcgctgagggctctaggagagggtatgggcaggtgtatgaatgtgcagcctctggagtgggtagagtggttttctggaatgcccggggactggataaaaaggtagagatgtaaa

SEQ ID NO: 483732 - DNA, 120 bp, Artificial Sequence
  ENSG00000162065_78 (sequence is synthesized)
ggcttttaaagttctagaggccacggagctttccagccaggacggtgaacttggccctcaagggagggcagcacagagaggaaggccctgagctggagagagaggaggcgggtggtgatg

SEQ ID NO: 483733 - DNA, 120 bp, Artificial Sequence
  ENSG00000162065_79 (sequence is synthesized)
gggagagcccggctgctgctcggcccagaggaggaagggtacgttcgggagaggatgaagacttgggagtggtgtgtttgctgtagacaatttccagagcaagaaggcaggctgggagca

SEQ ID NO: 483734 - DNA, 120 bp, Artificial Sequence
  ENSG00000162065_80 (sequence is synthesized)
ggggccgggggtaaaaggcagatagcaaggtaaggaggtgtgggggaagaccagcggctgtgctcaccgtggttagtgacactgtcaccatccagccccggtcagacatggtcctatagc

SEQ ID NO: 483735 - DNA, 120 bp, Artificial Sequence
  ENSG00000162065_81 (sequence is synthesized)
tgagggtctcaccaggcagtgggggcacaggtcaggggaatgggatcgccagaggagcattctcaaaatgtgcctgtgcaggcatctcccacccctgacattctgcatgggaggaccagg

SEQ ID NO: 483736 - DNA, 120 bp, Artificial Sequence
  ENSG00000162065_82 (sequence is synthesized)
gggtggccaccctacatgcagcagacccctggtggtcattctcctctcagcctcccgtcctcccctccccacctcaccacccccagtggatgtttctgatggctgtggcctctgcacatg

SEQ ID NO: 483737 - DNA, 120 bp, Artificial Sequence
  ENSG00000162065_83 (sequence is synthesized)
caggccttgttacccagttccccacccccactgcttagagcaagtcttgtatttccctgctgctgagtgcagatcctccccctgccaccccaacgcccagtctgccctgccaaccccagc

SEQ ID NO: 483738 - DNA, 120 bp, Artificial Sequence
  ENSG00000162065_84 (sequence is synthesized)
acgctgtaaccgccttctagaagggcttccggaacccatccagctccctggggcatgcgaccaccccggggcctctctgcttctacacatgtctacaaagccactttctgacctcactgt

SEQ ID NO: 483739 - DNA, 120 bp, Artificial Sequence
  ENSG00000162065_85 (sequence is synthesized)
caggtgaccgatttctctctcagctcttcctagctcagtgccaggcacctaggaggcactcaggagaaggttccagaaagaacgggtacacctgagtgcacagacaagtccagtggctct

SEQ ID NO: 483740 - DNA, 120 bp, Artificial Sequence
  ENSG00000162065_86 (sequence is synthesized)
cttccgtcgtggtccactgtgccagctccattgttccagggctgaggcctagggcggtggggctatatggcaggaggagtgtctgcactttgggcctctgcctgggatttatttgtgtct

SEQ ID NO: 483741 - DNA, 120 bp, Artificial Sequence
  ENSG00000162065_87 (sequence is synthesized)
ctgaggcatccagcagactcttggaggacaggatgaggtgttccctggcctttcccagcacgtaggtgggaggcctgggcccctcatgaagaaatcagacttggcgtggacttgcaagga

SEQ ID NO: 483742 - DNA, 120 bp, Artificial Sequence
  ENSG00000162065_88 (sequence is synthesized)
aggtcccccagccggaggaggcgtcatcccctccctggggctgaatgctggggccacctctcccctcatgcctgccatccacaccccgctccaggtctgcttttaggccccagtccctgc

SEQ ID NO: 483743 - DNA, 120 bp, Artificial Sequence
  ENSG00000162065_89 (sequence is synthesized)
cccatctagtgtgttcttccagcctccctccacctactctcccagcacctctgtgatgttgtgaaatatctatttggtctttgtccttgtttagtgacatacaactcctgaaatcctcag

SEQ ID NO: 483744 - DNA, 120 bp, Artificial Sequence
  ENSG00000162065_90 (sequence is synthesized)
aatctccgtggtgctctttctgtgcgctggtgttgactgatagcttccgggtggcgctggtcactggaaagaccaaggcaggattagcgggttagaactttcagccccacccccaaccgc

SEQ ID NO: 483745 - DNA, 120 bp, Artificial Sequence
  ENSG00000162065_91 (sequence is synthesized)
ggggaggggagaggtccagaggtggaaggtcaagttgattgccagtggggtaatcagttatgcctacttaacaagggctccatgtcaaccctagaagacaggacttggagagcttctgga

SEQ ID NO: 483746 - DNA, 120 bp, Artificial Sequence
  ENSG00000162065_92 (sequence is synthesized)
cagctgaataggagggagtgcctggagggcagcaccgtgtccctctcccgtacctcaccctaaaggtctcttcatctgtgtcctttgtaacaacctttataataaactagtgaatgtaag

SEQ ID NO: 483747 - DNA, 120 bp, Artificial Sequence
  ENSG00000162065_93 (sequence is synthesized)
cgcgtgcgcagaaaggccggcgcggcaggctgaggagaaagcggcgcgcggaggtgaatgttctagctgcaagagaaaccggagtggtctggtcactcaaccaaaacctgctgaagcaga

SEQ ID NO: 483748 - DNA, 120 bp, Artificial Sequence
  ENSG00000162066_0 (sequence is synthesized)
ggcgcggtctcagctctcggctggggttcgtcactgggcgcgggatttggccgccgcggggctccggagccgctcgctcccgacacggctcacgatgcgcggcgagcagggcgcggcggg

SEQ ID NO: 483749 - DNA, 120 bp, Artificial Sequence
  ENSG00000162066_1 (sequence is synthesized)
ggcccgcgtgctccagttcactaactgccggatcctgcgcggagggaaactgctcagggaggatctgtgggtgcgcggaggccgcatcttggacccagagaagctgttctttgaggagcg

SEQ ID NO: 483750 - DNA, 120 bp, Artificial Sequence
  ENSG00000162066_2 (sequence is synthesized)
gcgcgtggccgacgagcggcgggactgcgggggccgcatcttggctcccggattcatcgacgtgcagatcaacggtggatttggtgttgacttctctcaagccacggaggacgtgggttc

SEQ ID NO: 483751 - DNA, 120 bp, Artificial Sequence
  ENSG00000162066_3 (sequence is synthesized)
gggggttgccctcgtggcccggaggatcctgtcgcacggcgtcacctccttctgccccaccctggtcacttccccaccggaggtttatcacaaggttgttcctcagatccctgtgaagag

SEQ ID NO: 483752 - DNA, 120 bp, Artificial Sequence
  ENSG00000162066_4 (sequence is synthesized)
tggtggtccccatggggcaggggtcctcgggctgcacctggagggccccttcatcagccgggagaagcggggcgcgcaccccgaggcccacctccgctccttcgaggccgatgccttcca

SEQ ID NO: 483753 - DNA, 120 bp, Artificial Sequence
  ENSG00000162066_5 (sequence is synthesized)
ggacttgctggccacctacgggcccctggacaatgtccgcatcgtgacgctggccccagagttgggccgtagccacgaagtgatccgggcgctgacggcccgtggcatctgcgtgtccct

SEQ ID NO: 483754 - DNA, 120 bp, Artificial Sequence
  ENSG00000162066_6 (sequence is synthesized)
ctgcgggcggcagaggatgctgtgtggagcggagccaccttcatcacccacctcttcaacgccatgctgcctttccaccaccgcgacccaggcatcgtggggctcctgaccagcgaccgg

SEQ ID NO: 483755 - DNA, 120 bp, Artificial Sequence
  ENSG00000162066_7 (sequence is synthesized)
ctgcccgcaggccgctgcatcttctatgggatgattgcagatggcacgcacaccaaccccgccgccctgcggatcgcccaccgtgcccatccccaggggctggtgctggtcaccgatgcc

SEQ ID NO: 483756 - DNA, 120 bp, Artificial Sequence
  ENSG00000162066_8 (sequence is synthesized)
atccctgccttgggcctgggcaacggccggcacacgctgggacagcaggaagtggaagtggacggtctgacggcctacgtggcaggcaccaagacgctgagtggcagcatagccccaatg

SEQ ID NO: 483757 - DNA, 120 bp, Artificial Sequence
  ENSG00000162066_9 (sequence is synthesized)
gacgtctgtgtccggcacttcctgcaggccacaggctgcagcatggagtcggccctggaggctgcatccctgcaccccgcccagttgctggggctggagaagagtaaggggaccctggac

SEQ ID NO: 483758 - DNA, 120 bp, Artificial Sequence
  ENSG00000162066_10 (sequence is synthesized)
tttggtgctgacgcagacttcgtggtgctcgacgactcccttcacgtccaggccacctacatctcgggtgagctggtgtggcaggcggacgcagctaggcagtgacaaggacctcggctg

SEQ ID NO: 483759 - DNA, 120 bp, Artificial Sequence
  ENSG00000162066_11 (sequence is synthesized)
agaggacacctggccgcagcgggatgccatcagggccgggtggttggggagctggtctccagggagtgagtcgggagccctgctggattgatgcccagggcctgtgcggccgccctggag

SEQ ID NO: 483760 - DNA, 120 bp, Artificial Sequence
  ENSG00000162066_12 (sequence is synthesized)
tccgggttttgcttgtgctcacatgtggcaccatccttggttgccctcctggagaaggcattcacggcctggggtgggatggctgggctgtagtttagcctgggccttgggccccagtgg

SEQ ID NO: 483761 - DNA, 120 bp, Artificial Sequence
  ENSG00000162066_13 (sequence is synthesized)
gggacagggcctgtctgcatgaagtggaccggagacctgcagaccccaggaaagtgtcactatgggagggaggggcaggcagtcagtggctggtgccatggggtgaagccaccatgggct

SEQ ID NO: 483762 - DNA, 120 bp, Artificial Sequence
  ENSG00000162066_14 (sequence is synthesized)
gggggtgaagagccggcaggaaggggaccagtcacagggagtgtggacagtcaggggtttgctttctgctcctgagttggggtgtgcagcgtggagcccacagcctggttctgggccagg

SEQ ID NO: 483763 - DNA, 120 bp, Artificial Sequence
  ENSG00000162066_15 (sequence is synthesized)
gcacagtgccaggggctccgctctgacctccaggagggagactgggcccgggacccctgttttctgctccctggactgcctagccctgagtgccacggatgaccagcgttctgttttctc

SEQ ID NO: 483764 - DNA, 120 bp, Artificial Sequence
  ENSG00000162066_16 (sequence is synthesized)
ttctcaataaccctatctcttcacacatccccaggcccagtgcttgccggctgtggtgaccctgcctggtgctggagggcagtatgggaggcaccagtgtgccctgctcaccccattagt

SEQ ID NO: 483765 - DNA, 120 bp, Artificial Sequence
  ENSG00000162066_17 (sequence is synthesized)
gtcatcctgccatcttctgtgtccccttggccctggcacacacccatgtggcaaacacgggccgtgaggctccctgaacagcttcgaggcgggtgggcttctggagccctcttggctctg

SEQ ID NO: 483766 - DNA, 120 bp, Artificial Sequence
  ENSG00000162066_18 (sequence is synthesized)
aggacagccacagtggggtcagacgtcagggattggtgcagccccacgtcaggggtgattgtcttgactttctctccatttgagttctggggtgggtggctcccttcccccttgcttaca

SEQ ID NO: 483767 - DNA, 120 bp, Artificial Sequence
  ENSG00000162066_19 (sequence is synthesized)
ggtgctgtcctgggcacaggaggtacgcgcctggctctgccactgttctcttccctctgctgcaaagcccagttaaggaaatgtctccaggtccaaagagataggatggtctgggcccca

SEQ ID NO: 483768 - DNA, 120 bp, Artificial Sequence
  ENSG00000162066_20 (sequence is synthesized)
cctgttggaagggaacagccagggaagaaccacctgcctgggcagggcctcgcctgagggagggcctggggcagggcacaaggggttgatctcagcccacaagccccaggggcagcccag

SEQ ID NO: 483769 - DNA, 120 bp, Artificial Sequence
  ENSG00000162066_21 (sequence is synthesized)
gaaagcaggcgacggatgtggatcctgacctcctgagaggtgtgaggtgcagggatacccacctctgccttgacggccgcgcaccccttaggaagtggctgtccagcgcctgcctgtgct

SEQ ID NO: 483770 - DNA, 120 bp, Artificial Sequence
  ENSG00000162066_22 (sequence is synthesized)
gggcctgggagaggagctgtcttgccagggctcccaggcagggagaggcaggtgaggttctcagccgatgtgttagaggttgagcatcgcctgtgcccagcttgctggctgtcagtgctt

SEQ ID NO: 483771 - DNA, 120 bp, Artificial Sequence
  ENSG00000162066_23 (sequence is synthesized)
gatgtgcccatcctcagctaaaacccagagctggcatgttggtcatccccacctcagacgggacgcccagtccagagctggtgagccctgggccagcctttgggcctggcctgccccatt

SEQ ID NO: 483772 - DNA, 120 bp, Artificial Sequence
  ENSG00000162066_24 (sequence is synthesized)
caccggccagcgccccacctccctggctggagggtcggggaggggctggcagagatggttggtccacagggctagccctgggtggtgggagaggggcccagggtcagggtgagagagagc

SEQ ID NO: 483773 - DNA, 120 bp, Artificial Sequence
  ENSG00000162066_25 (sequence is synthesized)
tgggccagggagctgctgcaggatgattttgaggtgtgggggaagcactcttggttggttttggtttgctttttaaaaattgtggtaaaatacataacaaaagtaactatcgtaacctga

SEQ ID NO: 483774 - DNA, 120 bp, Artificial Sequence
  ENSG00000162066_26 (sequence is synthesized)
ttcctgcaggccacaggctgcagcatggagtcggccctggaggctgcatccctgcaccccgcccagttgctggggctggagaagagtaaggggaccctggactttggtgctgacgcaggt

SEQ ID NO: 483775 - DNA, 120 bp, Artificial Sequence
  ENSG00000162066_27 (sequence is synthesized)
gagggcctgtcgcagggtcaccgggcagcctggccctgcctgtagactctgttgttcctggggcggcctggacagggccagggagggtgggtcctccctagctccctcctctcaggtggg

SEQ ID NO: 483776 - DNA, 120 bp, Artificial Sequence
  ENSG00000162066_28 (sequence is synthesized)
gcaaggggttgcagggagcattgtccagtacctctgtccatctgtgatgggtcagggtgtcttgcactagtcgtgtccctgggcctcagtttccccaccagcgtcgggttgttggggagc

SEQ ID NO: 483777 - DNA, 120 bp, Artificial Sequence
  ENSG00000162066_29 (sequence is synthesized)
agctctggggtaggtgggcggccccactcctgccccctactcattgcccggctctgtcccagacttcgtggtgctcgacgactcccttcacgtccaggccacctacatctcgggtgagct

SEQ ID NO: 483778 - DNA, 120 bp, Artificial Sequence
  ENSG00000162066_30 (sequence is synthesized)
ggtttatcacaagatccctgtgaagagtggtggtccccatggggcaggggtcctcgggctgcacctggagggccccttcatcagccgggagaagcggggcgcgcaccccgaggcccacct

SEQ ID NO: 483779 - DNA, 120 bp, Artificial Sequence
  ENSG00000162066_31 (sequence is synthesized)
gcggatcgcccaccgtgcccatccccagggtaagctgcggcaggtggccaggacaggtaggatgactgggctagcaggttctgagcctcttctcccccagggctggtgctggtcaccgat

SEQ ID NO: 483780 - DNA, 120 bp, Artificial Sequence
  ENSG00000162066_32 (sequence is synthesized)
acgtctgtgtccggcacttcctgcaggccacaggtcagtgagcagcacgggtgcgggtttaggtggtctgtgagtggtgggtccccaaggggctggaccgggtgcccggactgtagccca

SEQ ID NO: 483781 - DNA, 120 bp, Artificial Sequence
  ENSG00000162066_33 (sequence is synthesized)
cctgggcattgggtacttggtgactcaggcccagggtgacaggcagaccagcagggtccttgttagcctgctgcagagtccctgagacagggagtgctggtgtggttgggggctgttggc

SEQ ID NO: 483782 - DNA, 120 bp, Artificial Sequence
  ENSG00000162066_34 (sequence is synthesized)
ccccaccctgggaggctcctgcgggacctgttggcagcccccacccctccagatgcccagctggtggggagggcaggtgataagggctgggtggggcagggacctgctggagccacttgc

SEQ ID NO: 483783 - DNA, 80 bp, Artificial Sequence
  ENSG00000162068_0 (sequence is synthesized)
gtgcaccgcaggccccgcccgcccacggcccttcccgggaggccgggagacctgctccgcccggccctcggtgggtgagt

SEQ ID NO: 483784 - DNA, 120 bp, Artificial Sequence
  ENSG00000162068_1 (sequence is synthesized)
gagtgcgagcggcgggtggggcctccgcgggcggaggcaccgggagcgggggcgacgcctgtcatcgctctaggcccagcgggaggacgcgccaacatccccgctgctgtgctgggcccg

SEQ ID NO: 483785 - DNA, 120 bp, Artificial Sequence
  ENSG00000162068_2 (sequence is synthesized)
cccggggcgtgcccgccgctgctcccacctctgggccgggctggggccgcccgggggccctgttcctcggcattgcgggcctggtgggcagagccgcggagagggcttcttttccccaag

SEQ ID NO: 483786 - DNA, 120 bp, Artificial Sequence
  ENSG00000162068_3 (sequence is synthesized)
ggcagcgtcttggggcccggccactggctgacccgcagcggctccggccatgcctggctggccctgggggctgctgctgacggcaggcacgctcttcgccgccctgagtcctgggccgcc

SEQ ID NO: 483787 - DNA, 120 bp, Artificial Sequence
  ENSG00000162068_4 (sequence is synthesized)
cgcggctgcgtgccaggactggtgaacgccgccctgggccgcgaggtgctggcttccagcacgtgcgggcggccggccactcgggcctgcgacgcctccgacccgcgacgggcacactcc

SEQ ID NO: 483788 - DNA, 120 bp, Artificial Sequence
  ENSG00000162068_5 (sequence is synthesized)
gcctgcgacgcctccgacccgcgacgggcacactcccccgccctccttacttccccagggggcacggccagccctctgtgctggcgctcggagtccctgcctcgggcgcccctcaacgtg

SEQ ID NO: 483789 - DNA, 120 bp, Artificial Sequence
  ENSG00000162068_6 (sequence is synthesized)
actctcacggtgcccctgggcaaggcttttgagctggtcttcgtgagcctgcgcttctgctcagctcccccagcctccgtggccctgctcaagtctcaggaccatggccgcagctgggcc

SEQ ID NO: 483790 - DNA, 120 bp, Artificial Sequence
  ENSG00000162068_7 (sequence is synthesized)
ccgctgggcttcttctcctcccactgtgacctggactatggccgtctgcctgcccctgccaatggcccagctggcccagggcctgaggccctgtgcttccccgcacccctggcccagcct

SEQ ID NO: 483791 - DNA, 120 bp, Artificial Sequence
  ENSG00000162068_8 (sequence is synthesized)
gatggcagcggccttctggccttcagcatgcaggacagcagccccccaggcctggacctggacagcagcccagtgctccaagactgggtgaccgccaccgacgtccgtgtagtgctcaca

SEQ ID NO: 483792 - DNA, 120 bp, Artificial Sequence
  ENSG00000162068_9 (sequence is synthesized)
acatggaggccgtcgtcccttactcctacgcagccaccgacctccaggtgggcgggcgctgcaagtgcaatggacatgcctcacggtgcctgctggacacacagggccacctgatctgcg

SEQ ID NO: 483793 - DNA, 120 bp, Artificial Sequence
  ENSG00000162068_10 (sequence is synthesized)
actgtcggcatggcaccgagggccctgactgcggccgctgcaagcccttctactgcgacaggccatggcagcgggccactgcccgggaatcccacgcctgcctcgcttgctcctgcaacg

SEQ ID NO: 483794 - DNA, 120 bp, Artificial Sequence
  ENSG00000162068_11 (sequence is synthesized)
gccatgcccgccgctgccgcttcaacatggagctgtaccgactgtccggccgccgcagcgggggtgtctgtctcaactgccggcacaacaccgccggccgccactgccactactgccggg

SEQ ID NO: 483795 - DNA, 120 bp, Artificial Sequence
  ENSG00000162068_12 (sequence is synthesized)
agggcttctatcgagaccctggccgtgccctgagtgaccgtcgggcttgcagggcctgcgactgtcacccggttggtgctgctggcaagacctgcaaccagaccacaggccagtgtccct

SEQ ID NO: 483796 - DNA, 120 bp, Artificial Sequence
  ENSG00000162068_13 (sequence is synthesized)
gcaaggatggcgtcactggcctcacctgcaaccgctgcgcgcctggcttccagcaaagccgctccccagtggcgccctgtgttaagacccctatccctggacccactgaggacagcagcc

SEQ ID NO: 483797 - DNA, 120 bp, Artificial Sequence
  ENSG00000162068_14 (sequence is synthesized)
ctgtgcagccccaggactgtgactcgcactgcaaacctgcccgtggcagctaccgcatcagcctaaagaagttctgcaagaaggactatgcggtgcaggtggcggtgggtgcgcgcggcg

SEQ ID NO: 483798 - DNA, 120 bp, Artificial Sequence
  ENSG00000162068_15 (sequence is synthesized)
actatgcggtgcaggtggcggtgggtgcgcgcggcgaggcgcgcggcgcgtggacacgcttcccggtggcggtgctcgccgtgttccggagcggagaggagcgcgcgcggcgcgggagta

SEQ ID NO: 483799 - DNA, 80 bp, Artificial Sequence
  ENSG00000162068_16 (sequence is synthesized)
cggggggccgggggcccgggctcatcgccgcccgcggaagcctcgtgctaccctggagggacgcgtggacgcggcgcctg

SEQ ID NO: 483800 - DNA, 120 bp, Artificial Sequence
  ENSG00000162068_17 (sequence is synthesized)
ctcatcgccgcccgcggaagcctcgtgctaccctggagggacgcgtggacgcggcgcctgcggaggctgcagcgacgcgaacggcgggggcgctgcagcgccgcctgagcccgccggctg

SEQ ID NO: 483801 - DNA, 120 bp, Artificial Sequence
  ENSG00000162069_0 (sequence is synthesized)
tagagtgtcccgcagccacctgtccccgcagatgctgcaggtgacatgagctctccagatgggcccagcttcccgtccgggccgctctcagggggcgcctctcccagcggcgacgagggc

SEQ ID NO: 483802 - DNA, 120 bp, Artificial Sequence
  ENSG00000162069_1 (sequence is synthesized)
ttcttcccctttgtgctggagcggcgggactcattcctgggagggggcccagggcctgaggagcccgaggacctagccttgcagctgcagcagaaggagaaagacctgctgttggccgcg

SEQ ID NO: 483803 - DNA, 120 bp, Artificial Sequence
  ENSG00000162069_2 (sequence is synthesized)
gagctcggcaagatgcttctggagcgaaatgaagagctgcggcggcagctggagacgctgagcgcccagcacttggagcgtgaggaacggctccagcaggagaaccatgagctccggcga

SEQ ID NO: 483804 - DNA, 120 bp, Artificial Sequence
  ENSG00000162069_3 (sequence is synthesized)
ggcctggcagcccgaggagccgagtgggaggcccgggccgtggagctggagggggacgtggaggccctgcgggcccagcttggggagcagcgctcagagcagcaggacagtgggcgagaa

SEQ ID NO: 483805 - DNA, 120 bp, Artificial Sequence
  ENSG00000162069_4 (sequence is synthesized)
cgggcacgggccctcagcgagctcagcgagcagaacctccggctcagccagcagctggctcaggcctcccagactgagcaggaacttcagagggaactggacgcccttcggggacagtgc

SEQ ID NO: 483806 - DNA, 120 bp, Artificial Sequence
  ENSG00000162069_5 (sequence is synthesized)
caggctcaggcactggctggagcagagctgaggacgcggctggagagtctgcagggggaaaaccagatgctgcagagccgccggcaggacctggaggcccagatccgaggcctgcgtgag

SEQ ID NO: 483807 - DNA, 120 bp, Artificial Sequence
  ENSG00000162069_6 (sequence is synthesized)
gaggtggagaagggtgagggcagactgcagaccacccacgaggagttgctgctgctgaggcgggagcggcgggagcacagcctggagctggaacgcgcacggtcagaggctggggaggcg

SEQ ID NO: 483808 - DNA, 120 bp, Artificial Sequence
  ENSG00000162069_7 (sequence is synthesized)
gcggaggctgcagcggcgcgtctccgagctggaggaggagtcacgcctccaggacgccgacgtgtcggctgcctcgttgcagtcagaactggcccacagcctcgacgacggcgaccaggg

SEQ ID NO: 483809 - DNA, 120 bp, Artificial Sequence
  ENSG00000162069_8 (sequence is synthesized)
ccagggcgccgacgcacccggagacaccccgaccacccggtccccaaagacccgaaaggcgtccagcccccagccttcacccccggaagagatcttagagccccccaagaagcgaacatc

SEQ ID NO: 483810 - DNA, 120 bp, Artificial Sequence
  ENSG00000162069_9 (sequence is synthesized)
cctcagtccagcggagatactggaggagaaggaggtggaagtggccaagctgcaagatgagatctcgctgcagcaggcagagctgcagtccctgcgggaagagctgcagaggcagaagga

SEQ ID NO: 483811 - DNA, 120 bp, Artificial Sequence
  ENSG00000162069_10 (sequence is synthesized)
gctgcgggcgcaggaagaccctggggaggccctgcacagtgccctctcagaccgggacgaggccgtgaacaaggccctggagctgtccctgcagctcaaccgcgtctcgctggagcgaga

SEQ ID NO: 483812 - DNA, 120 bp, Artificial Sequence
  ENSG00000162069_11 (sequence is synthesized)
ctccctgtctcgggagctgctgcgcgccatccgccagaaggtggcgctcacgcaggagctggaggcctggcaggacgacatgcaggtggtgatcgggcagcagctgcgctcacagcgcca

SEQ ID NO: 483813 - DNA, 120 bp, Artificial Sequence
  ENSG00000162069_12 (sequence is synthesized)
gaaggagctgagcgcctccgcgtcgtcgtcgaccccgcgccgtgccgcgccccgcttctcgctgcgcctgggccccgggcccgccggtggctttctcagtaacctcttccgaaggacctg

SEQ ID NO: 483814 - DNA, 120 bp, Artificial Sequence
  ENSG00000162069_13 (sequence is synthesized)
acggctgggcccagagggctgcccttgcccacttaggggctcactttcctcttcaggccaatggagcgacagggcccagattgtcttccaaaagaagctgatgccctccccgccccagga

SEQ ID NO: 483815 - DNA, 120 bp, Artificial Sequence
  ENSG00000162069_14 (sequence is synthesized)
tgctgggcaagggctcatcgggagcaggggctcatccggagcaggggccagctttgtggggcaggagctccaggtgggtggcaggggcaggtgaacagagctattttccgaattaatata

SEQ ID NO: 483816 - DNA, 120 bp, Artificial Sequence
  ENSG00000162069_15 (sequence is synthesized)
caagatcggacagagtaatatataaatcactccaccgatttggcccccattcatagaaagaaagagcatggtaaaaaagcctgaaactttattgtaaaaaaaaaaaaaaaaagaaaatga

SEQ ID NO: 483817 - DNA, 120 bp, Artificial Sequence
  ENSG00000162069_16 (sequence is synthesized)
cctggagcccgttctctaagggacagcccaggactttcaaaaactgcaaatcagatcatttcactcctcaaccagaatctccccctcacacttagaatgaaaccaaaacccttccccagg

SEQ ID NO: 483818 - DNA, 120 bp, Artificial Sequence
  ENSG00000162069_17 (sequence is synthesized)
gcctaaaagtcccagagaactgggctcctccccgacctcatcacagcagcaccacccctttctcccctcctccaagaagggcagccgaaccaccctctccccgacaatgagggctctttt

SEQ ID NO: 483819 - DNA, 120 bp, Artificial Sequence
  ENSG00000162069_18 (sequence is synthesized)
catttcctccaagaactcacgcttgttccctcaggaactttgcacttgctgttccttaatgcctagccttctttctggtggctcttcttgtcctgcagaagtcgactcaaacatgacgtc

SEQ ID NO: 483820 - DNA, 120 bp, Artificial Sequence
  ENSG00000162069_19 (sequence is synthesized)
ctccttgaaggaccctccacccccaccccactccttactctctatcatttcccgggtctctttacagcccttactgtctccctgaaactacctggctccggcatgtgtccatgccctctg

SEQ ID NO: 483821 - DNA, 120 bp, Artificial Sequence
  ENSG00000162069_20 (sequence is synthesized)
gactctaagctgcttgaagcagtgaacttggtggtctcacgtgccactgacagcagaccccagaacaagtggagctcaggaaatgtgggaggattgatagcagtgtgggtggatagactt

SEQ ID NO: 483822 - DNA, 120 bp, Artificial Sequence
  ENSG00000162069_21 (sequence is synthesized)
agagatattgtgtccaggccacaaggcatcagcagagccgagcatcagccaggacaatctgaccttgaacctgacagcttaatcctgaagctgtgttgcctctgcagtattcggttaaga

SEQ ID NO: 483823 - DNA, 120 bp, Artificial Sequence
  ENSG00000162069_22 (sequence is synthesized)
aatcctgaagctgtgttgcctctgcagtattcggttaagagttctgctgcctgagttggcatccctgctttgtgaagttattgtgtgtcggctgggcacggtgtctcatgcctgtaatcc

SEQ ID NO: 483824 - DNA, 69 bp, Artificial Sequence
  ENSG00000162069_23 (sequence is synthesized)
gaaaacaaaaaaatttgccgggcagggtggcgcacgccagtaatcttagctacttgggaggctgaggca

SEQ ID NO: 483825 - DNA, 90 bp, Artificial Sequence
  ENSG00000162069_24 (sequence is synthesized)
ggagaatctcttgaacttgggaggcggacattgccgtgagctgagatagtgccactgcgctctagcctgggccaaagagtaaagaataaa

SEQ ID NO: 483826 - DNA, 120 bp, Artificial Sequence
  ENSG00000162069_25 (sequence is synthesized)
aacaacaataaatgactgtgtgtccttaggcaaggcacttagcaactcttgagcttgttccatctgtaaacccaggacgttagtgattctccctctagtggatgaaatgaagcaatgcag

SEQ ID NO: 483827 - DNA, 120 bp, Artificial Sequence
  ENSG00000162069_26 (sequence is synthesized)
atagagccctaatgcagggtacctgcgagtcgctgcagcagctgtggcaattgtcaccttcatccaggcccatcccgctttgagggcctagagagagtgggccagaggttaacccccgat

SEQ ID NO: 483828 - DNA, 120 bp, Artificial Sequence
  ENSG00000162069_27 (sequence is synthesized)
tcatctgcctccccacgctgggcatctgggtgtgccagggcattcccccgctggtcagacaggtttttgggccagggcggggctgaccagggttaattagagggaactggctaggaggag

SEQ ID NO: 483829 - DNA, 120 bp, Artificial Sequence
  ENSG00000162069_28 (sequence is synthesized)
ctggggagggggctgggcagagtccaggcctccagagcccctgggacacagcaggtgtgtgctgccatgggccggggcttgaactctgccagactcaggcgccaaaaacggcgcttgcga

SEQ ID NO: 483830 - DNA, 120 bp, Artificial Sequence
  ENSG00000162069_29 (sequence is synthesized)
cctcaggtccagaagccccggcagcagctggaggtgagtggtcatcagagatccccccaccccaacccttgccccgggcccacgcgtcctgtctgctcggaaccttccctctaaatctct

SEQ ID NO: 483831 - DNA, 120 bp, Artificial Sequence
  ENSG00000162069_30 (sequence is synthesized)
ttgtgtctgtcttggacacaaggcccccttaggctttctccctaggtgtctgtccctccatcgccatctctctgtgcctgcccagtctcatcggtgcctctctgcctctgtccctctgcc

SEQ ID NO: 483832 - DNA, 120 bp, Artificial Sequence
  ENSG00000162069_31 (sequence is synthesized)
ggggactacaactgcctggacccttagcaatggcttcagggctttctgggagatgaggccggagctggatcactgggaggcccagaggctggcccacaagagcatgggcattagcccatg

SEQ ID NO: 483833 - DNA, 120 bp, Artificial Sequence
  ENSG00000162069_32 (sequence is synthesized)
ggcaaatgggagccacggaaggctgttgagcaggtgaggcatgctcttagagtgcatcagagcctggcagctggaagagcagggagggggctggtgccagagctcaggccaggaatgaca

SEQ ID NO: 483834 - DNA, 120 bp, Artificial Sequence
  ENSG00000162069_33 (sequence is synthesized)
agtctgcactttggggtcagcttgccttccttcgcatcccggtgccccttcttacttactactgtgggacaagcagcctcagtagcaccaataaatgctgcatgaaacaattactgaatg

SEQ ID NO: 483835 - DNA, 120 bp, Artificial Sequence
  ENSG00000162069_34 (sequence is synthesized)
aggaggtagactgggcaggggaggagatggggctcttcgaggtgcggccctgctctataggcgaggaaactgtatatatccgctgagggaggtgcacggcccaaggcgcccagcgatcca

SEQ ID NO: 483836 - DNA, 120 bp, Artificial Sequence
  ENSG00000162069_35 (sequence is synthesized)
ggaacgggaacagcctgggccgctggggtgcggggctctccgcggcacccccgtgtggacctgccgcgggatgtcggcgttgcgtgcgtcccgctgaccgcccgcgcttccgtctgcggg

SEQ ID NO: 483837 - DNA, 120 bp, Artificial Sequence
  ENSG00000162069_36 (sequence is synthesized)
gtcagctggggctgggggattatctgagccaaaaaagccgggctgagggctgggaggggctgcccctgtccccagctctcaggcctttccccagaaccagatgctgcagagccgccggca

SEQ ID NO: 483838 - DNA, 80 bp, Artificial Sequence
  ENSG00000162073_0 (sequence is synthesized)
agagagactaccggccaccgccgccgccgccgccgcgagctgtccctgcggcgcgtctgccttggcggagccgaccgcag

SEQ ID NO: 483839 - DNA, 80 bp, Artificial Sequence
  ENSG00000162073_1 (sequence is synthesized)
cgcgggggcgacggactcgcgcgtgcgcagcgccggaggggcgcgggctgggaccccctagccagcgcgtgcgccgatcg

SEQ ID NO: 483840 - DNA, 120 bp, Artificial Sequence
  ENSG00000162073_2 (sequence is synthesized)
gcagtgatgggccttcccgcgctgcggccccactgaggaggaggctcggggacagcaggagcacgggctgcccgcgcggtgcggaccatggcgttcctggccgggccgcgcctgctggac

SEQ ID NO: 483841 - DNA, 120 bp, Artificial Sequence
  ENSG00000162073_3 (sequence is synthesized)
tgggccagctcgccgccgcacctgcagttcaataagttcgtgctgaccgggtaccggcccgccagcagcggctcgggctgcctgcgcagcctcttctacctgcacaacgaactgggcaac

SEQ ID NO: 483842 - DNA, 120 bp, Artificial Sequence
  ENSG00000162073_4 (sequence is synthesized)
atctacacgcacgggctggccctgctgggcttcctggtgctggtgccaatgaccatgccctggggtcagctgggcaaggatggctggctgggaggcacacattgcgtggcctgccttgca

SEQ ID NO: 483843 - DNA, 120 bp, Artificial Sequence
  ENSG00000162073_5 (sequence is synthesized)
ccccctgcaggctccgtgctctatcacctctttatgtgccaccaagggggcagcgctgtgtacgcccggctcctcgccctggacatgtgtggggtctgccttgtcaacacccttggggcc

SEQ ID NO: 483844 - DNA, 120 bp, Artificial Sequence
  ENSG00000162073_6 (sequence is synthesized)
ctgcccatcatccactgcaccctggcctgcaggccctggctgcgcccggctgccctggtgggctacactgtgttgtcgggtgtggccggctggcgtgctctcaccgccccctccaccagt

SEQ ID NO: 483845 - DNA, 120 bp, Artificial Sequence
  ENSG00000162073_7 (sequence is synthesized)
gctcggctccgggcatttggatggcaggctgctgcccgcctactggtatttggggcccggggagtgggtctgggttcaggggctccaggctccctgccctgctacctgcgcatggacgca

SEQ ID NO: 483846 - DNA, 120 bp, Artificial Sequence
  ENSG00000162073_8 (sequence is synthesized)
ctggcgctgcttgggggactggtaaatgtagcccgtctgcccgagcgctggggacctggccgctttgactactggggcaactcccaccagatcatgcacctgctgagcgtgggctccatc

SEQ ID NO: 483847 - DNA, 120 bp, Artificial Sequence
  ENSG00000162073_9 (sequence is synthesized)
ctgcagctgcacgccggcgtcgtgcccgacctgctctgggctgcccaccacgcctgtccccgggactgagctgccatgccagcctgcccacagcagcctcctagagttagcaacaccagg

SEQ ID NO: 483848 - DNA, 120 bp, Artificial Sequence
  ENSG00000162073_10 (sequence is synthesized)
tgttcctcccaactcgtctgcaaggggctggctccttggatgcttccagctcatgagatgtctcagcaggagccctgttcacccgttcttccctgtggactgacctcttccacccacgcc

SEQ ID NO: 483849 - DNA, 120 bp, Artificial Sequence
  ENSG00000162073_11 (sequence is synthesized)
ttttactgtgtcagctggaaggaaacctttccctcttgggacctctttaccctctgtgacctgtggggttagaccagagagggactctggggtcacgtcttgctctgagagttcaagtcc

SEQ ID NO: 483850 - DNA, 120 bp, Artificial Sequence
  ENSG00000162073_12 (sequence is synthesized)
tgccaggccgccagcccagagcctcctcaccctatcctgttcctcccaccaggcctgtggccagtcttcctgatctccatctttctgccctgcataccagccctcccagcagccacaagc

SEQ ID NO: 483851 - DNA, 120 bp, Artificial Sequence
  ENSG00000162073_13 (sequence is synthesized)
ttgcccgccctggctccctctgcccagagactatggagtaaggcattcaggacaaaaggaccaagggggcgtggacccgtcttgtaccagctggccacaggcacaagggctgcagctgct

SEQ ID NO: 483852 - DNA, 120 bp, Artificial Sequence
  ENSG00000162073_14 (sequence is synthesized)
tcttccaggaaactgacacagggagctcagcggcctcagatcctgggacccctgggccgtgcctgccctccaccttgagtgccatactcccaacagctccaggtacccaccgggggatgt

SEQ ID NO: 483853 - DNA, 120 bp, Artificial Sequence
  ENSG00000162073_15 (sequence is synthesized)
gcctgctcaggaaacctctttgctccacacagcatggggcttcagctgctggcccaaggccaggagcgctgggttctgcagcagggctcagcctcaggggcgttaagaccctggatgaca

SEQ ID NO: 483854 - DNA, 120 bp, Artificial Sequence
  ENSG00000162073_16 (sequence is synthesized)
tcaataaagggacaggaagggccatgttgccacatgagcaagcttgggtgctcccaaggttcaaatactttttattagacacggccaggcagagaagaccatgggagttcccgaggggcc

SEQ ID NO: 483855 - DNA, 120 bp, Artificial Sequence
  ENSG00000162073_17 (sequence is synthesized)
ccagctttcaagggcgacgggagagacacaggataaaaggttaaaagtgcagaggcagagtctggggctcaggttgggtctagggtgtcctcaaacaggctgaggaggttccgaggctca

SEQ ID NO: 483856 - DNA, 120 bp, Artificial Sequence
  ENSG00000162073_18 (sequence is synthesized)
aaggaggggaaggagccccgaggaggctctgagttgatgtcacttaggtccagggcatccctgggaggagagagtagtgacactcaggatccaaaagctagccctgcccaccccagcccc

SEQ ID NO: 483857 - DNA, 120 bp, Artificial Sequence
  ENSG00000162073_19 (sequence is synthesized)
tggacctgcttacctgggtgtgcacctgctccggggggtggaggtgctccccacagtccgggccaggacagcctcaggggagagtgaaggcctgcaggagggcaggcgagacaaggaggg

SEQ ID NO: 483858 - DNA, 120 bp, Artificial Sequence
  ENSG00000162073_20 (sequence is synthesized)
tgtccagggctagggagtgccggatgaaaccagctctgtccctgtgcaggctccaggctcccgcctgacaaacaggcagggagccacagtcagggacaataaaaacttggtgcactctga

SEQ ID NO: 483859 - DNA, 120 bp, Artificial Sequence
  ENSG00000162073_21 (sequence is synthesized)
aagcagcacttggacagccttcaaagtccttccatctggctgcactccaaggccccctctgtccttttcagaacacatggacttggaggcagatttgaaataaacttttagtaaatgtaa

SEQ ID NO: 483860 - DNA, 120 bp, Artificial Sequence
  ENSG00000162073_22 (sequence is synthesized)
gataagtaaccagtgccaaaagccttttgcccagggcctgtctctggccaaggccaggccgccaactggatgacagcattacctggacctgtcttgccctgtcctgtgttgtgtctgaac

SEQ ID NO: 483861 - DNA, 120 bp, Artificial Sequence
  ENSG00000162076_0 (sequence is synthesized)
ccagaagacagggcacccgcggccttgctgcgcatgctcgcgctgtgaccccggcttgaggccagaagccaaggagtcctcagtgacggtgggatccacaacatctccacatcgctgtcc

SEQ ID NO: 483862 - DNA, 120 bp, Artificial Sequence
  ENSG00000162076_1 (sequence is synthesized)
ccacccagccagggcagcgccagcactagctcagacgcaaggacggaaccgctggactccaggttccttgcctgggagtaggagaaatccacctgctgggggctgagtgtggcctgaggg

SEQ ID NO: 483863 - DNA, 120 bp, Artificial Sequence
  ENSG00000162076_2 (sequence is synthesized)
acaggccctgggtcccgggatgcccctgcccgagcccagcgagcaggagggtgagagtgtgaaggccagccaggagccatcccccaagccaggcacagaagtcatcccggcagcccccag

SEQ ID NO: 483864 - DNA, 120 bp, Artificial Sequence
  ENSG00000162076_3 (sequence is synthesized)
caagggtgtgcactgtgtcatgtccctgggggtgcccggccccgccacccttgccaaggccctcctccagacccaccccgaggcccagcgggccattgaggcagcccctcaggagcctga

SEQ ID NO: 483865 - DNA, 120 bp, Artificial Sequence
  ENSG00000162076_4 (sequence is synthesized)
gcagaaacggagcaggcaggacccaggcacagacagaacagaagacagtggattagcagcggggcctcctgaggctgctggggagaactttgccccctgctctgtggcgcccggcaagtc

SEQ ID NO: 483866 - DNA, 120 bp, Artificial Sequence
  ENSG00000162076_5 (sequence is synthesized)
cctgtaaccttgacaacaggcgcatcctcccaggccaccaacccagccataggctcttctctgtccgcagggcttctggggccaaatgggtgaatctttgcttttaacattgtgtgattt

SEQ ID NO: 483867 - DNA, 120 bp, Artificial Sequence
  ENSG00000162076_6 (sequence is synthesized)
cttttctttttttttttttttttagatcaagtataagttacttttgtaagcagaaaaatactttcaaacaagaataaaagaagctgttcgctagaccccataatgggcaggttttaaaca

SEQ ID NO: 483868 - DNA, 120 bp, Artificial Sequence
  ENSG00000162076_7 (sequence is synthesized)
agaagacagggcacccgcggccttgctgcgcatgctcgcgctgtgaccccggcttgaggtaacagcgcgagctgaggctggggcccttggcgcggaggctgagggacccgccgcggcgct

SEQ ID NO: 483869 - DNA, 120 bp, Artificial Sequence
  ENSG00000162076_8 (sequence is synthesized)
gctccacagcggccccccaggacagctcggcacctcccagggtggcccccacagccgcgctggctccatcaggcgcttctccctggcatgcgggtccttgttccctgactttgaccacgt

SEQ ID NO: 483870 - DNA, 120 bp, Artificial Sequence
  ENSG00000162076_9 (sequence is synthesized)
atccttccatccccaccccaggtccagcagaggcgatggctgcggcttcccagtgctcagcacaaacttggcctcaagtttcctggaaatgactttagcagcttttgtggccctggcctg

SEQ ID NO: 483871 - DNA, 120 bp, Artificial Sequence
  ENSG00000162078_0 (sequence is synthesized)
ccctgggccttcccccaggaagagccccacggccagctccttcctgttcccctggcggcccctcgcttcttccttctggatgggggcccagggggcccaggagagtataaaggcgatgtg

SEQ ID NO: 483872 - DNA, 120 bp, Artificial Sequence
  ENSG00000162078_1 (sequence is synthesized)
gagggtgcccggcacaaccagacgcccagtcacaggcgagagccctgggatgcaccggccagaggccatgctgctgctgctcacgcttgccctcctggggggccccacctgggcagggaa

SEQ ID NO: 483873 - DNA, 120 bp, Artificial Sequence
  ENSG00000162078_2 (sequence is synthesized)
gatgtatggccctggaggaggcaagtatttcagcaccactgaagactacgaccatgaaatcacagggctgcgggtgtctgtaggtcttctcctggtgaaaagtgtccaggtgaaacttgg

SEQ ID NO: 483874 - DNA, 120 bp, Artificial Sequence
  ENSG00000162078_3 (sequence is synthesized)
gggtatggtcatgtacaccagcaaggaccgctatttctattttgggaagcttgatggccagatctcctctgcctaccccagccaagaggggcaggtgctggtgggcatctatggccagta

SEQ ID NO: 483875 - DNA, 120 bp, Artificial Sequence
  ENSG00000162078_4 (sequence is synthesized)
tcaactccttggcatcaagagcattggctttgaatggaattatccactagaggagccgaccactgagccaccagttaatctcacatactcagcaaactcacccgtgggtcgctagggtgg

SEQ ID NO: 483876 - DNA, 120 bp, Artificial Sequence
  ENSG00000162078_5 (sequence is synthesized)
ggtatggggccatccgagctgaggccatctgggtggtggtggctgatggtactggagtaactgagtcgggacgctgaatctgaatccaccaataaataaaggttctgcagaatcagtgca

SEQ ID NO: 483877 - DNA, 120 bp, Artificial Sequence
  ENSG00000162078_6 (sequence is synthesized)
aaccagacgcccagtcacaggcgagagccctgggatgcaccggccagaggccatgctgctgctgctcacgcttgccctcctggggggccccacctgggcagggagtaagtcagtggggtc

SEQ ID NO: 483878 - DNA, 120 bp, Artificial Sequence
  ENSG00000162078_7 (sequence is synthesized)
tgccctcaatctcccctgcctccctccaggagagccagggactcacccggcccttgtcccagactaactctggtcacagaaccatcctgtctgcctggaggggtggggtcccctgttctg

SEQ ID NO: 483879 - DNA, 120 bp, Artificial Sequence
  ENSG00000162078_8 (sequence is synthesized)
agggcagggggtaagcacccgtggccacttttgccacacatgcctggctactgtcgatgcttcctggctcccgctgatgcttcctggctggagcggagacggtcagaccgtcctccctac

SEQ ID NO: 483880 - DNA, 120 bp, Artificial Sequence
  ENSG00000162078_9 (sequence is synthesized)
gggaaagtctgtccgattactgtcaaagaagacaggaggtaagggtcagagtggaccactgactgaatatgagtcgcagaagtgttagaggcagaagtccagggccatttccttaatatc

SEQ ID NO: 483881 - DNA, 120 bp, Artificial Sequence
  ENSG00000162078_10 (sequence is synthesized)
tcttctcctggtgaaaagatttctggaaggagttatttatgagtgaagagctggagaatccattcgcaaactgatgcatgaaagtgattagcaagagaaagttgtgagacaaaacagaga

SEQ ID NO: 483882 - DNA, 120 bp, Artificial Sequence
  ENSG00000162078_11 (sequence is synthesized)
agctgagaggccagaaacctctacccaggacgctgagctcctggcggatccgatgagtccctccaggacaccgtccaccctgggatgaaggcagaggagttggaaggaggcgaggccgtc

SEQ ID NO: 483883 - DNA, 120 bp, Artificial Sequence
  ENSG00000162078_12 (sequence is synthesized)
acgggacaacaggaccctatgaaggtgggcccacagcaaaaggagagatgattctagagcatccagtcttctagggcagcaaaacaacctaaattttctaagaggccacccagctgaggg

SEQ ID NO: 483884 - DNA, 120 bp, Artificial Sequence
  ENSG00000162078_13 (sequence is synthesized)
tgcccccggggagggctgaggcgtcagggtgacggctccactgcccactcacctgcgacctcaaagcccctctcctccttggggtgctcctgacagccacctccagggcaggcgagtggc

SEQ ID NO: 483885 - DNA, 120 bp, Artificial Sequence
  ENSG00000162078_14 (sequence is synthesized)
cccacccaagcagacggtccttcccccagacctggcgccaaactggagtgaaagcccgaccaccgtgtctcacagggaaactgacaccagatgcgaacttccaaatggatccctccctgc

SEQ ID NO: 483886 - DNA, 120 bp, Artificial Sequence
  ENSG00000162078_15 (sequence is synthesized)
aagtgtggagctggcgctaccaggcactgctctggccatgcgtctaagacacaggcagagggcgctgcccaccacgctggcgacggcctcaaagcccctgttcatgcctgggacagcgcc

SEQ ID NO: 483887 - DNA, 120 bp, Artificial Sequence
  ENSG00000162078_16 (sequence is synthesized)
caaggaccttgctcatgcctgggacaggccccagggcccccactggctgcagtcagcagcgggcagggtggtgggggaaggtatggacactccgtgggccggagctgggagaacaaggcc

SEQ ID NO: 483888 - DNA, 120 bp, Artificial Sequence
  ENSG00000162078_17 (sequence is synthesized)
tattattggacacctggtggccatggcaaccacacaaggatgcctgagactgaaaatctgtgggcttcaaggagctccagctcttgcactggctgagtcacagtgactatataactctta

SEQ ID NO: 483889 - DNA, 120 bp, Artificial Sequence
  ENSG00000162078_18 (sequence is synthesized)
ctcccacttttgggacactttttgagagggacagggatcctatctaactacacgggacagacatcgcccaagaccgtcctgagcaagcctggacgctgtgaccctaacgatgaaggtgtc

SEQ ID NO: 483890 - DNA, 120 bp, Artificial Sequence
  ENSG00000162078_19 (sequence is synthesized)
ccgcagacaatgtccggggcaggcaccatgctctcccaacctaccacagccagatgtttttgtaaagaacaataaaaatgaattactagaaaagcaaagacataaaatacacataaaaaa

SEQ ID NO: 483891 - DNA, 120 bp, Artificial Sequence
  ENSG00000162086_0 (sequence is synthesized)
agcgtcacttccacttccggccggcgctctggctctgtacctggacagggctgcggtaggccagcggtgggctggcggttgcgctcctcagatcggcggcctttcgggcggtggcttgcg

SEQ ID NO: 483892 - DNA, 120 bp, Artificial Sequence
  ENSG00000162086_1 (sequence is synthesized)
tttgagcctcagaaagcgaggagcggcctccacggaagccaagctggccgaggttgcagtccatgagctgggaaaggaggcagtgctcttgggagaaacagcagaggcctcaagtttcgg

SEQ ID NO: 483893 - DNA, 120 bp, Artificial Sequence
  ENSG00000162086_2 (sequence is synthesized)
gctgaagccaacagagtcccaaccagtgggcgtatcccaagatgaagaattttggaatacatacgagggtctgcaagaacagctcagcaggaatactcataaagagactgagcctgtgta

SEQ ID NO: 483894 - DNA, 120 bp, Artificial Sequence
  ENSG00000162086_3 (sequence is synthesized)
tgagagggctgtgcctactcaacagattctagcttttcctgagcaaacaaacaccaaagactggacagtgacacctgagcacgtcttgcctgagtcccagagcttgttgacatttgaaga

SEQ ID NO: 483895 - DNA, 120 bp, Artificial Sequence
  ENSG00000162086_4 (sequence is synthesized)
agtggccatgtatttttcccaggaagaatgggagttattggatcccactcagaaggccctctacaatgatgtaatgcaggaaaactatgagactgtcatctctctagcattgtttgtgct

SEQ ID NO: 483896 - DNA, 120 bp, Artificial Sequence
  ENSG00000162086_5 (sequence is synthesized)
ccccaaacctaaagtgatctcctgtctagagcaaggggaagagccatgggttcaagtatccccggagtttaaggatagtgccggaaaatctcctacagggttaaagctcaaaaacgacac

SEQ ID NO: 483897 - DNA, 120 bp, Artificial Sequence
  ENSG00000162086_6 (sequence is synthesized)
tgaaaatcatcagcctgtgtctctttctgacttagaaatacaagcatcagcaggcgtcatatcaaaaaaggccaaagtaaaagttccccagaaaacagcaggcaaagaaaatcattttga

SEQ ID NO: 483898 - DNA, 120 bp, Artificial Sequence
  ENSG00000162086_7 (sequence is synthesized)
tatgcacagagtgggaaaatggcaccaagattttccagtgaagaaaagaaagaaactttcaacctggaaacaagagctgctcaaacttatggatcgtcacaagaaagattgtgcaagaga

SEQ ID NO: 483899 - DNA, 120 bp, Artificial Sequence
  ENSG00000162086_8 (sequence is synthesized)
gaagccttttaaatgtcaggaatgtgggaaaaccttcagagttagctctgaccttattaagcaccaaagaattcacactgaagagaaaccctataaatgtcaacagtgtgataagaggtt

SEQ ID NO: 483900 - DNA, 120 bp, Artificial Sequence
  ENSG00000162086_9 (sequence is synthesized)
cttcagtcaaaatacaaatttacatacacaccaaagaactcatacaggagaaaagcccttcacatgtcatgaatgtggaaaaaaattcagtcagaactcccaccttattaaacaccggag

SEQ ID NO: 483901 - DNA, 120 bp, Artificial Sequence
  ENSG00000162086_10 (sequence is synthesized)
aacccacacaggtgagcagccatatacttgtagcatatgcaggagaaacttcagcaggcggtcaagccttcttagacaccagaaactccacctgtgaagagaagcttgtccagtgtcctc

SEQ ID NO: 483902 - DNA, 120 bp, Artificial Sequence
  ENSG00000162086_11 (sequence is synthesized)
attctgaagacattcaccaaatggagcttggcactaaaatttatgtaaaagaaaaatcacaaaccttgaaaaattttacatcagaaaatgggataaacatacatttcacagaaaataatc

SEQ ID NO: 483903 - DNA, 120 bp, Artificial Sequence
  ENSG00000162086_12 (sequence is synthesized)
aagacttgctctgcagccactcagtagtcttctgtggtcacagaagtaaacattgttggctttgtattgatctctccagtcatttttgaacacatccaatagaaacattggcagcatggt

SEQ ID NO: 483904 - DNA, 120 bp, Artificial Sequence
  ENSG00000162086_13 (sequence is synthesized)
cttccaaaacaaaaagcagtaacatgcatgtttaattgcataccattctcttcacagtagcaggcttaccaatttccatagtctcatgaggccgaaatgaattacaatgtaaagtgttcc

SEQ ID NO: 483905 - DNA, 120 bp, Artificial Sequence
  ENSG00000162086_14 (sequence is synthesized)
aggaaccaaattggattttctttcttttgtcattggacacggtttgcaaagttggacatcacttgagttccttcttaaacttttcggcaacttctcttggatcctgttatcacagttttt

SEQ ID NO: 483906 - DNA, 120 bp, Artificial Sequence
  ENSG00000162086_15 (sequence is synthesized)
tactgtgatgaaatcttgttaaccaccactagggaatctccagatgaactattaatgcactgtcttatgcctctcattggtgatgtttggaaaatagaagacatctctaatggaatcatg

SEQ ID NO: 483907 - DNA, 120 bp, Artificial Sequence
  ENSG00000162086_16 (sequence is synthesized)
ggggaaacgggttggaatttgtagccatggaatatatattagatgtaaagaattttctgcaataaaagaaactagacttgttaatccctgccttgcaatgtcagtaggataaagcagcta

SEQ ID NO: 483908 - DNA, 120 bp, Artificial Sequence
  ENSG00000162086_17 (sequence is synthesized)
taaaaattagtacttgcccaaggcctgaaagagaattagtgggaattaagatcaacttctcagttttgtttgtttactttttaattggcttttctttgttgttaagaatgagagacttaa

SEQ ID NO: 483909 - DNA, 120 bp, Artificial Sequence
  ENSG00000162086_18 (sequence is synthesized)
tttccatgggagttggagtgtgtgtgctgcaggcaggatcctgtggctcatttggcatggagacctggacatgtagtcagcaggagacggttccctaaataaaagatttgggcactggtg

SEQ ID NO: 483910 - DNA, 120 bp, Artificial Sequence
  ENSG00000162086_19 (sequence is synthesized)
cttttaggaagaagatccttttattgcttttgtacaagaccagacaggatctcatttgttaaacgtggtaccaattgggtgtcttaacacaggagcagaacttcctagagcagaatgatg

SEQ ID NO: 483911 - DNA, 120 bp, Artificial Sequence
  ENSG00000162086_20 (sequence is synthesized)
atggtagatctgaaagtggctgcgtacttggaccctcagatcagggctttgtgggagaccaaggggcctgcaagagagagctccggtcagagtaaaaaatctcctcaaatggactgtctc

SEQ ID NO: 483912 - DNA, 120 bp, Artificial Sequence
  ENSG00000162086_21 (sequence is synthesized)
gatcctaagagctcttgctggcacttccggaatttcacctatgatgaagcaggtggaccccgtgaggctgtcagcaaacttcaagaattatgtcatctatggctgaagccagagatccac

SEQ ID NO: 483913 - DNA, 120 bp, Artificial Sequence
  ENSG00000162086_22 (sequence is synthesized)
tcaaaagagcagatactggaactgctggtgctggagcagttcctgactattctgcccagggagacacagacccagatgcagaagcaccatccacagagcattgaggaggctgtggctctg

SEQ ID NO: 483914 - DNA, 120 bp, Artificial Sequence
  ENSG00000162086_23 (sequence is synthesized)
aaagcgaggagcggcctccacggaagccaagctggccgaggtaaccgagaagcggcttcccctatggcttcgaccctggagccgctggagcggcggcggccgcagggaggcagccatttt

SEQ ID NO: 483915 - DNA, 120 bp, Artificial Sequence
  ENSG00000162086_24 (sequence is synthesized)
ccgtaggcggtggccgcggcgcttccgggccgcgcggctggagcctgaggcggggccaccgtcgggcacgagaaaccattctctccccgcttttcgcagctgtatcccagaggcgcggct

SEQ ID NO: 483916 - DNA, 120 bp, Artificial Sequence
  ENSG00000162086_25 (sequence is synthesized)
gaagctcgctgggacactgcccgcttgcccagtgcccacgggcacgcctgtcgcagacacaggctgtggcgaatccgagtgctggcgggcagcagtgcctgcagctgcgcccgcagactc

SEQ ID NO: 483917 - DNA, 120 bp, Artificial Sequence
  ENSG00000162086_26 (sequence is synthesized)
tttcccgcctccgccggcatttccgtgtccggccgatgtcatgcggtcggttgagcctcagggctagcagcttctactgatgcaaaaacataggaagtgtctctttgcttctggaaccgg

SEQ ID NO: 483918 - DNA, 120 bp, Artificial Sequence
  ENSG00000162086_27 (sequence is synthesized)
ggtgggcagcaaggagctggccacttctttgaataccggtggcatcctgggcagaatttcggtgccgtttctgctggctcacttcaggaaaagtgaggctcacggctctcctcagccccc

SEQ ID NO: 483919 - DNA, 120 bp, Artificial Sequence
  ENSG00000162086_28 (sequence is synthesized)
cttagaagtctaaatgacctttggagaaatacaaagtcagcagaaagtttcactttcatcgtcaccaactcctgttggagttgatatttcataaacatcagcgacagaaagaaaatacga

SEQ ID NO: 483920 - DNA, 120 bp, Artificial Sequence
  ENSG00000162086_29 (sequence is synthesized)
cttgatattttgtaaataaaatatccttttttacaagttgatattttgtaaacagaggtcagctgtaattttctccagatcaagtaagcacagttaaaaattcatataggcctggcgcgg

SEQ ID NO: 483921 - DNA, 120 bp, Artificial Sequence
  ENSG00000162086_30 (sequence is synthesized)
ggcgagactccatctcaaaaaaaaaaacaaaattcgtataaatcatctgcatggcaccctttatgtgtgttgcaaagaatgatgagcatcttgttgcttacttgggagacattgtctgaa

SEQ ID NO: 483922 - DNA, 120 bp, Artificial Sequence
  ENSG00000162086_31 (sequence is synthesized)
acattgtctgaaaataggctacttttttactttctgtagtaccccctccccccactgtatctgggtttcacttacccgctgtcaactgccatccaaaaaatattaaatggaaaactccag

SEQ ID NO: 483923 - DNA, 120 bp, Artificial Sequence
  ENSG00000162086_32 (sequence is synthesized)
aaataaacagttcataagttttaaataacttttttttttttttttggagatggaatctcgttttgctgccctggctggagtgccgtggcacagtctgagctcactgcagccttcacctcc

SEQ ID NO: 483924 - DNA, 80 bp, Artificial Sequence
  ENSG00000162086_33 (sequence is synthesized)
ctcctgggtagctgggactacaggcgcgcactaccacacctggctaatttttgtgtttacaataaaggtctcaggtgatc

SEQ ID NO: 483925 - DNA, 75 bp, Artificial Sequence
  ENSG00000162086_34 (sequence is synthesized)
cacgaccgccagttttaaataactcttactacagtgttttattgttaatctcttattgtacctaatttataaatt

SEQ ID NO: 483926 - DNA, 120 bp, Artificial Sequence
  ENSG00000162086_35 (sequence is synthesized)
gttaatctcttattgtacctaatttataaattaaggtatcatagctatgtatacatagagaaaatagtataatgcagttagatgctgttgggggttttaggtattcacagaatgtactgg

SEQ ID NO: 483927 - DNA, 120 bp, Artificial Sequence
  ENSG00000162086_36 (sequence is synthesized)
ctgtattttgatctcaccgtctcagctcttttgccagtattcctacaatggaaaatctaaaatgttgttttttaaggtgcctttatttttagtttttaaattagagacaaagtcttgctc

SEQ ID NO: 483928 - DNA, 120 bp, Artificial Sequence
  ENSG00000162086_37 (sequence is synthesized)
taactcccaggctggagtgcagtgatgaggtcatggctcactgcaaccttgaattcctgggctcaggcgactctcccacctcagcctcctgagctagaactactggtgtgctctaccatc

SEQ ID NO: 483929 - DNA, 120 bp, Artificial Sequence
  ENSG00000162086_38 (sequence is synthesized)
ctggctattttttttttttttcttcaaattttgtgttttgtagagacggggtctcgctatgttgctcaggctggtctgaaactcctggctcaagtgatcctcccacctcggtctccaaaa

SEQ ID NO: 483930 - DNA, 120 bp, Artificial Sequence
  ENSG00000162086_39 (sequence is synthesized)
gtgctgggaatgcaggcatgagccactgcacctggcctaaaatatttttaaagtgaaggcttccatcttcacaagaggatgaagggtcataaaagttgtactccccttactagagacaga

SEQ ID NO: 483931 - DNA, 120 bp, Artificial Sequence
  ENSG00000162086_40 (sequence is synthesized)
ctgggatgatctgttgaaatttaagagaatctcagaatgttttcctaatcttattttctcctattcttttcttatggggaagatgggataggaggcacaccagttaaatccttggaaaat

SEQ ID NO: 483932 - DNA, 120 bp, Artificial Sequence
  ENSG00000162086_41 (sequence is synthesized)
cccaaaatacctttcagccagtgggtgccaattttcttacccaccaatctttcctaaattgttttcttttttataaaaaagacagttgtccactgacatttgtgtgttttgtgctgtgct

SEQ ID NO: 483933 - DNA, 120 bp, Artificial Sequence
  ENSG00000162086_42 (sequence is synthesized)
tcagctgaataatagaaaaggagaaaaacaaagggcctgctagttgattttgaagggaagacaggacaccttttctgttcttctttctctcataagtcgcaagtgatgaggttcatgtga

SEQ ID NO: 483934 - DNA, 120 bp, Artificial Sequence
  ENSG00000162086_43 (sequence is synthesized)
ggatgcaggtggatatagtagagatggtggcagttagttgagaaattagatggattaggtaggtcattgtttggttttttttttaaggacagttaaggtgggacttgaaactacaggccc

SEQ ID NO: 483935 - DNA, 120 bp, Artificial Sequence
  ENSG00000162086_44 (sequence is synthesized)
acagaaaagttcacaggtttcagagattgtggtagatacttccctggccttagagaaagagagttgcttttgccctctttggagccagggtgaattgagggtgttgggcctagtctggct

SEQ ID NO: 483936 - DNA, 120 bp, Artificial Sequence
  ENSG00000162086_45 (sequence is synthesized)
gagggtgttgggcctagtctggcttggccaaggagacaggacttaagtacttagaaacagaataaaaggtaataaagagtcagggaggctggatgcagtggctcacacctgtaatctcag

SEQ ID NO: 483937 - DNA, 120 bp, Artificial Sequence
  ENSG00000162086_46 (sequence is synthesized)
tcaggagttcaagaccagcctggacagcatggtggaaccctctctctacaaaaataaacaaattagctgggcatgatgaccggtgcctgtaatcccggctatcctcgaggctgaggaggg

SEQ ID NO: 483938 - DNA, 69 bp, Artificial Sequence
  ENSG00000162086_47 (sequence is synthesized)
gggcatgatgaccggtgcctgtaatcccggctatcctcgaggctgaggagggagaatcatttgaacctg

SEQ ID NO: 483939 - DNA, 120 bp, Artificial Sequence
  ENSG00000162086_48 (sequence is synthesized)
ttttctgccatgtgacaaaactcacttttaggtttctgctcaagtattactttctcaaagaggtgtcccacaagaccttatctaaaatagctttacaggagcagaatcttaaatactctt

SEQ ID NO: 483940 - DNA, 120 bp, Artificial Sequence
  ENSG00000162086_49 (sequence is synthesized)
taccgtgatttaattttctttaaaacatttatcactccctgacattattttgtttattgattgattgtgccatccctctactgtaatgtaaagtccgtgaaatcaggggtcttcttcact

SEQ ID NO: 483941 - DNA, 120 bp, Artificial Sequence
  ENSG00000162086_50 (sequence is synthesized)
actatatccctagccctcgagcagtgcctaacacaccatagccactcaatacatgtttgttgaatgaatgagtgagagagtttcataccttgtaatccgtaattagagaaacttcaccaa

SEQ ID NO: 483942 - DNA, 120 bp, Artificial Sequence
  ENSG00000162086_51 (sequence is synthesized)
gtgattttggtctatttcttctacctgcatatgaaccagtaatctataggaatggtagaaatctatcctagttgagggccagtggctaaggaataaaggctaaataaaaagtagctgtaa

SEQ ID NO: 483943 - DNA, 120 bp, Artificial Sequence
  ENSG00000162086_52 (sequence is synthesized)
ttataatagtaatcacttgtgcttatgatactcaagtcagcgtccttcacattggctttgccatacctggtcttatccaggctgagtccttctgaagagttaataagaccagcttatatt

SEQ ID NO: 483944 - DNA, 120 bp, Artificial Sequence
  ENSG00000162086_53 (sequence is synthesized)
ctatatccttttcattgatccaccgtagatttatttcttagtctctgctttgcatagctacctataagtataacatagtataaacgtgatacttaatcttggagtctatccatttaacca

SEQ ID NO: 483945 - DNA, 120 bp, Artificial Sequence
  ENSG00000162086_54 (sequence is synthesized)
tttggagtaacaaattgtaaaatgtctttggtcatcctgaaacagtctgggattagtggaccagttcactgttaagttaccagtccttgacctcattttgtccatttgacagcattgttt

SEQ ID NO: 483946 - DNA, 120 bp, Artificial Sequence
  ENSG00000162086_55 (sequence is synthesized)
gtgagacccccgtctcaaaacaaaacaaacaaacaaaaaaaacaactaggggaagactgcacaagaaaagaaaacatagaaaaaagggaaacaaagatttggaaaaaagaaaaatcccaa

SEQ ID NO: 483947 - DNA, 120 bp, Artificial Sequence
  ENSG00000162086_56 (sequence is synthesized)
cagaatagccaaggacaggaaatgcactgatgggtaatgtcctccctatagtagatgaaagtctctactgccttcccttaatgcttgttccttggctctgctgacaagttgggagccagg

SEQ ID NO: 483948 - DNA, 120 bp, Artificial Sequence
  ENSG00000162086_57 (sequence is synthesized)
ggtgggtggcgacacatctgctgacctcgggtctgctgggaagaatacagggcaggacctatgtttggtgtcagaatcatctggaggttgcagtccatgagctgggaaaggaggcagtgc

SEQ ID NO: 483949 - DNA, 120 bp, Artificial Sequence
  ENSG00000162086_58 (sequence is synthesized)
tttaagcctttttttgtcattttttttagtgtcttatactacccacaatgtgggctgtacacctgtcgctctgcctccacccccacaaaccaaaagtaagttctgtggtaacaaggatgg

SEQ ID NO: 483950 - DNA, 120 bp, Artificial Sequence
  ENSG00000162086_59 (sequence is synthesized)
ccaaaatgtcatgggcattttttgaataccctgctctgtggatttgtaaaaccagccttgatagcaactatgatgtccttccaggcagcagtagaaatgccaactgtggatgaaagtggg

SEQ ID NO: 483951 - DNA, 120 bp, Artificial Sequence
  ENSG00000162086_60 (sequence is synthesized)
agtaggcctagagaacagaaatatctaaaccacagaactcttggtaataacagtgtgaactctgttccttagactagtggagaggaaggaaagaaatggagtgggaaggcttggggccac

SEQ ID NO: 483952 - DNA, 120 bp, Artificial Sequence
  ENSG00000162086_61 (sequence is synthesized)
ttcatccttgtaaaatacagaaggaattgagatcagatgggctgttagtggcagaatgtgaaaacagttgtgtaccaggaaaaacataataaaagacaaaaaacttcatctcctaccata

SEQ ID NO: 483953 - DNA, 80 bp, Artificial Sequence
  ENSG00000162104_0 (sequence is synthesized)
agtgacagcgggcggggcaggggccggagatggtggcggcggcagctcttccgacatgaggcagcggccgcgggggacac

SEQ ID NO: 483954 - DNA, 80 bp, Artificial Sequence
  ENSG00000162104_1 (sequence is synthesized)
ccggcgtcgcgggagcccggctctgcggcagcgtctgcaccgccgcccggcgaggggcccgcgtccgtggttccacgcgc

SEQ ID NO: 483955 - DNA, 80 bp, Artificial Sequence
  ENSG00000162104_2 (sequence is synthesized)
gcactcggggggaagcaggccccactagacgggccgcgccgacgggctccgcgcactcgcagcccggggcgcccccaccc

SEQ ID NO: 483956 - DNA, 80 bp, Artificial Sequence
  ENSG00000162104_3 (sequence is synthesized)
cgaagctcgctgctccgggtcggggtccgggcccggggccggccgcgcgccgcctttgacgcatcggagcgcggctcctg

SEQ ID NO: 483957 - DNA, 120 bp, Artificial Sequence
  ENSG00000162104_4 (sequence is synthesized)
gcgcgccgcctttgacgcatcggagcgcggctcctgcaggatggagggctccgcgccgccagcggagttgtttgtgcgcaggcggctcgcggggctgggagcgctcaaggtctgaacttc

SEQ ID NO: 483958 - DNA, 120 bp, Artificial Sequence
  ENSG00000162104_5 (sequence is synthesized)
cctccggagccgcagctggaggaggcgagcgcgcgaggaggagaagccgcgcggcgcggaggccaccctcggggcgagaggcgcggaaggcgagcgagcaaagcggtcccggagccacgg

SEQ ID NO: 483959 - DNA, 120 bp, Artificial Sequence
  ENSG00000162104_6 (sequence is synthesized)
cggccacgcggcggggacccccgggcgttctaggtactggtgaccccggccggggcaggccccgggactcgacaacatggcttccccaccccaccagcagctgctgcatcaccacagcac

SEQ ID NO: 483960 - DNA, 120 bp, Artificial Sequence
  ENSG00000162104_7 (sequence is synthesized)
cgaggtgagctgcgactccagcggggacagcaacagcgtgcgcgtcaagatcaaccccaagcagctgtcctccaacagccaccccaagcactgcaaatacagcatctcctctagctgcag

SEQ ID NO: 483961 - DNA, 120 bp, Artificial Sequence
  ENSG00000162104_8 (sequence is synthesized)
cagctctggggactccgggggcgtcccccggcgagtgggcggcggaggccggctgcgcaggcagaagaagctgccccagctgttcgagagggcctccagccgctggtgggaccccaagtt

SEQ ID NO: 483962 - DNA, 120 bp, Artificial Sequence
  ENSG00000162104_9 (sequence is synthesized)
cgactcggtgaacctggaggaggcctgcctggagcgctgcttcccgcagacccagcgccggttccggtatgcgctcttctacatcggcttcgcctgccttctgtggagcatctattttgc

SEQ ID NO: 483963 - DNA, 120 bp, Artificial Sequence
  ENSG00000162104_10 (sequence is synthesized)
ggtccacatgagatccagactgatcgtcatggtcgcccccgcgctgtgcttcctcctggtgtgtgtgggcttctttctgtttaccttcaccaagctgtacgcccggcattacgcgtggac

SEQ ID NO: 483964 - DNA, 120 bp, Artificial Sequence
  ENSG00000162104_11 (sequence is synthesized)
ctcgctggctctcaccctgctggtgttcgccctgaccctggctgcgcagttccaggtcttgacgcctgtctcaggacgcggcgacagctccaaccttacggccacagcccggcccacaga

SEQ ID NO: 483965 - DNA, 120 bp, Artificial Sequence
  ENSG00000162104_12 (sequence is synthesized)
tacttgcttatctcaagtggggagcttctccatgtgcatcgaagtgctctttttgctctataccgtcatgcacttacctttgtacctgagtttgtgtctgggggtggcctactctgtcct

SEQ ID NO: 483966 - DNA, 120 bp, Artificial Sequence
  ENSG00000162104_13 (sequence is synthesized)
tttcgagacctttggctaccatttccgggatgaagcctgcttcccctcgcccggagccggggccctgcactgggagctgctgagcagggggctgctccacggctgcatccacgccatcgg

SEQ ID NO: 483967 - DNA, 120 bp, Artificial Sequence
  ENSG00000162104_14 (sequence is synthesized)
ggtccacctgttcgtcatgtcccaggtgaggtccaggagcaccttcctcaaggtggggcaatccattatgcacgggaaggacctggaagtggaaaaagccctcaaagagaggatgattca

SEQ ID NO: 483968 - DNA, 120 bp, Artificial Sequence
  ENSG00000162104_15 (sequence is synthesized)
ttccgtgatgccaagaatcatagccgatgacttaatgaagcagggagatgaggagagtgagaattctgtcaagaggcatgccacctcgagccccaagaacaggaagaaaaagtcttccat

SEQ ID NO: 483969 - DNA, 120 bp, Artificial Sequence
  ENSG00000162104_16 (sequence is synthesized)
ccaaaaagctcctatagccttccgcccttttaagatgcagcagatcgaagaagtcagtattttatttgcagatatcgtgggcttcaccaagatgagtgccaacaagtctgcccacgccct

SEQ ID NO: 483970 - DNA, 120 bp, Artificial Sequence
  ENSG00000162104_17 (sequence is synthesized)
ggtgggtctcctgaacgatctgttcggtcgcttcgaccgcctgtgtgaggagaccaagtgtgagaaaatcagcaccctgggagactgttactactgcgtggcgggctgtcccgagccccg

SEQ ID NO: 483971 - DNA, 120 bp, Artificial Sequence
  ENSG00000162104_18 (sequence is synthesized)
ggccgaccatgcctactgctgcatcgagatgggcctgggcatgatcaaggccatcgagcagttctgccaggagaagaaggagatggtgaacatgagagtcggggtgcacacgggcaccgt

SEQ ID NO: 483972 - DNA, 120 bp, Artificial Sequence
  ENSG00000162104_19 (sequence is synthesized)
cctttgcggcatcctgggcatgaggaggtttaaatttgacgtgtggtccaacgatgtgaacctggccaatctcatggagcagctgggagtggccggcaaagttcacatttctgaggccac

SEQ ID NO: 483973 - DNA, 120 bp, Artificial Sequence
  ENSG00000162104_20 (sequence is synthesized)
cgcaaaatacttagatgaccggtacgaaatggaagatgggaaagttattgaacggctgggccagagcgtggttgctgaccagttgaaaggtttgaagacatacctgatatcgggtcagag

SEQ ID NO: 483974 - DNA, 120 bp, Artificial Sequence
  ENSG00000162104_21 (sequence is synthesized)
agccaaggagtctcgctgcagctgtgcagaggccttgctttctggctttgaggtcattgacggctcacaggtgtcctcaggccctaggggacaggggacagcgtcatcagggaatgtcag

SEQ ID NO: 483975 - DNA, 120 bp, Artificial Sequence
  ENSG00000162104_22 (sequence is synthesized)
tgacttggcgcagactgtcaaaacctttgataaccttaagacctgcccttcgtgcggaatcacatttgctcccaaatctgaagccggcgccgagggaggagcacctcaaaacggctgcca

SEQ ID NO: 483976 - DNA, 120 bp, Artificial Sequence
  ENSG00000162104_23 (sequence is synthesized)
agacgagcataaaaacagcaccaaggcttctggaggacctaatcccaaaactcagaacgggctcctcagccctccccaagaggagaagctcaccaacagtcagacttctctgtgtgagat

SEQ ID NO: 483977 - DNA, 120 bp, Artificial Sequence
  ENSG00000162104_24 (sequence is synthesized)
cttgcaggagaagggaaggtgggcaggggtgagcctggaccagtcggctctccttccgctgaggttcaagaacatccgggagaaaacggacgcccactttgtggacgttatcaaagaaga

SEQ ID NO: 483978 - DNA, 120 bp, Artificial Sequence
  ENSG00000162104_25 (sequence is synthesized)
cagcctgatgaaagattacttttttaagccgcccattaatcagttcagcctgaacttcctggatcaggagctggagcgatcctacaggaccagctatcaggaagaggtcataaagaactc

SEQ ID NO: 483979 - DNA, 120 bp, Artificial Sequence
  ENSG00000162104_26 (sequence is synthesized)
ccccgtgaagacgtttgctagtcccaccttcagctccctcctggatgtgtttctgtcgaccacagtgtttctgacgctgtccaccacctgcttcctgaagtacgaggcggccaccgtgcc

SEQ ID NO: 483980 - DNA, 120 bp, Artificial Sequence
  ENSG00000162104_27 (sequence is synthesized)
tcccccgcccgccgccctggcggtcttcagtgcagccctgctgctggaggtgctgtccctcgcggtgtccatcaggatggtgttcttcctggaggacgtcatggcctgcaccaagcgcct

SEQ ID NO: 483981 - DNA, 120 bp, Artificial Sequence
  ENSG00000162104_28 (sequence is synthesized)
gctggagtggatcgccggctggctaccacgtcactgcatcggggccatcctggtgtcgcttcccgcactggccgtctactcccatgtcacctccgaatatgagaccaacatacacttccc

SEQ ID NO: 483982 - DNA, 120 bp, Artificial Sequence
  ENSG00000162104_29 (sequence is synthesized)
agtgttcacaggctcggccgcgctgattgccgtcgtgcactactgtaacttctgccagctcagctcctggatgaggtcctccctcgccaccgtcgtgggggccgggccgctgctcctgct

SEQ ID NO: 483983 - DNA, 120 bp, Artificial Sequence
  ENSG00000162104_30 (sequence is synthesized)
ctacgtctccctgtgcccagacagttctgtattaacttcgccccttgacgcagtacagaatttcagttccgagaggaacccgtgcaatagttcggtgccgcgtgacctccggcggcccgc

SEQ ID NO: 483984 - DNA, 120 bp, Artificial Sequence
  ENSG00000162104_31 (sequence is synthesized)
cagcctcatcggccaggaggtggttctcgtcttctttctcctgctcttgttggtctggttcctgaatcgcgaatttgaagtcagctaccgcctccactaccacggagacgtggaagcgga

SEQ ID NO: 483985 - DNA, 120 bp, Artificial Sequence
  ENSG00000162104_32 (sequence is synthesized)
tcttcaccgcaccaagatccagagcatgcgggaccaggcagactggctgctgaggaacatcatcccctaccacgtggctgagcagctgaaggtgtcccagacctactccaagaaccatga

SEQ ID NO: 483986 - DNA, 120 bp, Artificial Sequence
  ENSG00000162104_33 (sequence is synthesized)
cgagggcggcaaggagtgctaccgggtcctcaacgagctcatcggggactttgacgagctcctaagcaagccggactacagcagcatcgagaagatcaagaccatcggagccacgtacat

SEQ ID NO: 483987 - DNA, 120 bp, Artificial Sequence
  ENSG00000162104_34 (sequence is synthesized)
ggcggcgtcagggctgaacaccgcgcaggcccaggacggcagccacccgcaggagcacctgcagatcctgttcgagttcgccaaggagatgatgcgcgtggtggacgacttcaacaacaa

SEQ ID NO: 483988 - DNA, 120 bp, Artificial Sequence
  ENSG00000162104_35 (sequence is synthesized)
catgctgtggttcaacttcaagctccgcgtcggcttcaaccatgggcccctcacggccggggtcatcggcaccaccaagctgctgtacgacatctggggagacaccgtcaacatcgccag

SEQ ID NO: 483989 - DNA, 120 bp, Artificial Sequence
  ENSG00000162104_36 (sequence is synthesized)
caggatggacaccaccggcgtggagtgccgcatccaggtgagcgaagagagctaccgcgtcttgagcaagatgggctatgacttcgactacagagggaccgtgaatgtcaaggggaaagg

SEQ ID NO: 483990 - DNA, 120 bp, Artificial Sequence
  ENSG00000162104_37 (sequence is synthesized)
ccagatgaagacctacctgtacccaaagtgcacggatcacagggtcatcccacagcaccagctgtccatctccccagacatccgcgtccaggtggatggcagcatcggacggtctcccac

SEQ ID NO: 483991 - DNA, 120 bp, Artificial Sequence
  ENSG00000162104_38 (sequence is synthesized)
agacgagattgccaacctggtgccttctgtccagtatgtggacaagacatctctgggttctgacagcagcacgcaggccaaggatgcccacctgtcccccaagagaccgtggaaggagcc

SEQ ID NO: 483992 - DNA, 120 bp, Artificial Sequence
  ENSG00000162104_39 (sequence is synthesized)
cgtcaaagccgaagaaaggggtcgatttggcaaagccatagagaaagacgactgtgacgaaacaggaatagaagaagccaacgaactcaccaagctcaacgtttcaaagagtgtgtgagg

SEQ ID NO: 483993 - DNA, 120 bp, Artificial Sequence
  ENSG00000162104_40 (sequence is synthesized)
cggcgcccacccgctgcccgaggtgctctgtttgtcgaaacacagtaatatttgtatttggctgttgtgctttccaagcgccacagttgccctccccggacgtggtgttatgtggtcatt

SEQ ID NO: 483994 - DNA, 120 bp, Artificial Sequence
  ENSG00000162104_41 (sequence is synthesized)
tcagccctaacttctgtgtggatcacagttattcagggttcattttcatccattcttccctttcgctcccttccctggaaaccccgctgcctctgggtcatccgttcagcacgtggtgga

SEQ ID NO: 483995 - DNA, 120 bp, Artificial Sequence
  ENSG00000162104_42 (sequence is synthesized)
gaacaagtgccttcagggctggcctcggcctcgagtctcgggacagaggccgccagtggagatcatggctttgggtattatttgacttttagaacaaaagctgtggttaagatctcattt

SEQ ID NO: 483996 - DNA, 120 bp, Artificial Sequence
  ENSG00000162104_43 (sequence is synthesized)
ttattgctttttcccacgtcccacgagacactattttcggttctctggctaataccctgtttttgagtttattttgtttctgtctatgtcacagtgttcctctacgacccgacctctcta

SEQ ID NO: 483997 - DNA, 120 bp, Artificial Sequence
  ENSG00000162104_44 (sequence is synthesized)
tgtaagcacacatgcgcacacacacttgcattcatgaatctgatataaagtgccagtaatccgccaagagggggtgcgaagggggcatgtcacgacagctccgccaccccccattgccca

SEQ ID NO: 483998 - DNA, 120 bp, Artificial Sequence
  ENSG00000162104_45 (sequence is synthesized)
cccgcactttcccgagcaccgcgccccgtgggctgtgggtgagccgcgctccctgcactgagcgggtttaggggctcgcccacatgcatgcaggccaagacagcaaatgccagccgggca

SEQ ID NO: 483999 - DNA, 120 bp, Artificial Sequence
  ENSG00000162104_46 (sequence is synthesized)
cgacgcccgtgtgcccaggcctcgggggtctcagagccgcctctcacccccgaccctccacccaggggtctccccatcgggagtggaggtgttggtcctggaagctgactcatcggagag

SEQ ID NO: 484000 - DNA, 120 bp, Artificial Sequence
  ENSG00000162104_47 (sequence is synthesized)
ggaaataccaaataaacatccgaggttgcatttatttatttatttatttacccggaagcatgtgcgctcccgggaggggtgctgggtcctcagggtggggggtcatagccacaggggagg

SEQ ID NO: 484001 - DNA, 120 bp, Artificial Sequence
  ENSG00000162104_48 (sequence is synthesized)
gcagttcccaggaaggtaaccagatgtctcttttgtgttttggccacctggggccgcccccaacctccccaccccaagaggggtctgagtgggacctcaaagcatggccagtgcaattct

SEQ ID NO: 484002 - DNA, 120 bp, Artificial Sequence
  ENSG00000162104_49 (sequence is synthesized)
gaggctaggggaataggagaagcccaccagctgcccctgccacccacgggggctcctccctgccggggtccagctcagaaccacgggggtctgtgccggcagcaccggtgccatcttggc

SEQ ID NO: 484003 - DNA, 120 bp, Artificial Sequence
  ENSG00000162104_50 (sequence is synthesized)
ttccacaaattccagaagtttcttggctgcctcccgctctcagatggcacagggcctatcagtggcaggatttaatctggggagcaaattccagctctgaaatggagttctcacaccgta

SEQ ID NO: 484004 - DNA, 120 bp, Artificial Sequence
  ENSG00000162104_51 (sequence is synthesized)
tctagggacagaggcatctggatgcaaacgcggggtttgttaggggcggaatcccgagggtggtgtgggggagctccgtccgggcagttggctgctggtcctgtctgattatgttttgcc

SEQ ID NO: 484005 - DNA, 120 bp, Artificial Sequence
  ENSG00000162104_52 (sequence is synthesized)
atattgagtctgaagtttgtgtggaagtgagctcgcccgagttgtccggtcggagttgtagccagtctttcaggggaccccgggacgctgatgaggcccagggtgcactccttgtcagtc

SEQ ID NO: 484006 - DNA, 120 bp, Artificial Sequence
  ENSG00000162104_53 (sequence is synthesized)
ttgcccgttgtccctgtgcattttgctttccgctgtcaaatctcactgtctcgttttcacaccgcatcagtccccatcatcactactcctccccagagacatacagattgccctccccgg

SEQ ID NO: 484007 - DNA, 120 bp, Artificial Sequence
  ENSG00000162104_54 (sequence is synthesized)
catgaagaagtcacaattctgacccgccacctctccaggggcggtgcctgggatggccacccatcaggacagccagagccagggtcccggcgtcctgagagtccagggcacctcccccca

SEQ ID NO: 484008 - DNA, 120 bp, Artificial Sequence
  ENSG00000162104_55 (sequence is synthesized)
ttagctgtaaggtttcctgtcaggtgtgactgtcagtttgctggtcttccaataccgaagaaagggtggttgtgacaatacctcttgcttctaaagaatgtattataaaacaccgcagat

SEQ ID NO: 484009 - DNA, 120 bp, Artificial Sequence
  ENSG00000162104_56 (sequence is synthesized)
ttttttttttccttaaaaaacactacctgatgctttccttgttcgtggggattgtggtcacatgaagctctttctgcatcagtattaaggtgtatatttgaatgtcctcccctccccttt

SEQ ID NO: 484010 - DNA, 120 bp, Artificial Sequence
  ENSG00000162104_57 (sequence is synthesized)
cccctccaggctgtgtagctttgaggggctgggcgtttgctcacgaccttgctgtctcgctcagaacatgctccgcaaagttctccgcacacacttcttccccatcaagcccatttcctt

SEQ ID NO: 484011 - DNA, 120 bp, Artificial Sequence
  ENSG00000162104_58 (sequence is synthesized)
ccccaaccacaaaggtgtttgtgattcctcaccccgggaaaccaaggagctgcaaagtggagtctggttcagccccgtgcagactcacccagagcttaacgttgtctttcaaacaccctg

SEQ ID NO: 484012 - DNA, 120 bp, Artificial Sequence
  ENSG00000162104_59 (sequence is synthesized)
agccttcctaaacagccagtgcagacgttctctctgggccacgaagcccctcgggtcctccccgtcccctgctccgatgcatacctcagtgcagaaccacagaatctctgcagcggaaac

SEQ ID NO: 484013 - DNA, 120 bp, Artificial Sequence
  ENSG00000162104_60 (sequence is synthesized)
gccgtgcatctcttgtctgttggcagcgagcacatcgtgctggagacacgagtttctaagcagctggcacgagggctgctgacggcatgggtcgtgcttcagggtggcaatacctcttag

SEQ ID NO: 484014 - DNA, 120 bp, Artificial Sequence
  ENSG00000162104_61 (sequence is synthesized)
gaacttagggcaggaagcaatacttcagcattgaatgtgtgtaaatagttgctttgagttgcaattgctattttcttctcagtcccagctcagatcgaattatatatccatatatatata

SEQ ID NO: 484015 - DNA, 120 bp, Artificial Sequence
  ENSG00000162104_62 (sequence is synthesized)
tatatatatatatatatatatatggtaaacaagcacacacaattttatccaatgcaaacaaatgtagagcatcagttacaaaaccctcgaatagcttgagagccccacaggctctgccac

SEQ ID NO: 484016 - DNA, 120 bp, Artificial Sequence
  ENSG00000162104_63 (sequence is synthesized)
aggctctgccacacccgtgacttcatccacactgacgtcacccgcgggggctccccctgcacatttgcacacgatccggagagccgaaggccgcgtgcttcctgtcacatgggctgtaat

SEQ ID NO: 484017 - DNA, 120 bp, Artificial Sequence
  ENSG00000162104_64 (sequence is synthesized)
catttgtagtttccaaagacacgtctgcatttgaatttctagattttcgaggtaaggagttttttttaattggttgtttggaaaatcacatcatgcctagaatctgaaattgaattagca

SEQ ID NO: 484018 - DNA, 120 bp, Artificial Sequence
  ENSG00000162104_65 (sequence is synthesized)
agaaccgactgtttgcattttccatatatccttttatctgctctttttaaattgttaattctaataatttcaaaatgcattcactgaagaaatggacattaaaatattctaaaatttaaa

SEQ ID NO: 484019 - DNA, 120 bp, Artificial Sequence
  ENSG00000162104_66 (sequence is synthesized)
atttccattatctagacaagggaactgaggtcaagcattggagtgaaagtcacctaggtggctttttttcttttttaacctatttatttctttcaacccttagcccagatcctaaccttc

SEQ ID NO: 484020 - DNA, 120 bp, Artificial Sequence
  ENSG00000162104_67 (sequence is synthesized)
atgtgtctatgagaatgtgctgggtcataatcagttgctctgtgaccctggcagggttttttttgtgtttttttgttttcggaaacggtataattctgcagtggtgtgatcatagttcac

SEQ ID NO: 484021 - DNA, 120 bp, Artificial Sequence
  ENSG00000162104_68 (sequence is synthesized)
tgggctcaagcaatcctcccacctcagatcccaagtacctgggactacaggcacaaaccactatgcccagctaattattttattttttggtagacggggtctcgctatgttgcccaggct

SEQ ID NO: 484022 - DNA, 120 bp, Artificial Sequence
  ENSG00000162104_69 (sequence is synthesized)
tgcagtggcatgattatagctcactgcggcctgaaactcctgggctcacacaatcctcctgcgtcatcctcctgagtagctgggaccacactcacgcactgccatgcctggctaatttta

SEQ ID NO: 484023 - DNA, 120 bp, Artificial Sequence
  ENSG00000162104_70 (sequence is synthesized)
gccatgcctggctaattttaaagttttttgtagagatggagtctcactgtgttacgctggccgggaactcctgggctccagcgaccctcctacgtcagcctcccaaagtgtcgggattac

SEQ ID NO: 484024 - DNA, 120 bp, Artificial Sequence
  ENSG00000162104_71 (sequence is synthesized)
aggcgtgagccaccgtgcccagccccctgggcaagtttaacttctctgtgccttggactccccagtgttaaatggggtagtagagggagacagccctccgagagccttcctgccctgtgc

SEQ ID NO: 484025 - DNA, 120 bp, Artificial Sequence
  ENSG00000162104_72 (sequence is synthesized)
ctggcccagagcagcagtgctccgcacgtgttgcctgtttctccatctgaactgcgctcctggccgcccatggcctcccagtcattctgctccactcctgctccacacaggtcataaaga

SEQ ID NO: 484026 - DNA, 120 bp, Artificial Sequence
  ENSG00000162104_73 (sequence is synthesized)
gctccctcttctggctccatggcttatggctgagcggttggactggtccccagccagctgtccctgctggctgatttctggagatgggtccccgtgtcctccccgagccctgtgccccag

SEQ ID NO: 484027 - DNA, 120 bp, Artificial Sequence
  ENSG00000162104_74 (sequence is synthesized)
tttccaggttcagagactgcaaaggagaaggtgagaagataggaaacaatctggaggaaggaaaggaaaagacatgagcgggggtagtgggcctgggacagcaggcgcctcttcagagta

SEQ ID NO: 484028 - DNA, 120 bp, Artificial Sequence
  ENSG00000162104_75 (sequence is synthesized)
ccggagccaaacagcatctccacgcacttgcctcaggcagtggtctcttggatgtgacgccaacagaagaaagaatagacaagcccaacttcctcagaagttaagctgttgcgctacaaa

SEQ ID NO: 484029 - DNA, 120 bp, Artificial Sequence
  ENSG00000162104_76 (sequence is synthesized)
gaacaccatcaagaaagagaaagaacccacagaacgggagggaacacttgcagatcaggcctcggacaaggtctaacatctagaatggataaagagcacacatagcctgataataaaaag

SEQ ID NO: 484030 - DNA, 120 bp, Artificial Sequence
  ENSG00000162104_77 (sequence is synthesized)
acagctcattttaaaggggacagaggctccgaatagaccacaggtgcgtcttgggaaagctgggccctcgggaccagcctggctccctgagggggctcgcagcggctctgtattcctgag

SEQ ID NO: 484031 - DNA, 120 bp, Artificial Sequence
  ENSG00000162104_78 (sequence is synthesized)
caggaaggtggccctgtgtggtccccgtcctgggcaccacaagccccttgggtggtcctgtcaccctcaacaggatggctgccggcctagcagagtcccactagcaacggtgccccggag

SEQ ID NO: 484032 - DNA, 120 bp, Artificial Sequence
  ENSG00000162104_79 (sequence is synthesized)
ctgggcttcaaacagacatggggaggcagccctgaccttgagcgtctgctgcccttatccaacatcccagggcagaaatgaatggctttgagtctggcgtgaggcgccggaatgctggct

SEQ ID NO: 484033 - DNA, 120 bp, Artificial Sequence
  ENSG00000162104_80 (sequence is synthesized)
tctcccatctggggtgggcaggctgggattcctgccccctccttcccacctgcactgtacccaggaccctttcagcttcctccgaggccgccatgggccatgctgtctgtggcgtgtgct

SEQ ID NO: 484034 - DNA, 120 bp, Artificial Sequence
  ENSG00000162104_81 (sequence is synthesized)
cagtgtttcccagaactccctgtgggctcatgccccatcacccccagcgagcagccctcttcctggcacagcctcccctcctgcctcagtgccctcctgtgcttctggggacccctccca

SEQ ID NO: 484035 - DNA, 120 bp, Artificial Sequence
  ENSG00000162104_82 (sequence is synthesized)
aaggagccgtcgcctgcaaaccctttcagggtccacttccccagaacccaaaccagacatcctcaggcccctggttggtttgtttttcctctttaaaaagatcagctttaggctgggcat

SEQ ID NO: 484036 - DNA, 120 bp, Artificial Sequence
  ENSG00000162104_83 (sequence is synthesized)
ccctgtggagagggagactccaagtttcccttcagttcacaggaagagagttgccgtgcaggagcctaattgtaaatttgaaaaaattaaaaactgcttatgctctgtcaattaccaaaa

SEQ ID NO: 484037 - DNA, 120 bp, Artificial Sequence
  ENSG00000162104_84 (sequence is synthesized)
actcagtaaatattgtgagccaggcactattctcggctctgtggttgcatcagtgaacaaaacagacgctaatcctgctttcgtgagccatctataatagaatgggcgagtcaagaaatt

SEQ ID NO: 484038 - DNA, 120 bp, Artificial Sequence
  ENSG00000162105_0 (sequence is synthesized)
ctctagaatacagacagttcctgctctaagaggccatctgtgaggctcagtctcccaacacctctgacacaggcagccatgccgcgcagcccaacatccagcgaggacgagatggcccag

SEQ ID NO: 484039 - DNA, 120 bp, Artificial Sequence
  ENSG00000162105_1 (sequence is synthesized)
agcttctccgactactccgtggggtcggagtcagacagctccaaagaagagaccatctatgacacgatccgggccactgcggagaagccgggcggtgccaggacggaggagagccagggc

SEQ ID NO: 484040 - DNA, 120 bp, Artificial Sequence
  ENSG00000162105_2 (sequence is synthesized)
aacacgctggtgatccgcgtggtcatccatgacctgcagcagacgaaatgcattcgatttaacccggatgccacagtgtgggttgcaaagcagcggatcctgtgtacattaacccagagt

SEQ ID NO: 484041 - DNA, 120 bp, Artificial Sequence
  ENSG00000162105_3 (sequence is synthesized)
ttgaaagatgtcctgaactacggcctgttccagccggccagcaatgggcgtgacggcaagttcctggatgaggagcggctcctgcgcgagtacccacagcccgtgggtgagggcgttcct

SEQ ID NO: 484042 - DNA, 120 bp, Artificial Sequence
  ENSG00000162105_4 (sequence is synthesized)
tccctggagtttcgatacaagaagcgggtgtataaacaagccagtctcgatgagaaacagttggccaagctccacacgaagaccaatctgaagaaatgcatggatcacattcagcatcgc

SEQ ID NO: 484043 - DNA, 120 bp, Artificial Sequence
  ENSG00000162105_5 (sequence is synthesized)
ttggtggagaagatcaccaagatgctggaccgaggcctggatcccaatttccacgacccggagaccggagagacccccctgaccttagccgctcagctggacgactctgtggaggtcatc

SEQ ID NO: 484044 - DNA, 120 bp, Artificial Sequence
  ENSG00000162105_6 (sequence is synthesized)
aaagctctcaaaaatggtggagctcacctggacttccgtgccaaagatgggatgaccgccctacacaaagctgcccgagcgaggaaccaagttgccctgaagacccttttagagcttggt

SEQ ID NO: 484045 - DNA, 120 bp, Artificial Sequence
  ENSG00000162105_7 (sequence is synthesized)
gcatccccagattataaagacagttacggcctcaccccgctgtatcacacagccatcgtcggaggtgatccctactgctgcgagcttctcctgcacgaacacgccactgtgtgctgcaaa

SEQ ID NO: 484046 - DNA, 120 bp, Artificial Sequence
  ENSG00000162105_8 (sequence is synthesized)
gatgagaacggctggcacgagatccaccaggcctgcaggtacgggcacgtgcagcacctggagcacctgctgttctacggggcagacatgagtgcccagaatgcctcggggaacacggcc

SEQ ID NO: 484047 - DNA, 120 bp, Artificial Sequence
  ENSG00000162105_9 (sequence is synthesized)
ttgcacatctgcgccctctacaaccaggacagctgtgcaagagtgcttctgtttcgaggcggaaataaggagttaaaaaactacaacagccagactccatttcaggtggccataatagca

SEQ ID NO: 484048 - DNA, 120 bp, Artificial Sequence
  ENSG00000162105_10 (sequence is synthesized)
ggcaactttgagctggcagaatacatcaagaaccacaaggaaacagacattgtgcccttccgagaggccccggcgtactccaaccgccggcggcggccccccaacacgctggccgccccc

SEQ ID NO: 484049 - DNA, 120 bp, Artificial Sequence
  ENSG00000162105_11 (sequence is synthesized)
cgggtcctgctgcgctccaacagtgacaacaacctcaatgccagcgctcccgactgggccgtctgctccacggccacctcgcaccgcagcctgtcaccccagctgctgcagcagatgccc

SEQ ID NO: 484050 - DNA, 120 bp, Artificial Sequence
  ENSG00000162105_12 (sequence is synthesized)
agcaagcccgagggggccgcgaagaccattgggagctacgtgcccgggccccgcagccggtccccatcgctcaacaggctgggcggcgcaggcgaggacggcaagaggccgcagcctctc

SEQ ID NO: 484051 - DNA, 120 bp, Artificial Sequence
  ENSG00000162105_13 (sequence is synthesized)
tggcatgtcgggtcgccttttgctcttggtgccaacaaggactcactctcggccttcgagtacccggggcccaagcggaagctctacagtgccgtgcccgggaggctcttcgtcgctgtc

SEQ ID NO: 484052 - DNA, 120 bp, Artificial Sequence
  ENSG00000162105_14 (sequence is synthesized)
aagccataccaaccccaagtggacggcgagatcccccttcaccgcggtgacagggtcaaagttctgagcatcggtgaagggggcttctgggaaggcagcgcccgcggccacatcggatgg

SEQ ID NO: 484053 - DNA, 120 bp, Artificial Sequence
  ENSG00000162105_15 (sequence is synthesized)
tttccggcggagtgcgtggaggaggtccagtgtaagcccagggacagccaggcagaaacccgcgctgaccgcagcaagaagcttttcaggcactacaccgtgggctcctatgacagcttc

SEQ ID NO: 484054 - DNA, 120 bp, Artificial Sequence
  ENSG00000162105_16 (sequence is synthesized)
gacacttccagtgactgcattattgaggagaagacggtggtcctgcagaaaaaagacaatgagggctttggattcgtgcttcgaggggccaaagctgacacacccattgaagaattcaca

SEQ ID NO: 484055 - DNA, 120 bp, Artificial Sequence
  ENSG00000162105_17 (sequence is synthesized)
ccaacaccggctttcccagccctacagtacctggagtccgtggatgaaggtggggtggcgtggcaagccggactaaggaccggggacttcttgattgaggttaacaatgagaatgttgtc

SEQ ID NO: 484056 - DNA, 120 bp, Artificial Sequence
  ENSG00000162105_18 (sequence is synthesized)
aaagtcggccacaggcaggtggtgaacatgatccggcagggagggaatcacctggtccttaaggtggtcacggtgaccaggaatctggaccccgacgacaccgccaggaagaaagctccc

SEQ ID NO: 484057 - DNA, 120 bp, Artificial Sequence
  ENSG00000162105_19 (sequence is synthesized)
ccgcctccaaagcgggcaccgaccacagccctcaccctgcgctccaagtccatgacctcggagctggaggagctcgtggataaagcctcggtccggaagaagaaggataaacccgaggag

SEQ ID NO: 484058 - DNA, 120 bp, Artificial Sequence
  ENSG00000162105_20 (sequence is synthesized)
atagtcccggcctccaagccctcccgcgctgctgagaacatggctgtggaaccgagggtggcgaccatcaagcagcggcccagcagccggtgcttcccggcgggctcagacatgaactct

SEQ ID NO: 484059 - DNA, 120 bp, Artificial Sequence
  ENSG00000162105_21 (sequence is synthesized)
gtgtacgaacgccaaggaatcgccgtgatgacgcccactgttcctgggagcccaaaagccccgtttctgggcatccctcgaggtacgatgcgaaggcagaaatcaatagacagcagaatc

SEQ ID NO: 484060 - DNA, 120 bp, Artificial Sequence
  ENSG00000162105_22 (sequence is synthesized)
tttctatcaggaataacagaggaagagcggcagtttctggctcctccaatgctgaagttcaccagaagcctgtccatgccggacacctctgaggacatcccccctccaccgcagtctgtg

SEQ ID NO: 484061 - DNA, 120 bp, Artificial Sequence
  ENSG00000162105_23 (sequence is synthesized)
cccccgtccccaccaccaccttccccaaccacttacaactgccccaagtccccaactccaagagtctacgggacgattaagcctgcgttcaatcagaattctgccgccaaggtgtccccc

SEQ ID NO: 484062 - DNA, 120 bp, Artificial Sequence
  ENSG00000162105_24 (sequence is synthesized)
gccaccaggtccgacaccgtggccaccatgatgagggagaaggggatgtacttcaggagagagctggaccgctactccttggactctgaagacctctacagtcggaatgccggcccgcaa

SEQ ID NO: 484063 - DNA, 120 bp, Artificial Sequence
  ENSG00000162105_25 (sequence is synthesized)
gccaacttccgcaacaagagaggccagatgccagaaaacccatactcagaggtggggaagatcgccagcaaagccgtctacgtccccgccaagcccgccaggcggaaggggatgctggtg

SEQ ID NO: 484064 - DNA, 120 bp, Artificial Sequence
  ENSG00000162105_26 (sequence is synthesized)
aagcagtccaacgtggaggacagccccgagaagacgtgctccatccctatcccgaccatcatcgtgaaggagccgtccaccagcagcagcggcaagagcagccagggcagcagcatggag

SEQ ID NO: 484065 - DNA, 120 bp, Artificial Sequence
  ENSG00000162105_27 (sequence is synthesized)
atcgacccccaggccccggagccaccgagccagctgcggcctgacgaaagcctgaccgtcagcagcccctttgccgccgccatcgccggagccgtccgcgaccgtgagaagcggctggaa

SEQ ID NO: 484066 - DNA, 120 bp, Artificial Sequence
  ENSG00000162105_28 (sequence is synthesized)
gccaggaggaactccccggccttcctctccacagacctgggggatgaggatgtgggcctggggccacccgcccccaggacgcggccctccatgttccccgaggagggggattttgctgac

SEQ ID NO: 484067 - DNA, 120 bp, Artificial Sequence
  ENSG00000162105_29 (sequence is synthesized)
gaggacagcgctgagcagctgtcatcccccatgccgagtgccacgcccagggagcccgaaaaccatttcgtgggtggcgccgaggccagtgctccgggtgaggctgggaggccgctgaat

SEQ ID NO: 484068 - DNA, 120 bp, Artificial Sequence
  ENSG00000162105_30 (sequence is synthesized)
tccacgtccaaagcccaggggcccgagagcagcccagcagtgccctccgcgagcagcggcacagccggccccgggaattatgtccacccactcacagggcggctgcttgatcccagctcc

SEQ ID NO: 484069 - DNA, 120 bp, Artificial Sequence
  ENSG00000162105_31 (sequence is synthesized)
ccgctggccctggcactctccgcaagggaccgagccatgaaggagtctcaacagggacccaaaggggaggcccccaaggccgacctcaacaaacctctttacattgataccaaaatgcgg

SEQ ID NO: 484070 - DNA, 120 bp, Artificial Sequence
  ENSG00000162105_32 (sequence is synthesized)
cccagcctggatgccggcttccctacggtcaccaggcagaacacccggggacccctgaggcggcaggagacggagaacaagtacgagaccgacctgggccgagaccggaaaggcgatgac

SEQ ID NO: 484071 - DNA, 120 bp, Artificial Sequence
  ENSG00000162105_33 (sequence is synthesized)
aagaagaacatgctgatcgacatcatggacacgtcccagcagaagtcggctggcctgctgatggtgcacaccgtggacgccactaagctggacaacgccctgcaggaagaggacgagaag

SEQ ID NO: 484072 - DNA, 120 bp, Artificial Sequence
  ENSG00000162105_34 (sequence is synthesized)
gcagaggtggagatgaagccagacagctcgccgtccgaggtgccagaaggtgtttccgaaaccgaaggtgctttacagatctccgctgcccccgagcccaccaccgtgcccggcagaacc

SEQ ID NO: 484073 - DNA, 120 bp, Artificial Sequence
  ENSG00000162105_35 (sequence is synthesized)
atcgtcgcggtgggctccatggaagaggcggtgattttgccattccgcatccctcctccccctctggcatccgtggacttggatgaggattttatttttacagagccattgcctcctccc

SEQ ID NO: 484074 - DNA, 120 bp, Artificial Sequence
  ENSG00000162105_36 (sequence is synthesized)
ctggaatttgcaaatagttttgatatccccgatgaccgggcagcttctgtcccggctctctcagacttagtgaagcagaagaaaagcgacacccctcagtccccttcgttgaactccagc

SEQ ID NO: 484075 - DNA, 120 bp, Artificial Sequence
  ENSG00000162105_37 (sequence is synthesized)
attcctgccaccccctgaaagctttgacgccgtcgccgactctgggatcgaggaggtggacagccggagtagcagcgaccaccacctcgagacgaccagcactatctccaccgtgtctag

SEQ ID NO: 484076 - DNA, 120 bp, Artificial Sequence
  ENSG00000162105_38 (sequence is synthesized)
catctccaccctgtcttccgaaggtggagagaatgtggacacctgcacagtctatgcagatgggcaagcatttatggttgacaaacccccagtacctcctaagccaaaaatgaagcccat

SEQ ID NO: 484077 - DNA, 120 bp, Artificial Sequence
  ENSG00000162105_39 (sequence is synthesized)
cattcacaaaagcaatgcactttatcaagacgcgctcgtggaagaagatgtagatagctttgttatccccccgcccgctcccccgcccccgccgggcagtgcccagcctgggatggccaa

SEQ ID NO: 484078 - DNA, 120 bp, Artificial Sequence
  ENSG00000162105_40 (sequence is synthesized)
ggttctccagccaaggacctccaagttgtggggcgacgtcacagagatcaaaagcccgattctctcaggcccaaaggcaaacgttattagtgaattgaactctatcctacagcaaatgaa

SEQ ID NO: 484079 - DNA, 120 bp, Artificial Sequence
  ENSG00000162105_41 (sequence is synthesized)
ccgagagaaattggcaaagccgggggaaggactggattcaccaatgggagccaagtccgccagcctcgctccaagaagcccggagatcatgagcaccatctcaggtacacggagcacgac

SEQ ID NO: 484080 - DNA, 120 bp, Artificial Sequence
  ENSG00000162105_42 (sequence is synthesized)
ggtcaccttcactgttcgccccggcacctcccagcccatcaccctgcagagccggccccccgactatgaaagcaggacctcaggaacaagacgtgccccaagccctgtggtctcgccaac

SEQ ID NO: 484081 - DNA, 120 bp, Artificial Sequence
  ENSG00000162105_43 (sequence is synthesized)
agagatgaacaaagagaccctgcccgcccccctgtctgctgccaccgcctctccttctcccgctctctcagatgtctttagccttccaagccagcccccttctggggatctatttggctt

SEQ ID NO: 484082 - DNA, 120 bp, Artificial Sequence
  ENSG00000162105_44 (sequence is synthesized)
gaacccagcgggacgcagtaggtcgccatccccctcgatactgcaacagccaatctcaaataagccttttacaactaaacctgtccacctgtggactaaaccagatgtggccgattggct

SEQ ID NO: 484083 - DNA, 120 bp, Artificial Sequence
  ENSG00000162105_45 (sequence is synthesized)
ggaaagtctaaacttgggtgaacataaagaggccttcatggacaatgagatcgatggcagtcacttaccaaacctgcagaaggaggacctcatcgatcttggggtaactcgagtcgggca

SEQ ID NO: 484084 - DNA, 120 bp, Artificial Sequence
  ENSG00000162105_46 (sequence is synthesized)
cagaatgaacatagaaagggctttgaaacagctgctggacagataaggacggctgctctccacctcgcagactgctcttgttataagtagagatgggctcgtgctgaaacatctgaatgc

SEQ ID NO: 484085 - DNA, 120 bp, Artificial Sequence
  ENSG00000162105_47 (sequence is synthesized)
caagcgaagtctgtgagcatcaaccccactccatgggtttgtctcctggtacccaaagaaatactgagttgtgtccacaacatggctgggtcttcagacccctggctcaccatgtgggtg

SEQ ID NO: 484086 - DNA, 120 bp, Artificial Sequence
  ENSG00000162105_48 (sequence is synthesized)
tcttgggcagtttctatcacacatgggacaaggggagggagtttttctaacatggaaaaagattctcagcctgccgcccagcatgcaggtggcctcgctttgccgggtccgagaggctcc

SEQ ID NO: 484087 - DNA, 120 bp, Artificial Sequence
  ENSG00000162105_49 (sequence is synthesized)
ccgtcaattttgcacgggatcctagctcttgtaggcagacaccagtgcactctagatacctcctgagacctccgtcctctgctttccgggcagctctcaccaccccaggccccggcatga

SEQ ID NO: 484088 - DNA, 120 bp, Artificial Sequence
  ENSG00000162105_50 (sequence is synthesized)
ggcctttcctcagtcctgtggcctctcagaggacacctgatgctcacctgcccctctttctcctgcacttggcttgcagtgagatgctcccagatgcatttgtccagtgccccatcatgg

SEQ ID NO: 484089 - DNA, 120 bp, Artificial Sequence
  ENSG00000162105_51 (sequence is synthesized)
gcctgaaaggcagagaaactttttcctacacagattcttttccccatctcctcctgtggtttgcatccatggctctttggccatgaggttcctggcagtgctgggagtttggatgggatc

SEQ ID NO: 484090 - DNA, 120 bp, Artificial Sequence
  ENSG00000162105_52 (sequence is synthesized)
gtgcccagctttgcttagctttctttatttctgcaaatctgttagcataattccaaggtggccaagcagatgtcacatggagttagtcaaagcacaaagtcacgattccacaatggaggg

SEQ ID NO: 484091 - DNA, 120 bp, Artificial Sequence
  ENSG00000162105_53 (sequence is synthesized)
gagacctggccaagggagccagccagcgtgcaactgcccaagctccaggtctccaggacaagagcagttgtctgccatgagcacccatccaggatggagaataagggcttctctgcctct

SEQ ID NO: 484092 - DNA, 120 bp, Artificial Sequence
  ENSG00000162105_54 (sequence is synthesized)
cagaattctttttaattgaagatgtcttgagctctgcaaagatcagagcaggtgagcatccactttgacatgaaggacaagaagacgcatggctcatggcgggcacatgcggctgccagt

SEQ ID NO: 484093 - DNA, 120 bp, Artificial Sequence
  ENSG00000162105_55 (sequence is synthesized)
gagacagcgtctcctctgggagctgggcgggcacagcatcctcagttctgtgcccagccaagggtgagcatctctgctgagacagtccttttgctctcggaggccagggaagatggtact

SEQ ID NO: 484094 - DNA, 120 bp, Artificial Sequence
  ENSG00000162105_56 (sequence is synthesized)
tagaggcttttcccctatcgctctgggtgtctaggaatcccaccagcttgtcttaacagtacaacagcttctttgaggacccagtgggtatggagtatagacagaacccagggttgagaa

SEQ ID NO: 484095 - DNA, 120 bp, Artificial Sequence
  ENSG00000162105_57 (sequence is synthesized)
cagaaggtgggcggcaggatcagagtgaaagcagaggcgtgaggagaggaaagcagggaggtctcctgggctgccaggtcagcctctctggcaaggctttcttgagccccgcccctttct

SEQ ID NO: 484096 - DNA, 120 bp, Artificial Sequence
  ENSG00000162105_58 (sequence is synthesized)
ttccccggagtccctccaccccataacaatacctcgaatttccaaaagaggtcaccagatgcacatgggccgcaaaacacacagtcaggcttccagcacattctcccccatttggaggat

SEQ ID NO: 484097 - DNA, 120 bp, Artificial Sequence
  ENSG00000162105_59 (sequence is synthesized)
ttctcccccatttggaggatactcgaatgtcaggtttttggttttattattatttcagaactagctcagcccatctctaattataaaacatggttttgttttttttttttcctttttttc

SEQ ID NO: 484098 - DNA, 120 bp, Artificial Sequence
  ENSG00000162105_60 (sequence is synthesized)
tctagaatgaacacataaaatttagcaatttaaaatctttctttactgcaagtttaaatagttgtacagatagtttataagcacaatattttaagaaaaaaaagtggctggtctactagg

SEQ ID NO: 484099 - DNA, 120 bp, Artificial Sequence
  ENSG00000162105_61 (sequence is synthesized)
cagcctttgtgccacttcagtgctagaaagttaaagaaaaaaaaacttttgtgatttaataatactatttctgtggaataattataaaagtatgacctttttaaatcaaccttatttgga

SEQ ID NO: 484100 - DNA, 120 bp, Artificial Sequence
  ENSG00000162105_62 (sequence is synthesized)
tgcatctgaaccagcagagctgtgttatattttctatctttgctagaacttcgtcattgaaggacaatttcttcaaagtggttacaattcataatgcagcagtttctccaaaaacaaaaa

SEQ ID NO: 484101 - DNA, 120 bp, Artificial Sequence
  ENSG00000162105_63 (sequence is synthesized)
caaaacacacaccacacacacgcgcttttccagtcacacacccctgatgttggaaccaagtttttggaccttctgttccaaaaccttttgcaggtcaatctttgtatttgaaatgatcca

SEQ ID NO: 484102 - DNA, 120 bp, Artificial Sequence
  ENSG00000162105_64 (sequence is synthesized)
atccaacttgaagtcaattgaatattaaggcgctttacttccgtgtgctttcagtttttccatcatgagatgaatgagcattactctagataaatttcaagacaggatactacaggtggc

SEQ ID NO: 484103 - DNA, 120 bp, Artificial Sequence
  ENSG00000162105_65 (sequence is synthesized)
ctgctgaggctgccccatattttagaaaatgtaaaaatggtggtttggccattaatttgtcttccatttgatgataccgcaaaattccgtgagtccattcctttggcatggcactttccc

SEQ ID NO: 484104 - DNA, 120 bp, Artificial Sequence
  ENSG00000162105_66 (sequence is synthesized)
tgggcctacagttggtattacctctgtgctcagtgccaggcaaaacactagctcaaaggagagtcaaggaaaccgctggcagacgataaccagtcgaaactcgtgacttcggtttgttga

SEQ ID NO: 484105 - DNA, 120 bp, Artificial Sequence
  ENSG00000162105_67 (sequence is synthesized)
actttggcagccagttggtgagggccagatgttattccctttcttaaagatactccaagccacatgccactaaccacaagcaagctggctgcaagactaaagagctgataacatagttta

SEQ ID NO: 484106 - DNA, 120 bp, Artificial Sequence
  ENSG00000162105_68 (sequence is synthesized)
tttttacactgtcttattatagagaagtaatagacctatcagaacctgcactgaccaacaaataaacacatgttgccaagatgaatcggtctctatctctatctgcttattttggtactg

SEQ ID NO: 484107 - DNA, 120 bp, Artificial Sequence
  ENSG00000162105_69 (sequence is synthesized)
aaagcaatagttcctcattcaaatcaccacccactgttctccccctttgggacatgttaggacgaggccctattccatgcccctctttaatggtggaacaaatgttaaactgctcatcta

SEQ ID NO: 484108 - DNA, 120 bp, Artificial Sequence
  ENSG00000162105_70 (sequence is synthesized)
aagatcatgttgatattattccaggttttaagatcaacttttgttacatactgtaatttaaataaactgcatttacatgcctagtttctgtaatattgtgtatacaaaacccaaatctct

SEQ ID NO: 484109 - DNA, 120 bp, Artificial Sequence
  ENSG00000162105_71 (sequence is synthesized)
caaaatgtaaattatgtatacctgccaagataccttttccagggtgtctgcgcacattttaagttaattcacataatataaaaattactcaatgtgactgttgatttgctgaactttaca

SEQ ID NO: 484110 - DNA, 120 bp, Artificial Sequence
  ENSG00000162105_72 (sequence is synthesized)
tatcacaaagtgaattatttgtgatactttagttaataaaatggtaaatttttttctcagttattgaacaagcaagcattatccagttgatctggcaatgactttttgtgtgtgggccac

SEQ ID NO: 484111 - DNA, 120 bp, Artificial Sequence
  ENSG00000162105_73 (sequence is synthesized)
aatattgattttcccattaacaatttttttttgttttttaaatactaatatgtttcacactatagtttgtgtaacaacacgtgttcgcattatctatgttgctgttacttttgtgctttt

SEQ ID NO: 484112 - DNA, 120 bp, Artificial Sequence
  ENSG00000162105_74 (sequence is synthesized)
attctttttagactttataaaaaaaaaaaaaagctcctgtaatttgcactttctcccaatccttaaatctcttgtatggcaaccaaaattactgtaaaaaaataaatatactattgcact

SEQ ID NO: 484113 - DNA, 86 bp, Artificial Sequence
  ENSG00000162105_75 (sequence is synthesized)
agaaagctgctcccagttccggttcatcgaccactcagctttccattttctgaatggacctccgtgagttgggaccacagacacac

SEQ ID NO: 484114 - DNA, 120 bp, Artificial Sequence
  ENSG00000162105_76 (sequence is synthesized)
ctccaggcaccctgctttggccctctagaatacagacagttcctgctctaagaggccatctgtgaggctcagtctcccaacacctctggatcacactctgttgcccaagctgagagcagt

SEQ ID NO: 484115 - DNA, 86 bp, Artificial Sequence
  ENSG00000162105_77 (sequence is synthesized)
ggtgcagtcacagctcactgcagccttgacttcctaagctggaaccacaggcatgtgccactacactcagctaatttttgattttt

SEQ ID NO: 484116 - DNA, 120 bp, Artificial Sequence
  ENSG00000162105_78 (sequence is synthesized)
ctccaagtgttgtctcaagtcattccatttgtcattttcatttgctcccatgaccggtgttaacagaagagggtcgtgctgaacagaaaagcccggagatcatgagcaccatctcaggta

SEQ ID NO: 484117 - DNA, 120 bp, Artificial Sequence
  ENSG00000162105_79 (sequence is synthesized)
ccatttcatacataggaaactgtgtcttagaagaaagttatctcacagaggagacaaatgttcagcccccttggcacagatagtgctgtttgctgtcagaggaaaaagccttcctgggca

SEQ ID NO: 484118 - DNA, 120 bp, Artificial Sequence
  ENSG00000162105_80 (sequence is synthesized)
ttaattaatttcccggggccattccttacccgcctgctgcagggctctgatgacgcctatggtttttgtgattgttttcttggccctgaagtggccaatctcatttttgtgttaatttct

SEQ ID NO: 484119 - DNA, 120 bp, Artificial Sequence
  ENSG00000162105_81 (sequence is synthesized)
attggtgagtaggcacgtggagaaactgtgttgggatttggtttggagatgctctgaggaatcagtcactcaccagctttttaaaattctcctaagattggtttagagcctgcttttagc

SEQ ID NO: 484120 - DNA, 120 bp, Artificial Sequence
  ENSG00000162105_82 (sequence is synthesized)
agccgggtttgagagcagcccgtctacgtgcagttggttcccagctgacagacagaatatggggtgggctttgtcaccagcacgctgggtctggcatgcccagctatgctcggaagtgca

SEQ ID NO: 484121 - DNA, 120 bp, Artificial Sequence
  ENSG00000162105_83 (sequence is synthesized)
ccgtgcccagacacccgccacctctccccgggtcccagctgctctagcaccgaggggccgggctgcacgcctgtccttcctcccatccaggaaggttatataatgagcggaccgctgcca

SEQ ID NO: 484122 - DNA, 120 bp, Artificial Sequence
  ENSG00000162105_84 (sequence is synthesized)
acacttccaggttgcagacacatttgggggtccctgcaaccctcggagacagctggagtctggacctgtagggcctggttgtggaaacagccccgctgcctcctgcccggtggctctgga

SEQ ID NO: 484123 - DNA, 120 bp, Artificial Sequence
  ENSG00000162105_85 (sequence is synthesized)
ggccccttccgcacatccagggcgggtcggctgctccagttctgccttcccacccagtgctgggatgtgcaacgccccccaccgaatgctcagatgtgcagccccctcctctgctggcct

SEQ ID NO: 484124 - DNA, 120 bp, Artificial Sequence
  ENSG00000162105_86 (sequence is synthesized)
ggaccttggacctcacacgtgcacatgttctgacatcagtgcctcatccgatgtccaaccccggccagaggaaccaccgtcgcttcagccccactctgaccttggaagccccaccctgca

SEQ ID NO: 484125 - DNA, 120 bp, Artificial Sequence
  ENSG00000162105_87 (sequence is synthesized)
gaactctgtcatccaccgttccccacagaccactcacagccgctttaagagaacagccagggcttctaggcaggagcacgacagtgttcacgctgatggccagggagcctcctcagccag

SEQ ID NO: 484126 - DNA, 120 bp, Artificial Sequence
  ENSG00000162105_88 (sequence is synthesized)
cagcagccgactcgtgcttgtgcattgttcagatggaagcatgatcattggatggaagttcctggcacaggtgcaagttgaccctgagtcattccagaaggattcgggcctcaccggaaa

SEQ ID NO: 484127 - DNA, 120 bp, Artificial Sequence
  ENSG00000162105_89 (sequence is synthesized)
gaacgccaggaaaagccatagggcaacagctcttctgccatttcagtcctcatgggtgaaactggggtaaagcgtgagtggctggggccctgctgacacctgcacttgtgcgtcaccgcc

SEQ ID NO: 484128 - DNA, 120 bp, Artificial Sequence
  ENSG00000162105_90 (sequence is synthesized)
aagctgtgtccctagactgccctgggtgagtaggcagccaacgtctgcagccccgtgtggtcagctgctcctgccctcccgcctcatcacggcccttcagacatcagggccggctgccta

SEQ ID NO: 484129 - DNA, 120 bp, Artificial Sequence
  ENSG00000162105_91 (sequence is synthesized)
ccttccaaccccactctgtctggaatgttcttttctcttctgtcccctccccagtcctccaacccattctcctatgtatacttcagtcctcctcctccaggaagtcttccaggtgcccgt

SEQ ID NO: 484130 - DNA, 120 bp, Artificial Sequence
  ENSG00000162105_92 (sequence is synthesized)
atggttctcacagaaccacgtcctgcactgttgaaggcacacatttctgtgactgtggattgatgtttatcttcctcacttgcccggcctttgctctaacgatcaccacagactaggggg

SEQ ID NO: 484131 - DNA, 120 bp, Artificial Sequence
  ENSG00000162105_93 (sequence is synthesized)
ctcaaaacaagagaagtcacttacctgtcacagccctggaggccagaggtccaaaaccaagatgacagcagggccacgctccctccgggggctccaggggagagtcttcctcctccacct

SEQ ID NO: 484132 - DNA, 120 bp, Artificial Sequence
  ENSG00000162105_94 (sequence is synthesized)
ctgctgttggcctgcagtccttggtgctcctcagctgggccacatcactccagcctccacatcactccagcctctgcctccaccttcccatggcctcctctgcactgcctctgggtgtca

SEQ ID NO: 484133 - DNA, 120 bp, Artificial Sequence
  ENSG00000162105_95 (sequence is synthesized)
acctccctctgcttttctcgcgtaagggcacagtcattggtttaggaccctccctaaatccaggaagatctcaactcaagacccttaactaattatacctgcaaagacccaaattccaag

SEQ ID NO: 484134 - DNA, 120 bp, Artificial Sequence
  ENSG00000162105_96 (sequence is synthesized)
tgtcgtcactttcacagacgctgggggttaggaattggacacatttttttgggtgggttgagtcaccattcaactgaccacaccagacaactctataaggaccagactgggcctggtttg

SEQ ID NO: 484135 - DNA, 120 bp, Artificial Sequence
  ENSG00000162105_97 (sequence is synthesized)
ttccttcctaaatgcccagcacccagttcatcccctgactctcagtgggtattcaggatgtaacagctggattgatttattgatttacacggcggcttgacactggccccagttacttct

SEQ ID NO: 484136 - DNA, 120 bp, Artificial Sequence
  ENSG00000162105_98 (sequence is synthesized)
gaactttgaaacccagtcccagctggtcacggaagaactaaagctgtcaccagacggggccaccaacccagctgggatcctgagagctatgagtaaagccatctggtctaccccaataac

SEQ ID NO: 484137 - DNA, 120 bp, Artificial Sequence
  ENSG00000162105_99 (sequence is synthesized)
ccacagaaagcagctaccagagaccataggtgggtgtcagttcccacacttctgctgctcaggcccccccggacacacgaagccagggccgccctgccatctgcgtcccccagagtgctg

SEQ ID NO: 484138 - DNA, 120 bp, Artificial Sequence
  ENSG00000162105_100 (sequence is synthesized)
tcctttcctccatgctgcctggatctggcgagctggggtgattaattggctatgatgatgaacgtccccggcggaggagcggccgcggtgatgatgacgggctacaataatggtcgctgt

SEQ ID NO: 484139 - DNA, 120 bp, Artificial Sequence
  ENSG00000162105_101 (sequence is synthesized)
caaacaaacagtgaacactgtctgaattaaacaaaaagctgcccgacttgcaatctaatgtagattatctcaggcattgtggccagctctgcctctctaaaactgaccagaaaaatctct

SEQ ID NO: 484140 - DNA, 120 bp, Artificial Sequence
  ENSG00000162105_102 (sequence is synthesized)
ctcatcgagtaaacaggctcctgtcactgagctaatctgccttggttccatttccttattctcaatttatcaatggatacgtgcatgttatttcagaattatgcaaaacgtcaaaatctg

SEQ ID NO: 484141 - DNA, 120 bp, Artificial Sequence
  ENSG00000162105_103 (sequence is synthesized)
cttctgtgaccgctgctataggcgtggagctgaggctcggcttttccttttgttctgggtggaagcagcggtgccgcggagggccagccagatccggacccttcccttagggtccagtct

SEQ ID NO: 484142 - DNA, 120 bp, Artificial Sequence
  ENSG00000162105_104 (sequence is synthesized)
ccccacaccccagcagggtgtcttctagccataaggccaagggagtggcagaactgggccgcctctctggttgacaagcaaaccacatgctaaggcttggagcaagagagaatttgtgtc

SEQ ID NO: 484143 - DNA, 120 bp, Artificial Sequence
  ENSG00000162105_105 (sequence is synthesized)
tattggcaaagaactaagccaggaagacatgggccatccctccgctttagggaagcatattttaaacctaaacgttgaacttcttctttggcctcaccagtgaaaacttgttgtctttag

SEQ ID NO: 484144 - DNA, 120 bp, Artificial Sequence
  ENSG00000162105_106 (sequence is synthesized)
ttcctaaagtttcttctactttggcacattccccagttgagcagcagcctctatgcttccacgttcaggaaaaattccagtcctcatatcttttgtagttcaccctcaagctctcccgct

SEQ ID NO: 484145 - DNA, 120 bp, Artificial Sequence
  ENSG00000162105_107 (sequence is synthesized)
tcaccatccaatagtttctcccaaaccttggcacccccctagactttgcttccaatggtttcttccagaccacttttcctagatgaatatattcgtttaccttactaggaaaattattgg

SEQ ID NO: 484146 - DNA, 120 bp, Artificial Sequence
  ENSG00000162105_108 (sequence is synthesized)
aagattttttcttttacttgaaattggaggcattttaataactggcgaactggaatgtgtttctgtatttgtagacaaccatgaacccatgcaagtaggtgaacattccacagtggctgg

SEQ ID NO: 484147 - DNA, 120 bp, Artificial Sequence
  ENSG00000162105_109 (sequence is synthesized)
gtgaccacagcagctgcatgcagacaggactgcccgtgctttgtggggaatcagagaatttccaaacttgtttctcagacttccgcagatctcatcactttgatttctaatccatgctgt

SEQ ID NO: 484148 - DNA, 120 bp, Artificial Sequence
  ENSG00000162105_110 (sequence is synthesized)
attggtgattttgtttatcgttcctgtaacttgttctacattccacagtctttaccgttttatgttcaaaattacaacaatccctgtccattgattccactctggaactctttgttcatg

SEQ ID NO: 484149 - DNA, 88 bp, Artificial Sequence
  ENSG00000162105_111 (sequence is synthesized)
tgtgtgccttgggtgttttgaacctgatctgcataaaaccatattgtattcaaatgctgtatctttcatgaaaggataaatatatctt

SEQ ID NO: 484150 - DNA, 120 bp, Artificial Sequence
  ENSG00000162105_112 (sequence is synthesized)
ttcaaatgctgtatctttcatgaaaggataaatatatcttcaatgtattaatgtagctgataaaatagttatagtgccttgttttctgaactgagaagcccatatcaatgcacaacgtaa

SEQ ID NO: 484151 - DNA, 120 bp, Artificial Sequence
  ENSG00000162105_113 (sequence is synthesized)
agaaaggacggttcgagctatgaaatgttgaggacacctacacgtgattctggagcctttctcatcataagactgtggaaaatacacagtcgtttaagttaaaaataaaaagtaaattga

SEQ ID NO: 484152 - DNA, 80 bp, Artificial Sequence
  ENSG00000162105_114 (sequence is synthesized)
cttccccaccccctgcacctgagccgcggcggcggctcctgagctccggcggggctgggcgcggcgccgctcgggttccc

SEQ ID NO: 484153 - DNA, 120 bp, Artificial Sequence
  ENSG00000162105_115 (sequence is synthesized)
gggctcggacccgcccccgactcgccgagccaggatatttttgttggtataaaattatggattgagaatacttttctttcatcacttgaaaattactgtgccactttcttttggtctcca

SEQ ID NO: 484154 - DNA, 120 bp, Artificial Sequence
  ENSG00000162105_116 (sequence is synthesized)
accatgcctggctagtttttgtatttttggtggagatgggttttgctatgttggccagactggtctcgaactcttgaccttaagtgatctgcctgcctctacctccgaaattgttgggat

SEQ ID NO: 484155 - DNA, 120 bp, Artificial Sequence
  ENSG00000162105_117 (sequence is synthesized)
ctgcctctacctccgaaattgttgggattacaggcatgagccttcatgtctgacccagtctattaagttttatcatgaatctatgttgtcatatccgatgtgtcttgataaaatatttat

SEQ ID NO: 484156 - DNA, 120 bp, Artificial Sequence
  ENSG00000162105_118 (sequence is synthesized)
ccaaaatccgatcctgcaactgtcaaagatgattatgtagatttcccctgcttatctgctaatgcgatgaattatatttgtcaattttcttatttctaaaataaactcacctagccatga

SEQ ID NO: 484157 - DNA, 120 bp, Artificial Sequence
  ENSG00000162105_119 (sequence is synthesized)
gtggccataatagcaggcaactttgagctggcagaatacatcaagaaccacaaggaaacagacattgtaccccttgtgccaaccaggaggagagtctttggggctcctcctctctcccat

SEQ ID NO: 484158 - DNA, 120 bp, Artificial Sequence
  ENSG00000162105_120 (sequence is synthesized)
cgccctgccatcggctgggcccagtcttgcaacttggacgagcccactggcctgtttcctccagccccgcgcttccacaggacctgcagcggggagcagtcccattggaccggcagtgtg

SEQ ID NO: 484159 - DNA, 120 bp, Artificial Sequence
  ENSG00000162105_121 (sequence is synthesized)
acatctgagtggcatgaaactcatcccccctgaaggacacaaaatctagggtggcttctgtcatcttgaagcccagttatctgtgataattccagcagggtaaagcgggagggtgggcgg

SEQ ID NO: 484160 - DNA, 120 bp, Artificial Sequence
  ENSG00000162105_122 (sequence is synthesized)
ggtggtgcgagccaacccccctcccccaccctgccctgctcagggtgggaagggtaagtgggttccctgcattccccagccaccaccaggcctggagtatgagctcagcagatgtacttc

SEQ ID NO: 484161 - DNA, 120 bp, Artificial Sequence
  ENSG00000162105_123 (sequence is synthesized)
caagggtggttgggtcaggtctcgaaatgaaataatgtactgtgtgttgcagaaaactgccttcctttcttcttaatgtcacaattattcctattgaccctgttgcaggcaaaggtacac

SEQ ID NO: 484162 - DNA, 120 bp, Artificial Sequence
  ENSG00000162105_124 (sequence is synthesized)
ttgaccttgagacaaggtcacacttgaccctttgagacagtccctttgtgagataattcagcattgcctttactgtgtcaattctggtagaagctaaggcccttgccctgtgagagttgt

SEQ ID NO: 484163 - DNA, 120 bp, Artificial Sequence
  ENSG00000162105_125 (sequence is synthesized)
ggaggcaaccctgggactctggtctgcccagcccaccccaggggcactgtcctgtgtgttctggaaatgcctctgggctgctgtgcaaaagcgcagcgtgcttgtgagtctcaggtggat

SEQ ID NO: 484164 - DNA, 120 bp, Artificial Sequence
  ENSG00000162105_126 (sequence is synthesized)
aactgtaggcagtcactaggcagtaagtggccgtggaggtggtgtctgctgtgcttaaagctccccctgcaccagcaaactcagggaaagctgcgtatttgtcttgcggttactggttaa

SEQ ID NO: 484165 - DNA, 120 bp, Artificial Sequence
  ENSG00000162105_127 (sequence is synthesized)
taacaactgatttcctcctgtcagacagcagaatctttctatcaggttagtgaaccttacggtttggaatctgtaatctgaatgtaacccagtttactttataaggtgtattcttaaatt

SEQ ID NO: 484166 - DNA, 120 bp, Artificial Sequence
  ENSG00000162105_128 (sequence is synthesized)
agtactccttgggaacagaattgccagacagccaactcagagtgactggtcaatggagaacactttgaacgagccatctttgcaatgccaaaatgtcctcccacaaggagtatgttaaat

SEQ ID NO: 484167 - DNA, 120 bp, Artificial Sequence
  ENSG00000162105_129 (sequence is synthesized)
ttggaatacccttatcgaatggaagttttcattggaataaattattgtagtttgtcctaggactttttttcatttcaagtaatttattttgctacctctttgaaaacctgcatgctccca

SEQ ID NO: 484168 - DNA, 120 bp, Artificial Sequence
  ENSG00000162105_130 (sequence is synthesized)
gaaatcaataggtaagaagtgtggcactcccccacagaagttgcccctgggctttcaaacacagccttaggcccctcaggaattctgagccctgggcctctcacagttgccttggcgtcc

SEQ ID NO: 484169 - DNA, 120 bp, Artificial Sequence
  ENSG00000162105_131 (sequence is synthesized)
agtctggggcttacaacttgtgtcaaagaagcgaattttcagctgatttggatgttcagtccccagaagtcaaatttgtgaacttcctcatggatgaaacattcccggagccatctttct

SEQ ID NO: 484170 - DNA, 120 bp, Artificial Sequence
  ENSG00000162105_132 (sequence is synthesized)
tcttcatctgattttttttttcttttcttcttcaattctgcccccagagggctgcaactttttttttttcctgttgaattaacaggcagtagtagatgaggccgccccacggactcagtc

SEQ ID NO: 484171 - DNA, 120 bp, Artificial Sequence
  ENSG00000162105_133 (sequence is synthesized)
tccgtggagaccccgaggagcagtggtccgagtgagatggtcacacccaggttagaaaggatggccgagaattcacggttcaagaagaaagttcattttggagaaacccgcgctgaccgc

SEQ ID NO: 484172 - DNA, 120 bp, Artificial Sequence
  ENSG00000162105_134 (sequence is synthesized)
ttaaacccccttcaaggaaaagcaaaacaaaactgctgcctcatttctcctctggctgattttcccgggcttccctggaagatgcgtgtggtcgggacaagccggaggagctcattcccg

SEQ ID NO: 484173 - DNA, 120 bp, Artificial Sequence
  ENSG00000162105_135 (sequence is synthesized)
acgccgccgctgctgaggccgccgctgccgccgccgccgttcgggccacttactttctttgccctgggcggcgtcctggccagccccccttgagcctccagctcagccatccctcaggca

SEQ ID NO: 484174 - DNA, 120 bp, Artificial Sequence
  ENSG00000162105_136 (sequence is synthesized)
gccgccccaccatgtatgactccttcctccggctggctccggctctgcctgcccccaccctgcaagtctcattgtgccacgctcgcctatcccggtagccacccccctcttccttcgctc

SEQ ID NO: 484175 - DNA, 120 bp, Artificial Sequence
  ENSG00000162105_137 (sequence is synthesized)
gcaggtttgagttcgtctgatgtgtggaaagagccctgcatctttgacaatgtgactggcacaggcacgtggttggatttttctgcagaaaccacacctgtgtgtcaccagctgtgggga

SEQ ID NO: 484176 - DNA, 120 bp, Artificial Sequence
  ENSG00000162105_138 (sequence is synthesized)
tgggaagtgctgctctaactggtcagccattgagctccaaagacagccccagtgcaagtcgatgaactggcccccagcagacgggcaggggcttcagtcttgccctccagggagtctccc

SEQ ID NO: 484177 - DNA, 120 bp, Artificial Sequence
  ENSG00000162105_139 (sequence is synthesized)
cacacggcagcatctctactgtttgcagctctccccctcttgcccatgaccctttcactgagacactgcagcccaccaccattcacggtcacgatgtcacaccagtgcactcctcatgct

SEQ ID NO: 484178 - DNA, 120 bp, Artificial Sequence
  ENSG00000162105_140 (sequence is synthesized)
ctccagagcccctccacccagggtaacccaccacataggagggagaggagcccacttcatgtgggaagatgtggagacaggagaaaagtgcacccaagctggcatctgacagagccaggg

SEQ ID NO: 484179 - DNA, 120 bp, Artificial Sequence
  ENSG00000162105_141 (sequence is synthesized)
ctccagcagacatctctcaagtccaggtcttgaagagagagccgtggtaggatggatcttttcagaagcggtgggtgggccgttcatatccacgtgaatgggcccaaaaggcaagagacc

SEQ ID NO: 484180 - DNA, 120 bp, Artificial Sequence
  ENSG00000162105_142 (sequence is synthesized)
cacacctctcctcccctccccagtggctgtggctttcctagggacaataggatgaatgggctttcagtgtggggacagcaaaacatgcactagggcccagagtggcagttctcttggtgt

SEQ ID NO: 484181 - DNA, 120 bp, Artificial Sequence
  ENSG00000162105_143 (sequence is synthesized)
ggagagtgcctgccacaggccttggccagagcccgtgagggagtggtgtgtgaaaggccacctccacgtgggtaagcgtgaggacttggacttctctggcactgagatgggacctcctgc

SEQ ID NO: 484182 - DNA, 120 bp, Artificial Sequence
  ENSG00000162105_144 (sequence is synthesized)
ctgtgggagtcatctggccaccaccctggggccagtaaaggttggagctagaagggtcgtcctccctgacttgagctctgagggctttgcctgcccagccagagcggcaaggcacagggg

SEQ ID NO: 484183 - DNA, 120 bp, Artificial Sequence
  ENSG00000162105_145 (sequence is synthesized)
accctcggggacgcccatggccaccctggggaagacagggctcctcacgcgttctgcttttcagtaaggcccgtgtgtcctaccagtgagcctctcacatgaaaggggctaaaaataaca

SEQ ID NO: 484184 - DNA, 120 bp, Artificial Sequence
  ENSG00000162105_146 (sequence is synthesized)
cagggtaccccagctccttctgcaacaaaactgtccactgggtgggcgctggacagtgctgcctcaggaaggtgagcgcagcccacactggccacacaagccacgccctgctgtctgggt

SEQ ID NO: 484185 - DNA, 120 bp, Artificial Sequence
  ENSG00000162105_147 (sequence is synthesized)
ttccgggtgatctcaacccctgagtgccctgcgtagctacaggggttccagttactgaaaggggccacctgggaaggatcctgccctgctcttgtccatttacccaaaaagcctaaggct

SEQ ID NO: 484186 - DNA, 120 bp, Artificial Sequence
  ENSG00000162105_148 (sequence is synthesized)
gccaggcggctgaggggcctgtcctccaggtgtgctccttcccacctgctgaagctgaggcgctggagatgttgcctggcacgttctacccaggtgacaggaccccactctgtccctgtc

SEQ ID NO: 484187 - DNA, 120 bp, Artificial Sequence
  ENSG00000162105_149 (sequence is synthesized)
tccgtgccctcttcaagggaccccttccaaatgcctcagtggccaccctcccgagggtcccccggccctgccccccagcacaggcaggtcccccagcccctctgtcccagttcaggtgag

SEQ ID NO: 484188 - DNA, 120 bp, Artificial Sequence
  ENSG00000162105_150 (sequence is synthesized)
tgggctgacgtggtgtgctccccccagcacaggcaggtcccccagcccctctgtcccagttcaggtgagtgggctgacgtggtgtgctctggtgtctccaactttgctctggcccctttc

SEQ ID NO: 484189 - DNA, 120 bp, Artificial Sequence
  ENSG00000162105_151 (sequence is synthesized)
tccccctcccccaccctggcatggcaaatcattcgttcactgccagtggatctgccactagacactctggcatggtttgggcgtctccctcgccttcctgggtgatctgcagccagctgc

SEQ ID NO: 484190 - DNA, 120 bp, Artificial Sequence
  ENSG00000162105_152 (sequence is synthesized)
attctataaactgcagggcccaagctgcaggtttcaccttcctgagggtcgccacccgggaggcagaggcaccaggatggacgtgggaactacctccgctcttcctttctcacagtgccc

SEQ ID NO: 484191 - DNA, 120 bp, Artificial Sequence
  ENSG00000162105_153 (sequence is synthesized)
cagccctacagtacctggagtccgtggatgaaggtggggtggcgtggcaagccggactaaggaccggggacttcttgattgaggctgtggatcaccggaagtcactcagcctctaaggtg

SEQ ID NO: 484192 - DNA, 120 bp, Artificial Sequence
  ENSG00000162105_154 (sequence is synthesized)
aatacccacaagtacacccacatcctccagccccttggcactccctctcatggagccagctgggctgcagtgatcctggagggtgaccctgtctgaagctgcagcccacacacaccactg

SEQ ID NO: 484193 - DNA, 120 bp, Artificial Sequence
  ENSG00000162105_155 (sequence is synthesized)
aggatcaatgtcacccatatcttgtcaattgtgactgcaaacttcagaaggactcagagtggaaagtcttggcaaccatgttgcggttcagacagtgggagccatgcttctgcgaatgag

SEQ ID NO: 484194 - DNA, 120 bp, Artificial Sequence
  ENSG00000162105_156 (sequence is synthesized)
cctggggactggggactgtggtcccagccctggatttgatgaggggagtatccctgtcctgcgagggtgcagtgtcacttttccactcccatttggggtcaactcttaacagcatccctg

SEQ ID NO: 484195 - DNA, 120 bp, Artificial Sequence
  ENSG00000162105_157 (sequence is synthesized)
actcatgcctcccggcgtctcccagctgccagctcgaggacgcctgatccgcgttaaccctccgcggtgcctcttcctcaatgccctgagcacaaaagcagagtagcccggctcacatga

SEQ ID NO: 484196 - DNA, 120 bp, Artificial Sequence
  ENSG00000162129_0 (sequence is synthesized)
gttggacgtggtcagcacaggggccggcaccacggggttatcgaagcagctgtcaagatgctggggtccctggtgttgaggagaaaagcactggcgccacggctactcctccggctgctc

SEQ ID NO: 484197 - DNA, 120 bp, Artificial Sequence
  ENSG00000162129_1 (sequence is synthesized)
aggtccccaacgctccggggccatggaggtgcttccggccggaatgtgactactgggagtctcggggagccgcagtggctgagggtagccaccggggggcgccctggaacatcgccggcc

SEQ ID NO: 484198 - DNA, 120 bp, Artificial Sequence
  ENSG00000162129_2 (sequence is synthesized)
ttgttctccggacgtggggcagccaccggggggcgccagggaggacgcttcgataccaaatgcctcgcggctgccacttggggacgccttcctggtcccgaagaaacactcccaggacag

SEQ ID NO: 484199 - DNA, 120 bp, Artificial Sequence
  ENSG00000162129_3 (sequence is synthesized)
gacagctggaacggggtccccagcagggccggactgggcatgtgcgccctggccgcagcgctggtggttcattgctacagcaagagtccgtccaacaaggatgcagccctgttggaagct

SEQ ID NO: 484200 - DNA, 120 bp, Artificial Sequence
  ENSG00000162129_4 (sequence is synthesized)
gcccgtgccaacaatatgcaagaagtcagcaggctgttgtcagaaggtgcagatgtcaatgcaaagcacagacttggctggacagcactcatggtggcagccatcaaccgaaacaacagt

SEQ ID NO: 484201 - DNA, 120 bp, Artificial Sequence
  ENSG00000162129_5 (sequence is synthesized)
gtggtacaggtcctgcttgctgctggggctgatccaaaccttggagatgatttcagcagtgtttacaagactgccaaggaacagggaatccattctttggaagatgggggacaggacggt

SEQ ID NO: 484202 - DNA, 120 bp, Artificial Sequence
  ENSG00000162129_6 (sequence is synthesized)
gcaagccggcacatcacaaaccagtggacaagtgccctggagttcaggagatggctaggactccccgctggcgtcctgatcacccgagaggatgacttcaacaacaggctgaacaaccgc

SEQ ID NO: 484203 - DNA, 120 bp, Artificial Sequence
  ENSG00000162129_7 (sequence is synthesized)
gccagtttcaagggctgcacggccttgcactatgctgttcttgctgatgactaccgcactgtcaaggagctgcttgatggaggagccaaccccctgcagaggaatgaaatgggacacaca

SEQ ID NO: 484204 - DNA, 120 bp, Artificial Sequence
  ENSG00000162129_8 (sequence is synthesized)
cccttggattatgcccgagaaggggaagtgatgaagcttctgaggacttctgaagccaagtaccaagagaagcagcggaagcgtgaggctgaggagcggcgccgcttccccctggagcag

SEQ ID NO: 484205 - DNA, 120 bp, Artificial Sequence
  ENSG00000162129_9 (sequence is synthesized)
cgactaaaggagcacatcattggccaggagagcgccatcgccacagtgggtgctgcgatccggaggaaggagaatggctggtacgatgaagaacaccctctggtcttcctcttcttggga

SEQ ID NO: 484206 - DNA, 120 bp, Artificial Sequence
  ENSG00000162129_10 (sequence is synthesized)
tcatctggaataggaaaaacagagctggccaagcagacagccaaatatatgcacaaagatgctaaaaagggcttcatcaggctggacatgtccgagttccaggagcgacacgaggtggcc

SEQ ID NO: 484207 - DNA, 120 bp, Artificial Sequence
  ENSG00000162129_11 (sequence is synthesized)
aagtttattgggtctccaccaggctacgttggccatgaggagggtggccagctgaccaagaagttgaagcagtgccccaatgctgtggtgctctttgatgaagtagacaaggcccatcca

SEQ ID NO: 484208 - DNA, 120 bp, Artificial Sequence
  ENSG00000162129_12 (sequence is synthesized)
gatgtgctcaccatcatgctgcagctgtttgatgagggccggctgacagatggaaaagggaagaccattgattgcaaggacgccatcttcatcatgacctccaatgtggccagcgacgag

SEQ ID NO: 484209 - DNA, 120 bp, Artificial Sequence
  ENSG00000162129_13 (sequence is synthesized)
atcgcacagcacgcgctgcagctgaggcaggaagctttggagatgagccgtaaccgtattgccgaaaacctgggggatgtccagataagtgacaagatcaccatctcaaagaacttcaag

SEQ ID NO: 484210 - DNA, 120 bp, Artificial Sequence
  ENSG00000162129_14 (sequence is synthesized)
gagaatgtgattcgccctatcctgaaagctcacttccggagggatgagtttctgggacggatcaatgagatcgtctacttcctccccttctgccactcggagctcatccaactcgtcaac

SEQ ID NO: 484211 - DNA, 120 bp, Artificial Sequence
  ENSG00000162129_15 (sequence is synthesized)
aaggaactaaacttctgggccaagagagccaagcaaaggcacaacatcacgctgctctgggaccgcgaggtggcagatgtgctggtcgacggctacaatgtgcactatggcgcccgctcc

SEQ ID NO: 484212 - DNA, 120 bp, Artificial Sequence
  ENSG00000162129_16 (sequence is synthesized)
atcaaacatgaggtagaacgccgtgtggtgaaccagctggcagcagcctatgagcaggacctgctgccagggggctgtactttgcgcatcacggtggaggactcagacaagcagctactc

SEQ ID NO: 484213 - DNA, 120 bp, Artificial Sequence
  ENSG00000162129_17 (sequence is synthesized)
aaaagcccagaactgccctcaccccaggctgagaagcgcctccccaagctgcgtctggagatcatcgacaaggacagcaagactcgcagactggacatccgggcaccactgcaccctgag

SEQ ID NO: 484214 - DNA, 120 bp, Artificial Sequence
  ENSG00000162129_18 (sequence is synthesized)
aaggtgtgcaacaccatctagcagccacctgcctgctcctatgtgccctcaccatccaataaaggccccttggctgtggcatggcaactgacttaccttcccctcatgccgctcccatct

SEQ ID NO: 484215 - DNA, 120 bp, Artificial Sequence
  ENSG00000162129_19 (sequence is synthesized)
ctacccagtctcaggcctgcttacctcctcacagcccatgaagaccccttctcagccccaaaacctgaaggaggaatttcgccctactctggcccctttgttgtgggcccataacctgct

SEQ ID NO: 484216 - DNA, 120 bp, Artificial Sequence
  ENSG00000162129_20 (sequence is synthesized)
aacaagccttcaggagaggagctgcctttccacccccttcaaggcaaggagggatggaggtcccttatttccttcagaatgatccccatcccccatagtcgccagactttctcatgttcc

SEQ ID NO: 484217 - DNA, 120 bp, Artificial Sequence
  ENSG00000162129_21 (sequence is synthesized)
caggaagctcagaagtatggcagctaagaacacagctggctggaagaagacagggaccagactgaactgccaccctctgctagtcctcatgcaactcagtccccagaatggctccactgg

SEQ ID NO: 484218 - DNA, 120 bp, Artificial Sequence
  ENSG00000162129_22 (sequence is synthesized)
gagtggaggaagagctcagaggcccaggtgcagatagttctgcaatttagtctgtagcctcctcgttccctaccctaaaattctaaggggaagggacccatagaggcttgcctgtttccg

SEQ ID NO: 484219 - DNA, 120 bp, Artificial Sequence
  ENSG00000162129_23 (sequence is synthesized)
ctactatattatgcccagtgttcctcctcaccccacgtcctggggtcaggccagaccatgtttcgtcagccttggggactaggccagtgttgggcacctccaggaggaggcctgactggt

SEQ ID NO: 484220 - DNA, 120 bp, Artificial Sequence
  ENSG00000162129_24 (sequence is synthesized)
tcattaccctcccctactcagactgagcagcagtcccagataaccaagcaagctcagctctgtgggggcctccttcaaaagaccaacatcgcagacattaggaagctgtaggaagagaga

SEQ ID NO: 484221 - DNA, 120 bp, Artificial Sequence
  ENSG00000162129_25 (sequence is synthesized)
tcatgggtttgacctctgcccacatggccatggagtcagcctcagccctgtctgtactgctcgtccagctaaacgagcctggaataaacatgcagtttattcagtctgcatgttagtcac

SEQ ID NO: 484222 - DNA, 120 bp, Artificial Sequence
  ENSG00000162129_26 (sequence is synthesized)
aaagcagagggtctggacaccgtcccccaagggcatttcacagaccagccaatgtttcaagcccaccttagccaggcacagtaaggcctggtgcatccttgggcaccatctacagtagcc

SEQ ID NO: 484223 - DNA, 120 bp, Artificial Sequence
  ENSG00000162129_27 (sequence is synthesized)
actgctgataagcagtccacccaccttcccccacaggcccttcatggaaccctcgcgtagtgttagctagtctttcaggaagcagagaatggggccaggaatcaaagtcccttgggtaat

SEQ ID NO: 484224 - DNA, 120 bp, Artificial Sequence
  ENSG00000162129_28 (sequence is synthesized)
ggaagcatgtcctaacagtatggtgggtatgaggcagtcagaatccagggtgtgagctccagcagatgcttggatcactgtctacccctcaggggctgctgctccctacctcactgactg

SEQ ID NO: 484225 - DNA, 120 bp, Artificial Sequence
  ENSG00000162129_29 (sequence is synthesized)
gattacaggcatgagccactggacccggcctgcttttcattgttttttactttttgttttgaaataattttagacttagagaaagttgcagaaatagtagaaaattcccatgtatctttc

SEQ ID NO: 484226 - DNA, 120 bp, Artificial Sequence
  ENSG00000162129_30 (sequence is synthesized)
gttgcagaaatagtagaaaattcccatgtatctttcatctagcatctcccaatgattacatcctacaaagccatactgtagtttatcaaaaccaggaaattgccgggtgtggtggctcat

SEQ ID NO: 484227 - DNA, 120 bp, Artificial Sequence
  ENSG00000162129_31 (sequence is synthesized)
tgagactccgtctcaaaaaaagaaaaccaggaagttaacattgataaactactactaactaatctacggacattcaaattttgccagttttcccgatgatgtcctttgtctggtccaggg

SEQ ID NO: 484228 - DNA, 120 bp, Artificial Sequence
  ENSG00000162129_32 (sequence is synthesized)
gtccagggtcccatattgcattttgttgtggtgtttccttcatctctgtcagcctgtgacagtttcttggtctttatctttcatgaccttgacactttggaagagtccaggccagttatt

SEQ ID NO: 484229 - DNA, 120 bp, Artificial Sequence
  ENSG00000162129_33 (sequence is synthesized)
ttatagaatattccccagttttagtttgtttaatgtttttacatgatatgattgaggatctgcatttttgccaagacaaccacagaagtgatactgtgctattcttagtgcctcctagcg

SEQ ID NO: 484230 - DNA, 66 bp, Artificial Sequence
  ENSG00000162129_34 (sequence is synthesized)
cacagaagtgatactgtgctattcttagtgcctcctagcggagggtggtggtacaggatggagtgc

SEQ ID NO: 484231 - DNA, 78 bp, Artificial Sequence
  ENSG00000162129_35 (sequence is synthesized)
agactaggtggtggtaactttgatcacatggctaaggtggtgtgtgccaggtttctccactgtaaaattaggaatttt

SEQ ID NO: 484232 - DNA, 120 bp, Artificial Sequence
  ENSG00000162129_36 (sequence is synthesized)
cttaaaattttgcctactgattttcatttccatcatcaatgattcttgcttataacaggtattaatgttatgcttgcctaatggtgactttgtttcattattttacctgtatttattaat

SEQ ID NO: 484233 - DNA, 120 bp, Artificial Sequence
  ENSG00000162129_37 (sequence is synthesized)
tggtattctactataaggaagagctgtcccttttccccatttatttatttgataatttatatcagtatgaatgagtggatatctgttttattctacaggctacaatctaatgctaacagt

SEQ ID NO: 484234 - DNA, 120 bp, Artificial Sequence
  ENSG00000162129_38 (sequence is synthesized)
ttatttggttgctcaaattggctcagatttggccagtgagaactcattgaagttggcactgtgttgtttcgacattgcccctgtcactttttaagcattttctggcaccacaagatgttt

SEQ ID NO: 484235 - DNA, 120 bp, Artificial Sequence
  ENSG00000162129_39 (sequence is synthesized)
caggcttcctcacattttccctatctcagccctggcatcagtcattctctaagaagctcccagttccttttattccagaaaaaaggaacttagaaaccaagttgtttcttgatgccactg

SEQ ID NO: 484236 - DNA, 120 bp, Artificial Sequence
  ENSG00000162129_40 (sequence is synthesized)
gaaaccaagatctggacagaatatatactcctggctagagtatcattggcggagtgtcattgcttgtaggcctgctcagcagacagagctagaaaacatatatgtatatatgttaaaaca

SEQ ID NO: 484237 - DNA, 120 bp, Artificial Sequence
  ENSG00000162129_41 (sequence is synthesized)
tgcaaatacaagcacctgaatttattattctatccatctgtatgttattaaaaaccgtgagccaggtatggtggctcgtgcctgtatcccaggactttgggaggccaaagtgggaggatc

SEQ ID NO: 484238 - DNA, 89 bp, Artificial Sequence
  ENSG00000162129_42 (sequence is synthesized)
gagcccaggagttcaagaccagcctgcgcatcatagcaagacctcatcctccaaacgtttacattcctgtaatcctagctacgtaggag

SEQ ID NO: 484239 - DNA, 120 bp, Artificial Sequence
  ENSG00000162129_43 (sequence is synthesized)
ggaggctgaggcaggaggatcgcttgagttcagaaggttgaggctgtagtgaactgtgattgtaccactgcactgcagcctgagtgacagagcaagactccgtttcatatttttaaaaat

SEQ ID NO: 484240 - DNA, 120 bp, Artificial Sequence
  ENSG00000162129_44 (sequence is synthesized)
aaataaaaatcatgagtttagatacggttttaattcaataccatagggtttgcgactgccatttttataaccttactattctttttctgctttttctcctgctatctctgtttctgctcc

SEQ ID NO: 484241 - DNA, 120 bp, Artificial Sequence
  ENSG00000162129_45 (sequence is synthesized)
tttctatttgatgtttagacttcccatagaggctctagttaagtcagctagtaaccagcctgtgtgcagtattcctactagatagaggtcttatgcccggctgtcagtccgttggttcag

SEQ ID NO: 484242 - DNA, 120 bp, Artificial Sequence
  ENSG00000162129_46 (sequence is synthesized)
ttaactgtggccaggaatactaggcatataacttaaaatcagataacttttatacaagaaaagccaatggccaccttcctgagaataggataaggagacaggggtagaaccttagattct

SEQ ID NO: 484243 - DNA, 74 bp, Artificial Sequence
  ENSG00000162129_47 (sequence is synthesized)
gagaataggataaggagacaggggtagaaccttagattctaaggaacctaattaagaatcacaggccatgtagg

SEQ ID NO: 484244 - DNA, 120 bp, Artificial Sequence
  ENSG00000162129_48 (sequence is synthesized)
ccactgcactccagcctggtgacagagccagcctccgtctccaacaaaaacaaacaaaaaaagaattacttcttccagagattctctgccagaactcctaggtggtgttggacccatatc

SEQ ID NO: 484245 - DNA, 120 bp, Artificial Sequence
  ENSG00000162129_49 (sequence is synthesized)
cctaggtggtgttggacccatatcttttacttccatagcatcccaggctcagctcacttgtcctacttgttctgtgtcttcatcactagaatgtaagttctaagagggcagatgccaagc

SEQ ID NO: 484246 - DNA, 120 bp, Artificial Sequence
  ENSG00000162129_50 (sequence is synthesized)
tgttcagccattcacagaacctggcacagtgcaggcatatgacagatgttcctttattattatacttgggtgagtggatgggacctgcagcaagtgcagatcttctcagtgggctctgga

SEQ ID NO: 484247 - DNA, 120 bp, Artificial Sequence
  ENSG00000162129_51 (sequence is synthesized)
acagaaaagtattgtttgtttgctcagcatatttttatttgtcccatgttgctgtggccaggatttgagctctgagacaatgcagcaaggtgagacccagatttcttttgttttgttttg

SEQ ID NO: 484248 - DNA, 120 bp, Artificial Sequence
  ENSG00000162129_52 (sequence is synthesized)
tggcctcccagagtgctgagattacaagcgtcaacgactgtacccggccccaaattccttattgaggatcctagaatacatgagaccagacttggaaatgaaagtgtaacatgtttattg

SEQ ID NO: 484249 - DNA, 120 bp, Artificial Sequence
  ENSG00000162129_53 (sequence is synthesized)
ttcaaaaagaaaaactcaaaggtgtgtagtgattttaaaatttagggaaattcctcaatatagtgaaagaagaaaaacaagaaagaaatttaggaaagaaacacacttaaaccataaaaa

SEQ ID NO: 484250 - DNA, 120 bp, Artificial Sequence
  ENSG00000162129_54 (sequence is synthesized)
atagaaaatggaccaataaagataaaagctaaacttaacaaggtaggaaaaagaaaaagaataaattaaaaaattctttgaaagcaccaataaaatagataaaacctcctgagcctgata

SEQ ID NO: 484251 - DNA, 120 bp, Artificial Sequence
  ENSG00000162129_55 (sequence is synthesized)
aaaggggaaaggagccaaaaaaattaacaaaattaggcatgagaaattagacataaccatatatattgaggaattgagaagaagaatagaactctatggcaacaaatttgaaatcagagg

SEQ ID NO: 484252 - DNA, 120 bp, Artificial Sequence
  ENSG00000162129_56 (sequence is synthesized)
aaatggataatttcccagcaaacactgatcctagaaatagtttgaataggccagttggttacccaagaagaaactggaaaggtggttaaaattttatcctttttgagcaccataagatgg

SEQ ID NO: 484253 - DNA, 120 bp, Artificial Sequence
  ENSG00000162129_57 (sequence is synthesized)
aaattttatcctttttgagcaccataagatggtgaaaaataaataaaattttatccttgtaaaagattgatggccaggcatggtggtggcccacacctgtaatcctagcactttggaagg

SEQ ID NO: 484254 - DNA, 87 bp, Artificial Sequence
  ENSG00000162129_58 (sequence is synthesized)
cacatggtgcttgcctgtagtcaacagctacttgggaggctgaggtggggaagatggtttaagcccaggaggcagaggttgcagtga

SEQ ID NO: 484255 - DNA, 83 bp, Artificial Sequence
  ENSG00000162129_59 (sequence is synthesized)
gccaagactgatgtcccaaaaataaaaaattgtttttaattaaactttttaattgaaaaatatatgggaaattgtacaaatca

SEQ ID NO: 484256 - DNA, 120 bp, Artificial Sequence
  ENSG00000162129_60 (sequence is synthesized)
attgaaaaatatatgggaaattgtacaaatcacaagtatgcagctcagtgaatgattacaaagtaaacacactcctatagccatcactcaacccccaaaatagatgagttttaactatta

SEQ ID NO: 484257 - DNA, 120 bp, Artificial Sequence
  ENSG00000162129_61 (sequence is synthesized)
ttgtactcaaacctgataaagtgccagaaagaatgctatagcctaatctcacctatggccatagatgcaaaaatcccaaataaaatcaagttgaattgcacactctgattacataaggtt

SEQ ID NO: 484258 - DNA, 120 bp, Artificial Sequence
  ENSG00000162129_62 (sequence is synthesized)
tattttagcaatgcaaggctcagtgtcaggaaatttattaatttattacatcaagaacttaaatgttatttaaatgtctagagagtgctagtgttgttaaattttctcattttgataatt

SEQ ID NO: 484259 - DNA, 120 bp, Artificial Sequence
  ENSG00000162129_63 (sequence is synthesized)
atactatgattacagaagagaacgtccttgttttcagaaaatgtaagtatttagaggttaaaggtaaacctctaatttggtttgccagtatttcagataactacacacacacacacacac

SEQ ID NO: 484260 - DNA, 120 bp, Artificial Sequence
  ENSG00000162129_64 (sequence is synthesized)
accagcctggacaacatggtgaaacccctctttattaaagtacaaaaattagccggacatagtggcacatgccggtaattccagctatttgggaggctgaggcacaggaatcccttgaac

SEQ ID NO: 484261 - DNA, 77 bp, Artificial Sequence
  ENSG00000162129_65 (sequence is synthesized)
caaacaaaaaaaagatgttaacatttgggaaatctgagggaatgatgtacatgaattctttgtattgtttttgcaac

SEQ ID NO: 484262 - DNA, 120 bp, Artificial Sequence
  ENSG00000162129_66 (sequence is synthesized)
gggaatgatgtacatgaattctttgtattgtttttgcaacttttaagtataaagttatttcaggccaggcatggtagtgcatgcctgtatacccagctactcgaggctgaggtggaagat

SEQ ID NO: 484263 - DNA, 120 bp, Artificial Sequence
  ENSG00000162129_67 (sequence is synthesized)
gctatgatcatgccactgcactccaggctgggtggcagagtgacaccctatctcttaaaaaaaaaaaaaaaaaaaaaaacaggtgcagtatctcacacctgtaatctcaacagaacactg

SEQ ID NO: 484264 - DNA, 88 bp, Artificial Sequence
  ENSG00000162129_68 (sequence is synthesized)
tatctcttaaaaaaaaaaaaaaaaaaaaaaacaggtgcagtatctcacacctgtaatctcaacagaacactgaggggtcaaggcaggt

SEQ ID NO: 484265 - DNA, 120 bp, Artificial Sequence
  ENSG00000162129_69 (sequence is synthesized)
tcagctacttgggaggctgaggtgggaatataactggagctcaggaggtggaggttgctgtgagatgagatcgtgccactgcactccagcctatctccaaaaaaaaaaaaaaggctatag

SEQ ID NO: 484266 - DNA, 120 bp, Artificial Sequence
  ENSG00000162129_70 (sequence is synthesized)
atctccaaaaaaaaaaaaaaggctatagtagaagcctattagcatggataagtgtctgaataaaagataactgtacaaaaatcaattgttttttctgtattctagcaataatcaactaga

SEQ ID NO: 484267 - DNA, 120 bp, Artificial Sequence
  ENSG00000162129_71 (sequence is synthesized)
aacagtatcaaaagaaaaacattccatttacaattgcaacaaataggtatatatatatttgctcttctacacataacctatttctggaagggagcagaactgggcaattcagggacagca

SEQ ID NO: 484268 - DNA, 120 bp, Artificial Sequence
  ENSG00000162129_72 (sequence is synthesized)
atggaaggggaacactgctatgttattttaaatactttttagtaagctttgaaccatattaatgtattacctgttcaaaattatacttaataaatttaacaagaaaaccatattgaaggg

SEQ ID NO: 484269 - DNA, 120 bp, Artificial Sequence
  ENSG00000162129_73 (sequence is synthesized)
ttgaagggcataaaaataagacctgacaagtgaaaaaacatcaagttttagaaaggatgatttaatactaaaatatacatttcttaatatataacttaatgtaaacctaataaataattt

SEQ ID NO: 484270 - DNA, 120 bp, Artificial Sequence
  ENSG00000162129_74 (sequence is synthesized)
attgtgacgcaatcccacagccttctgggaaacgtagtttatttattctccagctggggaaaggcttagggctgtggactacctctcccgtgaggtagtgcgcaactccaccctgttcgc

SEQ ID NO: 484271 - DNA, 120 bp, Artificial Sequence
  ENSG00000162129_75 (sequence is synthesized)
ggctggtacgatgaagaacaccctctggtcttcctcttcttgggatcatctggaataggaaaaacagagctggccaagcagacagccaaatatatgcacaaagatgctaaaaagttggta

SEQ ID NO: 484272 - DNA, 120 bp, Artificial Sequence
  ENSG00000162129_76 (sequence is synthesized)
ggttcctccagagaattgagccctcattctccaaggcatccatcgtacacaggaattaacttctctcccaggaatctaaaatggtactagctatatatatatatatatatatacacacac

SEQ ID NO: 484273 - DNA, 120 bp, Artificial Sequence
  ENSG00000162129_77 (sequence is synthesized)
acaccaactcttgaaggatgaatgcaagtgtaccaggtagatgaggtaggaaggcggagggagcaacgtgttcaaaggcatggagtatgaagcagcatactttactcagaatattgcagg

SEQ ID NO: 484274 - DNA, 120 bp, Artificial Sequence
  ENSG00000162129_78 (sequence is synthesized)
aggagacatgaaaacatacatctacacaaagacttgtgtgtgaatgttcatggcactgtttatataatagccaaaaaggggaaatagcttaaatgtcgatcatcacctgatagaaaaaca

SEQ ID NO: 484275 - DNA, 120 bp, Artificial Sequence
  ENSG00000162129_79 (sequence is synthesized)
cagccccaagagactgcaaagaatgatgctcagtcaagaagctgggcagggctgaatgctggagtctcactgaagaacaccaagatttcctcctctgaatggcccctcaggctgttgtca

SEQ ID NO: 484276 - DNA, 120 bp, Artificial Sequence
  ENSG00000162129_80 (sequence is synthesized)
aagatcatgtgaaatcaaaatgatgattccggccaagaaagtcaagcccaaaaacttgttcaaaattacatagcaaatcattagaagaactagggtgagaacccaggtcacttgacataa

SEQ ID NO: 484277 - DNA, 120 bp, Artificial Sequence
  ENSG00000162129_81 (sequence is synthesized)
gtaagcacgagagtctatagtccatctgtcgtccgacattcattggcatctggacacaaagctcagcacccttcaaggtgaagactgtcaagagcccagctgattggcagagaggaagct

SEQ ID NO: 484278 - DNA, 120 bp, Artificial Sequence
  ENSG00000162129_82 (sequence is synthesized)
agggcacagccactgaagggcaggactacttgtggatgtggcagcagttcttgggatgactgatgcttctggagcgagaacttgctgttctcagaagcagagacttagaaaacatcccca

SEQ ID NO: 484279 - DNA, 120 bp, Artificial Sequence
  ENSG00000162129_83 (sequence is synthesized)
agcagaaagcttcttcctttgtccgttggaaaactctgtggcaagacatttgtagctaagaattggagtgttcaccaaggacattatctctgccgtgccttaaaatcaatcaatactccc

SEQ ID NO: 484280 - DNA, 120 bp, Artificial Sequence
  ENSG00000162129_84 (sequence is synthesized)
ttgctgaccctggaatcacctgttggctactgcgaagggctgccgggctgcgactttccccttttggcagggcatttgcagagcagcaatgttgggaatccactcttccatcccccaggg

SEQ ID NO: 484281 - DNA, 120 bp, Artificial Sequence
  ENSG00000162129_85 (sequence is synthesized)
gatgccactaccatattccattgagctgccaggcattgattatttagttctttcaaatacatgtttttctaatagcaattaaacacccatcccaaaaatacagaaagtaattgaacttaa

SEQ ID NO: 484282 - DNA, 120 bp, Artificial Sequence
  ENSG00000162129_86 (sequence is synthesized)
attgtgacatcagtttgcttgtcaaagtccacgtttctaaagtactgccactgtcttagtgggccctccacgcagtcctgagatgggtatgtcctggccgcggatctgaccagtgccccc

SEQ ID NO: 484283 - DNA, 120 bp, Artificial Sequence
  ENSG00000162129_87 (sequence is synthesized)
gagagcgccatcgccacagtgggtgctggggacccacatcaagcccaccccggactcatgccctaggtcgggcagaattgaccagggacagctgtgcagtgaagtctgcctggcattata

SEQ ID NO: 484284 - DNA, 120 bp, Artificial Sequence
  ENSG00000162129_88 (sequence is synthesized)
cttgagtagccccatacatactggatgtgaagactaaaccaagatatgaaagtggcaggccaggaccctgaggctgagggccaggaaaaggagtaagtagggaggacactaggagcccag

SEQ ID NO: 484285 - DNA, 120 bp, Artificial Sequence
  ENSG00000162129_89 (sequence is synthesized)
aagggagagcactgatcactggaggaggagagaactgggccttgaagaatgggcaggatctgggtaatcggagagaccacaggtggggacagagtggagctgagcgtggacacagggaag

SEQ ID NO: 484286 - DNA, 120 bp, Artificial Sequence
  ENSG00000162129_90 (sequence is synthesized)
gtgcatggctgctcatatgtggtcatcctgccactctctctctcaatgtttccttgatggggagctcataacggaaaagaatggatcagtccacattgacatgtctctgatcatgggaag

SEQ ID NO: 484287 - DNA, 120 bp, Artificial Sequence
  ENSG00000162129_91 (sequence is synthesized)
gatttcccataatcagaagtttcaaccaaaacttctaatttgagatagtcaacagactgctgaaatagtgacaatgaggatgaaggtggtaaagccactagcaataaatatggaaagcaa

SEQ ID NO: 484288 - DNA, 120 bp, Artificial Sequence
  ENSG00000162139_0 (sequence is synthesized)
agtcgacacgctcttcgcttctcggggcttgtctccgtgtcctccgtctcagttgtttctccctctctatcctcctctgtctcagtctccccagccttggggccggtgcctcttccgggc

SEQ ID NO: 484289 - DNA, 120 bp, Artificial Sequence
  ENSG00000162139_1 (sequence is synthesized)
ttcggcgaatgagacctgcggacctgcccccgcgccccatggaagaatccccggcgtccagctctgccccgacagagacggaggagccggggtccagtgcagaggtcatggaagaagtga

SEQ ID NO: 484290 - DNA, 120 bp, Artificial Sequence
  ENSG00000162139_2 (sequence is synthesized)
caacatgctccttcaacagccctctgttccggcaggaagatgacagagggattacctaccggatcccagccctgctctacataccccccacccacaccttcctggcctttgcagagaagc

SEQ ID NO: 484291 - DNA, 120 bp, Artificial Sequence
  ENSG00000162139_3 (sequence is synthesized)
gttctacgaggagagatgaggatgctctccacctggtgctgaggcgagggttgaggattgggcagttggtacagtgggggcccctgaagccactgatggaagccacactaccggggcatc

SEQ ID NO: 484292 - DNA, 120 bp, Artificial Sequence
  ENSG00000162139_4 (sequence is synthesized)
ggaccatgaacccctgtcctgtatgggagcagaagagtggttgtgtgttcctgttcttcatctgtgtgcggggccatgtcacagagcgtcaacagattgtgtcaggcaggaatgctgccc

SEQ ID NO: 484293 - DNA, 120 bp, Artificial Sequence
  ENSG00000162139_5 (sequence is synthesized)
gcctttgcttcatctacagtcaggatgctggatgttcatggagtgaggtgagggacttgactgaggaggtcattggctcagagctgaagcactgggccacatttgctgtgggcccaggtc

SEQ ID NO: 484294 - DNA, 120 bp, Artificial Sequence
  ENSG00000162139_6 (sequence is synthesized)
atggcatccagctgcagtcagggagactggtcatccctgcgtatacctactacatcccttcctggttcttttgcttccagctaccatgtaaaaccaggcctcattctctgatgatctaca

SEQ ID NO: 484295 - DNA, 120 bp, Artificial Sequence
  ENSG00000162139_7 (sequence is synthesized)
gtgatgacctaggggtcacatggcaccatggtagactcattaggcccatggttacagtagaatgtgaagtggcagaggtgactgggagggctggccaccctgtgctatattgcagtgccc

SEQ ID NO: 484296 - DNA, 120 bp, Artificial Sequence
  ENSG00000162139_8 (sequence is synthesized)
ggacaccaaacaggtgccgggcagaggcgctcagcactgaccatggtgaaggctttcagagactggccctgagtcgacagctctgtgagcccccacatggttgccaagggagtgtggtaa

SEQ ID NO: 484297 - DNA, 120 bp, Artificial Sequence
  ENSG00000162139_9 (sequence is synthesized)
gtttccggcccctggagatcccacataggtgccaggactctagcagcaaagatgcacccaccattcagcagagctctccaggcagttcactgaggctggaggaggaagctggaacaccgt

SEQ ID NO: 484298 - DNA, 120 bp, Artificial Sequence
  ENSG00000162139_10 (sequence is synthesized)
cagaatcatggctcttgtactcacacccaaccagtaggaaacagagggttgacctaggtatctatctcaaccagacccccttggaggctgcctgctggtcccgcccctggatcttgcact

SEQ ID NO: 484299 - DNA, 120 bp, Artificial Sequence
  ENSG00000162139_11 (sequence is synthesized)
gtgggccctgtggctactctgatctggctgctctggaggaggagggcttgtttgggtgtttgtttgaatgtgggaccaagcaagagtgtgagcagattgccttccgcctgtttacacacc

SEQ ID NO: 484300 - DNA, 120 bp, Artificial Sequence
  ENSG00000162139_12 (sequence is synthesized)
gggagatcctgagtcacctgcagggggactgcaccagccctggtaggaacccaagccaattcaaaagcaattaattggcttaggacccaatttccatagatgcaaatggcagttacagac

SEQ ID NO: 484301 - DNA, 120 bp, Artificial Sequence
  ENSG00000162139_13 (sequence is synthesized)
aggttaacagaagctactgaagtctacagataatcaaaaaacttaatattctgttccctaccttttttcacttttcctcctccaaagagcaaaatgaaaattttgccttagctactgcag

SEQ ID NO: 484302 - DNA, 120 bp, Artificial Sequence
  ENSG00000162139_14 (sequence is synthesized)
tggaaagagcactgaactaggagttggaagacaaggatgtggtcctggctctgccactggcttgcttttggaccttggatgtgtcacctgaactctctggacctcaggtttccatctgta

SEQ ID NO: 484303 - DNA, 120 bp, Artificial Sequence
  ENSG00000162139_15 (sequence is synthesized)
aaatgagagtattggttctaagatttctcatcttctcatccctaggacaagcatagtgcctgcatgcttcatgatcagtaagtcctggctgcataaaggactctgatgtcaaaatggaaa

SEQ ID NO: 484304 - DNA, 120 bp, Artificial Sequence
  ENSG00000162139_16 (sequence is synthesized)
ccaggggacttaccttttcacatgacttacccctcatccgagtgtgaggttacaagcaggtgtcatggcaggaaggaagaccagatctgtatgatttgttccatttttaataacaaaaat

SEQ ID NO: 484305 - DNA, 120 bp, Artificial Sequence
  ENSG00000162139_17 (sequence is synthesized)
atccacacccttttaataatgctcagttctgtaggctctctatcctagaggaattgagcaaaacagaagaatcatgaagtctcctaccttctacagccttgtagttctgcttaccttctc

SEQ ID NO: 484306 - DNA, 120 bp, Artificial Sequence
  ENSG00000162139_18 (sequence is synthesized)
ttcctcatccagaaagcatcattttctagggagaacaatgagaatctcaatgccagtagtactggataatagtgcgtattgcttctggtggcattaccctgatgatgggctgaagttcat

SEQ ID NO: 484307 - DNA, 120 bp, Artificial Sequence
  ENSG00000162139_19 (sequence is synthesized)
ttattagggtggttcctgatgggaaaaggacatggattaggactttaaaacactggacagaatttcccacagtctttgccctcaaggagttcaccagtttatggggctagaagagcgaga

SEQ ID NO: 484308 - DNA, 120 bp, Artificial Sequence
  ENSG00000162139_20 (sequence is synthesized)
aaattcaagaaaataaatgtagctggtgggagactttgtagatgttgggctatatgttggggtgatggtagctcctgatgtaattttcttagttgcatcttcaatatgcctggagtcgtc

SEQ ID NO: 484309 - DNA, 120 bp, Artificial Sequence
  ENSG00000162139_21 (sequence is synthesized)
tgtccaaggcttgtccaggcttctgggtttctctcaagtttgtttttctcaggatattgtcctggcccagctactcctttacctgtgagaagatcttcaccattaggaagatctctagac

SEQ ID NO: 484310 - DNA, 120 bp, Artificial Sequence
  ENSG00000162139_22 (sequence is synthesized)
ccccagatctcagaatcaggcctatttgtgtaggcccatggaaatcactacttgtgaagtagagatgcctttttgtctaatggttttcgtgctgaacttagttcatgctgagtctctcag

SEQ ID NO: 484311 - DNA, 120 bp, Artificial Sequence
  ENSG00000162139_23 (sequence is synthesized)
atgataccacgttggttgttcctatcttagattgtttctcccatagcctgttattgcaacagaaattctatcatgagagatttatttttttgtccctattttaggagtctaatgcttaaa

SEQ ID NO: 484312 - DNA, 120 bp, Artificial Sequence
  ENSG00000162139_24 (sequence is synthesized)
agtcttagtcatgaaatatagcctaggagactaggggttacagttgcactagttgggtagagagagtcctacaggataaaagtggagattaactttacctactttagcagattgcttaag

SEQ ID NO: 484313 - DNA, 120 bp, Artificial Sequence
  ENSG00000162139_25 (sequence is synthesized)
ccatggcttagagtggcttttaaaaatccccttagcctctcctacatttgccaaggtaatcttcccaatacacaattattcactcatgtatacatttatctaaatatttcttgagtgcct

SEQ ID NO: 484314 - DNA, 120 bp, Artificial Sequence
  ENSG00000162139_26 (sequence is synthesized)
aatacaaggtactttctactgccattccttggctctaaatcatttgtggttctccattgcctattataatgtaaagatgtttacatttagcctggcatgtaggaccttccagctgttggg

SEQ ID NO: 484315 - DNA, 120 bp, Artificial Sequence
  ENSG00000162139_27 (sequence is synthesized)
tgaaataatgcacactttcctctacttccttatatgaggcccactgtcagggaaaacctctgtcaagttggcaggtggagggtggtggaggtctagggatgggcaggattggtgcaggga

SEQ ID NO: 484316 - DNA, 120 bp, Artificial Sequence
  ENSG00000162139_28 (sequence is synthesized)
ggaattggggaaggggagaggattaaaagggcagccccctcctgagtggtagaaactccttgtttagcaaagctttcctgaacactgtactgcaagtggataggaatagggaggatggcc

SEQ ID NO: 484317 - DNA, 86 bp, Artificial Sequence
  ENSG00000162139_29 (sequence is synthesized)
aacactgtactgcaagtggataggaatagggaggatggccaagtcgtacaaccagggctaaaggatgaaaagaatgagaatatcaa

SEQ ID NO: 484318 - DNA, 68 bp, Artificial Sequence
  ENSG00000162139_30 (sequence is synthesized)
tactgcgcccagccgagaatatcaacttctttaggactactcaagaagggagtcaaggcagggacctt

SEQ ID NO: 484319 - DNA, 120 bp, Artificial Sequence
  ENSG00000162139_31 (sequence is synthesized)
ctttaggactactcaagaagggagtcaaggcagggaccttggtctgtgccactgtgacgcagagatgtataataccagtactcataagaggtccatctctaaattgccctcctcttactt

SEQ ID NO: 484320 - DNA, 120 bp, Artificial Sequence
  ENSG00000162139_32 (sequence is synthesized)
cttccccctgcctcatgttttttctctttaatgactagcatcgaaactctttaaatggggcaggcctgtgttcttatctcaggaatagtaagaaaagggggttgggaacaggggaaatcc

SEQ ID NO: 484321 - DNA, 120 bp, Artificial Sequence
  ENSG00000162139_33 (sequence is synthesized)
agaataaagacttgagaaaggaacagagtgggtgatggcagctatgaagaaaaaacagatcagaagaagagtcctggcaccttaggaagagaaagtgtcacagacacgaggcctaggcta

SEQ ID NO: 484322 - DNA, 120 bp, Artificial Sequence
  ENSG00000162139_34 (sequence is synthesized)
gagagatggtgtaggtggtagctgctgtgaagaagaaatgacaacaggctggagctgttccctgaaacctgtgggaaggaagagagacctgcacaggccggcacttagcttgtggagaag

SEQ ID NO: 484323 - DNA, 120 bp, Artificial Sequence
  ENSG00000162139_35 (sequence is synthesized)
gtcctaactcaacactgcaactttaagctggcttaacttgtccaagttccagatgaccaacaaagacagctatagacactctaactctgtgccaattacccaaggccttcagggccctgg

SEQ ID NO: 484324 - DNA, 120 bp, Artificial Sequence
  ENSG00000162139_36 (sequence is synthesized)
gacctattccatgatagtggtaccctaactgaacccatttcagccactcagattgataggatggaaaagacagggcaggtggtagcagctgtgaagaaaagaggaaagcagaagggtggc

SEQ ID NO: 484325 - DNA, 120 bp, Artificial Sequence
  ENSG00000162139_37 (sequence is synthesized)
ctataatctacaggcatgtagagaggactacataggcctctgttctttgccctcaggagcccccttcctgtcccttggactcagaatggatccttccagcacacatggcccaacactgag

SEQ ID NO: 484326 - DNA, 120 bp, Artificial Sequence
  ENSG00000162139_38 (sequence is synthesized)
agtgcaggaagcatgggtaggggcctcctgctgctggtatgtacccaggccagcctcctgccgacacagcctactggctgggttcatgttcttactattcacctcaggccattgtctggg

SEQ ID NO: 484327 - DNA, 120 bp, Artificial Sequence
  ENSG00000162139_39 (sequence is synthesized)
tgcttaatttgacttgtttcccctggtcaccagtctcccctccgatattcacaggacatcaagcagcttcagccacgggtaagaggcttttcaccctgcctgttgggtagcccagaggac

SEQ ID NO: 484328 - DNA, 120 bp, Artificial Sequence
  ENSG00000162139_40 (sequence is synthesized)
ccacaaaggtcaacctgagtctccacagcctcctccccagggcagtaggaattgatatctcacttttgccagattaggcttctcactcttcttgagtaggccataatccacctcttcagt

SEQ ID NO: 484329 - DNA, 120 bp, Artificial Sequence
  ENSG00000162139_41 (sequence is synthesized)
aggccatgcatcttgtctctgcagtgccagaattcacagtctgggcctccctttggtccttaccataggctgccatgtattattgtctatgttgtgccctgtaggcctctgctaggctgt

SEQ ID NO: 484330 - DNA, 120 bp, Artificial Sequence
  ENSG00000162139_42 (sequence is synthesized)
gaactccttgactgactcctcactgtgtcctttttaccttgaatcacagtggcttatctaaaaatataagcttttttctgtcatattctgaattccctgaaggtaaggactatgtctgat

SEQ ID NO: 484331 - DNA, 120 bp, Artificial Sequence
  ENSG00000162139_43 (sequence is synthesized)
tcctctctttgtcctctgcacccagcgtagggcctgaaacagagtagctagcagtaaagatacactgaatgaatgaatgagtcaaccatccttggcctctggagctaattgagaaggcta

SEQ ID NO: 484332 - DNA, 120 bp, Artificial Sequence
  ENSG00000162139_44 (sequence is synthesized)
gggggagttccgctgtagggagaaggatgttgcatccctttgtagattgtgtagcattcaaaacctgctgaacactcaccctcaatgtatattctctgttctggcctgcttcaaggtcag

SEQ ID NO: 484333 - DNA, 120 bp, Artificial Sequence
  ENSG00000162139_45 (sequence is synthesized)
ttacactacttcctgggatgggcctttctctggcttaagcttggttgtccctggctttcccaaggatcacagcccaaaaggcacagtggggaaaatttatggcctattccagaagagtga

SEQ ID NO: 484334 - DNA, 120 bp, Artificial Sequence
  ENSG00000162139_46 (sequence is synthesized)
gcagcctaatcaagccaagccttgatttggggttctcacttcactggtattttccctctgtccctaattgggttttctatagttactagttttccaggcctccaagggagattctgaggc

SEQ ID NO: 484335 - DNA, 120 bp, Artificial Sequence
  ENSG00000162139_47 (sequence is synthesized)
ttgatgtgttctgactgtgtcttggctttgtgatgctgagtgccagaaatactctgtactataaaaactaccatcgttctttgaaacaacaaagaggaataaagaacttaattctggtga

SEQ ID NO: 484336 - DNA, 120 bp, Artificial Sequence
  ENSG00000162139_48 (sequence is synthesized)
cccacgtaggccttccaaagcgctgagattgtaggcataagccaccaggcccagcctattacctttacgttgtacttagtcccagataaaaaatgaccttagatcagtcctttcctcttt

SEQ ID NO: 484337 - DNA, 120 bp, Artificial Sequence
  ENSG00000162139_49 (sequence is synthesized)
ggctggggagaggggggcttaaattccggtactgtgaaacagaagaatggactcagtgctatgtgacaaatctatgtatgtaaatgtgtgtatatacacacacataaattatatatatga

SEQ ID NO: 484338 - DNA, 120 bp, Artificial Sequence
  ENSG00000162139_50 (sequence is synthesized)
atatattttcattttcatattttgcaaggagagtagccaatgctctggacctctggtcctttttgtagggtaccctctgaggccgggaacctttgctcaactctcaggctgtccagggaa

SEQ ID NO: 484339 - DNA, 120 bp, Artificial Sequence
  ENSG00000162139_51 (sequence is synthesized)
gctttaggcggtgataccgagctacagaccaatataagagctcggggctgtggcactgaagagaggaggcggccgttgggaactgagtctccccagccttggggccggtgcctcttccgg

SEQ ID NO: 484340 - DNA, 120 bp, Artificial Sequence
  ENSG00000162139_52 (sequence is synthesized)
gctgaggcgagggttgaggattgggcagttggtacaggtgactcttcatcccagatctgagtctgggcctcagtttctcttcacaaagctcagagctcttcaggatctgtgccttttctc

SEQ ID NO: 484341 - DNA, 120 bp, Artificial Sequence
  ENSG00000162139_53 (sequence is synthesized)
atcagtacaggaaagccctgtgtggggagcagaggcagaaaaaacagcaaaaacaatggctctcactgagtgcttattgtgtgccaggggcacattgggtcctcacagccattctgtgtc

SEQ ID NO: 484342 - DNA, 120 bp, Artificial Sequence
  ENSG00000162139_54 (sequence is synthesized)
gtaggtactgttttcagtcatattttacagacaaggaaactgagactcagagaggttgccatttgctcaaggttatacagctataataaagcagtagaagctggtttcaaactcagtcgc

SEQ ID NO: 484343 - DNA, 84 bp, Artificial Sequence
  ENSG00000162139_55 (sequence is synthesized)
aacagattgtgtcaggcaggaatgctgcccgcctttgcttcatctacagtcaggatgctggatgttcatggagtgagagaaccc

SEQ ID NO: 484344 - DNA, 73 bp, Artificial Sequence
  ENSG00000162139_56 (sequence is synthesized)
cattgccgaaaagatacccaaaaatgtggaaactactttggaactagaaaaatgtggaaaagtttggaactcc

SEQ ID NO: 484345 - DNA, 120 bp, Artificial Sequence
  ENSG00000162139_57 (sequence is synthesized)
aattacaaaaattaatggctctaattgttatagtgataataaagcataaatgaaattgtgaggacatcaaaatttataattaaagacacctattaaaacagcagtttaaaatttataaaa

SEQ ID NO: 484346 - DNA, 120 bp, Artificial Sequence
  ENSG00000162139_58 (sequence is synthesized)
ctcctggactcaagctattctaaagtgctgggattacagcatgagccactgtgcctggccatttgggggcccctgaagccactgatggaagccacactaccggggcatcggaccatgaac

SEQ ID NO: 484347 - DNA, 120 bp, Artificial Sequence
  ENSG00000162144_0 (sequence is synthesized)
ggctttctcttcccgctctatggccagtctggccgccatgttggagctttcgctgttcggggcccggcctgctccgggccctcccagcgtcgccgctagctgacttagggctcccgccca

SEQ ID NO: 484348 - DNA, 120 bp, Artificial Sequence
  ENSG00000162144_1 (sequence is synthesized)
cactgcgcacggccttgctgagggccggctcgtagtgggaggcttcgcgttcacctgaacatttccgcctcctctggatgggggatgagaggcggggctgatgcatcgcagcagtcctgg

SEQ ID NO: 484349 - DNA, 120 bp, Artificial Sequence
  ENSG00000162144_2 (sequence is synthesized)
accctgacttcggacttggagaagaaacgccgaggaggaacgggagttagggggttagcagcttggcgcgctgggagccggccacccctggtctccggacttcacttcccaggaggcctc

SEQ ID NO: 484350 - DNA, 120 bp, Artificial Sequence
  ENSG00000162144_3 (sequence is synthesized)
gcgcgcgactggaagtgctgcgagcctataagaaggcgaggcggcacccgccgctctgctctggggcggcattgccagccggctgtaggcattcagggcagtgtcttctgcatctcctag

SEQ ID NO: 484351 - DNA, 120 bp, Artificial Sequence
  ENSG00000162144_4 (sequence is synthesized)
gaacctcgggagcggcagctccggcgcctggtagcgagaggcgggttccggagatcccggcctcacttcgtcccactgtggttaggggtgagtcctgcaaatgttaagtgatttgctcaa

SEQ ID NO: 484352 - DNA, 120 bp, Artificial Sequence
  ENSG00000162144_5 (sequence is synthesized)
ggtgcccatttcgcaggaattggagcccaggccagttctctgagcctatcattagggctaaaggagtgcgtgatcagaatggtgtctggacggttctacttgtcctgcctgctgctgggg

SEQ ID NO: 484353 - DNA, 120 bp, Artificial Sequence
  ENSG00000162144_6 (sequence is synthesized)
tccctgggctctatgtgcatcctcttcactatctactggatgcagtactggcgtggtggctttgcctggaatggcagcatctacatgttcaactggcacccagtgcttatggttgctggc

SEQ ID NO: 484354 - DNA, 120 bp, Artificial Sequence
  ENSG00000162144_7 (sequence is synthesized)
atggtggtattctatggaggtgcgtcactggtgtaccgcctgccccagtcgtgggtggggcccaaactgccctggaaactcctccatgcagcgctgcacctgatggccttcgtcctcact

SEQ ID NO: 484355 - DNA, 120 bp, Artificial Sequence
  ENSG00000162144_8 (sequence is synthesized)
gttgtggggctggttgctgtctttacgtttcacaaccatggaaggactgccaacctctactcccttcacagctggctgggcatcaccactgtcttcctcttcgcctgccagtggttcctg

SEQ ID NO: 484356 - DNA, 120 bp, Artificial Sequence
  ENSG00000162144_9 (sequence is synthesized)
ggctttgctgtcttcctcctgccctgggcgtccatgtggctgcgcagcctcctaaaacctatccacgtcttttttggagccgccatcctctctctgtccatcgcatccgtcatttcgggc

SEQ ID NO: 484357 - DNA, 120 bp, Artificial Sequence
  ENSG00000162144_10 (sequence is synthesized)
attaatgagaagcttttcttcagtttgaaaaacaccaccaggccataccacagcctgcccagtgaggcggtctttgccaacagcaccgggatgctggtggtggcctttgggctgctggtg

SEQ ID NO: 484358 - DNA, 120 bp, Artificial Sequence
  ENSG00000162144_11 (sequence is synthesized)
ctctacatccttctggcttcatcttggaagcgcccagagccggggatcctgaccgacagacagcccctgctgcatgatggggagtgaagcagcaggaaggggctcccaagagctcctggt

SEQ ID NO: 484359 - DNA, 120 bp, Artificial Sequence
  ENSG00000162144_12 (sequence is synthesized)
aggcgactttcttccaatgctgggcccagacttcttgcctgggtgctggcctgccctctccggccgcttgctgcctgtctgctttccttggtggctttgcctgggtgctgggcctgccct

SEQ ID NO: 484360 - DNA, 120 bp, Artificial Sequence
  ENSG00000162144_13 (sequence is synthesized)
ctccggccgcttgctgcctgtctgctttccttggtggctttgcctgggtgctgggcctgccttctctggctgcttgctgcctgtctgctttccttggtggctttggcttctgcactcctt

SEQ ID NO: 484361 - DNA, 120 bp, Artificial Sequence
  ENSG00000162144_14 (sequence is synthesized)
ggcgtcagcctctcaggtcctccattcacacgaggtcctcctcgctctggccgctcttgctgctcctgtctgaagaaatcagactgatttcctcttaagactcctagggatgtggtgaag

SEQ ID NO: 484362 - DNA, 120 bp, Artificial Sequence
  ENSG00000162144_15 (sequence is synthesized)
agctgggactcaagtgcagtccacggtgtgaaacatgagggaggtgaggtgtccgtccacttcccccataaaggtgtgcatttcagttaggctgccccgccacagagcaggcttcatctg

SEQ ID NO: 484363 - DNA, 120 bp, Artificial Sequence
  ENSG00000162144_16 (sequence is synthesized)
ctctgccatccagccccatctggatgtgaggtggggtggagacatcatggggtgattgcagaaagggggagtggcggcccacgcagcttctgctgaggagctgaccgctctgagctgttc

SEQ ID NO: 484364 - DNA, 120 bp, Artificial Sequence
  ENSG00000162144_17 (sequence is synthesized)
tgtttcgtattgctgctctgtgtctgcatgtattgtgaccgtgcggctccacctcttccagctgctgctacagctgaggcctggatcccggcctttccctgtgacttacgtgtctgtcac

SEQ ID NO: 484365 - DNA, 120 bp, Artificial Sequence
  ENSG00000162144_18 (sequence is synthesized)
cggcaggcagccctacaaatcctggtgacctgctctcccaagaacagagcctgtccccagatgtcccagtagcgatgagtaacagaggtggctgtggacttcctctacttctccttgctg

SEQ ID NO: 484366 - DNA, 120 bp, Artificial Sequence
  ENSG00000162144_19 (sequence is synthesized)
gatcagggccttcctgcctcccgctgggcaggtctggccttgctctcttggcagggccccagcccctctgaccactctgcagctcaccatgcagctgatgccaaagttgtggtgtccagt

SEQ ID NO: 484367 - DNA, 120 bp, Artificial Sequence
  ENSG00000162144_20 (sequence is synthesized)
gtgcagcagccctgggagccactgccaccttcagaggggttccttgctgagacccacattgcttcacctggccccaccatggctgcttgcctggcccaacctagcgttctgtgccatgct

SEQ ID NO: 484368 - DNA, 120 bp, Artificial Sequence
  ENSG00000162144_21 (sequence is synthesized)
agagcttgagctgttgctcttcttcaggggaggaaatagggtggagagcgggaagggtcttgctcctaagtgttgctgctgtggcttttttgccttctccaaagacgcactgccaggtcc

SEQ ID NO: 484369 - DNA, 120 bp, Artificial Sequence
  ENSG00000162144_22 (sequence is synthesized)
caagcttcagactgctgtgcttagtaagcaagtgagaagcctggggtttggagcccacctactctctggcagcatcagcatcctactcctggcaacatcaggccaacgtccaccccagcc

SEQ ID NO: 484370 - DNA, 120 bp, Artificial Sequence
  ENSG00000162144_23 (sequence is synthesized)
tcacattgccagatgttggcagaagggctaatattgaccgtcttgactggctggagccttcaaagccactgggatgtcctccaggcacctgggtcccatgaccagctccccatctccata

SEQ ID NO: 484371 - DNA, 120 bp, Artificial Sequence
  ENSG00000162144_24 (sequence is synthesized)
ggggtaggcatttcactggtttatgaagctcgagtttcattaaatatgttaagaatcaaagctgtctttgttcaggctgctataacaaaaatataatagcctgggtggcttaaacaacaa

SEQ ID NO: 484372 - DNA, 120 bp, Artificial Sequence
  ENSG00000162144_25 (sequence is synthesized)
gttacctctccagtgaagattagccccatagagcttactctatggggaagaacttttctgactccttcctgtctagggagtgcgtgatcagaatggtgtctggacggttctacttgtcct

SEQ ID NO: 484373 - DNA, 120 bp, Artificial Sequence
  ENSG00000162144_26 (sequence is synthesized)
gaattggagcccaggccagttctctgagcctatcattagggctaaagaggaagagaaagcagaagtctcagggctggagacagctgaggggcatcagctggttcaaggtgtggagtgtgg

SEQ ID NO: 484374 - DNA, 120 bp, Artificial Sequence
  ENSG00000162144_27 (sequence is synthesized)
cggcctcacttcgtcccactgtggttagggggtgtggctacagatcctttcggactgcatttactttttcctcttacaaagaaaaaaaaaacagttgtggaagtagatattgtcagatga

SEQ ID NO: 484375 - DNA, 120 bp, Artificial Sequence
  ENSG00000162144_28 (sequence is synthesized)
gaaagggtgttaaaattctagatcacatatggacccgggaaggttttctcaccctctgttagtgacatcgagtctcccactagacaaaaataggtggaaaaatctctcgagggctcacat

SEQ ID NO: 484376 - DNA, 120 bp, Artificial Sequence
  ENSG00000162144_29 (sequence is synthesized)
atgatgctttttagcctagaaactgcaaacaagctgaatttattattgtgaaaatagaatgagaggtccaagaaacctgcttcccccctccactttttttttaggagacaggtttccctc

SEQ ID NO: 484377 - DNA, 120 bp, Artificial Sequence
  ENSG00000162144_30 (sequence is synthesized)
tttttcaggctagagtgcagtgggatgatcatagcttgctgcagccttgaactcttaggctcaagtgatcctcccacctcagtcccccaagtagctgagagaacaggcatgtgccaccat

SEQ ID NO: 484378 - DNA, 88 bp, Artificial Sequence
  ENSG00000162144_31 (sequence is synthesized)
ggatctggcctcccaaagtgctgacatgagtcaccgtgcccagccctcctccctttttaattggaatctgtttatttatttatttctc

SEQ ID NO: 484379 - DNA, 120 bp, Artificial Sequence
  ENSG00000162144_32 (sequence is synthesized)
ccaaagtgctgacatgagtcaccgtgcccagccctcctccctttttaattggaatctgtttatttatttatttctctctgtggcccaggctagattgcagtggcatgatcatagctcact

SEQ ID NO: 484380 - DNA, 120 bp, Artificial Sequence
  ENSG00000162144_33 (sequence is synthesized)
ctggaattacaggcatgagccaccttgcctgaccactcctccctttttaactggcccttctctcctcccttcatggctgttatcccacaaatcatgggagggtagaagatgccgaggagt

SEQ ID NO: 484381 - DNA, 120 bp, Artificial Sequence
  ENSG00000162144_34 (sequence is synthesized)
tagaagatgccgaggagttgataccagtgccctagcatttcctgttcccttgctgggaagctgtgtaggatcctatcagggttattccctgatgtctgggtgagctcgaggggagaggct

SEQ ID NO: 484382 - DNA, 120 bp, Artificial Sequence
  ENSG00000162144_35 (sequence is synthesized)
ggtgagtaagaggtcaggaagggaggcgggatagggctcaggctggacaaagctgcactttccctctccaaggctggcctttgtaaatgttgggcttggggctatgggggtagggtgggt

SEQ ID NO: 484383 - DNA, 120 bp, Artificial Sequence
  ENSG00000162144_36 (sequence is synthesized)
agggagtggacccgaattcctgtaccagctcggccacttaccttggctaagtcattttcttgttttgggccccagtgtcacagtgtttttgatttgtaagatgagggtttagggcttgta

SEQ ID NO: 484384 - DNA, 120 bp, Artificial Sequence
  ENSG00000162144_37 (sequence is synthesized)
tcctaaatctggtcctcaagattcttgaagtcccccagtccatcggggagggagagcaacaaactgattttctaccccttcatttatttgtagttctaaattataaaagtaacactgcaa

SEQ ID NO: 484385 - DNA, 69 bp, Artificial Sequence
  ENSG00000162144_38 (sequence is synthesized)
cgtagagcctttttctaagactaagggctggatgggaactagcatttcttacccctggatgtgacctgt

SEQ ID NO: 484386 - DNA, 120 bp, Artificial Sequence
  ENSG00000162144_39 (sequence is synthesized)
ggatgggaactagcatttcttacccctggatgtgacctgttttagctcagccgggagaatcctttttcgcaagaagttaataatatcttgtgacgtgaaaattatgtgaaactcagactt

SEQ ID NO: 484387 - DNA, 120 bp, Artificial Sequence
  ENSG00000162144_40 (sequence is synthesized)
cagtgtccataaataaatattactggaacacagccgtggtgctcatttgttaagatgtttatgtggctgctcttgcatgggcagagttgatgacatagttgtgacagaccatgtgctcta

SEQ ID NO: 484388 - DNA, 120 bp, Artificial Sequence
  ENSG00000162144_41 (sequence is synthesized)
caaagcctagaatatttactacctggacctttacagaagagcttgctgactgctcccttagaatggggctctgcaaagtgagcacaccctgggatcacagcccagcctgcccttagaaca

SEQ ID NO: 484389 - DNA, 85 bp, Artificial Sequence
  ENSG00000162144_42 (sequence is synthesized)
agcacaccctgggatcacagcccagcctgcccttagaacaaatgagaggatattttcaagcatttgcattgcagttttcacggag

SEQ ID NO: 484390 - DNA, 89 bp, Artificial Sequence
  ENSG00000162144_43 (sequence is synthesized)
gatgccatcacgcccagctaatttttttttttttttaagagatgagggctcactgttgctcaggctggtctggaactcctgggtattta

SEQ ID NO: 484391 - DNA, 120 bp, Artificial Sequence
  ENSG00000162144_44 (sequence is synthesized)
tttttttttttaagagatgagggctcactgttgctcaggctggtctggaactcctgggtatttatttatagacagagtctatctctgttgcacaggctgcagtgcagtggcgtgatcttg

SEQ ID NO: 484392 - DNA, 80 bp, Artificial Sequence
  ENSG00000162144_45 (sequence is synthesized)
tggtccttcactgcattcttccttttctcctgctttgctctatttcaggaagtaggagggcttatctgtgtattgtgagc

SEQ ID NO: 484393 - DNA, 120 bp, Artificial Sequence
  ENSG00000162144_46 (sequence is synthesized)
tatttcaggaagtaggagggcttatctgtgtattgtgagcagggcaatataactttgcagctctctgtcaggaaagtgtgcccagggtctattctaagtctgtcacagagcagtaaacca

SEQ ID NO: 484394 - DNA, 120 bp, Artificial Sequence
  ENSG00000162144_47 (sequence is synthesized)
gatctcttacatttcactgagggatggagagtgttttaggtgaatatctggtgatctgaaacgtcctctgcccttggaggaattgaggaggcagttctgaggctgggtagcaaatctctg

SEQ ID NO: 484395 - DNA, 120 bp, Artificial Sequence
  ENSG00000162144_48 (sequence is synthesized)
agttaagtagttgagtcacaaatcttctaggaggctggtggcatgattttctcctgccagcttcatggaagctttttccctgcagcccttggaccttcttttcttttttttttttttttt

SEQ ID NO: 484396 - DNA, 67 bp, Artificial Sequence
  ENSG00000162144_49 (sequence is synthesized)
ctcactgcaacaattacaggcgtgcgccaccacacccagcacatttttgcattttcagtagagacgt

SEQ ID NO: 484397 - DNA, 68 bp, Artificial Sequence
  ENSG00000162144_50 (sequence is synthesized)
tgcctcagcctccctggtagctggaattacaggcgtgcgccaccacacccagcacatttttgcatttt

SEQ ID NO: 484398 - DNA, 120 bp, Artificial Sequence
  ENSG00000162144_51 (sequence is synthesized)
attacaggcttgagccaccgagcctggctggaccttcctttctcagagattactgccaacttgggtcaccttgtgcatctttacctaagtaggtggacccctagcatggggagagctggc

SEQ ID NO: 484399 - DNA, 120 bp, Artificial Sequence
  ENSG00000162144_52 (sequence is synthesized)
atggcatggctgagggccactgagaggcctgggcaggcacaaggaacatgagctgcatgttagtagttaggatgaagtgcatgacagcaatgactaagaattctatgtatatatatatat

SEQ ID NO: 484400 - DNA, 75 bp, Artificial Sequence
  ENSG00000162144_53 (sequence is synthesized)
atgacagcaatgactaagaattctatgtatatatatatatttttagatggagtctcgctcactccacctcccggg

SEQ ID NO: 484401 - DNA, 69 bp, Artificial Sequence
  ENSG00000162144_54 (sequence is synthesized)
ttcaagcgattttcctgcctcagcctaccgagtagctagctgggactaagcgggggttcaccatattgg

SEQ ID NO: 484402 - DNA, 73 bp, Artificial Sequence
  ENSG00000162144_55 (sequence is synthesized)
attacaggcataagccatcgcgcccagcgaagaattctaatacttgacttctacagtgtgctacattcatttt

SEQ ID NO: 484403 - DNA, 120 bp, Artificial Sequence
  ENSG00000162144_56 (sequence is synthesized)
attctaatacttgacttctacagtgtgctacattcattttctcacttgatctgacaacctgtggtcaaggaagcagcgtgggccttgaagctaaacacacaggatttggaactccccacc

SEQ ID NO: 484404 - DNA, 120 bp, Artificial Sequence
  ENSG00000162144_57 (sequence is synthesized)
cactctcactgggtcctcatgctaattacttatctctctcagccttagtttcctcacggaataatatgcctcccagggttaagaggagtaaatgggatcttgtgtgtaaggctctggtgc

SEQ ID NO: 484405 - DNA, 120 bp, Artificial Sequence
  ENSG00000162144_58 (sequence is synthesized)
tcacaggactcacccaagggaggagagattttggggttgggtccactcctgatctggaaggtaacagaattgatctttctttaggttgaaattggtaagtcagcagatatttattgagca

SEQ ID NO: 484406 - DNA, 120 bp, Artificial Sequence
  ENSG00000162144_59 (sequence is synthesized)
tcagtttgatttagcacctgctgtgtgtcagaaacagtactaagcaccttacatttaatcctgtcaaccaccctacatcattggtattgattggtattgttgtcattgccattttctttt

SEQ ID NO: 484407 - DNA, 90 bp, Artificial Sequence
  ENSG00000162144_60 (sequence is synthesized)
gctgggcctacaagaatttttagtagggacggggtttcaccatgctgggcaggctggtctcggactcctgacctcatgatctgcccgcct

SEQ ID NO: 484408 - DNA, 120 bp, Artificial Sequence
  ENSG00000162144_61 (sequence is synthesized)
caggcatgagccactgcacccggccgtcattgccattttcaattgagggaacagattctgcaataggactgttcaggtagaaataaaaataaaaaaaatgagggaacagaggggttacgt

SEQ ID NO: 484409 - DNA, 120 bp, Artificial Sequence
  ENSG00000162144_62 (sequence is synthesized)
aaaaaatgagggaacagaggggttacgtaacttacccgagggcacacagccagtaagtggcagagctgggactcagattaggcagtctgactctagagccttgcatgcctgaccactact

SEQ ID NO: 484410 - DNA, 120 bp, Artificial Sequence
  ENSG00000162144_63 (sequence is synthesized)
gtccgttcttttgaggcaatggggtgtagtgaaaagcaactaggacttaaggtcagaccttggtttcgatcttggctgtgccatttactagttatgcaactttgggcaagttaatttcat

SEQ ID NO: 484411 - DNA, 120 bp, Artificial Sequence
  ENSG00000162144_64 (sequence is synthesized)
ccatttactagttatgcaactttgggcaagttaatttcattgctttgagcttcagtttcctcatgggtaaaaggattattacagctgggtgccgtggcatgcacctgtagtcccagctac

SEQ ID NO: 484412 - DNA, 120 bp, Artificial Sequence
  ENSG00000162144_65 (sequence is synthesized)
aggaagaccctctctctctccttttatccccccagccaagagatagcatctcactctgttgcctaggttggagagcaatggtgtgaccatagctcactgcagcatcaaactcctgcactc

SEQ ID NO: 484413 - DNA, 120 bp, Artificial Sequence
  ENSG00000162144_66 (sequence is synthesized)
tcaaactcctgcactcaagcgatcttcccaatgtagcctcctaagtaagctaggactacaggcatggaccacctcacctagctaagttttatttttgtagagacaggatctcactatgtt

SEQ ID NO: 484414 - DNA, 82 bp, Artificial Sequence
  ENSG00000162144_67 (sequence is synthesized)
caaagtgctgggattacaagagtgagccgctgcacctggctcattatacaaatatttgcagggacttagaaagggtgttaaa

SEQ ID NO: 484415 - DNA, 120 bp, Artificial Sequence
  ENSG00000162144_68 (sequence is synthesized)
agggtgggacagggccaggtctagagaaggatctcccacgaaaggctggggccttgacaagaagacttaccctgtggcacagcaggaaaccaagtaacttgagggtggagttagggtggc

SEQ ID NO: 484416 - DNA, 120 bp, Artificial Sequence
  ENSG00000162144_69 (sequence is synthesized)
tgatggggagcactggtcccaaaccagcgcatcccagtgaaatgctgggactccccagtctgtccattgggagacagaatttcccccccaaatcactgtggttctgtggggtgaagtgtg

SEQ ID NO: 484417 - DNA, 120 bp, Artificial Sequence
  ENSG00000162144_70 (sequence is synthesized)
gccttatcttcttccccaaggaagggcttgactgtgacaagggtgtgtgatttctcctttaccagcctgggggctagtctagtgggatgggtgcctggtgaccagctgagtgctcagagc

SEQ ID NO: 484418 - DNA, 120 bp, Artificial Sequence
  ENSG00000162144_71 (sequence is synthesized)
aggtcttgatgggatgtagggagacggggtgtgtaccaggctcagggactttggggcttccctgagggatttggtggcttggatggggaccaccctgcaggctgggggtctgtctgaaca

SEQ ID NO: 484419 - DNA, 120 bp, Artificial Sequence
  ENSG00000162144_72 (sequence is synthesized)
gcttgggcctggtgtgactcctgcatcatgtcattaactcctgggcatctgcctctctttccagcccctgctgcatgatggggagtgaagcagcaggaaggggctcccaagagctcctgg

SEQ ID NO: 484420 - DNA, 120 bp, Artificial Sequence
  ENSG00000162144_73 (sequence is synthesized)
attgaggcctcgggcggggggtggtgcccaggctgatgcaggggaactgaagcaaaaagattccatcccacaggccaagagctaaatcagtgttacctcctttagccagagaactgggtg

SEQ ID NO: 484421 - DNA, 120 bp, Artificial Sequence
  ENSG00000162144_74 (sequence is synthesized)
aattcttgaagtggtttccatattctgatctcaggcctgtgcgagtgaagagttttatgagcaaggactggaaggaaccagagacaaacaaggtggttgggtttgctgggagtgggatgg

SEQ ID NO: 484422 - DNA, 120 bp, Artificial Sequence
  ENSG00000162144_75 (sequence is synthesized)
tagctaagcatgtcatttactgttcttgttgcttgggtaataggccacaatgaggaagctagcacggtagtgggcaatgccaggtgggaaggtttgagttgtgaaagaagagccagggag

SEQ ID NO: 484423 - DNA, 120 bp, Artificial Sequence
  ENSG00000162144_76 (sequence is synthesized)
cagagatggggaggaggcactgatggggtgggatgtgctttggtcacacatagcacagtcgggtgtgtcctcccttttgtccacagtggttcctgggctttgctgtcttcctcctgccct

SEQ ID NO: 484424 - DNA, 120 bp, Artificial Sequence
  ENSG00000162148_0 (sequence is synthesized)
gtttctcctgcttggcctcctccaggagggctggcttctctgcagagctctgcttcctgcagcctctccccgacctcagagcctctgcagaggaaaggccccctggggccctgccccaca

SEQ ID NO: 484425 - DNA, 120 bp, Artificial Sequence
  ENSG00000162148_1 (sequence is synthesized)
gcatcatgatggggaaactccccctgggggtcgtctccccttatgtgaagatgagttcggggggctacacggaccccctgaaattctacgccaccagctactgcaccgcctacggtcggg

SEQ ID NO: 484426 - DNA, 120 bp, Artificial Sequence
  ENSG00000162148_2 (sequence is synthesized)
aggatttcaagccccgtgtgggcagtcacgtaggcaccggctacaaatcaaatttccagcccgtggtctcatgccaagccagtctggaggccttagacaacccggccaggggggaacaag

SEQ ID NO: 484427 - DNA, 120 bp, Artificial Sequence
  ENSG00000162148_3 (sequence is synthesized)
cccaggaccatttccagtctgtggccagccagagctaccgccccctggaggtgcctgacggcaagcatcccctgccctggagcatgcgccagaccagctcaggctatgggcgggagaagc

SEQ ID NO: 484428 - DNA, 120 bp, Artificial Sequence
  ENSG00000162148_4 (sequence is synthesized)
ccagtgcgggtccccccaccaaggaggtccggaaggtccatttcgacacccaggagcacgggcctcaggccatcacggggctggagcccagggaagtgcctctgctccaccagcagcagg

SEQ ID NO: 484429 - DNA, 120 bp, Artificial Sequence
  ENSG00000162148_5 (sequence is synthesized)
gccaggacccgctggagcgggagaacttccgacatggcccacgcttcatgacgtcggagtacaattccaagtatctcagggaccctctagaccagccagatttcttgcagaagaaatcga

SEQ ID NO: 484430 - DNA, 120 bp, Artificial Sequence
  ENSG00000162148_6 (sequence is synthesized)
gccctcctcccaggccagagtgtcaccaagtcagacttcctccccaagactcacctacatggagatgagttcctacctgtgttggccagaggctccaagcgggaaacagccttcagccga

SEQ ID NO: 484431 - DNA, 120 bp, Artificial Sequence
  ENSG00000162148_7 (sequence is synthesized)
gggaatgaaaggattctgaaccccagagtgccccctccctgcccagaacccagcagcgtgagtcaccagcagtttcagccacttcatcggatgcaacagacaaacgttgccctgcttggc

SEQ ID NO: 484432 - DNA, 120 bp, Artificial Sequence
  ENSG00000162148_8 (sequence is synthesized)
cgggagactgtggggaaaaaggagcccacagggttcagccttaacaaccccatgtatgtccggagcccctgtgatcctgacagggatcagcgatacctgaccacctacaaccaagggtac

SEQ ID NO: 484433 - DNA, 120 bp, Artificial Sequence
  ENSG00000162148_9 (sequence is synthesized)
tttgagaacatccccaagggtctagaccaggaaggctggactcgaggtggcatccagccccagatgccaggaggctacgccctcagccagccggtcagctgcatggaggccacccccaac

SEQ ID NO: 484434 - DNA, 120 bp, Artificial Sequence
  ENSG00000162148_10 (sequence is synthesized)
cccatggagagcctgcggcacctgcatccccacgtgggaagaaccctgacctcagctgaccccttctaccagaacacacctcacagcagccgctgcgtggcacacagctgagccctgagc

SEQ ID NO: 484435 - DNA, 120 bp, Artificial Sequence
  ENSG00000162148_11 (sequence is synthesized)
ccttggtttgtcaatcctaggggacaggagccaggctactgtctgtacccccactccatcccccaggggaacacccctgcccagctactttcctaatgaaataaagagcattgaagcaga

SEQ ID NO: 484436 - DNA, 120 bp, Artificial Sequence
  ENSG00000162148_12 (sequence is synthesized)
gaggagacatgcatgtggctgcagccagttagcgagagctgttaggtaatgcgcaaagagaaagggatcgcgagggctgcagtgcgcacgggtcggatttgaaatcggtggccttgagca

SEQ ID NO: 484437 - DNA, 120 bp, Artificial Sequence
  ENSG00000162148_13 (sequence is synthesized)
gccgtttgttgtcctctggcctaaaccctgaggctcagaggggaggagcagagcttccgcccgcacagcagactcagcacagtggccgctccagttcccacggaggtgggggaggggcaa

SEQ ID NO: 484438 - DNA, 120 bp, Artificial Sequence
  ENSG00000162148_14 (sequence is synthesized)
cgatgttctgaccccttcttaggcaaacacctcctcctgtggctctggcagagaccagctccagtcctgtctgctgggtccttccagcctgtcgtgtcctgttgtgtcctgagctcctgc

SEQ ID NO: 484439 - DNA, 120 bp, Artificial Sequence
  ENSG00000162148_15 (sequence is synthesized)
tggctgtcaggcacgcttgctggtgcttcctggtgcgcgcagagccccgggattgtcatcactgattcctgcattgatctgtctgcaccccctcttcataagttcaagggtgggaccccc

SEQ ID NO: 484440 - DNA, 120 bp, Artificial Sequence
  ENSG00000162148_16 (sequence is synthesized)
ttcttacttgtctttgcaccctctggacctggctgtgctcagtgaaatggaaggaaatggaaatgaaatggaaggaaagttaagtgcctagagaagtggatgagacggggtccccacccc

SEQ ID NO: 484441 - DNA, 120 bp, Artificial Sequence
  ENSG00000162148_17 (sequence is synthesized)
catcactgaaactgtcctttaacactccaaagagtgtttcagcgtcaggtggaggggagggcaggctttttgagtaagagttcccccagtggacgtgggcttagggagagctagacgagg

SEQ ID NO: 484442 - DNA, 120 bp, Artificial Sequence
  ENSG00000162148_18 (sequence is synthesized)
acagcatgagcaaaggtggggaggctgggcgatctgagggtcgatggagaagggcagcaggggttgcagaggtgggcagagtccagcttccagccaaggacccctcctctcctccaggta

SEQ ID NO: 484443 - DNA, 120 bp, Artificial Sequence
  ENSG00000162174_0 (sequence is synthesized)
gaccagagcggttgcgggctgagcggtttcgagccggcgtcggggagcggcggtaccgggcggctgcggggctggctcgacccagcttgaggtctcggcgtccgcgtcctgcggtgccct

SEQ ID NO: 484444 - DNA, 120 bp, Artificial Sequence
  ENSG00000162174_1 (sequence is synthesized)
gggatccgccgacatgaatcccatcgtagtggtccacggcggcggagccggtcccatctccaaggatcggaaggagcgagtgcaccagggcatggtcagagccgccaccgtgggctacgg

SEQ ID NO: 484445 - DNA, 120 bp, Artificial Sequence
  ENSG00000162174_2 (sequence is synthesized)
catcctccgggagggcgggagcgccgtggatgccgtagagggagctgtcgtcgccctggaagacgatcccgagttcaacgcaggttgtgggtctgtcttgaacacaaatggtgaggttga

SEQ ID NO: 484446 - DNA, 120 bp, Artificial Sequence
  ENSG00000162174_3 (sequence is synthesized)
aatggatgctagtatcatggatggaaaagacctgtctgcaggagcagtgtccgcagtccagtgtatagcaaatcccattaaacttgctcggcttgtcatggaaaagacacctcattgctt

SEQ ID NO: 484447 - DNA, 120 bp, Artificial Sequence
  ENSG00000162174_4 (sequence is synthesized)
tctgactgaccaaggcgcagcgcagtttgcagcagctatgggggttccagagattcctggagaaaaactggtgacagagagaaacaaaaagcgcctggaaaaagagaagcatgaaaaagg

SEQ ID NO: 484448 - DNA, 120 bp, Artificial Sequence
  ENSG00000162174_5 (sequence is synthesized)
tgctcagaaaacagattgtcaaaaaaacttgggaaccgtgggtgctgttgccttggactgcaaagggaatgtagcctacgcaacctccacaggcggtatcgttaataaaatggtcggccg

SEQ ID NO: 484449 - DNA, 120 bp, Artificial Sequence
  ENSG00000162174_6 (sequence is synthesized)
cgttggggactcaccgtgtctaggagctggaggttatgccgacaatgacatcggagccgtctcaaccacagggcatggggaaagcatcctgaaggtgaacctggctagactcaccctgtt

SEQ ID NO: 484450 - DNA, 120 bp, Artificial Sequence
  ENSG00000162174_7 (sequence is synthesized)
ccacatagaacaaggaaagacggtagaagaggctgcggacctatcgttgggttatatgaagtcaagggttaaaggtttaggtggcctcatcgtggttagcaaaacaggagactgggtggc

SEQ ID NO: 484451 - DNA, 120 bp, Artificial Sequence
  ENSG00000162174_8 (sequence is synthesized)
aaagtggacctccacctccatgccctgggcagccgccaaggacggcaagctgcacttcggaattgatcctgacgatactactatcaccgaccttccctaagccgctggaagattgtattc

SEQ ID NO: 484452 - DNA, 120 bp, Artificial Sequence
  ENSG00000162174_9 (sequence is synthesized)
gtacagtctcctcatgagacatagcctaatcaattagatctagaattggaaaaattgtcccgtctgtcacttgttttgttgccttaataagcatctgaatgtttggttgtggggcgggtt

SEQ ID NO: 484453 - DNA, 120 bp, Artificial Sequence
  ENSG00000162174_10 (sequence is synthesized)
ggttgtggggcgggttctgaagcgatgagagaaatgcccgtattaggaggattacttgagcccaggaggtcaaagctgaggtgagccatgattactccactgcactccagcctgggcaac

SEQ ID NO: 484454 - DNA, 120 bp, Artificial Sequence
  ENSG00000162174_11 (sequence is synthesized)
aaaaaaaaaaagaaaagggaaaaaagaaagaaagcagcagcatgatcctgacatgacagatgtgggagacccacagcctgcagacactgtgggctggaaggtgggaagggaggggccggt

SEQ ID NO: 484455 - DNA, 120 bp, Artificial Sequence
  ENSG00000162174_12 (sequence is synthesized)
gggccggtggaggtggagctgtttgaaagtgacacagcagcagtagaagcagtggtgggcgaagcccaggtgaccctcagaacgttgcacaagaacatcagggaaaagaaccagaatcct

SEQ ID NO: 484456 - DNA, 120 bp, Artificial Sequence
  ENSG00000162174_13 (sequence is synthesized)
ttaaggaaaatgttcttcatgtatgagagactaaagtgatttttctaagaaagttcagcccttctctgacttacctggacatttctagatacttccaaaggaccctctgggaatccatag

SEQ ID NO: 484457 - DNA, 120 bp, Artificial Sequence
  ENSG00000162174_14 (sequence is synthesized)
cttcctaatctggagatgggaggtcataagggagacgctgtggggttccttgaagtttcttgggttcacagaggagccccctcacttggtgttctcccgtgagccagcctccacctgcca

SEQ ID NO: 484458 - DNA, 120 bp, Artificial Sequence
  ENSG00000162174_15 (sequence is synthesized)
aagacactctggtcctcgtatagtgagtaatggggctcagggcctctccaacaacagagaggagctgatgctgtagggctgaccccgtgacttcctgagtcctcaccctgtccagtgctt

SEQ ID NO: 484459 - DNA, 120 bp, Artificial Sequence
  ENSG00000162174_16 (sequence is synthesized)
tgagattcttcccacctccccatcctcaccagccggatcgggcgctgtgcagtgtggtcagcatggtgaagaaagtcatttcctcggtgggcagtattcctctttatctctcattacact

SEQ ID NO: 484460 - DNA, 120 bp, Artificial Sequence
  ENSG00000162174_17 (sequence is synthesized)
ggaaatgttatttctgctgtatcatccgtgctcaacgttttagtctgtcaggctcaccttctctctggaaagaatttgcttaacttgacattccatgtgccgctaataaaatatattttg

SEQ ID NO: 484461 - DNA, 120 bp, Artificial Sequence
  ENSG00000162174_18 (sequence is synthesized)
attcctggagaaaaactggtgacagagagaaacaaaaagcgcctggaaaaagagaagcatgaaaaaggtgctcagaaaacagattgtcaaaagttcttccgagggcacaagcttaccaca

SEQ ID NO: 484462 - DNA, 120 bp, Artificial Sequence
  ENSG00000162174_19 (sequence is synthesized)
agactgactgtagacgtactcgggaatctctcatcaacttgttctcaatgaccacgctctagctcaccttcaccctagagaaaagcacccacgttgggcaccagatgaaggggtggccag

SEQ ID NO: 484463 - DNA, 85 bp, Artificial Sequence
  ENSG00000162174_20 (sequence is synthesized)
aaaagcacccacgttgggcaccagatgaaggggtggccagcccctctacacctgtgggcgtttctcaggctgggtgcggtgggtc

SEQ ID NO: 484464 - DNA, 120 bp, Artificial Sequence
  ENSG00000162174_21 (sequence is synthesized)
ggctgaggcaggagagacagagacaacgtatagagaaaaaaaagtgggcccaggggaccggtgctcagcatacggaggacccccaccggcaacagtctctgagttccctcagtatttact

SEQ ID NO: 484465 - DNA, 120 bp, Artificial Sequence
  ENSG00000162174_22 (sequence is synthesized)
accggcaacagtctctgagttccctcagtatttactgatcattatctctaccatctggagagggggatgtggcaggacaataagttaatagagaggagagggtcagcaggaaaacatgtg

SEQ ID NO: 484466 - DNA, 82 bp, Artificial Sequence
  ENSG00000162174_23 (sequence is synthesized)
ccagccctaaggctgttttctcctatctcagtaaatagaacatacaatcgggttttaaacccagacattctattgacaactg

SEQ ID NO: 484467 - DNA, 74 bp, Artificial Sequence
  ENSG00000162174_24 (sequence is synthesized)
caaagaggccttcctcttttactaatgctcctcagcacagaccctttacgggtggggtgtcgggctgggggaca

SEQ ID NO: 484468 - DNA, 70 bp, Artificial Sequence
  ENSG00000162174_25 (sequence is synthesized)
gaggtccctgcagccttccgcagtgtattgtgtccctgggtacttgaaattagagaatggtagcctgcat

SEQ ID NO: 484469 - DNA, 74 bp, Artificial Sequence
  ENSG00000162174_26 (sequence is synthesized)
ccttcaagcacttttttaacaaagcacatctctgcgacacagggttggggtagggttacagattaacagcatct

SEQ ID NO: 484470 - DNA, 120 bp, Artificial Sequence
  ENSG00000162174_27 (sequence is synthesized)
acttctttctacatagacacagtaacagcctgatctctttcgtttccccacaaatccatatagtatttgagtgtgataatgtaaaaatcagtattcatttctaaatctaagtactgcttt

SEQ ID NO: 484471 - DNA, 120 bp, Artificial Sequence
  ENSG00000162174_28 (sequence is synthesized)
cagtattcatttctaaatctaagtactgctttgagaattttgttggtaattccagttgctgctgcttcagcagaaggaagcttctccaaattaaaataaattaaaaacttgctaaaaact

SEQ ID NO: 484472 - DNA, 120 bp, Artificial Sequence
  ENSG00000162174_29 (sequence is synthesized)
gttccctttctgcttttggtgcagctccaggatgtctgggagtgacaatggggttggaaggggttgttcggggtgctgccttgagagggtgtttgtatctggcgccactgtttttactag

SEQ ID NO: 484473 - DNA, 120 bp, Artificial Sequence
  ENSG00000162174_30 (sequence is synthesized)
attgcatgcctttttggaacaacttggggagagaagtggagacagggatgctaacgttgcccccagtctaccctgtcgtgattctgtcttctctttagccacagtttcaggatctgcaga

SEQ ID NO: 484474 - DNA, 120 bp, Artificial Sequence
  ENSG00000162174_31 (sequence is synthesized)
cttacttgagtaagacttactcccgagacatgggctctgattagcaatctgagaaatctgagactgcagttgttagatctgagcagcatgaaagtgacatacttctacagacacattata

SEQ ID NO: 484475 - DNA, 120 bp, Artificial Sequence
  ENSG00000162174_32 (sequence is synthesized)
gattgagatgttgtttacattaacggggaagcacgccatctcattcccaggagtgggtgagaggcagggctggggggctgtatgtttcactccgtgcagactttcacacttgtcatgcag

SEQ ID NO: 484476 - DNA, 120 bp, Artificial Sequence
  ENSG00000162174_33 (sequence is synthesized)
ttcagaataaatagaacctacatagtgttagggaatctaatgagctttggggtgaaactaagtatgtaaaaaagaaacaatatttaatttttctacctgtgctgaaaagagtcaaacgct

SEQ ID NO: 484477 - DNA, 120 bp, Artificial Sequence
  ENSG00000162188_0 (sequence is synthesized)
cttctagcatccttcatccttcaggtaccagccatccagacagtgcttgagctgcagaaactgagaccagacctctggcctggccctccccaggggcctcctttcgtatagtcactgctt

SEQ ID NO: 484478 - DNA, 120 bp, Artificial Sequence
  ENSG00000162188_1 (sequence is synthesized)
ctgcatcagatactttcagctgcaactccctactgggtggggcacccatttcaggcagaaggttttggtaccctccactgaccctacacccagggctgctactgccgcttgtggcttcag

SEQ ID NO: 484479 - DNA, 120 bp, Artificial Sequence
  ENSG00000162188_2 (sequence is synthesized)
gatgaaaggtgagaccccggtgaacagcactatgagtattgggcaagcacgcaagatggtggaacagcttaagattgaagccagcttgtgtcggataaaggtgtccaaggcagcagcaga

SEQ ID NO: 484480 - DNA, 120 bp, Artificial Sequence
  ENSG00000162188_3 (sequence is synthesized)
cgcctgtgaggatcccctcatcacccctgtgcccacttcggagaaccccttccgggagaagaagttcttctgtgctctcctctgagctcccctgtcccttctcacaactcctcccttttc

SEQ ID NO: 484481 - DNA, 120 bp, Artificial Sequence
  ENSG00000162188_4 (sequence is synthesized)
cctctcctgggcccttccttaggtcagtaattgttgtgagccccttaggctccttgcatcccatccctaacccttgcctgaccatgtgaggttatctgaagcacaaggcccaccctcacc

SEQ ID NO: 484482 - DNA, 120 bp, Artificial Sequence
  ENSG00000162188_5 (sequence is synthesized)
tatctgtcgaccccatttcctaccacctttgtggccgaccccaagcaccccagagatatgaggcaccctttgctccacccacagcagggccccgtcagactctgccagcgcgtcctgccc

SEQ ID NO: 484483 - DNA, 120 bp, Artificial Sequence
  ENSG00000162188_6 (sequence is synthesized)
gcttccctcggtgacctgctcagacaatggagagggatgggccaggttcttgctctcagtctcacctggagctactgggagggtaaagccatttgaagaataaagtcatccagagcctca

SEQ ID NO: 484484 - DNA, 120 bp, Artificial Sequence
  ENSG00000162191_0 (sequence is synthesized)
cgcttcccctcggctttcttctcgtcggtgttcccggctgctatagagccgggtgagagagcgagcgcccgtcggcgggtgtcgagggcgggttgcctcgcgctgacccttcccgccctc

SEQ ID NO: 484485 - DNA, 120 bp, Artificial Sequence
  ENSG00000162191_1 (sequence is synthesized)
cttctcgtcacacaccaggtccccgcggaagccgcggtgtcggcgccatggcggagctgacggctcttgagagtctcatcgagatgggcttccccaggggacgcgcggagaaggctctgg

SEQ ID NO: 484486 - DNA, 120 bp, Artificial Sequence
  ENSG00000162191_2 (sequence is synthesized)
ccctcacagggaaccagggcatcgaggctgcgatggactggctgatggagcacgaagacgaccccgatgtggacgagcctttagagactccccttggacatatcctgggacgggagccca

SEQ ID NO: 484487 - DNA, 120 bp, Artificial Sequence
  ENSG00000162191_3 (sequence is synthesized)
cttcctcagagcaaggcggccttgaaggatctggttctgctgccggagaaggcaaacccgctttgagtgaagaggaaagacaggaacaaactaagaggatgttggagctggtggcccaga

SEQ ID NO: 484488 - DNA, 120 bp, Artificial Sequence
  ENSG00000162191_4 (sequence is synthesized)
agagttgtcagcagcacgacagcggctacaggaagatgagatgcgccgggctgctgaggagaggcggagggaaaaggccgaggagttagcagccagacaaagagttagagaaaagatcga

SEQ ID NO: 484489 - DNA, 120 bp, Artificial Sequence
  ENSG00000162191_5 (sequence is synthesized)
gagggacaaagcagagagagccaagaagtatggtggcagtgtgggctctcagccacccccagtggcaccagagccaggtcctgttccctcttctcccagccaggagcctcccaccaagcg

SEQ ID NO: 484490 - DNA, 120 bp, Artificial Sequence
  ENSG00000162191_6 (sequence is synthesized)
ggagtatgaccagtgtcgcatacaggtcaggctgccagatgggacctcactgacccagacgttccgggcccgggaacagctggcagctgtgaggctctatgtggagctccaccgtgggga

SEQ ID NO: 484491 - DNA, 120 bp, Artificial Sequence
  ENSG00000162191_7 (sequence is synthesized)
ggaactaggtgggggccaggaccctgtgcaattgctcagtggcttccccagacgggccttctcagaagctgacatggagcggcctctgcaggagctgggactcgtgccttctgctgttct

SEQ ID NO: 484492 - DNA, 120 bp, Artificial Sequence
  ENSG00000162191_8 (sequence is synthesized)
cattgtggccaagaaatgtcccagctgagggcctttgtcccattgtccctctgtgaccccttcatctttgataaagcactgacatctccttcctaataaatagaccctgagttctgtaca

SEQ ID NO: 484493 - DNA, 120 bp, Artificial Sequence
  ENSG00000162191_9 (sequence is synthesized)
tggtcaaagaaccttgacctttccacatttcctctttcttggcattttcttttcctttaatctactttgggatatatgtcgcctaattttgtttattgtaaactttacaccttcccactc

SEQ ID NO: 484494 - DNA, 120 bp, Artificial Sequence
  ENSG00000162191_10 (sequence is synthesized)
tgtccatttctcttgaactgttttccctcggcaacacaggatgttggagctggtggcccagaagcagcgggagcgtgaagaaagagaggaacgggaggcattggaacgggaacggcagcg

SEQ ID NO: 484495 - DNA, 120 bp, Artificial Sequence
  ENSG00000162191_11 (sequence is synthesized)
aaagcagagagagccaagaaggtaggtgactgagaagacgccacgggtaatggagtgggcaggttagtaaatcttttccagcttcagagggaaagcatgggcttatatgatctgtttcac

SEQ ID NO: 484496 - DNA, 120 bp, Artificial Sequence
  ENSG00000162191_12 (sequence is synthesized)
aaagagaaggggctttgtgaacatggtgcaaggccaggaattttgggagcaaaaaccaagtatccttgtggttcaagcctgttttcttccatcttcaggactcgtgccttctgctgttct

SEQ ID NO: 484497 - DNA, 120 bp, Artificial Sequence
  ENSG00000162191_13 (sequence is synthesized)
gccacgggtaatggagtgggcagtatggtggcagtgtgggctctcagccacccccagtggcaccagagccaggtcctgttccctcttctcccagccaggagcctcccaccaagcgggagt

SEQ ID NO: 484498 - DNA, 120 bp, Artificial Sequence
  ENSG00000162191_14 (sequence is synthesized)
tgattctaattcttatcttcctcttgggacccctttgttccgtgttaaggtgcccagctcagagcttttttcagttaacgtgccctttgccaaatctctcccttctttgtaaatgacttt

SEQ ID NO: 484499 - DNA, 120 bp, Artificial Sequence
  ENSG00000162191_15 (sequence is synthesized)
tgaaatcctatctctactcttgggaaaggtatcaaatttcacctgccccagttgtatttaaacccatacctctctcttactcagcagttacccttttacttgttcatgtttttatttggt

SEQ ID NO: 484500 - DNA, 120 bp, Artificial Sequence
  ENSG00000162191_16 (sequence is synthesized)
ttattatgtagctatctggtgatgtggtatttatccagattcttttgtataatcttatccttgtctttcttaggttgtgagggagctgggagtctctcatccgcacttagtaaagcggag

SEQ ID NO: 484501 - DNA, 120 bp, Artificial Sequence
  ENSG00000162191_17 (sequence is synthesized)
cctaagtggctgttcatttggtgctttaaatagtagttgtgctggttcaatctaagaagaagggggcccagctttagctcttttccttacttgggcacctcattcagttttgatgcccac

SEQ ID NO: 484502 - DNA, 120 bp, Artificial Sequence
  ENSG00000162191_18 (sequence is synthesized)
ctgggcaggggaaatgatggatagcagatgagaaagaaatcaagatttgctttgttgatgtctgacctaatttcttcttgtctacatttcagacaaagagttagagaaaagatcgagagg

SEQ ID NO: 484503 - DNA, 120 bp, Artificial Sequence
  ENSG00000162191_19 (sequence is synthesized)
taccgattgtttgtttgtaggatctggttctgctgccggagaaggcaaacccgctttgagtgaagaggaaagacaggaacaaactaagaggatgttggagctggtggcccagaagcagcg

SEQ ID NO: 484504 - DNA, 120 bp, Artificial Sequence
  ENSG00000162194_0 (sequence is synthesized)
cagcattttccgcaaggaatccatggccgcctgcacagccagcggagcgcccacgggagctccccgcagccgcaagctgttgccgcgcggtctcactaccccttggcgcaggctagagcg

SEQ ID NO: 484505 - DNA, 120 bp, Artificial Sequence
  ENSG00000162194_1 (sequence is synthesized)
ccctatagcagaaaccatagataagcggccggctagagaggacctgctcgaggaaacgtttggaatccggagcgcttggatctcagaatcaccaccatggcccttgtgccagggagaagc

SEQ ID NO: 484506 - DNA, 120 bp, Artificial Sequence
  ENSG00000162194_2 (sequence is synthesized)
aaggaggatgggctttggactagaaatagcccaggctcctcccagcatccagaaagtcccaggctgcccaaccctctctgggacagaggaaaaattggcaaggttgaaggtcaccagcac

SEQ ID NO: 484507 - DNA, 120 bp, Artificial Sequence
  ENSG00000162194_3 (sequence is synthesized)
attcaggatttctctcaaaagtcccatctgccgtctattgtggtggaatccagtgaggtgaatgaagagagtggggatctccatttgccccatgaggagctgctgctgctcactgatggt

SEQ ID NO: 484508 - DNA, 120 bp, Artificial Sequence
  ENSG00000162194_4 (sequence is synthesized)
gaggaagaggatgctgaggccttcttccaagaccaaagtgaagagccaggctgggcttggagcccacaggaccctagaagtcctttaagaacatttaacgctggactcagctgggggcag

SEQ ID NO: 484509 - DNA, 120 bp, Artificial Sequence
  ENSG00000162194_5 (sequence is synthesized)
gaccaggatgaagaagatgcttgttggattcttgaggacacagcatgtctggaagccaccaaccactgtcccttctgggactcaacaggctcccgtgtttgtagaagtggctttgtggaa

SEQ ID NO: 484510 - DNA, 120 bp, Artificial Sequence
  ENSG00000162194_6 (sequence is synthesized)
tattcccatctcctgcctcctaatagctttgagggagctgaagaagaagctgttcaaacgccggcgggtgttgaatcgggagcggcgtctgaggcaccgggtggtcggggctgtgataga

SEQ ID NO: 484511 - DNA, 120 bp, Artificial Sequence
  ENSG00000162194_7 (sequence is synthesized)
ccaagggctgatcacgcggcaccacctcaagaagcgggcgtccagtgcacgtgccaacattacactgtcagggaagaagcgcagaaaactcctccagcagatccggcttgcccagaaaga

SEQ ID NO: 484512 - DNA, 120 bp, Artificial Sequence
  ENSG00000162194_8 (sequence is synthesized)
gaagacagccatggaagtggaagccccttcaaagccagccaggactagtgaaccacagctcaaaaggcaaaagaagacaaaagccccccaggatgtagaaatgaaggaccttgaagatga

SEQ ID NO: 484513 - DNA, 120 bp, Artificial Sequence
  ENSG00000162194_9 (sequence is synthesized)
gagctaaacctcttccactagaagattctcaactggagccagccttcagactcagtggttgtttcagaggactttgacaaaagcaaggccccttttcactctccagatttcctcctacct

SEQ ID NO: 484514 - DNA, 120 bp, Artificial Sequence
  ENSG00000162194_10 (sequence is synthesized)
aatggcctactgacctcccctagagggatgtctttgggagggaagaaggtacagaagaaagattggagaagggcctctctagcagtcaactccatttgtaataaagccctagcactctga

SEQ ID NO: 484515 - DNA, 120 bp, Artificial Sequence
  ENSG00000162194_11 (sequence is synthesized)
tccaagaagtgctggcaccaagggctgagcgcggggaccctgtgtcctcaattccggggtgggattgctagggggagagtgcgtgtcttcatggttgccgtgggttttatgattgcccat

SEQ ID NO: 484516 - DNA, 120 bp, Artificial Sequence
  ENSG00000162194_12 (sequence is synthesized)
ttttctgtcttccgacgtttcccgatcagtagaggcccgagctgtgctctgtggtttcctgcagtcacccgcgcgttttcaacacagcgcatggagggcatctacacacatacacatccc

SEQ ID NO: 484517 - DNA, 120 bp, Artificial Sequence
  ENSG00000162194_13 (sequence is synthesized)
tctccatcccctcaactctggaacaaacactcaaagtcaagtatactggttggagaaatggcgtataatcgcttagcacagtcggtgcttaaggggccaggctccaaagaagattaaagg

SEQ ID NO: 484518 - DNA, 120 bp, Artificial Sequence
  ENSG00000162194_14 (sequence is synthesized)
ctctggaacaaacactcaaagtcaagtatactggttggagaaatgggtaatagttacttatctttaacatttattttacaaacaacctattccttttctcgtcatggtacacacttggta

SEQ ID NO: 484519 - DNA, 120 bp, Artificial Sequence
  ENSG00000162194_15 (sequence is synthesized)
ttgtttgggtttttttttggttttgttgttgttgttagtgtgtgggcgtggttttgtttgtttttggagacaaggtctcgctctgtcgcccagggctggagtgcagtggcgcgatcatgg

SEQ ID NO: 484520 - DNA, 86 bp, Artificial Sequence
  ENSG00000162194_16 (sequence is synthesized)
gtcgcccagaagcctcgacttccagggcccaagcgatcctcctgcctcaacctcccggatagctgggattacaggcgtgcaccacc

SEQ ID NO: 484521 - DNA, 120 bp, Artificial Sequence
  ENSG00000162194_17 (sequence is synthesized)
caggtgtgagccaccgcgcccggctgttttgctttgttttcaaccactaaaaggctggattcgtgtaacatactgaattctgctttacagaagaaaacacctcttagctgtgtgactgat

SEQ ID NO: 484522 - DNA, 120 bp, Artificial Sequence
  ENSG00000162194_18 (sequence is synthesized)
tgctttacagaagaaaacacctcttagctgtgtgactgattataggcaagttcttgtgccccggtttctgcatcagaaaatgaagcttataacaacagtacttgtctcacagttttagga

SEQ ID NO: 484523 - DNA, 120 bp, Artificial Sequence
  ENSG00000162194_19 (sequence is synthesized)
taattaaattagttatatgtaaagcaattaaaacagctcctgccaaagagtaaacaccatataaatattcattaaataacatacaaacataccaggttgggaaaaatcagtaagcatagg

SEQ ID NO: 484524 - DNA, 120 bp, Artificial Sequence
  ENSG00000162194_20 (sequence is synthesized)
ggcccacagggctttaatccaggtgcccttgtctcctacccttgttgccatcccagtgtctccagggagtaagtagaaataaagatcctatctcacctcttgggcattttcccctcccct

SEQ ID NO: 484525 - DNA, 120 bp, Artificial Sequence
  ENSG00000162194_21 (sequence is synthesized)
ggtaagtattgttccctccccctcaaatatctcatccaggtttatgaagctccttatacccatcctcttacaatctccttttacaggtgacaaaaatgaggcttacaggttaggccacta

SEQ ID NO: 484526 - DNA, 120 bp, Artificial Sequence
  ENSG00000162194_22 (sequence is synthesized)
ccgacggcagctcacaggaccccggagagtcctggcatggtatctcggtccggactctccgctgggcccacgaaggagaaaggctgcctcggattcctgcgcccaagccaaggtccggcg

SEQ ID NO: 484527 - DNA, 120 bp, Artificial Sequence
  ENSG00000162194_23 (sequence is synthesized)
agttgaaactggggaatgacccaattgtaccttctcttttcagcattcattttgtgctaaatattgcgcacatcattgtatgtaatctccgtaactccaagttattctcactctgcagat

SEQ ID NO: 484528 - DNA, 120 bp, Artificial Sequence
  ENSG00000162222_0 (sequence is synthesized)
agtgtcccaggcgttctcacgcccgcaacaattcctgagtagggccttgcttgagttcttcggaaagtctcatccacccccacatcgcctctttaggaagtcacttaatgttgggcttca

SEQ ID NO: 484529 - DNA, 120 bp, Artificial Sequence
  ENSG00000162222_1 (sequence is synthesized)
ttattcccacatccctttccttactacttgcctgcacttcttgagaaaaagactgcagaaaggagaggtggggctttcagtagaaacaagcaaaccgcaggtccctgtggggggactctc

SEQ ID NO: 484530 - DNA, 120 bp, Artificial Sequence
  ENSG00000162222_2 (sequence is synthesized)
caggaagaagggtaatttcctgcctccttaaattggctgctactgtcagttattttgctcccaaccccagagcttcacttgctccttcacttcccagttccgcaagaaccgtgggcgaca

SEQ ID NO: 484531 - DNA, 120 bp, Artificial Sequence
  ENSG00000162222_3 (sequence is synthesized)
gttatggagaagcgtctgcaggaggctcagctgtacaaggaggaagggaaccagcgctaccgggaagggaagtaccgagatgctgtgagtaggtaccatcgagctctgcttcagctgcgg

SEQ ID NO: 484532 - DNA, 120 bp, Artificial Sequence
  ENSG00000162222_4 (sequence is synthesized)
ggccctcacgcctgaacaagaaaacatattgcataccacccagacagactgctataacaatctagctgcttgtctccttcagatggagcccgtgaactacgaacgagtgagagaatatag

SEQ ID NO: 484533 - DNA, 120 bp, Artificial Sequence
  ENSG00000162222_5 (sequence is synthesized)
tcagaaagtcctggaacgacagcctgataatgccaaggccttgtatcgggccggagtggcctttttccatctgcaggactatgaccaggcccgccactacctcctggctgccgtgaatag

SEQ ID NO: 484534 - DNA, 120 bp, Artificial Sequence
  ENSG00000162222_6 (sequence is synthesized)
gcagcctaaagatgccaacgtccggcggtacctccagctgacacagtcagaactcagcagctaccatagaaaagagaagcagctctacctgggcatgtttggttaacaaagaagaaagat

SEQ ID NO: 484535 - DNA, 120 bp, Artificial Sequence
  ENSG00000162222_7 (sequence is synthesized)
gctcctccagttgaacttaggtggaccattaaacatgcatgaaggagaaatctgagcctcagcaagagaaattaaccctatacctctgacccaggtggatttttgtttctagttctgcac

SEQ ID NO: 484536 - DNA, 120 bp, Artificial Sequence
  ENSG00000162222_8 (sequence is synthesized)
aaacttcactacttagacagtctgagtctttttctgtctatccatctgtttatttctatacctttcaatacatgttattgttgcagatatttggcttgagaaatataatcagaaaacata

SEQ ID NO: 484537 - DNA, 120 bp, Artificial Sequence
  ENSG00000162222_9 (sequence is synthesized)
ggaggcggggtcgtttctgcgggattatttttccggagcctcttctgattgggtggtgtggcgcaatgcgcgcgaccctcaagataccaaactgtacgcatctctgaccctttcctctcc

SEQ ID NO: 484538 - DNA, 90 bp, Artificial Sequence
  ENSG00000162222_10 (sequence is synthesized)
gaaacgtgtgcctcggtggtttgctgcacctatcaacacatcacctcggtattaagtccagcatgtattagctatttttcctcatgttct

SEQ ID NO: 484539 - DNA, 120 bp, Artificial Sequence
  ENSG00000162222_11 (sequence is synthesized)
gattccttctcccctacaaaaatatttgctattttgtccttgctatttctcatacttagatcattcatacactatatttattttttcattaaactattttaaaacctttggagtaaagca

SEQ ID NO: 484540 - DNA, 120 bp, Artificial Sequence
  ENSG00000162222_12 (sequence is synthesized)
tctgattgggtggtgtggcgcaatgcgcgcgaccctcaagataccaaactgtacgcatctctgaccctttcctctccttgctcctgctggtaaaccgaagcccaggagacttccaggttt

SEQ ID NO: 484541 - DNA, 120 bp, Artificial Sequence
  ENSG00000162222_13 (sequence is synthesized)
gggcatctgcagagggcgaggaactggtcacggcgccgggtgggcttgcagctgtgacgcttatgtggacacctcagtgtcgctggtggttcacctcggcttcccagtttatttattgac

SEQ ID NO: 484542 - DNA, 120 bp, Artificial Sequence
  ENSG00000162222_14 (sequence is synthesized)
gtcaacaaataaatgttgaataaggaagaagagttagaattgcttgaagccctctggagttttagcactagtcccgcccactcccttctacttccaggtcgggggggggcgggtccaata

SEQ ID NO: 484543 - DNA, 120 bp, Artificial Sequence
  ENSG00000162222_15 (sequence is synthesized)
tataacaatctagctgttgtgaaatagggagtgtttcccttcttaatcataaaaaggcagaacattgacctgaattgcctgaattgactcctctgcagcttgtctccttcagatggagcc

SEQ ID NO: 484544 - DNA, 120 bp, Artificial Sequence
  ENSG00000162222_16 (sequence is synthesized)
ctttgccaatgtattattttcaataagtaatacattcacatggttgagaattcgaactgaaaaagtatacgatgaacagacctttttccactcttgtgttcttgtctccacagaaaagca

SEQ ID NO: 484545 - DNA, 120 bp, Artificial Sequence
  ENSG00000162222_17 (sequence is synthesized)
gtattattagtttcatgtgtagggggttgatgcttaatcagacatacacaatatatatgttggtatgtctgtttcatatatgtatgtatgcctattctaatatataaatatatgtatatc

SEQ ID NO: 484546 - DNA, 120 bp, Artificial Sequence
  ENSG00000162222_18 (sequence is synthesized)
aacgtgcttttatttataaatatacagtgtatatatttatacatatacatgaatatatatataaaataggcaggccaggtggggtggctcacatctgttatctcagcactttgggagacc

SEQ ID NO: 484547 - DNA, 120 bp, Artificial Sequence
  ENSG00000162227_0 (sequence is synthesized)
agagggaatgagtgtgagctcgtgagtgggcgccgccgccaccgcccccgccgccgtcgtctcggtagcagccttcgccacgccggggtcttcagctccactggggccatgtcagagcga

SEQ ID NO: 484548 - DNA, 120 bp, Artificial Sequence
  ENSG00000162227_1 (sequence is synthesized)
gaagagcggcggtttgtggagatccctcgggagtctgtccggctcatggcggagagcacgggcctggagctgagcgatgaggtggcggcgctgctcgcagaggacgtgtgctatcgtctg

SEQ ID NO: 484549 - DNA, 120 bp, Artificial Sequence
  ENSG00000162227_2 (sequence is synthesized)
agagaggccacgcagaatagctctcagttcatgaagcacaccaaacgccggaagctgacggttgaggacttcaacagggccctcagatggagcagcgtggaggctgtgtgtggttacgga

SEQ ID NO: 484550 - DNA, 120 bp, Artificial Sequence
  ENSG00000162227_3 (sequence is synthesized)
tcacaggaggcactgcccatgcgccccgccagggagggtgaactctactttcctgaggatcgagaggtgaacctggtggagctggccctggctaccaacatccccaaaggctgtgctgag

SEQ ID NO: 484551 - DNA, 120 bp, Artificial Sequence
  ENSG00000162227_4 (sequence is synthesized)
acagctgtcagagttcatgtctcctacctggatggcaaagggaacctggcacctcaaggatcggtgcccagtgctgtgtcttcactgacagatgaccttctcaagtactatcaccaggtg

SEQ ID NO: 484552 - DNA, 120 bp, Artificial Sequence
  ENSG00000162227_5 (sequence is synthesized)
actcgtgctgtgctaggggatgatccgcaactgatgaaggttgcactccaggacttgcagacgaactccaagattggggcactcctgccttactttgtttatgtggtcagtggggtgaaa

SEQ ID NO: 484553 - DNA, 120 bp, Artificial Sequence
  ENSG00000162227_6 (sequence is synthesized)
tctgtaagccatgacctggagcaactgcaccggctgctgcaggtggcacggagcctatttcgtaatccgcacctgtgcttggggccctatgtccgctgtctggtgggcagtgtcctctac

SEQ ID NO: 484554 - DNA, 120 bp, Artificial Sequence
  ENSG00000162227_7 (sequence is synthesized)
tgtgtcctggagccactggctgcctccatcaaccccctgaatgaccactggactctgcgggatggggctgccctcctgctcagccacatcttctggactcatggggaccttgtaagtggc

SEQ ID NO: 484555 - DNA, 120 bp, Artificial Sequence
  ENSG00000162227_8 (sequence is synthesized)
ggaaggcagtagaacgagtcctgtacccacacctgtccacctactggacaaacttgcaggctgtgctggatgattattcagtatctaatgcccaggtcaaagcagatggacacaaagtct

SEQ ID NO: 484556 - DNA, 120 bp, Artificial Sequence
  ENSG00000162227_9 (sequence is synthesized)
atggagccattctggtggcggtagagcgactgctgaagatgaaggcccaggcagcagagcccaacaggggtggcccaggtggcagggggtgccggcgcctggacgacctgccatgggaca

SEQ ID NO: 484557 - DNA, 120 bp, Artificial Sequence
  ENSG00000162227_10 (sequence is synthesized)
gccttctctttcaagagtcgtcctccgggggcggtgcagaacccagctttgggtccggcctcccgctgccgccagggggcgcggggccggaggacccttctctttcggtgaccctggccg

SEQ ID NO: 484558 - DNA, 120 bp, Artificial Sequence
  ENSG00000162227_11 (sequence is synthesized)
acatctaccgggagctctacgccttcttcggtgacagcttggccacacgctttggcaccggccagcctgcacccacggctccgcggccgcccggggacaagaaggagccggcggcagccc

SEQ ID NO: 484559 - DNA, 120 bp, Artificial Sequence
  ENSG00000162227_12 (sequence is synthesized)
cggactcggtgcggaagatgccgcagctgacggcaagcgccatagtcagcccgcacggcgacgagagcccccggggcagcggcggaggcggccccgcgtcggcctctgggcccgccgcct

SEQ ID NO: 484560 - DNA, 120 bp, Artificial Sequence
  ENSG00000162227_13 (sequence is synthesized)
gcctctgagagcaggcccttgccgcgcgtgcatcgggcgcgcggggcaccccggcagcagggccccgggaccggcacccgcgacgttttccagaagagccgtttcgccccgcgcggcgcc

SEQ ID NO: 484561 - DNA, 120 bp, Artificial Sequence
  ENSG00000162227_14 (sequence is synthesized)
actttcgtttcatcatagccgggcggcaggctgggaggcgctgccgcgggcgccttttccagactgccttccccgcgccgtacgggcctagcccggcctcgcgctacgtgcagaaactgc

SEQ ID NO: 484562 - DNA, 120 bp, Artificial Sequence
  ENSG00000162227_15 (sequence is synthesized)
ccatgatcggccgtaccagccgccccgcccgccggtgggcgctctcggactactcgctgtacttgccgctctgagtcagtggccccttcgttccttgtaaataaatcccgcccccggaaa

SEQ ID NO: 484563 - DNA, 120 bp, Artificial Sequence
  ENSG00000162227_16 (sequence is synthesized)
cctaaacctgcgggtgggattgctgcagagccaagtgggttggggtaaggaaatggggcgaagcctctggctttgagagtctatgagaagatggggaaccttttccctaggagcgtccta

SEQ ID NO: 484564 - DNA, 120 bp, Artificial Sequence
  ENSG00000162227_17 (sequence is synthesized)
tgtgcagagcctagatggtcagggctgagcaggctctaagagcagtctcttgccctggttgtcctgtcagaaaggcttcttgtggatgtgtgtggggatggtggttgagggggaggaggc

SEQ ID NO: 484565 - DNA, 120 bp, Artificial Sequence
  ENSG00000162227_18 (sequence is synthesized)
aagggaacctggcacctcaaggatcgggtaaggggtgatgtaggaaacaggctctttggatgaattttctcccttaggttctgagggtggtgcctatgtgcccccgagtctgcgtctaac

SEQ ID NO: 484566 - DNA, 120 bp, Artificial Sequence
  ENSG00000162227_19 (sequence is synthesized)
atgtgtttacccatgcctgccttgtgccatggtctgagtgggcgctgggctctgcatggagggctcagagttggagatgggggcccagacctgtaactagtcataatgcagcatgttgga

SEQ ID NO: 484567 - DNA, 120 bp, Artificial Sequence
  ENSG00000162227_20 (sequence is synthesized)
tgctaagacagaagtctgggcagcatgctggggcggtgtttcacccccagggtatgctgagcagagcttcacagagcctgaagctctcaggagtccgtctggcagagggtgggtggaaga

SEQ ID NO: 484568 - DNA, 120 bp, Artificial Sequence
  ENSG00000162227_21 (sequence is synthesized)
caggacagagcacagaggtgtgcagagcctagatggtcagggctgagcaggctctaagagcagtctcttgccctggttgtcctgtcagaaaggcttcttgtggatgtgtgtggggatggt

SEQ ID NO: 484569 - DNA, 120 bp, Artificial Sequence
  ENSG00000162227_22 (sequence is synthesized)
tgagtttctgtaggttacatttatagaaatagaattgctagatcaaagaatatgaacattaaaattgtaaaacatgaataaggtgatacactgtcttccagaagaataccgcattcatgt

SEQ ID NO: 484570 - DNA, 120 bp, Artificial Sequence
  ENSG00000162231_0 (sequence is synthesized)
acttcggtcctgagcgcttgggagttaggttgtttgccggcgtagcggccagcgcctgagcccgcccttgatcttcgctgtggcatggcggacgaggggaagtcgtacagcgaacacgat

SEQ ID NO: 484571 - DNA, 120 bp, Artificial Sequence
  ENSG00000162231_1 (sequence is synthesized)
gatgaacgcgttaatttccctcaaagaaagaagaaaggccggggtcccttccggtggaaatatggtgaaggaaaccgtaggtctggaagaggcggttctggtattcggtcttcccgcctt

SEQ ID NO: 484572 - DNA, 120 bp, Artificial Sequence
  ENSG00000162231_2 (sequence is synthesized)
gaggaagatgatggagatgtggcaatgagtgatgcccaggatggtccccgagtacgatacaacccctataccacccgacctaaccgtcggggtgatacttggcatgatcgagatcgcatt

SEQ ID NO: 484573 - DNA, 120 bp, Artificial Sequence
  ENSG00000162231_3 (sequence is synthesized)
catgttactgtgcggagagacagagctcctccagagagaggaggggctggcaccagccaggatgggacctcaaagaactggttcaagattacaattccttatggcagaaagtatgacaag

SEQ ID NO: 484574 - DNA, 120 bp, Artificial Sequence
  ENSG00000162231_4 (sequence is synthesized)
gcatggctcctgagcatgattcagagcaagtgcagtgtgcccttcacccctattgagtttcactatgagaatacacgggcccagttcttcgttgaagacgccagtactgcctctgcattg

SEQ ID NO: 484575 - DNA, 120 bp, Artificial Sequence
  ENSG00000162231_5 (sequence is synthesized)
aaggctgtcaactataagattttggatcgggagaaccgaaggatatctatcatcatcaactcttctgctccaccccacactatactgaatgaactgaagccagaacaagtagaacagcta

SEQ ID NO: 484576 - DNA, 120 bp, Artificial Sequence
  ENSG00000162231_6 (sequence is synthesized)
aagctgatcatgagcaaacgatacgatggctcccaacaagcccttgacctcaaaggcctccgttcagacccagatttggtggcccagaacattgacgttgtcctgaatcgcagaagctgt

SEQ ID NO: 484577 - DNA, 120 bp, Artificial Sequence
  ENSG00000162231_7 (sequence is synthesized)
atggcagctaccctgaggatcattgaagagaacatccctgagctattgtccttgaacttgagcaacaacaggctgtacaggctggatgacatgtctagcattgttcagaaggcacccaac

SEQ ID NO: 484578 - DNA, 120 bp, Artificial Sequence
  ENSG00000162231_8 (sequence is synthesized)
ctgaagatcctaaacctttctggaaatgaattgaagtctgagcgggaattggacaagataaaggggctgaagctagaagagctctggctcgatggaaactccctgtgtgacaccttccga

SEQ ID NO: 484579 - DNA, 120 bp, Artificial Sequence
  ENSG00000162231_9 (sequence is synthesized)
cctacatcagcgccattcgcgaacgatttcccaagttactacgcctggatggccatgagctacccccaccaattgcctttgatgttgaagcccccacgacgttaccgccctgcaagggaa

SEQ ID NO: 484580 - DNA, 120 bp, Artificial Sequence
  ENSG00000162231_10 (sequence is synthesized)
gctattttggaacagaaaacttgaagagtctggtcttgcacttcctgcaacagtactatgcaatttacgactctggagaccgacaagggctcctggatgcctaccatgatggggcctgct

SEQ ID NO: 484581 - DNA, 120 bp, Artificial Sequence
  ENSG00000162231_11 (sequence is synthesized)
gttccctgagcattcctttcattcctcagaaccctgcccgaagcagcttagccgagtatttcaaggatagcagaaatgtgaagaagcttaaagaccctaccttgcggttccggctgctga

SEQ ID NO: 484582 - DNA, 120 bp, Artificial Sequence
  ENSG00000162231_12 (sequence is synthesized)
agcacacgcgtctcaacgttgttgccttcctcaatgagttgcccaaaacccagcacgacgtcaattccttcgtggtagacataagcgcccagacaagcacattgctgtgtttttctgtca

SEQ ID NO: 484583 - DNA, 120 bp, Artificial Sequence
  ENSG00000162231_13 (sequence is synthesized)
atggagtcttcaaggaagtggacggaaagtcccgggattctttgcgagccttcacccggacattcattgctgttcctgctagcaattcagggctatgtattgtaaatgatgagctatttg

SEQ ID NO: 484584 - DNA, 120 bp, Artificial Sequence
  ENSG00000162231_14 (sequence is synthesized)
tgcggaatgccagttctgaagagatccaaagagccttcgctatgcctgcacccacgccttcctccagcccggtgcccaccctctctccagagcagcaggaaatgttgcaagcattctcta

SEQ ID NO: 484585 - DNA, 120 bp, Artificial Sequence
  ENSG00000162231_15 (sequence is synthesized)
cccagtctggcatgaacctcgagtggtcccagaagtgccttcaggacaacaactgggactacaccagatctgcccaggccttcactcatctcaaggccaagggcgagatcccagaagtgg

SEQ ID NO: 484586 - DNA, 120 bp, Artificial Sequence
  ENSG00000162231_16 (sequence is synthesized)
cattcatgaagtgatcgtagtcatgcctcagaagcagtcccccctgtaaatagtccttggatattaccgtctggttgtcgtctgtcatctcctcctgtctggcccgaggccgccccgtga

SEQ ID NO: 484587 - DNA, 120 bp, Artificial Sequence
  ENSG00000162231_17 (sequence is synthesized)
ctgtgaccgagggagggagggctgcctgatccctctcctcgcctgccttctggaagacttcagaagattgagcctcactggtgccaggaagccaaagcttactttgtagaactgacacta

SEQ ID NO: 484588 - DNA, 120 bp, Artificial Sequence
  ENSG00000162231_18 (sequence is synthesized)
aactacccgaaggacttaggtgctttgtgtacttaaccccaggacctccttactttttaatataaagagtgatgttgtatttcgtgttctgcactttttaatataaagagtgatgttgta

SEQ ID NO: 484589 - DNA, 120 bp, Artificial Sequence
  ENSG00000162231_19 (sequence is synthesized)
atagagacaacagtcaggggctggtggtggtgcttttgggggtctaggagagcccaaggccctgatattttaaaatgtcctcctcggcatctccagcaagttgccactgctggcgaagaa

SEQ ID NO: 484590 - DNA, 120 bp, Artificial Sequence
  ENSG00000162231_20 (sequence is synthesized)
agcgaggtatagacaaggagccgagctgaaacactggctagattccggtaggggtctgagccatcactcccacctggaggcgcggtctccattcctctgaagccctttgtgcggccccct

SEQ ID NO: 484591 - DNA, 120 bp, Artificial Sequence
  ENSG00000162231_21 (sequence is synthesized)
tcctcactgagttctgggctgcggcggcagcactgtgctctagcactaactctgaagctgccagggcagcgtcagcggacagatgaaaaggtgcggggacatgctggctgccagccgggg

SEQ ID NO: 484592 - DNA, 120 bp, Artificial Sequence
  ENSG00000162231_22 (sequence is synthesized)
ttccgcaagttcaggtcttgggcggggcgtggagggccaggccccgcccctcgaacgacggccttaagtgtgcgcacgcgcagggggccgcgctttctccgggcggcggcaccgcccaca

SEQ ID NO: 484593 - DNA, 120 bp, Artificial Sequence
  ENSG00000162231_23 (sequence is synthesized)
gagtgaccagttggtctggtttgaatttagtggctcatgagattatatggcccttttactgtccatgtcatttcctttcccacctgttagagtgagaaatgccaggactagcttagtgat

SEQ ID NO: 484594 - DNA, 120 bp, Artificial Sequence
  ENSG00000162231_24 (sequence is synthesized)
taaacagtcttagttgtagtcccactaacagtgcaggaaggcctttgagaagactttcctagcatttgtggtcattttattctctgcttacccacagcaacccctataccacccgaccta

SEQ ID NO: 484595 - DNA, 120 bp, Artificial Sequence
  ENSG00000162231_25 (sequence is synthesized)
accctagtgtgtttagtagataatccttccaaacattgattccatgggaggggataaatgataaaaggtaacaatagctaagagtgggagggggaccttgtggatattgaaagaatcaga

SEQ ID NO: 484596 - DNA, 120 bp, Artificial Sequence
  ENSG00000162231_26 (sequence is synthesized)
tacacagttttccagtaacttttccctgatgctgccctcccacagagagggttctttcctgtggatagggagcggagtttgcatggagatggcctctgtcgttagtatgtatctcttcca

SEQ ID NO: 484597 - DNA, 120 bp, Artificial Sequence
  ENSG00000162231_27 (sequence is synthesized)
gcattcctttcattcctcagaaccctgcccgcagcttagccgagtatttcaaggatagcagaaatgtgaagaagcttaaagaccctaccttgcggttccggctgctgaagcacacgcgtc

SEQ ID NO: 484598 - DNA, 120 bp, Artificial Sequence
  ENSG00000162231_28 (sequence is synthesized)
tcctggggaccttcaccccctgggaggctgagctaatgcatcctgaccagggcccgtctgcggagatgtgcagccctgagctggaaccacctgtcctttgagaggatcgcgtgctcccca

SEQ ID NO: 484599 - DNA, 120 bp, Artificial Sequence
  ENSG00000162231_29 (sequence is synthesized)
ctttggtctgtctgtgtcttccagctttgtcctgagatgttctctcttctcttctgacttgactatctgtttgctgggtctgtggcctttctctttcttcctgaacacaaccttttctag

SEQ ID NO: 484600 - DNA, 120 bp, Artificial Sequence
  ENSG00000162231_30 (sequence is synthesized)
tctaaccagagggtatcttgtacataccctatagatggggttgccttgtgccaagagcctggtgtccatgggttgaggaagccctccctacctgggacttcctactgagatgggccttcc

SEQ ID NO: 484601 - DNA, 120 bp, Artificial Sequence
  ENSG00000162231_31 (sequence is synthesized)
ctcctttgtactgtgatggcccctcttgcccttgcgccaagagggacccttttctcaggatccacttgcccagggctgttgctgtccatgctgaggttgaggcctcctaggggctggtgg

SEQ ID NO: 484602 - DNA, 120 bp, Artificial Sequence
  ENSG00000162231_32 (sequence is synthesized)
catgcaatctgtctctcttgcccagtgctatgagctgggctctccctgaagaagaaacctgggttccccaagatgtgaccagagctggggccccgccagcaggcgagggaatcccaaggc

SEQ ID NO: 484603 - DNA, 120 bp, Artificial Sequence
  ENSG00000162231_33 (sequence is synthesized)
aggtgctgggcgtggaggccacgggggcataggctaccaaggagacagagaactgaccccctcgggggcgctgcctctccctcactcacacactgcacgtcaccctgtttggccccggtg

SEQ ID NO: 484604 - DNA, 120 bp, Artificial Sequence
  ENSG00000162231_34 (sequence is synthesized)
gatggctggttagccagagacgggtaagattcctcagggaaggaacaacctaagacaggcacagtcgcagaggggccatcaggagagaacttgggggcaacagaggtggggcatggaccc

SEQ ID NO: 484605 - DNA, 120 bp, Artificial Sequence
  ENSG00000162231_35 (sequence is synthesized)
aggtctcctgcccccatggctgctttgcttcccacgcccagttcagatcgggacccaggtagcagacagagacctggccaacagcaagtgcccactcaccacagcaaggatttgtttctc

SEQ ID NO: 484606 - DNA, 120 bp, Artificial Sequence
  ENSG00000162231_36 (sequence is synthesized)
atttctaccttggaccacagggatggggcagctgaaagaaagggctgtgtcagggtgtctttctcccttttctccctcatttttctagatgcttttttgccttgtagttctttctctttt

SEQ ID NO: 484607 - DNA, 120 bp, Artificial Sequence
  ENSG00000162231_37 (sequence is synthesized)
tctttgctttctctttcctttttctgtctgtctcctatacctccccatctctcccttgcccctgccccatcttgcctttttctctttttcctccttttcctttcttattcctttgcctct

SEQ ID NO: 484608 - DNA, 120 bp, Artificial Sequence
  ENSG00000162231_38 (sequence is synthesized)
cctcttcctgagccccacctgctcatctccctgccccaacatcctgtgccatccctgtggtgtgtttgggtcttggccaaagccagacctggcagaactgatggatacctggtgaggcag

SEQ ID NO: 484609 - DNA, 120 bp, Artificial Sequence
  ENSG00000162231_39 (sequence is synthesized)
cggagcccctgggctcccaccccattccctcctcccggggctgcacaggtgagtaggtggaaggtaaggggggcagggaggggaaagaggtcctgggcttaaagcctgggcttggagtac

SEQ ID NO: 484610 - DNA, 120 bp, Artificial Sequence
  ENSG00000162231_40 (sequence is synthesized)
tgctccttgacactcagggtcaggcagagagaaaagagacagccttcaaggcagtccatgtctgggtgccccgggtcaggtggggagtgggggccatttttccctgagcacaggctggga

SEQ ID NO: 484611 - DNA, 120 bp, Artificial Sequence
  ENSG00000162231_41 (sequence is synthesized)
gggagtggagggatgagcaggatgggatgggctgtccctcgggtttggtatatttgctcctagagcagcccaggaggcacggtggctctgaagcatcactcacttctgtcccgttcttga

SEQ ID NO: 484612 - DNA, 120 bp, Artificial Sequence
  ENSG00000162231_42 (sequence is synthesized)
agggtagagtcagtctttggggtgatttcagaaaggcaacaggaaatcagagaaagctcacatagtagttaagagccagttaatagcttggctctggaattgtaccgtctgggttttcat

SEQ ID NO: 484613 - DNA, 120 bp, Artificial Sequence
  ENSG00000162231_43 (sequence is synthesized)
cagcctcccaaagtgctgggattatacgcatgagacactgtgcccggccgtagttattactattgtcctttctgacctgacccttcaccccacctgtgcttcccttatacccttatatac

SEQ ID NO: 484614 - DNA, 120 bp, Artificial Sequence
  ENSG00000162231_44 (sequence is synthesized)
tcaccccacctgtgcttcccttatacccttatatacttaatcattcctctctgacttgctaggattctttatatcaaagaccatgattcaagaagctgtttgtaaacataaagcactagt

SEQ ID NO: 484615 - DNA, 120 bp, Artificial Sequence
  ENSG00000162231_45 (sequence is synthesized)
tcactcatctcaaggtaaggtctggaaatacagtggcaaaaagactaggatctctgggcctccaggaggtcaggttagctgagtggggttgctgagtggcgagggtaggcctacctctac

SEQ ID NO: 484616 - DNA, 120 bp, Artificial Sequence
  ENSG00000162231_46 (sequence is synthesized)
tgaccttcatttttctccaggccaagggcgagatcccagaagtggcattcatgaagtgatcgtagtcatgcctcagaagcagtcccccctgtaaatagtccttggatattaccgtctggt

SEQ ID NO: 484617 - DNA, 120 bp, Artificial Sequence
  ENSG00000162236_0 (sequence is synthesized)
agtctttggtcgggtttcggcggcttcagtgctcggggaggaggcagtgacggccggtgagattggaagtggcggcggcggcaggcggcagaggggagtccgaggttatgcgtctcaatg

SEQ ID NO: 484618 - DNA, 120 bp, Artificial Sequence
  ENSG00000162236_1 (sequence is synthesized)
atcccgcggaaacgctacgggtctaagaacacggatcagggtgtctacctgggtctctcaaagacacaggtcctgtcccctgcaactgctggcagtagcagcagcgacatcgcccctctg

SEQ ID NO: 484619 - DNA, 120 bp, Artificial Sequence
  ENSG00000162236_2 (sequence is synthesized)
ccccccccagtgaccctcgtccctccccctcccgacaccatgtcctgccgggatcggacccaggagtttctgtctgcctgcaagtcgctgcagacccgtcagaatggaatccagacaaat

SEQ ID NO: 484620 - DNA, 120 bp, Artificial Sequence
  ENSG00000162236_3 (sequence is synthesized)
aagccagctttgcgtgctgtccgacaacgcagtgaattcaccctcatggccaagcgcattgggaaagaccttagcaacacatttgccaagctggagaagctgacaatcttggcaaagcgc

SEQ ID NO: 484621 - DNA, 120 bp, Artificial Sequence
  ENSG00000162236_4 (sequence is synthesized)
aagtccctctttgatgataaagcagtggaaattgaagagctaacatatatcatcaaacaggacatcaatagcctcaacaaacaaattgctcagctccaggatttcgtgagagccaagggc

SEQ ID NO: 484622 - DNA, 120 bp, Artificial Sequence
  ENSG00000162236_5 (sequence is synthesized)
agccagagtggccggcacctgcagacccactccaacaccattgtggtctccttgcagtcgaaactggcttctatgtccaatgacttcaaatcggttttagaagtgaggacagagaacctg

SEQ ID NO: 484623 - DNA, 120 bp, Artificial Sequence
  ENSG00000162236_6 (sequence is synthesized)
aagcagcagaggagccggagagagcagttctcccgggcacctgtgtcagccctgccccttgcccctaaccacctgggcggtggtgctgtggttctgggggcagagtcccatgcctccaag

SEQ ID NO: 484624 - DNA, 120 bp, Artificial Sequence
  ENSG00000162236_7 (sequence is synthesized)
attgttgagttgggctccatctttcagcagttggcacacatggttaaggaacaggaggaaaccattcagaggatcgacgagaacgtgctaggagcccagctggacgttgaggccgcccat

SEQ ID NO: 484625 - DNA, 120 bp, Artificial Sequence
  ENSG00000162236_8 (sequence is synthesized)
tcagagatcctcaagtacttccagtctgtcacctccaaccggtggctcatggtcaaaatcttcctcatcctcattgtcttcttcatcatctttgtggtcttccttgcttgaaccctctct

SEQ ID NO: 484626 - DNA, 120 bp, Artificial Sequence
  ENSG00000162236_9 (sequence is synthesized)
actctgaggcactctgttggggtttgggaccctcctgggaaggcaagtggccagtgctgccactgagcctgtgcagggtacttgggagaaaggccctgtttccctggaactgctaagaat

SEQ ID NO: 484627 - DNA, 120 bp, Artificial Sequence
  ENSG00000162236_10 (sequence is synthesized)
gaccactgcccctgatcccccaccccttgcctctggccaccctgtcctccccccaccaccctcaggcctatgaaacacacagggttctagatttgaactctgctgtgaagtgactggaag

SEQ ID NO: 484628 - DNA, 120 bp, Artificial Sequence
  ENSG00000162236_11 (sequence is synthesized)
ggagcagaggccagctgggggccagtgggggaggttgtttccactaggagatttttataaaccctctccagcctctcccaaaggaagcgttggcagcaaagggagatgatgcccttaccc

SEQ ID NO: 484629 - DNA, 120 bp, Artificial Sequence
  ENSG00000162236_12 (sequence is synthesized)
accttcctgtgagtgaagagaggaagcagccccagggaccaattttcccaattgacctctttcttcctctttcaccatgtgaggcagggagccctgagcccttcagctgcctgcacaacc

SEQ ID NO: 484630 - DNA, 120 bp, Artificial Sequence
  ENSG00000162236_13 (sequence is synthesized)
cctgacattggctgctggtgactcaatctgccaaatgtgctgcagctcgttttctcccaattacagcaagactgtcagcctcactagccatgtcatcatttctgggtgggagcgtcgaag

SEQ ID NO: 484631 - DNA, 120 bp, Artificial Sequence
  ENSG00000162236_14 (sequence is synthesized)
tctctcgccccaaacagaggagctttctcttccccgtggattggcatcttaaagtccccagggactgcttgatgccttttggaagatagagtgaattctgcccacccatgggacccagtt

SEQ ID NO: 484632 - DNA, 120 bp, Artificial Sequence
  ENSG00000162236_15 (sequence is synthesized)
cacctgcttccatccacccaacaagtttttattgagcacctgttcatgtgaggcactgttccaggtgcgggagatacagtggcaagtagaacagtaaagtctgtctggagctgctttgta

SEQ ID NO: 484633 - DNA, 120 bp, Artificial Sequence
  ENSG00000162236_16 (sequence is synthesized)
caagggatcctctttcctcagcctcctgagcagctgggactacatggatgcaccactcagctaattttaaaattttttcgtacaggcagtgtctcactatgttgcccagaatggaatcca

SEQ ID NO: 484634 - DNA, 120 bp, Artificial Sequence
  ENSG00000162241_0 (sequence is synthesized)
agatccttgaaagggttttggttttgactgagcagaatggtgccattgcagatcaacacgcactttaaataatcaaaacccctatctttcccctgggaaggaggaagccgaggaaggctg

SEQ ID NO: 484635 - DNA, 120 bp, Artificial Sequence
  ENSG00000162241_1 (sequence is synthesized)
tgtttctgactcacacgggggagtcgggggagtcgtaaacaaccctgaagagaacagccaggcctgttcccgcaagcccagacaatgccggtggaggaatttgtggctggctggatctct

SEQ ID NO: 484636 - DNA, 120 bp, Artificial Sequence
  ENSG00000162241_2 (sequence is synthesized)
ggcgctctgggcttggtcctgggacacccgtttgacactgtaaaggtgaggctgcagacccagaccacctaccggggcatcgttgattgcatggtcaagatttaccgccatgagtccctc

SEQ ID NO: 484637 - DNA, 120 bp, Artificial Sequence
  ENSG00000162241_3 (sequence is synthesized)
ctgggcttcttcaagggaatgagcttccccattgccagcatagctgtggtcaactctgtcctgtttggggtctatagcaacaccctgctggtgctcacggccacctcccaccaggagcgg

SEQ ID NO: 484638 - DNA, 120 bp, Artificial Sequence
  ENSG00000162241_4 (sequence is synthesized)
cgggcccagccgcccagctacatgcacatcttcctagcgggctgcaccggggggttcctgcaggcctactgtctggctccttttgacctcatcaaagtccggctacaaaaccagacagag

SEQ ID NO: 484639 - DNA, 120 bp, Artificial Sequence
  ENSG00000162241_5 (sequence is synthesized)
ccaagggcccagccagggagccccccaccccggtaccaggggcccgtgcactgtgcagcctccatcttccgggaggaggggccccgggggctgttccgaggagcctgggccctgacgctg

SEQ ID NO: 484640 - DNA, 120 bp, Artificial Sequence
  ENSG00000162241_6 (sequence is synthesized)
agggacacccccacggtggggatctacttcatcacctatgaagggctctgtcgccagtacacaccagaaggccagaatcccagctcagccacggtgctggtggcagggggctttgcaggc

SEQ ID NO: 484641 - DNA, 120 bp, Artificial Sequence
  ENSG00000162241_7 (sequence is synthesized)
attgcttcctgggtggcagccacgcccttagacatgatcaagtcccggatgcagatggatggactgagacgcagagtgtaccaggggatgctggactgcatggtgagcagcatccggcag

SEQ ID NO: 484642 - DNA, 120 bp, Artificial Sequence
  ENSG00000162241_8 (sequence is synthesized)
gaaggactgggagtcttcttccggggggtcaccatcaacagtgcccgcgcctttcccgtcaatgctgtcaccttcctcagctacgaatatctcctccgctggtggggatgagccctgcgg

SEQ ID NO: 484643 - DNA, 120 bp, Artificial Sequence
  ENSG00000162241_9 (sequence is synthesized)
cagcagctccccatcaggcccacggcctggaggccagtttgagattggaggccaggttgaaagcttgcaaatcagtgcaagaggctcagcccttcctaaccaaggtgcctcccacccgcg

SEQ ID NO: 484644 - DNA, 120 bp, Artificial Sequence
  ENSG00000162241_10 (sequence is synthesized)
cagatctgggctgggcagacacctgtgggagccggaagccagggggcctgtgcagcctccctgtgtagctggccttgactcctttgcctcccacatctgtgaaacagggagcatgaggca

SEQ ID NO: 484645 - DNA, 120 bp, Artificial Sequence
  ENSG00000162241_11 (sequence is synthesized)
cctttgcctcccacatctgtgaaacagggagcatgaggcacaagtgagctggcaagtggtgctggtgacatcccagctcctgtcctgtgccttcacctcttttttttttttttttttttt

SEQ ID NO: 484646 - DNA, 120 bp, Artificial Sequence
  ENSG00000162241_12 (sequence is synthesized)
cgcgcccggctgccttcacctcttaaggagctctgagactccacttctgagagtccctgcggcctcccacctccctgcctttcaaagctctctcccccatgacccaggataaccctatgt

SEQ ID NO: 484647 - DNA, 120 bp, Artificial Sequence
  ENSG00000162241_13 (sequence is synthesized)
ctcctcccccagaatccttcagtggctctcatcaccttcaggaaaagcccaaactccttccaccctccaggttcctccctccccacgaggctttgttctcctggggttgcttcctggacc

SEQ ID NO: 484648 - DNA, 120 bp, Artificial Sequence
  ENSG00000162241_14 (sequence is synthesized)
ctgaacaagttgtgctctcattggccgggcctggccagcagtgcacagtgcctggcaggttgactctaccatccccggggctggccccgctctcctccgagacccaggctgagcccagtc

SEQ ID NO: 484649 - DNA, 120 bp, Artificial Sequence
  ENSG00000162241_15 (sequence is synthesized)
ccctcacccttccttgacttacctccccacctgaggctgactttggggttcccagacaccctacccacacacatgccttgatcatagcacttgcctgcgcttcttcagagtcattaattt

SEQ ID NO: 484650 - DNA, 120 bp, Artificial Sequence
  ENSG00000162241_16 (sequence is synthesized)
gcttctcggcttccccactggactgtgagctgcctgaggtcagggattgcgctttggatggtttccagcctgagcctggtgcttgaacagacgtgtgcaataaatgctcgttaaatgatg

SEQ ID NO: 484651 - DNA, 120 bp, Artificial Sequence
  ENSG00000162241_17 (sequence is synthesized)
tttttgcaaaggcagtttcaggaataagaagcagaaccaggactgcagcccaagccaccacgagaggccagtctttggggatggtcttttaggatgatctttgggggtggcccaaggagc

SEQ ID NO: 484652 - DNA, 120 bp, Artificial Sequence
  ENSG00000162241_18 (sequence is synthesized)
cccaggcagctccagaggcaggagtcactcaggatttattgagagcccaccctgtgccacccgctgtgcacagaacacccagagatccctgtccagacagacaagttcttcccatcgtat

SEQ ID NO: 484653 - DNA, 120 bp, Artificial Sequence
  ENSG00000162241_19 (sequence is synthesized)
gttggcgtgataactgtgatggagaaagagaggaagagccagcagtgcctccggctggggaggcggggcagacctcacccaggtggtgacatttgagccccagctggaggggtgccaggg

SEQ ID NO: 484654 - DNA, 120 bp, Artificial Sequence
  ENSG00000162241_20 (sequence is synthesized)
caagagtgcccaggaagagggaagagccagtccacaggcctggagacagaaggctgactgaagaagagtctggaggctcgggtggctgcagcagagaaagcaagggggaggaagccgagg

SEQ ID NO: 484655 - DNA, 120 bp, Artificial Sequence
  ENSG00000162241_21 (sequence is synthesized)
gccaggtgagcaccctataccttgagccctgctctccaggcccaccctgttgggcttacaaaggaagttcacctttgacctcacctgctgtcctgagtcccctctgggcctctgccccac

SEQ ID NO: 484656 - DNA, 120 bp, Artificial Sequence
  ENSG00000162241_22 (sequence is synthesized)
ctggctgtgggccgcagtcccgggccctgaggcctgttgtgctgtggtcccagcccagcttctgggtggcattcctcttaggagaaagagagggacgttctgaacctgcctcctgggggt

SEQ ID NO: 484657 - DNA, 120 bp, Artificial Sequence
  ENSG00000162241_23 (sequence is synthesized)
gagaagctcctctgcaggtgcccaggcatgacccccatcagggccctgcagttctgcgtggccagctggcagcagggcctgctctggatcccggcgacgacattatgagttgaagaaaga

SEQ ID NO: 484658 - DNA, 120 bp, Artificial Sequence
  ENSG00000162241_24 (sequence is synthesized)
atgggggcggccatgccccttggtggagatgaatgggagtggagctgggctggctgggcaggcaggggcttgcctcttgctgactaaggcagccctggaggggcccgaccatggggcagg

SEQ ID NO: 484659 - DNA, 120 bp, Artificial Sequence
  ENSG00000162241_25 (sequence is synthesized)
aacccagttgccatcctcagagcgaggatcattggccgggctcggggatcagggcctctgtggtcccggcacgcctggcccgtgagactgtactctgcacgactcctccaggtggccagg

SEQ ID NO: 484660 - DNA, 120 bp, Artificial Sequence
  ENSG00000162241_26 (sequence is synthesized)
gtcaccggaactggctcgctctcctctgccagttgccggaggtctgggcaccaggccaattctcaccttcccgccagggttaaacattagtgggaggttatcagcgtgggccaggggagg

SEQ ID NO: 484661 - DNA, 120 bp, Artificial Sequence
  ENSG00000162241_27 (sequence is synthesized)
gggggagtcgtaaacaaccctgaagagaacagccaggcctggtgagtcactcctgggagtggctcctccccaccctgccacgcagcggcaaatgcgggctgggcctaccccctggtggcc

SEQ ID NO: 484662 - DNA, 77 bp, Artificial Sequence
  ENSG00000162241_28 (sequence is synthesized)
tgagaccagtctgggcaacatagggaggcccctgtctctacaaaaaaatcaaaattaggaggattgcttgagctcag

SEQ ID NO: 484663 - DNA, 120 bp, Artificial Sequence
  ENSG00000162241_29 (sequence is synthesized)
atacaaaaattagccaggcgcggtggcgcacgcctgtggtcccaactactccagaggctgaggtggaaggagcccttaagctcaggaggttgaagctgcaatgagccatgatcatgccac

SEQ ID NO: 484664 - DNA, 120 bp, Artificial Sequence
  ENSG00000162241_30 (sequence is synthesized)
catgccactgcactccagcctggacaacaccagcaagaccctgtgtcaaaaaaaaaaagtctgggttccgtggagcaccccagagccagctgtccccagtcctctggggagtggccgatg

SEQ ID NO: 484665 - DNA, 120 bp, Artificial Sequence
  ENSG00000162241_31 (sequence is synthesized)
gggatacccgggtatgggctccagcgaggacacgtacgtctttggctggctcttccctcttgggtgtgcatcctcaggtggggcctggggtcttagtcccttgtcccagtgccttcctgg

SEQ ID NO: 484666 - DNA, 120 bp, Artificial Sequence
  ENSG00000162241_32 (sequence is synthesized)
cccagtgcctgtgtggagggggtggcaggggcagctggagtctctagagcttggcaggaaggtggctgcatgtgtctgagatggccctgctctccttcctcctgcctgaacccctctttc

SEQ ID NO: 484667 - DNA, 120 bp, Artificial Sequence
  ENSG00000162241_33 (sequence is synthesized)
tgttggtaccagcttccctctccagcagggttctgctcctggaggagagaagaccaagtctgggatccttggggggcctgggtggtagcttagcaccccagaggcgcagcctcagcccat

SEQ ID NO: 484668 - DNA, 120 bp, Artificial Sequence
  ENSG00000162241_34 (sequence is synthesized)
ccctgcctgtccccacttccctgtggcaggacttgggagcagtttccagccagaggctgccttgccaggggtggagaggacaaaggggaggccccacggtgcctactccgctgccactgt

SEQ ID NO: 484669 - DNA, 120 bp, Artificial Sequence
  ENSG00000162241_35 (sequence is synthesized)
ggtcatctcgatctgtcctctcccaccctgccctggcgacccacagctgtggaggcataggcctcttggaggggaacaagaggcctgtgctatggccttccaggctgcaggcctctgggg

SEQ ID NO: 484670 - DNA, 120 bp, Artificial Sequence
  ENSG00000162241_36 (sequence is synthesized)
gagggctgtggggaacagagggggcaaaaggcagagacagctggtgggcagtgccaagagggtgctgggagaagcagcctgggccactcgctccagctgacggggcttgcccccctccag

SEQ ID NO: 484671 - DNA, 120 bp, Artificial Sequence
  ENSG00000162241_37 (sequence is synthesized)
aggggtctgccagcctcagagctgtggggagcccactccccaaggagacctttgaccctggagaaccaccagcaccccgcagagctgtgagcccagcccctctggccgggtcctgatgag

SEQ ID NO: 484672 - DNA, 120 bp, Artificial Sequence
  ENSG00000162241_38 (sequence is synthesized)
tgcctgcagtgcttgggtgcccatgacctgggagcctcacctgaggcccagcccagcagggcattaaccattcaggcactgccgtcatctgggctttgggctttagaggggtggatggag

SEQ ID NO: 484673 - DNA, 120 bp, Artificial Sequence
  ENSG00000162241_39 (sequence is synthesized)
ggaagagggaccagctgccgccagtgggaaccggtgctgaatgggtcctgtgagcataagcagggagagggtgcgcccggcacccactgacaccccagccgcaagccagggtcgccctct

SEQ ID NO: 484674 - DNA, 120 bp, Artificial Sequence
  ENSG00000162241_40 (sequence is synthesized)
cctgggcagctgcccccagttccttgtcacacttcatggggcagagagcaaggacaaaggacaaagtcaggctgctccttcaaatgaattaatgattaatgagacccccggaggccccgg

SEQ ID NO: 484675 - DNA, 120 bp, Artificial Sequence
  ENSG00000162241_41 (sequence is synthesized)
cttttcttctgccccttcttgtgcgaggtgccacctataggtttcctgagccccgcgagccacatcccacaaacacaaggaagagaaccgaagccctaagctaagtggccaggcccggct

SEQ ID NO: 484676 - DNA, 120 bp, Artificial Sequence
  ENSG00000162241_42 (sequence is synthesized)
tctaagtcaccctgcccccccagctctttggaaagcagaagtggggactgtgagggccgctgatggagcctgggtttacagtgaaacctgtggctttagtttaacagagtcttaaaggaa

SEQ ID NO: 484677 - DNA, 120 bp, Artificial Sequence
  ENSG00000162241_43 (sequence is synthesized)
aaatgtgttttagtgtggagtgggaagaagaggcagggactgacagcctctgacgggcacagacgttgccctggtcttcgccgaagctgaccttctgaaatggcatctgacactccacca

SEQ ID NO: 484678 - DNA, 120 bp, Artificial Sequence
  ENSG00000162241_44 (sequence is synthesized)
cccctgtgggggtgtctgtcacctggtgtcagcctagccctgtcctcagcccccaggagctcagggctcagaacacctcctgaagccctgagctcagccctgccagcacgctctagaggg

SEQ ID NO: 484679 - DNA, 120 bp, Artificial Sequence
  ENSG00000162241_45 (sequence is synthesized)
tggcacaaggccccatctcccaagggatggtacctaacctacgacccttactcctgggaccaaagtaaacaagcgaagacttggcctgccacaccctaagtaccaccacccaccaccaga

SEQ ID NO: 484680 - DNA, 120 bp, Artificial Sequence
  ENSG00000162241_46 (sequence is synthesized)
ggcgaccgccagcccccgtcgccatcagccatctccagggctgaggaactgagcccatgtacctgtcacaaaacaaacaagcaaaaaacagataaatccctcagagacaggctagccttg

SEQ ID NO: 484681 - DNA, 120 bp, Artificial Sequence
  ENSG00000162241_47 (sequence is synthesized)
acatggaccccgattctcacctggactccaaaagctatcttgacctactggcatctctgacccaaatcttaattgcccccatcgccctctacatccccccagcactgaccctcaccagga

SEQ ID NO: 484682 - DNA, 120 bp, Artificial Sequence
  ENSG00000162241_48 (sequence is synthesized)
ctccagccccaattccatcccaaatctgtgtagcatctgcttctgccgattctaagagccctagcacctgccaagtccccccattacccaccttcccacactcagaagcctctttggtgg

SEQ ID NO: 484683 - DNA, 120 bp, Artificial Sequence
  ENSG00000162241_49 (sequence is synthesized)
gatgctaatgggaaggagtcttgcctctctggaggcaggaggggctggccttgtgcccctccgggcctctgagaggtgggcgcaggagaacagcactcacgaggggacctccttcaccct

SEQ ID NO: 484684 - DNA, 120 bp, Artificial Sequence
  ENSG00000162241_50 (sequence is synthesized)
gggaaagggtggtttctttgctatttcacagtcacaggctgaatccttcacttggccctgcccaccgtacaggtatgctcactgccggctttagggaggccagaaaccaacctgctcctg

SEQ ID NO: 484685 - DNA, 120 bp, Artificial Sequence
  ENSG00000162241_51 (sequence is synthesized)
caaaaagaatccaggcttgttctgagtgcctgctgtaggccaggcaagttggtcactgttgcatgaggggcagtgcctctcactcttgggcctgatgccaagggaggtggcctgtcccgg

SEQ ID NO: 484686 - DNA, 120 bp, Artificial Sequence
  ENSG00000162241_52 (sequence is synthesized)
tcgcatgcagacatcctggccatcccagccacacatgcacgtgagaggctgggtgccggcagggttcctgagggactggaagatgtggccccctgcctgcctccttcctcttgtgaatat

SEQ ID NO: 484687 - DNA, 120 bp, Artificial Sequence
  ENSG00000162241_53 (sequence is synthesized)
ggttcctgcaggtatgctcactgccggctttagggaggccagaaaccaacctgctcctgcaaaaagaatccaggcttgttctgagtgcctgctgtaggccaggcctactgtctggctcct

SEQ ID NO: 484688 - DNA, 120 bp, Artificial Sequence
  ENSG00000162244_0 (sequence is synthesized)
ctcttccggttctaggcgcttcgggagccgcggcttatggtgcagacatggccaagtccaagaaccacaccacacacaaccagtcccgaaaatggcacagaaatggtatcaagaaacccc

SEQ ID NO: 484689 - DNA, 120 bp, Artificial Sequence
  ENSG00000162244_1 (sequence is synthesized)
gatcacaaagatacgaatctcttaagggggtggaccccaagttcctgaggaacatgcgctttgccaagaagcacaacaaaaagggcctaaagaagatgcaggccaacaatgccaaggcca

SEQ ID NO: 484690 - DNA, 120 bp, Artificial Sequence
  ENSG00000162244_2 (sequence is synthesized)
tgagtgcacgtgccgaggctatcaaggccctcgtaaagcccaaggaggttaagcccaagatcccaaagggtgtcagccgcaagctcgatcgacttgcctacattgcccaccccaagcttg

SEQ ID NO: 484691 - DNA, 120 bp, Artificial Sequence
  ENSG00000162244_3 (sequence is synthesized)
caggctgtgccggccaaaggccaaggccaaggccaaggccaaggatcaaaccaaggcccaggctgcagccccagcttcagttccagctcaggctcccaaacgtacccaggcccctacaaa

SEQ ID NO: 484692 - DNA, 120 bp, Artificial Sequence
  ENSG00000162244_4 (sequence is synthesized)
ggcttcagagtagatatctctgccaacatgaggacagaaggactggtgcgaccccccacccccgcccctgggctaccatctgcatggggctggggtcctcctgtgctatttgtacaaata

SEQ ID NO: 484693 - DNA, 120 bp, Artificial Sequence
  ENSG00000162244_5 (sequence is synthesized)
aacctgaggcaggatttgttagcctctgtctatgatcctggggatgggtttggttgctccatctgttggtgtgggagaagacatgggtctggatggtggggtgtgggtgggagtcaggag

SEQ ID NO: 484694 - DNA, 120 bp, Artificial Sequence
  ENSG00000162244_6 (sequence is synthesized)
gcttatggtgagtgttggccgcgcggcatccgatgccatccgcgacttacgggtggcggcggggcgcgggctgcggagaggactggtgaccgaccgtgtgtctgtcgggagcaaaagctg

SEQ ID NO: 484695 - DNA, 120 bp, Artificial Sequence
  ENSG00000162244_7 (sequence is synthesized)
cgcgcggcatccgatgccatccgcgacttacgggtggcggcggggcgcgggctgcggagaggactggtgaccgaccgtgtgtctgtcgggagcaaaagctgcggggtgcagacatggcca

SEQ ID NO: 484696 - DNA, 120 bp, Artificial Sequence
  ENSG00000162244_8 (sequence is synthesized)
gaatctcttaagggggtgagtgcactgaatcacatggaagtgtcttttcttggttccaggtgcacagtcaaggcctctcatgtagtttttctctagctttggcttctgcctgagcacagc

SEQ ID NO: 484697 - DNA, 120 bp, Artificial Sequence
  ENSG00000162244_9 (sequence is synthesized)
ctaactggcccacccaaagcctgcaattcctttttctaccctaccagacccataataaagctttccttggtctccacagcctgaagtgtaaccctctggtcagggtgtaacctgcctcct

SEQ ID NO: 484698 - DNA, 120 bp, Artificial Sequence
  ENSG00000162244_10 (sequence is synthesized)
tagggtaaggagtggccttgtctgagtgcgtgcagggcacattcccacactgaccagccttatgacctccatctgacccagtgctggagttggggtcagcttctcttcctgtgtcagggg

SEQ ID NO: 484699 - DNA, 120 bp, Artificial Sequence
  ENSG00000162244_11 (sequence is synthesized)
gttctaaggattagctgagaaggctggagggtctaggggagagctgagcatgtccccagtctgttccttccctttacttttgctctctgttccgtggagtgaatcacaaactctgagcct

SEQ ID NO: 484700 - DNA, 120 bp, Artificial Sequence
  ENSG00000162244_12 (sequence is synthesized)
cagtttccccatatcccaccttggctataagtcttttggaccagacttggtatttaattgacaccttcttctaaagaggggagggggtgtccctgaggggatgtcaggaaaaaacttggt

SEQ ID NO: 484701 - DNA, 120 bp, Artificial Sequence
  ENSG00000162244_13 (sequence is synthesized)
cgaacccctgctgtaggaagttgaagccccacaaccttggcagacagggcagcaaagcagcttgtaattttgttcttgaaggaggtctgcacagcattacccaggtggcgtattggctcc

SEQ ID NO: 484702 - DNA, 120 bp, Artificial Sequence
  ENSG00000162244_14 (sequence is synthesized)
ctcttccggttctaggcgcttcgggagccgcggcttatggtgcagacatggccaagtccaagaaccacaccacacacaaccagtgtaagttttttgggccctgcctacatcccagaccct

SEQ ID NO: 484703 - DNA, 120 bp, Artificial Sequence
  ENSG00000162244_15 (sequence is synthesized)
ggcaaggactggttcaggcaaactgggacagagatgaaggggcacgtttccattgtgggcctgaggctgattgatttcacccagtaataactttagggtttataggtttagagatctact

SEQ ID NO: 484704 - DNA, 120 bp, Artificial Sequence
  ENSG00000162244_16 (sequence is synthesized)
gaatctcttaaggggcctgaagtgtaaccctctggtcagggtgtaacctgcctcctgagggcagtttggctatctcccttgcttggcagtggcacttagggtggaccccaagttcctgag

SEQ ID NO: 484705 - DNA, 120 bp, Artificial Sequence
  ENSG00000162267_0 (sequence is synthesized)
tcagcgatggcatttgcatggtggccctgtctcatcttggctctgctctccagcttggcagcctctggcttcccgagaagcccctttcggctgcttgggaaacggagcctcccggaaggg

SEQ ID NO: 484706 - DNA, 120 bp, Artificial Sequence
  ENSG00000162267_1 (sequence is synthesized)
gtggccaatggcatcgaggtctacagtaccaaaatcaactccaaggtgacctcccgttttgctcacaatgttgtcaccatgagagccgtcaaccgtgcagacacggccaaggaggtttcc

SEQ ID NO: 484707 - DNA, 120 bp, Artificial Sequence
  ENSG00000162267_2 (sequence is synthesized)
tttgatgtggagctgcccaagacggccttcatcaccaacttcaccttgaccatcgacggtgttacctaccctgggaatgtcaaggagaaggaagttgccaagaagcagtatgaaaaggct

SEQ ID NO: 484708 - DNA, 120 bp, Artificial Sequence
  ENSG00000162267_3 (sequence is synthesized)
gtgtcccagggcaagacggccggcttggtcaaggcctctgggaggaagttggagaagttcacagtctcggtcaacgtggctgcaggcagcaaagtcaccttcgagctaacctacgaggag

SEQ ID NO: 484709 - DNA, 120 bp, Artificial Sequence
  ENSG00000162267_4 (sequence is synthesized)
ctgctgaagaggcacaagggcaagtacgagatgtacctcaaggtccagcctaagcaactggtcaaacactttgagatcgaggtagacatcttcgagcctcagggaatcagcatgctggat

SEQ ID NO: 484710 - DNA, 120 bp, Artificial Sequence
  ENSG00000162267_5 (sequence is synthesized)
gctgaggcctctttcatcaccaacgacctcctgggaagcgccctcaccaagtccttctcagggaaaaagggccatgtgtccttcaagcccagcttagaccaacagcgttcatgcccaacc

SEQ ID NO: 484711 - DNA, 120 bp, Artificial Sequence
  ENSG00000162267_6 (sequence is synthesized)
tgtacagactccctcctcaatggagatttcactatcacctatgacgtgaacagagaatctcctggcaacgtgcagatagtcaatggctacttcgtgcacttctttgcacctcaaggcctt

SEQ ID NO: 484712 - DNA, 120 bp, Artificial Sequence
  ENSG00000162267_7 (sequence is synthesized)
ccagtggtgcctaagaacgtggcctttgtgattgacatcagcggctccatggctggtcggaaattagagcagacaaaggaggcccttctcagaatcctggaagatatgcaagaggaagac

SEQ ID NO: 484713 - DNA, 120 bp, Artificial Sequence
  ENSG00000162267_8 (sequence is synthesized)
tatctgaatttcatcctgttcagtggagatgtgtccacatggaaagagcacttagtccaggccacgcccgagaacctccaggaggccaggacgtttgtgaagagcatggaggataaagga

SEQ ID NO: 484714 - DNA, 120 bp, Artificial Sequence
  ENSG00000162267_9 (sequence is synthesized)
atgaccaacatcaatgacgggctgctgaggggcatcagtatgctgaacaaggcccgagaggagcacagaatcccagagaggagcacctccattgtcatcatgctgactgatggggatgcc

SEQ ID NO: 484715 - DNA, 120 bp, Artificial Sequence
  ENSG00000162267_10 (sequence is synthesized)
aatgttggtgagagcagacccgaaaaaatccaagagaatgtgcggaatgccatcgggggcaagttccccttgtataacctgggctttggcaacaatctgaattataacttcctggagaac

SEQ ID NO: 484716 - DNA, 120 bp, Artificial Sequence
  ENSG00000162267_11 (sequence is synthesized)
atggccctggagaaccatgggtttgcccggcgcatttatgaggactctgatgccgatttgcagttgcagggcttctatgaggaggtggccaacccactgctgacgggtgtggagatggag

SEQ ID NO: 484717 - DNA, 120 bp, Artificial Sequence
  ENSG00000162267_12 (sequence is synthesized)
agaacgctatcctggacctcacccagaacacttaccagcacttctacgatggctctgagatcgtggtggccgggcgcctggtggacgaggacatgaacagctttaaggcagatgtgaagg

SEQ ID NO: 484718 - DNA, 120 bp, Artificial Sequence
  ENSG00000162267_13 (sequence is synthesized)
gccatggggccaccaacgacctgaccttcacagaggaggtggacatgaaggagatggagaaggccctgcaggagcgggactacatcttcgggaattacattgagcggctctgggcctacc

SEQ ID NO: 484719 - DNA, 120 bp, Artificial Sequence
  ENSG00000162267_14 (sequence is synthesized)
tcaccattgagcagctgctggagaagcgcaagaacgcccatggcgaggagaaggagaacctcacggcccgggccctggacctgtccctcaagtatcactttgtgactccactgacctcaa

SEQ ID NO: 484720 - DNA, 120 bp, Artificial Sequence
  ENSG00000162267_15 (sequence is synthesized)
tggtggtgaccaagcctgaggacaacgaggatgagagggccattgccgacaagcctggggaagatgcagaagccacaccggtgagccccgccatgtcctacctgaccagctaccagcctc

SEQ ID NO: 484721 - DNA, 120 bp, Artificial Sequence
  ENSG00000162267_16 (sequence is synthesized)
ctcaaaacccctactactatgtggacggggatccccacttcatcatccaaattccggagaaagacgatgccctctgcttcaacatcgatgaagccccaggcacagtgctgcgccttattc

SEQ ID NO: 484722 - DNA, 120 bp, Artificial Sequence
  ENSG00000162267_17 (sequence is synthesized)
aggatgcagtcacaggcctcacagttaatgggcagatcactggcgacaagagaggcagccctgactccaagaccagaaagacttactttggaaaactgggcatcgccaatgctcagatgg

SEQ ID NO: 484723 - DNA, 120 bp, Artificial Sequence
  ENSG00000162267_18 (sequence is synthesized)
acttccaggtggaggtgacaacggagaagatcaccctgtggaacagggccgtgccgagcactttcagctggctggacacagtcacagtcacgcaggatgggctgtccatgatgatcaaca

SEQ ID NO: 484724 - DNA, 120 bp, Artificial Sequence
  ENSG00000162267_19 (sequence is synthesized)
ggaagaacatggtggtctcctttggagatggggttaccttcgtggtcgtcctacaccaggtgtggaagaaacatcctgtccaccgtgactttctaggcttctacgtggtggacagtcacc

SEQ ID NO: 484725 - DNA, 120 bp, Artificial Sequence
  ENSG00000162267_20 (sequence is synthesized)
ggatgtcagcacagacgcatgggctgctggggcaattcttccaaccctttgactttaaagtgtctgacatccggccaggctctgaccccacaaagccagatgccacattggtggtgaaga

SEQ ID NO: 484726 - DNA, 120 bp, Artificial Sequence
  ENSG00000162267_21 (sequence is synthesized)
accatcagctgattgtcaccaggggctcccagaaagactacagaaaggatgccagcatcggcacgaaggttgtctgctggttcgtccacaacaacggagaagggctgattgatggtgtcc

SEQ ID NO: 484727 - DNA, 120 bp, Artificial Sequence
  ENSG00000162267_22 (sequence is synthesized)
acactgactacattgtccccaacctgttttgagtagacacaccagctcctgttgggatggatggcccggattttatggcatctggaacatgggcacagagaggggcctgtgggaggggct

SEQ ID NO: 484728 - DNA, 120 bp, Artificial Sequence
  ENSG00000162267_23 (sequence is synthesized)
gggaaaataaagtccaaggtcgagaccagacagctgccagcctctacatgccttcatgagcctctgctccagggaacaggcaactgggacccacagcagctcaaaagaggggatggctag

SEQ ID NO: 484729 - DNA, 120 bp, Artificial Sequence
  ENSG00000162267_24 (sequence is synthesized)
caggaaggcaacttcttgggcctctccactgacacagctgagagacagagttggttggactagaactttagggattcaaatgtatgacagcttgggggaaaaaataaagaactgactctg

SEQ ID NO: 484730 - DNA, 120 bp, Artificial Sequence
  ENSG00000162267_25 (sequence is synthesized)
attcattgtttgctgagtaccaccatgggctggcagatagggtccttgggcacatgagtggggccggctgtcccggcctcctccgctccagcctgtctgcacactggcaccctgaggaca

SEQ ID NO: 484731 - DNA, 120 bp, Artificial Sequence
  ENSG00000162267_26 (sequence is synthesized)
gtcagggacaggcagagtgaacattaggagccattaggacgggcccagccctggggcatggatgcccagctgcagcatcagtgggagcctgacctggggcttgagatgactggccccgtg

SEQ ID NO: 484732 - DNA, 120 bp, Artificial Sequence
  ENSG00000162267_27 (sequence is synthesized)
gacgacccctccaacctcgcaggatgtagcccaagagggcccctcacaggcatcccttccttccgcagacacttccttagcacttgctggtacctggctctgtgaagcggtccctgccac

SEQ ID NO: 484733 - DNA, 120 bp, Artificial Sequence
  ENSG00000162267_28 (sequence is synthesized)
accctcacgaagcatctttatatccctagggggagggggctggaacacctccctagagcctctcaaaattcaacacccctattggaaagagggtgtttggagacttcccttggcacagga

SEQ ID NO: 484734 - DNA, 120 bp, Artificial Sequence
  ENSG00000162267_29 (sequence is synthesized)
gatagggatggaggccggaacccggaggcctcctgtgctgggcaccctacctgggtgtccagtggaggagtgggccaggctggggagacccagacctgctgaagtagggcatctgaagga

SEQ ID NO: 484735 - DNA, 120 bp, Artificial Sequence
  ENSG00000162267_30 (sequence is synthesized)
aaactggccacgggatggggaaagtggggtggagcgtgaagcagtcagcatggacagtggggtgtggggtgaataggagcctctgcacctctaaagggaagtgagtaaagggggcacact

SEQ ID NO: 484736 - DNA, 120 bp, Artificial Sequence
  ENSG00000162267_31 (sequence is synthesized)
ttccttttaatgggaagctaccccttccctaagtagcttctcagtgctgagctccaaggtagcctgggctaatgggtgtgtgaggccaagaaaaagggagctggaagctgaatcagccaa

SEQ ID NO: 484737 - DNA, 120 bp, Artificial Sequence
  ENSG00000162267_32 (sequence is synthesized)
aagcaagataggacccccagccatgggggcacacttgggacacctgggctcaggcccagccctattgccaaatcatgaacgtgcccctctctgagcctgaggatccctgtgagttaattg

SEQ ID NO: 484738 - DNA, 120 bp, Artificial Sequence
  ENSG00000162267_33 (sequence is synthesized)
ggggtggcttcccttgcccagggagacacaatcagtatgacagtatctatgacctgcaaaaatgagcaatttagcatgtcagtcatttatacttcattagtcccatagcaaccctccaag

SEQ ID NO: 484739 - DNA, 120 bp, Artificial Sequence
  ENSG00000162267_34 (sequence is synthesized)
agggcccttttatgatccccattttacaatggggaaattgaggcacggggggttaatttgctcagtctgtttgctcacagactcagcagatggccaagctggtacttaggccaaggcagt

SEQ ID NO: 484740 - DNA, 120 bp, Artificial Sequence
  ENSG00000162267_35 (sequence is synthesized)
ctggccccaatgcccatgctgggaattgctggggatcacagtcctctgtgcctctctcaccacaaaactggaacctcacaaactccctgccactaggcagggcctccccagcccctactg

SEQ ID NO: 484741 - DNA, 120 bp, Artificial Sequence
  ENSG00000162267_36 (sequence is synthesized)
gcctgccccacctccatttggactggcacatttggactgggccatcacattcccctcagaacagccctgataaatgtaccggtgcatgtgagtacatatatgcatgtgcacgcatatgtg

SEQ ID NO: 484742 - DNA, 120 bp, Artificial Sequence
  ENSG00000162267_37 (sequence is synthesized)
tgcgcctgtgtgcacgtgtgggtgggtgtttactatcaagaagcaacagacagccgtgagcctcactcaccccaactagggggtgggaagcccaggggtggggcagatgtttgctgtgag

SEQ ID NO: 484743 - DNA, 120 bp, Artificial Sequence
  ENSG00000162267_38 (sequence is synthesized)
cattactcaagagagagaagatgacttaatggcttgcatttcagccacatcaaaaagccctgcgccaacgttaaaatcacatcccattgccaccagccccataaagggcttccctggacg

SEQ ID NO: 484744 - DNA, 120 bp, Artificial Sequence
  ENSG00000162267_39 (sequence is synthesized)
tgcccgatttccaaagcctaatctttgtagtcacatctccacctctatctgccagtgttggggcccctctggggcccagcagcgctaagacaggaggaaggcacggggctgggggagaag

SEQ ID NO: 484745 - DNA, 120 bp, Artificial Sequence
  ENSG00000162267_40 (sequence is synthesized)
gaacccctagaccctgctcaccactgcccttcggcttttcagccacaccggtgagccccgccatgtcctacctgagtgagtacatgctggcagctgccactcctcccactgcttagagcc

SEQ ID NO: 484746 - DNA, 120 bp, Artificial Sequence
  ENSG00000162267_41 (sequence is synthesized)
tccaccgtggctactcactcagctctccgggatgggcagatggacaatgtgccctgaggagattgcggggtgggagggcaatggcattagcgagcgggaaggggaggggaggggcataag

SEQ ID NO: 484747 - DNA, 120 bp, Artificial Sequence
  ENSG00000162267_42 (sequence is synthesized)
cagggggtcccaaatgcccactgcaactaggtacagggtctgtgtgtggtggtggaggattggcattgggagacatgggaggcaaagagctgggcctggccaggccaggcctctggcttc

SEQ ID NO: 484748 - DNA, 120 bp, Artificial Sequence
  ENSG00000162267_43 (sequence is synthesized)
caagaactcctagttccaggggacacccagtgggggaagagctggctgctgggaggcccacagcctagggctggtcggccaagcagccagctctggtccctgctcacaagtgccctatgg

SEQ ID NO: 484749 - DNA, 120 bp, Artificial Sequence
  ENSG00000162298_0 (sequence is synthesized)
gggggtggggagtgttgttaaccggaggggcagccgcagtcgcgcggattgagcgggctcgcggcgctgggttcctggtctccgggccagggcaatgttccgcacggcagtgatgatggc

SEQ ID NO: 484750 - DNA, 120 bp, Artificial Sequence
  ENSG00000162298_1 (sequence is synthesized)
ggccagcctggcgctgaccggggctgtggtggctcacgcctactacctcaaacaccagttctaccccactgtggtgtacctgaccaagtccagccccagcatggcagtcctgtacatcca

SEQ ID NO: 484751 - DNA, 120 bp, Artificial Sequence
  ENSG00000162298_2 (sequence is synthesized)
ggcctttgtccttgtcttccttctgggcaaggtgatgggcaaggtgttctttgggcaactgagggcagcagagatggagcaccttctggaacgttcctggtacgccgtcacagagacttg

SEQ ID NO: 484752 - DNA, 120 bp, Artificial Sequence
  ENSG00000162298_3 (sequence is synthesized)
tctggccttcaccgtttttcgggatgacttcagcccccgctttgttgcactcttcactcttcttctcttcctcaaatgtttccactggctggctgaggaccgtgtggactttatggaacg

SEQ ID NO: 484753 - DNA, 120 bp, Artificial Sequence
  ENSG00000162298_4 (sequence is synthesized)
cagccccaacatctcctggctctttcactgccgcattgtctctcttatgttcctcctgggcatcctggacttcctcttcgtcagccacgcctatcacagcatcctgacccgtggggcctc

SEQ ID NO: 484754 - DNA, 120 bp, Artificial Sequence
  ENSG00000162298_5 (sequence is synthesized)
tgtgcagctggtgtttggctttgagtatgccatcctgatgacgatggtgctcaccatcttcatcaagtatgtgctgcactccgtggacctccagagtgagaacccctgggacaacaaggc

SEQ ID NO: 484755 - DNA, 120 bp, Artificial Sequence
  ENSG00000162298_6 (sequence is synthesized)
tgtgtacatgctctacacagagctgtttacaggcttcatcaaggttctgctgtacatggccttcatgaccatcatgatcaaggtgcacaccttcccactctttgccatccggcccatgta

SEQ ID NO: 484756 - DNA, 120 bp, Artificial Sequence
  ENSG00000162298_7 (sequence is synthesized)
cctggccatgagacagttcaagaaagctgtgacagatgccatcatgtctcgccgagccatccgcaacatgaacaccctgtatccagatgccaccccagaggagctccaggcaatggacaa

SEQ ID NO: 484757 - DNA, 120 bp, Artificial Sequence
  ENSG00000162298_8 (sequence is synthesized)
tgtctgcatcatctgccgagaagagatggtgactggtgccaagagactgccctgcaaccacattttccataccagctgcctgcgctcctggttccagcggcagcagacctgccccacctg

SEQ ID NO: 484758 - DNA, 120 bp, Artificial Sequence
  ENSG00000162298_9 (sequence is synthesized)
ccgtatggatgtccttcgtgcatcgctgccagcgcagtcaccaccacccccggagcctgcggatcaggggccaccccctgccccccaccccccaccactcttgcctcagccccccaactt

SEQ ID NO: 484759 - DNA, 120 bp, Artificial Sequence
  ENSG00000162298_10 (sequence is synthesized)
cccccagggcctcctgcctccttttcctccaggcatgttcccactgtggccccccatgggcccctttccacctgtcccgcctccccccagctcaggagaggctgtggctcctccatccac

SEQ ID NO: 484760 - DNA, 120 bp, Artificial Sequence
  ENSG00000162298_11 (sequence is synthesized)
cagtgcagccctttctcggcccagtggagcagctacaaccacagctgctggcaccagtgctactgctgcttctgccacagcatctggcccaggctctggctctgccccagaggctggccc

SEQ ID NO: 484761 - DNA, 120 bp, Artificial Sequence
  ENSG00000162298_12 (sequence is synthesized)
tccaccctttgccttccccccaatgcctgtgccccctgcgggctttgctgggctgaccccagaggagctacgagctctggagggccatgagcggcagcacctggaggcccggctgcagag

SEQ ID NO: 484762 - DNA, 120 bp, Artificial Sequence
  ENSG00000162298_13 (sequence is synthesized)
cctgcgtaacatccacacactgctggacgccgccatgctgcagatcaaccagtacctcaccgtgctggcctccttggggcccccccggcctgccacttcagtcaactccactgaggagac

SEQ ID NO: 484763 - DNA, 120 bp, Artificial Sequence
  ENSG00000162298_14 (sequence is synthesized)
tgccactacagttgttgctgctgcctcctccaccagcatccctagctcagaggccacgaccccaaccccaggagcctccccaccagcccctgaaatggaaaggcctccagctcctgagtc

SEQ ID NO: 484764 - DNA, 120 bp, Artificial Sequence
  ENSG00000162298_15 (sequence is synthesized)
agtgggcacagaggagatgcctgaggatggagagcccgatgcagcagagctccgccggcgccgcctgcagaagctggagtctcctgttgcccactgacactgccccagcccagccccagc

SEQ ID NO: 484765 - DNA, 120 bp, Artificial Sequence
  ENSG00000162298_16 (sequence is synthesized)
ctctgctcttttgagcagccctcgctggaacatgtcctgccaccaagtgccagctccctctctgtctgcaccagggagtagtacccccagctctgagaaagaggcggcatcccctaggcc

SEQ ID NO: 484766 - DNA, 120 bp, Artificial Sequence
  ENSG00000162298_17 (sequence is synthesized)
aagtggaaagaggctggggttcccatttgactccagtcccaggcagccatggggatctcgggtcagttccagccttcctctccaactcttcagccctgtgttctgctggggccatgaagg

SEQ ID NO: 484767 - DNA, 120 bp, Artificial Sequence
  ENSG00000162298_18 (sequence is synthesized)
cagaaggtttagcctctgagaagccctcttcttcccccacccctttccaggagaaggggctgcccctccaagccctacttgtatgtgcggagtcacactgcagtgccgaacagtattagc

SEQ ID NO: 484768 - DNA, 120 bp, Artificial Sequence
  ENSG00000162298_19 (sequence is synthesized)
tcccgttcccaagtgtggactccagaggggctggaggcaagctatgaacttgctcgctggcccacccctaagactggtacccatttccttttcttaccctgatctccccagaagcctctt

SEQ ID NO: 484769 - DNA, 120 bp, Artificial Sequence
  ENSG00000162298_20 (sequence is synthesized)
gtggtggtggctgtgccccctatgccctgtggcatttctgcgtcttactggcaaccacacaactcagggaaaggaatgcctgggagtgggggtgcaggcgggcagcactgagggaccctg

SEQ ID NO: 484770 - DNA, 120 bp, Artificial Sequence
  ENSG00000162298_21 (sequence is synthesized)
ccccgcccctccccccaggcccctttcctctgcagcttctcaagtgagactgacctgtctcacccagcagccactgcccagccgcactccaggcaagggccagtgcgcctgctcctgacc

SEQ ID NO: 484771 - DNA, 120 bp, Artificial Sequence
  ENSG00000162298_22 (sequence is synthesized)
actgcaatcccagcgcccaaggaaggccacttctcaactggcagaacttctgaagtttagaattggaattacttccttactagtgtcttttggcttaaattttgtcttttgaagttgaat

SEQ ID NO: 484772 - DNA, 120 bp, Artificial Sequence
  ENSG00000162298_23 (sequence is synthesized)
gcttaatcccgggaaagaggaacaggagtgccagactcctggtctttccagtttagaaaaggctctgtgccaaggagggaccacaggagctgggacctgcctgcccctgtcttttcccct

SEQ ID NO: 484773 - DNA, 120 bp, Artificial Sequence
  ENSG00000162298_24 (sequence is synthesized)
tggttttgtgttacaagagttgttggagacagtttcagatgattatttaatttgtaaatattgtacaaattttaatagcttaaattgtatatacagccaaataaaaacttgcattaacaa

SEQ ID NO: 484774 - DNA, 120 bp, Artificial Sequence
  ENSG00000162298_25 (sequence is synthesized)
ttgtggttggggtcgggacccgaaccttccccttgaggtctccggagtcggcacgcccctcagccccgccgcacgctttcggcctgtcagctggccggagacctcagacgccggtgcggc

SEQ ID NO: 484775 - DNA, 120 bp, Artificial Sequence
  ENSG00000162298_26 (sequence is synthesized)
actgccgcattgtctgtgagtgagattcaggggaggggaagggaggactggaacgtgaaccgtggacctgtactccagagcacaggctaccccccacagctgtacaggaaagataattta

SEQ ID NO: 484776 - DNA, 120 bp, Artificial Sequence
  ENSG00000162298_27 (sequence is synthesized)
agccccgctggacaccggttctccatccccgcagcgtagcccggaacatggtagctgccatctttacctgctacgccagccttctgtgcgcgcaactgtctggtcccgccccgtcctgcg

SEQ ID NO: 484777 - DNA, 120 bp, Artificial Sequence
  ENSG00000162298_28 (sequence is synthesized)
cgagctgcctgcccaggcaggttcgccggtgcgagcgtaaaggggcggagctaggactgccttgggcggtacaaatagcagggaaccgcgcggtcgctcagcagtgacgtgacacgcagc

SEQ ID NO: 484778 - DNA, 120 bp, Artificial Sequence
  ENSG00000162298_29 (sequence is synthesized)
ccacggtctgtactgacgcgccctcgcttcttcctctttctcgactccatcttcgcggtagctgggaccgccgttcagtcgccaatatgcagctctttgtccgcgcccaggagctacaca

SEQ ID NO: 484779 - DNA, 120 bp, Artificial Sequence
  ENSG00000162298_30 (sequence is synthesized)
ctctgtgctgttccactctagggcttctcaactgcctgggccctcagccctttgccttctcacctgcagcctgggcagccccaacaactccccctcccccaggaagttcccagagggcca

SEQ ID NO: 484780 - DNA, 120 bp, Artificial Sequence
  ENSG00000162298_31 (sequence is synthesized)
ggttcagtggagtgtgcccacctgactagatcgctggggccatggtgggcttgagggtggggctgtcctagagcattaaacagctgttgggccctgggctgacccccccaccctgcatgt

SEQ ID NO: 484781 - DNA, 120 bp, Artificial Sequence
  ENSG00000162298_32 (sequence is synthesized)
cccactccagaaagcatgtctggatctaagtaggagtgatgtttattcgagagctgactttagatcttattcctttatatttttctaaagtcaaattattcagaatttgcagtgctttag

SEQ ID NO: 484782 - DNA, 120 bp, Artificial Sequence
  ENSG00000162298_33 (sequence is synthesized)
ttcatcacatgatattcttctgagatgtggtgacacttagattggcaattgctgcccccaaactgagggagcgaataataggaagtcacttggagccatcctggctcaagttcaagcgct

SEQ ID NO: 484783 - DNA, 120 bp, Artificial Sequence
  ENSG00000162298_34 (sequence is synthesized)
ggtcccatcactcatttttgacctctcattatttgaataaaggggtcttaattcatattcataagtgatgtgtactgccagatacacacctataatcagcactttggaaggctgaggcag

SEQ ID NO: 484784 - DNA, 120 bp, Artificial Sequence
  ENSG00000162298_35 (sequence is synthesized)
gaggattgtttgagcctaggaatttgagggtgcagtgagctatgattgtgccactaaattccagctttggtgacagagccgagacgctgtcttttaaaaaagtgacatgtacataatgcc

SEQ ID NO: 484785 - DNA, 120 bp, Artificial Sequence
  ENSG00000162298_36 (sequence is synthesized)
tggcatctagcagtgacagcacaggcttggagaggaacttgagtccaaggctcgagcactgtggcttattgagtgagtcccctataaggtgcctgactccccagggtggagactgcaggg

SEQ ID NO: 484786 - DNA, 120 bp, Artificial Sequence
  ENSG00000162298_37 (sequence is synthesized)
taagagtgaacaggtcaacagtccctgcctgcaagcaccttacagctaagggatagaatcatttggcccttgagtccagtcaccctgtctgagttcattcagcatgttcacttgtgtttg

SEQ ID NO: 484787 - DNA, 120 bp, Artificial Sequence
  ENSG00000162298_38 (sequence is synthesized)
ccaggcactggggccacaagggcacatcattctatactctgttctgcaaggctcaccaagggcaggagaatctgcccaaccttggatgccaaggccaggcccgcctctcgtcccttctct

SEQ ID NO: 484788 - DNA, 120 bp, Artificial Sequence
  ENSG00000162298_39 (sequence is synthesized)
gcaaggtgttctttgggcaactgagggcagcagagatggaggtaagatgtcggctgccccaaaggtgagggcagggtgctgggaaagaatgtttggtatccacattattccctgcctggc

SEQ ID NO: 484789 - DNA, 120 bp, Artificial Sequence
  ENSG00000162300_0 (sequence is synthesized)
agagacgtggcagcggagggataatcggggcggccggggctgaagggagaggcgcaggagccctggggagagtggtccctgcccttccgcgcctcgagccatcgctaccgcccttcggaa

SEQ ID NO: 484790 - DNA, 120 bp, Artificial Sequence
  ENSG00000162300_1 (sequence is synthesized)
ccagtgcagcggccgatcagtaaacacagagactggggatcgatcatggggctttgtaagtgccccaagagaaaggtgaccaacctgttctgcttcgaacatcgggtcaacgtctgcgag

SEQ ID NO: 484791 - DNA, 120 bp, Artificial Sequence
  ENSG00000162300_2 (sequence is synthesized)
cactgcctggtagccaatcacgccaagtgcatcgtccagtcctacctgcaatggctccaagatagcgactacaaccccaattgccgcctgtgcaacatacccctggccagccgagagacg

SEQ ID NO: 484792 - DNA, 120 bp, Artificial Sequence
  ENSG00000162300_3 (sequence is synthesized)
acccgccttgtctgctatgatctctttcactgggcctgcctcaatgaacgtgctgcccagctaccccgaaacacggcacctgccggctatcagtgccccagctgcaatggccccatcttc

SEQ ID NO: 484793 - DNA, 120 bp, Artificial Sequence
  ENSG00000162300_4 (sequence is synthesized)
cccccaaccaacctggctggccccgtggcctccgcactgagagagaagctggccacagtcaactgggcccgggcaggactgggcctccctctgatcgatgaggtggtgagcccagagccc

SEQ ID NO: 484794 - DNA, 120 bp, Artificial Sequence
  ENSG00000162300_5 (sequence is synthesized)
accagaggaggtagacagcgcctctgctgccccagccttctacagccaggccccccggcccccagcttccccaggccggcccgagcagcacacagtgatccacatgggcaatcctgagcc

SEQ ID NO: 484795 - DNA, 120 bp, Artificial Sequence
  ENSG00000162300_6 (sequence is synthesized)
cttgactcacgcccctaggaaggtgtatgatacgcgggatgatgaccggacaccaggcctccatggagactgtgacgatgacaagtaccgacgtcggccggccttgggttggctggcccg

SEQ ID NO: 484796 - DNA, 120 bp, Artificial Sequence
  ENSG00000162300_7 (sequence is synthesized)
gctgctaaggagccgggctgggtctcggaagcggccgctgaccctgctccagcgggcggggctgctgctactcttgggactgctgggcttcctggccctccttgccctcatgtctcgcct

SEQ ID NO: 484797 - DNA, 120 bp, Artificial Sequence
  ENSG00000162300_8 (sequence is synthesized)
aggccgggccgcagctgacagcgatcccaacctggacccactcatgaaccctcacatccgcgtgggcccctcctgagcccccttgcttgtggctaggccagcctaggatgtgggttctgt

SEQ ID NO: 484798 - DNA, 120 bp, Artificial Sequence
  ENSG00000162300_9 (sequence is synthesized)
ggaggagaggcggggtaatggggaggctgagggcacctcttcactgcccctctccctcaagcctaagacactaagaccccagacccaaagccaagtccaccagagtggctgcaggccagg

SEQ ID NO: 484799 - DNA, 120 bp, Artificial Sequence
  ENSG00000162300_10 (sequence is synthesized)
cctggagtccccgtgggtcaagcatttgtcttgacttgctttcctcccgggtctccagcctccgacccctcgccccatgaaggagctggcaggtggaaataaacaacaactttattaaaa

SEQ ID NO: 484800 - DNA, 120 bp, Artificial Sequence
  ENSG00000162300_11 (sequence is synthesized)
gggatttatgcagggggtgtttctccgcataaggagggacagtgggcaggaatctgagatcggggcgaatatgagaggtgtctgggggagttaagagtggaaactgggctggtgagagcg

SEQ ID NO: 484801 - DNA, 120 bp, Artificial Sequence
  ENSG00000162300_12 (sequence is synthesized)
ttccaggccctcctcaagcagcaggacagtgagtcccccgagtctcagagcccagattctagtcctgttaaagttccttacctgctgtgtaagttcagatcgatgaggtggtgagcccag

SEQ ID NO: 484802 - DNA, 120 bp, Artificial Sequence
  ENSG00000162300_13 (sequence is synthesized)
tggccagccgagagacgacccgccttgtctgctatgattccttcctccagatcgatgaggtggtgagcccagagcccgagcccctcaacacgtctgacttctctgactggtctagtttta

SEQ ID NO: 484803 - DNA, 120 bp, Artificial Sequence
  ENSG00000162300_14 (sequence is synthesized)
cgctagaatgtaagccccacaagggcaaggacttgatttattttgttcactgatatatcccccgttcccaagagagagtctggtgcacagtatgtgctcaataaatatttattgattaaa

SEQ ID NO: 484804 - DNA, 120 bp, Artificial Sequence
  ENSG00000162300_15 (sequence is synthesized)
taaacacagagactggggtctgtagagaaggggcgggacttggagggggtggggctcaggagaggtcttgggggcggggccggtagtatcggggagcctctgatggaggggcctggccgg

SEQ ID NO: 484805 - DNA, 120 bp, Artificial Sequence
  ENSG00000162300_16 (sequence is synthesized)
cttgtctgctatggtgaggccttggcacctcggggggatcaggccagcctcaggggccagcttggtgactggtttccaggccctcctcaagcagcaggacagtgagtcccccgagtctca

SEQ ID NO: 484806 - DNA, 120 bp, Artificial Sequence
  ENSG00000162300_17 (sequence is synthesized)
gagcccagattctagtcctgttaaagttccttacctgctgtgtaagttcaggcaagttattcttcctttctaggcctcactgtctttcctaaaaattaaagctcctagttcctctttcct

SEQ ID NO: 484807 - DNA, 120 bp, Artificial Sequence
  ENSG00000162300_18 (sequence is synthesized)
aaaaattaagccctgccaatctggaggtttcagcgagaaccagtcaagcttacgggtatgctggtggccgtgactattagctagccagaccggcatgttgctttcagatattcaggatcc

SEQ ID NO: 484808 - DNA, 120 bp, Artificial Sequence
  ENSG00000162300_19 (sequence is synthesized)
accactgattccaaggctaaacagagaggaagtgagtttcccacattaaagttagctaaaagaagtcagcagacatatgtgtcatgactttgacctgaatctggggtaagagccttagct

SEQ ID NO: 484809 - DNA, 120 bp, Artificial Sequence
  ENSG00000162300_20 (sequence is synthesized)
ccagtttttgaaggagctcatgcaagagtcagctccatatgtgtttctccttgtgagtgcatgtgtgtacttgcaggcacttaatgtacattgtgtgtttaaatgagtgttagtgtgttg

SEQ ID NO: 484810 - DNA, 120 bp, Artificial Sequence
  ENSG00000162300_21 (sequence is synthesized)
atctgtacttggggtgaatgaatgggtaaatgtatgtatgtgaacatatgaacacaggtgtgttgtgggagtgcaagagaatgcatggttgagggtgcctgttagcaaacctgtgagtgt

SEQ ID NO: 484811 - DNA, 120 bp, Artificial Sequence
  ENSG00000162300_22 (sequence is synthesized)
atagatgtgtatgtgtgagggctcctgtacccatagtgtagatatagggaatgccacttgtgtttgattatgtgcttataaggacatgtacatttgtgcccagggatgtgtacatgtata

SEQ ID NO: 484812 - DNA, 120 bp, Artificial Sequence
  ENSG00000162300_23 (sequence is synthesized)
tctgaaactgttcattattagccattagcccaaagaatatgatgagtgcaggcccagagaggactcattgaaaggactgaaaggggaggtggcgttttcttcctacccaaacttacccct

SEQ ID NO: 484813 - DNA, 120 bp, Artificial Sequence
  ENSG00000162300_24 (sequence is synthesized)
gtgagctggacagcttggtagcacctgcctggacttagatggtggtagccaagaagactgacattttagggaacaggacggggaggagaaggctctggcacacacacatgtgtccatatg

SEQ ID NO: 484814 - DNA, 120 bp, Artificial Sequence
  ENSG00000162302_0 (sequence is synthesized)
cggccggagccgccatgtaaccggcgccgcccggagcccgagccgcgcgggccccagcgacccgcccgccatgggggacgaggacgacgatgagagctgcgccgtggagctgcggatcac

SEQ ID NO: 484815 - DNA, 120 bp, Artificial Sequence
  ENSG00000162302_1 (sequence is synthesized)
tcacagaagccaacctgaccgggcacgaggagaaggtgagcgtggagaacttcgagctgctcaaggtgctgggcacgggagcctacggcaaggtgttcctggtgcggaaggcgggcgggc

SEQ ID NO: 484816 - DNA, 120 bp, Artificial Sequence
  ENSG00000162302_2 (sequence is synthesized)
acgacgcggggaagctgtacgccatgaaggtgctgcgcaaggcggcgctggtgcagcgcgccaagacgcaagagcacacgcgcaccgagcgctcggtgctggagctggtgcgccaggcgc

SEQ ID NO: 484817 - DNA, 120 bp, Artificial Sequence
  ENSG00000162302_3 (sequence is synthesized)
ccttcctggtcacgctgcactacgctttccagacggatgccaagctgcacctcatcctggactatgtgagcggcggggagatgttcacccacctctaccagcgccagtacttcaaggagg

SEQ ID NO: 484818 - DNA, 120 bp, Artificial Sequence
  ENSG00000162302_4 (sequence is synthesized)
ctgaggtgcgcgtgtatgggggtgagatcgtgctggccctggaacacctgcacaagctcggcatcatttaccgagacctgaaactggagaatgtgctgctggactccgagggccacattg

SEQ ID NO: 484819 - DNA, 120 bp, Artificial Sequence
  ENSG00000162302_5 (sequence is synthesized)
tcctcacggacttcgggctgagcaaggagttcctgacggaggagaaagagcggaccttctccttctgtggcaccatcgagtacatggcccccgaaatcatccgtagcaagacggggcatg

SEQ ID NO: 484820 - DNA, 120 bp, Artificial Sequence
  ENSG00000162302_6 (sequence is synthesized)
gcaaggctgtggactggtggagcctgggcatcttgctcttcgagctgctgacgggggcctcgcccttcaccctggagggcgagaggaacacgcaggctgaggtgtctcgacggatcctga

SEQ ID NO: 484821 - DNA, 120 bp, Artificial Sequence
  ENSG00000162302_7 (sequence is synthesized)
agtgctcccctcccttcccccctcggatcgggcccgtggcgcaggacctgctgcagcggctgctttgtaaggatcctaagaagcgattgggcgcggggccccagggggcacaagaagtcc

SEQ ID NO: 484822 - DNA, 120 bp, Artificial Sequence
  ENSG00000162302_8 (sequence is synthesized)
ggaaccatcccttcttccagggcctcgattgggtggctctggctgccaggaagattccagccccattccggccccaaatccgctcagagctggatgtgggcaactttgcggaggaattca

SEQ ID NO: 484823 - DNA, 120 bp, Artificial Sequence
  ENSG00000162302_9 (sequence is synthesized)
ctcggctggagcctgtctactcaccccctggcagccccccacctggggacccccgaatctttcagggatactcctttgtggcaccctccattctctttgaccacaacaacgcggtgatga

SEQ ID NO: 484824 - DNA, 120 bp, Artificial Sequence
  ENSG00000162302_10 (sequence is synthesized)
ccgatgggctggaagcgcctggtgctggagaccggccaggtcgggcagcggtggccaggagcgctatgatgcaggactcgcccttcttccagcagtacgagctggacctgcgggagcctg

SEQ ID NO: 484825 - DNA, 120 bp, Artificial Sequence
  ENSG00000162302_11 (sequence is synthesized)
cgctgggccagggcagcttttctgtgtgtcgccgctgccgccagcgccagagcggccaggagttcgcagtcaagatcctcagtcgcaggctggaggcgaacacgcagcgcgaagtggctg

SEQ ID NO: 484826 - DNA, 120 bp, Artificial Sequence
  ENSG00000162302_12 (sequence is synthesized)
ccctgcgcctgtgccagtcacaccccaacgtggtgaatctgcacgaggtgcatcacgaccagctgcacacgtacctggtcctggagctgctgcggggcggggagctgctggagcacatcc

SEQ ID NO: 484827 - DNA, 120 bp, Artificial Sequence
  ENSG00000162302_13 (sequence is synthesized)
cggcacttcagcgagtcggaagcaagccagatcctgcgcagcctcgtgtcggccgtgagcttcatgcacgaggaggcgggcgtggtgcaccgcgacctcaagccggagaacatcctgtac

SEQ ID NO: 484828 - DNA, 120 bp, Artificial Sequence
  ENSG00000162302_14 (sequence is synthesized)
gccgacgacacgcccggggccccggtgaaaatcatcgacttcgggttcgcgcggttgcggccgcagagtcccggggtgcccatgcagacgccctgcttcacgctgcagtacgctgccccc

SEQ ID NO: 484829 - DNA, 120 bp, Artificial Sequence
  ENSG00000162302_15 (sequence is synthesized)
gagctgctggcgcagcagggctacgacgagtcctgcgacctctggagcctgggcgtcattctgtacatgatgctgtcggggcaggtccccttccagggggcctctggccagggcgggcag

SEQ ID NO: 484830 - DNA, 120 bp, Artificial Sequence
  ENSG00000162302_16 (sequence is synthesized)
agccaggcggccgagatcatgtgcaaaatccgcgaggggcgcttctcccttgacggggaggcctggcagggtgtatccgaggaagccaaggagctggtccgagggctcctgaccgtggac

SEQ ID NO: 484831 - DNA, 120 bp, Artificial Sequence
  ENSG00000162302_17 (sequence is synthesized)
cccgccaagcggctgaagctcgagggactgcggggcagctcgtggctgcaggacggcagcgcgcgctcctcgcccccgctccggacgcccgacgtgctcgagtcctctgggcccgcagtg

SEQ ID NO: 484832 - DNA, 120 bp, Artificial Sequence
  ENSG00000162302_18 (sequence is synthesized)
cgctcgggtctcaacgccaccttcatggcattcaaccggggcaagcgggagggcttcttcctgaagagcgtggagaatgcacccctggccaagcggcggaagcagaagctgcggagcgcc

SEQ ID NO: 484833 - DNA, 120 bp, Artificial Sequence
  ENSG00000162302_19 (sequence is synthesized)
ccgccggggctcccctgcaccagccaacccgggccgagcccccgtcgcctccaaaggggccccccgccgagccaacggccccctgcccccctcctaatccccaccactgtgacccccttc

SEQ ID NO: 484834 - DNA, 120 bp, Artificial Sequence
  ENSG00000162302_20 (sequence is synthesized)
cccccttccctcataggggctgtgacctgggagcccggctcactcccggaggcctctgcctgcggctgacctgatccccaagggactgtcctttcctctcctaccccaccccactcccag

SEQ ID NO: 484835 - DNA, 120 bp, Artificial Sequence
  ENSG00000162302_21 (sequence is synthesized)
acagagcagaagtatttttataagcagagaattttttatgtcttaccagatagagttgcagggaagggggggcctgctggggagtggggtttggggggccctctcccaggacactgcctc

SEQ ID NO: 484836 - DNA, 120 bp, Artificial Sequence
  ENSG00000162302_22 (sequence is synthesized)
ttctgggcagaaggcccctccagggggactgctccaacaggaaagagcccctcccccacttctaagcactgagttaggagtgctaactcctaaactgggaccccctaccctgttctcccc

SEQ ID NO: 484837 - DNA, 120 bp, Artificial Sequence
  ENSG00000162302_23 (sequence is synthesized)
tgaggccccgttcctgggaggggcacccctcaactgtcactttatggactgtctgtgcaattacgtccaccaaagacccgtgttgggggtactgaaggagaggccctgggggaccctctg

SEQ ID NO: 484838 - DNA, 120 bp, Artificial Sequence
  ENSG00000162302_24 (sequence is synthesized)
aagcatttctgcctcactttatgtcatctgcttctcccctgttggggctaaggaaggagataggtggctcctaaaagaggaggccatcttctcacccaccccttcctctttggcacagct

SEQ ID NO: 484839 - DNA, 120 bp, Artificial Sequence
  ENSG00000162302_25 (sequence is synthesized)
actcctggctgggggtggggccttgggggtctgggctgggcatccatggtcactgcctcagcccagccaggctgtgcctttgactttaaaataaaagtccacccagtgctgtgtgtggca

SEQ ID NO: 484840 - DNA, 120 bp, Artificial Sequence
  ENSG00000162302_26 (sequence is synthesized)
attcagtggctctgccctggagaccccctctacaggcagatgactttctctggggggtctccttatcctgagcagggccaggagctggaggagctggggagggtttcggggaggaagcct

SEQ ID NO: 484841 - DNA, 120 bp, Artificial Sequence
  ENSG00000162302_27 (sequence is synthesized)
gggggaaattggttttaggagaggcctaggcccggggactctaggcctagatccaactggcgcccgcagcgtgagctcagcaaggtcctaagcctctccgacatggggcgtggcggggcc

SEQ ID NO: 484842 - DNA, 120 bp, Artificial Sequence
  ENSG00000162302_28 (sequence is synthesized)
ccaccctttcccggcacagcctgccttgcctgccccgccctgcctcgccagagtttgcatgcccacttccagggcactccacattgacatcactcctccctccacggtcctgtgcgtgca

SEQ ID NO: 484843 - DNA, 120 bp, Artificial Sequence
  ENSG00000162302_29 (sequence is synthesized)
tacccccctggatttgccaacaccctggggagggggactggcgcccctctcaagtgatttgcatagctcctccctttcttccaatatgggatccccctcccacattttgcaaatgcccca

SEQ ID NO: 484844 - DNA, 80 bp, Artificial Sequence
  ENSG00000162337_0 (sequence is synthesized)
gcgaggagccgccgccgccgcgccatggagcccgagtgagcgcggcgcgggcccgtccggccgccggacaacatggaggc

SEQ ID NO: 484845 - DNA, 120 bp, Artificial Sequence
  ENSG00000162337_1 (sequence is synthesized)
cggacaacatggaggcagcgccgcccgggccgccgtggccgctgctgctgctgctgctgctgctgctggcgctgtgcggctgcccggcccccgccgcggcctcgccgctcctgctatttg

SEQ ID NO: 484846 - DNA, 120 bp, Artificial Sequence
  ENSG00000162337_2 (sequence is synthesized)
ccgccgggacgtacggctggtggacgccggcggagtcaagctggagtccaccatcgtggtcagcggcctggaggatgcggccgcagtggacttccagttttccaagggagccgtgtactg

SEQ ID NO: 484847 - DNA, 120 bp, Artificial Sequence
  ENSG00000162337_3 (sequence is synthesized)
gacagacgtgagcgaggaggccatcaagcagacctacctgaaccagacgggggccgccgtgcagaacgtggtcatctccggcctggtctctcccgacggcctcgcctgcgactgggtggg

SEQ ID NO: 484848 - DNA, 120 bp, Artificial Sequence
  ENSG00000162337_4 (sequence is synthesized)
caagaagctgtactggacggactcagagaccaaccgcatcgaggtggccaacctcaatggcacatcccggaaggtgctcttctggcaggaccttgaccagccgagggccatcgccttgga

SEQ ID NO: 484849 - DNA, 120 bp, Artificial Sequence
  ENSG00000162337_5 (sequence is synthesized)
ccccgctcacgggtacatgtactggacagactggggtgagacgccccggattgagcgggcagggatggatggcagcacccggaagatcattgtggactcggacatttactggcccaatgg

SEQ ID NO: 484850 - DNA, 120 bp, Artificial Sequence
  ENSG00000162337_6 (sequence is synthesized)
actgaccatcgacctggaggagcagaagctctactgggctgacgccaagctcagcttcatccaccgtgccaacctggacggctcgttccggcagaaggtggtggagggcagcctgacgca

SEQ ID NO: 484851 - DNA, 120 bp, Artificial Sequence
  ENSG00000162337_7 (sequence is synthesized)
ccccttcgccctgacgctctccggggacactctgtactggacagactggcagacccgctccatccatgcctgcaacaagcgcactggggggaagaggaaggagatcctgagtgccctcta

SEQ ID NO: 484852 - DNA, 120 bp, Artificial Sequence
  ENSG00000162337_8 (sequence is synthesized)
ctcacccatggacatccaggtgctgagccaggagcggcagcctttcttccacactcgctgtgaggaggacaatggcggctgctcccacctgtgcctgctgtccccaagcgagcctttcta

SEQ ID NO: 484853 - DNA, 120 bp, Artificial Sequence
  ENSG00000162337_9 (sequence is synthesized)
cacatgcgcctgccccacgggtgtgcagctgcaggacaacggcaggacgtgtaaggcaggagccgaggaggtgctgctgctggcccggcggacggacctacggaggatctcgctggacac

SEQ ID NO: 484854 - DNA, 120 bp, Artificial Sequence
  ENSG00000162337_10 (sequence is synthesized)
gccggacttcaccgacatcgtgctgcaggtggacgacatccggcacgccattgccatcgactacgacccgctagagggctatgtctactggacagatgacgaggtgcgggccatccgcag

SEQ ID NO: 484855 - DNA, 120 bp, Artificial Sequence
  ENSG00000162337_11 (sequence is synthesized)
ggcgtacctggacgggtctggggcgcagacgctggtcaacaccgagatcaacgaccccgatggcatcgcggtcgactgggtggcccgaaacctctactggaccgacacgggcacggaccg

SEQ ID NO: 484856 - DNA, 120 bp, Artificial Sequence
  ENSG00000162337_12 (sequence is synthesized)
catcgaggtgacgcgcctcaacggcacctcccgcaagatcctggtgtcggaggacctggacgagccccgagccatcgcactgcaccccgtgatgggcctcatgtactggacagactgggg

SEQ ID NO: 484857 - DNA, 120 bp, Artificial Sequence
  ENSG00000162337_13 (sequence is synthesized)
agagaaccctaaaatcgagtgtgccaacttggatgggcaggagcggcgtgtgctggtcaatgcctccctcgggtggcccaacggcctggccctggacctgcaggaggggaagctctactg

SEQ ID NO: 484858 - DNA, 120 bp, Artificial Sequence
  ENSG00000162337_14 (sequence is synthesized)
gggagacgccaagacagacaagatcgaggtgatcaatgttgatgggacgaagaggcggaccctcctggaggacaagctcccgcacatttttgggttcacgctgctgggggacttcatcta

SEQ ID NO: 484859 - DNA, 120 bp, Artificial Sequence
  ENSG00000162337_15 (sequence is synthesized)
ctggactgactggcagcgccgcagcatcgagcgggtgcacaaggtcaaggccagccgggacgtcatcattgaccagctgcccgacctgatggggctcaaagctgtgaatgtggccaaggt

SEQ ID NO: 484860 - DNA, 120 bp, Artificial Sequence
  ENSG00000162337_16 (sequence is synthesized)
cgtcggaaccaacccgtgtgcggacaggaacggggggtgcagccacctgtgcttcttcacaccccacgcaacccggtgtggctgccccatcggcctggagctgctgagtgacatgaagac

SEQ ID NO: 484861 - DNA, 120 bp, Artificial Sequence
  ENSG00000162337_17 (sequence is synthesized)
ctgcatcgtgcctgaggccttcttggtcttcaccagcagagccgccatccacaggatctccctcgagaccaataacaacgacgtggccatcccgctcacgggcgtcaaggaggcctcagc

SEQ ID NO: 484862 - DNA, 120 bp, Artificial Sequence
  ENSG00000162337_18 (sequence is synthesized)
cctggactttgatgtgtccaacaaccacatctactggacagacgtcagcctgaagaccatcagccgcgccttcatgaacgggagctcggtggagcacgtggtggagtttggccttgacta

SEQ ID NO: 484863 - DNA, 120 bp, Artificial Sequence
  ENSG00000162337_19 (sequence is synthesized)
ccccgagggcatggccgttgactggatgggcaagaacctctactgggccgacactgggaccaacagaatcgaagtggcgcggctggacgggcagttccggcaagtcctcgtgtggaggga

SEQ ID NO: 484864 - DNA, 120 bp, Artificial Sequence
  ENSG00000162337_20 (sequence is synthesized)
cttggacaacccgaggtcgctggccctggatcccaccaagggctacatctactggaccgagtggggcggcaagccgaggatcgtgcgggccttcatggacgggaccaactgcatgacgct

SEQ ID NO: 484865 - DNA, 120 bp, Artificial Sequence
  ENSG00000162337_21 (sequence is synthesized)
gggccaacgacctcaccattgactacgctgaccagcgcctctactggaccgacctggacaccaacatgatcgagtcgtccaacatgctgggtcaggagcgggtcgtgattgccgacgatc

SEQ ID NO: 484866 - DNA, 120 bp, Artificial Sequence
  ENSG00000162337_22 (sequence is synthesized)
tcccgcacccgttcggtctgacgcagtacagcgattatatctactggacagactggaatctgcacagcattgagcgggccgacaagactagcggccggaaccgcaccctcatccagggcc

SEQ ID NO: 484867 - DNA, 120 bp, Artificial Sequence
  ENSG00000162337_23 (sequence is synthesized)
acctggacttcgtgatggacatcctggtgttccactcctcccgccaggatggcctcaatgactgtatgcacaacaacgggcagtgtgggcagctgtgccttgccatccccggcggccacc

SEQ ID NO: 484868 - DNA, 120 bp, Artificial Sequence
  ENSG00000162337_24 (sequence is synthesized)
gctgcggctgcgcctcacactacaccctggaccccagcagccgcaactgcagcccgcccaccaccttcttgctgttcagccagaaatctgccatcagtcggatgatcccggacgaccagc

SEQ ID NO: 484869 - DNA, 120 bp, Artificial Sequence
  ENSG00000162337_25 (sequence is synthesized)
acagcccggatctcatcctgcccctgcatggactgaggaacgtcaaagccatcgactatgacccactggacaagttcatctactgggtggatgggcgccagaacatcaagcgagccaagg

SEQ ID NO: 484870 - DNA, 120 bp, Artificial Sequence
  ENSG00000162337_26 (sequence is synthesized)
acgacgggacccagccctttgttttgacctctctgagccaaggccaaaacccagacaggcagccccacgacctcagcatcgacatctacagccggacactgttctggacgtgcgaggcca

SEQ ID NO: 484871 - DNA, 120 bp, Artificial Sequence
  ENSG00000162337_27 (sequence is synthesized)
ccaataccatcaacgtccacaggctgagcggggaagccatgggggtggtgctgcgtggggaccgcgacaagcccagggccatcgtcgtcaacgcggagcgagggtacctgtacttcacca

SEQ ID NO: 484872 - DNA, 120 bp, Artificial Sequence
  ENSG00000162337_28 (sequence is synthesized)
acatgcaggaccgggcagccaagatcgaacgcgcagccctggacggcaccgagcgcgaggtcctcttcaccaccggcctcatccgccctgtggccctggtggtggacaacacactgggca

SEQ ID NO: 484873 - DNA, 120 bp, Artificial Sequence
  ENSG00000162337_29 (sequence is synthesized)
agctgttctgggtggacgcggacctgaagcgcattgagagctgtgacctgtcaggggccaaccgcctgaccctggaggacgccaacatcgtgcagcctctgggcctgaccatccttggca

SEQ ID NO: 484874 - DNA, 120 bp, Artificial Sequence
  ENSG00000162337_30 (sequence is synthesized)
agcatctctactggatcgaccgccagcagcagatgatcgagcgtgtggagaagaccaccggggacaagcggactcgcatccagggccgtgtcgcccacctcactggcatccatgcagtgg

SEQ ID NO: 484875 - DNA, 120 bp, Artificial Sequence
  ENSG00000162337_31 (sequence is synthesized)
aggaagtcagcctggaggagttctcagcccacccatgtgcccgtgacaatggtggctgctcccacatctgtattgccaagggtgatgggacaccacggtgctcatgcccagtccacctcg

SEQ ID NO: 484876 - DNA, 120 bp, Artificial Sequence
  ENSG00000162337_32 (sequence is synthesized)
tgctcctgcagaacctgctgacctgtggagagccgcccacctgctccccggaccagtttgcatgtgccacaggggagatcgactgtatccccggggcctggcgctgtgacggctttcccg

SEQ ID NO: 484877 - DNA, 120 bp, Artificial Sequence
  ENSG00000162337_33 (sequence is synthesized)
agtgcgatgaccagagcgacgaggagggctgccccgtgtgctccgccgcccagttcccctgcgcgcggggtcagtgtgtggacctgcgcctgcgctgcgacggcgaggcagactgtcagg

SEQ ID NO: 484878 - DNA, 120 bp, Artificial Sequence
  ENSG00000162337_34 (sequence is synthesized)
accgctcagacgaggcggactgtgacgccatctgcctgcccaaccagttccggtgtgcgagcggccagtgtgtcctcatcaaacagcagtgcgactccttccccgactgtatcgacggct

SEQ ID NO: 484879 - DNA, 120 bp, Artificial Sequence
  ENSG00000162337_35 (sequence is synthesized)
ccgacgagctcatgtgtgaaatcaccaagccgccctcagacgacagcccggcccacagcagtgccatcgggcccgtcattggcatcatcctctctctcttcgtcatgggtggtgtctatt

SEQ ID NO: 484880 - DNA, 120 bp, Artificial Sequence
  ENSG00000162337_36 (sequence is synthesized)
ttgtgtgccagcgcgtggtgtgccagcgctatgcgggggccaacgggcccttcccgcacgagtatgtcagcgggaccccgcacgtgcccctcaatttcatagccccgggcggttcccagc

SEQ ID NO: 484881 - DNA, 120 bp, Artificial Sequence
  ENSG00000162337_37 (sequence is synthesized)
atggccccttcacaggcatcgcatgcggaaagtccatgatgagctccgtgagcctgatggggggccggggcggggtgcccctctacgaccggaaccacgtcacaggggcctcgtccagca

SEQ ID NO: 484882 - DNA, 120 bp, Artificial Sequence
  ENSG00000162337_38 (sequence is synthesized)
gctcgtccagcacgaaggccacgctgtacccgccgatcctgaacccgccgccctccccggccacggacccctccctgtacaacatggacatgttctactcttcaaacattccggccactg

SEQ ID NO: 484883 - DNA, 120 bp, Artificial Sequence
  ENSG00000162337_39 (sequence is synthesized)
cgagaccgtacaggccctacatcattcgaggaatggcgcccccgacgacgccctgcagcaccgacgtgtgtgacagcgactacagcgccagccgctggaaggccagcaagtactacctgg

SEQ ID NO: 484884 - DNA, 120 bp, Artificial Sequence
  ENSG00000162337_40 (sequence is synthesized)
atttgaactcggactcagacccctatccacccccacccacgccccacagccagtacctgtcggcggaggacagctgcccgccctcgcccgccaccgagaggagctacttccatctcttcc

SEQ ID NO: 484885 - DNA, 120 bp, Artificial Sequence
  ENSG00000162337_41 (sequence is synthesized)
cgccccctccgtccccctgcacggactcatcctgacctcggccgggccactctggcttctctgtgcccctgtaaatagttttaaatatgaacaaagaaaaaaatatattttatgatttaa

SEQ ID NO: 484886 - DNA, 120 bp, Artificial Sequence
  ENSG00000162337_42 (sequence is synthesized)
aaaataaatataattgggattttaaaaacatgagaaatgtgaactgtgatggggtgggcagggctgggagaactttgtacagtggagaaatatttataaacttaattttgtaaaacagaa

SEQ ID NO: 484887 - DNA, 120 bp, Artificial Sequence
  ENSG00000162337_43 (sequence is synthesized)
tgggtactgcgtaggcagagctggcagttgaaccccgtgtcctggttgtcgctgggggtgggctgcaccctgacttgtgaggccagtagcaaggtttgcacgtgacttcgtgaccgtcac

SEQ ID NO: 484888 - DNA, 120 bp, Artificial Sequence
  ENSG00000162337_44 (sequence is synthesized)
ccagctctgcagcacatcccgtgacccagctcatccaggccgcatgcaaacctgttgccaggcgagaaaccagtcaccgcacagctgtggttgcctgaaatgattaagctcattaatcac

SEQ ID NO: 484889 - DNA, 120 bp, Artificial Sequence
  ENSG00000162337_45 (sequence is synthesized)
tcgtgcccacagtgaccccgtctgcaaatgtagttccttgccctactcgcactggggagcaggacgcagagccgtgcaactcacaggtgccaagctcaggactccctcctgggtctgcct

SEQ ID NO: 484890 - DNA, 120 bp, Artificial Sequence
  ENSG00000162337_46 (sequence is synthesized)
tgatttgtctcttcctgaaaaggtgacagagttacactggagagagcagcatccaggtgcggcagggacaggcctggggctcgcgggcagggactctgtgtcctgccggggtcccacact

SEQ ID NO: 484891 - DNA, 120 bp, Artificial Sequence
  ENSG00000162337_47 (sequence is synthesized)
gtgacgtcaccaggatggtccgggctgctcacttgccacagtggcctgtttgagcccgggaagccaacggggctgctcagctggacaccagccccccgagctgcccatgttggggtcaca

SEQ ID NO: 484892 - DNA, 120 bp, Artificial Sequence
  ENSG00000162337_48 (sequence is synthesized)
cgtccagcagctcgtccagcacgaaggccacgctgtacccgccggggctcggatctggctgtatgctttccaggatggccttggagacccacataagccctacaccctttgggaagctgc

SEQ ID NO: 484893 - DNA, 120 bp, Artificial Sequence
  ENSG00000162341_0 (sequence is synthesized)
gcagtgaagctgggcgccttcggggcttgagcttctgagggtcgggtccagcgcgtgggctgctggatggcggaaccccaggcggagtcggagcccctgctgggcggggcccgcggcggt

SEQ ID NO: 484894 - DNA, 120 bp, Artificial Sequence
  ENSG00000162341_1 (sequence is synthesized)
ggcggcgactggccggcggggctgaccacttaccgcagcatccaagtcggccctggtgccgcggccaggtgggacctctgcattgatcaggctgtggtcttcatcgaagatgctattcag

SEQ ID NO: 484895 - DNA, 120 bp, Artificial Sequence
  ENSG00000162341_2 (sequence is synthesized)
taccgctccatcaaccaccgggtggatgccagctcgatgtggctttaccgacggtattactcgaacgtatgccaacggactttgagcttcaccatcttcttgatcctgtttttggctttt

SEQ ID NO: 484896 - DNA, 120 bp, Artificial Sequence
  ENSG00000162341_3 (sequence is synthesized)
atcgagaccccatcctcactcaccagcacggcggacgtgcgctaccgcgctgctccctgggagccgccctgcggcctgaccgagagtgtcgaggtgctctgcctgctggtctttgcggcc

SEQ ID NO: 484897 - DNA, 120 bp, Artificial Sequence
  ENSG00000162341_4 (sequence is synthesized)
gacctctctgtgaagggttacctgttcgggtgggcccatttccagaaaaacctttggctgctgggctacctcgtggtgctggtggtgtctctggtggactggaccgtgtccctgagtctc

SEQ ID NO: 484898 - DNA, 120 bp, Artificial Sequence
  ENSG00000162341_5 (sequence is synthesized)
gtgtgtcatgagcccctgcggatccgccggcttctccgtcccttcttcctgctgcagaactcctctatgatgaagaagaccttgaaatgcatccgctggtcgctgccggaaatggccagc

SEQ ID NO: 484899 - DNA, 120 bp, Artificial Sequence
  ENSG00000162341_6 (sequence is synthesized)
gtcgggctgctgctggccatccacctgtgcctcttcaccatgttcggaatgctgctgttcgctggtgggaagcaggatgatgggcaggacagggagaggctgacctacttccagaacctg

SEQ ID NO: 484900 - DNA, 120 bp, Artificial Sequence
  ENSG00000162341_7 (sequence is synthesized)
cctgagtctctgacttccctcctggtgctgctgaccacggccaacaaccccgatgtgatgattcctgcgtattccaagaaccgggcctatgccatcttcttcatagtcttcactgtgata

SEQ ID NO: 484901 - DNA, 120 bp, Artificial Sequence
  ENSG00000162341_8 (sequence is synthesized)
ggaagcctgtttctgatgaacctgctgacagccatcatctacagtcagttccggggctacctgatgaaatctctccagacctcgctgtttcggaggcggctgggaacccgggctgccttt

SEQ ID NO: 484902 - DNA, 120 bp, Artificial Sequence
  ENSG00000162341_9 (sequence is synthesized)
gaagtcctatcctccatggtgggggagggaggagccttccctcaggcagttggggtgaagccccagaacttgctgcaggtgcttcagaaggtccagctggacagctcccacaaacaggcc

SEQ ID NO: 484903 - DNA, 120 bp, Artificial Sequence
  ENSG00000162341_10 (sequence is synthesized)
atgatggagaaggtgcgttcctatggcagtgttctgctctcagctgaggagtttcagaagctcttcaacgagcttgacagaagtgtggttaaagagcacccgccgaggcccgagtaccag

SEQ ID NO: 484904 - DNA, 120 bp, Artificial Sequence
  ENSG00000162341_11 (sequence is synthesized)
tctccgtttctgcagagcgcccagttcctcttcggccactactactttgactacctggggaacctcatcgccctggcaaacctggtgtccatttgcgtgttcctggtgctggatgcagat

SEQ ID NO: 484905 - DNA, 120 bp, Artificial Sequence
  ENSG00000162341_12 (sequence is synthesized)
gtgctgcctgctgagcgtgatgacttcatcctggggattctcaactgcgtcttcattgtgtactacctgttggagatgctgctcaaggtctttgccctgggcctgcgagggtacctgtcc

SEQ ID NO: 484906 - DNA, 120 bp, Artificial Sequence
  ENSG00000162341_13 (sequence is synthesized)
taccccagcaacgtgtttgacgggctcctcaccgttgtcctgctggttttggagatctcaactctggctgtgtaccgattgccacacccaggctggaggccggagatggtgggcctgctg

SEQ ID NO: 484907 - DNA, 120 bp, Artificial Sequence
  ENSG00000162341_14 (sequence is synthesized)
tcgctgtgggacatgacccgcatgctgaacatgctcatcgtgttccgcttcctgcgtatcatccccagcatgaagctgatggccgtggtggccagtaccgtcctgggcctggtgcagaac

SEQ ID NO: 484908 - DNA, 120 bp, Artificial Sequence
  ENSG00000162341_15 (sequence is synthesized)
atgcgtgcgtttggcgggatcctggtggtggtctactacgtatttgccatcattgggatcaacttgtttagaggcgtcattgtggctcttcctggaaacagcagcctggcccctgccaat

SEQ ID NO: 484909 - DNA, 120 bp, Artificial Sequence
  ENSG00000162341_16 (sequence is synthesized)
ggctcggcgccctgtgggagcttcgagcagctggagtactgggccaacaacttcgatgactttgcggctgccctggtcactctgtggaacttgatggtggtgaacaactggcaggtgttt

SEQ ID NO: 484910 - DNA, 120 bp, Artificial Sequence
  ENSG00000162341_17 (sequence is synthesized)
ctggatgcatatcggcgctactcaggcccgtggtccaagatctattttgtattgtggtggctggtgtcgtctgtcatctgggtcaacctgtttctggccctgattctggagaacttcctt

SEQ ID NO: 484911 - DNA, 120 bp, Artificial Sequence
  ENSG00000162341_18 (sequence is synthesized)
cacaagtgggacccccgcagccacctgcagccccttgctgggaccccagaggccacctaccagatgactgtggagctcctgttcagggatattctggaggagcccggggaggatgagctc

SEQ ID NO: 484912 - DNA, 120 bp, Artificial Sequence
  ENSG00000162341_19 (sequence is synthesized)
acagagaggctgagccagcacccgcacctgtggctgtgcaggtgacgtccgggctgccgtcccagcaggggcggcaggagagagaggctggcctacacaggtgcccgtcatggaagaggc

SEQ ID NO: 484913 - DNA, 120 bp, Artificial Sequence
  ENSG00000162341_20 (sequence is synthesized)
cactaagctggggacaggaaccaagtcctttgcgtgtggcccaacaaccatctacagaacagctgctggtgcttcagggaggcgccgtgccctccgctttcttttatagctgcttcagtg

SEQ ID NO: 484914 - DNA, 120 bp, Artificial Sequence
  ENSG00000162341_21 (sequence is synthesized)
agaattccctcgtcgactccacagggacctttcagacaaaaatgcaagaagcagcggcctcccctgtcccctgcagcttccgtggtgcctttgctgccggcagcccttggggaccacagg

SEQ ID NO: 484915 - DNA, 120 bp, Artificial Sequence
  ENSG00000162341_22 (sequence is synthesized)
cctgaccagggcctgcacaggttaaccgtcagacttccggggcattcaggtggggatgctggtggtttgacatggagagaaccttgactgtgttttattatttcatggcttgtatgagtg

SEQ ID NO: 484916 - DNA, 120 bp, Artificial Sequence
  ENSG00000162341_23 (sequence is synthesized)
tgactgggtgtgtttctttagggttctgattgccagttattttcatcaataagtcttgcaaagaatgggattgtcattcttcacttcagcacagttctagtcctgcttctctggagtagg

SEQ ID NO: 484917 - DNA, 120 bp, Artificial Sequence
  ENSG00000162341_24 (sequence is synthesized)
gttgttgagtaaggttgcttgggttgtgcattgcacaagggcacatggctgtgaggtgtatcctggcggggggctgtctacctgcagtgaggggcaccttttctgttttgctcaaaggca

SEQ ID NO: 484918 - DNA, 120 bp, Artificial Sequence
  ENSG00000162341_25 (sequence is synthesized)
tgtataagccaatgggtgaccttatttcctgtgtcttcaggtgtgtggcagggggcctggggtggggaggtggggcgagcgagcagtgtgtggaaagccttgttgtcacctgaagcacgc

SEQ ID NO: 484919 - DNA, 120 bp, Artificial Sequence
  ENSG00000162341_26 (sequence is synthesized)
caggtccagattgaccaatggttttctcacttcaggggccaacccacgccccctttctgctgaggtttgggtgccatctagtggtgggatgggacttggttgactacatttaaggtaagg

SEQ ID NO: 484920 - DNA, 120 bp, Artificial Sequence
  ENSG00000162341_27 (sequence is synthesized)
tggacccagcaactcccagaaacaactccggggacaccactccccatcacactccacaccgagcctggtgcccggtctgtgcccgagctcagcgggaccaggaagggatgggccctgcca

SEQ ID NO: 484921 - DNA, 120 bp, Artificial Sequence
  ENSG00000162341_28 (sequence is synthesized)
gggttgcccctgcactgtgcattctcgcctgggaggcacaagttctttcatctgcttttccttcagaggtgctgagcccacgccatagcccctgtgggatggtgggggagggggcgaccc

SEQ ID NO: 484922 - DNA, 120 bp, Artificial Sequence
  ENSG00000162341_29 (sequence is synthesized)
gaacaacagtgcagtcggtatcgagattggggagaggagcgagtccaaggagaaggtcatgagtttctttttactcgtgttgaataataacaataacaataacaataacaatatggaaac

SEQ ID NO: 484923 - DNA, 120 bp, Artificial Sequence
  ENSG00000162341_30 (sequence is synthesized)
caccgcaaacttggagaaaagttgtaagcacagtaaagagaagcttccttctgagtcacttgagtggttgccgttctggccctgcaccctctgtgctttgggacggcgtccaacccgcat

SEQ ID NO: 484924 - DNA, 120 bp, Artificial Sequence
  ENSG00000162341_31 (sequence is synthesized)
tcatgtcaggagtgagtcgcacgtggctttgtggtcatggcgacttaatccgcctggacggtggctccgtctccctgggcttagacgaccttggcacttctggagataagcccatggctc

SEQ ID NO: 484925 - DNA, 120 bp, Artificial Sequence
  ENSG00000162341_32 (sequence is synthesized)
ccaggttgtgttcatgtgacgtttccttgtggtaggttctgggtctgcgtttcgtctaggagtgtcacaggatggacactgcctcctggcaggggctgcccaatgcagttagcctcctgc

SEQ ID NO: 484926 - DNA, 120 bp, Artificial Sequence
  ENSG00000162341_33 (sequence is synthesized)
tggtgttctctcttgttgcttggtgaaggtggccctggtcagcttctccactgcccagtgaacgacccctttgtaatgaatgagtggggaggtagtgtgaagcgatgccaatatcccatc

SEQ ID NO: 484927 - DNA, 120 bp, Artificial Sequence
  ENSG00000162341_34 (sequence is synthesized)
cctgtcaaactgcctttactttttccttccttccttgctcccacctgtgtggatcctggtcccttcttgtattcagggctgtggtctgttatgacatttactctcaggctcaggtcctgc

SEQ ID NO: 484928 - DNA, 120 bp, Artificial Sequence
  ENSG00000162341_35 (sequence is synthesized)
ttgtttggcccgtgggagccccttcttctgccttttgtgttttttttgttatgtacctacagttctttagctgtttctttactttctggtgcaaaaagatgttcaagccttattttatac

SEQ ID NO: 484929 - DNA, 120 bp, Artificial Sequence
  ENSG00000162341_36 (sequence is synthesized)
ttgcctgcccctttctctttcatttattggagtgagctgcagctctaagaagacctgttcttttgaatggagagtagcatcaggaaccaggatgtgggtgcgaggcgtgctcctggctgt

SEQ ID NO: 484930 - DNA, 120 bp, Artificial Sequence
  ENSG00000162341_37 (sequence is synthesized)
tgcagattgctgcacccgggagctcttagtggacagagctagaggatatgtgcacgtacttccatctctctctctgtctcatctattcacagctgggaatgatactaatacctccgattt

SEQ ID NO: 484931 - DNA, 120 bp, Artificial Sequence
  ENSG00000162341_38 (sequence is synthesized)
tagcccagcaccacagggtacgttccagtttttctctctttccatagctgtaaggccctttctgggaatggttctcattctccttaatctattattgggtcagttttcctgcatgtcccc

SEQ ID NO: 484932 - DNA, 120 bp, Artificial Sequence
  ENSG00000162341_39 (sequence is synthesized)
agcctcccatcactgccacccactccccacagagatgccctgctcatccgactggggctttgactcccacactgtgtacccctcttgtgtggacgccctgctgccaaaaccttcagcaaa

SEQ ID NO: 484933 - DNA, 120 bp, Artificial Sequence
  ENSG00000162341_40 (sequence is synthesized)
cagctttccaaatggaagttgtcactgtcagggcctttacaatcagcaacagcaaaatctacatgctgctgagggtcctgcctcattaagatgcaataaatatgtaagtacataaaaaca

SEQ ID NO: 484934 - DNA, 120 bp, Artificial Sequence
  ENSG00000162341_41 (sequence is synthesized)
actcaggccctgacccaggaggctctcacgtggagtccccagaacagcatcaactcctcacgatgctcctgacggtggtggacagactctccatgccccgatgaagttgtgagtcacata

SEQ ID NO: 484935 - DNA, 120 bp, Artificial Sequence
  ENSG00000162341_42 (sequence is synthesized)
catccccgtccacagcacccggtactcagtaggtggtcccataaatgtttgtggcacaagtgaatgaacttggaaccatccatctagtggaaattgtaaattataacaaaacccaatgga

SEQ ID NO: 484936 - DNA, 120 bp, Artificial Sequence
  ENSG00000162341_43 (sequence is synthesized)
ccgtgaaagccagggtcaaggctggggcctgctgaggccctgtcatcgagggagtttttgtgctggtaaagatgatgactgccctggtgcagggcccgtgtagcccaacatgtctagtcc

SEQ ID NO: 484937 - DNA, 120 bp, Artificial Sequence
  ENSG00000162341_44 (sequence is synthesized)
gtggcgggctcttactggggatgaggggcctccaggaggagcaggcctgggcacagacttctgacctgggcacagttgggaagggtgacaaggggtcagagcaggctcttggcctcaggt

SEQ ID NO: 484938 - DNA, 120 bp, Artificial Sequence
  ENSG00000162341_45 (sequence is synthesized)
caaaggacaggagtcctcctgactctgctgtgtctgaagcccacagtgaatgcaatgcagaaaaagcagtgcttgaccctttgttttctccggggttaggatccctgatatgattgggct

SEQ ID NO: 484939 - DNA, 120 bp, Artificial Sequence
  ENSG00000162341_46 (sequence is synthesized)
gtgtccccacccaaatcttgccttgaattgtaatgatccccacatgtcaggagtggggccaggtggagatcattgaatcacgggggtggtttcccctgtactgttcttgtggtagtgaat

SEQ ID NO: 484940 - DNA, 66 bp, Artificial Sequence
  ENSG00000162341_47 (sequence is synthesized)
ggcacatgctctctcttgcctgcccccatggaagatgtgtcttgcttctcctttgccttctgccat

SEQ ID NO: 484941 - DNA, 120 bp, Artificial Sequence
  ENSG00000162341_48 (sequence is synthesized)
gggaaggcaccctcggaaggagcagattacagcaaagaacattatccacccagcacccaggaggaggcacagctagaagagaagaatcagaatgttcccaacgtaaagaagagatacatg

SEQ ID NO: 484942 - DNA, 120 bp, Artificial Sequence
  ENSG00000162341_49 (sequence is synthesized)
tggctcgcccctccaggggcgactgactgggtccaaggcctccattgctggactgtaggttaagagaactgagggtggagcctctgggcacggctcttcgtcagtccccggaggacttgt

SEQ ID NO: 484943 - DNA, 120 bp, Artificial Sequence
  ENSG00000162341_50 (sequence is synthesized)
cttctgcatcctggacgcatttgctgctttgatgcaccgtgttctgaggcctgttgtggaccaccccattctaggtcccgggtgggtgggggcatcctggaggatgacacagctgcacgg

SEQ ID NO: 484944 - DNA, 120 bp, Artificial Sequence
  ENSG00000162341_51 (sequence is synthesized)
cgttgtcctgctggtaaagtaggcgcatccgaggccggcctctactgggcgggtgggtgagcgccacctgggctctgtgctggcccatctcaggcctcccctgaggactagaggctgtag

SEQ ID NO: 484945 - DNA, 120 bp, Artificial Sequence
  ENSG00000162341_52 (sequence is synthesized)
gaaggtgggcttctgctctcagtggtgagggctggcttccctgctggccgagttgctcagtgggcagccggtgaggtctttaggaggctgggtttctactgcatccgagtgtcatggggg

SEQ ID NO: 484946 - DNA, 120 bp, Artificial Sequence
  ENSG00000162341_53 (sequence is synthesized)
gcaggctgcccctcccgacccccaggggaagccctgaaggacttgtagccctggccagcgactccagcccggggaacagcctcttaaacgtcactgatagacggtgtgacctcagcatgg

SEQ ID NO: 484947 - DNA, 120 bp, Artificial Sequence
  ENSG00000162341_54 (sequence is synthesized)
gtggagcgaggggccagggggctctcaggcaccagggtgttcttgggaaatgcttacacttcctttccccagacccagtgggagtgagggcatgccacacttggtgtgtgtgtcacaagc

SEQ ID NO: 484948 - DNA, 120 bp, Artificial Sequence
  ENSG00000162341_55 (sequence is synthesized)
agccacatgagagtgacgtttgctgtagccagcaggcccctcggcacataggtgaagagaaatttgaaaagggccctgcagtctgtccttgactcagtatcttctctgccacctctgcca

SEQ ID NO: 484949 - DNA, 120 bp, Artificial Sequence
  ENSG00000162341_56 (sequence is synthesized)
ccccaatctgtgcagtcccccgattcctgaggccagggtgtctttccagctgaaagaagtcctgacatctggaaccaacccgtggggtccaggaccaagctctgatttctccccaaaagc

SEQ ID NO: 484950 - DNA, 120 bp, Artificial Sequence
  ENSG00000162341_57 (sequence is synthesized)
cccttttggggagaatgtgttagagatgagctttataataattcctttaagggccgcccagattagtgttgctgtagcgaagccttcttttcttttgtaattaaaggttttggagatctc

SEQ ID NO: 484951 - DNA, 120 bp, Artificial Sequence
  ENSG00000162344_0 (sequence is synthesized)
gccgtcagagcaggagcgctgcgtccaggatctagggccacgaccatcccaacccggcactcacagccccgcagcgcatcccggtcgccgcccagcctcccgcacccccatcgccggagc

SEQ ID NO: 484952 - DNA, 120 bp, Artificial Sequence
  ENSG00000162344_1 (sequence is synthesized)
tgcgccgagagccccagggaggtgccatgcggagcgggtgtgtggtggtccacgtatggatcctggccggcctctggctggccgtggccgggcgccccctcgccttctcggacgcggggc

SEQ ID NO: 484953 - DNA, 120 bp, Artificial Sequence
  ENSG00000162344_2 (sequence is synthesized)
cccacgtgcactacggctggggcgaccccatccgcctgcggcacctgtacacctccggcccccacgggctctccagctgcttcctgcgcatccgtgccgacggcgtcgtggactgcgcgc

SEQ ID NO: 484954 - DNA, 120 bp, Artificial Sequence
  ENSG00000162344_3 (sequence is synthesized)
ggggccagagcgcgcacagtttgctggagatcaaggcagtcgctctgcggaccgtggccatcaagggcgtgcacagcgtgcggtacctctgcatgggcgccgacggcaagatgcaggggc

SEQ ID NO: 484955 - DNA, 120 bp, Artificial Sequence
  ENSG00000162344_4 (sequence is synthesized)
tgcttcagtactcggaggaagactgtgctttcgaggaggagatccgcccagatggctacaatgtgtaccgatccgagaagcaccgcctcccggtctccctgagcagtgccaaacagcggc

SEQ ID NO: 484956 - DNA, 120 bp, Artificial Sequence
  ENSG00000162344_5 (sequence is synthesized)
agctgtacaagaacagaggctttcttccactctctcatttcctgcccatgctgcccatggtcccagaggagcctgaggacctcaggggccacttggaatctgacatgttctcttcgcccc

SEQ ID NO: 484957 - DNA, 120 bp, Artificial Sequence
  ENSG00000162344_6 (sequence is synthesized)
tggagaccgacagcatggacccatttgggcttgtcaccggactggaggccgtgaggagtcccagctttgagaagtaactgagaccatgcccgggcctcttcactgctgccaggggctgtg

SEQ ID NO: 484958 - DNA, 120 bp, Artificial Sequence
  ENSG00000162344_7 (sequence is synthesized)
tgcttctacaagaacagtcctgagtccacgttctgtttagctttaggaagaaacatctagaagttgtacatattcagagttttccattggcagtgccagtttctagccaatagacttgtc

SEQ ID NO: 484959 - DNA, 120 bp, Artificial Sequence
  ENSG00000162344_8 (sequence is synthesized)
tgatcataacattgtaagcctgtagcttgcccagctgctgcctgggcccccattctgctccctcgaggttgctggacaagctgctgcactgtctcagttctgcttgaatacctccatcga

SEQ ID NO: 484960 - DNA, 120 bp, Artificial Sequence
  ENSG00000162344_9 (sequence is synthesized)
tggggaactcacttcctttggaaaaattcttatgtcaagctgaaattctctaattttttctcatcacttccccaggagcagccagaagacaggcagtagttttaatttcaggaacaggtg

SEQ ID NO: 484961 - DNA, 120 bp, Artificial Sequence
  ENSG00000162344_10 (sequence is synthesized)
atccactctgtaaaacagcaggtaaatttcactcaaccccatgtgggaattgatctatatctctacttccagggaccatttgcccttcccaaatccctccaggccagaactgactggagc

SEQ ID NO: 484962 - DNA, 120 bp, Artificial Sequence
  ENSG00000162344_11 (sequence is synthesized)
aggcatggcccaccaggcttcaggagtaggggaagcctggagccccactccagccctgggacaacttgagaattccccctgaggccagttctgtcatggatgctgtcctgagaataactt

SEQ ID NO: 484963 - DNA, 120 bp, Artificial Sequence
  ENSG00000162344_12 (sequence is synthesized)
gctgtcccggtgtcacctgcttccatctcccagcccaccagccctctgcccacctcacatgcctccccatggattggggcctcccaggccccccaccttatgtcaacctgcacttcttgt

SEQ ID NO: 484964 - DNA, 120 bp, Artificial Sequence
  ENSG00000162344_13 (sequence is synthesized)
tcaaaaatcaggaaaagaaaagatttgaagaccccaagtcttgtcaataacttgctgtgtggaagcagcgggggaagacctagaaccctttccccagcacttggttttccaacatgatat

SEQ ID NO: 484965 - DNA, 120 bp, Artificial Sequence
  ENSG00000162344_14 (sequence is synthesized)
ttatgagtaatttattttgatatgtacatctcttattttcttacattatttatgcccccaaattatatttatgtatgtaagtgaggtttgttttgtatattaaaatggagtttgtttgta

SEQ ID NO: 484966 - DNA, 120 bp, Artificial Sequence
  ENSG00000162365_0 (sequence is synthesized)
tcagagagaggaaggggcactcagagatccagcaggtgctgcaccatgagtgtctctgtcctgagccccagcagacgcctgggtggtgtctccgggatcctccaagtgacctccctgctc

SEQ ID NO: 484967 - DNA, 120 bp, Artificial Sequence
  ENSG00000162365_1 (sequence is synthesized)
attctgcttctgctgctgatcaaggcagctcagctctacctgcataggcagtggctgctcaaagccctccagcagttcccgtgccctccctcccactggctcttcgggcacatccaggag

SEQ ID NO: 484968 - DNA, 120 bp, Artificial Sequence
  ENSG00000162365_2 (sequence is synthesized)
ttccaacacgaccaggagctacaacggattcaggaacgggtgaagacattcccaagtgcctgtccttattggatatggggaggcaaagttcgtgtccagctctatgaccctgactatatg

SEQ ID NO: 484969 - DNA, 120 bp, Artificial Sequence
  ENSG00000162365_3 (sequence is synthesized)
aaggtgattctggggagatcagacccgaaatcccatggatcctacaaattcctggctccacggattgggtacggcttgctcctgttgaatgggcagacatggttccagcatcgacggatg

SEQ ID NO: 484970 - DNA, 120 bp, Artificial Sequence
  ENSG00000162365_4 (sequence is synthesized)
ctgaccccagccttccacaatgacatcctgaagccatacgtggggctcatggcagactctgtacgagtgatgctggacaaatgggaagagctccttggccaggattcccctctggaggtc

SEQ ID NO: 484971 - DNA, 120 bp, Artificial Sequence
  ENSG00000162365_5 (sequence is synthesized)
tttcagcacgtctccttgatgaccctggacaccatcatgaagagtgccttcagccatcagggcagcatccaggtggacaggaattctcagtcctacatccaggccattagtgacctgaac

SEQ ID NO: 484972 - DNA, 120 bp, Artificial Sequence
  ENSG00000162365_6 (sequence is synthesized)
agcctggttttttgctgtatgaggaatgcctttcatgagaatgacaccatctacagcctgacctctgctggccgctggacacaccgcgcctgccagctggcccatcagcacacagaccaa

SEQ ID NO: 484973 - DNA, 120 bp, Artificial Sequence
  ENSG00000162365_7 (sequence is synthesized)
gtgatccaactgaggaaggctcaactacagaaggagggggagctggagaagatcaagaggaagaggcacttggattttctggacatcctcctcttggccaaaatggagaatgggagcatc

SEQ ID NO: 484974 - DNA, 120 bp, Artificial Sequence
  ENSG00000162365_8 (sequence is synthesized)
ttgtcagacaaggacctccgtgctgaggtggacacgttcatgtttgagggccacgacaccacagccagtgggatctcctggatcctctatgctctggccacacaccccaagcatcaggag

SEQ ID NO: 484975 - DNA, 120 bp, Artificial Sequence
  ENSG00000162365_9 (sequence is synthesized)
aggtgccgggaggagatccatggcctcctgggtgatggagcctccatcacctggaaccacctggaccagatgccctacaccaccatgtgcattaaggaggcactgaggctctacccaccg

SEQ ID NO: 484976 - DNA, 120 bp, Artificial Sequence
  ENSG00000162365_10 (sequence is synthesized)
agagagctcagcactcccgtcaccttccctgatgggcgctccttgcccaaaggtatcatggtcctcctctccatttatggccttcaccacaacccaaaagtgtggcccaacctagaggtg

SEQ ID NO: 484977 - DNA, 120 bp, Artificial Sequence
  ENSG00000162365_11 (sequence is synthesized)
tttgacccttcccgttttgcaccgggttctgctcaacacagccacgctttcctgcccttctcaggaggatcaaggaactgcatcgggaaacaatttgccatgaaccagctgaaggtggcc

SEQ ID NO: 484978 - DNA, 120 bp, Artificial Sequence
  ENSG00000162365_12 (sequence is synthesized)
agggccctgaccctgctccgctttgagctgctgcctgatcccaccaggatccccatccccatggcacgacttgtgttgaaatccaaaaatggaatccacctgcgtctcaggaggctccct

SEQ ID NO: 484979 - DNA, 120 bp, Artificial Sequence
  ENSG00000162365_13 (sequence is synthesized)
aacccttgtgaagacaaggaccagctttgagggcctccacctgccatcctgtcttcctgacccccactcctatctcctgcctgtctgcctctgtcctgctttctgtctgcccaccttccc

SEQ ID NO: 484980 - DNA, 120 bp, Artificial Sequence
  ENSG00000162365_14 (sequence is synthesized)
ttcttcccacctgcctgctgtcccccagtctgcctgcccttctctctctcacctttctccaagctccctacctgcttgtctacctgtctcctacccacctgtatatcttgttgggagaaa

SEQ ID NO: 484981 - DNA, 90 bp, Artificial Sequence
  ENSG00000162365_15 (sequence is synthesized)
atcttgttgggacgagcttgcatgtctgacataatgtaaaagagtcttgaatcatgtccaggatccagggtctaaaaccccttgtggcct

SEQ ID NO: 484982 - DNA, 73 bp, Artificial Sequence
  ENSG00000162365_16 (sequence is synthesized)
ccagggctcgtggctctggaatgtgtctggacttgctggctcctcgctccttgctctcccaggatccagagca

SEQ ID NO: 484983 - DNA, 86 bp, Artificial Sequence
  ENSG00000162365_17 (sequence is synthesized)
tctgcacttccagagctcggggccttcacagcctccatacttagctttggcgccctggacccactttctctctcaaactgtctttt

SEQ ID NO: 484984 - DNA, 120 bp, Artificial Sequence
  ENSG00000162365_18 (sequence is synthesized)
aaactgtcttttctcattcctttgactctgccggactttgtcacccccacaacctggtgttgggtccgataaccccaacatccctgaatctccacccacctcccaaactcctgcctgccc

SEQ ID NO: 484985 - DNA, 120 bp, Artificial Sequence
  ENSG00000162365_19 (sequence is synthesized)
tcccaaactcctgcctgccctccagactgtctgcccatacacctgtctccttcttcctgcctgcttgtctgttcctatattagtttcctattgctgctgtaataaactatcacaatctca

SEQ ID NO: 484986 - DNA, 120 bp, Artificial Sequence
  ENSG00000162365_20 (sequence is synthesized)
ggtcaaccctctgatctttgtgagcccgatgttcatatgtggcatcttcaggtgtgctcttaaatattggtatttgtgggaaagtcaggcacctggtgtgggcgtctctgtgtacaaaag

SEQ ID NO: 484987 - DNA, 120 bp, Artificial Sequence
  ENSG00000162365_21 (sequence is synthesized)
gaaggtggcattcagagcaccccatggagactttgctccctctgcttcttcaaatgggcagcctgaattcactgtcagtgcatgttccaaacttcagtatattcatgtattttcctcact

SEQ ID NO: 484988 - DNA, 120 bp, Artificial Sequence
  ENSG00000162365_22 (sequence is synthesized)
ttaaggatatgaattctcaaaattagatattctccagtaaattcaacttcagctgtttgcttttctcagttgtcaggaatagtaaactgtagatttctctctccccacacatcctcaatg

SEQ ID NO: 484989 - DNA, 120 bp, Artificial Sequence
  ENSG00000162365_23 (sequence is synthesized)
cagcacactaccttccctatttaattcactagtctgtcgtagagatgaatcattgaaatctttgcatctgtttataatacagatgacctgcaagtcctacctttcaagccatataaggga

SEQ ID NO: 484990 - DNA, 120 bp, Artificial Sequence
  ENSG00000162365_24 (sequence is synthesized)
gaggttaaggtagccctttgaagaaagttttacaacagtgtgtgtcatatcatacatttttctgtcttgcccaatgacatttttacttcattatatagtgttcacatatttacatctatt

SEQ ID NO: 484991 - DNA, 120 bp, Artificial Sequence
  ENSG00000162365_25 (sequence is synthesized)
tccccatttggcaaattctgtacatgccttgagatctttataccatagtcctgtaatccacttagcacaatattggccaaaaacataaaaatgtgaacagtacactgtcttggagagaaa

SEQ ID NO: 484992 - DNA, 120 bp, Artificial Sequence
  ENSG00000162365_26 (sequence is synthesized)
agcccaataattatcatataacgcacaacatttgaagcctcctggtatgtgaaatataaaacacacttgaaatagctattgagctggagaggaaaactccagaatggctgcggtggaaat

SEQ ID NO: 484993 - DNA, 120 bp, Artificial Sequence
  ENSG00000162365_27 (sequence is synthesized)
catcgtggcatcaggaatcgtcctgtgacatacacacaggcaaaaatgataaaaattcttagtagaaacaaagtttgttcaaagaaataattatgtgacttcttcaaatggtgagtccac

SEQ ID NO: 484994 - DNA, 120 bp, Artificial Sequence
  ENSG00000162365_28 (sequence is synthesized)
ttacatggaacaggaaagcttcctcctgaaactccttctccagcactggtctgtctatcccagcatgaggaagtccttgtaaacattgcctgcaaatcatgtcgctgccactagagaacc

SEQ ID NO: 484995 - DNA, 120 bp, Artificial Sequence
  ENSG00000162365_29 (sequence is synthesized)
ggagagcattcctaagctccatttctagctcagaactaatattttactctcagtgtatttcattctattttattcattttaaaacttaaataacatcattcaaatattaaagtatttctt

SEQ ID NO: 484996 - DNA, 120 bp, Artificial Sequence
  ENSG00000162366_0 (sequence is synthesized)
agactgagcccaggttgatttcaggcggacaccaatagactccacagcagctccaggagcccagacaccggcggccagaagcaaggctaggagctgctgcagccatgtcggccctcagcc

SEQ ID NO: 484997 - DNA, 120 bp, Artificial Sequence
  ENSG00000162366_1 (sequence is synthesized)
tcctcattctgggcctgctcacggcagtgccacctgccagctgtcagcaaggcctggggaaccttcagccctggatgcagggccttatcgcggtggccgtgttcctggtcctcgttgcaa

SEQ ID NO: 484998 - DNA, 120 bp, Artificial Sequence
  ENSG00000162366_2 (sequence is synthesized)
tcgcctttgcagtcaaccacttctggtgccaggaggagccggagcctgcacacatgatcctgaccgtcggaaacaaggcagatggagtcctggtgggaacagatggaaggtactcttcga

SEQ ID NO: 484999 - DNA, 80 bp, Artificial Sequence
  ENSG00000162366_3 (sequence is synthesized)
cccctcctgccccatgccggccctacccgcccttgaagtatagccagccaaggttggagctcagaccgtgtctaggttgg

SEQ ID NO: 485000 - DNA, 120 bp, Artificial Sequence
  ENSG00000162366_4 (sequence is synthesized)
tagccagccaaggttggagctcagaccgtgtctaggttggggctcggctgtggccctggggtctcctgctcagctcagaagagccttctggagaggacagtcagctgagcacctcccatc

SEQ ID NO: 485001 - DNA, 120 bp, Artificial Sequence
  ENSG00000162366_5 (sequence is synthesized)
ctgctcacacgtccttccccataactatggaaatggccctaatttctgtgaaataaagactttttgtatttctggggctgaggctcagcaacagcccctcaggcttccagtgagtcccca

SEQ ID NO: 485002 - DNA, 120 bp, Artificial Sequence
  ENSG00000162366_6 (sequence is synthesized)
gtggacaccacgtgatcctggggaggcttttgcctcttccgagggctctggctccagggcctccctgttccaggggctaggtgtgccttcctcaatgctgcttttggctatgagggtgac

SEQ ID NO: 485003 - DNA, 120 bp, Artificial Sequence
  ENSG00000162366_7 (sequence is synthesized)
gggcccagggcttcagggccccagatcgcaccttgccatctggggtgtccgtcctttgtcccccacagcaggctgtgtttgcccattttctcctctgccatgggtggagatggatctgaa

SEQ ID NO: 485004 - DNA, 120 bp, Artificial Sequence
  ENSG00000162366_8 (sequence is synthesized)
gttgggtgttgaagcctctgaccaaggctgtatcttgttttgaggccctgcccggtttccagggaccacatctggggccaagaggaagaaccgaactgggactaggcggacaccaataga

SEQ ID NO: 485005 - DNA, 120 bp, Artificial Sequence
  ENSG00000162366_9 (sequence is synthesized)
ggacagagagaggctttggactcaggataaatcttttgcaaatatttggccccccactatggagtggggagaaagtgagagaccccatgggtggggccagtagccgcggctgacatgccc

SEQ ID NO: 485006 - DNA, 120 bp, Artificial Sequence
  ENSG00000162366_10 (sequence is synthesized)
tgttgcacacagctctgggaagggcagttgctagccttcgggcttgtgagaaccaggacccagaatagggtctgcttggacgaggggggccccactgaggagccccactgatgaatccca

SEQ ID NO: 485007 - DNA, 120 bp, Artificial Sequence
  ENSG00000162367_0 (sequence is synthesized)
gcccgggactatcccttcgcggtgtagcggcagccggagacctggctgaggaggcaaccgcgtagacacctccctgcttagaaaacaaacactgaaccagaccgatcccagttggagggt

SEQ ID NO: 485008 - DNA, 120 bp, Artificial Sequence
  ENSG00000162367_1 (sequence is synthesized)
tcgaaaatgttccagacagcctgtcgggaggggttgttgttgctgttggactaaatagctattcctgattggtcatgtatagggttttttaaggcgggtggggggaggagggggtagagg

SEQ ID NO: 485009 - DNA, 120 bp, Artificial Sequence
  ENSG00000162367_2 (sequence is synthesized)
aaaggctccaaacacctgcaggttgggggcggaaagctgtttgcgattccctggactggttggtcggggacaggaggtaattcccagccattgacccccatttctctctctccctccctc

SEQ ID NO: 485010 - DNA, 120 bp, Artificial Sequence
  ENSG00000162367_3 (sequence is synthesized)
ttgccctgcctctttctctccacccctatctttcctggaaactcgctttgggcgcggcagatcgcccaggaccacaccgcagcgtaactgcaggcctctcagcgaaaaagggggaaagca

SEQ ID NO: 485011 - DNA, 120 bp, Artificial Sequence
  ENSG00000162367_4 (sequence is synthesized)
aagacccgggtgtgcatcctcttcctcggcttccgcccctttccggcggagtggagatcctattcagaggggccggtctctctaaatatgccccaggatgaccgagcggccgccgagcga

SEQ ID NO: 485012 - DNA, 120 bp, Artificial Sequence
  ENSG00000162367_5 (sequence is synthesized)
ggcggctcgcagtgacccccagctagagggacgggacgcggccgaggccagcatggcccccccgcacctggtcctgctgaacggcgtcgccaaggagacgagccgcgcggccgcagcgga

SEQ ID NO: 485013 - DNA, 120 bp, Artificial Sequence
  ENSG00000162367_6 (sequence is synthesized)
cgtcgccaaggagacgagccgcgcggccgcagcggagcccccagtcatcgaactgggcgcgcgcggaggcccggggggcggccctgccggtgggggcggcgccgcgagagacttaaaggg

SEQ ID NO: 485014 - DNA, 120 bp, Artificial Sequence
  ENSG00000162367_7 (sequence is synthesized)
catcgggtgcccaccaccgagctgtgcagacctcccgggcccgccccggcccccgcgcccgcctcggttacagcggagctgcccggcgacggccgcatggtgcagctgagtcctcccgcg

SEQ ID NO: 485015 - DNA, 120 bp, Artificial Sequence
  ENSG00000162367_8 (sequence is synthesized)
ccccgccgcccccggccgcgcgctgctctacagcctcagccagccgctggcctctctcggcagcgggttctttggggagccggatgccttccctatgttcaccaccaacaatcgagtgaa

SEQ ID NO: 485016 - DNA, 120 bp, Artificial Sequence
  ENSG00000162367_9 (sequence is synthesized)
gaggagaccttccccctatgagatggagattactgatggtccccacaccaaagttgtgcggcgtatcttcaccaacagccgggagcgatggcggcagcagaatgtgaacggggcctttgc

SEQ ID NO: 485017 - DNA, 120 bp, Artificial Sequence
  ENSG00000162367_10 (sequence is synthesized)
cgagctccgcaagctgatccccacacatcccccggacaagaagctcagcaagaatgagatcctccgcctggccatgaagtatatcaacttcttggccaagctgctcaatgaccaggagga

SEQ ID NO: 485018 - DNA, 120 bp, Artificial Sequence
  ENSG00000162367_11 (sequence is synthesized)
ggagggcacccagcgggccaagactggcaaggaccctgtggtgggggctggtgggggtggaggtgggggagggggcggcgcgcccccagatgacctcctgcaagacgtgctttcccccaa

SEQ ID NO: 485019 - DNA, 120 bp, Artificial Sequence
  ENSG00000162367_12 (sequence is synthesized)
ctccagctgcggcagctccctggatggggcagccagcccggacagctacacggaggagcccgcgcccaagcacacggcccgcagcctccatcctgccatgctgcctgccgccgatggagc

SEQ ID NO: 485020 - DNA, 120 bp, Artificial Sequence
  ENSG00000162367_13 (sequence is synthesized)
cggccctcggtgatgggtctgggccaccaggatcagccaggagggcgttcttaggctgctgggatggtgggcttcagggcaggtggggtgagaattgggcggctctgaagcaaggcggtg

SEQ ID NO: 485021 - DNA, 120 bp, Artificial Sequence
  ENSG00000162367_14 (sequence is synthesized)
gacttgaactttcctggatgtctgaactttgggaagcctttactgaccctggggctggcttttctgtttcctgtaccagtaggagatcagaaaaatggagcaaagtggtaggtacttttt

SEQ ID NO: 485022 - DNA, 120 bp, Artificial Sequence
  ENSG00000162367_15 (sequence is synthesized)
gtgaagacggcacggtcttccctcttccctcagtcccaaatccttcccaagtaagaggctggagttgtcactgcttttggcctggagtttgggatccctgtctttcctaagacctggggt

SEQ ID NO: 485023 - DNA, 120 bp, Artificial Sequence
  ENSG00000162367_16 (sequence is synthesized)
tgtcagctctcatctgaggcatccagcagtctctgccttgcctttagcccctcccaagctggctggggtggcctgtgtggccacttctgtccatatttataggtacccaatagctgccca

SEQ ID NO: 485024 - DNA, 120 bp, Artificial Sequence
  ENSG00000162367_17 (sequence is synthesized)
tttcgtgagccccatcttcacccaggcctatgttgatccatccagcttgccagatgctgcagagtcacaagcctcgaggtgccttcttcagggcctggttgaagaagatgatcagtggac

SEQ ID NO: 485025 - DNA, 120 bp, Artificial Sequence
  ENSG00000162367_18 (sequence is synthesized)
agtctgctctagatgagctgggccggagggtcaggaaacccagtcgcccttacttcttgccctggggatcaaagttctgctttctccccaatgagacttgccttcctaagcctgtggctg

SEQ ID NO: 485026 - DNA, 120 bp, Artificial Sequence
  ENSG00000162367_19 (sequence is synthesized)
tggagacaatgtctgcagccctgagaaagccctgtcgggctttgtgtgaaggcagagaaagggacaatgatagtagagtgatatggagcaagagatattttgggcatgtgggcttcaact

SEQ ID NO: 485027 - DNA, 120 bp, Artificial Sequence
  ENSG00000162367_20 (sequence is synthesized)
catctgtgcattctcctggatgcttagagggatttctttgctgtaagatgtctgtttgctgatggtctggtctatgttccgaattgagcacaaaacctgtcctatgaatgctttgcattt

SEQ ID NO: 485028 - DNA, 120 bp, Artificial Sequence
  ENSG00000162367_21 (sequence is synthesized)
ggaatttttgcttgacttcagttattggtggaatctttagcgctcaataggaccaggatccagcctcacttctagggtatgggaaatccaatcagagaccaggccctggctaagacccaa

SEQ ID NO: 485029 - DNA, 120 bp, Artificial Sequence
  ENSG00000162367_22 (sequence is synthesized)
acatatgcacattcacttagcagaaccttaaacacccctcagttgtgcagcttttggtcatcaagggtgcgtctgggaggttggtttaatgcaatagaagtgctcccctctgaaagttgt

SEQ ID NO: 485030 - DNA, 120 bp, Artificial Sequence
  ENSG00000162367_23 (sequence is synthesized)
acatgaaatttttgtaaatcacatccttatccttcatcttttaaagaaataaccactgcaagtccttttgtaaagtgaagaatccttttgtagaatgaaccactgccccttcattgattt

SEQ ID NO: 485031 - DNA, 120 bp, Artificial Sequence
  ENSG00000162367_24 (sequence is synthesized)
cctgtgtcaatccagatggtgggatgtggttttcttaaggtgaggcctgtctgtgacctgcatctaagcccatgggacaaattgcacagaagtcctgtatgtctgtcattgtacccttaa

SEQ ID NO: 485032 - DNA, 120 bp, Artificial Sequence
  ENSG00000162367_25 (sequence is synthesized)
gtcaccctagccctctccctctaggctctgccttcgaggtcagaggagagatagcctgtggccctgtcctgccatgcaagaactcatcactgtggctgtctggaaagcccccccttatag

SEQ ID NO: 485033 - DNA, 120 bp, Artificial Sequence
  ENSG00000162367_26 (sequence is synthesized)
tttgggcttcagcctagtggcttgtcctcaccatgatggggccctaattcagccatgtacagacagagaatatgtctgctcctttccccttccttttaagtaaggtccaattctcgagct

SEQ ID NO: 485034 - DNA, 120 bp, Artificial Sequence
  ENSG00000162367_27 (sequence is synthesized)
tggggcaacattgttcacctttgtagcactcaggctctccattcaatttcaggctccccagatcatgttttggtgaaaattagggttggttcctttccaacgtttggaagatcctgtgag

SEQ ID NO: 485035 - DNA, 120 bp, Artificial Sequence
  ENSG00000162367_28 (sequence is synthesized)
gagccccatctgtctaaagatagagtcattgctgtaggatctaaggctgtttgcttcaccgtggattcgcttgagttaggaatgagaagtagccacagtatggatgggtggatgggtttt

SEQ ID NO: 485036 - DNA, 120 bp, Artificial Sequence
  ENSG00000162367_29 (sequence is synthesized)
atgagatggatcacatattttattaagaactcaaacttctggctccctcttctttcagacttgccatgtgactctggcttggcctatctcctagggctatggtgtggactgaatgggatc

SEQ ID NO: 485037 - DNA, 120 bp, Artificial Sequence
  ENSG00000162367_30 (sequence is synthesized)
atgaaagtagacagttttgagaacgtaaagaactttttcttttccctcaatctcaatcctgcagtggggtttcgcagcctgagtccacgacctaggcagtaggccggtgtgcctgactgc

SEQ ID NO: 485038 - DNA, 120 bp, Artificial Sequence
  ENSG00000162367_31 (sequence is synthesized)
cggtgtgcctgactgcccagcatttgggtaatttagattgtaaaccgctttggcctgagttattgagattgtcctcatttctccagattatctatttgtgtgtgtgtgtgtgtgtgtgtg

SEQ ID NO: 485039 - DNA, 120 bp, Artificial Sequence
  ENSG00000162367_32 (sequence is synthesized)
tgtgtgtgtgtgtgtgtgtgagagacggtgtcttgttctgtcactcaggctggagtacagtggtgccatcattgctgtctgcagccttgaactctgggctcaagcaatcctctcacctca

SEQ ID NO: 485040 - DNA, 89 bp, Artificial Sequence
  ENSG00000162367_33 (sequence is synthesized)
ctcagcctcccgagtagggaggaccacaggtgtgagccaccacacctggctaatttttacttttttttttttttggtagagatggagtc

SEQ ID NO: 485041 - DNA, 120 bp, Artificial Sequence
  ENSG00000162367_34 (sequence is synthesized)
ctgggatcacaggtgtcagccattgcacccagcccagattgtcttaatttctatcttgttccaaggccagggacagtaataagaatggaaaagagatatgggaacactggcagactgtgt

SEQ ID NO: 485042 - DNA, 120 bp, Artificial Sequence
  ENSG00000162367_35 (sequence is synthesized)
aaaatgtaatgcaactacccaaaacaagcctggtaggaaagggcaagtctttaggtctttgtaagaactaaagaagatctgtaatttttattttcaccctctgtaccccatgaccttatc

SEQ ID NO: 485043 - DNA, 120 bp, Artificial Sequence
  ENSG00000162367_36 (sequence is synthesized)
cttcctctccttccttgttacccatgaaaaactggcaacattccaagaatagcatctgtacaaaggggaaagaacataaaggtaaaacaaaacaaaacaacattttgagaacaaagatga

SEQ ID NO: 485044 - DNA, 120 bp, Artificial Sequence
  ENSG00000162367_37 (sequence is synthesized)
ccataaccactgaagggaatcacatcttttaagacaaattcatattcttttatttgttatggcagatgacaagatggtacaacctttattcttttccaaaataaaacaaagggcacagca

SEQ ID NO: 485045 - DNA, 120 bp, Artificial Sequence
  ENSG00000162367_38 (sequence is synthesized)
tctgtagtcagccgacaactatttcggccttttgggggtgggtctggccgtacttgtgatttcgatggtacgtgaccctctgctgaagacttgccccctgcccgtgtacatagtgcattg

SEQ ID NO: 485046 - DNA, 120 bp, Artificial Sequence
  ENSG00000162367_39 (sequence is synthesized)
tttctgtgggcgggcccagcactttccgtcaacgttgtactgtatgtgatgaattgcgttggtctctgcatttttctgcagaagaggagtaaccgctccaggtaccttgacctttgtaca

SEQ ID NO: 485047 - DNA, 120 bp, Artificial Sequence
  ENSG00000162367_40 (sequence is synthesized)
gcccagaggccaacactgtgggtgtgtgactctttagcaaaaaaaacccatgtggtgatgatgtgtatatatatgtgaggatgtatcgggaagatttctaaataaaagttttacaaaggg

SEQ ID NO: 485048 - DNA, 120 bp, Artificial Sequence
  ENSG00000162367_41 (sequence is synthesized)
gccttccctatgttcaccaccaacaatcgagtgaagaggagaccttccccctatgagatggagattactgatggcactgaccctcagggattccctgcacttcctcccaagtcttcctta

SEQ ID NO: 485049 - DNA, 120 bp, Artificial Sequence
  ENSG00000162367_42 (sequence is synthesized)
gagtctggagtctgcttcctccctgcaatggagtcatcaagggttttctccgaggtccctacacagtaggctccccttgtctcccgttaacacattctgggcttagacctggagttccct

SEQ ID NO: 485050 - DNA, 120 bp, Artificial Sequence
  ENSG00000162367_43 (sequence is synthesized)
tcggcggctgctctgcccggaggcccgcctgtgcctaggtgtttgaggggttcgttggtgagtgggaggctcctccaggcttgaagctgagcagcgctcgccgaggccggcgccttcgag

SEQ ID NO: 485051 - DNA, 120 bp, Artificial Sequence
  ENSG00000162367_44 (sequence is synthesized)
taagcagggtctccgtagtacaaagagagaggagctgtagtcgtcaaatactctagaacgattcagtctaaaatctccctcctccttcattctccccaaataaaaacaaacaaaatctct

SEQ ID NO: 485052 - DNA, 80 bp, Artificial Sequence
  ENSG00000162368_0 (sequence is synthesized)
gccgcctccccgccccgccccgcgccgcgccggccgctgtcagctccctcagcgtccggccgaggcgcggtgtatgctga

SEQ ID NO: 485053 - DNA, 120 bp, Artificial Sequence
  ENSG00000162368_1 (sequence is synthesized)
tccctcagcgtccggccgaggcgcggtgtatgctgagccgctgccgcagcgggctgctccacgtcctgggccttagcttcctgctgcagacccgccggccgattctcctctgctctccac

SEQ ID NO: 485054 - DNA, 120 bp, Artificial Sequence
  ENSG00000162368_2 (sequence is synthesized)
gtctcatgaagccgctggtcgtgttcgtcctcggcggccccggcgccggcaaggggacccagtgcgcccgcatcgtcgagaaatatggctacacacacctttctgcaggagagctgcttc

SEQ ID NO: 485055 - DNA, 120 bp, Artificial Sequence
  ENSG00000162368_3 (sequence is synthesized)
gtgatgaaaggaagaacccagattcacagtatggtgaacttattgaaaagtacattaaagaaggaaagattgtaccagttgagataaccatcagtttattaaagagggaaatggatcaga

SEQ ID NO: 485056 - DNA, 120 bp, Artificial Sequence
  ENSG00000162368_4 (sequence is synthesized)
caatggctgccaatgctcagaagaataaattcttgattgatgggtttccaagaaatcaagacaaccttcaaggatggaacaagaccatggatgggaaggcagatgtatctttcgttctct

SEQ ID NO: 485057 - DNA, 120 bp, Artificial Sequence
  ENSG00000162368_5 (sequence is synthesized)
tttttgactgtaataatgagatttgtattgaacgatgtcttgagaggggaaagagtagtggtaggagtgatgacaacagagagagcttggaaaagagaattcagacctaccttcagtcaa

SEQ ID NO: 485058 - DNA, 120 bp, Artificial Sequence
  ENSG00000162368_6 (sequence is synthesized)
caaagccaattattgacttatatgaagaaatggggaaagtcaagaaaatagatgcttctaaatctgttgatgaagtttttgatgaagttgtgcagatttttgacaaggaaggctaattct

SEQ ID NO: 485059 - DNA, 120 bp, Artificial Sequence
  ENSG00000162368_7 (sequence is synthesized)
aaacctgaaggcatccttgaaatcatgcttgaatattgctttgatagctgctatcatgacccctttttaaggcaattctaatctttcataactacatctcaattagtggctggaaagtac

SEQ ID NO: 485060 - DNA, 120 bp, Artificial Sequence
  ENSG00000162368_8 (sequence is synthesized)
atggtaaaacaaagtaaatttttttatgttcttttttttggtcacaggagtagacagtgaattcaggtttaacttcaccttagttatggtgctcaccaaacgaagggtatcagctatttt

SEQ ID NO: 485061 - DNA, 120 bp, Artificial Sequence
  ENSG00000162368_9 (sequence is synthesized)
ttttaaaattcaaaaagaatatcccttttatagtttgtgccttctgtgagcaaaactttttagtacgcgtatatatccctctagtaatcacaacattttaggatttagggatacccgctt

SEQ ID NO: 485062 - DNA, 120 bp, Artificial Sequence
  ENSG00000162368_10 (sequence is synthesized)
cctctttttcttgcaagttttaaatttccaaccttaagtgaatttgtggaccaaatttcaaaggaactttttgtgtagtcagttcttgcacaatgtgtttggtaaacaaactcaaaatgg

SEQ ID NO: 485063 - DNA, 120 bp, Artificial Sequence
  ENSG00000162368_11 (sequence is synthesized)
attcttaggagcattttagtgtttattaaataactgaccatttgctgtagaaagatgagaaaacttaagctttgttttactacaacttgtacaaagttgtatgacagggcatattctttg

SEQ ID NO: 485064 - DNA, 120 bp, Artificial Sequence
  ENSG00000162368_12 (sequence is synthesized)
gtcagctttagtctgacataatctaagggtatggggcaaggatcacatctaatgcttgtgttccttatactctattatatagtgttattcatgattcagctgatcttaacaaaattcgta

SEQ ID NO: 485065 - DNA, 120 bp, Artificial Sequence
  ENSG00000162368_13 (sequence is synthesized)
gcagtggaaccttgaaatgcatgtggctagatttatgctaaaatgattctcagttagcattttagtaacacttcaaaggtttttttttgtttgttttctagacttaataaaagcttagga

SEQ ID NO: 485066 - DNA, 120 bp, Artificial Sequence
  ENSG00000162368_14 (sequence is synthesized)
ttaattagaagaagcaatctagttaaatttcccatttgtattttattttcttgaatacttttttcatagttatttgtttaaaaagatttaaaaatcattgcactttggtcagaaaaataa

SEQ ID NO: 485067 - DNA, 120 bp, Artificial Sequence
  ENSG00000162368_15 (sequence is synthesized)
taaatatatcttataaatgtttgattcccttccttgctatttttattcagtagatttttgtttggcatcatgttgaagcaccgaaagataaatgatttttaaaaggctatagagtccaaa

SEQ ID NO: 485068 - DNA, 120 bp, Artificial Sequence
  ENSG00000162368_16 (sequence is synthesized)
ggaatattcttttacaccaattcttcctttaaaaatctctgaggaatttgttttcgccttacttttttttcttctgtcacaatgctaagtggtatccgaggttcttaatatgagatttaa

SEQ ID NO: 485069 - DNA, 120 bp, Artificial Sequence
  ENSG00000162368_17 (sequence is synthesized)
aatcttaaaatgtttcttattttcagcacttacatcatttggtacacagggtcaaatagggcaaataattttgtctttgtataatagatttgatatttaaagtcactggaaataggacaa

SEQ ID NO: 485070 - DNA, 120 bp, Artificial Sequence
  ENSG00000162368_18 (sequence is synthesized)
acaagttaatggatgtttttatattttaatagaatcatttatttctatgtgttatgaaattcacttaatgataaatttttcaacatacttgccattagaaaacaaagtattgctaagtac

SEQ ID NO: 485071 - DNA, 120 bp, Artificial Sequence
  ENSG00000162368_19 (sequence is synthesized)
acatattggccactaaaattcatattgagattatcttggtttcttggaagagataggaatgagttcttatctagtgttgcaggccagcaaatacagaggtggtttaatcaaacagctcta

SEQ ID NO: 485072 - DNA, 120 bp, Artificial Sequence
  ENSG00000162368_20 (sequence is synthesized)
gtatgaagcaagagtaaagactaaggtttcgagagcattcctactcacataagtgaagaaatctgtcagataggaatctaaatatttatagtgagattgtgaaagcaaccttaaagtttt

SEQ ID NO: 485073 - DNA, 120 bp, Artificial Sequence
  ENSG00000162368_21 (sequence is synthesized)
gaagaagactgatgagactaggtgctttgcttcctttcatcaggtatctttctgtggcatttgagaacagaaaccaagaaacatggtaattactaaattatgaggctttgctttttgttt

SEQ ID NO: 485074 - DNA, 120 bp, Artificial Sequence
  ENSG00000162368_22 (sequence is synthesized)
gcttttaagtagaaaaacatgttggcaacattgagttttggagttgattgagataatatgacttaactagttttgtcattccatttgttaaagatacagtcaccaagaatgttttgagtt

SEQ ID NO: 485075 - DNA, 120 bp, Artificial Sequence
  ENSG00000162368_23 (sequence is synthesized)
ttttgaaagaccccaatttaagccttgcttatttttaaattatttccattcagtgatgttggatgtatatcagttatttagtaaataatctcaataaattttgtgctgtggcctttgcta

SEQ ID NO: 485076 - DNA, 120 bp, Artificial Sequence
  ENSG00000162368_24 (sequence is synthesized)
ccagtgcgcccgcatcgtcgagggatgacatcttgctatggtgcataggctgatctcaaactcctggcctcgagcaaccctctcgtcttgaccttccaaagtgctgagattacaggcatg

SEQ ID NO: 485077 - DNA, 120 bp, Artificial Sequence
  ENSG00000162368_25 (sequence is synthesized)
tttttggtagcatacatattatttctgttttataaataaacagatctaagaaagattaaacaaattacccactgtcacactgggttgtgacagagttataaaactttagttttagttata

SEQ ID NO: 485078 - DNA, 120 bp, Artificial Sequence
  ENSG00000162368_26 (sequence is synthesized)
aaaccttaagcactctagttcagtgttctgagtgtgtgatttcatgtaaggttcaggttcttgtgatctttgctgagttctttgtgtttctccaaatttatttccccattagtttgataa

SEQ ID NO: 485079 - DNA, 120 bp, Artificial Sequence
  ENSG00000162368_27 (sequence is synthesized)
ttttgcaaatgctcaaatgttatgtttgcttaatattattatttaggattctgtctcctttgtacatttttctggtgttgattcttaaattcaaataaattctagttcctaaagagcacc

SEQ ID NO: 485080 - DNA, 120 bp, Artificial Sequence
  ENSG00000162368_28 (sequence is synthesized)
cagcagtgttttttgaattggtagattggatggacggaacagcactgtcttgctgttggagtattaaaaactatttggcattagcagccttgtggagctaaattttcctttattttcaaa

SEQ ID NO: 485081 - DNA, 120 bp, Artificial Sequence
  ENSG00000162368_29 (sequence is synthesized)
ataacaagaatcagttttgatttttaaaaaataagaattgacatacataataatattaggtaatgaagctgaactactttcttaggtagacattattatcaaagagtattttgccttagg

SEQ ID NO: 485082 - DNA, 120 bp, Artificial Sequence
  ENSG00000162373_0 (sequence is synthesized)
acctccgcgcccgccccgcgggctgagctgcccgaccggggcccgcccccggcgcccaccatgtacgcctttgtgcggttcctggaggacaacgtctgctacgcgctgcccgtgtcgtgc

SEQ ID NO: 485083 - DNA, 120 bp, Artificial Sequence
  ENSG00000162373_1 (sequence is synthesized)
gtgcgcgacttcagcccccgctcgcggctggattttgacaaccagaaggtgtacgccgtgtaccggggcccggaggaattgggcgccgggcccgagagccccccgcgcgccccccgcgac

SEQ ID NO: 485084 - DNA, 120 bp, Artificial Sequence
  ENSG00000162373_2 (sequence is synthesized)
tggggcgcgctgttgctccacaaggcccagatcctggcgctggcagaagacaaatctgaccttgaaaacagtgtgatgcagaagaaaataaaaatccccaagctttctcttaatcatgta

SEQ ID NO: 485085 - DNA, 120 bp, Artificial Sequence
  ENSG00000162373_3 (sequence is synthesized)
gaagaagatggagaggttaaagattatggggaagaagatttacagcttagacacatcaagagacctgaggggcggaagccgagcgaagtggcgcacaagagcatcgaggcagtggtggct

SEQ ID NO: 485086 - DNA, 120 bp, Artificial Sequence
  ENSG00000162373_4 (sequence is synthesized)
cggctagagaagcagaacggcctgagcctgggccatagcacgtgtccggaagaggtcttcgtggaggcctcgccaggcacagaggacatggacagtctagaagatgctgtggtgccccgg

SEQ ID NO: 485087 - DNA, 120 bp, Artificial Sequence
  ENSG00000162373_5 (sequence is synthesized)
gctctgtatgaggagctgctgcgcaactaccagcagcaacaggaagagatgcgccacctccagcaggagctggagcggactcggaggcagctggtacaacaggccaagaagctcaaggag

SEQ ID NO: 485088 - DNA, 120 bp, Artificial Sequence
  ENSG00000162373_6 (sequence is synthesized)
tacggggcacttgtgtctgaaatgaaggagctccgtgaccttaaccggaggctccaggacgtgctgctcctgcggcttggcagcggtcccgccattgatctggaaaaagtaaagtcagaa

SEQ ID NO: 485089 - DNA, 120 bp, Artificial Sequence
  ENSG00000162373_7 (sequence is synthesized)
agccggagttacggagcactttcagtgaggaagcaaatacgtcgtcctattaccccgctcctgcgcctgtcatggacaagtatatcctagacaatggcaaggtccatctgggaagcggga

SEQ ID NO: 485090 - DNA, 120 bp, Artificial Sequence
  ENSG00000162373_8 (sequence is synthesized)
tttgggttgatgaggagaaatggcaccagctacaagtaacccaaggagattccaagtacacgaagaacttggcagttatgatttggggaacagatgttctgaaaaacagaagcgtcacag

SEQ ID NO: 485091 - DNA, 120 bp, Artificial Sequence
  ENSG00000162373_9 (sequence is synthesized)
gcgtcgccacaaaaaaaaagaaagatgcagtccctaaaccacccctctcgcctcacaaactaagcatcgtcagagagtgtttgtatgacagaatagcacaagaaactgtggatgaaactg

SEQ ID NO: 485092 - DNA, 120 bp, Artificial Sequence
  ENSG00000162373_10 (sequence is synthesized)
aaattgcacagagactctccaaagtcaacaagtacatctgtgaaaaaatcatggatatcaataaatcctgtaaaaatgaagaacgaagggaagcaaaatacaatttgcaataaactttgg

SEQ ID NO: 485093 - DNA, 120 bp, Artificial Sequence
  ENSG00000162373_11 (sequence is synthesized)
atttttcataaagctttcgtgttttccttgtgtggcatgtgatttgcgagcgatggtgccgtccaaatcagaccccaccgtgcatggtggtgtgtgtgcagggatccatcgggttctggg

SEQ ID NO: 485094 - DNA, 120 bp, Artificial Sequence
  ENSG00000162373_12 (sequence is synthesized)
gtcagcggcttgttctgaatgtggacactccaaagacgacagatggctttgctgagactcaggagcagcctggcactggtgtccttctgggaatggggaaaacactcttcttggaggggg

SEQ ID NO: 485095 - DNA, 120 bp, Artificial Sequence
  ENSG00000162373_13 (sequence is synthesized)
ataaggttgcctgagttgcctgtcacttgactggggtttgaatggatatttttactatccaaggacttctttgttgctctattttgttctataataaattttcattaattctttgatgta

SEQ ID NO: 485096 - DNA, 120 bp, Artificial Sequence
  ENSG00000162373_14 (sequence is synthesized)
atctcgtagctaaagagtttcagtctggcttcctctccccatgtaaatgtcccctggtatcacaggctatgattttttcagggtagtgaaagcgtgggacaactcgtgtgtatttgcctt

SEQ ID NO: 485097 - DNA, 120 bp, Artificial Sequence
  ENSG00000162373_15 (sequence is synthesized)
gctggccaactttctagagagccctgattcatgctgtgccaccaagcttggtcctgtttgcacagtctgtgcagtgtcatcgctgttggaggtttggaacggtgtgtttctccttggccc

SEQ ID NO: 485098 - DNA, 120 bp, Artificial Sequence
  ENSG00000162374_0 (sequence is synthesized)
tagaatcgggggtttcagctcactgctccttttcttttttttctttctctcccccgcccacccccccaaaaataattgatttgctttacaatcatccacactgtgttttgtggatcttta

SEQ ID NO: 485099 - DNA, 120 bp, Artificial Sequence
  ENSG00000162374_1 (sequence is synthesized)
attatatataacaatagtagtcattttaaatatatattctgaaatctttgcaaattttaacagaagagtcgaagctctgcgagacccaatatttgccaataagaatggttatgataatta

SEQ ID NO: 485100 - DNA, 120 bp, Artificial Sequence
  ENSG00000162374_2 (sequence is synthesized)
gcaccatggagcctcaggtgtcaaatggtccgacatccaatacaagcaatggaccctccagcaacaacagaaactgtccttctcccatgcaaacaggggcaaccacagatgacagcaaaa

SEQ ID NO: 485101 - DNA, 120 bp, Artificial Sequence
  ENSG00000162374_3 (sequence is synthesized)
ccaacctcatcgtcaactatttaccccagaatatgacccaagaagaattcaggagtctcttcgggagcattggtgaaatagaatcctgcaaacttgtgagagacaaaattacaggacaga

SEQ ID NO: 485102 - DNA, 120 bp, Artificial Sequence
  ENSG00000162374_4 (sequence is synthesized)
gtttagggtatggatttgttaactatattgatccaaaggatgcagagaaagccatcaacactttaaatggactcagactccagaccaaaaccataaaggtctcatatgcccgtccgagct

SEQ ID NO: 485103 - DNA, 120 bp, Artificial Sequence
  ENSG00000162374_5 (sequence is synthesized)
ctgcctcaatcagggatgctaacctctatgttagcggccttcccaaaaccatgacccagaaggaactggagcaacttttctcgcaatacggccgtatcatcacctcacgaatcctggttg

SEQ ID NO: 485104 - DNA, 120 bp, Artificial Sequence
  ENSG00000162374_6 (sequence is synthesized)
attcatccgctttgataagaggattgaggcagaagaagccatcaaagggctgaatggccagaagcccagcggtgctacggaaccgattactgtgaagtttgccaacaaccccagccagaa

SEQ ID NO: 485105 - DNA, 120 bp, Artificial Sequence
  ENSG00000162374_7 (sequence is synthesized)
gtccagccaggccctgctctcccagctctaccagtcccccaaccggcgctacccaggtccacttcaccaccaggctcagaggttcaggctggacaatttgcttaatatggcctatggcgt

SEQ ID NO: 485106 - DNA, 120 bp, Artificial Sequence
  ENSG00000162374_8 (sequence is synthesized)
aaagagactgatgtctggaccagtccccccttctgcttgtccccccaggttctccccaattaccattgatggaatgacaagccttgtgggaatgaacatccctggtcacacaggaactgg

SEQ ID NO: 485107 - DNA, 120 bp, Artificial Sequence
  ENSG00000162374_9 (sequence is synthesized)
gtggtgcatctttgtctacaacctgtcccccgattccgatgagagtgtcctctggcagctctttggcccctttggagcagtgaacaacgtaaaggtgattcgtgacttcaacaccaacaa

SEQ ID NO: 485108 - DNA, 120 bp, Artificial Sequence
  ENSG00000162374_10 (sequence is synthesized)
gtgcaagggattcggctttgtcaccatgaccaactatgatgaggcggccatggccatcgccagcctcaacgggtaccgcctgggagacagagtgttgcaagtttcctttaaaaccaacaa

SEQ ID NO: 485109 - DNA, 120 bp, Artificial Sequence
  ENSG00000162374_11 (sequence is synthesized)
agcccacaagtcctgaatttcccattcttacttactaaaatatatatagaaatatatacgaacaaaacacacgcgcgcacacacacacatacacgaaagagagagaaacaaacttttcaa

SEQ ID NO: 485110 - DNA, 120 bp, Artificial Sequence
  ENSG00000162374_12 (sequence is synthesized)
ggcttatattcaaccatggactttataagccagtgttgcctaagtattaaaacattggattatcctgaggtgtaccaggaaaggattttataatgcttagaaaaaaagaaaaaaaaaaaa

SEQ ID NO: 485111 - DNA, 120 bp, Artificial Sequence
  ENSG00000162374_13 (sequence is synthesized)
gcttccttctctgggcagcagctctgtaagaaggaatgtcagcttttacataacgttcctttccgcttttgacacactgtgtgagggtccatcttcttctgatcacagatggagtggaat

SEQ ID NO: 485112 - DNA, 120 bp, Artificial Sequence
  ENSG00000162374_14 (sequence is synthesized)
atagatagcgatgtgcagggatttttacccagccagctaactttactaccttccttgaaggtggatctttttaagatgaccattcgctcatttgaagaagaaaaacaaaaaacaaaaaaa

SEQ ID NO: 485113 - DNA, 120 bp, Artificial Sequence
  ENSG00000162374_15 (sequence is synthesized)
aataaaacaatttttacaaagtaatgggattcaaagaaaggaaaaaaagatttttcttttttgtcaaaatatcgatccaatcagattggtaaaaacccccacacaaattaaagaggaata

SEQ ID NO: 485114 - DNA, 120 bp, Artificial Sequence
  ENSG00000162374_16 (sequence is synthesized)
ataaaaattgcaaaaataaaaaaaaacttttgcaaatttttttatttttccttctttcttttatatcatgtgaactaaaacagtcttctgttaggggatgggggcaagggggatacctga

SEQ ID NO: 485115 - DNA, 120 bp, Artificial Sequence
  ENSG00000162374_17 (sequence is synthesized)
aacattaacattgttgccaaagaggtggtctctttgctgaaaatgggtttcaagaaaaatctatttttataaaatataaagaatttttacaagagaatctggatttgagaaaaaaatatt

SEQ ID NO: 485116 - DNA, 120 bp, Artificial Sequence
  ENSG00000162374_18 (sequence is synthesized)
ttgactggctaatttaggggaaattgacaactttgtcgcgttcatactgcactggtaactttttagagatcaagatgtgtgttttaaactggattcgtagactgttttttgaaggatggg

SEQ ID NO: 485117 - DNA, 120 bp, Artificial Sequence
  ENSG00000162374_19 (sequence is synthesized)
ctataaacagatgatcttcatatcttttcatagcatgtaataataattaaaaaacaattattaattactaggggaaaggagtgttcgttctacccagggtaccacagttccccacagtca

SEQ ID NO: 485118 - DNA, 120 bp, Artificial Sequence
  ENSG00000162374_20 (sequence is synthesized)
aaacccaaaagcaaggagatgagttgaaagacagtttttctttaagtcatcagtatgggatgtcagcagaacaaaaattaaaaagattaattttccttttgatctaaaacttccttagtt

SEQ ID NO: 485119 - DNA, 120 bp, Artificial Sequence
  ENSG00000162374_21 (sequence is synthesized)
tgagcagtaggtgctacaaaattatttacatatcttagtatcatagttaaatgtaatgtgtttaggagaggaaaacaaaagatacatttgctttaaattcattaagaaattttcaaattc

SEQ ID NO: 485120 - DNA, 120 bp, Artificial Sequence
  ENSG00000162374_22 (sequence is synthesized)
actttgtagcccatgctgatagaattgggctgtgttggtacatttgaaacactgtttatgttgcttgaaacacttatttatttaatcgccgatgtgatgatgcctatggccgagatcaaa

SEQ ID NO: 485121 - DNA, 120 bp, Artificial Sequence
  ENSG00000162374_23 (sequence is synthesized)
tatagctagattggctagactacttatttgtttacttaaactatgggaagaagcatattattgtgtcattctgttgtgtgtgtatgtgtatatacaatataaatatatatatataaagtt

SEQ ID NO: 485122 - DNA, 120 bp, Artificial Sequence
  ENSG00000162374_24 (sequence is synthesized)
attttttctttgggttaatttattataagttgtaacacttggctagttttgtttgtatatgtcttaaaatgttttcttatgatatttaagtgacagttaaagaggtatcaaggtaacttg

SEQ ID NO: 485123 - DNA, 120 bp, Artificial Sequence
  ENSG00000162374_25 (sequence is synthesized)
tgtagaactattctttgatatattgtcatgtttgttgtgaatattttttcttactgcacagtagaaaaataaaaacaactgagtctttattttaatgtaactcagattggggaaaacaaa

SEQ ID NO: 485124 - DNA, 120 bp, Artificial Sequence
  ENSG00000162374_26 (sequence is synthesized)
acagagctaagggaacaaaatgactgagggagcactctcccacgtccagtgcactgatcattttagtatgtttgtgctttgtacggttatatatttaaaacgaaaacaaaacaaaaaaat

SEQ ID NO: 485125 - DNA, 120 bp, Artificial Sequence
  ENSG00000162374_27 (sequence is synthesized)
acaagggttcatgctcttccctgggtaatagaaacagttactcgctatgcataatctagttgatagttaaatttgctattgcttttcttgtcttgttatataaaatcttttcaatacaag

SEQ ID NO: 485126 - DNA, 120 bp, Artificial Sequence
  ENSG00000162374_28 (sequence is synthesized)
tttagtcttaatggtaataaaacgttatggttatttataacttgtgcttattttgtgcattttttcccatgctgaacccactaagtgcatgtagacaggactgttgttttcacactgaaa

SEQ ID NO: 485127 - DNA, 120 bp, Artificial Sequence
  ENSG00000162374_29 (sequence is synthesized)
aggcaaactttgtagtagtcgttgtagtggtagacagataacgaataccaaggctgcatcatagactcctcctttaaattttttttctgtttttttttcctcttttcggttttggatata

SEQ ID NO: 485128 - DNA, 120 bp, Artificial Sequence
  ENSG00000162374_30 (sequence is synthesized)
acaccagatttcagttcagagaacactcgttcaacattcagggaaagctttttacgtcacctgctatgaatgaacgtagtttgctggcaaagttttgatgcatttgctaagcattagtgg

SEQ ID NO: 485129 - DNA, 120 bp, Artificial Sequence
  ENSG00000162374_31 (sequence is synthesized)
gaaaggcatgccaaaatcttctctataatgtgttcaatcttgggggaaaaaaaaaggaaaaaaaatcttaggaccaggcagttgtatactttagttattaatgaatgacttcatgttaat

SEQ ID NO: 485130 - DNA, 120 bp, Artificial Sequence
  ENSG00000162374_32 (sequence is synthesized)
cttgctagtttagatgatttccaagggaaagtattgtaaatgtttttttttcataatcttgttgtgtttgaattatttgtactttatctgtccagacaataaatgaaagtgtgtagaatg

SEQ ID NO: 485131 - DNA, 120 bp, Artificial Sequence
  ENSG00000162374_33 (sequence is synthesized)
tggtttgtcattgctggctgcagaagcctacagaaggctgtggcctggaatgtgcattccagggcttatggaacttgtagtgggtaaagaaggaagatgggagtcagtgaccagaagatg

SEQ ID NO: 485132 - DNA, 120 bp, Artificial Sequence
  ENSG00000162374_34 (sequence is synthesized)
tcagttcagatccaggctctgcaccatgtgaatattggctagttagctttacctttcatttgctccttaacccttagtttgctcacctgtaaactgcaagtgatggcaagggaagacacc

SEQ ID NO: 485133 - DNA, 120 bp, Artificial Sequence
  ENSG00000162374_35 (sequence is synthesized)
tggaaaaaaaccaagtatcttctttggaagcgtacattacagaggtctcaggaccatctagtacatgtttgtgaactttggtcaaatttccccctccttttcaaatttctggagtgcaaa

SEQ ID NO: 485134 - DNA, 120 bp, Artificial Sequence
  ENSG00000162374_36 (sequence is synthesized)
acactctactttaaatgttatgcacaaagtaggttcaggcaaatcaatagttaattccaaagctgtgaaggttaatgattaacagctggattcagggaaggttctggaaagctctaaggc

SEQ ID NO: 485135 - DNA, 120 bp, Artificial Sequence
  ENSG00000162374_37 (sequence is synthesized)
atcggtggagactgtagtgagctgtaaagaagacagctattctgctgctgctgctaactgtttaaacccagattgttgccagatctaccagttgtccaatacacatgaaaatctagattt

SEQ ID NO: 485136 - DNA, 120 bp, Artificial Sequence
  ENSG00000162374_38 (sequence is synthesized)
gaacttaatagttgaccttttgacaggcagtttgcaaaccaccccccaacccacccccaccaaaaaaaaaatgaactcaaatttaaatatgaaaacatcgttttgccaattggtagtgaa

SEQ ID NO: 485137 - DNA, 120 bp, Artificial Sequence
  ENSG00000162374_39 (sequence is synthesized)
tggctcattacaggtccactacaggctgagcatcccaaattggaaaatctgaaacccaaaatgctccaaaatttgaaactttttgagcacctacatgacactcaaaggaaatgctcattg

SEQ ID NO: 485138 - DNA, 120 bp, Artificial Sequence
  ENSG00000162374_40 (sequence is synthesized)
gtgcattttagatttcaagtttttggattaaggatgttgaatcagtataatgcaaatattccaaaatctaaaatttgtggtcccatttctgataagggatactcaacctgtactaggagg

SEQ ID NO: 485139 - DNA, 120 bp, Artificial Sequence
  ENSG00000162374_41 (sequence is synthesized)
tacccacaaatgatggttcccagtcaacaaatatccatttcccttttattaggggcagtgttacatgactctgtgtgaatactgacagcattcagagagcaatctgacctctgttctcca

SEQ ID NO: 485140 - DNA, 120 bp, Artificial Sequence
  ENSG00000162374_42 (sequence is synthesized)
gaagcatgcaatctaggcatcggcacagcaccaaagcagagaaagagcatgatgtgtaattaagcttccaatgcatagtgtggatggtgactccaggggaattgttctttgggttataac

SEQ ID NO: 485141 - DNA, 120 bp, Artificial Sequence
  ENSG00000162374_43 (sequence is synthesized)
ttctttagtgggagaaagttcccaccacacatcttggagatcaggctcagagacactaagtgacttgtccaaagccatacaacaggccagcagtggagctcaagttagcttcaaaagggc

SEQ ID NO: 485142 - DNA, 120 bp, Artificial Sequence
  ENSG00000162374_44 (sequence is synthesized)
ctctgaaggattctgccagaagaggagctgcttaatatgttagcatgagcttgaaataataataataaagattaatagtaatgctaatttatagtgagtattcactctgtatccaatact

SEQ ID NO: 485143 - DNA, 120 bp, Artificial Sequence
  ENSG00000162374_45 (sequence is synthesized)
attataacccttttacatgcttaatatcatttcatctttgaaatatccctggagctaggtgctttacacacatcaactctaattcttaaaatagccctgtcaggaggtactattacctcc

SEQ ID NO: 485144 - DNA, 120 bp, Artificial Sequence
  ENSG00000162374_46 (sequence is synthesized)
tttatacaggtgaggaaactgaggcccaaggaggcttagagacacacccaggatgacacaattgataagcaagacttggagtaagaaaaaatgttctaaaaataactctctggcagtagg

SEQ ID NO: 485145 - DNA, 120 bp, Artificial Sequence
  ENSG00000162374_47 (sequence is synthesized)
tcgtaagtgttggaatgtcacactgcctgcttgctcagcaacacgtgcattctgtgagggtgtgtgggtgtgtatttggctctgtgcacacatgggttatactctctggcatgggaagga

SEQ ID NO: 485146 - DNA, 120 bp, Artificial Sequence
  ENSG00000162374_48 (sequence is synthesized)
aaagagagtgatttatttgggcttcagtaaatgctgcatcttgtatttcaaagagtttcctgtcatgacctcataaaaaagaggaggcggcttgtatgtgtagcagtgcctggcgtgttg

SEQ ID NO: 485147 - DNA, 120 bp, Artificial Sequence
  ENSG00000162374_49 (sequence is synthesized)
gggacttgggccccggggcgctgctcctccgcaaccgatccaccgcatcctggcaactgagcaggctccgccacccctagagcacaggggccagttgaaacagagtgtaaccaaaggaga

SEQ ID NO: 485148 - DNA, 120 bp, Artificial Sequence
  ENSG00000162374_50 (sequence is synthesized)
tttcccagaggaaggtaaaatgtgagctgaattttaaaggatcatcagaagaaaatgaggatcctaggtcaaagaaacagacatgtaaggatagaggtacccatgtgctaacaaataata

SEQ ID NO: 485149 - DNA, 120 bp, Artificial Sequence
  ENSG00000162374_51 (sequence is synthesized)
ccagctctcagcatctgaaaacacaaaaccagaactttttagtccaacaaagctacttttccaacatccagcctgatagaggagactactggtataagataatcttagctggaaggccac

SEQ ID NO: 485150 - DNA, 120 bp, Artificial Sequence
  ENSG00000162374_52 (sequence is synthesized)
tttactttggacatatcttagacaccaaacagccaaacatgacttgaaggatctacttaaggtgtctacattccctgccaaagacaagccaccttctccatgctcctctccccaaaggat

SEQ ID NO: 485151 - DNA, 120 bp, Artificial Sequence
  ENSG00000162374_53 (sequence is synthesized)
tgccggcgactgatgctgagatatctgcaacctttgggatgtgtgcatggtggcaaggggctgactgatatgagattacttcttttaagggaaattgtcattaatgagtcaagaaactgc

SEQ ID NO: 485152 - DNA, 120 bp, Artificial Sequence
  ENSG00000162374_54 (sequence is synthesized)
ccagccatgtttggggcaggctgctcttgcaaagagagcagtacatataacaggagtctactgtgtgtgagataaggggaaaattcagctcactgactagaggttttaatgtacgaactc

SEQ ID NO: 485153 - DNA, 120 bp, Artificial Sequence
  ENSG00000162374_55 (sequence is synthesized)
tagggaaataatatattgactgttccgtggtgcgcaagaaaattgaagaaccctttgcagacggagtgctttgcaaaggattctatctgtttctcttaaaacaaaatctgtggcaagatg

SEQ ID NO: 485154 - DNA, 120 bp, Artificial Sequence
  ENSG00000162374_56 (sequence is synthesized)
tgaagatggtctccagtgctcattttgtgggataatgtgtggccagagagaagatggtggtgagtggggaatatgcttattttctccagtataaaaatgtacccacttcaaacttgcaag

SEQ ID NO: 485155 - DNA, 120 bp, Artificial Sequence
  ENSG00000162374_57 (sequence is synthesized)
aggtaattaaaactccacagattgccagatgtccatgttggcacagactggggctagaattttttttttttaattcactaactttactttaaaagaaaaaaattcttcctttttcttcca

SEQ ID NO: 485156 - DNA, 120 bp, Artificial Sequence
  ENSG00000162374_58 (sequence is synthesized)
aggtgggcagggggtggcggcggcgacggtggcggagccgcagagcgagctagagagcgagagcggtgagactctgcggacgtcttcccgcccgccgcgctccgccccacccagcctccg

SEQ ID NO: 485157 - DNA, 120 bp, Artificial Sequence
  ENSG00000162374_59 (sequence is synthesized)
caggagcagcatgggtgtgtaatagagaaaggtgtgctgagaaactgcagtcattacaatgtgtctggtgtgtcatagagtgcaagggcataggtggcaagaggtacccctgggaagtta

SEQ ID NO: 485158 - DNA, 120 bp, Artificial Sequence
  ENSG00000162374_60 (sequence is synthesized)
ggttgtgttagatcaaggcattaaccaggaaacactctacctcaagtgtccagaagatacaaaggtgaaatagacatggatcctcaaggagtttccagccatgtagggaagatatatcct

SEQ ID NO: 485159 - DNA, 120 bp, Artificial Sequence
  ENSG00000162377_0 (sequence is synthesized)
gtctttgggccggcgcgaaccatggccggcatggtggacttccaggatgaggagcaggtcaagtcctttttggagaacatggaggtggagtgcaactaccactgctaccacgagaaggac

SEQ ID NO: 485160 - DNA, 120 bp, Artificial Sequence
  ENSG00000162377_1 (sequence is synthesized)
ccggacggttgctatcggctggtggactatttggaagggatccggaagaattttgatgaggctgccaaggtgttgaagtttaactgtgaagagaaccagcacagtgatagctgctacaaa

SEQ ID NO: 485161 - DNA, 120 bp, Artificial Sequence
  ENSG00000162377_2 (sequence is synthesized)
ctgggggcctactatgtgactggaaaaggtggtctgacccaggacctgaaagctgccgccaggtgctttttgatggcgtgtgagaagcctggaaagaagtcaatagcagcatgtcacaac

SEQ ID NO: 485162 - DNA, 120 bp, Artificial Sequence
  ENSG00000162377_3 (sequence is synthesized)
gttggcctcctggcacatgatggacaggttaatgaggatggccagcctgacttgggaaaggccagggactactacacaagggcctgtgatggtggctatacttccagttgcttcaacctc

SEQ ID NO: 485163 - DNA, 120 bp, Artificial Sequence
  ENSG00000162377_4 (sequence is synthesized)
agtgccatgttcctgcagggtgccccaggctttcccaaggacatggacctggcatgtaaatactccatgaaagcctgtgacctgggtcatatctgggcctgtgccaatgccagtcgcatg

SEQ ID NO: 485164 - DNA, 120 bp, Artificial Sequence
  ENSG00000162377_5 (sequence is synthesized)
tacaagctgggggatggtgttgataaggatgaggccaaggccgaggtgctaaaaaatcgagcccagcagctacacaaagaacagcagaaaggtgtccaacccttaacatttgggtaatgt

SEQ ID NO: 485165 - DNA, 120 bp, Artificial Sequence
  ENSG00000162377_6 (sequence is synthesized)
ggtccaccctccctcccaggcaacaaactgcttgaggctggcagctcctgtttctgaagactgatgcagcccttgaaggtcaacctgctggagcaaaaaaacttgggacttgaatttgta

SEQ ID NO: 485166 - DNA, 120 bp, Artificial Sequence
  ENSG00000162377_7 (sequence is synthesized)
gctccatttacatggatccattgccccagctactggagtatagcctacaatgtttatttcagtcaatattcctttatctgggtgttctgtacaatgtttattacagtcaatattccttca

SEQ ID NO: 485167 - DNA, 120 bp, Artificial Sequence
  ENSG00000162377_8 (sequence is synthesized)
tctggatgttctgtgaagatagccatgtttatgggggtcttagttttcaaactctggcaactctgtgaaaaataggagcaaactagagagccctggagattggtagtagggaagggagga

SEQ ID NO: 485168 - DNA, 120 bp, Artificial Sequence
  ENSG00000162377_9 (sequence is synthesized)
tagcaggaagtttgaaaaattagcagccccggggcctaaaggaatcagctgtcatcattttcatcattattattttggttaggatggcttgaaaatcagaacgtatcttggtttacgtaa

SEQ ID NO: 485169 - DNA, 120 bp, Artificial Sequence
  ENSG00000162377_10 (sequence is synthesized)
ttgaggtcttaaagaactaagaacagttaaatagtcacaactaccaccctctgacttacataatcattggtgtgggcttcgttttgcctttagagtcacatctttcagtaaattcacaga

SEQ ID NO: 485170 - DNA, 120 bp, Artificial Sequence
  ENSG00000162377_11 (sequence is synthesized)
gatcaagagggacgtgcaacatacagcttaaaggctgttatgcttcagggttgctgaagaagatgaaacatcagcctgccatcgtctagaagagacattggcagttaaaaattagcacct

SEQ ID NO: 485171 - DNA, 120 bp, Artificial Sequence
  ENSG00000162377_12 (sequence is synthesized)
ccagtgtagtcgcctggcactgcccatcatgctgagggagcagattcttcccaaggcagcttcagctaggagtttgtaagcaaggactttgtgacacatttgtcccctggaactgagcct

SEQ ID NO: 485172 - DNA, 120 bp, Artificial Sequence
  ENSG00000162377_13 (sequence is synthesized)
ttttaactgtccctgtgaatgaacaattttgagtgacctacggtttgtgttaattagtgttctttccagattccaggtaccgtagagagtatgttctttgtggtggttgtgccttttaag

SEQ ID NO: 485173 - DNA, 120 bp, Artificial Sequence
  ENSG00000162377_14 (sequence is synthesized)
gactccgtctcaaaaaaaaaaaaaaatttgctttttctgttgtctccccagcttgtcaccagggggcgagcttgccatttccctgctggtaacaataccattctgtcaccatctactgtt

SEQ ID NO: 485174 - DNA, 120 bp, Artificial Sequence
  ENSG00000162377_15 (sequence is synthesized)
ccatctactgttttaggcttccgttttgcagccgtcctgaaaggaaggcttgctgtgtaaatgaaggcttgtgagcacagcagccagcctctcaagttgatagaggacagggacttcccc

SEQ ID NO: 485175 - DNA, 120 bp, Artificial Sequence
  ENSG00000162377_16 (sequence is synthesized)
agggacttccccaagtgcacagaggagatttcaaaagacatcaaattcactttttaaaaatgtaaagtagcttttggtgtgcttaaactaggtcaggccaggcgtggtggctcatgcctg

SEQ ID NO: 485176 - DNA, 60 bp, Artificial Sequence
  ENSG00000162377_17 (sequence is synthesized)
ttcgagaacagcctggccaacatagtgaaacctcgtatctactaaaaatacaaaaattat

SEQ ID NO: 485177 - DNA, 78 bp, Artificial Sequence
  ENSG00000162377_18 (sequence is synthesized)
gcggatcacgaggtcaggatttcgagaacagcctggccaacatagtgaaacctcgtacctgttgtcccagctattcag

SEQ ID NO: 485178 - DNA, 87 bp, Artificial Sequence
  ENSG00000162377_19 (sequence is synthesized)
cacacacacacacacacaaaactgtaggtcaaaaaacatgaaaatatgttcaacatcactaattagggaaatgtaaatcaaaaacca

SEQ ID NO: 485179 - DNA, 120 bp, Artificial Sequence
  ENSG00000162377_20 (sequence is synthesized)
gttcaacatcactaattagggaaatgtaaatcaaaaaccacaatgaactcttaaaattcaacagtaagaaaacaacctgattaaaaacaggccaaaacccttaacatatctcagcaaaga

SEQ ID NO: 485180 - DNA, 120 bp, Artificial Sequence
  ENSG00000162377_21 (sequence is synthesized)
agatagacaggtggcaaataagcatatgaaaagatgttccatataacatgtcatcaggaaaatgcaagttagaacaacagaccactatacaactattagaatggccaaaatccaaagcac

SEQ ID NO: 485181 - DNA, 120 bp, Artificial Sequence
  ENSG00000162377_22 (sequence is synthesized)
cgacagcatgaaatgctgggaaagttggagcaaccagaactcttattccttgctggtgggaacgcaagatggcacagccactttggaagacagttaagcagtttcttacaaaaactaggt

SEQ ID NO: 485182 - DNA, 120 bp, Artificial Sequence
  ENSG00000162377_23 (sequence is synthesized)
aagctcttaccatgtgatccagcaatcttgctctttagtatttacctgaaggaactgaaaacatgtccacacaaaaaccagcacatggatgtttatagcagctttatctataattgccaa

SEQ ID NO: 485183 - DNA, 120 bp, Artificial Sequence
  ENSG00000162377_24 (sequence is synthesized)
aactcaacccaaaatgtctttcagtaggtaaatgggtaaataaattgtggtgcatgtagtcattattcagtgcttaaatcaagctatgacaaattatgagttatcaagctataagaagtc

SEQ ID NO: 485184 - DNA, 120 bp, Artificial Sequence
  ENSG00000162377_25 (sequence is synthesized)
agtcacagaggaacttaaatgaatgctactaaatgaagccagtctgaaaaggcttcatattaaatgatgccaactatatgacactgggatgtattctggaaaaggcaaaactatggagac

SEQ ID NO: 485185 - DNA, 120 bp, Artificial Sequence
  ENSG00000162377_26 (sequence is synthesized)
aaaagcagtgggtgggggaggggagggaggaataattggagcacagaagatttttagggcagcgaaactactctgtatgatactataattataaatacctgtcattgtacatatgtccaa

SEQ ID NO: 485186 - DNA, 120 bp, Artificial Sequence
  ENSG00000162377_27 (sequence is synthesized)
ccccctaaaatgtacaacaccaagagtgaaccctaatgtaaactgtggactttgagtgataatgatgtgtcagtgtaggttcatcaattactgcaaatgtacctctttggtgggagatgt

SEQ ID NO: 485187 - DNA, 120 bp, Artificial Sequence
  ENSG00000162377_28 (sequence is synthesized)
tgaaaatggtggagactatgcatgtgtggggacaacaactatatgggaaatctctgtaccctctcaattttgctgtaaacctaaaattgctctaaaatataaagtctattaaaaccacaa

SEQ ID NO: 485188 - DNA, 120 bp, Artificial Sequence
  ENSG00000162377_29 (sequence is synthesized)
gatgtgtcccgggaagaccgagccaggaggccggggcgggtaggaagagacgtgctggggcttttgggttagggactggggatccatcggtgaacagatgaaactccctgccctcgtgga

SEQ ID NO: 485189 - DNA, 120 bp, Artificial Sequence
  ENSG00000162378_0 (sequence is synthesized)
ggagtctgcgctctggttcgggctgcggctgcggctgcggctgcggctgctactgctacgctcctagcttgagggaaagaggccgaggcctgggccaagcccggagccgccgctcgccgg

SEQ ID NO: 485190 - DNA, 120 bp, Artificial Sequence
  ENSG00000162378_1 (sequence is synthesized)
cctccgcgccggctcagcctgggggcgggctccggtccggcccgccgccgcacccaggacggaggctgcatgcccgaggaccaggccggcgcagccatggaggaggcgtctccctattcc

SEQ ID NO: 485191 - DNA, 120 bp, Artificial Sequence
  ENSG00000162378_2 (sequence is synthesized)
tctccctattccttacttgatatctgcttgaatttcttgactactcaccttgagaagttctgttcagccagacaagatggaacattgtgtctgcaggaacctggagtattcccacaggag

SEQ ID NO: 485192 - DNA, 120 bp, Artificial Sequence
  ENSG00000162378_3 (sequence is synthesized)
gtggctgatcgactgcttcggaccatggcttttcatggtctattgaatgatggaactgtgggtatttttaggggcaaccagatgcgcttaaagcgagcctgcattcgcaaagcaaagatc

SEQ ID NO: 485193 - DNA, 120 bp, Artificial Sequence
  ENSG00000162378_4 (sequence is synthesized)
tctgctgttgctttccggaaagctttctgccaccacaagttagtggaacttgatgccacaggtgtgaatgctgatatcacgattacagacattatcagtgggcttggcagtaacaaatgg

SEQ ID NO: 485194 - DNA, 120 bp, Artificial Sequence
  ENSG00000162378_5 (sequence is synthesized)
atccagcagaatctccagtgcctggtgctgaattcattaactctctccctcgaggatccttacgagcgctgcttcagccggctttctggccttcgagctttaagcatcacgaatgttctc

SEQ ID NO: 485195 - DNA, 120 bp, Artificial Sequence
  ENSG00000162378_6 (sequence is synthesized)
ttttacaatgaagacctggctgaagttgcctcattgccaagattagagagcttggatatttctaacacctcaatcacagacatcactgctctactggcctgcaaagaccgactcaagtct

SEQ ID NO: 485196 - DNA, 120 bp, Artificial Sequence
  ENSG00000162378_7 (sequence is synthesized)
ctaaccatgcaccacttgaaatgtttaaaaatgacaactacccagatactggatgtagttcgggaactcaaacatctgaatcatcttgatatctcagatgataaacagtttacatcagac

SEQ ID NO: 485197 - DNA, 120 bp, Artificial Sequence
  ENSG00000162378_8 (sequence is synthesized)
atagctcttcgcttactagaacaaaaagacatcctacctaaccttgtttctctggatgtttctgggagaaagcacgtgacagataaagccgttgaagcctttatacaacaacgtccaagc

SEQ ID NO: 485198 - DNA, 120 bp, Artificial Sequence
  ENSG00000162378_9 (sequence is synthesized)
atgcaatttgtaggtttgctggctactgatgctggttactctgaattcctcacaggcgaaggacatttgaaggtgtctggggaagccaatgaaactcagattgcagaagcactgaagcgt

SEQ ID NO: 485199 - DNA, 120 bp, Artificial Sequence
  ENSG00000162378_10 (sequence is synthesized)
tacagtgaacgggcattctttgttcgggaagctctatttcatctttttagtctgactcatgtgatggaaaaaacaaagccagaaattttaaagcttgtggttactgggatgagaaaccac

SEQ ID NO: 485200 - DNA, 120 bp, Artificial Sequence
  ENSG00000162378_11 (sequence is synthesized)
cctatgaatttgccagtgcaactggctgcaagcgcctgtgtatttaacttaaccaagcaggatcttgctgcagggatgcctgtccgactcctggctgatgtgacccatttgctgctcaaa

SEQ ID NO: 485201 - DNA, 120 bp, Artificial Sequence
  ENSG00000162378_12 (sequence is synthesized)
gccatggaacattttcccaatcaccagcagttacagaagaattgcctcctttcactttgcagtgaccggatccttcaagatgttccatttaacaggtttgaagcagccaagcttgtcatg

SEQ ID NO: 485202 - DNA, 120 bp, Artificial Sequence
  ENSG00000162378_13 (sequence is synthesized)
cagtggctttgcaaccatgaggatcaaaacatgcaaaggatggcagttgctatcatttctatcctggctgccaagctttctacagaacaaactgcacagcttggtactgagctcttcatt

SEQ ID NO: 485203 - DNA, 120 bp, Artificial Sequence
  ENSG00000162378_14 (sequence is synthesized)
gtcaggcaacttcttcaaatagtgaagcagaaaaccaatcaaaattcagtggacactacattgaaatttactttgagtgcactttggaacctcacagatgaatctccaaccacttgtaga

SEQ ID NO: 485204 - DNA, 120 bp, Artificial Sequence
  ENSG00000162378_15 (sequence is synthesized)
cactttattgaaaaccaagggttagaactcttcatgagggttctagagtctttcccaactgagtcatccattcagcagaaagttctaggacttttgaacaatatagctgaagtacaagaa

SEQ ID NO: 485205 - DNA, 120 bp, Artificial Sequence
  ENSG00000162378_16 (sequence is synthesized)
ttacattctgaattaatgtggaaagattttatagaccacatcagtagtctcctacacagtgtggaagtggaagtcagttactttgcagctggaattattgcccatttaatatccagaggt

SEQ ID NO: 485206 - DNA, 120 bp, Artificial Sequence
  ENSG00000162378_17 (sequence is synthesized)
gaacaagcttggacattgagtcgtagccagaggaattctctgctggatgatttgcattcagctattttgaaatggccaactccagagtgtgagatggtagcatacaggtcctttaatcca

SEQ ID NO: 485207 - DNA, 120 bp, Artificial Sequence
  ENSG00000162378_18 (sequence is synthesized)
tttttcccattacttggctgtttcacaacaccaggagttcagctatgggcagtttgggccatgcaacatgtctgcagcaagaatccttcaaggtattgcagcatgctgattgaagaagga

SEQ ID NO: 485208 - DNA, 120 bp, Artificial Sequence
  ENSG00000162378_19 (sequence is synthesized)
ggattgcagcatttatacaacatcaaagatcatgaacatactgatccccatgtccaacagattgctgtggccattctggatagcttagaaaaacacattgtgcgccatgggaggccacct

SEQ ID NO: 485209 - DNA, 120 bp, Artificial Sequence
  ENSG00000162378_20 (sequence is synthesized)
ccctgtaaaaaacagccccaagccagactaaattgatagccataagtattggatagttgaatcacaggaatcctttttgtgattggtccatttggaatatcttaccctccctgatgtttt

SEQ ID NO: 485210 - DNA, 120 bp, Artificial Sequence
  ENSG00000162378_21 (sequence is synthesized)
gggggtttctatgacaagagtcataaaatcagtttgggattgataatgtgtagtactgcccatgtgaacagtctctaatttgtcttgtgattttaaacttatgagtcaagaagggtctct

SEQ ID NO: 485211 - DNA, 120 bp, Artificial Sequence
  ENSG00000162378_22 (sequence is synthesized)
tcctttatcattgccttttaggaaattttccacatctttcagtgtttgaacttacttgtgcttgagattctacagttttatggtaaagtttgcacgaacccttaggccagacttttctga

SEQ ID NO: 485212 - DNA, 120 bp, Artificial Sequence
  ENSG00000162378_23 (sequence is synthesized)
tctcagagtcccttccaatcaatttgcagcttcacataagctgttgacctgatttctgacactgcttcagttgtaaattttatactgcttctgtataaaatgcctttcttctctatctgt

SEQ ID NO: 485213 - DNA, 120 bp, Artificial Sequence
  ENSG00000162378_24 (sequence is synthesized)
gtatattttataagatgtccttcttagtgtgaaagaagggaaatgtggatcatcttgtggaagctaatcactggcaggagcctggatggctggcggaaagatatatgagaaagaaaaatt

SEQ ID NO: 485214 - DNA, 120 bp, Artificial Sequence
  ENSG00000162378_25 (sequence is synthesized)
atgaaggtagaacagagtgtaggaactgggaattggtttcatggtataggttttaaaatgagacaggctacccttcgggagtccacctctcttgaggcggtgagcagaagcttgtcctcc

SEQ ID NO: 485215 - DNA, 120 bp, Artificial Sequence
  ENSG00000162378_26 (sequence is synthesized)
atatttatacctagaagtgtggactgctggttcctgcacagactgccggttattcactaggaatatttccccaagcaccacagtataaaatactacagcactctgtgttaaagactaact

SEQ ID NO: 485216 - DNA, 120 bp, Artificial Sequence
  ENSG00000162378_27 (sequence is synthesized)
gtctacatctccatatgttgtagtgttgtgaaaatgtgattttaaaaaattatcgccagttaaaactggctattcttttcctctatttcaaagtcatttttgttcagtggaatagagaca

SEQ ID NO: 485217 - DNA, 120 bp, Artificial Sequence
  ENSG00000162378_28 (sequence is synthesized)
gcaacatggtgttaacctctcaattaaaatacaattgacaccagtaaattttgccataaaaagttaaaatctcttgttcaaaatatgtgtatcttcttaatgtgttcatgttagagaaag

SEQ ID NO: 485218 - DNA, 120 bp, Artificial Sequence
  ENSG00000162378_29 (sequence is synthesized)
tgtccccatctcactgccaaaaatgaaagaaaataattaaactctttaaatgattaaatgtaatgattctactcgcagtgcataacagcacatatttttgacagattattttttaggcaa

SEQ ID NO: 485219 - DNA, 120 bp, Artificial Sequence
  ENSG00000162378_30 (sequence is synthesized)
ttacctttccttaaggtatctgatacagtatagtaaagaatcacttatatcagtaatagcacttgagagatagcaagtcaccaagaaacttaattttcatttaaaattttattttgtgaa

SEQ ID NO: 485220 - DNA, 120 bp, Artificial Sequence
  ENSG00000162378_31 (sequence is synthesized)
taaggtcaatctacaatcccagataactacattttttttcatagatggccagtgttttcaacagagatttaaaatggaatattaaaattatagtgattattcagaagcattttaatttag

SEQ ID NO: 485221 - DNA, 120 bp, Artificial Sequence
  ENSG00000162378_32 (sequence is synthesized)
aaaggagctggtttgttagttcactgatgacattttttgacaaacattttataccattatcacaataatcagacttgaattttttttggagttccttcatgtgaatgaaaactgagttaa

SEQ ID NO: 485222 - DNA, 120 bp, Artificial Sequence
  ENSG00000162378_33 (sequence is synthesized)
tagcctgggcaacatagtgagactcggtctctaccaaaaaaaaaaattttttttttttaaattagctgggtgtggtggcacctgggaaacagagcgagacgctgactcaaataaatatct

SEQ ID NO: 485223 - DNA, 120 bp, Artificial Sequence
  ENSG00000162378_34 (sequence is synthesized)
aaatagatatttagaatcactgaaaaccatattaaatgctgggttaatgctgacttaattggcttaaggaatttttataggcgtaagataaattttcacagactaagtttatttcagaca

SEQ ID NO: 485224 - DNA, 120 bp, Artificial Sequence
  ENSG00000162378_35 (sequence is synthesized)
aaatagagaattcttttaaaagttttttttttttttttcctttttcgaatgttaatgtctaagacaaagttcagaaaacgagatggcctgtggtagtttggaaattgctagatatgttga

SEQ ID NO: 485225 - DNA, 120 bp, Artificial Sequence
  ENSG00000162378_36 (sequence is synthesized)
ccgtttccaggtcttttatctagtgtagttaagggaaagcctatttaagaagtttggcttcaagtttctgttttataagacaaaagtgcatatttctttacaggctaatgctaggttttt

SEQ ID NO: 485226 - DNA, 120 bp, Artificial Sequence
  ENSG00000162378_37 (sequence is synthesized)
gtctttacaaattattttcagaaatggctaaaagtgtacagaaaacagtaaatcccttctttactcagaataacttcttaatagttgaagcatccaaaatatgtaaaagcaagggtgggc

SEQ ID NO: 485227 - DNA, 120 bp, Artificial Sequence
  ENSG00000162378_38 (sequence is synthesized)
tgccactgcactccagcctggacaacggagtgagactctggggaaaaaaaaaattaaacttcctactttttttctttttgtagagacagagtttcactctgtcgcccaagctggagtgca

SEQ ID NO: 485228 - DNA, 120 bp, Artificial Sequence
  ENSG00000162378_39 (sequence is synthesized)
cacaatcatacctcactgcagcctcttgggcttatgtgatcttaccccctcagcctctggagtagctggaactacaggctaaatttcctactttgtaaacatcagtagtggccagatact

SEQ ID NO: 485229 - DNA, 85 bp, Artificial Sequence
  ENSG00000162378_40 (sequence is synthesized)
gcataataatttattacatcccaaatatataaaaatttgagtgcctttgcagttgggatggttcctaaaattgcgtatagaatta

SEQ ID NO: 485230 - DNA, 120 bp, Artificial Sequence
  ENSG00000162378_41 (sequence is synthesized)
tttgcagttgggatggttcctaaaattgcgtatagaattaaggcacagaattgtgtgtaaggtcctgaatctggctaaaatacagtggatgtatgtattggaattatgaggcataagtag

SEQ ID NO: 485231 - DNA, 120 bp, Artificial Sequence
  ENSG00000162378_42 (sequence is synthesized)
ccagtatctatagttagaatctacaaggcctcctttttgcacctgtagactagaatataactgttattggtgcctttgagtgttatctctcagtggctagaggtgctgtttcaagcacaa

SEQ ID NO: 485232 - DNA, 120 bp, Artificial Sequence
  ENSG00000162378_43 (sequence is synthesized)
tttagactagggttgaaccactcattgttcaaatcattggtgggctccaatgtaaaatatcactacatcagtccacaagcaacattaaggaaatctaaaggaaatggaatttgacttttt

SEQ ID NO: 485233 - DNA, 120 bp, Artificial Sequence
  ENSG00000162378_44 (sequence is synthesized)
agagtataatgatgttctagggcataatgaggaaaatttttaaaaaatagattataatgatacatattggtatcattaagacaacagatttgagcaaatacaattaaggtgtcttatttt

SEQ ID NO: 485234 - DNA, 120 bp, Artificial Sequence
  ENSG00000162378_45 (sequence is synthesized)
ttgcatcaagtaattattgctgtggtctttctactccacaaaataattttttctttttgcagttgaaaattaactgcattattaactaattaataaaataaatcaagtggtataagggat

SEQ ID NO: 485235 - DNA, 120 bp, Artificial Sequence
  ENSG00000162378_46 (sequence is synthesized)
tagtttaccctcaagccgatgactccatggctactgatattagttagtttaggatttttaaaaagcatatcagacccccagtttcaggaattgagtataaatattgcttcttgtcaccct

SEQ ID NO: 485236 - DNA, 120 bp, Artificial Sequence
  ENSG00000162378_47 (sequence is synthesized)
gggacagtaatgccttatagtggcactagtcaccttaagtagattacacatggttgaggtgaataaagctgcatgggaatttgctttcgtgatatatttcatttgcaaacttctacataa

SEQ ID NO: 485237 - DNA, 120 bp, Artificial Sequence
  ENSG00000162378_48 (sequence is synthesized)
tcaagttttatgtttaaaaccatcggttctatatatctagctttaggaagttgcccttacaggtgggaccttttgtgttaatctgttttctccccagtcatcttatttggctatgttaaa

SEQ ID NO: 485238 - DNA, 75 bp, Artificial Sequence
  ENSG00000162378_49 (sequence is synthesized)
atctgttttctccccagtcatcttatttggctatgttaaaaaaaaaaaaaaaaaaaaagcgagagagagagatgg

SEQ ID NO: 485239 - DNA, 120 bp, Artificial Sequence
  ENSG00000162378_50 (sequence is synthesized)
aggcatgagccacagtgcctggtcttagctgtgtttttaattatgccatgcatcaacataacaccgggccatcttcctatcccttcctatcccatatgtttaatgaaaacatattttatg

SEQ ID NO: 485240 - DNA, 120 bp, Artificial Sequence
  ENSG00000162378_51 (sequence is synthesized)
tgctaaattaggttaatttaccagagatttagcttagtgtttttaaactatagaacaatacccctatagaacaatgtacagctgcacccaaggttaaaaagaggtagcagggaaaacaaa

SEQ ID NO: 485241 - DNA, 120 bp, Artificial Sequence
  ENSG00000162378_52 (sequence is synthesized)
cttaaactctttgtatatggtgaaacccatccctctcctgccctctaatggtatgtttacattatttcgttattatacaatgtagtggtataaacagtattattaaactgaaggcataag

SEQ ID NO: 485242 - DNA, 120 bp, Artificial Sequence
  ENSG00000162378_53 (sequence is synthesized)
ttaaaggaagtatgttactttgagctgatgtaggctcttccacttttatctgtattttacttatttggggactttgtattgctagggcttcagaatactaactttgacacagctcccaga

SEQ ID NO: 485243 - DNA, 120 bp, Artificial Sequence
  ENSG00000162378_54 (sequence is synthesized)
gaggtttgcaaacttttggtttccctctcaaatccatggtagtagtttcaaatgagtttgtggataatggatgtttagtccttatcatttgctgtgttttgacagtttttaatttgcagt

SEQ ID NO: 485244 - DNA, 120 bp, Artificial Sequence
  ENSG00000162378_55 (sequence is synthesized)
attcactcacgaactgttttattttaggaataatgcaaaaccaaccttcgtccggtgatgagaatagccgtatgataagagaatttgctcatcgtgctttaaatgattaactgttttacc

SEQ ID NO: 485245 - DNA, 120 bp, Artificial Sequence
  ENSG00000162378_56 (sequence is synthesized)
ttatttagtatttcatagactttgcatgatatggtacactcctaattatgcattctttggtttccaaatcttaatctaagatactttgttaactgactggtagcctaagaaagagacttt

SEQ ID NO: 485246 - DNA, 120 bp, Artificial Sequence
  ENSG00000162378_57 (sequence is synthesized)
tcttcctgtttttctctctccccattttttggggtaagttttgcaaagatcagtgctgcttctcatgactctaaagtaaagctcttttggatagcacagcctaactttacagctagacag

SEQ ID NO: 485247 - DNA, 120 bp, Artificial Sequence
  ENSG00000162378_58 (sequence is synthesized)
aatggccattaagaatatttccaaaatccaagtttatcaaaattattttgtgggaaatcatcaatctattttattaatgttatgtgtttaattttggacttattttgggaaaaactgttc

SEQ ID NO: 485248 - DNA, 120 bp, Artificial Sequence
  ENSG00000162378_59 (sequence is synthesized)
aaattgggtccttttaagcttattttaagcagcctagaaggaagaagctacttagctaatgaaagctgagacactttattaaaagcaggatcttaagagcattgtttttccttaaaaact

SEQ ID NO: 485249 - DNA, 120 bp, Artificial Sequence
  ENSG00000162378_60 (sequence is synthesized)
ttatactctcagataatctgcaacaacaaaaattaagaaatccctgacttttgtagaattcccactgtcaaattctcactgacttatgagtgtgagagaagttatcttttgtttgaattc

SEQ ID NO: 485250 - DNA, 120 bp, Artificial Sequence
  ENSG00000162378_61 (sequence is synthesized)
tgatagaacagtttaactcctttctaaggatataaaaaattcattggaaagtgtgtatatttcaaagactctcaattatctggactgaaggcactgttctcactatggccagatgaatgg

SEQ ID NO: 485251 - DNA, 120 bp, Artificial Sequence
  ENSG00000162378_62 (sequence is synthesized)
gagtattctgtacatgaatcatgctgtattttaaatcaggacatcacttaagtattaatgttgtgtgtacagatttttgttttgggattttttttgcctaaataaatgttataaatttta

SEQ ID NO: 485252 - DNA, 120 bp, Artificial Sequence
  ENSG00000162383_0 (sequence is synthesized)
ctggtgtttagcaactccgaccacctgcctgctgaggggctagagccctcagcccagaccctgtgcccccggccgggctctcatgcgtggaatggtgctgtgccccttgccagcaggcca

SEQ ID NO: 485253 - DNA, 120 bp, Artificial Sequence
  ENSG00000162383_1 (sequence is synthesized)
ggctcaccatggtgccgcatgccatcttggcacgggggagggacgtgtgcaggcggaatggactcctcatcctgtctgtgctgtctgtcatcgtgggctgcctcctcggcttcttcttga

SEQ ID NO: 485254 - DNA, 120 bp, Artificial Sequence
  ENSG00000162383_2 (sequence is synthesized)
ggacccggcgcctctcaccacaggaaattagttacttccagttccctggagagctcctgatgaggatgctgaagatgatgatcctgccactggtggtctccagcttgatgtccggacttg

SEQ ID NO: 485255 - DNA, 120 bp, Artificial Sequence
  ENSG00000162383_3 (sequence is synthesized)
cctccctggatgccaagacctctagccgcctgggcgtcctcaccgtggcgtactacctgtggaccaccttcatggctgtcatcgtgggcatcttcatggtctccatcatccacccaggca

SEQ ID NO: 485256 - DNA, 120 bp, Artificial Sequence
  ENSG00000162383_4 (sequence is synthesized)
gcgcggcccagaaggagaccacggagcagagtgggaagcccatcatgagctcagccgatgccctgttggacctcatccggaacatgttcccagccaacctagtagaagccacattcaaac

SEQ ID NO: 485257 - DNA, 120 bp, Artificial Sequence
  ENSG00000162383_5 (sequence is synthesized)
agtaccgcaccaagaccaccccagttgtcaagtcccccaaggtggcaccagaggaggcccctcctcggcggatcctcatctacggggtccaggaggagaatggctcccatgtgcagaact

SEQ ID NO: 485258 - DNA, 120 bp, Artificial Sequence
  ENSG00000162383_6 (sequence is synthesized)
tcgccctggacctgaccccgccgcccgaggtcgtttacaagtcagagccgggcaccagcgatggcatgaatgtgctgggcatcgtcttcttctctgccaccatgggcatcatgctgggcc

SEQ ID NO: 485259 - DNA, 120 bp, Artificial Sequence
  ENSG00000162383_7 (sequence is synthesized)
gcatgggtgacagcggggcccccctggtcagcttctgccagtgcctcaatgagtcggtcatgaagatcgtggcggtggctgtgtggtatttccccttcggcattgtgttcctcattgcgg

SEQ ID NO: 485260 - DNA, 120 bp, Artificial Sequence
  ENSG00000162383_8 (sequence is synthesized)
gtaagatcctggagatggacgaccccagggccgtcggcaagaagctgggcttctactcagtcaccgtggtgtgcgggctggtgctccacgggctctttatcctgcccctgctctacttct

SEQ ID NO: 485261 - DNA, 120 bp, Artificial Sequence
  ENSG00000162383_9 (sequence is synthesized)
tcatcaccaagaagaatcccatcgtcttcatccgtggcatcctgcaggctctgctcatcgcgctggccacctcctccagctcagccacactgcccatcaccttcaagtgcctgctggaga

SEQ ID NO: 485262 - DNA, 120 bp, Artificial Sequence
  ENSG00000162383_10 (sequence is synthesized)
actacgagctggactttggccagatcatcaccatcagtatcacagccactgcagccagcattggggcagctggcatcccccaggccggcctcgtcaccatggtcatcgtgctcacctccg

SEQ ID NO: 485263 - DNA, 120 bp, Artificial Sequence
  ENSG00000162383_11 (sequence is synthesized)
tgggactgcccaccgatgacatcaccctcatcattgccgttgactgggctctggaccgtttccgcaccatgattaacgtgctgggtgatgcgctggcagcggggatcatggcccatatat

SEQ ID NO: 485264 - DNA, 120 bp, Artificial Sequence
  ENSG00000162383_12 (sequence is synthesized)
gtcggaaggattttgcccgggacacaggcaccgagaaactgctgccctgcgagaccaagccagtgagcctccaggagatcgtggcagcccagcagaatggctgtgtgaagagtgtagccg

SEQ ID NO: 485265 - DNA, 120 bp, Artificial Sequence
  ENSG00000162383_13 (sequence is synthesized)
aggcctccgagctcaccctgggccccacctgcccccaccacgtccccgttcaagtggagcaggatgaggagctgcccgctgcgagtctgaaccactgcaccatccagatcagtgagctgg

SEQ ID NO: 485266 - DNA, 120 bp, Artificial Sequence
  ENSG00000162383_14 (sequence is synthesized)
agaccaatgtctgagcctgcggagctgcaggggcaggcgaggcctccaggggcagggtcctgaggcaggaactcgactctccaaccctcctgagcagccggcaggggccaggatcacaca

SEQ ID NO: 485267 - DNA, 120 bp, Artificial Sequence
  ENSG00000162383_15 (sequence is synthesized)
ttcttctcacccttgagaggctggaattaaccccgcttgacggaaaatgtatctcagagaagggaaaggctgcatgggggagccccatctagggagtgatgggcccggcattgcctgagg

SEQ ID NO: 485268 - DNA, 120 bp, Artificial Sequence
  ENSG00000162383_16 (sequence is synthesized)
ccccgctgtgacagtttccccggtgtgagcccggtgagggcggcaggcaggggttatccggccccactttctggatgacagacttgaggctctgagagctgaaaacacttgtccaaggtc

SEQ ID NO: 485269 - DNA, 120 bp, Artificial Sequence
  ENSG00000162383_17 (sequence is synthesized)
tcacgttaaggtcaagacactaactcaaatctttcaagccccgcctctcctcttggaggacagggcagcctgcagctgtgtccaggcccaggccccaccccataacaggtggcctcagcc

SEQ ID NO: 485270 - DNA, 120 bp, Artificial Sequence
  ENSG00000162383_18 (sequence is synthesized)
acacagttctccccaaggggagcagcccagggccaagccccgctgccttccccaggccacagtgcgtccagtctcctgtcctgccacgtgtcttttgcaaagctccttggatgtggagac

SEQ ID NO: 485271 - DNA, 120 bp, Artificial Sequence
  ENSG00000162383_19 (sequence is synthesized)
agatgtctttactagagctgaaaggcccccttgacacatccaggccaacctcccatggaataggtaggcaagccaggactccgggaaggaggtgcagccaggatgctctggtggagctgc

SEQ ID NO: 485272 - DNA, 120 bp, Artificial Sequence
  ENSG00000162383_20 (sequence is synthesized)
cgatggggccctggtgtcagaactccccaaaggcctgtgcgtccaagtggagtcaggttttctattcctttctgtgtttgcaaattcagtgttaactaaataaaggtattttgtttttca

SEQ ID NO: 485273 - DNA, 120 bp, Artificial Sequence
  ENSG00000162383_21 (sequence is synthesized)
aagaaccaagtgagagcactgcagtgcccgcggtccttacctcctgccggagcagcgctgcagaggcacaaacactcctggcggggtggctgcctggggaggggtgagcttcccgacaga

SEQ ID NO: 485274 - DNA, 120 bp, Artificial Sequence
  ENSG00000162383_22 (sequence is synthesized)
ggccccagccatcctggaggagggtgctgggcagacaccggcccctctaaccgtagctcagccacactgcccatcaccttcaagtgcctgctggagaacaaccacatcgaccggcgcatc

SEQ ID NO: 485275 - DNA, 120 bp, Artificial Sequence
  ENSG00000162383_23 (sequence is synthesized)
atcaccatcaggtgcaccctgacactgcacctgggtggatggggcgggggctgggggccttggggattcccaggctcccagacttgaggggtatctgaagcgagcgagcctgggctcgga

SEQ ID NO: 485276 - DNA, 120 bp, Artificial Sequence
  ENSG00000162383_24 (sequence is synthesized)
gcacagcaggcagagggccagggctgggagctccgagcctggaggacagcccgggagggagggcattgctggtggccacagggcgagcggaggccagggacaggactcaggaccttggag

SEQ ID NO: 485277 - DNA, 120 bp, Artificial Sequence
  ENSG00000162383_25 (sequence is synthesized)
aggccgcccgtgtggcaggagccaacgaaggggtgctgggatgcggctgaggctgacggaggcctcacagcccagccaagcacacaggtctgaccctggaggccaggccccagaggcagg

SEQ ID NO: 485278 - DNA, 120 bp, Artificial Sequence
  ENSG00000162383_26 (sequence is synthesized)
caggcagagccatgtggtggtcagtcagagtccctgggcagccccatagcaatatagcttcctggaacccacagaggcacagctccagacacaggtgtttgcacagttcccagggattct

SEQ ID NO: 485279 - DNA, 120 bp, Artificial Sequence
  ENSG00000162383_27 (sequence is synthesized)
cctgaggccaggaatgggggtccatggggcttcaggactgtgaggagggacttgaccccgagagctccctggtgtggcattcctacccaccccccgcaccaaatggctgtcccagaggcc

SEQ ID NO: 485280 - DNA, 120 bp, Artificial Sequence
  ENSG00000162383_28 (sequence is synthesized)
atggccaccccattagcaagagaatcagagcttgatggcaggtcccatttggtccccacaacataataggacttctgttaaggaaggacgggagaatggagactgcataggcaactagct

SEQ ID NO: 485281 - DNA, 120 bp, Artificial Sequence
  ENSG00000162383_29 (sequence is synthesized)
gtccctgccaaggcccacatttaaaatgattgtaattgtaaaggaagttgtaaagaaatgtctatataggtataagttccatttggcttcttacgagcttccaaatgttctccgtgtgtg

SEQ ID NO: 485282 - DNA, 120 bp, Artificial Sequence
  ENSG00000162383_30 (sequence is synthesized)
taaactgagtcttgaaagaggggaagagggttaccgaggacaagagtgagtgggaggcgacccaggtggaggcagtgtgagtgtggggcggcaggttggaggaagagcaggcatgcaacg

SEQ ID NO: 485283 - DNA, 120 bp, Artificial Sequence
  ENSG00000162383_31 (sequence is synthesized)
gaagcctcttaccagatgctcacctcagagttggcatttctcacaagacacactcctagaaggggactgtgaagacaaagatacaaatgcttttagagaaaggttgctgccaggaccatg

SEQ ID NO: 485284 - DNA, 120 bp, Artificial Sequence
  ENSG00000162383_32 (sequence is synthesized)
tgagggtgcccatctcaccaaacctcccacattgtgcactgtcatttgaaaaatactttgtcagtttgacaggtggaaatatcttgaatttgttgatgaaactaaacattttaaaaagca

SEQ ID NO: 485285 - DNA, 120 bp, Artificial Sequence
  ENSG00000162383_33 (sequence is synthesized)
ccccagcccctcccagcagcctgctcctccacctcttactgaggtctggggagaatgctggagaggtttactgtgaaaaactggaaatattcaccacacctgtttatttaaatccttcgc

SEQ ID NO: 485286 - DNA, 120 bp, Artificial Sequence
  ENSG00000162383_34 (sequence is synthesized)
ctccccaccccaccccaggggcttccccctggcacctccccctcaggcccgtctgggccatttcttaggcccgcagctggcatccctgccacacccttccctttgctgccctcctctggg

SEQ ID NO: 485287 - DNA, 120 bp, Artificial Sequence
  ENSG00000162383_35 (sequence is synthesized)
atgccaggcccctcacctatgcaagccccttggaggcccgcaccttggtttttaaattttgtgttatttttcttaaagatgggtcccaaattatacaagcttcagaccccacaaagcctg

SEQ ID NO: 485288 - DNA, 120 bp, Artificial Sequence
  ENSG00000162383_36 (sequence is synthesized)
tggaaatgtcctgcctgccatccccgactcctccactgggttttcttgtcaaggaaaagacctcaccaacctcgttcatgcaaaaactctaggggtgactttctacctcgtcctctgcct

SEQ ID NO: 485289 - DNA, 120 bp, Artificial Sequence
  ENSG00000162383_37 (sequence is synthesized)
tggcccccacctttgcatccggtcgggtctgcccccaaagtcccctccaagccgtgcgtttccttctaccccgcgtcactgcccgggtcaaggccgtgtggtctctcgcctggttcctgt

SEQ ID NO: 485290 - DNA, 120 bp, Artificial Sequence
  ENSG00000162383_38 (sequence is synthesized)
gaaagctgcctagaaaacttccacggctgtccctgctggtgtgtccagctcaggaggtcacaagtctgaccgtgctctgcccattgcccctggaaaggggccgaacccctagtgccggct

SEQ ID NO: 485291 - DNA, 120 bp, Artificial Sequence
  ENSG00000162383_39 (sequence is synthesized)
ggcccgtgtgctcctctccgcacaaccctcagcccggctgctcttgccactccccctccacgtttgtcatcttcagggtgctccccacaagtgccatgccctcaggagagtcctccgcag

SEQ ID NO: 485292 - DNA, 120 bp, Artificial Sequence
  ENSG00000162383_40 (sequence is synthesized)
actaggccgagtgccccgagctacactgcctggttactctgtgagcactagactcgattgcaaggatatcattgcttgctgtctgcacagccatgaccagccccatacaggctgacgggc

SEQ ID NO: 485293 - DNA, 120 bp, Artificial Sequence
  ENSG00000162384_0 (sequence is synthesized)
acgacgcgccggaaagcaacggcaagggccgcagccagcaccgggcggagagggctaccatggggaaaatcgcgctgcaactcaaagccacgctggagaacatcaccaacctccggcccg

SEQ ID NO: 485294 - DNA, 120 bp, Artificial Sequence
  ENSG00000162384_1 (sequence is synthesized)
tgggcgaggacttccggtggtacctgaagatgaaatgtggcaactgtggtgagatttcggacaagtggcagtacatccggctgatggacagtgtggcactgaaggggggccgtggcagtg

SEQ ID NO: 485295 - DNA, 120 bp, Artificial Sequence
  ENSG00000162384_2 (sequence is synthesized)
cttccatggtccagaagtgcaagctgtgtgcaagagaaaattccatcgagattttaagcagcaccatcaagccttacaatgctgaagacaatgagaacttcaagacaatagtggagtttg

SEQ ID NO: 485296 - DNA, 120 bp, Artificial Sequence
  ENSG00000162384_3 (sequence is synthesized)
agtgccggggccttgaaccagttgatttccagccgcaggctgggtttgctgctgaaggtgtggagtcagggacagccttcagtgacattaatctgcaggagaaggactggactgactatg

SEQ ID NO: 485297 - DNA, 120 bp, Artificial Sequence
  ENSG00000162384_4 (sequence is synthesized)
gggaatctatgaggtcacccaccagtttgtgaagtgctgatccctcttccttcccagttgcccttaagaactgagaaaggacaaagtactctaagcagcagagcccacagaggctcgttc

SEQ ID NO: 485298 - DNA, 120 bp, Artificial Sequence
  ENSG00000162384_5 (sequence is synthesized)
ctttgacccttgtctcctggtggctatacgaaaccttcacaatctgcatgctggactttattacagcttcccaagccccatcaataaagcccctgttcacgctgcactggtgcatgaagg

SEQ ID NO: 485299 - DNA, 120 bp, Artificial Sequence
  ENSG00000162384_6 (sequence is synthesized)
tgaagtaaggaggcagctactccctccacaaataagaattcgtgcagcagcagttcactccttaggaaaatgaagagtatttttaaggagatggtatctccccagtcaagggcaagttta

SEQ ID NO: 485300 - DNA, 120 bp, Artificial Sequence
  ENSG00000162384_7 (sequence is synthesized)
cagagatgaaaccgcgatcccaccatcactcaatgagccagaagccaatggtgacgtactgttacctgaacttactgaacttgctgttggaaagatctttgtgaggattaggaattaggt

SEQ ID NO: 485301 - DNA, 120 bp, Artificial Sequence
  ENSG00000162384_8 (sequence is synthesized)
taaaagaaattaagaaccatcttcaagcaaaaattaaactttatttctgcttaaacaataaatacacctgagttagttttccaaacctttcctcctgattaaatgcccttaaaacttaaa

SEQ ID NO: 485302 - DNA, 120 bp, Artificial Sequence
  ENSG00000162384_9 (sequence is synthesized)
catgggggtgaggggaggccgcccgccgcggggacacggaggggaggtggcgagggtctgggaggcaacagctcgcgccaggaggagatgaagcgagtgggtgcgcgctgaaggagcagg

SEQ ID NO: 485303 - DNA, 120 bp, Artificial Sequence
  ENSG00000162384_10 (sequence is synthesized)
aggcagaaggagtgtctccctgtggcacccacggctgggaatgcgggagggtcgggcaggcgtggggctgcgcaggcacggctgacgcagtcgctctggccctccccctcagaaaatcgc

SEQ ID NO: 485304 - DNA, 120 bp, Artificial Sequence
  ENSG00000162384_11 (sequence is synthesized)
aaagccacgctggagaacatcaccaacctccggcccgtgggcgaggacttccggtggtacctgaaggtgcggccggggcggggcccggggagaggaggcccgtcctgatctcagtgctga

SEQ ID NO: 485305 - DNA, 120 bp, Artificial Sequence
  ENSG00000162384_12 (sequence is synthesized)
accggagccttctctccggcagtatgagaaaatatttaaccaggcacattaagtgttcggggttttcctagttagaattttacgtttgctttctattaaagtgtattggtttatctctaa

SEQ ID NO: 485306 - DNA, 120 bp, Artificial Sequence
  ENSG00000162384_13 (sequence is synthesized)
taaacgaaatgctacttgaagggacgcttgtgattatttaataaggtgaatagttcgcctttcgtttattgatttggttttctttattgtgaaatagtttaattttgtgcgtaatccacc

SEQ ID NO: 485307 - DNA, 120 bp, Artificial Sequence
  ENSG00000162384_14 (sequence is synthesized)
cttccttagccctcccacactggtaaagctggtaccctagtggcatggtctacagaggcctccccttccccagcagttcgaggctcttcactcttccagatcccagagcttctgctctgt

SEQ ID NO: 485308 - DNA, 120 bp, Artificial Sequence
  ENSG00000162384_15 (sequence is synthesized)
tttactcctggtcaaaaatcccagcatccttctgtacctctcaaaagccctgtttttcgggaagctgcctccggactacttttgtttcccaggattttgaagcctgaataccagggctta

SEQ ID NO: 485309 - DNA, 120 bp, Artificial Sequence
  ENSG00000162384_16 (sequence is synthesized)
cttgggagaatctgttctttggcttgaagaagcggaatcgagtgaaggagacagaaaaatagagtaacaatagagtgataagtgcttataccagtgacatacagggcctgtgggaacata

SEQ ID NO: 485310 - DNA, 120 bp, Artificial Sequence
  ENSG00000162384_17 (sequence is synthesized)
caccaggctgaaagtagactcatgttacctgagggtggagtcaggcctaagatgccgacacctgtacagcgtgatctttttcagggccacatgtgggcacctggctggggcgagggtatg

SEQ ID NO: 485311 - DNA, 120 bp, Artificial Sequence
  ENSG00000162384_18 (sequence is synthesized)
gactcaagtcaactttgtgttctcttttctatttcagagattttaagcagcaccatcaagccttacaatgtaagtttgctgctgtagtggcagggatggtgggcttaaatcctaactgga

SEQ ID NO: 485312 - DNA, 120 bp, Artificial Sequence
  ENSG00000162384_19 (sequence is synthesized)
gttagtaggtctgggttctagagtcatgcctgcatcagagtgacctgccataggacattcactcatgaacttagttcttctttgactcagtcatttatccactgtacactgagtgcttgg

SEQ ID NO: 485313 - DNA, 120 bp, Artificial Sequence
  ENSG00000162384_20 (sequence is synthesized)
tatattgcctcttgcagtgccttcttatgagggctgggctgtgagagctcaggggacctctgacacaacctagctgttcagtttgcatcactgagagcacttgccttgtcttcattttag

SEQ ID NO: 485314 - DNA, 120 bp, Artificial Sequence
  ENSG00000162384_21 (sequence is synthesized)
gggactagcaagctttctctgaaaccatgggtggggtagtcgtttggtgcatcccatcctttatatcatcagtgttaacaagttagcccaaaggtgagggagggtgtgctttggatctgt

SEQ ID NO: 485315 - DNA, 120 bp, Artificial Sequence
  ENSG00000162384_22 (sequence is synthesized)
ttgtttaaagaaagccagttatatgtattcacctattccttatttggtatttatttaaagtatcttgagttgtgccaaattcttggctttgtcctgaagttaaagagaaattaaatgagg

SEQ ID NO: 485316 - DNA, 120 bp, Artificial Sequence
  ENSG00000162384_23 (sequence is synthesized)
actcgccttcacgtacataataatctagtggaaaatacaaaaaacaagaatcgaactagggccctaacagagaagtgccttaccagtgccagagatgtggtcagtgtgcaggaaattact

SEQ ID NO: 485317 - DNA, 120 bp, Artificial Sequence
  ENSG00000162384_24 (sequence is synthesized)
gccccctccacatacataaccatttcaaaggctataagacagccctctgcccttactgcatggcagatggtcagcaaaaggctatggttaagtgtactgggtctgtttggatgatctaga

SEQ ID NO: 485318 - DNA, 120 bp, Artificial Sequence
  ENSG00000162384_25 (sequence is synthesized)
gactttggagcttaacattcttgttcatatttttggtgttgataattttatttactatttattgagcactgtgctgggcactttatatgcatttcaaaatctgacagtaaaattgtagag

SEQ ID NO: 485319 - DNA, 120 bp, Artificial Sequence
  ENSG00000162384_26 (sequence is synthesized)
gtttcctcggctctatttgacagtttaggaatcttgggcccagaggggaagataggcagagcttaccttacatccaggcaggttgaccccagcatccacgctcttctgcagcctccatgt

SEQ ID NO: 485320 - DNA, 120 bp, Artificial Sequence
  ENSG00000162384_27 (sequence is synthesized)
ctgctgtctacagaaagcttcatagggagcaggtgcccaaggcaggcttcctctaagaaggggatgagttcttcctgggtctcatactaggcctccaggggcagtaagtgcccatttggc

SEQ ID NO: 485321 - DNA, 120 bp, Artificial Sequence
  ENSG00000162384_28 (sequence is synthesized)
aagaaggtagatcatgagcctgcccacctcccactgttcttaccctttccttggtgtctgtgcagcagagccagctgctttactaacattctttttccccaaagatgaaatgtggcaact

SEQ ID NO: 485322 - DNA, 120 bp, Artificial Sequence
  ENSG00000162384_29 (sequence is synthesized)
gtggtgagatttcggacaagtggcagtacatccggctgatggtaactgttccccgcccaacccccaacataaacactcacaaacacacatacacttctgggcagggatttggggaaactg

SEQ ID NO: 485323 - DNA, 120 bp, Artificial Sequence
  ENSG00000162384_30 (sequence is synthesized)
gccttcatctctccagttctttgctccctgctttttgtggtttgggagggtaggtgtcagtgtgatcagcactggattcaataggcatctttgaggtatgaggcagagttcaaaatcaag

SEQ ID NO: 485324 - DNA, 120 bp, Artificial Sequence
  ENSG00000162384_31 (sequence is synthesized)
gggaagccctttttttattttcctcaggaagccttcccaggagtcttgtcctagtaagttaccctttctgggtcttggtctctttaagtggacaataaatggtgggctcgatctcctcag

SEQ ID NO: 485325 - DNA, 120 bp, Artificial Sequence
  ENSG00000162384_32 (sequence is synthesized)
tagtgatgttccgataaatgtaatgtattgtgatcagatcaaggtagttagcatattcacctcaaacgtgtatcatttctttgtgttgggagcatttaatatcctagctatttgaaacta

SEQ ID NO: 485326 - DNA, 120 bp, Artificial Sequence
  ENSG00000162384_33 (sequence is synthesized)
tatattattgtcagctatagtcatcctacagtgctatagaacactagaacttattcctcccatatagctgtaattttgtatcttctaacaaatctctccatattcccccccctcacctcc

SEQ ID NO: 485327 - DNA, 120 bp, Artificial Sequence
  ENSG00000162384_34 (sequence is synthesized)
gctgaaaccatttctgcaccacaggtgccttgaatccccggccacactgagcacttcatagaggagggtgggcacgccggcataggaaacagccttacctatcctttgcccagagatagt

SEQ ID NO: 485328 - DNA, 120 bp, Artificial Sequence
  ENSG00000162385_0 (sequence is synthesized)
agtgtcgggcgcagacggcggcagtgcggcttgctcttggaagttcaggctcggttgtcttttgggagccatggagagtgacttttatctgcgttactacgtggggcacaagggcaagtt

SEQ ID NO: 485329 - DNA, 120 bp, Artificial Sequence
  ENSG00000162385_1 (sequence is synthesized)
cggccacgagttcctggagtttgagtttcgaccggacgggaagttaagatatgccaacaacagcaattacaagaatgatgtcatgatcagaaaagaggcttatgtacataaaagcgtgat

SEQ ID NO: 485330 - DNA, 120 bp, Artificial Sequence
  ENSG00000162385_2 (sequence is synthesized)
tgtggcctcctcctgaccgagtgggccggcaggagcttgaaatcgtcattggagatgaacacatttcttttacaacatcaaaaattggttcccttattgatgtcaatcaatccaaggatc

SEQ ID NO: 485331 - DNA, 120 bp, Artificial Sequence
  ENSG00000162385_3 (sequence is synthesized)
cagaaggcttacgagtattttattatcttgtccaggacctgaagtgtttggtcttcagtcttattggattacacttcaagattaaaccaatctagactgaatattggtgtggacatgggg

SEQ ID NO: 485332 - DNA, 120 bp, Artificial Sequence
  ENSG00000162385_4 (sequence is synthesized)
ggtgggtgggagtagaaaattttgtgtatatcagggcagtatttttttatgaactataaatgattgtctttaataaatatgtgataaaatccaatttttattattttataaagacctgaa

SEQ ID NO: 485333 - DNA, 120 bp, Artificial Sequence
  ENSG00000162385_5 (sequence is synthesized)
aagagaataattgacgacagtgaaattaccaaagaggatgatgcattgtggcctcctcctgaccgagtgggccggcaggtgtgttttattgattatcctgtagtgcagaaatcttacaaa

SEQ ID NO: 485334 - DNA, 120 bp, Artificial Sequence
  ENSG00000162385_6 (sequence is synthesized)
ctcctccacttaaagcttttgttgcctatctcacttactaactactatggacaaagcattgtggagatacaaagagaaatagaacataattatttcaacaatctaatgaaaggaaaatca

SEQ ID NO: 485335 - DNA, 120 bp, Artificial Sequence
  ENSG00000162385_7 (sequence is synthesized)
tacaaataattcagtgtatgtatttaaattcatgtatatttatatacattaatgtatatattcattctgagcaccattttggtaactaaaaaataaaagccactgtcatattgaactgaa

SEQ ID NO: 485336 - DNA, 120 bp, Artificial Sequence
  ENSG00000162385_8 (sequence is synthesized)
ttaacagaaaaggtattttcactcttgactgctaccatcctaatccagacttctaatagatttccttgtttttcctcttgttccataccatccatttttccatcctgaaagccagtgtga

SEQ ID NO: 485337 - DNA, 120 bp, Artificial Sequence
  ENSG00000162385_9 (sequence is synthesized)
ttttgggtttcgttgtgagttgggtatgtgggcaggcagaagggccatgtgaacaggatgtaccaggaggtagtaacagctagataggggactgaggtgcagttactggatacttctgac

SEQ ID NO: 485338 - DNA, 120 bp, Artificial Sequence
  ENSG00000162385_10 (sequence is synthesized)
cgtgtccctcacctgcatcatgccgaggttgagcatgaatgtcttcccacttaaggagatgccagaaataagtctgcaggaacagttatttttatcttccatcactatctgagtcaaagc

SEQ ID NO: 485339 - DNA, 120 bp, Artificial Sequence
  ENSG00000162390_0 (sequence is synthesized)
atttggagtcaggcctggctgttgctcaggtgaccagcttgtgtctctgggagggcgctgctttccccggccacccggcgcgatgatccagaatgtcggaaatcacctgcgacggggctt

SEQ ID NO: 485340 - DNA, 120 bp, Artificial Sequence
  ENSG00000162390_1 (sequence is synthesized)
ggcctctgtgttctccaaccgcacatcccggaagtcagccttacgtgcggggaacgacagtgccatggcagacggcgagggataccggaaccccacggaggtgcagatgagccagctggt

SEQ ID NO: 485341 - DNA, 120 bp, Artificial Sequence
  ENSG00000162390_2 (sequence is synthesized)
gctgccctgccacaccaaccaacgtggtgagctgagcgtcgggcagctgctcaagtggattgacaccacggcttgcctgtccgcggagaggcacgctggctgcccctgtgtcacagcttc

SEQ ID NO: 485342 - DNA, 120 bp, Artificial Sequence
  ENSG00000162390_3 (sequence is synthesized)
catggatgacatctattttgagcacaccattagtgttggacaagtggtgaatatcaaggccaaggtgaaccgggccttcaactccagcatggaggtgggcatccaggtggcctcggagga

SEQ ID NO: 485343 - DNA, 120 bp, Artificial Sequence
  ENSG00000162390_4 (sequence is synthesized)
cctgtgctctgagaagcagtggaatgtgtgcaaggccttggccaccttcgtggcccgccgagagatcaccaaggtgaagctgaagcagatcacgccgcggacagaagaggagaagatgga

SEQ ID NO: 485344 - DNA, 120 bp, Artificial Sequence
  ENSG00000162390_5 (sequence is synthesized)
gcacagtgtggcggctgagcgccggcgcatgcgccttgtctatgcagacaccatcaaggacctcctggccaactgcgccattcagggcgatctggagagcagagactgtagccgcatggt

SEQ ID NO: 485345 - DNA, 120 bp, Artificial Sequence
  ENSG00000162390_6 (sequence is synthesized)
gccggctgagaagacccgtgtggagagtgtggagctggtcctgcctccccacgccaatcaccagggcaacacctttgggggccagatcatggcctggatggagaatgtggccaccattgc

SEQ ID NO: 485346 - DNA, 120 bp, Artificial Sequence
  ENSG00000162390_7 (sequence is synthesized)
agccagccggctctgccgtgcccaccctacgctgaaggccattgaaatgttccacttccgaggcccgtcccaggtcggcgaccgtctggtgctcaaagccatcgtgaacaatgccttcaa

SEQ ID NO: 485347 - DNA, 120 bp, Artificial Sequence
  ENSG00000162390_8 (sequence is synthesized)
acatagcatggaggtgggcgtgtgcgtggaggcctatcgccaggaggctgagacccaccggcgccacatcaacagtgcctttatgacctttgtggtcctggacgcagatgaccagcccca

SEQ ID NO: 485348 - DNA, 120 bp, Artificial Sequence
  ENSG00000162390_9 (sequence is synthesized)
gttgctgccctggattcggccccagcccggcgatggtgagcggcggtaccgagaggccagtgccagaaagaagatccgcctggacaggaagtacatcgtgtcctgtaagcagacagaggt

SEQ ID NO: 485349 - DNA, 120 bp, Artificial Sequence
  ENSG00000162390_10 (sequence is synthesized)
gcccctctccgtcccctgggaccctagcaaccaggtgtacctgagctacaataacgtctcctccttgaagatgcttgtggccaaggacaactgggtgctgtcctcggagatcagtcaggt

SEQ ID NO: 485350 - DNA, 120 bp, Artificial Sequence
  ENSG00000162390_11 (sequence is synthesized)
ccgcctgtacactctggaggatgacaagttcctctccttccacatggagatggtggtgcatgtggatgcagcccaggccttcctgctgctctcggacctgcgtcagaggccagagtggga

SEQ ID NO: 485351 - DNA, 120 bp, Artificial Sequence
  ENSG00000162390_12 (sequence is synthesized)
caagcactaccggagcgtggagctagtgcagcaggtagacgaggacgacgccatctaccacgtcaccagccctgccctcggaggtcacacaaagccccaggacttcgtgatcctggcctc

SEQ ID NO: 485352 - DNA, 120 bp, Artificial Sequence
  ENSG00000162390_13 (sequence is synthesized)
gaggcggaagccttgtgacaatggggacccctatgtcatcgcgctgaggtcggtcacgctgcccacacaccgagagacgccagagtacagacgcggagagaccctctgctcaggcttctg

SEQ ID NO: 485353 - DNA, 120 bp, Artificial Sequence
  ENSG00000162390_14 (sequence is synthesized)
cctctggcgcgagggggaccagctgaccaagtgctgctgggttagggtctccctgactgagctggtctcggcaagtggcttctattcctgggggctcgaatccaggtcaaagggtcgcag

SEQ ID NO: 485354 - DNA, 120 bp, Artificial Sequence
  ENSG00000162390_15 (sequence is synthesized)
tgggggctcgaatccaggtcaaagggtcgcaggagcgacggttggaatggaaaactagctggaggacacctgagtactcttaaagcaatccccgtggccaaaatcaacagccgatttgga

SEQ ID NO: 485355 - DNA, 120 bp, Artificial Sequence
  ENSG00000162390_16 (sequence is synthesized)
ccagatgccaaggaagagactctgggaggatccagaggaccccctggttgcagccacgtagagactgacgctgaggaggactccaactatcatgagcaacacccgtcgaacacagccacc

SEQ ID NO: 485356 - DNA, 86 bp, Artificial Sequence
  ENSG00000162390_17 (sequence is synthesized)
atttaatggtagctatgatagcagttatcaccactgccgtgagtattccttcaataagggctggtaataatgcctggatgcaatca

SEQ ID NO: 485357 - DNA, 120 bp, Artificial Sequence
  ENSG00000162390_18 (sequence is synthesized)
ggattggacccagttagaaaaaatgaacgtacttatttaggaagattgctttgcagaataggcagagatgctgcacaacgattcctatggaatcattactaattggtcccccaaggggat

SEQ ID NO: 485358 - DNA, 120 bp, Artificial Sequence
  ENSG00000162390_19 (sequence is synthesized)
tgaattgcacctctcagtctgcatgccacggtcacactatgttcagatgatctgaacaaaacagtcagatggtagaaatgttaagtacggcaaaagttcctattatctggaaccatggcg

SEQ ID NO: 485359 - DNA, 120 bp, Artificial Sequence
  ENSG00000162390_20 (sequence is synthesized)
gtacggcaaaagttcctattatctggaaccatggcggtatagtggcacctcaacctcaaataatatggcccgctctaggagctaaacataaggatttgtaaaaactattaaatgctctta

SEQ ID NO: 485360 - DNA, 120 bp, Artificial Sequence
  ENSG00000162390_21 (sequence is synthesized)
ataagatcaaaatttgggaaagaataaaagagtatctagaaggacactctacaaacttgtttttggatatagcaaaattaaaagaacaaatatgtaaagcatcccgggcaacctgacctt

SEQ ID NO: 485361 - DNA, 120 bp, Artificial Sequence
  ENSG00000162390_22 (sequence is synthesized)
aagcatcccgggcaacctgaccttaatgccaggaaccagagtgcttaaaggagctgcagaaaaattagcagctagtaacccatttaaatgggtaaaaacacttggaagctctgtgatttc

SEQ ID NO: 485362 - DNA, 120 bp, Artificial Sequence
  ENSG00000162390_23 (sequence is synthesized)
gttgtttgcctttgtatagtctgcagatgcggatcccgactcctgcgagagtctctttgcaaatcgaagaagggagacatgttgggagcaagccccccagagtctggccataaactggcc

SEQ ID NO: 485363 - DNA, 120 bp, Artificial Sequence
  ENSG00000162390_24 (sequence is synthesized)
ccaaaactggccataagcaaaacctctgcagcactaaaacatgtccataatggccctaacgcccaatctggaaggttgtgggtttatgggaatgagagcaaggaacacctggcctgccca

SEQ ID NO: 485364 - DNA, 78 bp, Artificial Sequence
  ENSG00000162390_25 (sequence is synthesized)
cttaaaggcattcttaagccacaaacaaaagcatgagcgatctgtgtcttacgggtgtgttcctgctgcaattaattc

SEQ ID NO: 485365 - DNA, 77 bp, Artificial Sequence
  ENSG00000162390_26 (sequence is synthesized)
aaagaaaagtgggcccaggggaccagcattcagcatacagaggatccacactgagcatggcaggataataggataat

SEQ ID NO: 485366 - DNA, 80 bp, Artificial Sequence
  ENSG00000162390_27 (sequence is synthesized)
ttcccttagtatttattgatcattatcgagcatggcaggataataggataatagtggagagaaggtcagaaggtaaacac

SEQ ID NO: 485367 - DNA, 79 bp, Artificial Sequence
  ENSG00000162390_28 (sequence is synthesized)
tcataccttatattccatgtaaagtaaatcggctttacacccagacattccattgcccagagacgagcaggagacagaa

SEQ ID NO: 485368 - DNA, 74 bp, Artificial Sequence
  ENSG00000162390_29 (sequence is synthesized)
agatggaagtatattccatgtaaagtaaatcggctttacacccagacattccattgcccagagagttccttcct

SEQ ID NO: 485369 - DNA, 70 bp, Artificial Sequence
  ENSG00000162390_30 (sequence is synthesized)
ttcctaggcagaggtccctgcggcctttgcagtattttgcgtctctgggtacttgagattagggagtggt

SEQ ID NO: 485370 - DNA, 81 bp, Artificial Sequence
  ENSG00000162390_31 (sequence is synthesized)
gtaacaatctgatctctcttttccccacagttaataaatatgtgggtaaatctctgtttctacttcacacctctatatttt

SEQ ID NO: 485371 - DNA, 86 bp, Artificial Sequence
  ENSG00000162390_32 (sequence is synthesized)
cctctatattttagttagtgaccgagctggtctcggcagaggtgggcgggtcttttgagttcaggagttcaagagcagcctggcca

SEQ ID NO: 485372 - DNA, 120 bp, Artificial Sequence
  ENSG00000162390_33 (sequence is synthesized)
ggtgaaaccccttctctactaaaaatatgaaaattatccgggcatggtggtgtgcctctgtactttcagctactcaggaagctgaggcacaagaattgctggaacatgggaggtggaggc

SEQ ID NO: 485373 - DNA, 64 bp, Artificial Sequence
  ENSG00000162390_34 (sequence is synthesized)
caatagagtaagactctgtctcaaaacaaaaagagttttaggccaggtgtggtggctcacgcct

SEQ ID NO: 485374 - DNA, 120 bp, Artificial Sequence
  ENSG00000162390_35 (sequence is synthesized)
ttccagccggggtaagagagcgagactctgcctcaaaaaaagaaggcttagtgtgcaactcatcagagttgcacagggcagagaaagaatgggaaaaaaacaatttctagaaaacttttc

SEQ ID NO: 485375 - DNA, 120 bp, Artificial Sequence
  ENSG00000162390_36 (sequence is synthesized)
gaattttctgatcaacaccaaatattccaaataggaaaaatacaaaaaaatccatacctatatgtggcataatatgattgtagagcaccaaagtaaaagatcttattttttattaaaatt

SEQ ID NO: 485376 - DNA, 120 bp, Artificial Sequence
  ENSG00000162390_37 (sequence is synthesized)
gctggtcttgaactcctggcttcaagctatcctcccaccatggcatcctaaagtgctgggattgcaggcatgagctgctgcatctggcccaaagtaaaagatcttagaagcggccagaaa

SEQ ID NO: 485377 - DNA, 120 bp, Artificial Sequence
  ENSG00000162390_38 (sequence is synthesized)
catctggcccaaagtaaaagatcttagaagcggccagaaaaaatagatttgggctgggcatgaatagattgatcaccaaaaaggtggcagactaacttctcgacagaatccacagaagcc

SEQ ID NO: 485378 - DNA, 120 bp, Artificial Sequence
  ENSG00000162390_39 (sequence is synthesized)
agaaggcagtggaacattagctttgatgtactaaaataaaataccacgctaggctcctacatacagtgaaaatgttttgagaatgagaattataattttttggcaaacaaaactaaagga

SEQ ID NO: 485379 - DNA, 86 bp, Artificial Sequence
  ENSG00000162390_40 (sequence is synthesized)
gaatgagaattataattttttggcaaacaaaactaaaggagtttacaactaagaaactcttttgtgagacagcaaatctcagctca

SEQ ID NO: 485380 - DNA, 75 bp, Artificial Sequence
  ENSG00000162390_41 (sequence is synthesized)
tcggcctcccgggttcaggcaattcttgggcccagctactttttatatttttagtggagatggggtttcactgtg

SEQ ID NO: 485381 - DNA, 120 bp, Artificial Sequence
  ENSG00000162390_42 (sequence is synthesized)
agtgatctgcccgccttggcctgctaaagtgctgggattacaggcatgagcgactgtgcctctccagtccctgtgtttttttttgtttttggaggttttatttgtttgtttttagagaca

SEQ ID NO: 485382 - DNA, 120 bp, Artificial Sequence
  ENSG00000162390_43 (sequence is synthesized)
gtttttggaggttttatttgtttgtttttagagacactttcactgtgttgcccaggcctgtctgttggcctcaagtgatcctcctgccttggatctcccaaagtgctgggattacaggtg

SEQ ID NO: 485383 - DNA, 120 bp, Artificial Sequence
  ENSG00000162390_44 (sequence is synthesized)
ttgaaggaaggtagcagtattaattaattttggactttgctcactaaagtttgaatgttaagaatagatgtatacagtctggatgcagtggtgcatgcttgtaattttagcactttggga

SEQ ID NO: 485384 - DNA, 63 bp, Artificial Sequence
  ENSG00000162390_45 (sequence is synthesized)
ggatgcagtggtgcatgcttgtaattttagcactttgggaggctgaagcgggaggatcgcttg

SEQ ID NO: 485385 - DNA, 120 bp, Artificial Sequence
  ENSG00000162390_46 (sequence is synthesized)
aacgtggccggcctctcctctgagttctacaccaccttcaaggcttgtgagcagtttctcttggacaaccggaatgatctggcccccagcctccagaccctctagatgccctcagtggcc

SEQ ID NO: 485386 - DNA, 120 bp, Artificial Sequence
  ENSG00000162390_47 (sequence is synthesized)
acatcatgcccactcccactccatcctgtccccaaggactcacatacagtgcctggagaaagccaaagacctttatttcttcctgcctccccgtgggaagcctccgccctgaggtccgct

SEQ ID NO: 485387 - DNA, 120 bp, Artificial Sequence
  ENSG00000162390_48 (sequence is synthesized)
ggcccaccacccctgggtgctcagtttctaccaacatgagccagcaagtccttgtggtagccctggggtagcctgtagtagactcgggtcctgtccacagccctagctgccagcaatgct

SEQ ID NO: 485388 - DNA, 120 bp, Artificial Sequence
  ENSG00000162390_49 (sequence is synthesized)
gtcctcacagaggcatagtcgcccccagctgggttgtgctccactgtgacggtggcccggggggaggatgccagcagcctgcctatggctccagctgtgctgtggcccagcagcatggcc

SEQ ID NO: 485389 - DNA, 120 bp, Artificial Sequence
  ENSG00000162390_50 (sequence is synthesized)
tgcatctggaaggacacaggttgccagagcccctggcacaactctagcatatctgtgagcagctgttccctgtagccactgcccagcacctcctcaggccagcctggtgccacagtcacg

SEQ ID NO: 485390 - DNA, 120 bp, Artificial Sequence
  ENSG00000162390_51 (sequence is synthesized)
tgggggaagacctcagccacagctgtaagcagctctctgccagccacatggccggggaccgaaaaactcccgtgggagattttggccccaacccacacaggccaatgcaagaggccaagg

SEQ ID NO: 485391 - DNA, 120 bp, Artificial Sequence
  ENSG00000162390_52 (sequence is synthesized)
ctggagaggcgtgccagcaaggccagggatggccggagggctgcgggctccgctatttgcaaatggatgccccagtgtccgggatgtgtggccagctgctgcaggcaggactccagcgtc

SEQ ID NO: 485392 - DNA, 120 bp, Artificial Sequence
  ENSG00000162390_53 (sequence is synthesized)
aggatgttgccacttggagtatgaacaatgggcacggggttttcagccacagttccctcgaggccagtgttcagcaggatcatgccttctgtgtctggaagaggcggcagaggcaacagt

SEQ ID NO: 485393 - DNA, 120 bp, Artificial Sequence
  ENSG00000162390_54 (sequence is synthesized)
gtttaggatttgggttatcataaggtgttaagagtcccttgttaaaggggcagtgggagttatggggtcatcaaggaccttgcctctctggaatctgtcaacccagttttgggctccagg

SEQ ID NO: 485394 - DNA, 120 bp, Artificial Sequence
  ENSG00000162390_55 (sequence is synthesized)
tggatgggttgctttataaatgtgcctggtgcatgagaaactcttgtttcagctcttggcctttacccatgactcagcctgggggctggtgccggccttgcctgcagcaatgtagctgag

SEQ ID NO: 485395 - DNA, 120 bp, Artificial Sequence
  ENSG00000162390_56 (sequence is synthesized)
gactggtctgaaggccaggagccctgtgctcttgacatcactgtactccctctccctccccgcaaccctgccccaccttgcatccagggtatggtgtaaataaacctgtgttgccatggc

SEQ ID NO: 485396 - DNA, 120 bp, Artificial Sequence
  ENSG00000162390_57 (sequence is synthesized)
agcgccgccgcctccgcgcctcccttcagcctgcccgcagcttcccgcctctggctgggctcggggacctcggaggcctgtttctgagcccctccccgcggactcgctccccggacgccc

SEQ ID NO: 485397 - DNA, 120 bp, Artificial Sequence
  ENSG00000162390_58 (sequence is synthesized)
agggtctgggatgggtgcggccacgtccattcagggctgagggctcttcctgaccctagaaaggaccctacttcaaactgtccaggagccctttgccctgcagacagggtctaaatccct

SEQ ID NO: 485398 - DNA, 120 bp, Artificial Sequence
  ENSG00000162390_59 (sequence is synthesized)
gcctggctgatgggttcctctgaaattcagctctgattttcccttcttgggagccttccctggctcccagtcctgcccacccctggctgggtcagggacccctcctctgggatcccccag

SEQ ID NO: 485399 - DNA, 120 bp, Artificial Sequence
  ENSG00000162390_60 (sequence is synthesized)
caggcttcatttggagtcaggcctggctgttgctcaggtgaccagcttgtgtctctgggagggcgctgctttccccggccacccggcgcgatgatccagaatgtcggaaatcacctgcga

SEQ ID NO: 485400 - DNA, 120 bp, Artificial Sequence
  ENSG00000162390_61 (sequence is synthesized)
cggctctctttggaaggagaaatcgcagaacccctgggctggtttattatcagcagcaatctccaaacaagccccaggggctgtcagatcccccacgggctggctgtgtagagtggaatc

SEQ ID NO: 485401 - DNA, 120 bp, Artificial Sequence
  ENSG00000162390_62 (sequence is synthesized)
gggaaaccccagcttggggttggcattcaaggcttcagaagcttggctgttctgaatcagagaaatgaatttttgtgaactgaccattccttgttctactaaaaaagctagcatctttta

SEQ ID NO: 485402 - DNA, 120 bp, Artificial Sequence
  ENSG00000162390_63 (sequence is synthesized)
tggccctacctgcactccttctagtatctatgttcccttcacatcaagccttctagtatctatgttcgcttcacatcaaaccatttgctgttctctgttcccatcctccactttcccagc

SEQ ID NO: 485403 - DNA, 120 bp, Artificial Sequence
  ENSG00000162390_64 (sequence is synthesized)
ccctgcctttgctcctgatgtagcctcctgccgtgcttcccctactcttctttgtctgctaatatcctgcccacttcctccataaagccatctctgactgttcccttcttctaaggggtg

SEQ ID NO: 485404 - DNA, 120 bp, Artificial Sequence
  ENSG00000162390_65 (sequence is synthesized)
aaaattgttttctctcctctaacatctgtttctgtccggggcttgttctaccctaaatatcagggtattttttatagttatggtaactgaccttcactaattgacactctcacacctcca

SEQ ID NO: 485405 - DNA, 120 bp, Artificial Sequence
  ENSG00000162390_66 (sequence is synthesized)
agactttgctcttgctgttccctctaccaggagtgcctttcccaacccatgccctttccagccaggtggattcctccttattctttagagcctggcttaaatggcccctcctccagttta

SEQ ID NO: 485406 - DNA, 120 bp, Artificial Sequence
  ENSG00000162390_67 (sequence is synthesized)
acctgtgggagacagtgcataagcaatgctgttttgggcaggcctggctatgagtgcagtaagatcctggaggagcctgatggtcagggaaggctgcctgaaggaagagcacttcagctg

SEQ ID NO: 485407 - DNA, 120 bp, Artificial Sequence
  ENSG00000162390_68 (sequence is synthesized)
ggacttgaatgccaagtagctttgggtaaggggagggcttctggatagtgggaacagcagctaccaaggtgtaaaagttggaaggaaaatgggaaaggggtttacccaaagccctgcttt

SEQ ID NO: 485408 - DNA, 120 bp, Artificial Sequence
  ENSG00000162390_69 (sequence is synthesized)
cttctgtcccctcaaacttggcttctttccagccatgcatagacctcagtattctaaactatgaaatgggactttagttctgtgcctctgggcagaactgccactgggttgggtggcagt

SEQ ID NO: 485409 - DNA, 120 bp, Artificial Sequence
  ENSG00000162390_70 (sequence is synthesized)
tgggttgggtggcagtgggtgggtcagaatgtgtagttccaggctgcgtctggggatgggaccagggtagaaggctggcccaagctggcctagcatggtggctcacacctgtaatcccag

SEQ ID NO: 485410 - DNA, 63 bp, Artificial Sequence
  ENSG00000162390_71 (sequence is synthesized)
aatcccagcgctttgggaggctgaggccacttaggccagaagttcaagaccagcctgggaaca

SEQ ID NO: 485411 - DNA, 120 bp, Artificial Sequence
  ENSG00000162391_0 (sequence is synthesized)
agagcagaccaggcccggtggagaattaggtgctgctgggagctcctgcctcccacaggattccagctgcagggagcctcagggactctgggccgcacggagttgggggcattccccaga

SEQ ID NO: 485412 - DNA, 120 bp, Artificial Sequence
  ENSG00000162391_1 (sequence is synthesized)
gagcgtcgccatggtctgcagggagcagttatcaaagaatcaggtcaagtgggtgtttgccggcattacctgtgtgtctgtggtggtcattgccgcaatagtccttgccatcaccctgcg

SEQ ID NO: 485413 - DNA, 120 bp, Artificial Sequence
  ENSG00000162391_2 (sequence is synthesized)
gcggccaggctgtgagctggaggcctgcagccctgatgccgacatgctggactacctgctgagcctgggccagatcagccggcgagatgccttggaggtcacctggtaccacgcagccaa

SEQ ID NO: 485414 - DNA, 120 bp, Artificial Sequence
  ENSG00000162391_3 (sequence is synthesized)
cagcaagaaagccatgacagctgccctgaacagcaacatcacagtcctggaggctgacgtcaatgtagaagggctcggcacagccaatgagacaggagttcccatcatggcacacccccc

SEQ ID NO: 485415 - DNA, 120 bp, Artificial Sequence
  ENSG00000162391_4 (sequence is synthesized)
cactatctacagtgacaacacactggagcagtggctggacgctgtgctgggctcttcccaaaagggcatcaaactggacttcaagaacatcaaggcagtgggcccctccctggacctcct

SEQ ID NO: 485416 - DNA, 120 bp, Artificial Sequence
  ENSG00000162391_5 (sequence is synthesized)
gcggcagctgacagaggaaggcaaagtccggcggcccatatggatcaacgctgacatcttaaagggccccaacatgctcatctcaactgaggtcaatgccacacagttcctggccctggt

SEQ ID NO: 485417 - DNA, 120 bp, Artificial Sequence
  ENSG00000162391_6 (sequence is synthesized)
ccaggagaagtatcccaaggctaccctatctccaggctggaccaccttctacatgtccacgtccccaaacaggacgtacacccaagccatggtggagaagatgcacgagctggtgggagg

SEQ ID NO: 485418 - DNA, 120 bp, Artificial Sequence
  ENSG00000162391_7 (sequence is synthesized)
agtgccccagagggtcaccttccctgtacggtcttccatggtgcgggctgcctggccccacttcagctggctgctgagccaatctgagaggtacagcctgacgctgtggcaggctgcctc

SEQ ID NO: 485419 - DNA, 120 bp, Artificial Sequence
  ENSG00000162391_8 (sequence is synthesized)
caagtctactatgacatctttgagcctctcctgtcacagttcaagcagctggccttgaatgccacacggaaaccaatgtactacacgggaggcagcctgatccctcttctccagctgcct

SEQ ID NO: 485420 - DNA, 120 bp, Artificial Sequence
  ENSG00000162391_9 (sequence is synthesized)
ggggatgacggtctgaatgtggagtggctggttcctgacgtccagggcagcggtaaaacagcaacaatgaccctcccagacacagaaggcatgatcctgctgaacactggcctcgaggga

SEQ ID NO: 485421 - DNA, 120 bp, Artificial Sequence
  ENSG00000162391_10 (sequence is synthesized)
actgtggctgaaaaccccgtgcccattgttcatactccaagtggcaacatcctgacgctggagtcctgcctgcagcagctggccacacatcccggacactggggcatccatttgcaaata

SEQ ID NO: 485422 - DNA, 120 bp, Artificial Sequence
  ENSG00000162391_11 (sequence is synthesized)
gcggagcccgcagccctccggccatccctggccttgctggcacgcctctccagccttggcctcttgcattggcctgtgtgggttggggccaaaatctcccacgggagtttttcggtcccc

SEQ ID NO: 485423 - DNA, 120 bp, Artificial Sequence
  ENSG00000162391_12 (sequence is synthesized)
ggccatgtggctggcagagagctgcttacagctgtggctgaggtcttcccccacgtgactgtggcaccaggctggcctgaggaggtgctgggcagtggctacagggaacagctgctcaca

SEQ ID NO: 485424 - DNA, 120 bp, Artificial Sequence
  ENSG00000162391_13 (sequence is synthesized)
gatatgctagagttgtgccaggggctctggcaacctgtgtccttccagatgcaggccatgctgctgggccacagcacagctggagccataggcaggctgctggcatcctccccccgggcc

SEQ ID NO: 485425 - DNA, 120 bp, Artificial Sequence
  ENSG00000162391_14 (sequence is synthesized)
accgtcacagtggagcacaacccagctgggggcgactatgcctctgtgaggacagcattgctggcagctagggctgtggacaggacccgagtctactacaggctaccccagggctaccac

SEQ ID NO: 485426 - DNA, 120 bp, Artificial Sequence
  ENSG00000162391_15 (sequence is synthesized)
aaggacttgctggctcatgttggtagaaactgagcacccaggggtggtgggccagcggacctcagggcggaggcttcccacggggaggcaggaagaaataaaggtctttggctttctcca

SEQ ID NO: 485427 - DNA, 120 bp, Artificial Sequence
  ENSG00000162396_0 (sequence is synthesized)
gaggcgcaagcgcgctggcccggcacggcggtggtcttgcgggaggcgtgggctgggattgcggtgcctgtgcttcccggtgccagggtgtcatggaagggctgctgacaagatgcagag

SEQ ID NO: 485428 - DNA, 120 bp, Artificial Sequence
  ENSG00000162396_1 (sequence is synthesized)
cattgcccgccctggccacctgcagccgccagctctctgggtatgttccttgcaggtttcaccactgtgccccaagaagagggcggcgcctgctgctgtctcgtgtgttccagccacaga

SEQ ID NO: 485429 - DNA, 120 bp, Artificial Sequence
  ENSG00000162396_2 (sequence is synthesized)
accttcgggaagaccgggtgctctccctgcaggacaaatctgatgacctgacctgtaagagccagcggctgatgctgcaggtgggcctgatctacccagcaagccccggctgttaccacc

SEQ ID NO: 485430 - DNA, 120 bp, Artificial Sequence
  ENSG00000162396_3 (sequence is synthesized)
tcctgccatataccgtccgtgccatggagaagctcgtgcgagtgatagaccaggagatgcaggccatcgggggccagaaagtcaacatgcccagcctcagcccggcagagctctggcaag

SEQ ID NO: 485431 - DNA, 120 bp, Artificial Sequence
  ENSG00000162396_4 (sequence is synthesized)
ccaccaaccggtgggacttgatgggcaaagagctgctaagacttagagacaggcatggcaaggaatactgcttaggaccaactcacgaggaagccattacggccttaattgcctcccaga

SEQ ID NO: 485432 - DNA, 120 bp, Artificial Sequence
  ENSG00000162396_5 (sequence is synthesized)
agaaactgtcctacaagcagcttcccttcctgctgtaccaagtgacaaggaagtttcgggatgagcccaggccccgctttggtcttctccgtggccgagagttttacatgaaggatatgt

SEQ ID NO: 485433 - DNA, 120 bp, Artificial Sequence
  ENSG00000162396_6 (sequence is synthesized)
acacctttgactcctccccagaggctgcccagcagacctacagcctggtgtgtgatgcctactgcagcctgttcaacaagctagggctgccatttgtcaaggtccaggccgatgtgggca

SEQ ID NO: 485434 - DNA, 120 bp, Artificial Sequence
  ENSG00000162396_7 (sequence is synthesized)
ccatcgggggcacagtgtctcatgagttccagctcccagtggatattggagaggaccggcttgccatctgtccccgctgcagcttctcagccaacatggagacactagacttgtcacaaa

SEQ ID NO: 485435 - DNA, 120 bp, Artificial Sequence
  ENSG00000162396_8 (sequence is synthesized)
tgaactgccctgcttgccagggcccattgactaaaaccaaaggcattgaggtggggcacacattttacctgggtaccaagtactcatccattttcaatgcccagtttaccaatgtctgtg

SEQ ID NO: 485436 - DNA, 120 bp, Artificial Sequence
  ENSG00000162396_9 (sequence is synthesized)
ctctacagaagactgtgtccgctggcccagcctactggccccttaccaagcctgcctcatcccccctaagaagggcagtaaggagcaggcggcctccgagctcatagggcagctgtacga

SEQ ID NO: 485437 - DNA, 120 bp, Artificial Sequence
  ENSG00000162396_10 (sequence is synthesized)
ccacatcacagaggcagtgcctcagcttcacggggaggtgctcctggacgacaggacccatctgaccatcggaaacagactgaaagatgccaacaagtttggctacccctttgtgataat

SEQ ID NO: 485438 - DNA, 120 bp, Artificial Sequence
  ENSG00000162396_11 (sequence is synthesized)
cgctggcaagagggccctggaggaccctgcacattttgaggtttggtgtcagaacactggtgaggtggccttcctcaccaaagatggagtcatggatttactgaccccagtgcagactgt

SEQ ID NO: 485439 - DNA, 120 bp, Artificial Sequence
  ENSG00000162396_12 (sequence is synthesized)
ctaaatgcccccagcccacccctgcccccatttgcagccttggtgttcgttctaacactgcattttcctacacccctttcctggactgctctctccagaaacagcacagctcatggaggg

SEQ ID NO: 485440 - DNA, 120 bp, Artificial Sequence
  ENSG00000162396_13 (sequence is synthesized)
tgagatcatgttagggaaatcaatttttatctagtcatttgttcagattatttgtatttaaagtcattaacttgatccctttctccagactggccatgccgccatatacctttccttttg

SEQ ID NO: 485441 - DNA, 120 bp, Artificial Sequence
  ENSG00000162396_14 (sequence is synthesized)
tattccattgtggaagcttctaggaggctgagaagcaggagatccaagctccagtcctgggtgttaccctgaggggggaagtcacttcccttctctcagctgagtttttcacgtgtaaga

SEQ ID NO: 485442 - DNA, 120 bp, Artificial Sequence
  ENSG00000162396_15 (sequence is synthesized)
tgagaatggctgatggctgagagcccaccaaccttccccaccccgtatcagtttgaccacgggccttttgctacattctatccagagagcaggcctgccagcccctctccactgagaagt

SEQ ID NO: 485443 - DNA, 120 bp, Artificial Sequence
  ENSG00000162396_16 (sequence is synthesized)
tgggctgagagtatggggaaaagaatcaagagacctgactgccgccaactcactagtgacttagatacatcccctccccctgctggggcctcagtttccccatctgtaacttgagaaaat

SEQ ID NO: 485444 - DNA, 120 bp, Artificial Sequence
  ENSG00000162396_17 (sequence is synthesized)
agaactagatctgtaaagtctggaactagatctgtaacgtccttataggtgtcactagggggttccatgagaggtgtgtgacaggcagtctgattcctctcattctccatagtctgtttc

SEQ ID NO: 485445 - DNA, 120 bp, Artificial Sequence
  ENSG00000162396_18 (sequence is synthesized)
ctggaaagtcgatgtaattaactgatggcccaaaaactacctcaagagacctggccctgttaagacggcttaaccactgagatcccgttctattgatttaataaagtcaaactattggaa

SEQ ID NO: 485446 - DNA, 120 bp, Artificial Sequence
  ENSG00000162398_0 (sequence is synthesized)
acaaggcccgggttgccgtggcagcagcggaggcgggcagcgcgcaggcctgccatgagggaaagccaggatgccgccggagctcatggctggaaccgcgtcggctccacggccaccaag

SEQ ID NO: 485447 - DNA, 120 bp, Artificial Sequence
  ENSG00000162398_1 (sequence is synthesized)
tggttcaccggggcgcccttcggggtgcagagccacaggtttgacatctctgctgtttatcccaactggaagaagttcagcaccttcactgaggccccatactccacgcgttattctacc

SEQ ID NO: 485448 - DNA, 120 bp, Artificial Sequence
  ENSG00000162398_2 (sequence is synthesized)
caagtgtcccacataggccctgggacttacagctccaaagagacctgcttcagcaagaagaagctgatgaaggaggtggacacaggctgggccaaggcccaggaagccacgcggctgacc

SEQ ID NO: 485449 - DNA, 120 bp, Artificial Sequence
  ENSG00000162398_3 (sequence is synthesized)
cagctaccccacttccagtaccaggccatcatgaaagagaagcggctgaaggagcaaaagctgggccccggctcctacaacctcaaagacttcttagaacagctgcgggagaaaccatgt

SEQ ID NO: 485450 - DNA, 120 bp, Artificial Sequence
  ENSG00000162398_4 (sequence is synthesized)
agcacccgggggctgctcagctctggggaggttcgcttccgaggactcactgggaactactatccaggccctggaaattatggggagaagggtaacccatacaccaagctggaggagaat

SEQ ID NO: 485451 - DNA, 120 bp, Artificial Sequence
  ENSG00000162398_5 (sequence is synthesized)
gcctggaaccggtctcattccgagggcctcatgtgcaggatgagcaacaagccacacccccggcctcatcaggggagtggtctgggacccggcacctacttcttcaaaagcgaccttgag

SEQ ID NO: 485452 - DNA, 120 bp, Artificial Sequence
  ENSG00000162398_6 (sequence is synthesized)
acatatgtggcacgatccgtcggcacccgcggcccctatgacactttctctggtgatcggagcaagccactgccttatgggcactactccatgcagaaaaaaaagcccagggaactgatg

SEQ ID NO: 485453 - DNA, 120 bp, Artificial Sequence
  ENSG00000162398_7 (sequence is synthesized)
ggatttactgggccaacctcagccagtgcccccgcacactggccacatctggccccagtttctggcttccacaagagaagaaatgcaaacccgtcaaccagcccccattcctgttgacct

SEQ ID NO: 485454 - DNA, 120 bp, Artificial Sequence
  ENSG00000162398_8 (sequence is synthesized)
ccaaggggtcaggtgcaaaggcctgccagatgattatgggaagctggaacccagtaggtgtgggccgctacctcaacacctggctgatggagacaaaggacaggcggcagcgatatcgat

SEQ ID NO: 485455 - DNA, 120 bp, Artificial Sequence
  ENSG00000162398_9 (sequence is synthesized)
ccctattcctgagtggatccaaacgctacctctcagacctggcccgggacatgctcatgcaaatcaggctgttttgttggaaaggcctagaagtcatcaattttggcctctcaccaatgt

SEQ ID NO: 485456 - DNA, 120 bp, Artificial Sequence
  ENSG00000162398_10 (sequence is synthesized)
aggatctcctgtgaagcagaaccaacagggaaaggatcacaccatttactaagggaaagtgccctccaactgtggattacaattcagatcctactccttaaagccacatgcgaaggacag

SEQ ID NO: 485457 - DNA, 120 bp, Artificial Sequence
  ENSG00000162398_11 (sequence is synthesized)
cctgcagtgaccagagagcccaaaggcctgaagacaaatctgggggtgacagcatgggcatgggagtggggtgtcttagagaaaggacacatgggcttgggagaggggagagatgtatgg

SEQ ID NO: 485458 - DNA, 120 bp, Artificial Sequence
  ENSG00000162398_12 (sequence is synthesized)
ggatcacctttgccagagctgcatacctgaaggtcacagtgtcttccgggacagctggggacaggtatcttttgttgcaggagatcaattatcctgagaactcaactcagccagtgacat

SEQ ID NO: 485459 - DNA, 120 bp, Artificial Sequence
  ENSG00000162398_13 (sequence is synthesized)
gaacatgggggccagagagcagatggactgaagggatgggacgtagttgacacttgtgggaccctttctattctaaagccagagtgcttggctccttgtttattaaagttcagaaagtgg

SEQ ID NO: 485460 - DNA, 120 bp, Artificial Sequence
  ENSG00000162399_0 (sequence is synthesized)
agagggaaggtgagagggcaaggagtaaaggtggctgggtgtgggtccgttgaagcgagccgcctccagccctgttgaactggtgggcccagggactggagcgggattgaaagggatctt

SEQ ID NO: 485461 - DNA, 120 bp, Artificial Sequence
  ENSG00000162399_1 (sequence is synthesized)
gctctcccttgaagccttgagttgcagcgatttcagtgtcttctctccctgtgtaagcctgtctcggtgtttaggctgaactacagccaccccctctcccgggggtgtgcaggccaggga

SEQ ID NO: 485462 - DNA, 120 bp, Artificial Sequence
  ENSG00000162399_2 (sequence is synthesized)
ctggccaggcagccatggctgacgagaagaccttccggatcggcttcattgtgctggggcttttcctgctggccctcggtacgttcctcatgagccatgatcggccccaggtctacggca

SEQ ID NO: 485463 - DNA, 120 bp, Artificial Sequence
  ENSG00000162399_3 (sequence is synthesized)
ccttctatgccatgggcagcgtcatggtgatcgggggcatcatctggagcatgtgccagtgctaccccaagatcaccttcgtccctgctgactctgactttcaaggcatcctctccccaa

SEQ ID NO: 485464 - DNA, 120 bp, Artificial Sequence
  ENSG00000162399_4 (sequence is synthesized)
aggccatgggcctgctggagaatgggcttgctgccgagatgaagagccccagtccccagccgccctatgtaaggctgtgggaggaagccgcctatgaccagagcctgcctgacttcagcc

SEQ ID NO: 485465 - DNA, 120 bp, Artificial Sequence
  ENSG00000162399_5 (sequence is synthesized)
acatccagatgaaagtcatgagctacagtgaggaccaccgctccttgctggcccctgagatggggcagccgaagctgggaaccagtgatggaggagaaggtggccctggcgacgttcagg

SEQ ID NO: 485466 - DNA, 120 bp, Artificial Sequence
  ENSG00000162399_6 (sequence is synthesized)
cctggatggaggctgccgtggtcatccacaagggctcagacgagagtgaaggggaaagacgcctaactcagagctggcccggccccctggcctgtccccagggccctgcccccttggctt

SEQ ID NO: 485467 - DNA, 120 bp, Artificial Sequence
  ENSG00000162399_7 (sequence is synthesized)
ccttccaagatgacctggacatggactccagtgaaggcagcagccccaatgcatctccacatgacagggaggaagcttgttccccacaacaggaacctcagggctgcaggtgcccgctgg

SEQ ID NO: 485468 - DNA, 120 bp, Artificial Sequence
  ENSG00000162399_8 (sequence is synthesized)
accgcttccaagactttgccctgattgatgccccaacgttggaggatgagccccaagaggggcagcagtgggaaatagccctgcccaacaactggcagcggtacccaaggacaaaggtgg

SEQ ID NO: 485469 - DNA, 120 bp, Artificial Sequence
  ENSG00000162399_9 (sequence is synthesized)
aggagaaggaggcttcggacacaggtggggaggaacctgagaaggaagaggaagacctgtactatgggctgccagatggagccggggacctcctcccggacaaggagctgggttttgagc

SEQ ID NO: 485470 - DNA, 120 bp, Artificial Sequence
  ENSG00000162399_10 (sequence is synthesized)
ctgacacccaaggctgagatgtttgtgctccgtagcttctagtctggaactgctgctgacccctgtgtgacatcacagggcctcagtttccctatctgcaaaatgggatgatatggaggt

SEQ ID NO: 485471 - DNA, 120 bp, Artificial Sequence
  ENSG00000162399_11 (sequence is synthesized)
tcaatgagatggtggcattttgagaatggtaaagaaatacacagggaggggatgatgactattagtggactcttgtttttccaatagttagtggtctttggccaacctttgaaggcaaaa

SEQ ID NO: 485472 - DNA, 120 bp, Artificial Sequence
  ENSG00000162399_12 (sequence is synthesized)
tatgatttgttgaggtttgcagcagctgaagccctcaaaagcattttccaccttcccccaaagctgacctctgagaggaaccttccttggtgctccctctgggcccctgatcctttgtga

SEQ ID NO: 485473 - DNA, 120 bp, Artificial Sequence
  ENSG00000162399_13 (sequence is synthesized)
aggccagtcaggtttcccattcctattgtgtcttatagtccacttggtagatggcgtgatccgtctttacacagagggagcctcatctcctcctgggccacattcctcctgcagctccca

SEQ ID NO: 485474 - DNA, 120 bp, Artificial Sequence
  ENSG00000162399_14 (sequence is synthesized)
tcgctccttggccaggacccaaaaccttctgtgactgacccctgctgacctcattctctctgctcctccagttccaagcctagcccccctgcccatcttgcggctcacactcttgcccaa

SEQ ID NO: 485475 - DNA, 120 bp, Artificial Sequence
  ENSG00000162399_15 (sequence is synthesized)
gctgttctcctccaccaggatgcccttggctcccttttcagcttggcaaattcgtgctcacccttcaaacccctacacagatgacctcccttggaaaggttttcctgatgtcgctgcctc

SEQ ID NO: 485476 - DNA, 120 bp, Artificial Sequence
  ENSG00000162399_16 (sequence is synthesized)
ctggaaccaggtggtcttgcctctctgcgctgcctttgggacctgtatatttgtcagtgtggcatggctgcctgcctcccgttgaagggcagcatcttgactttactcaccttgagatcg

SEQ ID NO: 485477 - DNA, 120 bp, Artificial Sequence
  ENSG00000162399_17 (sequence is synthesized)
cctgtgcccagatgggcctttggcctggcccagaatcggtggtcatcaagggtgtacagaactcaccaggacccaggaacctgttgcagataaaatcactctcccccacgttcccaactt

SEQ ID NO: 485478 - DNA, 120 bp, Artificial Sequence
  ENSG00000162399_18 (sequence is synthesized)
ttagactcacagccctcttacttcccagcattcaaacttctaaatggcctgtatgtattcacaaagcaggcaaaaagcccccagaggaacaccaccccccacccctgcctctggaataca

SEQ ID NO: 485479 - DNA, 120 bp, Artificial Sequence
  ENSG00000162399_19 (sequence is synthesized)
caccccccacccctgcctctggaatacatttgctttgacttggaattgtaggtgaaattcatcttcctggcctacttcagtttgaatcagttggctagccaggtgcggtggctcatgcct

SEQ ID NO: 485480 - DNA, 85 bp, Artificial Sequence
  ENSG00000162399_20 (sequence is synthesized)
tcatgcctgtaatctgagcattttgggaggctagcagcctgggcaacatagcgaaaccctatctctactaaaactacaaaaatta

SEQ ID NO: 485481 - DNA, 120 bp, Artificial Sequence
  ENSG00000162399_21 (sequence is synthesized)
attggaattggatggcatttagtgagcatctactatatgccagatattgagctgtgatctctaggggtaaagagacatgaactactgacaccgtgcttgccttcagagggctcacaatct

SEQ ID NO: 485482 - DNA, 120 bp, Artificial Sequence
  ENSG00000162399_22 (sequence is synthesized)
agtgagcttgatttctgtgagtgcagagcagaagctgaggtgggaacagagaagtaaaaaatggacacaccagaggcagaagagtgacagcctcccagctgtttggggcagttgagtatg

SEQ ID NO: 485483 - DNA, 120 bp, Artificial Sequence
  ENSG00000162399_23 (sequence is synthesized)
gtggggaaatagctcaagctgtctttgcagcccctgaagacatcactgtaccctattgaaccatctcagggtgatgctattgttacgctgatccctgcaacgcttgcctgtgccccagcc

SEQ ID NO: 485484 - DNA, 120 bp, Artificial Sequence
  ENSG00000162399_24 (sequence is synthesized)
caggatcctggcagctgcagagaaaatggcagtaacactacctcaaaccaggaccacgccctcagagcctgcaccctgggccacctgggagtcagagaccttcacctgggctatggggtt

SEQ ID NO: 485485 - DNA, 120 bp, Artificial Sequence
  ENSG00000162399_25 (sequence is synthesized)
ctgggttgaggctggggttcccggcctagggaagggcttccgggttgaggccgggggtcctggcctagggaaggagatgcccctgtgtgctgggttacaaggtcatggccctgggaacac

SEQ ID NO: 485486 - DNA, 120 bp, Artificial Sequence
  ENSG00000162399_26 (sequence is synthesized)
acttccttttctttctgggtcatttctgcctctgcagtgaaggatgccacagggtacaccctctctgctgtcatgactcaggacaggagttcctggtcacagctgagtcttcggatgagg

SEQ ID NO: 485487 - DNA, 120 bp, Artificial Sequence
  ENSG00000162399_27 (sequence is synthesized)
tgaggggtagcatgctcctgtgctctgttgcctaaggcagggcagcctacaacccacgttagaaacagcgtcagcactaagggctaaaataaaactactttcaacatttaaaggggtcat

SEQ ID NO: 485488 - DNA, 120 bp, Artificial Sequence
  ENSG00000162399_28 (sequence is synthesized)
cttcattcacctgcaaattcttttctttaaaaccaccccttccctcggggcaggatacgtgaggccttacgcctgacgggcaccagaggccctcttccggaagtaagccctcactgcagt

SEQ ID NO: 485489 - DNA, 120 bp, Artificial Sequence
  ENSG00000162399_29 (sequence is synthesized)
ggcatgaccgtggggtgtgctgtgtggtgctgaatctcaggagtgattccccacacccctgaaccacaaccgcagtggctttagacttaaacaagagcctctggttgctgggcctgccag

SEQ ID NO: 485490 - DNA, 120 bp, Artificial Sequence
  ENSG00000162399_30 (sequence is synthesized)
caggaagatggtaaccctgttctagagttagcatctgcagggggcttggggtagtggagtgagatggtgagacccaggcttggtctccctggctcttgctgcatgatggggagaccacac

SEQ ID NO: 485491 - DNA, 120 bp, Artificial Sequence
  ENSG00000162399_31 (sequence is synthesized)
acctgatctgcccaggaaggtcccggttgacaccgactgcctctgctaagttattaggaggcccctttcacgctcgaagatacctcatttggatgatacaatgttaccttacctactctg

SEQ ID NO: 485492 - DNA, 120 bp, Artificial Sequence
  ENSG00000162399_32 (sequence is synthesized)
tgacctttgacaagtctggttgcctccgtagccctcagctttctcatgtgcaaatgacagatgaagtgcgcatatcttggaatcttggaagtgatgggggtgtttgatgggacctatctt

SEQ ID NO: 485493 - DNA, 120 bp, Artificial Sequence
  ENSG00000162399_33 (sequence is synthesized)
gtcaatgccctgcagccaaagaccactgggagcacacctcacctgtggttaacaagctgggtttcttcttgcagtaagggggaatgaacaccacagcgaaccagggggagtctctgaaag

SEQ ID NO: 485494 - DNA, 120 bp, Artificial Sequence
  ENSG00000162399_34 (sequence is synthesized)
aggtattagaaaggacttgttactggatttgggccagtgctcagtggcttggcgagggtttaagaagcaggcctttgctctgaaccggctgctgtcaggaggcggggctcattctatgac

SEQ ID NO: 485495 - DNA, 120 bp, Artificial Sequence
  ENSG00000162399_35 (sequence is synthesized)
tgggtgtcttcttcaaccttatctaggataaaataaaatcataaaacactgtgcttcatgcccctggccttgccaacttgcagtcccctctaagagcatcagagcctctggggcaccccc

SEQ ID NO: 485496 - DNA, 120 bp, Artificial Sequence
  ENSG00000162399_36 (sequence is synthesized)
tctccactgggagaggggcaaggtgctggtgaaggtcctggggagaaggctgggaggctctgaaagggtcaggaggggccttttggggtggcaaagcctgggattctagcgttcagctcc

SEQ ID NO: 485497 - DNA, 120 bp, Artificial Sequence
  ENSG00000162399_37 (sequence is synthesized)
aggctccaggtgtgtgtgccagggtgaaaattcctgctcttggtcactctcctgtcaggttggagggactctggaagtttccaccctctggagagggaaaggccctggagggatggcccc

SEQ ID NO: 485498 - DNA, 120 bp, Artificial Sequence
  ENSG00000162399_38 (sequence is synthesized)
tgcccttaactggaaagggtgggcaagggaaggcagggggcccaggggcagggaacctgggctctgccgaccgctcgccatgaccttgggtacatcacagccctccctgggctcctctat

SEQ ID NO: 485499 - DNA, 120 bp, Artificial Sequence
  ENSG00000162399_39 (sequence is synthesized)
gctcccagtccctgagcactgtgtgcctgtcaccatgcaagacaccgtcacccctattaccctatctagtccgtgaaacagccctgggggaccgatctgtcgaccccacattgcaaatgt

SEQ ID NO: 485500 - DNA, 120 bp, Artificial Sequence
  ENSG00000162399_40 (sequence is synthesized)
ttgttataaatcccaggctccagaatcagaaagacctggttttaccttcagcctcagccagttccttgctgtgtggccttggacaagtcacagcccctctcagagcctcaatgtccacat

SEQ ID NO: 485501 - DNA, 120 bp, Artificial Sequence
  ENSG00000162399_41 (sequence is synthesized)
ttatgcagtggggaggataatacctccctcttgggcttttgtggagaagaactgggtataatgcctcaggcacatttaggtgcttagacagtggtggtcttcttccctctctgggtctct

SEQ ID NO: 485502 - DNA, 120 bp, Artificial Sequence
  ENSG00000162399_42 (sequence is synthesized)
tccctcatctatgcatcagggagccactgtcctgcctataaataaaacaataggtgagtgcattcaccaggaggaagatgcatgtaaaagcttcttgcaaggggtaaagaaagtctgtgt

SEQ ID NO: 485503 - DNA, 120 bp, Artificial Sequence
  ENSG00000162399_43 (sequence is synthesized)
gcccagtgctgagaggcaggtgagccaacagcaagtgcagggactaaggtgtataaaatgcctcctgtggggcaggaggggagcagcatgctgagtgagagaggcagcaccctggaagct

SEQ ID NO: 485504 - DNA, 120 bp, Artificial Sequence
  ENSG00000162399_44 (sequence is synthesized)
tggaggaggagcaggattgcttgtgctgtcagacaggtgtcaaacagggttccaggcagctgctgagtgtcaggtgcttcccataaatcatttcattgaatttaatttttccatctgccc

SEQ ID NO: 485505 - DNA, 120 bp, Artificial Sequence
  ENSG00000162399_45 (sequence is synthesized)
tgagagatgggtattaccaggggagaaactgatattcaaacataggtcctctgagcctgtgctcttcccacgatgccacctggtccacgtcataagactcaacaatgcacctgttgtgct

SEQ ID NO: 485506 - DNA, 120 bp, Artificial Sequence
  ENSG00000162399_46 (sequence is synthesized)
gtgcacacttttcttcatttcatcctcgcagcttgcaaggttggtgtattgtccccattttatttttatgtatttatttatttattttgagatggagtgttgcgcttgttgcccaggcta

SEQ ID NO: 485507 - DNA, 72 bp, Artificial Sequence
  ENSG00000162399_47 (sequence is synthesized)
ggctggtcttgtacccctgacctcagatcactgcacccagctgtccccattttatagatgaggaactgaggc

SEQ ID NO: 485508 - DNA, 120 bp, Artificial Sequence
  ENSG00000162399_48 (sequence is synthesized)
gcacccagctgtccccattttatagatgaggaactgaggctcagagaagctgaataatttgcccatccttgcggagaagagctaaatggaggagaggaggtagagctgcagggctttctg

SEQ ID NO: 485509 - DNA, 120 bp, Artificial Sequence
  ENSG00000162399_49 (sequence is synthesized)
ttcctgccaggaatcatccagtagccccaggccattctgaccctagtgggacaggagaaaaatcagtatcaataagtcaggcagcaaggttccactgagcatctccctgtgctagtgtgg

SEQ ID NO: 485510 - DNA, 120 bp, Artificial Sequence
  ENSG00000162399_50 (sequence is synthesized)
agggagacacccccctgcaacatcttccatgactgcctattgcccacaagataaaattcagattcctcaggctggcatttgaggcccttcatgatctggccccaactgccccatccagct

SEQ ID NO: 485511 - DNA, 120 bp, Artificial Sequence
  ENSG00000162399_51 (sequence is synthesized)
gaatcatctgccatgtgctcccgtgcagcagccccggcatcctcacctttccagccaccctgccttggctcatgctgttccctccacccaggtgcccttcatccccttctctgtcatccc

SEQ ID NO: 485512 - DNA, 120 bp, Artificial Sequence
  ENSG00000162399_52 (sequence is synthesized)
tcaaaccctacctgttccctggagcctgaattagccctgctctccccttccacggtggaatccatctccactgcaccctctcctccgaatccctcctaaactgtgtgccccgctctgtcc

SEQ ID NO: 485513 - DNA, 120 bp, Artificial Sequence
  ENSG00000162399_53 (sequence is synthesized)
ccagcacttctgaatgactagctgtgtgagtaccagtctccccacatggactgggaggtccttcaaggacaggggcctcttccccgccaatacttctatccccaggacttagcaaaagca

SEQ ID NO: 485514 - DNA, 120 bp, Artificial Sequence
  ENSG00000162399_54 (sequence is synthesized)
aggaacagtagtgctggtggaacagaattgaaccgaaccgggtgcccactctgaaggctcatggcccaggggcatggactcctagcccagggctgaggagcaccagctttggagtaaaca

SEQ ID NO: 485515 - DNA, 120 bp, Artificial Sequence
  ENSG00000162399_55 (sequence is synthesized)
gcgctgggtttgagactaggcttccctactggccagctctgtgactttggccaggagacttagcctctctggccctcaatttccttattaataaattgaggttagtgatatcgacccaat

SEQ ID NO: 485516 - DNA, 120 bp, Artificial Sequence
  ENSG00000162399_56 (sequence is synthesized)
aggcatgttgtgaagattggatgagatcatgcatattgagtgtagcatgtgcctagcacctggtgagcccccagtaaagtcagttatcattgttagtgttgcctgcagagatgatgttac

SEQ ID NO: 485517 - DNA, 120 bp, Artificial Sequence
  ENSG00000162399_57 (sequence is synthesized)
aatgtgtagacatcaggtgcccatgtgcacctgggtcgttcaagcctacaagcactgtgtcatccaagcacatgtataattcgagctttgtatcgtcagtgcttccaagtgcctgtcaat

SEQ ID NO: 485518 - DNA, 120 bp, Artificial Sequence
  ENSG00000162399_58 (sequence is synthesized)
ggacccagctgggctggtggcatcagactctcctgggaaactttaaaaatctagtgtcctagaaccatcctcagaaaagtctgggatggcctgggttttgcataagcaagcctggtgatt

SEQ ID NO: 485519 - DNA, 120 bp, Artificial Sequence
  ENSG00000162399_59 (sequence is synthesized)
cttaagtgctgaagggcttagttgtttgtttttcttaaatgagttatcaaacattggatagctggtaggcaacccagaagaggtgggagttgcaagccaggacttaaaacagtagaatga

SEQ ID NO: 485520 - DNA, 120 bp, Artificial Sequence
  ENSG00000162399_60 (sequence is synthesized)
aggagtgagggtatctcaggcagagggcatggcataggcaaagccttgggggaaggaaggaggaagaaggagactgtcctggctggagtggtggaggacagggtcagagagggaggccgc

SEQ ID NO: 485521 - DNA, 120 bp, Artificial Sequence
  ENSG00000162399_61 (sequence is synthesized)
agcttggccatggggcttcttgaattcctgccacggagctcagatttgttctgatgggcaagggggattaattgatgattcttgagcagaggagtgacatgaaagaaacattcaggtcat

SEQ ID NO: 485522 - DNA, 120 bp, Artificial Sequence
  ENSG00000162399_62 (sequence is synthesized)
atactaacagatacaaaagggaaaggtggcacgtattggtggcaagaaggctggtttgtgccctgcggcagggatttcattctcaacctgccctgtgaaaggttttttccactcatgtca

SEQ ID NO: 485523 - DNA, 120 bp, Artificial Sequence
  ENSG00000162399_63 (sequence is synthesized)
ctgggtggatgccaggtcaggactgaagcttgcagagccggtgtcctggattcctccttgctgaccacaaatccagcagagcagggcagggaaccctgtggcagaggctgttgcttcccg

SEQ ID NO: 485524 - DNA, 120 bp, Artificial Sequence
  ENSG00000162399_64 (sequence is synthesized)
ccaagacaccagggccctggccaaggcagtgctcagttcacagatgacccaggacaagggcaaatgagggccccagtgactcaggaagtccccaggtcagaaaatgggccccactggtga

SEQ ID NO: 485525 - DNA, 120 bp, Artificial Sequence
  ENSG00000162399_65 (sequence is synthesized)
ttctgcagatagtccctgcacatcccggagaagagcagacacggtgtggtgggtaggtggatgagaccaggctttggggatcagatcagcaagcctgggggtaaggagggctagatttta

SEQ ID NO: 485526 - DNA, 120 bp, Artificial Sequence
  ENSG00000162399_66 (sequence is synthesized)
tctagtcatgtgttcattcatttgttcacttattcatttattctaaccacaaacactatgcacctgctttgtgccaccccctgtgctaggtactgggggaagagacatgcatctgaccca

SEQ ID NO: 485527 - DNA, 120 bp, Artificial Sequence
  ENSG00000162399_67 (sequence is synthesized)
tgcttgtcttgggggaacctctactaccccgggctaactgcagagtgaacagtgacaggtcagtgctgagcagagggaagcacggcggggatctgaccccacctggagagtcggcaggag

SEQ ID NO: 485528 - DNA, 120 bp, Artificial Sequence
  ENSG00000162399_68 (sequence is synthesized)
cttctcagagaggaactcccaccaagctatgtcctgaaggattcgctagggaagagcagggagggagaacagcttgggcgaagcctccagccctgagccaccccaccacgttccaggatt

SEQ ID NO: 485529 - DNA, 120 bp, Artificial Sequence
  ENSG00000162399_69 (sequence is synthesized)
gacctggggtaggtgtgaactgagcttagaataggagcggagggtggctggagaagacgtgggtgagtgagtgactggggactggaccagggcgggctgtggttgttgccctggagcaca

SEQ ID NO: 485530 - DNA, 120 bp, Artificial Sequence
  ENSG00000162399_70 (sequence is synthesized)
tggaaggccccagtgatggacaaggacaaagctacagtttccatggaaggagggctttgcagtgctgagagctgcccaaagaatgggtaggaacatgtctgaaagaggttacagttccta

SEQ ID NO: 485531 - DNA, 120 bp, Artificial Sequence
  ENSG00000162399_71 (sequence is synthesized)
acggagagagagagacagatggagagagagagacagagagagagaactagaaatcagacaggaaaagaaagggaattcatccactggaaatatctgtgatcccacaaaagaaacaaatga

SEQ ID NO: 485532 - DNA, 120 bp, Artificial Sequence
  ENSG00000162399_72 (sequence is synthesized)
aaacatggttaacctcaggggaatgcaaattaaaacaagaagctatgtttcacccataacactggcatcattttgtaaagatgatgtaataaagataataataggtggagctggcagaat

SEQ ID NO: 485533 - DNA, 120 bp, Artificial Sequence
  ENSG00000162399_73 (sequence is synthesized)
gtggaggaacagagctctttctgacgttgctgatgtgaatgggagtggtggcagcttttctgtgagtgccttcacagggggctgccccttgattcagcaattccacatgtaggacttgct

SEQ ID NO: 485534 - DNA, 120 bp, Artificial Sequence
  ENSG00000162399_74 (sequence is synthesized)
catttattctagttttgttgttgttgttgttgtttgtttgttgttttgagacaaggtcttgccgtattgcttaggctggtctcaaactcctggatcaagtgatcctctggcctcagcctc

SEQ ID NO: 485535 - DNA, 120 bp, Artificial Sequence
  ENSG00000162399_75 (sequence is synthesized)
gtagctgggattacaggagcacaccacagtgcctggctttatcctgataatttaccctaaggaagaaatcagacaactgtgctagactatacttacagaaggcagtttatcatagcgttg

SEQ ID NO: 485536 - DNA, 120 bp, Artificial Sequence
  ENSG00000162399_76 (sequence is synthesized)
gttgatgatggtagatgaaatgtggaaagaatctcaatgttcagcaacaggagactggctaagacatcatgccacagctatgcaagggacagatacacggccattcaaaacagtgaccct

SEQ ID NO: 485537 - DNA, 120 bp, Artificial Sequence
  ENSG00000162399_77 (sequence is synthesized)
cctgattgaatcaaatcccctatcaccactctcacagcaccacagatctctctcctttgtagcatttattaccatcataattttacatttctttgtgaatttctttgatgaatttctatc

SEQ ID NO: 485538 - DNA, 120 bp, Artificial Sequence
  ENSG00000162399_78 (sequence is synthesized)
tccttcattggacgctaagctctgtgaaggcaaggactctattacgttcattattgtgccctcagtgcttagttaagttcctggaacacagtatcctctcaataaattgttgttaaatga

SEQ ID NO: 485539 - DNA, 120 bp, Artificial Sequence
  ENSG00000162402_0 (sequence is synthesized)
ccgggccgcagccgcgcctgagcgcctcaccgcactagctcggctcgcaggacccaagcccgcacccagcctggcccggctgctgcggagcacccggggcaggaacgcaggggccaacct

SEQ ID NO: 485540 - DNA, 120 bp, Artificial Sequence
  ENSG00000162402_1 (sequence is synthesized)
aggcggcgcggagggtgcgccgcgcggcccgccaggcccgggacccgtagcttcgccgtgcgctggccggggcggccaggaggcccaagccatggaatcggaggaggagcagcacatgac

SEQ ID NO: 485541 - DNA, 120 bp, Artificial Sequence
  ENSG00000162402_2 (sequence is synthesized)
aggcccaagccatggaatcggaggaggagcagcacatgaccacgctgctgtgcatgggcttctcagaccccgccaccatccgcaaggccctgcgcctggccaagaacgacattaacgagg

SEQ ID NO: 485542 - DNA, 120 bp, Artificial Sequence
  ENSG00000162402_3 (sequence is synthesized)
acattaacgaggccgtggcactgctcaccaacgagcggccgggcctcgactacggcggctacgagcccatggacagcggcggtggccccagccccgggcccggcgggggcccgcggggcg

SEQ ID NO: 485543 - DNA, 120 bp, Artificial Sequence
  ENSG00000162402_4 (sequence is synthesized)
acggcggcggcggcggcccctcccgcggcgggagcaccggaggcgggggcggcttcgaccccccgcccgcctaccacgaggtggtggacgcggagaagaatgatgagaatggaaactgct

SEQ ID NO: 485544 - DNA, 120 bp, Artificial Sequence
  ENSG00000162402_5 (sequence is synthesized)
caggggaaggaattgaattccctacaacaaatttatatgaactggaaagccgtgttttgactgatcattggtccatcccttacaagcgagaagaatcactaggcaaatgcctgttggcat

SEQ ID NO: 485545 - DNA, 120 bp, Artificial Sequence
  ENSG00000162402_6 (sequence is synthesized)
ctacctacctagcaagacttggtctttccgagtctgatgagaattgtagaaggtttatggacaggtgtatgcctgaagcatttaaaaagctcctgacatcaagtgctgttcacaagtggg

SEQ ID NO: 485546 - DNA, 120 bp, Artificial Sequence
  ENSG00000162402_7 (sequence is synthesized)
gtactgaaattcatgaaggaatttacaacatgttgatgctattaatagaactggtcgcagagagaataaaacaagatccaattcccactggtctcctgggtgtgcttacaatggctttca

SEQ ID NO: 485547 - DNA, 120 bp, Artificial Sequence
  ENSG00000162402_8 (sequence is synthesized)
atcctgataatgaataccattttaaaaacagaatgaaagtgtctcaaaggaattgggcagaagtgtttggagagggaaatatgtttgctgtttcacctgtatcgactttccaaaaggagc

SEQ ID NO: 485548 - DNA, 120 bp, Artificial Sequence
  ENSG00000162402_9 (sequence is synthesized)
ctcatggatgggttgtggatttggtaaataagtttggagaattaggtggatttgcagcaatccaagccaagctccattcagaagatatagaacttggggctgtctcagcactgattcagc

SEQ ID NO: 485549 - DNA, 120 bp, Artificial Sequence
  ENSG00000162402_10 (sequence is synthesized)
ccttaggagtgtgtgcagagtacctcaattcctccgtggtacagcccatgctagacccagtcattcttactacaatccaggatgtacggagtgtagaagagaaagacctcaaagacaaga

SEQ ID NO: 485550 - DNA, 120 bp, Artificial Sequence
  ENSG00000162402_11 (sequence is synthesized)
gattggttagcatccctgagctcttgtctgccgttaagttactttgcatgcgcttccaaccggatctggtgacaattgtggatgaccttcgactagatattctattgcgcatgctgaaat

SEQ ID NO: 485551 - DNA, 120 bp, Artificial Sequence
  ENSG00000162402_12 (sequence is synthesized)
caccacatttcagtgctaagatgaattctctcaaagaagtaaccaaactaatagaagatagcactttatccaaatctgtgaagaatgctatagatacagacagattattagattggctag

SEQ ID NO: 485552 - DNA, 120 bp, Artificial Sequence
  ENSG00000162402_13 (sequence is synthesized)
ttgaaaactcagttctgtcgattgcactggaaggcaacatagaccaagcacaatactgtgaccgtataaagggaattattgaactcttgggtagtaaattgtcgttagatgaactcacta

SEQ ID NO: 485553 - DNA, 120 bp, Artificial Sequence
  ENSG00000162402_14 (sequence is synthesized)
aaatttggaagatacagtcaggacaatcatctactgtgattgagaacattcatactattattgctgcagcggctgtgaaatttaattcagatcagcttaatcatttgtttgttctcattc

SEQ ID NO: 485554 - DNA, 120 bp, Artificial Sequence
  ENSG00000162402_15 (sequence is synthesized)
agaagagctgggagactgagagtgatagagtaagacagaagcttttgagcctgattggacgaataggccgggaagctcgctttgagaccacttctggaaaggttttagacgtactctggg

SEQ ID NO: 485555 - DNA, 120 bp, Artificial Sequence
  ENSG00000162402_16 (sequence is synthesized)
aactggctcaccttccaaccctgcccagtagccttattcagcaggccttggaggagcacctgacaatccttagtgatgcatatgcagtgaaagaagcaatcaagaggagctacatcatca

SEQ ID NO: 485556 - DNA, 120 bp, Artificial Sequence
  ENSG00000162402_17 (sequence is synthesized)
agtgcatagaagatattaagaggcctggagaatggtcaggtttggaaaaaaacaagaaggatggattcaagtcatctcagcttaataatccccagtttgtatgggtggtaccagctttgc

SEQ ID NO: 485557 - DNA, 120 bp, Artificial Sequence
  ENSG00000162402_18 (sequence is synthesized)
gtcagctccatgaaattactcgctcattcataaaacaaacctatcaaaagcaagacaagagcattattcaagacttgaagaagaattttgaaatagtgaaattggtaacgggaagtttga

SEQ ID NO: 485558 - DNA, 120 bp, Artificial Sequence
  ENSG00000162402_19 (sequence is synthesized)
tcgcttgtcatcggcttgcagctgctgtggccgggcctggaggcttaagtggctcgacactagtggatggccggtacacttaccgggagtatttagaggcacatctaaaatttctagcgt

SEQ ID NO: 485559 - DNA, 120 bp, Artificial Sequence
  ENSG00000162402_20 (sequence is synthesized)
ttttcttgcaagaagctactctgtatctgggctggaatcgtgccaaggagatctgggagtgtcttgtaactggccaggatgtttgtgaattagatagagagatgtgttttgaatggttta

SEQ ID NO: 485560 - DNA, 120 bp, Artificial Sequence
  ENSG00000162402_21 (sequence is synthesized)
caaaaggacagcatgatcttgagagtgatgttcagcagcagctcttcaaggagaaaattcttaaattggagtcatatgaaatcactatgaatggttttaacttatttaaaactttttttg

SEQ ID NO: 485561 - DNA, 120 bp, Artificial Sequence
  ENSG00000162402_22 (sequence is synthesized)
aaaatgtgaatctttgtgatcatcgattgaaaagacaaggagctcagttgtatgtagaaaagctggaattgataggaatggatttcatttggaaaatagccatggaatcacctgatgaag

SEQ ID NO: 485562 - DNA, 120 bp, Artificial Sequence
  ENSG00000162402_23 (sequence is synthesized)
aaattgctaatgaagctattcagctaatcataaactatagttacattaatctaaatcctagattaaagaaggattcagtatctttacataagaaattcattgctgattgctacacaagat

SEQ ID NO: 485563 - DNA, 120 bp, Artificial Sequence
  ENSG00000162402_24 (sequence is synthesized)
tagaagcagccagttcagcacttggtggccccactctaacacatgctgtgaccagagcaacaaaaatgcttacagcaactgccatgccaactgtagcaacctcagttcagtctccttata

SEQ ID NO: 485564 - DNA, 120 bp, Artificial Sequence
  ENSG00000162402_25 (sequence is synthesized)
gatctactaaacttgtaataattgagagattgctgcttctggcagagcgctatgtgatcactatagaggatttttactctgttccacgaactattctacctcatggtgcctcatttcatg

SEQ ID NO: 485565 - DNA, 120 bp, Artificial Sequence
  ENSG00000162402_26 (sequence is synthesized)
gacatcttttaacccttaatgttacctatgagtctaccaaagataccttcactgtcgaggctcacagtaatgaaaccatagggagtgtccggtggaaaatagccaagcagttgtgctctc

SEQ ID NO: 485566 - DNA, 120 bp, Artificial Sequence
  ENSG00000162402_27 (sequence is synthesized)
ctgtggataatatacagatatttacaaatgatagcctgctgacagtgaataaagatcaaaagctactccaccaactgggcttttctgatgaacaaatccttacagtgaagacttctggca

SEQ ID NO: 485567 - DNA, 120 bp, Artificial Sequence
  ENSG00000162402_28 (sequence is synthesized)
gtgggaccccatctgggagttcagcagattcttcaaccagctccagcagcagcagcagtggggtttttagttcttcatatgccatggagcaggagaaatccctccctggtgtagtgatgg

SEQ ID NO: 485568 - DNA, 120 bp, Artificial Sequence
  ENSG00000162402_29 (sequence is synthesized)
ctctcgtatgtaacgtatttgacatgctttatcagctcgccaatctggaagagccaaggataactctacgagtacggaagcttctgctcttgatacccactgatccagccattcaggaag

SEQ ID NO: 485569 - DNA, 120 bp, Artificial Sequence
  ENSG00000162402_30 (sequence is synthesized)
cccttgatcaacttgattctttaggaagaaagaaaacattgctgtctgaatcaagttctcagtcctcaaaatctccatccctgtcatcaaagcaacagcaccagccaagtgccagttcaa

SEQ ID NO: 485570 - DNA, 120 bp, Artificial Sequence
  ENSG00000162402_31 (sequence is synthesized)
ttttagaaagtctgtttcgatcttttgccccgggaatgtctaccttcagagtgctctacaacttagaagttctaagctccaaactcatgccaacagctgatgatgacatggccagaagct

SEQ ID NO: 485571 - DNA, 120 bp, Artificial Sequence
  ENSG00000162402_32 (sequence is synthesized)
gtgccaaatccttctgtgaaaacttcctcaaagctggcggtttgagtttggttgtaaatgtcatgcagagagactccatcccatcagaagtagactatgaaacaaggcagggtgtttatt

SEQ ID NO: 485572 - DNA, 120 bp, Artificial Sequence
  ENSG00000162402_33 (sequence is synthesized)
ccatctgtctacagcttgcaagatttttacttgtcggacaaacaatgcccacgttattagatgaagacctcaccaaagatggtatagaagcactttcttcccgcccattccgaaatgtca

SEQ ID NO: 485573 - DNA, 120 bp, Artificial Sequence
  ENSG00000162402_34 (sequence is synthesized)
gccggcagacaagcagacagatgtccttatgtggtaccccagaaaagtcatcctaccgacagttgtccgtgtctgataggtcttctattagggttgaggaaatcatccctgctgctcgag

SEQ ID NO: 485574 - DNA, 120 bp, Artificial Sequence
  ENSG00000162402_35 (sequence is synthesized)
ttgcaatacaaacaatggaagtaagtgatttcacttctactgtggcttgcttcatgagattgtcatgggctgcggctgcaggacggcttgatcttgttgggagtagccagccaattaaag

SEQ ID NO: 485575 - DNA, 120 bp, Artificial Sequence
  ENSG00000162402_36 (sequence is synthesized)
aaagtaattccctgtgtcctgctggaattcgaaacagactcagcagttcaggaagcaattgcagctctggaagtgaaggagaaccagtagccctgcatgcgggaatctgtgttcgacaac

SEQ ID NO: 485576 - DNA, 120 bp, Artificial Sequence
  ENSG00000162402_37 (sequence is synthesized)
agtctgtatccaccaaagactcgctgattgcgggagaggctttgtctcttcttgttacgtgcctacagcttcggagccagcaactggcatctttctataacttgccctgtgttgctgatt

SEQ ID NO: 485577 - DNA, 120 bp, Artificial Sequence
  ENSG00000162402_38 (sequence is synthesized)
tcatcattgatattctgctcggatcaccaagtgctgagattcgccgggttgcctgtgatcagctgtacactcttagtcagacagacacatcagcgcatccagatgtgcagaagccaaatc

SEQ ID NO: 485578 - DNA, 120 bp, Artificial Sequence
  ENSG00000162402_39 (sequence is synthesized)
agtttcttctaggcgtaatcctcacggctcagctgcctctctggtctccaactagtattatgagaggagtcaatcagagactgttatctcagtgtatggagtattttgatttgagatgcc

SEQ ID NO: 485579 - DNA, 120 bp, Artificial Sequence
  ENSG00000162402_40 (sequence is synthesized)
agttattagatgatctgacaacttcagaaatggagcagttaaggatcagcccagctacgatgcttgaagatgagattacttggctggataactttgaacctaatcgtacagctgaatgtg

SEQ ID NO: 485580 - DNA, 120 bp, Artificial Sequence
  ENSG00000162402_41 (sequence is synthesized)
agaccagtgaagcggacaacatcttactggcagggcacttacgcctcatcaagacccttctttcactctgtggggcagaaaaggaaatgcttggttcatcactcattaaaccattgttag

SEQ ID NO: 485581 - DNA, 120 bp, Artificial Sequence
  ENSG00000162402_42 (sequence is synthesized)
atgacttccttttccgagcttctagaattattttaaatagtcattctccagctggcagtgccgccatcagtcaacaggactttcatccaaagtgtagtacagcgaatagccgattggcag

SEQ ID NO: 485582 - DNA, 120 bp, Artificial Sequence
  ENSG00000162402_43 (sequence is synthesized)
cctatgaagtccttgtgatgttggctgatagttcaccttcaaatcttcaaattattataaaagaactgctttctatgcatcaccagcctgaccctgctcttaccaaggagtttgattacc

SEQ ID NO: 485583 - DNA, 120 bp, Artificial Sequence
  ENSG00000162402_44 (sequence is synthesized)
ttcccccagtggatagcaggtccagttcagggtttgtggggctgagaaatggtggtgcaacttgttatatgaatgcagtcttccagcagctgtatatgcaacctgggctccctgagtcat

SEQ ID NO: 485584 - DNA, 120 bp, Artificial Sequence
  ENSG00000162402_45 (sequence is synthesized)
tactttcagtggatgatgacacagacaatccagatgatagcgtgttttaccaagtgcagtctctctttggacatttaatggaaagcaagctgcagtactatgtacctgagaatttttgga

SEQ ID NO: 485585 - DNA, 120 bp, Artificial Sequence
  ENSG00000162402_46 (sequence is synthesized)
agattttcaagatgtggaataaagaactttatgtgagagaacagcaggatgcatatgaattctttactagtctcattgatcagatggatgaatacctcaagaaaatggggagagaccaaa

SEQ ID NO: 485586 - DNA, 120 bp, Artificial Sequence
  ENSG00000162402_47 (sequence is synthesized)
tttttaagaatacatttcagggcatctactctgatcagaagatctgtaaagactgtcctcacagatatgagcgtgaagaagctttcatggctctcaatctaggagtgacttcttgtcaga

SEQ ID NO: 485587 - DNA, 120 bp, Artificial Sequence
  ENSG00000162402_48 (sequence is synthesized)
gtttggaaatttctttggaccaatttgttagaggagaagttctagaaggaagtaatgcgtactactgtgaaaagtgtaaagaaaagagaataacagtgaaaaggacctgtattaaatctt

SEQ ID NO: 485588 - DNA, 120 bp, Artificial Sequence
  ENSG00000162402_49 (sequence is synthesized)
tacctagcgtcttggtaattcacctaatgagatttgggtttgactgggaaagcggacgctccattaaatatgatgaacaaataaggtttccctggatgctaaacatggagccttacacag

SEQ ID NO: 485589 - DNA, 120 bp, Artificial Sequence
  ENSG00000162402_50 (sequence is synthesized)
tttcaggaatggctcgccaagattcttcttctgaagttggggaaaatgggcgaagtgtggatcagggcggtggaggatccccacgaaaaaaggttgccctcacagaaaactatgaacttg

SEQ ID NO: 485590 - DNA, 120 bp, Artificial Sequence
  ENSG00000162402_51 (sequence is synthesized)
tcggtgtcatcgtacacagtgggcaggcacacgcaggccactactattccttcattaaggacaggcgagggtgtggaaaaggaaagtggtataaatttaatgacacagttatagaagaat

SEQ ID NO: 485591 - DNA, 120 bp, Artificial Sequence
  ENSG00000162402_52 (sequence is synthesized)
ttgacctaaatgacgagaccctggagtatgaatgctttggaggagaatatagaccaaaagtttatgatcaaacaaacccatacactgatgtgcgccgaagatactggaatgcctatatgc

SEQ ID NO: 485592 - DNA, 120 bp, Artificial Sequence
  ENSG00000162402_53 (sequence is synthesized)
ttttctaccaaagggtgtctgatcagaactccccagtattaccaaagaaaagtcgagtcagcgttgtacggcaggaagctgaggatctctctctgtcagctccatcttcaccagaaattt

SEQ ID NO: 485593 - DNA, 120 bp, Artificial Sequence
  ENSG00000162402_54 (sequence is synthesized)
cacctcagtcatcccctcggccccataggccgaacaatgaccggctgtctattcttaccaagctggttaaaaaaggcgagaagaaaggactgtttgtggagaaaatgcctgctcgaatat

SEQ ID NO: 485594 - DNA, 120 bp, Artificial Sequence
  ENSG00000162402_55 (sequence is synthesized)
accagatggtgagagatgagaacctcaagtttatgaagaatagagatgtatacagtagtgattatttcagttttgttttgtctttagcttcattgaatgctactaaattaaagcatccat

SEQ ID NO: 485595 - DNA, 120 bp, Artificial Sequence
  ENSG00000162402_56 (sequence is synthesized)
attatccttgcatggcaaaggtgagcttacagcttgctattcaattcctttttcaaacttatctacggacaaagaagaaactcagggttgatactgaagaatggattgctaccattgaag

SEQ ID NO: 485596 - DNA, 120 bp, Artificial Sequence
  ENSG00000162402_57 (sequence is synthesized)
cattgctttcaaaaagttttgatgcttgtcagtggttagttgaatattttattagttctgaaggacgagaattgataaagattttcttactggagtgcaatgtgagagaagtacgagttg

SEQ ID NO: 485597 - DNA, 120 bp, Artificial Sequence
  ENSG00000162402_58 (sequence is synthesized)
ctgtggccaccattctggagaaaaccctagacagtgccttgttttatcaggataagttaaaaagccttcatcagttactggaggtactacttgctctgttggacaaagacgtcccagaaa

SEQ ID NO: 485598 - DNA, 120 bp, Artificial Sequence
  ENSG00000162402_59 (sequence is synthesized)
attgtaaaaactgtgctcagtactttttcctgttcaacacttttgtacaaaagcaaggaattagggctggagatcttcttctgaggcattcagctctgcggcacatgatcagcttcctcc

SEQ ID NO: 485599 - DNA, 120 bp, Artificial Sequence
  ENSG00000162402_60 (sequence is synthesized)
taggggccagtcggcaaaacaatcagatacgtcgatggagttcagcacaagcacgagaatttgggaatcttcacaatacagtggcgttacttgttttgcattcagatgtctcatcccaaa

SEQ ID NO: 485600 - DNA, 120 bp, Artificial Sequence
  ENSG00000162402_61 (sequence is synthesized)
ggaatgttgctcctggcatatttaagcaacgaccacccattagcattgctccctcaagccctctgttgcccctccatgaggaggtagaagccttgttgttcatgtctgaagggaaacctt

SEQ ID NO: 485601 - DNA, 120 bp, Artificial Sequence
  ENSG00000162402_62 (sequence is synthesized)
acctgttagaggtaatgtttgctttgcgggagctgacaggctcgctcttggcactcattgagatggtagtgtactgctgtttctgtaatgagcatttttccttcacaatgctgcatttca

SEQ ID NO: 485602 - DNA, 120 bp, Artificial Sequence
  ENSG00000162402_63 (sequence is synthesized)
ttaagaaccaactagaaacggctccacctcatgagttaaagaatacgttccaactacttcatgaaatattggttattgaagatcctatacaagtagagcgagtcaaatttgtgtttgaga

SEQ ID NO: 485603 - DNA, 120 bp, Artificial Sequence
  ENSG00000162402_64 (sequence is synthesized)
cagaaaatggattactagctttgatgcaccacagtaatcatgtggacagtagtcgctgctaccagtgtgtcaaatttcttgtcactcttgctcaaaagtgtcctgcagctaaggagtact

SEQ ID NO: 485604 - DNA, 120 bp, Artificial Sequence
  ENSG00000162402_65 (sequence is synthesized)
tcaaggagaattcccaccactggagctgggctgtgcagtggctacagaagaagatgtcagaacattactggacaccacagagtaatgtctctaatgaaacatcaactggaaaaacctttc

SEQ ID NO: 485605 - DNA, 120 bp, Artificial Sequence
  ENSG00000162402_66 (sequence is synthesized)
agcgaaccatttcagctcaggacacgttagcgtatgccacagctttgttgaatgaaaaagagcaatcaggaagcagtaatgggtcggagagtagtcctgccaatgagaacggagacaggc

SEQ ID NO: 485606 - DNA, 120 bp, Artificial Sequence
  ENSG00000162402_67 (sequence is synthesized)
atctacagcagggttcagaatctcccatgatgattggtgagttgagaagtgaccttgatgatgttgatccctagaggaacatgcccagcctgagaggagtcaagacacaatactggatgc

SEQ ID NO: 485607 - DNA, 120 bp, Artificial Sequence
  ENSG00000162402_68 (sequence is synthesized)
tcagcaccttcttggaatcagaatctcgaaccctttggaagagcctggagattggactgggaaagctgctgtgacttgggcggatcgtgtatttctcaaggaaagcatttttaagccact

SEQ ID NO: 485608 - DNA, 120 bp, Artificial Sequence
  ENSG00000162402_69 (sequence is synthesized)
agaaggtttgggagctgtttggcagtgggagaactccggcatgtggatcagctgtcccgggagcgtggtctatatgtggattcacatttctgtggagattttcggaaatagagccagtgg

SEQ ID NO: 485609 - DNA, 120 bp, Artificial Sequence
  ENSG00000162402_70 (sequence is synthesized)
cagacttttttgttacacgaacatacaagagtgagcataaagctgttgctttctctacgatgctacaaaagaaattcctttggtttttatattttaagaaaaagcaagctgcttttagat

SEQ ID NO: 485610 - DNA, 120 bp, Artificial Sequence
  ENSG00000162402_71 (sequence is synthesized)
atgtgggggcaaatttttaatcttgcagtaatattaaacaggaatatccaatttaaaatgatgtaaagatgtaataaaattccttttcattgtaaaatagtaattaagtcaatttacaca

SEQ ID NO: 485611 - DNA, 120 bp, Artificial Sequence
  ENSG00000162402_72 (sequence is synthesized)
gacctttgtatttaatatgtctccctatttgtatagaatttcagatgggtctagatgagaaccctatgcataagcttggatcttgatgaaaggttaccaggatcaggatcaaaaattggg

SEQ ID NO: 485612 - DNA, 120 bp, Artificial Sequence
  ENSG00000162402_73 (sequence is synthesized)
aaatactaagctcttgaagatatttttctgatataattagattgaaaagagcaattttgaaaatgctgtgttctccagaagtacagggtgcattatttgacatcaattacttaaagaagt

SEQ ID NO: 485613 - DNA, 120 bp, Artificial Sequence
  ENSG00000162402_74 (sequence is synthesized)
tatgagttgttccccaaacagattttaaaaacagcaaaataaaagcactttaagatataattttactgagtttaacttcacagaattatctttttaatgcttggagacatattgaataaa

SEQ ID NO: 485614 - DNA, 120 bp, Artificial Sequence
  ENSG00000162402_75 (sequence is synthesized)
ctgtagtcttaaatcatgtgatctgcaatcgtttgcttttgcttaaaacataattactgaaacccttggtattggttgtatatgaagttaactatttgagttggtacacactgcttgtga

SEQ ID NO: 485615 - DNA, 120 bp, Artificial Sequence
  ENSG00000162402_76 (sequence is synthesized)
gtttcatagttattgtaatgcagagaaggaatttgagaatttgtttctcctcaacatgactaattaacactgaaaagtcagtcaaggtttaagatttattttcccagaaataaatataaa

SEQ ID NO: 485616 - DNA, 120 bp, Artificial Sequence
  ENSG00000162402_77 (sequence is synthesized)
gcaattgaataaccatccatttagtcgtatttccaaagtatagcaccattcactcatttataccagctcccttttatggtgtgggggagaggtttacacccacatatttcatatatattt

SEQ ID NO: 485617 - DNA, 120 bp, Artificial Sequence
  ENSG00000162402_78 (sequence is synthesized)
tgtacattttgtattttgaattgctcacattttcggccctgttttgcctttagttacaggtcctgccttattttcatctcaccatgcacagaactagggagccttaggaagtgccaggtt

SEQ ID NO: 485618 - DNA, 120 bp, Artificial Sequence
  ENSG00000162402_79 (sequence is synthesized)
ttcactgtcagatttgccaagtcacagaggcgcagccagccctgaagtgcctgtctggctgctgtggcattgtgtgggcatgtggccaggcagatggcatctcattactgtgctctcgcc

SEQ ID NO: 485619 - DNA, 120 bp, Artificial Sequence
  ENSG00000162402_80 (sequence is synthesized)
atggcccagtcttttcattctctggcagtgagggtttctgtgctgtcagacttcattgttattctgtgacttgctggaggttggcagtggcctttgtcaaacacactgagaagatggaag

SEQ ID NO: 485620 - DNA, 120 bp, Artificial Sequence
  ENSG00000162402_81 (sequence is synthesized)
ggccagcacttaagagcagaactgtacccttagagaaacggacagaggcgagtggcaaacttcagacggttccaatggtcttgcagtttgaaatgtgatgttctaccattggttttgagt

SEQ ID NO: 485621 - DNA, 120 bp, Artificial Sequence
  ENSG00000162402_82 (sequence is synthesized)
acgtgaatacttcctgtcctactgtttcccctaccctattctcaccttctctccgcccacatcctcaccaagagattgtgtgggacatgaccttgaaatgctggcgatgatccacactgg

SEQ ID NO: 485622 - DNA, 120 bp, Artificial Sequence
  ENSG00000162402_83 (sequence is synthesized)
gatatcatcgctggcgactgcactctcaggagcccaaaatcaggagtgaaattgccacttctagtccccttatttcctatggaaacaacgccttccgcacccctagcacctgccgtcctc

SEQ ID NO: 485623 - DNA, 120 bp, Artificial Sequence
  ENSG00000162402_84 (sequence is synthesized)
actgtaaagcttcatcaggatcgtccaccgtgtatattatacgcttcagatcatgttgcttatattgttgctgcaatgaccatcgttttcactttgctggtaaccacttgattgctgaca

SEQ ID NO: 485624 - DNA, 120 bp, Artificial Sequence
  ENSG00000162402_85 (sequence is synthesized)
gctacagtcaatgaacctgctgatgactttttttaatgtagtacaacagtgacagttatgacaggcttaccttggaagagttgtcatttttactgccaattttttggatgaagatgtttt

SEQ ID NO: 485625 - DNA, 120 bp, Artificial Sequence
  ENSG00000162402_86 (sequence is synthesized)
tataaacctttcaaaatggtctgcaaacagagcaggaattgcacaattaactcaataatgctgtgtgttctcaagaagctcccttagtgaggccgatcttaagatggccgattctgcccg

SEQ ID NO: 485626 - DNA, 120 bp, Artificial Sequence
  ENSG00000162402_87 (sequence is synthesized)
ttgaaggcatcctgggaaagaaaacaagcatcccagcgggcatctcaccacgacttctcctggagtcctcacacggtcactgacaactacagtcagttttaggaactagagtgccgtatc

SEQ ID NO: 485627 - DNA, 120 bp, Artificial Sequence
  ENSG00000162402_88 (sequence is synthesized)
atcagacttaccctgtcctgccccaccttccctgctaacatcgaggtgtgtgcagttaccttctgagcttggaacaagcagactggaattttcctctgctacctcttgtgtataaaatct

SEQ ID NO: 485628 - DNA, 120 bp, Artificial Sequence
  ENSG00000162402_89 (sequence is synthesized)
tgtttataaaatttcaaaaggaagtagatacactagggaagaaccttaattctaaatttggttcatgtgtggcaaagttcttagcttctaagagtataaaataaatttttcaaaaacaga

SEQ ID NO: 485629 - DNA, 120 bp, Artificial Sequence
  ENSG00000162402_90 (sequence is synthesized)
gggagtccaagaaaattttgacatgtatttttaaaaaaagaaaaaaaaacagctttaataccaatcattatagtagaaaaagaaaataaatatgtattgaacacccactgtgtgcaaaca

SEQ ID NO: 485630 - DNA, 120 bp, Artificial Sequence
  ENSG00000162402_91 (sequence is synthesized)
tgtttgaggagtagactgtttgctctgtagagctccccatattctggatctgtttgcatcctctaggtattcccttcaagagaattgcagctgagtctgattgtacctctagagctgaac

SEQ ID NO: 485631 - DNA, 120 bp, Artificial Sequence
  ENSG00000162402_92 (sequence is synthesized)
attatgggagtacttcttatcttttaaactttctcatagttgccacatagagtcttagtgaattttgaacagagccttggctggtatgtggcattacagttagcaggaataagcagaagt

SEQ ID NO: 485632 - DNA, 120 bp, Artificial Sequence
  ENSG00000162402_93 (sequence is synthesized)
attctggagaaaaccctagacagtgccttgttttatcaggataagctttccatgaggcgtcagcgggctctcaattaaaaagccttcatcagttactggaggtactacttgctctgttgg

SEQ ID NO: 485633 - DNA, 120 bp, Artificial Sequence
  ENSG00000162402_94 (sequence is synthesized)
tggaaagctccacttggcccataagcgctaacactgtcaggagactctacttttgtttcttggctattagatgggacctatcatgggaaggttgaggttgtggaaatgtatcttgctttt

SEQ ID NO: 485634 - DNA, 120 bp, Artificial Sequence
  ENSG00000162402_95 (sequence is synthesized)
accccatttaagtagaatcacaaatataaagacaactgaattttaatgaaactagcatttacgtttcaaaatgaagcactaggaacaagcaaagaaagaatttggctaataaaaatctcc

SEQ ID NO: 485635 - DNA, 120 bp, Artificial Sequence
  ENSG00000162402_96 (sequence is synthesized)
agggggaatatccacgtggacatcaaaatgtatctagtaggtccagaagtacttctgctggattagttgtaccactggggctacatcgtcttacacacttgtctcatgaaccttttatgc

SEQ ID NO: 485636 - DNA, 120 bp, Artificial Sequence
  ENSG00000162402_97 (sequence is synthesized)
cacgacacagagggggccatagagctagagccatggagtgctaagaacacaagtatgaatacacactcatgattggcaggcacaatcactgacctgctctgtgagtgtgaaatgtcacaa

SEQ ID NO: 485637 - DNA, 120 bp, Artificial Sequence
  ENSG00000162402_98 (sequence is synthesized)
ataaacagagttgtggggagtgggcagtaaagaaatcgtgttgctgaaataaacttattttgtctggagagaaaaacaagttaaggttcataacctttgagtgggactaataaaacaatc

SEQ ID NO: 485638 - DNA, 120 bp, Artificial Sequence
  ENSG00000162402_99 (sequence is synthesized)
cctggagaatggtcaggtttggaaaaaaacaagaaggatggattcaaggcagcaaggtgggctgactggggattatgtctccctgccaggctacacagaaactaagcaaaggtcatctca

SEQ ID NO: 485639 - DNA, 120 bp, Artificial Sequence
  ENSG00000162407_0 (sequence is synthesized)
agaaaacaaacccaggcgatcacagcagcagccgccgcggcagcagcaccaacagcaggaggagcaggaggagccggaggaggaggaggaggaggaggcaaagttagagttggggctggc

SEQ ID NO: 485640 - DNA, 120 bp, Artificial Sequence
  ENSG00000162407_1 (sequence is synthesized)
gctccggagttgctgggctcagcgcagctcccattcattaaggaaccagctgcggaggaaggtggccgagcgcccgcgctgcccactcgctcgctcgcgcactcagacgcgcgccacaac

SEQ ID NO: 485641 - DNA, 120 bp, Artificial Sequence
  ENSG00000162407_2 (sequence is synthesized)
agcgcgccccaagctgcgcagctctgcaaaagtttctgctcgggatctggctctcttccccttggactttagaacgatttagggttgacagaggaaagcagaggcgcgcaggaggagcag

SEQ ID NO: 485642 - DNA, 120 bp, Artificial Sequence
  ENSG00000162407_3 (sequence is synthesized)
aaaacaccaccttctgcagttggaggcaggcagccccggctgcactctagccgccgcgcccggagccggggccgacccgccactatccgcagcagcctcggccaggaggcgacccgggcg

SEQ ID NO: 485643 - DNA, 120 bp, Artificial Sequence
  ENSG00000162407_4 (sequence is synthesized)
cctgggtgtgtggctgctgttgcgggacgtcttcgcggggcgggaggctcgcgccgcagccagcgccatgcaaaactacaagtacgacaaagcgatcgtcccggagagcaagaacggcgg

SEQ ID NO: 485644 - DNA, 120 bp, Artificial Sequence
  ENSG00000162407_5 (sequence is synthesized)
cagcccggcgctcaacaacaacccgaggaggagcggcagcaagcgggtgctgctcatctgcctcgacctcttctgcctcttcatggcgggcctccccttcctcatcatcgagacaagcac

SEQ ID NO: 485645 - DNA, 120 bp, Artificial Sequence
  ENSG00000162407_6 (sequence is synthesized)
catcaagccttaccaccgagggttttactgcaatgatgagagcatcaagtacccactgaaaactggtgagacaataaatgacgctgtgctctgtgccgtggggatcgtcattgccatcct

SEQ ID NO: 485646 - DNA, 120 bp, Artificial Sequence
  ENSG00000162407_7 (sequence is synthesized)
cgcgatcatcacgggggaattctaccggatctattacctgaagaagtcgcggtcgacgattcagaacccctacgtggcagcactctataagcaagtgggctgcttcctctttggctgtgc

SEQ ID NO: 485647 - DNA, 120 bp, Artificial Sequence
  ENSG00000162407_8 (sequence is synthesized)
catcagccagtctttcacagacattgccaaagtgtccatagggcgcctgcgtcctcacttcttgagtgtctgcaaccctgatttcagccagatcaactgctctgaaggctacattcagaa

SEQ ID NO: 485648 - DNA, 120 bp, Artificial Sequence
  ENSG00000162407_9 (sequence is synthesized)
ctacagatgcagaggtgatgacagcaaagtccaggaagccaggaagtccttcttctctggccatgcctccttctccatgtacactatgctgtatttggtgctatacctgcaggcccgctt

SEQ ID NO: 485649 - DNA, 120 bp, Artificial Sequence
  ENSG00000162407_10 (sequence is synthesized)
cacttggcgaggagcccgcctgctccggcccctcctgcagttcaccttgatcatgatggccttctacacgggactgtctcgcgtatcagaccacaagcaccatcccagtgatgttctggc

SEQ ID NO: 485650 - DNA, 120 bp, Artificial Sequence
  ENSG00000162407_11 (sequence is synthesized)
aggatttgctcaaggagccctggtggcctgctgcatagttttcttcgtgtctgacctcttcaagactaagacgacgctctccctgcctgcccctgctatccggaaggaaatcctttcacc

SEQ ID NO: 485651 - DNA, 120 bp, Artificial Sequence
  ENSG00000162407_12 (sequence is synthesized)
tgtggacattattgacaggaacaatcaccacaacatgatgtaggtgccacccacctcctgagctgtttttgtaaaatgactgctgacagcaagttcttgctgctctccaatctcatcaga

SEQ ID NO: 485652 - DNA, 120 bp, Artificial Sequence
  ENSG00000162407_13 (sequence is synthesized)
gatttttaaaaaggaaaaaaaaaatgttttactatgtggccttccaaaataggtagtgtttgcctatgtggaaacaacagcaaactaacaccaagtgccagagtcctggatgtgcaattg

SEQ ID NO: 485653 - DNA, 120 bp, Artificial Sequence
  ENSG00000162407_14 (sequence is synthesized)
gtttaagtgttcatgttctagtgaacacagcttgttcaggaacaaacactaaaacgatttgagtagaggctgctggtcaccttttgtgacctgaggaatcccaggcctgtgagaaaagca

SEQ ID NO: 485654 - DNA, 120 bp, Artificial Sequence
  ENSG00000162407_15 (sequence is synthesized)
aaaattcacattgcagcacatgatgccagaaatagcactgaatcaagaaaatagccattgcggagctgccctcttgagtctttctgtccatcccattctattctgtactgtgactttagt

SEQ ID NO: 485655 - DNA, 120 bp, Artificial Sequence
  ENSG00000162407_16 (sequence is synthesized)
tcaggaagttttgttttgtgttttaaataaaaggaaagagcaagtttgctcagtcaagtgatcagatcccgaatctagattcccagttctaaggccttatcacctcccctgcccataggc

SEQ ID NO: 485656 - DNA, 120 bp, Artificial Sequence
  ENSG00000162407_17 (sequence is synthesized)
caacaaccatagttcctcacattagtgattagcagactctttgtggacgagtgaatttcacaaacagcacaatttcagaagaaatcgagggcacaggccctcacttttcttcttttgacg

SEQ ID NO: 485657 - DNA, 120 bp, Artificial Sequence
  ENSG00000162407_18 (sequence is synthesized)
catcatcctgtgatgttgaaatgtcaattgcaggatgctgatgttgtgcacgtcaatcaccgggcacttgcatactcttagaaacagttcgacttcggttactgccttctcccttgaaat

SEQ ID NO: 485658 - DNA, 120 bp, Artificial Sequence
  ENSG00000162407_19 (sequence is synthesized)
ccttgctgcgtgcccaccaggatttcctgtgagggcccaggaatgagcaaggcatggtctgccaccagctgacggaaagcagccttctgtacaacagatgggagggtgaagggggcagaa

SEQ ID NO: 485659 - DNA, 120 bp, Artificial Sequence
  ENSG00000162407_20 (sequence is synthesized)
tgaaaatcgaaccaaccttttagctgttgcaaatcagaaggagccagagaagcaggcagtctcatgcatgagaggttacccttcaggatgacagagctgagggtctttgtaggagttgct

SEQ ID NO: 485660 - DNA, 120 bp, Artificial Sequence
  ENSG00000162407_21 (sequence is synthesized)
cttgctgtgtaaagcactattgtcttggggttgagccctagggcagttcttggtaggttctgctgggcagaacatatgggttaaatctcggtagagagtttccctcatcctctatccgta

SEQ ID NO: 485661 - DNA, 120 bp, Artificial Sequence
  ENSG00000162407_22 (sequence is synthesized)
agtgtccttccatgcaaggtcccactctaggtgatagacagggaccccttctactgaacctttgaggaaaggaggaaggaagaaatgcgtttagatcttggatgcagacctttcaaaggg

SEQ ID NO: 485662 - DNA, 120 bp, Artificial Sequence
  ENSG00000162407_23 (sequence is synthesized)
ttaaatgtaaccatatggatcaaccacatgcacatccttactacagaatccgtcctttcatttcaacttatagcaagctatgatttttatatataaatattatataaataatgtataaaa

SEQ ID NO: 485663 - DNA, 120 bp, Artificial Sequence
  ENSG00000162407_24 (sequence is synthesized)
cattaaaagttaactatgtaagatattatttctgaaacaatttagctatatccactatgattataaactgtgtctcgacctgtgttatttacattagctgcttaaaaaagcattgagtta

SEQ ID NO: 485664 - DNA, 120 bp, Artificial Sequence
  ENSG00000162407_25 (sequence is synthesized)
atttttttaaatatcaactaaaatatcatagttctgtggtagacattgttttataatgaaataactgcaactagagaaaactgtataaaaacattaaattgtcagtatttttgtaaggtt

SEQ ID NO: 485665 - DNA, 120 bp, Artificial Sequence
  ENSG00000162407_26 (sequence is synthesized)
ccattttgtaaagagaataatattcaaagacttttgtagcatacaaagtgaaaacttgtatctgcgaaactatacttgtattaaatgtgctttttaaataaaagctcgtaacacaactaa

SEQ ID NO: 485666 - DNA, 120 bp, Artificial Sequence
  ENSG00000162407_27 (sequence is synthesized)
gtttagcaggcaacggcctcagtgtgatcttttttgtcagtattcttattttttcctcttaagtttttccaataatacatttttataatttcaaaatgattataaagtagtctgctgtct

SEQ ID NO: 485667 - DNA, 120 bp, Artificial Sequence
  ENSG00000162407_28 (sequence is synthesized)
tccatgtctgcttatttgaaatagtgttccacgtagttgaggattcagtcctagacacttatggctaagaatgattctgggatcttccactcttctgtctcatcaagactggccactggc

SEQ ID NO: 485668 - DNA, 120 bp, Artificial Sequence
  ENSG00000162407_29 (sequence is synthesized)
ttgctcttttcttgccaccgaaggaaggtgtccatctgtcccaggaaggacaaactcatgtcttcagcactgccacaggtctatctttaggccatcagccacctcccctccgctctcttc

SEQ ID NO: 485669 - DNA, 120 bp, Artificial Sequence
  ENSG00000162407_30 (sequence is synthesized)
ccttctcctgcctctccaagtgctttgatttgtagtcggaagttcctcttgtccacttgcctcttccccctcatttcccaagttcccacaggaacctgggaataggttgtgcccagaggt

SEQ ID NO: 485670 - DNA, 120 bp, Artificial Sequence
  ENSG00000162407_31 (sequence is synthesized)
tagaacggaaactgcagcaagataactctgaggggacaatgcccagttgacgtcatttcaactactttgcttcagctagaggtggttttttttttaatcttccatttttcttcaggttac

SEQ ID NO: 485671 - DNA, 120 bp, Artificial Sequence
  ENSG00000162407_32 (sequence is synthesized)
tcttctactccaccctgtctagtgtctgtcaacttctatttgaaaattccctggcattgtctcgttggtttattgtttccttatattctcattcaatatccatagttccaagtggtgact

SEQ ID NO: 485672 - DNA, 120 bp, Artificial Sequence
  ENSG00000162407_33 (sequence is synthesized)
tagaaatgtgtccttgatagagttgctttcttctgaagcagaagcatctcattggggatataataacttcctcttatcattgcatatttaatttccgtgctgacaccaggtagtgtaggg

SEQ ID NO: 485673 - DNA, 120 bp, Artificial Sequence
  ENSG00000162407_34 (sequence is synthesized)
attatatagccgtaatccccagggaaatacacaaatgtgttaagtaagttgtcatcaattgtaaaaaaagaaacctttacaagccctggttactgctctttaattattagtttcagtcaa

SEQ ID NO: 485674 - DNA, 120 bp, Artificial Sequence
  ENSG00000162407_35 (sequence is synthesized)
atctccctagataaactctatttttcctattttttagtgtgagaactaagactcagcatttatttatttatttacttacttacttacttatttatttttttgaggcagagtctcactctg

SEQ ID NO: 485675 - DNA, 63 bp, Artificial Sequence
  ENSG00000162407_36 (sequence is synthesized)
cacacccagataatttttgtatttttattacagatgaggtttcactatgttggccagactggt

SEQ ID NO: 485676 - DNA, 120 bp, Artificial Sequence
  ENSG00000162407_37 (sequence is synthesized)
gccaggctcagcatttaaataactggcttgaggtcatgttcaaattgctgtatctacaacatgccacccaaggtccagatgatccctgttcgtagaaatgtagtgtgtgtcacctggggt

SEQ ID NO: 485677 - DNA, 120 bp, Artificial Sequence
  ENSG00000162407_38 (sequence is synthesized)
gggcgagggggcggaccccgagccgcgaggggcgcggggcgggcgcggggtcccgggagagggcgctgggcgcttcgggcccagatcatctttcttgctgacaagtatcatctaggaatc

SEQ ID NO: 485678 - DNA, 120 bp, Artificial Sequence
  ENSG00000162407_39 (sequence is synthesized)
actctacctcgctggcaattttgagaaaatagccagttatttttgtgctgaactttcatctggttaagggtcattccttcagtagtcaagtgagtaagaaaagacctattctgcttttga

SEQ ID NO: 485679 - DNA, 120 bp, Artificial Sequence
  ENSG00000162407_40 (sequence is synthesized)
agaccagaggaacagcctcaagttcagtcggacctttctaaggaggttttgttggaattccacaagaccctagttctgaaggtaggacaaagaaggagaagagaactgcactgacagact

SEQ ID NO: 485680 - DNA, 120 bp, Artificial Sequence
  ENSG00000162408_0 (sequence is synthesized)
gaggacccagcatggcggactcgggactgctgctaaagcggggttcctgccgttccacttggctgcgggtccgcaaggcccggccccagctcatcctcagccgccggccccgccgccggc

SEQ ID NO: 485681 - DNA, 120 bp, Artificial Sequence
  ENSG00000162408_1 (sequence is synthesized)
cggctcgggagcctgcgctggtgcggtcggcggcgcctacggtggcggttactgcaagcccaggcgtccggcgtggactggagggagggagcccgccaggtgtcgcgcgcggcggcggcc

SEQ ID NO: 485682 - DNA, 120 bp, Artificial Sequence
  ENSG00000162408_2 (sequence is synthesized)
gacccaacaccgcgacccccagcccgatccctagcccgaccccggcctccgaacccgagtccgaacccgaactcgaatccgcctcgagttgccaccggcctctcctcatcccaccggtgc

SEQ ID NO: 485683 - DNA, 120 bp, Artificial Sequence
  ENSG00000162408_3 (sequence is synthesized)
ggcccgtgggccccggccgcgcgttgctgctgctgccggtcgagcagggttttacttttagtgggatctgtcgtgtgacttgcctctatggccaggtgcaggtatttggttttaccatca

SEQ ID NO: 485684 - DNA, 120 bp, Artificial Sequence
  ENSG00000162408_4 (sequence is synthesized)
gccaaggccagcctgcccaagacatcttctctgtgtatacccactcttgcttgagtatccatgcacttcactactcacagcctgagaaaagcaagaaggaactgaaaagggaagcccgga

SEQ ID NO: 485685 - DNA, 120 bp, Artificial Sequence
  ENSG00000162408_5 (sequence is synthesized)
atttgctcaaatctcatcttaaccttgatgacaggcgttggtcgatgcagaatttttctcctcagtgttccattgtgttgctagaacatctgaaaactgccactgtaaacttcataacca

SEQ ID NO: 485686 - DNA, 120 bp, Artificial Sequence
  ENSG00000162408_6 (sequence is synthesized)
gctatccgggttcatcctacatttttgtgcaagagagtccaactccccagattaaacctgaatatttagccttgaggtctgttggcatcagaagagagaaaaaaaggaaaggccttcagt

SEQ ID NO: 485687 - DNA, 120 bp, Artificial Sequence
  ENSG00000162408_7 (sequence is synthesized)
taactgagagtaccctttcagccctggaagagttagtcaatgtttcctgtgaagaagtagatggctgccctgtcattctagtttgtggatcccaggatgttggaaagtcaacatttaata

SEQ ID NO: 485688 - DNA, 120 bp, Artificial Sequence
  ENSG00000162408_8 (sequence is synthesized)
gatacctgattaaccatttgttaaatagtcttccctgcgttgactatttggaatgtgatctgggacagacagaatttacccctcctggttgcatttctttgcttaatattacagaaccag

SEQ ID NO: 485689 - DNA, 120 bp, Artificial Sequence
  ENSG00000162408_9 (sequence is synthesized)
ttctgggaccacctttcactcacctgaggactccacagaagatggtatattatgggaaaccttcttgtaaaaacaactatgagaattatattgacatagtgaaatatgtgttcagcgctt

SEQ ID NO: 485690 - DNA, 120 bp, Artificial Sequence
  ENSG00000162408_10 (sequence is synthesized)
acaagagagagtcccctctcatcgtcaacactatgggatgggtttcagaccaggggctcctgcttctcattgatctgatccgattgctgtctcccagccacgtggttcagttccgctctg

SEQ ID NO: 485691 - DNA, 120 bp, Artificial Sequence
  ENSG00000162408_11 (sequence is synthesized)
accacagtaaatatatgccagaccttaccccgcagtatgtagatgacatggatggcttgtacacaaaaagcaagaccaagatgagaaatcgacgtttcagactcgcagcatttgcagatg

SEQ ID NO: 485692 - DNA, 120 bp, Artificial Sequence
  ENSG00000162408_12 (sequence is synthesized)
ctttggaatttgctgatgaagaaaaagagagtccagttgagttcactggacataaactgataggtgtttatacagactttgcattcagaataactccaagaaatagagagtcacataaca

SEQ ID NO: 485693 - DNA, 120 bp, Artificial Sequence
  ENSG00000162408_13 (sequence is synthesized)
aaattcttcgagatctgtccatcttgagttaccttagccagctgcagcccccgatgcccaaaccactttctcctttacatagcctgacaccctatcaggtccctttcaatgcagtcgcac

SEQ ID NO: 485694 - DNA, 120 bp, Artificial Sequence
  ENSG00000162408_14 (sequence is synthesized)
tccggattacccactctgatgtcgcccctacccatatactatatgctgtaaacgccagctgggttggtctttgcaagatccaggatgacgtcagaggatacacgaatgggcccatcctgc

SEQ ID NO: 485695 - DNA, 120 bp, Artificial Sequence
  ENSG00000162408_15 (sequence is synthesized)
ttgcccagactccaatctgtgactgcttgggctttggcatctgtagaggcattgacatggagaagcggctgtaccacatcctcacccctgtgcccccggaagagctaaggaccgtgaatt

SEQ ID NO: 485696 - DNA, 120 bp, Artificial Sequence
  ENSG00000162408_16 (sequence is synthesized)
gtctgctcgttggagctattgccattccacattgtgtccttaagtgccagcgtgggatcgaagggacagtaccttatgtcacaacggattacaattttaaacttcctggagcatcagaga

SEQ ID NO: 485697 - DNA, 120 bp, Artificial Sequence
  ENSG00000162408_17 (sequence is synthesized)
aaattggagcaagagaacctgaggaggcacataaagagaaaccataccgaagacctaagttctgtcgaaaaatgaagtgatgctcgcgtttttaataagggaagaaactttcctaccaga

SEQ ID NO: 485698 - DNA, 120 bp, Artificial Sequence
  ENSG00000162408_18 (sequence is synthesized)
aagctttgtctcaagcctgaccacaagagacatgatggagtttcatggccatgaatggtgcccttattagcaacagtgttttttgtgtaattcgtgaatgtcatatagtagtcttaagtt

SEQ ID NO: 485699 - DNA, 120 bp, Artificial Sequence
  ENSG00000162408_19 (sequence is synthesized)
tctcttttaaagctgcatgagctagaatttgttctagtcttctgtgtgatactcatacttgctgtccagagggagtaaaacagcagagaacagtttgtgtgccattaaaacagagattcc

SEQ ID NO: 485700 - DNA, 120 bp, Artificial Sequence
  ENSG00000162408_20 (sequence is synthesized)
tcagaaagttcttcagggacctggttattagaatcaggataaaaataaggaaactggggccattacaatgtaccgagaaggaaggaagaaggccgacctgcaggatctcaagcataatgg

SEQ ID NO: 485701 - DNA, 120 bp, Artificial Sequence
  ENSG00000162408_21 (sequence is synthesized)
atacaagggctcgccacgggccttgcctgagccatgtgcagagctggggtccagcggtctgcttccttggagccagtgtggatggttacagcccatccatttggtgcagttgtacttggt

SEQ ID NO: 485702 - DNA, 120 bp, Artificial Sequence
  ENSG00000162408_22 (sequence is synthesized)
gatggttacagcccatccatttggtgcagttgtacttggtctgttatattcaatcaaggtttaatagatagggctgggcatggtggctcatgcacacctgtaatcctagcactttgggag

SEQ ID NO: 485703 - DNA, 120 bp, Artificial Sequence
  ENSG00000162408_23 (sequence is synthesized)
tggagtacaccaactactccagcctgagcgacagagtaagaccttatcttttaaaaaagaaaagaaaaatttaaacgggtttgatagatataaatttggacccaagagcccttccttttt

SEQ ID NO: 485704 - DNA, 120 bp, Artificial Sequence
  ENSG00000162408_24 (sequence is synthesized)
ttgatagatataaatttggacccaagagcccttccttttttttaatcctgaggttttatgctgaggaaatttctttcaaatctggaaaacctcggggccaggcgcagtggctcacgcctg

SEQ ID NO: 485705 - DNA, 120 bp, Artificial Sequence
  ENSG00000162408_25 (sequence is synthesized)
agtagatttgtccaaattgacttctgatctgaggccagagacaaccacagggcagagctggagactgggctgttttgaaggaagaaggactggcagaccagctcttgggaaagctccatt

SEQ ID NO: 485706 - DNA, 120 bp, Artificial Sequence
  ENSG00000162408_26 (sequence is synthesized)
attgcctgtgggaggctggacctgaacttgcacctatgaacaaccctgccatttagagctttttcctgggggtgccggcggctggtgaccagactgccattctccacgttctccctggtg

SEQ ID NO: 485707 - DNA, 120 bp, Artificial Sequence
  ENSG00000162408_27 (sequence is synthesized)
cttccgactctgtcctctaggttggaagtggtttgtgtaaacgggtgatgggaccaggtcacatcatttctgcatttaagacagcaggatacttcctggggctgaggttcaaactggtat

SEQ ID NO: 485708 - DNA, 120 bp, Artificial Sequence
  ENSG00000162408_28 (sequence is synthesized)
tgtgaccaccgctttgacagaattccatcttcccagcatgatcacattgtaagactattaggatgtgtgggttttaacacttatatacacttatacaactgttggttatcattgtcttta

SEQ ID NO: 485709 - DNA, 120 bp, Artificial Sequence
  ENSG00000162408_29 (sequence is synthesized)
gtattttacagtggcccctcagcacctcttagacccaacagcaaaggacttaaaataagcacaggaaaccttgctatggtgattagttttgatacctttgagacaattgagtctagcttc

SEQ ID NO: 485710 - DNA, 120 bp, Artificial Sequence
  ENSG00000162408_30 (sequence is synthesized)
ttagttgccccttatttatgttgaaatctggctcattcatatgatgttttactgtgctggccttgtaaagaattttaagacaatccatcaccatcaatgttttgcctttctccactttcg

SEQ ID NO: 485711 - DNA, 120 bp, Artificial Sequence
  ENSG00000162408_31 (sequence is synthesized)
tgtatcttacagttatactcactggaggtcatttgcagcaaggctctggaagaatgaaactggtgccctgtaattgcatttgcattcaatctaggtttgccttcaggctttaaatgcggc

SEQ ID NO: 485712 - DNA, 120 bp, Artificial Sequence
  ENSG00000162408_32 (sequence is synthesized)
ctgtatgaaggtcaagtctttttcttcagtccctatcagtaaagaaaaatcgttgcctctagagggagctatcagctgtgggtcaggtggccgtactggggctagagttggcccaggaag

SEQ ID NO: 485713 - DNA, 120 bp, Artificial Sequence
  ENSG00000162408_33 (sequence is synthesized)
ctgtacagggtttagggaaggaggttcggagacagggagccaaggcctctgtcaggtctagcttgtgccggtcagacctgcagcagcaccattctccaggatgacaattcatcccattat

SEQ ID NO: 485714 - DNA, 69 bp, Artificial Sequence
  ENSG00000162408_34 (sequence is synthesized)
tggcagtggctttaagggcatttagaagaaggacaagattggactttttatcatttccacagtctgtta

SEQ ID NO: 485715 - DNA, 120 bp, Artificial Sequence
  ENSG00000162408_35 (sequence is synthesized)
ttagaagaaggacaagattggactttttatcatttccacagtctgttatgggtcagattaggtagtaaggagttctccattggagctattcttttttttttttctttttttttgagacag

SEQ ID NO: 485716 - DNA, 74 bp, Artificial Sequence
  ENSG00000162408_36 (sequence is synthesized)
tcacccaggctggggtgcagtggcacgaccttggctcactacagcctctcccctcccgggttcaagcgccacca

SEQ ID NO: 485717 - DNA, 61 bp, Artificial Sequence
  ENSG00000162408_37 (sequence is synthesized)
atatttttagtagagatagggtttcaccgtattggctagcaatttcttttttttttttttt

SEQ ID NO: 485718 - DNA, 90 bp, Artificial Sequence
  ENSG00000162408_38 (sequence is synthesized)
ggcgtgagccactgcgcctggcctgaagctattctttacaaaagctcttaggcgacggactctctgtcgccaaggctggagtgcagtggc

SEQ ID NO: 485719 - DNA, 69 bp, Artificial Sequence
  ENSG00000162408_39 (sequence is synthesized)
ttttgtttgtttgtttgtttttttcttttgcgacggactctctgtcgccaaggctggagtgcagtggcc

SEQ ID NO: 485720 - DNA, 120 bp, Artificial Sequence
  ENSG00000162408_40 (sequence is synthesized)
aggtgttgggattacaggcataagacactgtgcctgggcctcttagtaatttttgtatgtaattttcaaagtatccgggattacaggcgcccgccactacactagctaattttttttgta

SEQ ID NO: 485721 - DNA, 120 bp, Artificial Sequence
  ENSG00000162408_41 (sequence is synthesized)
gcctaggtcatttgtttttgggtttggatggcaagatcatggataagacagcaggctttgattatagagctctgagttcaaatcctggctctaccacttgtcagtggtgtaacttggagg

SEQ ID NO: 485722 - DNA, 120 bp, Artificial Sequence
  ENSG00000162408_42 (sequence is synthesized)
aagatgcttagcctgagcctgttttatgttttgaagattgggtaattgtccttccttcagtgttcctgggtgaggagtaagtgaagtcatgtctataagagatgtagcacagtctccggc

SEQ ID NO: 485723 - DNA, 120 bp, Artificial Sequence
  ENSG00000162408_43 (sequence is synthesized)
atgtagaaacggtcagtaactcctagtgtgtagctagcctctgatgagatggtaaactcaggaggctggcaccacggctgtgctactcacggtcatgctggagggatgcagaaactaaat

SEQ ID NO: 485724 - DNA, 120 bp, Artificial Sequence
  ENSG00000162408_44 (sequence is synthesized)
gaatccacagctacttactcatcttgcctctggcaggttcaccttaaaattgttgctaccaagcttcctgtggtcaaagagcccttgaggaagcaagctccacggccaccatagataacc

SEQ ID NO: 485725 - DNA, 120 bp, Artificial Sequence
  ENSG00000162408_45 (sequence is synthesized)
cattcctgaaagtttttcataaacccccacttgttgcttttaaaattttataagcagcttacacatgtagaaaatgatcctccagcccaccaccacatagtaatcactgacactgtgagg

SEQ ID NO: 485726 - DNA, 120 bp, Artificial Sequence
  ENSG00000162408_46 (sequence is synthesized)
tgtctcagctggggttctgctgtgtgtgtgtgtattttacaaaatatgtatggtttctgttcagctcttttcagttaacagatgaacttttgtatcattaaatatttttgaaaacatgaa

SEQ ID NO: 485727 - DNA, 120 bp, Artificial Sequence
  ENSG00000162408_47 (sequence is synthesized)
tccgggttcatcctacatttttgtgcaagaggtagaacccgttttcattcagagttttgctaattacttgcaccaaaacagtgatttcaaatgactatgtaggatgttgtcttggaagaa

SEQ ID NO: 485728 - DNA, 120 bp, Artificial Sequence
  ENSG00000162408_48 (sequence is synthesized)
cagttggtctatctagtgctctcagtcctacagaatgtaatacgtgtatacggaaactattatagaaaggtgtatcgtgaaaaatgttcatcctcccctccttagtttcatacctgagcc

SEQ ID NO: 485729 - DNA, 120 bp, Artificial Sequence
  ENSG00000162408_49 (sequence is synthesized)
aaataggtaactaaccctcatttggctgaagaattatttttccttccgtcgaaaaagacctgccattctcaattcctctaaaggcctgagtcctctaagatcttcaggtccctgtcacag

SEQ ID NO: 485730 - DNA, 120 bp, Artificial Sequence
  ENSG00000162408_50 (sequence is synthesized)
ctgtgcatgcacaaagacgaaccagttgttttctgaactgttatgttcccagtggaaatatccagaagtgtcccctacctctggctgccagcaactttgacttaaaggagagtctttaca

SEQ ID NO: 485731 - DNA, 120 bp, Artificial Sequence
  ENSG00000162408_51 (sequence is synthesized)
atgtctgtccaccagacccccagaggaagattagtcataattcgagtccaaggaagacggctaattctagcgatcaatgtttgtttcccattcagaagaagtagatggctgccctgtcat

SEQ ID NO: 485732 - DNA, 120 bp, Artificial Sequence
  ENSG00000162409_0 (sequence is synthesized)
gcactgtgggtaggcggcggcggcggcggctacgcggagcggcaggcggtggagcgaggccgcgcgcgccgaagatggctgagaagcagaagcacgacgggcgggtgaagatcggacact

SEQ ID NO: 485733 - DNA, 120 bp, Artificial Sequence
  ENSG00000162409_1 (sequence is synthesized)
acgtgctgggcgacacgctgggcgtcggcaccttcggcaaagtgaagattggagaacatcaattaacaggccataaagtggcagttaaaatcttaaatagacagaagattcgcagtttag

SEQ ID NO: 485734 - DNA, 120 bp, Artificial Sequence
  ENSG00000162409_2 (sequence is synthesized)
atgttgttggaaaaataaaacgagaaattcaaaatctaaaactctttcgtcatcctcatattatcaaactataccaggtgatcagcactccaacagatttttttatggtaatggaatatg

SEQ ID NO: 485735 - DNA, 120 bp, Artificial Sequence
  ENSG00000162409_3 (sequence is synthesized)
tgtctggaggtgaattatttgactacatctgtaagcatggacgggttgaagagatggaagccaggcggctctttcagcagattctgtctgctgtggattactgtcataggcatatggttg

SEQ ID NO: 485736 - DNA, 120 bp, Artificial Sequence
  ENSG00000162409_4 (sequence is synthesized)
ttcatcgagacctgaaaccagagaatgtcctgttggatgcacacatgaatgccaagatagccgatttcggattatctaatatgatgtcagatggtgaatttctgagaactagttgcggat

SEQ ID NO: 485737 - DNA, 120 bp, Artificial Sequence
  ENSG00000162409_5 (sequence is synthesized)
ctccaaattatgcagcacctgaagtcatctcaggcagattgtatgcaggtcctgaagttgatatctggagctgtggtgttatcttgtatgctcttctttgtggcaccctcccatttgatg

SEQ ID NO: 485738 - DNA, 120 bp, Artificial Sequence
  ENSG00000162409_6 (sequence is synthesized)
atgagcatgtacctacgttatttaagaagatccgagggggtgtcttttatatcccagaatatctcaatcgttctgtcgccactctcctgatgcatatgctgcaggttgacccactgaaac

SEQ ID NO: 485739 - DNA, 120 bp, Artificial Sequence
  ENSG00000162409_7 (sequence is synthesized)
gagcaactatcaaagacataagagagcatgaatggtttaaacaagatttgcccagttacttatttcctgaagacccttcctatgatgctaacgtcattgatgatgaggctgtgaaagaag

SEQ ID NO: 485740 - DNA, 120 bp, Artificial Sequence
  ENSG00000162409_8 (sequence is synthesized)
tgtgtgaaaaatttgaatgtacagaatcagaagtaatgaacagtttatatagtggtgaccctcaagaccagcttgcagtggcttatcatcttatcattgacaatcggagaataatgaacc

SEQ ID NO: 485741 - DNA, 120 bp, Artificial Sequence
  ENSG00000162409_9 (sequence is synthesized)
aagccagtgagttctacctcgcctctagtcctccatctggttcttttatggatgatagtgccatgcatattcccccaggcctgaaacctcatccagaaaggatgccacctcttatagcag

SEQ ID NO: 485742 - DNA, 120 bp, Artificial Sequence
  ENSG00000162409_10 (sequence is synthesized)
acagccccaaagcaagatgtccattggatgcactgaatacgactaagcccaaatctttagctgtgaaaaaagccaagtggcatcttggaatccgaagtcagagcaaaccgtatgacatta

SEQ ID NO: 485743 - DNA, 120 bp, Artificial Sequence
  ENSG00000162409_11 (sequence is synthesized)
tggctgaagtttaccgagctatgaagcagctggattttgaatggaaggtagtgaatgcataccatcttcgtgtaagaagaaaaaatccagtgactggcaattacgtgaaaatgagcttac

SEQ ID NO: 485744 - DNA, 120 bp, Artificial Sequence
  ENSG00000162409_12 (sequence is synthesized)
aactttacctggttgataacaggagctatcttttggactttaaaagcattgatgatgaagtagtggagcagagatctggttcctcaacacctcagcgttcctgttctgctgctggcttac

SEQ ID NO: 485745 - DNA, 120 bp, Artificial Sequence
  ENSG00000162409_13 (sequence is synthesized)
acagaccaagatcaagttttgattccacaactgcagagagccattcactttctggctctctcactggctctttgaccggaagcacattgtcttcagtttcacctcgcctgggcagtcaca

SEQ ID NO: 485746 - DNA, 120 bp, Artificial Sequence
  ENSG00000162409_14 (sequence is synthesized)
ccatggatttttttgaaatgtgtgccagtctgattactactttagcccgttgatctgtctctagtttctttctgttattgcactatgaaaatcagttatattctttaaatttttatctta

SEQ ID NO: 485747 - DNA, 120 bp, Artificial Sequence
  ENSG00000162409_15 (sequence is synthesized)
cttttggataatatccactgcaatactaattgagaaacatgaattatttccaggggcacacaatgctattgaaattactgaaaacaaaatatctgacatcttatttacttgtagaaatct

SEQ ID NO: 485748 - DNA, 120 bp, Artificial Sequence
  ENSG00000162409_16 (sequence is synthesized)
gtaattctattgtgcctatgataaattcacataggcaatatctttaataggttaatatcaatgaagatttttaattacaataatgagttcactacagacgattaacacaccacactggcg

SEQ ID NO: 485749 - DNA, 120 bp, Artificial Sequence
  ENSG00000162409_17 (sequence is synthesized)
aaccatctcaatgtaagggtggtttggcaacacctccttgctttgctgtttggtgtaggtaaatctagtttacttcctaaatttcagtaggctttatgctgtgtttatgcccccaattta

SEQ ID NO: 485750 - DNA, 120 bp, Artificial Sequence
  ENSG00000162409_18 (sequence is synthesized)
ttttaacaaaagaagattaaaaagtaaaagaaccacgagtaagatattatttaaatgttgaaatcttaaaaacctgcctccaagatttcagaagccaagtttttctaacagtatttgtac

SEQ ID NO: 485751 - DNA, 120 bp, Artificial Sequence
  ENSG00000162409_19 (sequence is synthesized)
aaatactgcctagtgtattcaacagaaggactgtggtcatgtaacaggtaaccacaattttcaggtttcttaaaaacagctgtaactaactcaggatttttatcttgagatttccctgaa

SEQ ID NO: 485752 - DNA, 120 bp, Artificial Sequence
  ENSG00000162409_20 (sequence is synthesized)
taatatatttatcttaagagccttcaagtttcaaattaatattggaacatctggaattgcaacaacttttgtcttttacataaacttacgtcatttaaaaaatgtcttcaaaatctacct

SEQ ID NO: 485753 - DNA, 120 bp, Artificial Sequence
  ENSG00000162409_21 (sequence is synthesized)
ttctcaaattctttttgcctctatttatttttgcatttcaccaacagtgataaaatagttaaatgaaacaaagcaaagtatcaacagtcccttaaatgagaatccttatctttgatcttt

SEQ ID NO: 485754 - DNA, 120 bp, Artificial Sequence
  ENSG00000162409_22 (sequence is synthesized)
attttctgtgttaggtgttagggtcctggtgcagctcataatgctaattcttcattggaagccactcccttcacctcacctcacctagtcactattgtctttgttcattgtttgatcctg

SEQ ID NO: 485755 - DNA, 120 bp, Artificial Sequence
  ENSG00000162409_23 (sequence is synthesized)
agtggttgattgatatagctttgaatcttttctagtccaagtttgaaaacactgttctggccctaagggctggctatgacctttactgttgaacctgatagggcagggaagctttgaaca

SEQ ID NO: 485756 - DNA, 120 bp, Artificial Sequence
  ENSG00000162409_24 (sequence is synthesized)
tcaagaaaaaatttttatcttaaataaataaatatatatattcacacaccagtgcttttaagcaaaaaccagtttttttgtttgtttgttttgctttgtgcaggttttctttaagattaa

SEQ ID NO: 485757 - DNA, 120 bp, Artificial Sequence
  ENSG00000162409_25 (sequence is synthesized)
gctttgtgcaggttttctttaagattaaaaaaacacaaactatagcagggtagataatagtttattgattatattttgttttagtaaaagtatttaattttaaattctgtgtaatttatc

SEQ ID NO: 485758 - DNA, 120 bp, Artificial Sequence
  ENSG00000162409_26 (sequence is synthesized)
tatgttgtaattaacacttatttacctggattaccctaaaaaaattaagctcttgaaaacaaaaaaatgacattaccttgacaggcttctctttgccaaaagtaatgtatgttctgccaa

SEQ ID NO: 485759 - DNA, 120 bp, Artificial Sequence
  ENSG00000162409_27 (sequence is synthesized)
gaagcaaatgagaatgttagactaagtttctcctgtgttagtggaaaacaagtgtgtctatctttaaatattctttgaatcaggagtttgcgttgtgtcacatcatatggctttgcagat

SEQ ID NO: 485760 - DNA, 120 bp, Artificial Sequence
  ENSG00000162409_28 (sequence is synthesized)
cttttaaaaactgatgttaaataacttataagtccaacttcttaatatcaagataaatgaatagttcaccaatttgggaaggagggcgggttgcaatttgagatagtttaaggtttaatt

SEQ ID NO: 485761 - DNA, 120 bp, Artificial Sequence
  ENSG00000162409_29 (sequence is synthesized)
attgaaagactgccatcttgtggcaccaaaaggtaatttttacatgattatttgtatagtgataagcagtcctgctgtgttagcctggtccattatagatatggcatagttttgggttct

SEQ ID NO: 485762 - DNA, 120 bp, Artificial Sequence
  ENSG00000162409_30 (sequence is synthesized)
ctaaatgggtccatacctcttttgggaaaaaacagggccacctcataatatttgcctgattatgaatggaattaccttagaaataaggaactaatcagattacttaaccccaatgacaaa

SEQ ID NO: 485763 - DNA, 120 bp, Artificial Sequence
  ENSG00000162409_31 (sequence is synthesized)
atccacaaaaattttgaaggcagagaaacagaaggaatccagtgatgttttagctccattagtctaataggtcagatattaaaaaattgttcatatcaaaattaccttatatggattatt

SEQ ID NO: 485764 - DNA, 120 bp, Artificial Sequence
  ENSG00000162409_32 (sequence is synthesized)
gccatgttttttgagagttaattatttactgttttctaattcttgccagtatttatgaacagctgtagcttgatatttacctactgaattttaggagaactaatggtcacagtttgggtt

SEQ ID NO: 485765 - DNA, 120 bp, Artificial Sequence
  ENSG00000162409_33 (sequence is synthesized)
cttttatgtgtatgtttttaaaacagctattttgtgaatctaggtggttggtttttagaagatttcaggagatgcagtccagcacaattagagctggaacattgttacagcaggcttttt

SEQ ID NO: 485766 - DNA, 120 bp, Artificial Sequence
  ENSG00000162409_34 (sequence is synthesized)
gttgctcatgggcagatagagggaaagaatcagttgttagccccaaatttccacatttcagtgttgtaaactctgaatgtgataggtagatgtgggctaagaataatttcctccagtgaa

SEQ ID NO: 485767 - DNA, 120 bp, Artificial Sequence
  ENSG00000162409_35 (sequence is synthesized)
gacacgggagaagagcttctattatgaggttatagataaggccttagttatatcatggaaatggactccatgtagttctagaactgcatttcccaaagtatatcctgtgagatgctccac

SEQ ID NO: 485768 - DNA, 120 bp, Artificial Sequence
  ENSG00000162409_36 (sequence is synthesized)
agaaaaaatgattgcatggactaagtttgaaaaatgttgcatgctactcttcccctcgaagatgacagtggatgtcagcattaaagactttgacaggtctttctgtgaaaaaaagaaagc

SEQ ID NO: 485769 - DNA, 120 bp, Artificial Sequence
  ENSG00000162409_37 (sequence is synthesized)
cacataactttgttgaactttgcccaaattaatttttcattttaaaaaacttaatagcccatgaaaagcaaatttgggaaatacattttttaggaaaatactgtcccagaatgccataat

SEQ ID NO: 485770 - DNA, 120 bp, Artificial Sequence
  ENSG00000162409_38 (sequence is synthesized)
ggattaaatagaattttctgtgtctgcaacttgtttcatgacaccttggttttcttaatcatcttgtattattatttgagtgcaacattattcttatgcatgggtgactgaaaaacctga

SEQ ID NO: 485771 - DNA, 120 bp, Artificial Sequence
  ENSG00000162409_39 (sequence is synthesized)
aacaagattacttgttaaaaaaaagtctaagagactaatgactcatgcttatggctcagtgggtaatgaatcagtgtcactgattcttacttttaaaatgtgtagtcagtgaacattttc

SEQ ID NO: 485772 - DNA, 120 bp, Artificial Sequence
  ENSG00000162409_40 (sequence is synthesized)
taaatacttttctttgggataccatatgaagatctaattccttatgtttcagtgtaggaacagctaccttctcaaatagaatatgcagggagggaagtaggcaaaccatttacaagttgg

SEQ ID NO: 485773 - DNA, 120 bp, Artificial Sequence
  ENSG00000162409_41 (sequence is synthesized)
gtttttgttttgattaacctgttaagagacacttttgtaatctctagtgtttacattcctttatactagctatctataaagagaatccagaaggctaaattaatcagaaataattatatt

SEQ ID NO: 485774 - DNA, 120 bp, Artificial Sequence
  ENSG00000162409_42 (sequence is synthesized)
tctatgtcagggtattggctatatgtagcatgaacaattctccattttctgcaaatgggtttttcaggacagttttataattctgagtttgctttttcttattccctagacagtttgtac

SEQ ID NO: 485775 - DNA, 120 bp, Artificial Sequence
  ENSG00000162409_43 (sequence is synthesized)
tcagggaatacaaattgatttttactgttaaatgagacatagtttagaaaaaatcataagcaactattgtagatttttgatctgtttggatttatctgtagcattgaataatgtgcagtg

SEQ ID NO: 485776 - DNA, 120 bp, Artificial Sequence
  ENSG00000162409_44 (sequence is synthesized)
tactgagttaatgtaggcacctcactttggatttataaaatgtaaaaacctggaacatgcctgccacagacaccactttgtctattcaccgggtactaatttacatcctattaatggttg

SEQ ID NO: 485777 - DNA, 120 bp, Artificial Sequence
  ENSG00000162409_45 (sequence is synthesized)
taaaagctgagtgtctaaatgctagacatgttcacaattttgtctgtttttgtttatttgtttttaagacccaaaccttttcaatcttgcatttatttacttggttctcctgtgtcaccc

SEQ ID NO: 485778 - DNA, 120 bp, Artificial Sequence
  ENSG00000162409_46 (sequence is synthesized)
tgtggctttttaaatagggaatgtaatttattttaatagtagttctcaaagactctattaaaaactctggacgagggatatgtgcaatctgttggtaagtcacatcctatgtttggcctc

SEQ ID NO: 485779 - DNA, 120 bp, Artificial Sequence
  ENSG00000162409_47 (sequence is synthesized)
atttttataactcctaaaatgagaaaggtagattttaacacttctaaggtacctttgagctttaaagttcttttctgcttttccatatgatttgtgttagtgttcactttttatatattt

SEQ ID NO: 485780 - DNA, 120 bp, Artificial Sequence
  ENSG00000162409_48 (sequence is synthesized)
agagtttttatatgagtgtgaatgtttctgttttgatttggtgaggcatgtcagaggtatatacttgaatatttttctaaatacagctgctggaggaatgcaaatggcaaaaatcatcca

SEQ ID NO: 485781 - DNA, 120 bp, Artificial Sequence
  ENSG00000162409_49 (sequence is synthesized)
gaaaaccaaacacggtgaaacatcacatccatttggcatgaagcaaagcattacaaatttggagtgatgaaagtgttccatatattttttatagtgatttttcgatctagagacccttca

SEQ ID NO: 485782 - DNA, 120 bp, Artificial Sequence
  ENSG00000162409_50 (sequence is synthesized)
tattgtttacttactattacgataactttgagaggtaaccagagaaagcatttttgccatttccagatgaggaagcaggaccagaaagctcttcataaagctttaacaccatacaagtat

SEQ ID NO: 485783 - DNA, 120 bp, Artificial Sequence
  ENSG00000162409_51 (sequence is synthesized)
ccagcagtgatcaattgctctttataggaaaccacctttcctctggggaagaacagtctgaattaataaaacatcagagtggttgagtagtaaaaataaacacagatgtattgctttcaa

SEQ ID NO: 485784 - DNA, 120 bp, Artificial Sequence
  ENSG00000162409_52 (sequence is synthesized)
gtcttagagtgacataaagtagtcttaaataaatagttcttagtttattttaagcagttgattgtactaacgagatgtaattatctgaagtatttatgattagcatattggtttttataa

SEQ ID NO: 485785 - DNA, 120 bp, Artificial Sequence
  ENSG00000162409_53 (sequence is synthesized)
gtatttctgagttattgagggtgcttaaaaatgctgaagaaactttaaaacatgattcttcttataattttatgtgattcttatagcacaatcatttttgaaaaaggaaaactaggctgg

SEQ ID NO: 485786 - DNA, 120 bp, Artificial Sequence
  ENSG00000162409_54 (sequence is synthesized)
atcccagctactcgggaggctgaggcacgggaatctcttgaacctgggaggcagagattgcaataagccaagatcatgccactgcatgccagcctgggtgacagcacaagactgtctcaa

SEQ ID NO: 485787 - DNA, 120 bp, Artificial Sequence
  ENSG00000162409_55 (sequence is synthesized)
aaaaaaacaaaaaaaggaaaaagaaaactagccccagtccctgtctaaattgttatagtttttgactattatctgaattagtcttatccaaatttcatatgcagattgatttttcatttt

SEQ ID NO: 485788 - DNA, 120 bp, Artificial Sequence
  ENSG00000162409_56 (sequence is synthesized)
caaatttcatatgcagattgatttttcattttgtatgtatattacatgatataactattttcatagaatatatttctaatttacaaacactgaattattagcttgatagagtttctccca

SEQ ID NO: 485789 - DNA, 120 bp, Artificial Sequence
  ENSG00000162409_57 (sequence is synthesized)
cccaaaccttataaaactttgaaatgtacttatgtttgagctttaaaaattataaaaacttcatttaaacaagttgctggcatcattactagcctttccacctataattatgatgcattt

SEQ ID NO: 485790 - DNA, 120 bp, Artificial Sequence
  ENSG00000162409_58 (sequence is synthesized)
gatgccactgaacagtaatagcacaaagaacaggtcacacagtctagactggattgagttttaattaaacttcttcatccatagcctgataagaatcaggctgggtctagaagagttatc

SEQ ID NO: 485791 - DNA, 120 bp, Artificial Sequence
  ENSG00000162409_59 (sequence is synthesized)
agactgtaggcctgtattaattttgcaagctaatgttaatgtttactgccagccttgcatagcaatgccagtttgcagttgtgactatgatgtgacttttggtaaaaatggtttatatct

SEQ ID NO: 485792 - DNA, 120 bp, Artificial Sequence
  ENSG00000162409_60 (sequence is synthesized)
aaagtagtttagattttatggaagtggctcttgattgtttggacaagcagggtaggtaaatttcaattacgtttgaagtgtaattaaatcctagaatagagcactctccagaaaaaaaaa

SEQ ID NO: 485793 - DNA, 120 bp, Artificial Sequence
  ENSG00000162409_61 (sequence is synthesized)
tgaaaaaagaatttggagaatatcctggcatgaaaacttttttgaataatacgtagaattttgacaaggttcatacagtgcatacagtgtgaccttttctgaggtgggcagggagggttg

SEQ ID NO: 485794 - DNA, 120 bp, Artificial Sequence
  ENSG00000162409_62 (sequence is synthesized)
ctacgttgtgttgatttaaaatttcaaggaggaacaaaaacattctagccaaggagaattgcattgttatttttttttctactaatttaaacgtgcatttttcacagttacacatttaag

SEQ ID NO: 485795 - DNA, 120 bp, Artificial Sequence
  ENSG00000162409_63 (sequence is synthesized)
ttcacagttacacatttaagttttgctaccaaaaatggccatttttctagacagataacattttcctaaagtggaagagagatccactgttctaaaaaaaaaaaaaaaaaaaaacactaa

SEQ ID NO: 485796 - DNA, 120 bp, Artificial Sequence
  ENSG00000162409_64 (sequence is synthesized)
ttataagaagagtaatagtaaaaacttgtttaaactatattttctttttttctaatccctctcagttctccttagatctgcctcctacaaatgatcatgttgtttgcatctgcctgattg

SEQ ID NO: 485797 - DNA, 120 bp, Artificial Sequence
  ENSG00000162409_65 (sequence is synthesized)
agttcccttggtcaaacctctccctatcactatcagaagttgttcactaaatgtattttcctatttctttcatgttgattgactttataagtcaccttggtaaacataacatttggctac

SEQ ID NO: 485798 - DNA, 120 bp, Artificial Sequence
  ENSG00000162409_66 (sequence is synthesized)
cttctcatgctttataaatgaatttgatgaatggcagtttttatattttaaccctttaaaaagtttgtcaaggaaacaactcagagctaagaacaaaatctaacttggaatcagtttctt

SEQ ID NO: 485799 - DNA, 120 bp, Artificial Sequence
  ENSG00000162409_67 (sequence is synthesized)
cctttggctgctgaagcagcagcaagtcacgtaacctcatttagttttttgatttacaaaatgtggataataacctacctcacagatgtgtgtgagcaactgtttgaaagcccttgttta

SEQ ID NO: 485800 - DNA, 120 bp, Artificial Sequence
  ENSG00000162409_68 (sequence is synthesized)
aatacagggtttatatccccacattcaatgtaaattcctttttttaaaaaaaataagtatctttgatactgataggatgagtatcttgatttttaggtaagatcacagtttcacaaattg

SEQ ID NO: 485801 - DNA, 120 bp, Artificial Sequence
  ENSG00000162409_69 (sequence is synthesized)
tggtgttgttaggtgacatttaatatttcttgagacctcaagtattcaaatatcaaacttgtcctgtgttgtaacaaatattcagaatctcttaaaatgttggctgaagctgccttaatg

SEQ ID NO: 485802 - DNA, 120 bp, Artificial Sequence
  ENSG00000162409_70 (sequence is synthesized)
taccaaaatacagctctcaagactgttcacaaatatctgtggttgtacaatgttttgaacatttaatgtaaagttgttgtagaactgtgaactctaaggatagtatctttattgttttag

SEQ ID NO: 485803 - DNA, 120 bp, Artificial Sequence
  ENSG00000162409_71 (sequence is synthesized)
gaagaatggttgtgttctttgtcatgtatgcttaaatatacagtggattttgaatgcaacaaataaaactgaaaacagccatttggttgtgtcatgacaatcataatataggatataata

SEQ ID NO: 485804 - DNA, 120 bp, Artificial Sequence
  ENSG00000162409_72 (sequence is synthesized)
tttactttttttcaaaaacatcctgcattcattcattcttagcatacctttgaaaaagaaaaaaaaatccataggttgatacattgacccattgaagtacttcattacgtatttattgaa

SEQ ID NO: 485805 - DNA, 120 bp, Artificial Sequence
  ENSG00000162409_73 (sequence is synthesized)
aattttttttaattgttgaaattgggaccactttttataattggtttcaagaaaaaaaaatgaacagacttccagtgcttttctgttcaaataaactccgattcaaatttcagttttgtt

SEQ ID NO: 485806 - DNA, 120 bp, Artificial Sequence
  ENSG00000162409_74 (sequence is synthesized)
tgttatatactttttgtgagtgttaaatgatatgggaaggatttgtctttcattaaccatatggaaaagatgtcttcctgaattacatagcatttcatagttacagattcttcctaatta

SEQ ID NO: 485807 - DNA, 120 bp, Artificial Sequence
  ENSG00000162409_75 (sequence is synthesized)
atgtttgcaccatatgaaactcataggtaacaaacacaaaggagaaaagcagcctgtctgattgcttataagcttttttcacaaaatcaaattaaaagtctctgattcatttgaaagcta

SEQ ID NO: 485808 - DNA, 120 bp, Artificial Sequence
  ENSG00000162409_76 (sequence is synthesized)
atggctgagaagcagaagcacgacgggcgggtgaagatcggacactacgtgctgggcgacacgctgggcgtcggcaccttcggcaaattgaatattggagaacatcaattaacaggccat

SEQ ID NO: 485809 - DNA, 120 bp, Artificial Sequence
  ENSG00000162413_0 (sequence is synthesized)
gtctctccgcaggccccggccgcggcgtcctcgacaacctatcgaaggcgccatggagcgaccggcgcccctggccgtgcttcccttctcggaccccgcgcacgccctgagcctgctgcg

SEQ ID NO: 485810 - DNA, 120 bp, Artificial Sequence
  ENSG00000162413_1 (sequence is synthesized)
cggcctgagccagctgcgcgccgagcgcaagttcctggacgtgaccctggaggcggcgggcgggcgcgacttcccggcgcaccgtgcggtgctggccgccgccagcccctacttccgcgc

SEQ ID NO: 485811 - DNA, 120 bp, Artificial Sequence
  ENSG00000162413_2 (sequence is synthesized)
catgttcgcggggcagctgcgcgagagccgcgccgagcgggtgcgcctgcacggagtgcctcccgacatgctgcagctgctgctggacttcagctacacgggccgcgtggcggtaagcgg

SEQ ID NO: 485812 - DNA, 120 bp, Artificial Sequence
  ENSG00000162413_3 (sequence is synthesized)
cgacaacgctgagccgctgctgcgcgccgccgacctgctgcagttcccggccgtgaaggaggcgtgcggggccttcctgcagcagcagctcgacctggccaactgcctggacatgcagga

SEQ ID NO: 485813 - DNA, 120 bp, Artificial Sequence
  ENSG00000162413_4 (sequence is synthesized)
cttcgctgaggccttcagctgctcgggactggcgagcgcggcgcagcggttcattctgcgccacgtgggcgagctgggcgccgagcagctggagcggctgccactggcgcgcctgctgcg

SEQ ID NO: 485814 - DNA, 120 bp, Artificial Sequence
  ENSG00000162413_5 (sequence is synthesized)
ctacctgcgggacgacgggctgtgtgtgcccaaggaggaggccgcctaccagctggcgctgcgctgggtccgcgctgacccgccgcgccgcgccgcgcactggccgcagctgctggaggc

SEQ ID NO: 485815 - DNA, 120 bp, Artificial Sequence
  ENSG00000162413_6 (sequence is synthesized)
cgtgcgcctgcccttcgtgcgccgcttctacctgttggcgcacgtcgaggccgagccgctggtggcgcgctgcccaccctgcctgcgcctgctgcgcgaggcgcgcgacttccaggcggc

SEQ ID NO: 485816 - DNA, 120 bp, Artificial Sequence
  ENSG00000162413_7 (sequence is synthesized)
gcgctacgaccgccacgaccgcgggccctgtccccgaatgcgtcctcgcccgtccaccggtctcgccgagatcctcgtgctcgtgggcggctgcgaccaggactgtgacgagctggtcac

SEQ ID NO: 485817 - DNA, 120 bp, Artificial Sequence
  ENSG00000162413_8 (sequence is synthesized)
tgtcgactgctacaacccgcagacgggtcagtggcgctacctggccgagttcccagaccacctgggcggaggctacagcatcgtggcgctgggcaatgacatctacgtgacgggtgggtc

SEQ ID NO: 485818 - DNA, 120 bp, Artificial Sequence
  ENSG00000162413_9 (sequence is synthesized)
cgatggctcccggctctatgactgcgtgtggaggtacaactcaagcgtgaatgagtgggcggaggtggcgcccatgctgaaggcccgcgagtaccacagctcctctgtgctggacggact

SEQ ID NO: 485819 - DNA, 120 bp, Artificial Sequence
  ENSG00000162413_10 (sequence is synthesized)
gctgtacgtggtggccgccgacagcaccgagcgctatgaccacaccactgactcctgggaggccctgcagcccatgacctaccccatggacaactgctccaccactgcgtgccgtggccg

SEQ ID NO: 485820 - DNA, 120 bp, Artificial Sequence
  ENSG00000162413_11 (sequence is synthesized)
gctctatgccatcggctccctggctggcaaggagaccatggtgatgcagtgctacgacccggacaccgacctgtggtcgctggtggactgcggccagctcccgccctggtccttcgcccc

SEQ ID NO: 485821 - DNA, 120 bp, Artificial Sequence
  ENSG00000162413_12 (sequence is synthesized)
caagactgcgactctaaacggactcatgtactttgtcagggatgactccgctgaggtggacgtgtacaacccgacgaggaacgaatgggacaagatcccgtccatgaatcaggtacatgt

SEQ ID NO: 485822 - DNA, 120 bp, Artificial Sequence
  ENSG00000162413_13 (sequence is synthesized)
ggggggcagcctggccgtccttggggggaagctgtacgtctctgggggatacgacaatacatttgaactctcggacgtggtagaggcctatgacccagagactcgcgcgtggagcgtggt

SEQ ID NO: 485823 - DNA, 120 bp, Artificial Sequence
  ENSG00000162413_14 (sequence is synthesized)
ggggcggctcccagaacccaccttctggcatggcagtgtcagcatcttccgccagttcatgccccagaccttctcgggtgggcgtggcttcgagttggacagtggcagcgatgacatgga

SEQ ID NO: 485824 - DNA, 120 bp, Artificial Sequence
  ENSG00000162413_15 (sequence is synthesized)
cccaggccgaccccggccgccgcgggaccccgatgagctgcactagccccagtctggcccggcacgggcctcggtgcaggtaactggcacctctgcggggcagtgccccactcctttgtg

SEQ ID NO: 485825 - DNA, 120 bp, Artificial Sequence
  ENSG00000162413_16 (sequence is synthesized)
cacaaggacacgttgggctcacaggaggagcacaggctcttgggtggcgaagccagcccaggatccattacctggaaggtttctgtaccttgagagcctgaatcagaggccgtcgggaac

SEQ ID NO: 485826 - DNA, 120 bp, Artificial Sequence
  ENSG00000162413_17 (sequence is synthesized)
gccctccctgcagttgaggaagagccactttcctgccagcacatgtttctgggtcttggaggtcacccccaccccgcggatcacagctcacccacgcggcgcacacccctcctgccgttg

SEQ ID NO: 485827 - DNA, 120 bp, Artificial Sequence
  ENSG00000162413_18 (sequence is synthesized)
gagggacgcgtgaagggagaaggggtcctcccatgaggctgaggatggcctgaacctggagcagcggaccaggcagacgggctgaagtggggtcccaaattccatgtccagaggtgtggg

SEQ ID NO: 485828 - DNA, 120 bp, Artificial Sequence
  ENSG00000162413_19 (sequence is synthesized)
gagcctgcctccctagctcctggcccctgccaggggcttacatcaaaacacctcagagggctgccctccagaggctgcacccagaacagtgggacatgagcaggggtgtgggcttggagg

SEQ ID NO: 485829 - DNA, 120 bp, Artificial Sequence
  ENSG00000162413_20 (sequence is synthesized)
gtgaagaggatgtggtcctatcagatgctgggcctcctcagccatagccccctgctcctaccccctgactggctcttgcgtcctcacctctcaccctctccttcccgggaggccctggga

SEQ ID NO: 485830 - DNA, 120 bp, Artificial Sequence
  ENSG00000162413_21 (sequence is synthesized)
ggtgatcattgacacccagccaagcagacagctgcgggtgcccaagcccttgctgggcctgcgcgtgaggagtcccactgcttctaaaggaagtcctgggcaggaggtggctttggtggt

SEQ ID NO: 485831 - DNA, 120 bp, Artificial Sequence
  ENSG00000162413_22 (sequence is synthesized)
tggttccaaagttgaaaatgcttgcagtttgaccttagaagaagtgggaagaagaaggagctctacagggtcagctttgtttgatttgtccagtctaagaagtcccattgccaaagcttt

SEQ ID NO: 485832 - DNA, 120 bp, Artificial Sequence
  ENSG00000162413_23 (sequence is synthesized)
ctgcaggagggtgaatgccgcagcttggcagcccctgggtttctcttggaaatggtcagtttcccctcaaagtacccaaagtagccttggcttgagtttttgtccttgcctcctttttag

SEQ ID NO: 485833 - DNA, 120 bp, Artificial Sequence
  ENSG00000162413_24 (sequence is synthesized)
agaagagggcatttagactgcattttcctggttaaagaaggttaaagcaaatgtttattgccttttctagtgaactaactcgtagagatgttctcagcaggaagacagtcttagcactgt

SEQ ID NO: 485834 - DNA, 120 bp, Artificial Sequence
  ENSG00000162413_25 (sequence is synthesized)
cacttagcagattgcacttaagtcccttgtgctggccagatggcgtggctggttgccttaatatgtcccaggacccctgacagggctgcctggcctctccctcgtgctcctcaagagccc

SEQ ID NO: 485835 - DNA, 120 bp, Artificial Sequence
  ENSG00000162413_26 (sequence is synthesized)
agtccatacactgtggatgtcattgctgtcgggttaggaagtcttgtcctagaacgccctggctggtatgaccacagttcatggcggctcttctcgcttgggtcatggtcatcttccagc

SEQ ID NO: 485836 - DNA, 120 bp, Artificial Sequence
  ENSG00000162413_27 (sequence is synthesized)
acctgctgtgctgggaaggccgaggatgggggcccagcactgtccaggcctgctggggcctggctgggagtcctgtgggcagcatggaacatgcagctgggcttcctgtgaccaggcacc

SEQ ID NO: 485837 - DNA, 120 bp, Artificial Sequence
  ENSG00000162413_28 (sequence is synthesized)
ctctggcactgttgcttgccctgtgccctggaccttttcctgcccttctccttcctctgctcccttggggctaccccttggcccctcctggtctgtgcaaactccctcagggagcccccc

SEQ ID NO: 485838 - DNA, 120 bp, Artificial Sequence
  ENSG00000162413_29 (sequence is synthesized)
tgccctgtagctctcgcttaacttcctaggggctgctgagcccacccagaggttgttggagttcagcggggcagcttgtctcccttgtcagcaggggcgtaagggctgggtttggccata

SEQ ID NO: 485839 - DNA, 120 bp, Artificial Sequence
  ENSG00000162413_30 (sequence is synthesized)
caaggttggctacgccctcaatccctgaccgttccaggcactgagctgggcacccacggaaggacatgctgtccagactgtgatgactgccagcacagggcatctcgggcttggctggtc

SEQ ID NO: 485840 - DNA, 120 bp, Artificial Sequence
  ENSG00000162413_31 (sequence is synthesized)
tgcgaggccttgcccctgtggaactctgggttcctgttttctcagtcttttttgcggctttgctgtggttggcagctgccgtactccaggcttgtgtcggccactcagatgagggctgtg

SEQ ID NO: 485841 - DNA, 120 bp, Artificial Sequence
  ENSG00000162413_32 (sequence is synthesized)
gtgcgagccagtgcaggagagctgcgcttgggattgtgccctctcctgtgtctgtcctccggacctacccaggtctccaccatcaggaccctgtctttgggtttagaagaccaagtatgg

SEQ ID NO: 485842 - DNA, 120 bp, Artificial Sequence
  ENSG00000162413_33 (sequence is synthesized)
ggaaaaccaggcaccagcctctgcagcaatgggtccctctagcctgtggacaccagctgggggatccagggtcaggccccctcctctccccagtttccctctgctgtgggttctgggctg

SEQ ID NO: 485843 - DNA, 120 bp, Artificial Sequence
  ENSG00000162413_34 (sequence is synthesized)
tcatgtctccaccacttaaggatgtctttacactgacttcaggatagatgctgggatgcctgggcatggccacatgttacatgtacagaactttgtctacagcacaaattaagttatata

SEQ ID NO: 485844 - DNA, 120 bp, Artificial Sequence
  ENSG00000162413_35 (sequence is synthesized)
aacacagtgactggtatttaatgctgatctactataaggtattctatatttatatgacttcagagacgcgtatgtaataaaggacgccctccctccagtgtccacatccagttcacccca

SEQ ID NO: 485845 - DNA, 120 bp, Artificial Sequence
  ENSG00000162413_36 (sequence is synthesized)
gagggtcgggcaggttgacatatttatttttgtctattctgtaggcttccatgtccagaatcctgcttaaggttttagggtaccttcagtactttttgcaataaaagtatttcctatcca

SEQ ID NO: 485846 - DNA, 120 bp, Artificial Sequence
  ENSG00000162413_37 (sequence is synthesized)
gagcagccgggggcctcgggagccgaccccggtccgaggggggcctaaaactcctcgagagcaaccggagccaggggcgggcggcggctcggaccgcgtccccgggggcggggaaagagt

SEQ ID NO: 485847 - DNA, 120 bp, Artificial Sequence
  ENSG00000162413_38 (sequence is synthesized)
ctctcgtggagtccgagcagctgcttcagggaggcccgggagcccctagggcgggcagccccggagcctgcagctgcgacgcagactcggaaactacaactgcgcgtgaagccgactaaa

SEQ ID NO: 485848 - DNA, 120 bp, Artificial Sequence
  ENSG00000162413_39 (sequence is synthesized)
gttaacgcctgtgtgattgagtcagaagctccttcaggaacacaggagtggggccgactcctggaatccggccccgggtcgcttataaatgcgccaagaaaaaaacgtcacccagtaatt

SEQ ID NO: 485849 - DNA, 120 bp, Artificial Sequence
  ENSG00000162413_40 (sequence is synthesized)
ttttttctcatatgtagatacaaaaggatattcttaaaatttttatagagacagggtcttgctgtgttacccaggctggtctcacactcctggcctcaagtgaccctcctgtctcagcct

SEQ ID NO: 485850 - DNA, 85 bp, Artificial Sequence
  ENSG00000162413_41 (sequence is synthesized)
accaccacgcccagctggttcctgaggaagtcagtgtgggaatactttttttttttttatacggagtctcgctctgtcacccagg

SEQ ID NO: 485851 - DNA, 120 bp, Artificial Sequence
  ENSG00000162413_42 (sequence is synthesized)
tgcccagcccactgtgggaatacttgtgttgagcacttgctgtgtgttctgaataggacaaccagggtccaccccttctctctgggcttgttgagaagaggggtgcccagcctgacagtg

SEQ ID NO: 485852 - DNA, 120 bp, Artificial Sequence
  ENSG00000162413_43 (sequence is synthesized)
atgggacagggaggcttcagtgccatttggccatgtgagcagtgttagtctgaggtacacatcatattgcctacagccttctttcctgtgtgtctgttaacatttccaaacctacactcc

SEQ ID NO: 485853 - DNA, 120 bp, Artificial Sequence
  ENSG00000162413_44 (sequence is synthesized)
tcacagcttaatgtcctggcatttaagagacccagcgttctgttttccccgcagtaagctgcacatagtcatagcgaatttgggaaagatggaaggaatcatccagcctcgcggttcaga

SEQ ID NO: 485854 - DNA, 120 bp, Artificial Sequence
  ENSG00000162413_45 (sequence is synthesized)
gcccagctctgccactgtcagccatgcaagcctcagttttcccatctgtaacatggggagaacagcactgctcagcccagagggccactgcagagattctgagagagaacgtaggaagcg

SEQ ID NO: 485855 - DNA, 120 bp, Artificial Sequence
  ENSG00000162413_46 (sequence is synthesized)
ctgctcggcacgacctgcacacggggaggcctggcgctgcagcgggcaccctcatcaccatagggaaggcccagctgcctccggggaggcccgttctcctaggcagggtgttggaaaggg

SEQ ID NO: 485856 - DNA, 120 bp, Artificial Sequence
  ENSG00000162413_47 (sequence is synthesized)
gttggcctctctgctgctttctgggagagccaaggccacccctctggggtactgacagggcatgccttgtctccagtggttccccaggtggggccctgccctaccctctcctctgacctc

SEQ ID NO: 485857 - DNA, 120 bp, Artificial Sequence
  ENSG00000162413_48 (sequence is synthesized)
cgcgctcgcggggggcggtggcgcccggcacagaggggttaagggggcggtgcagacgtctccccgcccatcccgcccctcgagagccgcggcgccccgccctatttatagcagcggtgc

SEQ ID NO: 485858 - DNA, 120 bp, Artificial Sequence
  ENSG00000162413_49 (sequence is synthesized)
ttaatagaaggctgctcttacccttattttgcacttaaggctcactgagacacagatgttaagtaataccctatgattacacagcttagtacacatttgagcagtgtttattgagtatct

SEQ ID NO: 485859 - DNA, 120 bp, Artificial Sequence
  ENSG00000162413_50 (sequence is synthesized)
gctgtgagccagagagcagaaggaagtgagggagcaaggcatacagtcatctggggacacctgttccagagagggacagcaggtacagaggccctgcagcagggcaccctggcgtgttct

SEQ ID NO: 485860 - DNA, 120 bp, Artificial Sequence
  ENSG00000162413_51 (sequence is synthesized)
aggccctgcagcagggcaccctggcgtgttcttagatacaccagcagcccatgtggccggagcagagtcagcatgaggtctgtgacctaccttttttatttttgagacagggtcttgctc

SEQ ID NO: 485861 - DNA, 80 bp, Artificial Sequence
  ENSG00000162415_0 (sequence is synthesized)
gtcttcgcgtccgcggcggccaggacaccgcgcgccgcctcacgctaccctgcaggccgcccgcgtctgccctcgcggcg

SEQ ID NO: 485862 - DNA, 120 bp, Artificial Sequence
  ENSG00000162415_1 (sequence is synthesized)
ccccctcggcgccaccgctgggcgcttgcgcggggcgcgtggccgtggccagggtctccgccgcagcccgagcagccgccgccgcctcagtcagtcagtcagtccccagcaatggcggac

SEQ ID NO: 485863 - DNA, 120 bp, Artificial Sequence
  ENSG00000162415_2 (sequence is synthesized)
agtcagtccccagcaatggcggacggaggtgagcgagaggagctgctctcgccgtcaccggtctctccggctaagcggcagtgttcgtggcccagcccgcaggctcatcaccctcgcggt

SEQ ID NO: 485864 - DNA, 120 bp, Artificial Sequence
  ENSG00000162415_3 (sequence is synthesized)
tcgcctggggcagccggcggaggggcagggggcgtcggcagcagctgcctggtcctcggggcccgcccccacctgcagccggattccttactggactgcgccgccaagacggtggcggaa

SEQ ID NO: 485865 - DNA, 120 bp, Artificial Sequence
  ENSG00000162415_4 (sequence is synthesized)
aagtgggcatacgaacgggtggaggagcgcttcgagcggatcccggagcccgtgcagcgccgcatcgtctactggtccttcccgcggaatgagcgggagatctgcatgtactccagcttc

SEQ ID NO: 485866 - DNA, 120 bp, Artificial Sequence
  ENSG00000162415_5 (sequence is synthesized)
cggaatgagcgggagatctgcatgtactccagcttccagtaccggggcggccccggcgccggcgctgctggcggcgccgcgggggcttcgccggccgaggaggggccgcagccacccccc

SEQ ID NO: 485867 - DNA, 120 bp, Artificial Sequence
  ENSG00000162415_6 (sequence is synthesized)
gcatcccccgggctgggcgcaggggccggcgcggccggctgcggtggcgaggggctcccgttccgccggggcatccgtctgctggacagcggctccgtggagaacgtgctgcaagtcggc

SEQ ID NO: 485868 - DNA, 120 bp, Artificial Sequence
  ENSG00000162415_7 (sequence is synthesized)
ctgcaagtcggctttcatctgagtggcacagtaactgagctggccactgcctctgaaccagcagtgacttataaagttgcaatcagttttgatcgatgcaaaatcacctcagtgacatgt

SEQ ID NO: 485869 - DNA, 120 bp, Artificial Sequence
  ENSG00000162415_8 (sequence is synthesized)
ggctgtgggaacaaggacatattctactgtgcccatgtggtagcactctcactctacaggatccgtaaaccagaccaagtcaaattgcgtcttcctatctccgaaacccttttccagatg

SEQ ID NO: 485870 - DNA, 120 bp, Artificial Sequence
  ENSG00000162415_9 (sequence is synthesized)
aatagggaccagctacaaaagtttattcaatatttaatcacggcacaccacactgaagttcttcctactgcacagaaactggcagatgagattctatcctccaactcagaaatcaaccaa

SEQ ID NO: 485871 - DNA, 120 bp, Artificial Sequence
  ENSG00000162415_10 (sequence is synthesized)
gtgaatggtgcccctgaccccacagctggggccagcattgacgatgagaactgttggcatttggatgaagaacaggtgaaagaacaagtgaagctttttctctcccagggcggttactgt

SEQ ID NO: 485872 - DNA, 120 bp, Artificial Sequence
  ENSG00000162415_11 (sequence is synthesized)
ggctctggaaagcaactcaactcaatgtttgccaaggttcgagaaatgctgcggatgagagattccaatggagcaaggatgctgacactaataactgagcagtttgtggctgacccacga

SEQ ID NO: 485873 - DNA, 120 bp, Artificial Sequence
  ENSG00000162415_12 (sequence is synthesized)
ctcacactctggaggcagcaaggaacaaacatgacagacaagtgcaggcagctctgggatgagctaggggctttatgggtgtgcataattttaaatccacactgcaaactggaggagaaa

SEQ ID NO: 485874 - DNA, 120 bp, Artificial Sequence
  ENSG00000162415_13 (sequence is synthesized)
tcctgctggctgcagcagctgcagaagtggagcgacctggatgtctgtcccctggaggatggaaactatggacatgagctgcccaacatcaccaatgcacttccccagagtgccattcac

SEQ ID NO: 485875 - DNA, 120 bp, Artificial Sequence
  ENSG00000162415_14 (sequence is synthesized)
agcccagactccttatccagaccaagacgaacagtattcactagagccattgaggggcgtgaattacattggcaggatagccacctacagcgaataatcagcagtgatgtttatacagct

SEQ ID NO: 485876 - DNA, 120 bp, Artificial Sequence
  ENSG00000162415_15 (sequence is synthesized)
cctgcctgccagcgggaaagtgaaagactactctttaattcccaaggccagccactgtggcttgagcatgtgcctacagcctgtgctcgagttgacgccctgcgttcccatggttatcca

SEQ ID NO: 485877 - DNA, 120 bp, Artificial Sequence
  ENSG00000162415_16 (sequence is synthesized)
aaagaggccctcagactcacagtggccattattaatactctgaggttgcagcagcagcggcaactggaaatctacaagcatcagaagaaagaactgttgcagagaggaaccacaaccatc

SEQ ID NO: 485878 - DNA, 120 bp, Artificial Sequence
  ENSG00000162415_17 (sequence is synthesized)
acaaacctggagggctgggtgggccaccccctggatcccatcgactgcctgtttctcactttgactgaggcctgccgcctgaatgatgatggctatctggagatgtcagatatgaatgaa

SEQ ID NO: 485879 - DNA, 120 bp, Artificial Sequence
  ENSG00000162415_18 (sequence is synthesized)
agcagaccccctgtgtaccagcatgtacctgtggctgcaggctccccaaacagcagtgagtcctacctgtcattggccctggaagttgcactgatgggcctgggtcaacagaggttaatg

SEQ ID NO: 485880 - DNA, 120 bp, Artificial Sequence
  ENSG00000162415_19 (sequence is synthesized)
cctgaaggcctctacgcacaggacaaggtatgccgtaatgaggagcagctcctgagccaactccaagagctgcagctggacgatgagctagtgcaaacactgcaaaaacaatgcatctta

SEQ ID NO: 485881 - DNA, 120 bp, Artificial Sequence
  ENSG00000162415_20 (sequence is synthesized)
ctgctggaaggaggtcctttcagcggtctgggagaagtcatccaccgagagagtgttcccatgcatacctttgccaagtatttgttctcagctctgctgcctcatgatccagacctgtcc

SEQ ID NO: 485882 - DNA, 120 bp, Artificial Sequence
  ENSG00000162415_21 (sequence is synthesized)
tataaattagccttacgtgccatgaggttacctgttttagaaaactcagcttctgcaggcgacacatcccaccctcaccatatggtgtctgtggtgcccagccgttatcctcgctggttc

SEQ ID NO: 485883 - DNA, 120 bp, Artificial Sequence
  ENSG00000162415_22 (sequence is synthesized)
acgcttggacacttggaatcacagcagtgtgaactggcctccaccatgctgactgctgccaaaggagacactttgagactccgaacaattctggaagcaatacagaagcacattcattct

SEQ ID NO: 485884 - DNA, 120 bp, Artificial Sequence
  ENSG00000162415_23 (sequence is synthesized)
tcctccctcatcttcaaactggcccaagatgcattcaagattgctactcccaccgacagtagtactgacagcaccctgctcaacgttgccctggaacttgggttacaggtgatgcggatg

SEQ ID NO: 485885 - DNA, 120 bp, Artificial Sequence
  ENSG00000162415_24 (sequence is synthesized)
acactcttcacccctactgaggctactagtattgtagctgccacagccgtatcccacaccactatcctgcgcctcagtcttgactatccacagcgggaggaactggctagctgtgctcgc

SEQ ID NO: 485886 - DNA, 120 bp, Artificial Sequence
  ENSG00000162415_25 (sequence is synthesized)
acactggctctacagtgtgctatgaaggatccacagagctgtgccctgtcagcccttacactctgtgagaaagaccacattgcctttgaggcagcctaccagattgccattgatgctgct

SEQ ID NO: 485887 - DNA, 120 bp, Artificial Sequence
  ENSG00000162415_26 (sequence is synthesized)
gctggtggtatgacccattcacagctgttcaccatcgcccgctacatggagctccgtggctacccgctacgtgccttcaagctggcctcattggccatgagccatcttaacctggcctac

SEQ ID NO: 485888 - DNA, 120 bp, Artificial Sequence
  ENSG00000162415_27 (sequence is synthesized)
aaccaggatactcacccagccatcaatgatgtgctctgggcttgtgctctcagccactctctgggcaagaatgagctggcagctctcatccccctggtggtgaagagtgtgcactgtgcc

SEQ ID NO: 485889 - DNA, 120 bp, Artificial Sequence
  ENSG00000162415_28 (sequence is synthesized)
acagtgctttcagacatcttacgacgctgcacagtgactgcacctggcctggccggcatcccaggccgccgaagctctggaaagctcatgtccactgacaaagctccattgcgccagttg

SEQ ID NO: 485890 - DNA, 120 bp, Artificial Sequence
  ENSG00000162415_29 (sequence is synthesized)
ctggatgccaccatcaatgcctatatcaacactacacactcacgcctaacacacatcagccctcgccactatggagagttcattgagtttctaagcaaggctcgggagaccttcctgctg

SEQ ID NO: 485891 - DNA, 120 bp, Artificial Sequence
  ENSG00000162415_30 (sequence is synthesized)
ccccaggatggccacctgcagtttgcccagttcatcgacaacctcaaacagatctacaaaggcaagaaaaagttgatgctgctggtgcgagagcgctttggctgagagagcagatagctc

SEQ ID NO: 485892 - DNA, 120 bp, Artificial Sequence
  ENSG00000162415_31 (sequence is synthesized)
actgccagagcagcctgggttcccaggtagtatcaggtcaggccaagggcactgaaacatttgtccaccctgagagaactctgagcacctgtggatgaggccaaaggaccacagggctaa

SEQ ID NO: 485893 - DNA, 120 bp, Artificial Sequence
  ENSG00000162415_32 (sequence is synthesized)
ggatggggaaagtccagctctagtcgataatgcctaccttggcaagcttctgactacagcctactgttcatggaggagctgggccctgcagatcgaccagaaaccccacaacatgccacc

SEQ ID NO: 485894 - DNA, 120 bp, Artificial Sequence
  ENSG00000162415_33 (sequence is synthesized)
tcatgcccctatatcctgcgtgtcctgagcattggccctgtctcccttggcaaacacagaacactgttccatctcagggattgcttaaccagagaaacagacacatttgtgggactgtaa

SEQ ID NO: 485895 - DNA, 120 bp, Artificial Sequence
  ENSG00000162415_34 (sequence is synthesized)
atactatatgtgttgctaattattgtaaacttgtaactatttataattctgcttctgatttgatgggcacttgaagtagctgtgggtaggaggatatgcttattttctgaggagactcac

SEQ ID NO: 485896 - DNA, 120 bp, Artificial Sequence
  ENSG00000162415_35 (sequence is synthesized)
aaccatttctcaggtttcccttgcagagtgtttgctggtagcagtggaagagtgggggtgccaaggagaaaaatggccagttaggatcaacccaagtctagtctatgcagaatcccccac

SEQ ID NO: 485897 - DNA, 120 bp, Artificial Sequence
  ENSG00000162415_36 (sequence is synthesized)
ctacagacagggcatttatagtccagtggtgagtgagggacagaggccaggactggacttagacttttgcctcacaaaactgtgaggacattgaagctcctgcctcacacagcctcttca

SEQ ID NO: 485898 - DNA, 120 bp, Artificial Sequence
  ENSG00000162415_37 (sequence is synthesized)
ggagcctgctgaacacctgagaaacaagtgcagggagaagatgaaggtctgggaagccgctgagttcataatattcatctactgtggtcacctttgtgttagcaagtgtgtggtttcatc

SEQ ID NO: 485899 - DNA, 120 bp, Artificial Sequence
  ENSG00000162415_38 (sequence is synthesized)
tataattgtgtgtgtgtatctttatggctaagtacatgtgtgtatgtacatagatacatctgtgcatgcctgtttgtgcacatatatatttatgtgtatgtgtcagttctatggctgtgt

SEQ ID NO: 485900 - DNA, 120 bp, Artificial Sequence
  ENSG00000162415_39 (sequence is synthesized)
acctgtttgaatatgtgcacactggactgtgagtttctacgtgaggatatacacattttgtgtacatgtgaggatgcacatctttgtgcaaatgcactcatgtttgtgcatgtttagtat

SEQ ID NO: 485901 - DNA, 120 bp, Artificial Sequence
  ENSG00000162415_40 (sequence is synthesized)
gtgtatctgcgtacacgagtgcatgtgtataaacatgtttgtatccatgtgtatgcttgttatccatgcatctgtgtctttatatgtgtaactgagcgtatttctacatgtagggatgtc

SEQ ID NO: 485902 - DNA, 120 bp, Artificial Sequence
  ENSG00000162415_41 (sequence is synthesized)
tgtgtattcatgtttgaggatctgcatcaatgtgtcctttttgccagatttctctttcccattcctcttaaatctctctcgccagctaaacgtttgttccccatctctgtgcctcctcta

SEQ ID NO: 485903 - DNA, 120 bp, Artificial Sequence
  ENSG00000162415_42 (sequence is synthesized)
ttcattctctcaccaaacaagcttctaagcaccaatctccctctgccatcagattggctgctttagctccatagttctcttctcgcctcatacttgctttcttcccctgcctttctacct

SEQ ID NO: 485904 - DNA, 120 bp, Artificial Sequence
  ENSG00000162415_43 (sequence is synthesized)
caagcttcctcgccggcttttgtcacagtctcattgctcgctgacttggaggctagggctggtctgcacttagcctctcccttcctaatttctagccctagtgggcagtcctgtcttagc

SEQ ID NO: 485905 - DNA, 120 bp, Artificial Sequence
  ENSG00000162415_44 (sequence is synthesized)
cctggctgacctccatagtgtatcatgttcctgctaccttcctgacccctgtgctcagcctggaattgttataggaggtagcaagggcactcagaaaagtcagttggaaccagtgtcttg

SEQ ID NO: 485906 - DNA, 120 bp, Artificial Sequence
  ENSG00000162415_45 (sequence is synthesized)
gtgtttactgtttcatgtcttagttcctgagttgggggtggggtttgatagggaaggggtggtatagctagaatgtgaactaagaacttctccatctgctttactttttctttcttcgac

SEQ ID NO: 485907 - DNA, 120 bp, Artificial Sequence
  ENSG00000162415_46 (sequence is synthesized)
aaactgtcaccttttttactccaaactgaccaagaagttgtatttgccatttgtggctactcaagtcttactgtccagccaagggcccctacgtctcagcccaatgggttggttaaaaaa

SEQ ID NO: 485908 - DNA, 120 bp, Artificial Sequence
  ENSG00000162415_47 (sequence is synthesized)
aagagagaagccactctcatttctgtatcacagttgcccttttttagcaagtgtgtgaattcacagtgcttttctatgaataaatcatggatcacataaaagatcatttttctaaaagca

SEQ ID NO: 485909 - DNA, 120 bp, Artificial Sequence
  ENSG00000162415_48 (sequence is synthesized)
ctgaacaagaattaggatccttaaacaacaacttcagactggaacaaagcaacaacaacaaaaaaaccaacaatatgatcactgagcgctctaatgccgccaggtcagcagaggcggagg

SEQ ID NO: 485910 - DNA, 120 bp, Artificial Sequence
  ENSG00000162419_0 (sequence is synthesized)
gcgcatgctccgtcgcctgcccgccctggccgctcgccgcccgcccgcccgacggagacgcagtcccagctatctgacttcatgtgaaagatggctaatgcagaagtgagtgtcccagtg

SEQ ID NO: 485911 - DNA, 120 bp, Artificial Sequence
  ENSG00000162419_1 (sequence is synthesized)
ggggatgtggttgtggtacctactgaaggaaatgaaggggagaatcctgaagacactaaaacccaagtgattttgcagttacagcctgtgcaacaaggtttgtttatcgatggacacttt

SEQ ID NO: 485912 - DNA, 120 bp, Artificial Sequence
  ENSG00000162419_2 (sequence is synthesized)
tacaacaggatttatgaagctgggtcggagaacaacacggcagttgtagcagtagaaactcacacgatacacaaaattgaagaagggattgatacaggcactatagaagcaaatgaggat

SEQ ID NO: 485913 - DNA, 120 bp, Artificial Sequence
  ENSG00000162419_3 (sequence is synthesized)
atggaaattgcttaccccataacttgtggggagagcaaagccatcctcctctggaagaagtttgtatgtccaggaataaacgtgaagtgtgtcaagttcaatgatcagttgatcagcccc

SEQ ID NO: 485914 - DNA, 120 bp, Artificial Sequence
  ENSG00000162419_4 (sequence is synthesized)
aagcactttgttcatctggctggcaagtccactctgaaggactggaagagagctattcgtctgggtgggatcatgctcaggaaaatgatggactccggacagattgatttttaccaacat

SEQ ID NO: 485915 - DNA, 120 bp, Artificial Sequence
  ENSG00000162419_5 (sequence is synthesized)
gacaaagtttgctccaatacctgcagaagcaccaaatttgatcttctgatcagcagtgcaagagctccagtgccaggacagcagacaagtgtggtgcagacacccacttcggctgatggt

SEQ ID NO: 485916 - DNA, 120 bp, Artificial Sequence
  ENSG00000162419_6 (sequence is synthesized)
agcatcacgcagattgccatctcagaagagagcatggaagaggcagggctggaatggaactcagctctcaccgctgctgtcaccatggccacggaggagggtgtaaagaaagactcagag

SEQ ID NO: 485917 - DNA, 120 bp, Artificial Sequence
  ENSG00000162419_7 (sequence is synthesized)
agcagcggctcatccaggctcccttccaagtcacagatgctgctgttctcaacaatgtagcacacacatttggcctaatggacacagtcaagaaggttttagacaacagaaggaaccaag

SEQ ID NO: 485918 - DNA, 120 bp, Artificial Sequence
  ENSG00000162419_8 (sequence is synthesized)
tagagcagggagaagaacagtttctctatactctgacagacttggaacgccagttggaggagcagaagaagcaaggccaggatcacaggctgaaatctcagacagttcaaaatgtggtac

SEQ ID NO: 485919 - DNA, 120 bp, Artificial Sequence
  ENSG00000162419_9 (sequence is synthesized)
tgatgcctgtgagcactcctaagcctccaaaaaggccccggctccagcggccagcctccaccactgtcttgagcccttctcctcctgtccagcagcctcagttcacagtcatctcaccca

SEQ ID NO: 485920 - DNA, 120 bp, Artificial Sequence
  ENSG00000162419_10 (sequence is synthesized)
tcaccatcaccccagtgggtcagtcattttccatgggcaatattccagtggccaccctcagccagggctccagtcctgtgactgtccacacactgccttctggccctcagctcttccgct

SEQ ID NO: 485921 - DNA, 120 bp, Artificial Sequence
  ENSG00000162419_11 (sequence is synthesized)
atgccacagtggtctcctctgccaagagcagctcaccagacacagtgaccatccacccttcatctagcttggcgctgctgagctctactgccatgcaggatgggagtacactgggcaaca

SEQ ID NO: 485922 - DNA, 120 bp, Artificial Sequence
  ENSG00000162419_12 (sequence is synthesized)
tgaccaccatggttagccctgtggaattggtggccatggagtccggcctaacctcggcaattcaggctgttgaaagcacctcagaggatgggcagaccatcattgagattgatccagccc

SEQ ID NO: 485923 - DNA, 120 bp, Artificial Sequence
  ENSG00000162419_13 (sequence is synthesized)
cggacccagaagctgaagatactgagggcaaagcagtcatcttggagacagagctgaggactgaggagaaagttgtggctgagatggaagaacaccagcatcaagttcacaatgtggaga

SEQ ID NO: 485924 - DNA, 120 bp, Artificial Sequence
  ENSG00000162419_14 (sequence is synthesized)
ttgtggtcttagaggattaactggggatctcagggccaggagttatgttttgatttggaattttaattatttgtttatttttatcattgtcccactcatttccacataggaccctttttt

SEQ ID NO: 485925 - DNA, 120 bp, Artificial Sequence
  ENSG00000162419_15 (sequence is synthesized)
tcattcaatgtcctaatcatcttacaccaagaaagtaatttcttttaggggaagtgtcaagataacaagtaaccctgtccagaaagccatttccaggctcgtctgtgtgtgtaggcatgt

SEQ ID NO: 485926 - DNA, 120 bp, Artificial Sequence
  ENSG00000162419_16 (sequence is synthesized)
ggttttattcttgtaaagatgcattgaccaaactctggaacacagatctgacactggaaggcaacccactcgcatgtggatgctgaagggcactttattttgtatcctgaaaagggccta

SEQ ID NO: 485927 - DNA, 120 bp, Artificial Sequence
  ENSG00000162419_17 (sequence is synthesized)
cagaggccagtacaaaactctcaaacaaaaggaagttgactctgctttgaggggaaggtggcatgccagcactagcttaaaaagggaagtgctagccgggcgtggtggctcacgcctgca

SEQ ID NO: 485928 - DNA, 120 bp, Artificial Sequence
  ENSG00000162419_18 (sequence is synthesized)
tctcaaaaaaaaaaaaaaaaaaaagtgctttggcaagtatggggcagggaaatcatcttacttccagaggtgcaactgacgcctctggagatctccaaaagttagtaccgtgagtgccat

SEQ ID NO: 485929 - DNA, 120 bp, Artificial Sequence
  ENSG00000162419_19 (sequence is synthesized)
gtaccgtgagtgccattttgagaagaaggtggtaataagtggaaggtacatctccacagagcaagtggcagcagtggcctgtggttttgcagaaatggaaagccaaggccgggtgcggtg

SEQ ID NO: 485930 - DNA, 120 bp, Artificial Sequence
  ENSG00000162419_20 (sequence is synthesized)
atggaaagccaaggatgctgcagctgtgctttggggttcaaggtaatagcttaccttgttccacactttgtcaaagcactcaccctcctaagctaggaccagtccattcatttgaaactg

SEQ ID NO: 485931 - DNA, 120 bp, Artificial Sequence
  ENSG00000162419_21 (sequence is synthesized)
tgcaatgtgatgtaaatggctctggttcttagactgtggctgtcacagggatggggctccaaggccatcattttcattgcatggctccaagagcagggagttcctcaatgaaaccagctg

SEQ ID NO: 485932 - DNA, 120 bp, Artificial Sequence
  ENSG00000162419_22 (sequence is synthesized)
ccttttttggtggggccatttttttggctttggaacccaaagcagccactcatttggtgcttcctcttgttctgccctccatccctcaactcttaatggcatctgtctcctagaacccac

SEQ ID NO: 485933 - DNA, 120 bp, Artificial Sequence
  ENSG00000162419_23 (sequence is synthesized)
gctcttcagctttttggctgatttggagaacagtgacaggtgcctgcctgccttcgtccccttttagattcatttataccacagatgtttctgtgagatactgagatcataaaaagcttt

SEQ ID NO: 485934 - DNA, 120 bp, Artificial Sequence
  ENSG00000162419_24 (sequence is synthesized)
aggcttggcagagaggactcaacacccccaggctttcctgaggcaccaactagatgtctcttgagtgagctggactccctgggaaagaagcattgtctgcaacattatattataggaaat

SEQ ID NO: 485935 - DNA, 120 bp, Artificial Sequence
  ENSG00000162419_25 (sequence is synthesized)
gtaccaggaatgtcaataataatgctttgggggggggggttattttgttttgttttgtttttaatgttgtttgtatatttagagctgggccattttccgtgctgcgatttcttctctttg

SEQ ID NO: 485936 - DNA, 120 bp, Artificial Sequence
  ENSG00000162419_26 (sequence is synthesized)
accctcttcagtgtttggggcaagagtggaccctggtttttatttctttgattgcattgtttactgcactaggaaaaatatagagatacagggaaactacagacaaatttaaggaaaaat

SEQ ID NO: 485937 - DNA, 120 bp, Artificial Sequence
  ENSG00000162419_27 (sequence is synthesized)
aggtcaaaaaagaaagcacacaccttaagagtgggaggaatatttttattaaaaacaaaacttggacctgtagtttttttttttcttttttatttttaagaaggcacctttcagaagcca

SEQ ID NO: 485938 - DNA, 120 bp, Artificial Sequence
  ENSG00000162419_28 (sequence is synthesized)
tgtttcttccaacagatgttggaaaccccatcgagcaagtaaaagttgcattctccatccctcagatggctgtatgtagtcaaagaaaccctgtaacatggtaaggttgctgtttttttt

SEQ ID NO: 485939 - DNA, 120 bp, Artificial Sequence
  ENSG00000162419_29 (sequence is synthesized)
aggcatgagccaccgcacccagcctgaaggtgactcttaagaatgagatttatgaactccatacagttgtagatttcagtttttaaatagtctggggttttatttttcttttcaaaatat

SEQ ID NO: 485940 - DNA, 120 bp, Artificial Sequence
  ENSG00000162419_30 (sequence is synthesized)
agtctggggttttatttttcttttcaaaatatctaatagacttagcaatcaatttagaacaaatatttggcccttaatatatctttagtgagggaagtagcttttatttcctgcttgttt

SEQ ID NO: 485941 - DNA, 120 bp, Artificial Sequence
  ENSG00000162419_31 (sequence is synthesized)
aggttttctgttggtacataaaaacaaaattgctgtctcagactgaatctacttgaatctaggaaggcacatctcatccctattgtggtttttagggacacttttctctttcccagagat

SEQ ID NO: 485942 - DNA, 120 bp, Artificial Sequence
  ENSG00000162419_32 (sequence is synthesized)
gagaggaccaattcaggacagaagagccctcgtgaataccaacgtgctagctcaggttcccttctttcctccatcagagctattggtagggttttaaggtcgtgtgtgcatcatgcttcc

SEQ ID NO: 485943 - DNA, 120 bp, Artificial Sequence
  ENSG00000162419_33 (sequence is synthesized)
aatgtcaagagatttcctcaaacagcctgtttactagatgaattttccagctggtgaaatacatgagctttgttgttttcctggtcttccaatagcctgtcattattgttagatattatg

SEQ ID NO: 485944 - DNA, 120 bp, Artificial Sequence
  ENSG00000162419_34 (sequence is synthesized)
gcacctgttgttgaatgtaggttcccttacagccctggtctagatgatcctagatggggtgagacatatgcaagccattggtatgtgcataagcagttgcaatgaaccttaggctgactt

SEQ ID NO: 485945 - DNA, 120 bp, Artificial Sequence
  ENSG00000162419_35 (sequence is synthesized)
ggtagtaggcatttgtctttctgttcatgcattgaataaacatttttaagaaccatctatgtgccaggctttgtgctaggcactgacagtagagagatgaagacatagtccttgcactta

SEQ ID NO: 485946 - DNA, 120 bp, Artificial Sequence
  ENSG00000162419_36 (sequence is synthesized)
aggaattcatactccagatgtctggagttaagaaatacatatttcagccaggcatggtggctcacacctagaatcccagcactttcagaagctgaggcagaattgcttgaggccaagagt

SEQ ID NO: 485947 - DNA, 120 bp, Artificial Sequence
  ENSG00000162419_37 (sequence is synthesized)
ttaagactagcctggtcaacatagccagaccccatctctataaaaaaatgtaaaaattagtcaagtcttgtggctcgcacttgtagacacaattactcaggatgctgaggcaagaggatt

SEQ ID NO: 485948 - DNA, 120 bp, Artificial Sequence
  ENSG00000162419_38 (sequence is synthesized)
ttgcttgggcctaggagttcaaggctgtagtgagctatgactttgccactgtactctagcccaggtaacagggcaacatccccagctcagaaaaccaaaactacacatttcattataatt

SEQ ID NO: 485949 - DNA, 120 bp, Artificial Sequence
  ENSG00000162419_39 (sequence is synthesized)
gtttttttttgtaattttatgtattttatgcattgaaaaacattatttaagaattggttcataggtttcagcagactgccaaaggcacaaacaagcagctctcctttactgaggtactga

SEQ ID NO: 485950 - DNA, 120 bp, Artificial Sequence
  ENSG00000162419_40 (sequence is synthesized)
aacagatcctactgcgtaagtgctgtgtgtgatagggctattggctaggagctgagagaacaaagcatgaagtgcctaacccagcttagcggtgtagaggtggggtcagcaaataaggga

SEQ ID NO: 485951 - DNA, 120 bp, Artificial Sequence
  ENSG00000162419_41 (sequence is synthesized)
gatcttcctggagaaggcatatacctaagctgatttaggagagaccacttttggctaggtttattgtactacttgattttcaagtaattgggcttatttattctagagaaaaagtcttca

SEQ ID NO: 485952 - DNA, 120 bp, Artificial Sequence
  ENSG00000162419_42 (sequence is synthesized)
gtctcttgcttctgcctgcaaagcaaggcagagtcagcaacatgggcagtctccccactggagaacgctgagtcatgcatgggcttctccaagtttccatcagatgggatccagtgttga

SEQ ID NO: 485953 - DNA, 120 bp, Artificial Sequence
  ENSG00000162419_43 (sequence is synthesized)
atccagtgcaggactggagtctagctggcaaagggtaaatgcccccaaagccttcctgccatatggtttccacgaaggcctgagagtcagctgtacaactgtcttgtcttggccatgtcc

SEQ ID NO: 485954 - DNA, 120 bp, Artificial Sequence
  ENSG00000162419_44 (sequence is synthesized)
ctgtttggtccctgccttgttctcttccctttctcaatttccaagctccacccactcctaaaaacaccagtcattctgaagtaaaaaatggacaataaacatgaatattcaagattcaaa

SEQ ID NO: 485955 - DNA, 120 bp, Artificial Sequence
  ENSG00000162426_0 (sequence is synthesized)
tttatacatgaagacacgaaaatgtatttatttcttttaaaatcagaagaaaacggtgagaactgtgaggccggggggacgttttcctccgggatcctggcagatcctgcagaccgcgcc

SEQ ID NO: 485956 - DNA, 120 bp, Artificial Sequence
  ENSG00000162426_1 (sequence is synthesized)
cagatcctgcagaccgcgccgtcgtgcgcgaagcaccgggacgggcctcccgcgggaagggcccaggaggacaccgggctcccctcccgcccgcggggccccagacgcggcgccgcttta

SEQ ID NO: 485957 - DNA, 120 bp, Artificial Sequence
  ENSG00000162426_2 (sequence is synthesized)
atgcggaggctgcggccgtgacgtcagcgccccgccccgggtgatgctgcagcagccgggaccgcggccgggcaggcagcagcccagcggggacagggatgcctgccgtctccacccaca

SEQ ID NO: 485958 - DNA, 120 bp, Artificial Sequence
  ENSG00000162426_3 (sequence is synthesized)
gggacgcccaccagccctccccacgatgatccccgcagccagcagcaccccgccgggagatgccctcttccccagcgtggccccacaggacttctggaggtcccaggtcacgggctactc

SEQ ID NO: 485959 - DNA, 120 bp, Artificial Sequence
  ENSG00000162426_4 (sequence is synthesized)
ggggtccgtgacacgacacctcagtcaccgggccaacaacttcaaacgacaccccaagaggaggaagtgcattcgtccctccccacccccgccccccaacaccccgtgcccgcttgagct

SEQ ID NO: 485960 - DNA, 120 bp, Artificial Sequence
  ENSG00000162426_5 (sequence is synthesized)
ggtggacttcggggacctgcacccccagaggtccttccgggagctgcttttcaacggctgcattctctttggcatcgagttcagctacgccatggagacggcgtacgtgaccccggtgct

SEQ ID NO: 485961 - DNA, 120 bp, Artificial Sequence
  ENSG00000162426_6 (sequence is synthesized)
cctgcagatgggcctgcccgaccagctctacagcctggtgtggttcatcagccccatcctcggattcctactgcagcctctgttgggtgcttggagtgaccggtgtacctcaaggtttgg

SEQ ID NO: 485962 - DNA, 120 bp, Artificial Sequence
  ENSG00000162426_7 (sequence is synthesized)
aaggagacgccctttcattcttgtcctggctataggggcactgctgggcctctcgctcttgctgaatggccgggacattggcatcgccctggctgacgtgaccgggaaccacaagtgggg

SEQ ID NO: 485963 - DNA, 120 bp, Artificial Sequence
  ENSG00000162426_8 (sequence is synthesized)
cctgctgctgaccgtgtgcggtgtggtgctgatggactttagcgccgactcggcggacaaccccagccacgcctacatgatggacgtgtgcagccccgcagaccaggaccgaggcctgaa

SEQ ID NO: 485964 - DNA, 120 bp, Artificial Sequence
  ENSG00000162426_9 (sequence is synthesized)
catccacgccctcctggcaggtctcggaggaggctttggatacgtggtcggcggaatccactgggataaaacgggcttcgggagggccctggggggacagctccgagtcatttacctctt

SEQ ID NO: 485965 - DNA, 120 bp, Artificial Sequence
  ENSG00000162426_10 (sequence is synthesized)
cactgcggtcaccctgagcgtcaccaccgtcctgaccctggtcagcatccctgagaggccgctgcggccgccgagtgagaagcgggcagccatgaagagccccagcctcccgctgccccc

SEQ ID NO: 485966 - DNA, 120 bp, Artificial Sequence
  ENSG00000162426_11 (sequence is synthesized)
aggccctggcgacagcctcccgtcgcacacggccaccaacttctccagccccatctcgccgcccagccccctcacgcccaagtacggcagcttcatcagcagggacagctccctgacggg

SEQ ID NO: 485967 - DNA, 120 bp, Artificial Sequence
  ENSG00000162426_12 (sequence is synthesized)
catcagcgagttcgcctcatcctttggcacggccaacatagacagcgtcctcattgactgcttcacgggcggccacgacagctacctggccatccctggcagcgtccccaggccgcccat

SEQ ID NO: 485968 - DNA, 120 bp, Artificial Sequence
  ENSG00000162426_13 (sequence is synthesized)
cagcgtcagcttcccccgggcccccgacggcttctaccgccaggaccgtggacttctggagggcagagagggtgccctgacctccggctgtgacggggacattctgagggtgggctcctt

SEQ ID NO: 485969 - DNA, 120 bp, Artificial Sequence
  ENSG00000162426_14 (sequence is synthesized)
ggacacctctaagccgaggtcatcagggattctgaagagacctcagaccttggccatcccggacgcagccggaggagggggtcccgaaaccagcaggagaaggaatgtgaccttcagtca

SEQ ID NO: 485970 - DNA, 120 bp, Artificial Sequence
  ENSG00000162426_15 (sequence is synthesized)
gcaggtggccaatatcctgctcaacggcgtgaagtatgagagcgagctgacgggctccagcgagcgcgcggagcagcctctgtccgtggggcgcctctgctccaccatctgcaacatgcc

SEQ ID NO: 485971 - DNA, 120 bp, Artificial Sequence
  ENSG00000162426_16 (sequence is synthesized)
caaggcgctacgcaccctctgcgtcaaccacttcctggggtggctctcattcgaggggatgttgctcttctacacagacttcatgggcgaggtggtgtttcagggggaccccaaggcccc

SEQ ID NO: 485972 - DNA, 120 bp, Artificial Sequence
  ENSG00000162426_17 (sequence is synthesized)
gcacacatcagaggcgtatcagaagtacaacagcggcgtgaccatgggctgctggggcatgtgtatctacgccttcagtgctgccttctactcagctatcctggagaagctggaggagtt

SEQ ID NO: 485973 - DNA, 120 bp, Artificial Sequence
  ENSG00000162426_18 (sequence is synthesized)
cctcagcgtccgcaccctctacttcatcgcctatctcgccttcggcctggggaccgggcttgccaccctctccaggaacctctacgtggtcctgtcgctctgcataacctacgggatttt

SEQ ID NO: 485974 - DNA, 120 bp, Artificial Sequence
  ENSG00000162426_19 (sequence is synthesized)
attttccaccctgtgcaccttgccttactcgctgctctgcgattactatcagagtaagaagtttgcagggtccagtgcggacggcacccggcggggcatgggcgtggacatctctctgct

SEQ ID NO: 485975 - DNA, 120 bp, Artificial Sequence
  ENSG00000162426_20 (sequence is synthesized)
gagctgccagtacttcctggctcagattctggtctccctggtcctggggcccctgacctcggccgtgggcagtgccaacggggtgatgtacttctccagcctcgtgtccttcctgggctg

SEQ ID NO: 485976 - DNA, 120 bp, Artificial Sequence
  ENSG00000162426_21 (sequence is synthesized)
cctgtactcctccctgtttgtcatttatgaaattcctcccagcgacgctgcagacgaggagcaccggcccctcctgctgaacgtctgacatcgcggagcctcgactccggacacgcgcct

SEQ ID NO: 485977 - DNA, 120 bp, Artificial Sequence
  ENSG00000162426_22 (sequence is synthesized)
gcacctgggggtctggagcaggccgaccagtgaggaccaaagggccttgttggacagggggactggctgcctactggaatgtaaatatgtgataaaataataaatgacagcggcaaagcc

SEQ ID NO: 485978 - DNA, 120 bp, Artificial Sequence
  ENSG00000162430_0 (sequence is synthesized)
ccctgctggccgccgccgctgccgccgccgtccgggtctgcgcccgccacgccgaggcccaggcggccgcgcggcaggaactggcgctgaagaccctggggacagatggcctttttctct

SEQ ID NO: 485979 - DNA, 120 bp, Artificial Sequence
  ENSG00000162430_1 (sequence is synthesized)
tggggacagatggcctttttctcttttcctccttggacactgacggggatatgtacatcagccctgaggagttcaaacccattgctgagaagctaacagggtcttgttctgtcacccaga

SEQ ID NO: 485980 - DNA, 120 bp, Artificial Sequence
  ENSG00000162430_2 (sequence is synthesized)
cagtcacagctcactgcagcctcaacttccctggctcaattgatcctcctgcctcagcctcctgaggtcaactcccgcggccagctgcgaggaggaggagttgccccctgaccctagcga

SEQ ID NO: 485981 - DNA, 120 bp, Artificial Sequence
  ENSG00000162430_3 (sequence is synthesized)
cccctgaccctagcgaggagacgctcaccatagaagcccgattccagcctctgctcccggagaccatgaccaagagcaaagatggcttcctaggggtctcccgcctcgccctgtccggcc

SEQ ID NO: 485982 - DNA, 120 bp, Artificial Sequence
  ENSG00000162430_4 (sequence is synthesized)
tccgaaactggacagccgccgcctcaccaagtgcagtgtttgccacccgccacttccagcccttccttcccccgccaggccaggagctgggtgagccctggtggatcatccccagtgagc

SEQ ID NO: 485983 - DNA, 120 bp, Artificial Sequence
  ENSG00000162430_5 (sequence is synthesized)
tgagcatgttcactggctacctgtccaacaaccgcttctatccaccgccgcccaagggcaaggaggtcatcatccaccggctcctgagcatgttccaccctcggccctttgtgaagaccc

SEQ ID NO: 485984 - DNA, 120 bp, Artificial Sequence
  ENSG00000162430_6 (sequence is synthesized)
gctttgcccctcagggagctgtggcctgcctgactgccatcagcgacttctactacactgtgatgttccggatccatgccgagttccagctcagtgagccgcccgacttccccttttggt

SEQ ID NO: 485985 - DNA, 120 bp, Artificial Sequence
  ENSG00000162430_7 (sequence is synthesized)
tctcccctgctcagttcaccggccacatcatcctctccaaagacgccacccacgtccgcgacttccggctcttcgtgcccaaccacaggtctctgaatgtggacatggagtggctttacg

SEQ ID NO: 485986 - DNA, 120 bp, Artificial Sequence
  ENSG00000162430_8 (sequence is synthesized)
gggccagtgaaagcagcaacatggaggtggacatcggctacataccccagatggagctggaggccacgggcccctctgtgccctccgtgatcctggatgaggatggcagcatgatcgaca

SEQ ID NO: 485987 - DNA, 120 bp, Artificial Sequence
  ENSG00000162430_9 (sequence is synthesized)
gccacctgccttcaggggagcccctgcagtttgtgtttgaggagatcaagtggcagcaggagctgagctgggaggaggctgcccggcgcctggaggtggccatgtaccccttcaagaagg

SEQ ID NO: 485988 - DNA, 120 bp, Artificial Sequence
  ENSG00000162430_10 (sequence is synthesized)
tctcctacttgccgttcactgaggccttcgaccgagccaaggctgagaacaagctggtgcactcaatcctgctgtggggggccctggatgaccagtcctgctgaggttcagggcggactc

SEQ ID NO: 485989 - DNA, 120 bp, Artificial Sequence
  ENSG00000162430_11 (sequence is synthesized)
tccgggagactgtcctggaaagttcgcccatcctcaccctgctcaacgagagcttcatcagcacctggtccctggtgaaggagctggaggaactgcagaacaaccaggagaactcgtccc

SEQ ID NO: 485990 - DNA, 120 bp, Artificial Sequence
  ENSG00000162430_12 (sequence is synthesized)
accagaagctggctggcctgcacctggagaagtacagcttccccgtggagatgatgatctgcctgcccaatggcaccgtggtccatcacatcaatgccaactacttcttggacatcacct

SEQ ID NO: 485991 - DNA, 120 bp, Artificial Sequence
  ENSG00000162430_13 (sequence is synthesized)
ccgtgaagcccgaggaaatcgagagcaatctcttcagcttctcatccacctttgaagacccgtccacggccacctacatgcagttcctgaaggagggactccggcgtggcctgcccctcc

SEQ ID NO: 485992 - DNA, 120 bp, Artificial Sequence
  ENSG00000162430_14 (sequence is synthesized)
tccagccctagagtgcctggacgggatctgatgcacaggcccccacgcctcagagccagagtggtcctcagcccatttcagactgcagatgccgcccactcccaccccactcctaggctg

SEQ ID NO: 485993 - DNA, 120 bp, Artificial Sequence
  ENSG00000162430_15 (sequence is synthesized)
ccttggagggtacaagatccactgagggtggccaccacagccttggctccatggtggcgggtagacaagggatgcctgggctgactgggcagaggaacctctagctctgactgtcactcg

SEQ ID NO: 485994 - DNA, 120 bp, Artificial Sequence
  ENSG00000162430_16 (sequence is synthesized)
gaatggagggaggagcaggctaggaagacggggccaccaccctctccttgctttcagcccttcccacaggaaacatcaagaagccccagccaggaggggccaggctgccaaggcggctcc

SEQ ID NO: 485995 - DNA, 120 bp, Artificial Sequence
  ENSG00000162430_17 (sequence is synthesized)
cctgtttatctagagccttcgttcctggccataccccggactgccctcctgtgcctgatgtccccagctggggtcagtctcaacaggagccagtcttctggagcctctgggcagaaccct

SEQ ID NO: 485996 - DNA, 120 bp, Artificial Sequence
  ENSG00000162430_18 (sequence is synthesized)
ccatcagagtggaaatcagacgggaccccctgcagcttccctgaccacgccactgaccagctatctggggaagtttactgtgaaggggtttctgcctttagcaatggggttcactaaggg

SEQ ID NO: 485997 - DNA, 120 bp, Artificial Sequence
  ENSG00000162430_19 (sequence is synthesized)
ggttcccgaggcccagggccaaggcactcccaccgcctaccttagcacagggtctctgcaggactgcgggagccagcgctcctgccgcccctcttgcccctcagaccttgcatccacaga

SEQ ID NO: 485998 - DNA, 120 bp, Artificial Sequence
  ENSG00000162430_20 (sequence is synthesized)
agcacaacccagccaaacaccacagccttctccagagccggcactgtcccggcaaccaggggtgccccaggctagctcttctacctctggggcaccacggactccccttggccactcttg

SEQ ID NO: 485999 - DNA, 120 bp, Artificial Sequence
  ENSG00000162430_21 (sequence is synthesized)
ggactttggtccacgtcctgagccactgaccacggccagtctctctttttatatgtgcagaaaagtgtttttacacaaactttctcatggtttgtaggtatttttttataaccccagtgc

SEQ ID NO: 486000 - DNA, 120 bp, Artificial Sequence
  ENSG00000162430_22 (sequence is synthesized)
tgaggagaaaggaggggcagtggcttccccggcagcagccccatgatggctgaatccgaaatcctcgatgggtccagcttgatgtctttgcagctgcacctatgggaagaagtagtcctc

SEQ ID NO: 486001 - DNA, 120 bp, Artificial Sequence
  ENSG00000162430_23 (sequence is synthesized)
tcttccttctcctcttcagctttttaaaaacagtcctcagaggatccatgatccccagcactgtcccatcctccacaaaggcccacaggcatgcctgtactctctttcattaaggtcttg

SEQ ID NO: 486002 - DNA, 120 bp, Artificial Sequence
  ENSG00000162430_24 (sequence is synthesized)
aagtcaggctgccccctccccagcccccagttctctccccaccccctcaccccacccggggctcactcagcctggcagaggaagaaggaaggcagacatctccgcagccactcctgggcc

SEQ ID NO: 486003 - DNA, 120 bp, Artificial Sequence
  ENSG00000162430_25 (sequence is synthesized)
tccgcagccactcctgggccttttatgtgccgagttaccccacttgccttgggcgtgtccactgagccttccccagccagtcttgttctcaattttgttttgttttgttttgagacggag

SEQ ID NO: 486004 - DNA, 120 bp, Artificial Sequence
  ENSG00000162430_26 (sequence is synthesized)
atcgtgcccagccttgttcttaattttgtatcatccagtcatcgctaatattacacgcaccttctcacttaatcctcacgacaagcctgtgaggcagatgctcattgttcccatcttgat

SEQ ID NO: 486005 - DNA, 120 bp, Artificial Sequence
  ENSG00000162430_27 (sequence is synthesized)
gaaacttgagtctcagggaagtgaagtgacttgcccagggtcactcaggtagagttgagattcaaacccacatgtggctccaaagtctgcatctggatttgggggtgttttttggcatgg

SEQ ID NO: 486006 - DNA, 120 bp, Artificial Sequence
  ENSG00000162430_28 (sequence is synthesized)
caccctcacctctctccctgcctgttttccccaaagtggaaaggaaggcctttcaaaccagagtgtctcactcccctctgacctccagaccagatggggcatgagccagccagctcagcc

SEQ ID NO: 486007 - DNA, 120 bp, Artificial Sequence
  ENSG00000162430_29 (sequence is synthesized)
aggctccctgtgtcctgggaggaagtgtccccatcccccatgccccttatggggagggagggcgtctgatgctctctctctgcctccccccccatcctgtcaggcacaggtgacgggggc

SEQ ID NO: 486008 - DNA, 120 bp, Artificial Sequence
  ENSG00000162430_30 (sequence is synthesized)
agcccatgcgagcccttctcctgctgctctgggagggccagttccacattgagccagcctggtcccatggaaaatgatggcctgggctttctgaggccttatctgatgcctctgcagttc

SEQ ID NO: 486009 - DNA, 120 bp, Artificial Sequence
  ENSG00000162430_31 (sequence is synthesized)
atgtcccccaccaggcctcgaggctcagggtgggagagggccccgggctgccctgtcactcctctaacacttccctcccctgtccccaacatgccctgtaataaaattagagaagactaa

SEQ ID NO: 486010 - DNA, 120 bp, Artificial Sequence
  ENSG00000162430_32 (sequence is synthesized)
ggctgagaacaagctggtgcactcaatcctgctgtggggggccctggatgaccagtcctgctgaggtagaggaacagcctgtgtgaaggccctgggacacagagcgttcattggatttaa

SEQ ID NO: 486011 - DNA, 120 bp, Artificial Sequence
  ENSG00000162433_0 (sequence is synthesized)
agtccgcctgctactcggtcccggcgctgggctgaggggaggggttgtcttaaaagtctctccttccccctgtaggggcggccggcgagtcccagtgagagcggagggtgccagaggtag

SEQ ID NO: 486012 - DNA, 120 bp, Artificial Sequence
  ENSG00000162433_1 (sequence is synthesized)
ggggccgagaaacaaagttcccggggcttcctccggggccgcggtcggggctgcgcgtttgaccgcccccctcctcgcgaaggcaatggcttccaaactcctgcgcgcggtcatcctcgg

SEQ ID NO: 486013 - DNA, 120 bp, Artificial Sequence
  ENSG00000162433_2 (sequence is synthesized)
gccgcccggctcgggcaagggcaccgtgtgccagaggatcgcccagaactttggtctccagcatctctccagcggccacttcttgcgggagaacatcaaggccagcaccgaagttggtga

SEQ ID NO: 486014 - DNA, 120 bp, Artificial Sequence
  ENSG00000162433_3 (sequence is synthesized)
gatggcaaagcagtatatagagaaaagtcttttggttccagaccatgtgatcacacgcctaatgatgtccgagttggagaacaggcgtggccagcactggctccttgatggttttcctag

SEQ ID NO: 486015 - DNA, 120 bp, Artificial Sequence
  ENSG00000162433_4 (sequence is synthesized)
gacattaggacaagccgaagccctggacaaaatctgtgaagtggatctagtgatcagtttgaatattccatttgaaacacttaaagatcgtctcagccgccgttggattcaccctcctag

SEQ ID NO: 486016 - DNA, 120 bp, Artificial Sequence
  ENSG00000162433_5 (sequence is synthesized)
cggaagggtatataacctggacttcaatccacctcatgtacatggtattgatgacgtcactggtgaaccgttagtccagcaggaggatgataaacccgaagcagttgctgccaggctaag

SEQ ID NO: 486017 - DNA, 120 bp, Artificial Sequence
  ENSG00000162433_6 (sequence is synthesized)
acagtacaaagacgtggcaaagccagtcattgaattatacaagagccgaggagtgctccaccaattttccggaacggagacgaacaaaatctggccctacgtttacacacttttctcaaa

SEQ ID NO: 486018 - DNA, 120 bp, Artificial Sequence
  ENSG00000162433_7 (sequence is synthesized)
caagatcacacctattcagtccaaagaagcatattgaccctgcccaatggaagaaccaggaagatgtggtcattcattcaatagtgtgtgtagtattggtgctgtgtccaaattagaagc

SEQ ID NO: 486019 - DNA, 120 bp, Artificial Sequence
  ENSG00000162433_8 (sequence is synthesized)
tagctgaggtagcttgcagcatcttttctagttgaaatggtgaactgataggaaaacaaatgagtagaaagagttcatgaagaggccctcctctgcctttcaaaaggctggtcacctaca

SEQ ID NO: 486020 - DNA, 120 bp, Artificial Sequence
  ENSG00000162433_9 (sequence is synthesized)
catgtttaaggtgtctctgcacatgtctcaagcccatcacaagaaagcaagtacagtgtggatttcaaatggtgtgtaacttcagctccagctggtttttgacagctgttgctgtggtaa

SEQ ID NO: 486021 - DNA, 120 bp, Artificial Sequence
  ENSG00000162433_10 (sequence is synthesized)
tatttttgacatgtgatggtgatagtctctggttctccccatccccacaaaggctgttgaaccacagcaccaggaagcctgagaatgaatcctgagggctctagcccaggctttgtccca

SEQ ID NO: 486022 - DNA, 120 bp, Artificial Sequence
  ENSG00000162433_11 (sequence is synthesized)
ggctttctggtgtgtgccctcctggtaacagtgaaattgaagctacttactcatagtggttgtttctctggtcttgagtgactgtgtccacagttcatttttttccggtaggaataactc

SEQ ID NO: 486023 - DNA, 120 bp, Artificial Sequence
  ENSG00000162433_12 (sequence is synthesized)
cttttctacatccacgctccatagagtctctccttttcagacatcctgggatgaaagaatttggcttttttttttctttttttttttggacatctgttttcactcttaggcttttaaaca

SEQ ID NO: 486024 - DNA, 120 bp, Artificial Sequence
  ENSG00000162433_13 (sequence is synthesized)
atagttattgcttttatccctctcagattctaataactgagagcgatggggctatattgaatctctgtatgcactgagaactgagctatgaagaggatcttattaaactgctggtctgac

SEQ ID NO: 486025 - DNA, 120 bp, Artificial Sequence
  ENSG00000162433_14 (sequence is synthesized)
tttatggattgacactgttcctttcttttattgtgaaaaaaaaaaaaaaccctgaaagtcttgggaaccccctaaagtcttttgggaatcctcaaaaagcatgggaagttaagtatttag

SEQ ID NO: 486026 - DNA, 120 bp, Artificial Sequence
  ENSG00000162433_15 (sequence is synthesized)
ctacataaatgttgtaagatcatatcttatgtatagaagtaataagaccatttggaattactggactaattgaatagttaaggtttctattcgggacaataaaatgtattttgaaagtgc

SEQ ID NO: 486027 - DNA, 120 bp, Artificial Sequence
  ENSG00000162433_16 (sequence is synthesized)
tgctaactattgatgctgacagtgtttcactcctatgagtgacccaaacatattataaatatgtggtaaagggaatggagcctgtggggttgagcagaatgttgtactagctgtgcctgg

SEQ ID NO: 486028 - DNA, 120 bp, Artificial Sequence
  ENSG00000162433_17 (sequence is synthesized)
actgagtataacagctttatgattatgagaaaacaaattctttattttttttttctgttccaaagattcatcctatggggtggccataaagtctagaattagatactaatattttgtcat

SEQ ID NO: 486029 - DNA, 120 bp, Artificial Sequence
  ENSG00000162433_18 (sequence is synthesized)
tcattataacatatcaataaaccatttgttaaaagatttgcctggtttccagacttggtggccaccttgaataattcttgctgtcttctgggaaggatgatgaaatttattcctgctgcc

SEQ ID NO: 486030 - DNA, 120 bp, Artificial Sequence
  ENSG00000162433_19 (sequence is synthesized)
ttaaaaatatgtatcccttcttcacccatcatgactgtccccagtgagtgtcctttactattcttgggagtgactcctgtctaacttttcatactggcgagaagaaaagaagcctatttt

SEQ ID NO: 486031 - DNA, 120 bp, Artificial Sequence
  ENSG00000162433_20 (sequence is synthesized)
aacactttagtggtgttgaaacacattacttactttctgaagatgtcccagtgaatcctctgtcaattcactgccatatgtaatctatatgataaggaatgcatcttccttctaagtact

SEQ ID NO: 486032 - DNA, 120 bp, Artificial Sequence
  ENSG00000162433_21 (sequence is synthesized)
gcccaaactcttgccagctcctctcccattgtcccttcatgtgaatatttcttggctaccttagtggaaatatagatcagttttctccccatccatcctctcaaacataatgagattgtt

SEQ ID NO: 486033 - DNA, 120 bp, Artificial Sequence
  ENSG00000162433_22 (sequence is synthesized)
tactttttagatttatgcagtgaaaatgcccagtcaggtctgaatcgtcagtgcattatattgactctgagcactttagaatttagagttgcaattgaatgccagctgtggagatggggt

SEQ ID NO: 486034 - DNA, 120 bp, Artificial Sequence
  ENSG00000162433_23 (sequence is synthesized)
gcatatcagatatataaataaagctcaggtttgctagggaaccaggtatagagaaaaataagtctgatatgaggaaaattgcacaatttagagtagttatgccgtagagaaaatttccac

SEQ ID NO: 486035 - DNA, 120 bp, Artificial Sequence
  ENSG00000162433_24 (sequence is synthesized)
aaactaggaaatgtagagagttattctatagaatactcaaaagaggaaagtatgtgatttttggaaacaggaaaatcttcaaacttctttcttcacttccctttgtgtttagctgaccct

SEQ ID NO: 486036 - DNA, 120 bp, Artificial Sequence
  ENSG00000162433_25 (sequence is synthesized)
ccaatgtgatcattgcctttggagtttgggagaggtacgggaagtggcctgatccctgcttccatacttcactcctccatccatccttccctccctcttcccctccagctaaatggacaa

SEQ ID NO: 486037 - DNA, 120 bp, Artificial Sequence
  ENSG00000162433_26 (sequence is synthesized)
ttctagccaacattgagtcactcaataagtctcaacagtgggtgtgtttgctgagattgtccagcggttgagcagtttggtctcacctccctcgctagttgagaccaaaaagagacaaat

SEQ ID NO: 486038 - DNA, 120 bp, Artificial Sequence
  ENSG00000162433_27 (sequence is synthesized)
aactttttcatggtctttgaaacataatgcttatttcgtggtcaatggctttaaaaaaatctgtttcttgttttcttcaacaaactcactagttttcccttaaatgatattgtaaaaatt

SEQ ID NO: 486039 - DNA, 90 bp, Artificial Sequence
  ENSG00000162433_28 (sequence is synthesized)
atcgccacacatgaccgttccttcacctttaagcaaagagagtggttcagatggtttctaagatgccaacctgacctcgcattctgtcat

SEQ ID NO: 486040 - DNA, 120 bp, Artificial Sequence
  ENSG00000162433_29 (sequence is synthesized)
atggtttctaagatgccaacctgacctcgcattctgtcattctacccagctcttaattcaatttgcttccattatcctaacaggcttctttcttacttagaacttggaaaggctgctgta

SEQ ID NO: 486041 - DNA, 120 bp, Artificial Sequence
  ENSG00000162433_30 (sequence is synthesized)
tttaataccctccaacactaacgcagacttaagataggtactgtttattgaaaacctactgagtgaaatgtgcggttttaggaccttcataaacatctcatttaatctttctagcatcct

SEQ ID NO: 486042 - DNA, 120 bp, Artificial Sequence
  ENSG00000162433_31 (sequence is synthesized)
gtgaaacagccatgatttcacgttgataaacaaagaagacaggggtcccagggatgtgaagcatcttgcccaggcttctgctgctggtgaccagtgtagccaggactccagcccaggttt

SEQ ID NO: 486043 - DNA, 120 bp, Artificial Sequence
  ENSG00000162433_32 (sequence is synthesized)
tcctgactcagaagactgagctttttcctggatgttattaatagctaattgtgtccaagcaaccaagggccttgagtctgcttggttctgcttatggcctcacatcaagaaatggagcta

SEQ ID NO: 486044 - DNA, 120 bp, Artificial Sequence
  ENSG00000162433_33 (sequence is synthesized)
gtccatgtctgtagtcccaatgctttgggaagccatgatgggaaggttgtcggaggccaaaagttcaagaccaggctgggcaatatcacaagactccatctctacggaaaagtaaaaaat

SEQ ID NO: 486045 - DNA, 120 bp, Artificial Sequence
  ENSG00000162433_34 (sequence is synthesized)
tagccagtcatggtggtgtacacttatggtcctagttactcaggagacttaggcaggaggattgcttgatcctaggaattcgaggctgcagtgagctatgattgcacctctgcacccaag

SEQ ID NO: 486046 - DNA, 120 bp, Artificial Sequence
  ENSG00000162433_35 (sequence is synthesized)
cctgggcgacacagcgagaccctctctcttaaaaaaaaaaaatagcagagctcaccaaagtgatgttcacctttttatgacattcctttttcttagcttaagaaaagaaagctgctagat

SEQ ID NO: 486047 - DNA, 120 bp, Artificial Sequence
  ENSG00000162433_36 (sequence is synthesized)
gagagtcttagttttcctgcataagacctcctttatgaatagaataaaagactgtcaaagtaggctgggcttgggcccaggctaatctatgaaggaagcaagctcgtgttccttacctat

SEQ ID NO: 486048 - DNA, 120 bp, Artificial Sequence
  ENSG00000162433_37 (sequence is synthesized)
ccttttggtgtccattggattgtgccccgaagtggcctttacccttgagccgtccccagccatggtgctcacacataggcttttgagctccttggagctatccagatcctgctcactttt

SEQ ID NO: 486049 - DNA, 120 bp, Artificial Sequence
  ENSG00000162433_38 (sequence is synthesized)
ccttcctgagatcagaacaaatcacccccttactcccactccaaacaaggccttgatgataaactaatccttcctaaaatgctggtaggtaaacaagcaatgatgaagcattgaacacag

SEQ ID NO: 486050 - DNA, 120 bp, Artificial Sequence
  ENSG00000162433_39 (sequence is synthesized)
gttaactcctgacttttgtaccattgtctattccattacacattaacatgactctgaatgccagatccaaacctttgcccaccatctgcttgtcgtgcaacagttgaggcagtaaccagg

SEQ ID NO: 486051 - DNA, 120 bp, Artificial Sequence
  ENSG00000162433_40 (sequence is synthesized)
ggagattcacttcctgtcttgtccttccccagggatcacccccctgctgccctctagcagccaaactcagatgagttccattgttaccctaggtgtgcccatctctttggtagggaagga

SEQ ID NO: 486052 - DNA, 120 bp, Artificial Sequence
  ENSG00000162433_41 (sequence is synthesized)
gaaaggtaagaatagccatcagtgaggaaggattcttggagcgaggagccactgtggtttttcctgctatttaagatgttgagaccggataactttagaaagatacctgcacaaacccat

SEQ ID NO: 486053 - DNA, 120 bp, Artificial Sequence
  ENSG00000162433_42 (sequence is synthesized)
aaatagtgcttttataaagtttagttcaccggaacctgagttcagtatttgacattagctttttgtccaaagagttgaagcctgctggaggtctttgctcaaataataaataccacatat

SEQ ID NO: 486054 - DNA, 120 bp, Artificial Sequence
  ENSG00000162433_43 (sequence is synthesized)
ttccaagtgtgttcaggtataggcactaggtactgtctgtttacttcatgttaggcacattacatgcattggctaatcaaatcctcatcaattacatatgtaataatctaaacttgcctc

SEQ ID NO: 486055 - DNA, 120 bp, Artificial Sequence
  ENSG00000162433_44 (sequence is synthesized)
cttgtattataaatggaaataatcctgtttatttaaacgggttttcatgtacctgtagggattaggaaactcaaatggcctttttaatacctttccctagtttgagctccctgttctctt

SEQ ID NO: 486056 - DNA, 120 bp, Artificial Sequence
  ENSG00000162433_45 (sequence is synthesized)
taacagataaaacaacatatttgcttcagcctggaatctgtttttggtgctttggtgcagagacaggaaatgggcactcagagtcacactggtagttgcacactgtatctacagagggcg

SEQ ID NO: 486057 - DNA, 120 bp, Artificial Sequence
  ENSG00000162433_46 (sequence is synthesized)
tgtctcatctgtactctgctgggttacaggatttcagtaggtatttgtgtccacctgagaattctgtttattacctttcatttgacagtgtctttcctttctgcagttgattttgctaga

SEQ ID NO: 486058 - DNA, 120 bp, Artificial Sequence
  ENSG00000162433_47 (sequence is synthesized)
gaggcaattcataaggtgaggtcctgttcatagtatgacttgctttctcaatatctccttcaatttttagtaactcttggtctatttggtgtctttaaaaaaaataacctagtaataaag

SEQ ID NO: 486059 - DNA, 120 bp, Artificial Sequence
  ENSG00000162433_48 (sequence is synthesized)
acttcttttaatgtggaaatgtggtctggtagtaagttatttctttccacatgtaactgacccaatctggtttccaaatgagaagtgtgcaggccccagaggttgagaagccatatttca

SEQ ID NO: 486060 - DNA, 120 bp, Artificial Sequence
  ENSG00000162433_49 (sequence is synthesized)
actgtgaaaaaaatctgcttcctgcatctgttgaaatatagttgttcatacttgccatcccttatctttcttgtaacaatttgcacagttcttgccagaataaatgccattatctgtatg

SEQ ID NO: 486061 - DNA, 120 bp, Artificial Sequence
  ENSG00000162433_50 (sequence is synthesized)
tttcagggagttccccaatttgatcatttttgtgtgtgtgtggtgtgtgtgtgagagagagagatactgcagtaaaacatttctaaaggatgaaagctcttgtatggcatagatatgaat

SEQ ID NO: 486062 - DNA, 120 bp, Artificial Sequence
  ENSG00000162433_51 (sequence is synthesized)
tccttcctctggtaataattaggttattcccagaagcacagtgtcattctttaaataaaagctttcctgtttaaagcttttcaaaggagcagaccaccttgaagattccccctagggttg

SEQ ID NO: 486063 - DNA, 120 bp, Artificial Sequence
  ENSG00000162433_52 (sequence is synthesized)
atatgtgtctaattcattttataaaaattattcttgtcttcattttaaagctttggctatatagtcagaaatgtcctaaataacaaactattttgtatttaatttagggaagactaaagg

SEQ ID NO: 486064 - DNA, 120 bp, Artificial Sequence
  ENSG00000162433_53 (sequence is synthesized)
gaagaaaaatgaaaactcagtctttatgtaagctccaaggatattagggcttaaagggcttttctagttttatgagaatttgtactactgatttttatatattcctgtttttgagatgaa

SEQ ID NO: 486065 - DNA, 120 bp, Artificial Sequence
  ENSG00000162433_54 (sequence is synthesized)
cagatctctggggaaattgttgagttacaatggcatttcactgtgatccctctcaagctcagatcagttctataacccaatgacaacctgtctctttggtttactgtcctgtgaaatgtc

SEQ ID NO: 486066 - DNA, 120 bp, Artificial Sequence
  ENSG00000162433_55 (sequence is synthesized)
agctcaagtttcccagaagtcgtgtgtttatgatgagtcagagtgcttttcctcggtgggacagttgctggccctcttaattttggtgtatgtgcttccaagtatctaaacctccagtct

SEQ ID NO: 486067 - DNA, 120 bp, Artificial Sequence
  ENSG00000162433_56 (sequence is synthesized)
gatctgtatatgctatcctaactgttaattgtattattgattatgttgattatcttgcttgaaggttcatacttttcaatttgatagaaataaagtttttttctgcttatagctagcgaa

SEQ ID NO: 486068 - DNA, 120 bp, Artificial Sequence
  ENSG00000162433_57 (sequence is synthesized)
agccgccggggaggggacgagacgcagaccacacgttgcccacgtgcgaggaccgggcaggggctcagcccctaggccgcccggtgcgtggggcggcgggggctggctttgagtcacccc

SEQ ID NO: 486069 - DNA, 120 bp, Artificial Sequence
  ENSG00000162433_58 (sequence is synthesized)
cgcttgtgccagcttccccggctcggcggagactggcttggggatgcctggccgcccggcccccttctcggacgcggcgtggggagcgagctggagttaaggatgaaggggcggccggcg

SEQ ID NO: 486070 - DNA, 120 bp, Artificial Sequence
  ENSG00000162433_59 (sequence is synthesized)
ttacgtaaggcgcgagtcccgcgcggccggccggggctccgcgactgggcgggcggaggcggcgccgccctgcaggatccgggctggaagcctctcggagtgctgcctccagccaagggg

SEQ ID NO: 486071 - DNA, 120 bp, Artificial Sequence
  ENSG00000162433_60 (sequence is synthesized)
ggggccgcgcgccggggaacctgtggcgccggggggctcgcagcctcgcgcctctccagcccctccacgcagcctcgggcctcggggcagagccctgggtggctttgaaaggcctgtctg

SEQ ID NO: 486072 - DNA, 120 bp, Artificial Sequence
  ENSG00000162433_61 (sequence is synthesized)
tgtgtttatttgattgcttttggtggcgaggcgcggggctcgggctcgtcgcgcgccccatggccggggagcgcatccgccaaccccgggcggaggtgggcccctccgagcgcgcgcggg

SEQ ID NO: 486073 - DNA, 120 bp, Artificial Sequence
  ENSG00000162434_0 (sequence is synthesized)
gcgtcgctgagcgcaggccgcggcggccgcggagtatcctggagctgcagacagtgcgggcctgcgcccagtcccggctgtcctcgccgcgacccctcctcagccctgggcgcgcgcacg

SEQ ID NO: 486074 - DNA, 120 bp, Artificial Sequence
  ENSG00000162434_1 (sequence is synthesized)
ctggggccccgcggggctggccgcctagcgagcctgccggtcgaccccagccagcgcagcgacggggcgctgcctggcccaggcgcacacggaagtgcgcttctctgaagtagctttgga

SEQ ID NO: 486075 - DNA, 120 bp, Artificial Sequence
  ENSG00000162434_2 (sequence is synthesized)
aagtagagaagaaaatccagtttgcttcttggagaacactggacagctgaataaatgcagtatctaaatataaaagaggactgcaatgccatggctttctgtgctaaaatgaggagctcc

SEQ ID NO: 486076 - DNA, 120 bp, Artificial Sequence
  ENSG00000162434_3 (sequence is synthesized)
aagaagactgaggtgaacctggaggcccctgagccaggggtggaagtgatcttctatctgtcggacagggagcccctccggctgggcagtggagagtacacagcagaggaactgtgcatc

SEQ ID NO: 486077 - DNA, 120 bp, Artificial Sequence
  ENSG00000162434_4 (sequence is synthesized)
agggctgcacaggcatgccgtatctctcctctttgtcacaacctctttgccctgtatgacgagaacaccaagctctggtatgctccaaatcgcaccatcaccgttgatgacaagatgtcc

SEQ ID NO: 486078 - DNA, 120 bp, Artificial Sequence
  ENSG00000162434_5 (sequence is synthesized)
ctccggctccactaccggatgaggttctatttcaccaattggcatggaaccaacgacaatgagcagtcagtgtggcgtcattctccaaagaagcagaaaaatggctacgagaaaaaaaag

SEQ ID NO: 486079 - DNA, 120 bp, Artificial Sequence
  ENSG00000162434_6 (sequence is synthesized)
attccagatgcaacccctctccttgatgccagctcactggagtatctgtttgctcagggacagtatgatttggtgaaatgcctggctcctattcgagaccccaagaccgagcaggatgga

SEQ ID NO: 486080 - DNA, 120 bp, Artificial Sequence
  ENSG00000162434_7 (sequence is synthesized)
catgatattgagaacgagtgtctagggatggctgtcctggccatctcacactatgccatgatgaagaagatgcagttgccagaactgcccaaggacatcagctacaagcgatatattcca

SEQ ID NO: 486081 - DNA, 120 bp, Artificial Sequence
  ENSG00000162434_8 (sequence is synthesized)
gaaacattgaataagtccatcagacagaggaaccttctcaccaggatgcggataaataatgttttcaaggatttcctaaaggaatttaacaacaagaccatttgtgacagcagcgtgtcc

SEQ ID NO: 486082 - DNA, 120 bp, Artificial Sequence
  ENSG00000162434_9 (sequence is synthesized)
acgcatgacctgaaggtgaaatacttggctaccttggaaactttgacaaaacattacggtgctgaaatatttgagacttccatgttactgatttcatcagaaaatgagatgaattggttt

SEQ ID NO: 486083 - DNA, 120 bp, Artificial Sequence
  ENSG00000162434_10 (sequence is synthesized)
cattcgaatgacggtggaaacgttctctactacgaagtgatggtgactgggaatcttggaatccagtggaggcataaaccaaatgttgtttctgttgaaaaggaaaaaaataaactgaag

SEQ ID NO: 486084 - DNA, 120 bp, Artificial Sequence
  ENSG00000162434_11 (sequence is synthesized)
cggaaaaaactggaaaataaacacaagaaggatgaggagaaaaacaagatccgggaagagtggaacaatttttcttacttccctgaaatcactcacattgtaataaaggagtctgtggtc

SEQ ID NO: 486085 - DNA, 120 bp, Artificial Sequence
  ENSG00000162434_12 (sequence is synthesized)
agcattaacaagcaggacaacaagaaaatggaactgaagctctcttcccacgaggaggccttgtcctttgtgtccctggtagatggctacttccggctcacagcagatgcccatcattac

SEQ ID NO: 486086 - DNA, 120 bp, Artificial Sequence
  ENSG00000162434_13 (sequence is synthesized)
ctctgcaccgacgtggcccccccgttgatcgtccacaacatacagaatggctgtcatggtccaatctgtacagaatacgccatcaataaattgcggcaagaaggaagcgaggaggggatg

SEQ ID NO: 486087 - DNA, 120 bp, Artificial Sequence
  ENSG00000162434_14 (sequence is synthesized)
tacgtgctgaggtggagctgcaccgactttgacaacatcctcatgaccgtcacctgctttgagaagtctgagcaggtgcagggtgcccagaagcagttcaagaactttcagatcgaggtg

SEQ ID NO: 486088 - DNA, 120 bp, Artificial Sequence
  ENSG00000162434_15 (sequence is synthesized)
cagaagggccgctacagtctgcacggttcggaccgcagcttccccagcttgggagacctcatgagccacctcaagaagcagatcctgcgcacggataacatcagcttcatgctaaaacgc

SEQ ID NO: 486089 - DNA, 120 bp, Artificial Sequence
  ENSG00000162434_16 (sequence is synthesized)
tgctgccagcccaagccccgagaaatctccaacctgctggtggctactaagaaagcccaggagtggcagcccgtctaccccatgagccagctgagtttcgatcggatcctcaagaaggat

SEQ ID NO: 486090 - DNA, 120 bp, Artificial Sequence
  ENSG00000162434_17 (sequence is synthesized)
ctggtgcagggcgagcaccttgggagaggcacgagaacacacatctattctgggaccctgatggattacaaggatgacgaaggaacttctgaagagaagaagataaaagtgatcctcaaa

SEQ ID NO: 486091 - DNA, 120 bp, Artificial Sequence
  ENSG00000162434_18 (sequence is synthesized)
gtcttagaccccagccacagggatatttccctggccttcttcgaggcagccagcatgatgagacaggtctcccacaaacacatcgtgtacctctatggcgtctgtgtccgcgacgtggag

SEQ ID NO: 486092 - DNA, 120 bp, Artificial Sequence
  ENSG00000162434_19 (sequence is synthesized)
aatatcatggtggaagagtttgtggaagggggtcctctggatctcttcatgcaccggaaaagcgatgtccttaccacaccatggaaattcaaagttgccaaacagctggccagtgccctg

SEQ ID NO: 486093 - DNA, 120 bp, Artificial Sequence
  ENSG00000162434_20 (sequence is synthesized)
agctacttggaggataaagacctggtccatggaaatgtgtgtactaaaaacctcctcctggcccgtgagggcatcgacagtgagtgtggcccattcatcaagctcagtgaccccggcatc

SEQ ID NO: 486094 - DNA, 120 bp, Artificial Sequence
  ENSG00000162434_21 (sequence is synthesized)
ctcctgagtgtgttgaggactccaagaacctgagtgtggctgctgacaagtggagctttggaaccacgctctgggaaatctgctacaatggcgagatccccttgaaagacaagacgctga

SEQ ID NO: 486095 - DNA, 120 bp, Artificial Sequence
  ENSG00000162434_22 (sequence is synthesized)
ttgagaaagagagattctatgaaagccggtgcaggccagtgacaccatcatgtaaggagctggctgacctcatgacccgctgcatgaactatgaccccaatcagaggcctttcttccgag

SEQ ID NO: 486096 - DNA, 120 bp, Artificial Sequence
  ENSG00000162434_23 (sequence is synthesized)
ccatcatgagagacattaataagcttgaagagcagaatccagatattgtttcagaaaaaaaaccagcaactgaagtggaccccacacattttgaaaagcgcttcctaaagaggatccgtg

SEQ ID NO: 486097 - DNA, 120 bp, Artificial Sequence
  ENSG00000162434_24 (sequence is synthesized)
acttgggagagggccactttgggaaggttgagctctgcaggtatgaccccgaaggggacaatacaggggagcaggtggctgttaaatctctgaagcctgagagtggaggtaaccacatag

SEQ ID NO: 486098 - DNA, 120 bp, Artificial Sequence
  ENSG00000162434_25 (sequence is synthesized)
ctgatctgaaaaaggaaatcgagatcttaaggaacctctatcatgagaacattgtgaagtacaaaggaatctgcacagaagacggaggaaatggtattaagctcatcatggaatttctgc

SEQ ID NO: 486099 - DNA, 120 bp, Artificial Sequence
  ENSG00000162434_26 (sequence is synthesized)
cttcgggaagccttaaggaatatcttccaaagaataagaacaaaataaacctcaaacagcagctaaaatatgccgttcagatttgtaaggggatggactatttgggttctcggcaatacg

SEQ ID NO: 486100 - DNA, 120 bp, Artificial Sequence
  ENSG00000162434_27 (sequence is synthesized)
ttcaccgggacttggcagcaagaaatgtccttgttgagagtgaacaccaagtgaaaattggagacttcggtttaaccaaagcaattgaaaccgataaggagtattacaccgtcaaggatg

SEQ ID NO: 486101 - DNA, 120 bp, Artificial Sequence
  ENSG00000162434_28 (sequence is synthesized)
accgggacagccctgtgttttggtatgctccagaatgtttaatgcaatctaaattttatattgcctctgacgtctggtcttttggagtcactctgcatgagctgctgacttactgtgatt

SEQ ID NO: 486102 - DNA, 120 bp, Artificial Sequence
  ENSG00000162434_29 (sequence is synthesized)
cagattctagtcccatggctttgttcctgaaaatgataggcccaacccatggccagatgacagtcacaagacttgtgaatacgttaaaagaaggaaaacgcctgccgtgcccacctaact

SEQ ID NO: 486103 - DNA, 120 bp, Artificial Sequence
  ENSG00000162434_30 (sequence is synthesized)
gtccagatgaggtttatcaacttatgaggaaatgctgggaattccaaccatccaatcggacaagctttcagaaccttattgaaggatttgaagcacttttaaaataagaagcatgaataa

SEQ ID NO: 486104 - DNA, 120 bp, Artificial Sequence
  ENSG00000162434_31 (sequence is synthesized)
catttaaattccacagattatcaagtccttctcctgcaacaaatgcccaagtcattttttaaaaatttctaatgaaagaagtttgtgttctgtccaaaaagtcactgaactcatacttca

SEQ ID NO: 486105 - DNA, 120 bp, Artificial Sequence
  ENSG00000162434_32 (sequence is synthesized)
gtacatatacatgtataaggcacactgtagtgcttaatatgtgtaaggacttcctctttaaatttggtaccagtaacttagtgacacataatgacaaccaaaatatttgaaagcacttaa

SEQ ID NO: 486106 - DNA, 120 bp, Artificial Sequence
  ENSG00000162434_33 (sequence is synthesized)
gcactcctccttgtggaaagaatataccaccatttcatctggctagttcaccatcacaactgcattaccaaaaggggatttttgaaaacgaggagttgaccaaaataatatctgaagatg

SEQ ID NO: 486107 - DNA, 120 bp, Artificial Sequence
  ENSG00000162434_34 (sequence is synthesized)
attgcttttccctgctgccagctgatctgaaatgttttgctggcacattaatcatagataaagaaagattgatggacttagccctcaaatttcagtatctatacagtactagaccatgca

SEQ ID NO: 486108 - DNA, 120 bp, Artificial Sequence
  ENSG00000162434_35 (sequence is synthesized)
ttcttaaaatattagataccaggtagtatatattgtttctgtacaaaaatgactgtattctctcaccagtaggacttaaactttgtttctccagtggcttagctcctgttcctttgggtg

SEQ ID NO: 486109 - DNA, 120 bp, Artificial Sequence
  ENSG00000162434_36 (sequence is synthesized)
atcactagcacccatttttgagaaagctggttctacatggggggatagctgtggaatagataatttgctgcatgttaattctcaagaactaagcctgtgccagtgctttcctaagcagta

SEQ ID NO: 486110 - DNA, 120 bp, Artificial Sequence
  ENSG00000162434_37 (sequence is synthesized)
tacctttaatcagaactcattcccagaacctggatgctattacacatgcttttaagaaacgtcaatgtatatccttttataactctaccactttggggcaagctattccagcactggttt

SEQ ID NO: 486111 - DNA, 120 bp, Artificial Sequence
  ENSG00000162434_38 (sequence is synthesized)
tgaatgctgtatgcaaccagtctgaataccacatacgctgcactgttcttagagggtttccatacttaccaccgatctacaagggttgatccctgtttttaccatcaatcatcaccctgt

SEQ ID NO: 486112 - DNA, 120 bp, Artificial Sequence
  ENSG00000162434_39 (sequence is synthesized)
ggtgcaacacttgaaagacccggctagaggcactatggacttcaggatccactagacagttttcagtttgcttggaggtagctgggtaatcaaaaatgtttagtcattgattcaatgtga

SEQ ID NO: 486113 - DNA, 120 bp, Artificial Sequence
  ENSG00000162434_40 (sequence is synthesized)
acgattacggtctttatgaccaagagtctgaaaatctttttgttatgctgtttagtattcgtttgatattgttacttttcacctgttgagcccaaattcaggattggttcagtggcagca

SEQ ID NO: 486114 - DNA, 120 bp, Artificial Sequence
  ENSG00000162434_41 (sequence is synthesized)
atgaagttgccatttaaatttgttcatagcctacatcaccaaggtctctgtgtcaaacctgtggccactctatatgcactttgtttactctttatacaaataaatatactaaagacttta

SEQ ID NO: 486115 - DNA, 120 bp, Artificial Sequence
  ENSG00000162434_42 (sequence is synthesized)
acgttgcccaggcttcttgcctttctttttgcagttgaggagattgagggactgagcaggtcatttgcttaagttaatagtggaggtggaactaaaaccaattgcttttcattcatttgt

SEQ ID NO: 486116 - DNA, 120 bp, Artificial Sequence
  ENSG00000162434_43 (sequence is synthesized)
gtaatgttttcttgtcaacgctggccaagaaccctacactgtgctagacctgggaggctgaggtgagtgaaatgaggtcaaggccacaagagtcaggcccaaggagctctgggcaggtga

SEQ ID NO: 486117 - DNA, 120 bp, Artificial Sequence
  ENSG00000162434_44 (sequence is synthesized)
gcgaggtgagcgcaccccacaagcagcaagacgctggctcctcgaatggactggcttccattttaaccacaggcaggcttggccctttcttggttgtcaagccactgagccggtgggccc

SEQ ID NO: 486118 - DNA, 120 bp, Artificial Sequence
  ENSG00000162434_45 (sequence is synthesized)
ttgggctgctgctgcacactgagatggaggggtggccttggcctctgagttcctgacatgtaagtttggaagaagagcgattttttttttaaccccaagtgacttcttccctgtggaatc

SEQ ID NO: 486119 - DNA, 120 bp, Artificial Sequence
  ENSG00000162434_46 (sequence is synthesized)
caacaatgtgagctgttccgtgtactcacacaggagtcctgttgagagggaagttttgccgtgtgagcggcctgacctctgcatcacagtgtgttgtagaacagcagcagtggtggcggt

SEQ ID NO: 486120 - DNA, 120 bp, Artificial Sequence
  ENSG00000162434_47 (sequence is synthesized)
tgttcccagagcccttgttctctgtgtcaggccctccgccaaggctttccaggccttgtgacatttagccgccatctgttattacagatgagggaattgaggctcagagaagtgtcactt

SEQ ID NO: 486121 - DNA, 120 bp, Artificial Sequence
  ENSG00000162434_48 (sequence is synthesized)
gatattgagaacgagtgtctagggatggctgtcctggccatctcacactatgccatgatgaagaagatgcagttgccagaactgcccaaggacatcaggtaaagcttcccactggctgaa

SEQ ID NO: 486122 - DNA, 120 bp, Artificial Sequence
  ENSG00000162434_49 (sequence is synthesized)
gaattgattgtgaggatggtggtgtttctacatgttcttacacatttcagcttaattactgccagggtttggctgacctttgctctctatgaaacccagatcttccttagaatgtttact

SEQ ID NO: 486123 - DNA, 120 bp, Artificial Sequence
  ENSG00000162434_50 (sequence is synthesized)
acatacacgtagcctaattataattgtgtcttgattttggatgttggctgctaatctcagaaatttgtgcttgggtgaaatttctgagctgaggatgccaataaaattagtggcccccag

SEQ ID NO: 486124 - DNA, 120 bp, Artificial Sequence
  ENSG00000162434_51 (sequence is synthesized)
gccttctccgtcccctccttgcccatggtggacactgtcgtctatcactgcattttttccttttgttttggacccatcttaaaaatccttctcagtacagttctgtaagcagctactacc

SEQ ID NO: 486125 - DNA, 120 bp, Artificial Sequence
  ENSG00000162434_52 (sequence is synthesized)
atcccaagcctgaactctgaacacgttacagtagttcactacagagctgttaattctaatgtgagaattgatcaactactattaaatatctcaagaaaattgcatttacttaaaaatatc

SEQ ID NO: 486126 - DNA, 120 bp, Artificial Sequence
  ENSG00000162434_53 (sequence is synthesized)
gtttgagatcaagtctctgtgaaggaatatttaagttctgtccatctatgacatccaatagttttttttcaccagtgggctattaggatggtcataaatgaagacagtctcattttgaag

SEQ ID NO: 486127 - DNA, 120 bp, Artificial Sequence
  ENSG00000162434_54 (sequence is synthesized)
agcagatcacagcttgctcctcagtgatgcagggattgagtcgatactgctcaactgctgctttctcttttttctgtggccttcactttgggtacttcctctttattttttcataagcta

SEQ ID NO: 486128 - DNA, 120 bp, Artificial Sequence
  ENSG00000162434_55 (sequence is synthesized)
aattgaaaaatgacagttcttctctaattctgttatattacattaatctaaaagaaaaataacatttgttgaggatgaatcccaaacttcacaattttctactgttctgaagccactcca

SEQ ID NO: 486129 - DNA, 120 bp, Artificial Sequence
  ENSG00000162434_56 (sequence is synthesized)
tgcggcagggatgacccggggccaggtgctgtctcagtcctgggagtaacaagcagatcagtctccgcatttggcccccagtggacttgttctttgtttcaggggtactcaacgttcttc

SEQ ID NO: 486130 - DNA, 120 bp, Artificial Sequence
  ENSG00000162434_57 (sequence is synthesized)
ttaacattgactcccgttctagcagtatatcagcttgtttagattctgtttgttgtagatactcgcccactagcacctggataggtaactaatctttcagcttacctgttgatcttttaa

SEQ ID NO: 486131 - DNA, 120 bp, Artificial Sequence
  ENSG00000162434_58 (sequence is synthesized)
ataatatatctgattcatattcacatggcaaacactaagtcttttgtattaattagctttagtatgtctttctctctctctctctcactctctctctctctctcttttttgtgggggtgc

SEQ ID NO: 486132 - DNA, 90 bp, Artificial Sequence
  ENSG00000162434_59 (sequence is synthesized)
tctcttttttgtgggggtgcttgggggaagtacaatggcatgatcttggctcaccgcaactttggcctcccaggttcaagcgattctcct

SEQ ID NO: 486133 - DNA, 120 bp, Artificial Sequence
  ENSG00000162434_60 (sequence is synthesized)
tgggattacagctacaagcgatatattccagaaacattgaataagtccatcagacagaggaaccttctcaccaggatgcggataaataatgttttcaaggatttcctaaaggaatttaac

SEQ ID NO: 486134 - DNA, 120 bp, Artificial Sequence
  ENSG00000162434_61 (sequence is synthesized)
tgcacagaagacggtatgttatgcaaggctggggtccggtttaaagatttggtgactgtctagggtcataaaggccagtgcaaaacaggcactccgtggccttacctgggcgtctgacat

SEQ ID NO: 486135 - DNA, 120 bp, Artificial Sequence
  ENSG00000162434_62 (sequence is synthesized)
cccccgccatctatcacatggcagagatagaataaaaacagaaaaatggcgacggtcacgttgtggcgagccttgctgcgtcattagataatcctcatgcaaatagcgggaagaacaaag

SEQ ID NO: 486136 - DNA, 120 bp, Artificial Sequence
  ENSG00000162434_63 (sequence is synthesized)
agggctgcacaggcatgccagtggcttctttctgctccgtcactaatgaactataagataccaggggatgacgcttgacttctgtggatccaggctcagttctcatttccccacatctgt

SEQ ID NO: 486137 - DNA, 120 bp, Artificial Sequence
  ENSG00000162434_64 (sequence is synthesized)
ctgggcgcgcgcacgctggggccccgcggggctggccgcctagcgagcctgccggtcgaccccagccagcgcagcgacggggcgctgcctggcccaggcgcacacggaagtgttatctaa

SEQ ID NO: 486138 - DNA, 120 bp, Artificial Sequence
  ENSG00000162434_65 (sequence is synthesized)
cctggtacttgttggctgtcctcctttcctccctgctgtccaagctctggtcaggccttcctgtaatctcctaccatcctctttgcagcagcccctcaatgctgcttctttacttggatc

SEQ ID NO: 486139 - DNA, 120 bp, Artificial Sequence
  ENSG00000162434_66 (sequence is synthesized)
tctcttcatagtttaaccccctcacctctccatagctgatcaagaagtactacactttctgatttcttgctgtgtcaaacaatgtgggcaattcaagaaacactgaacacagctgagcgt

SEQ ID NO: 486140 - DNA, 74 bp, Artificial Sequence
  ENSG00000162434_67 (sequence is synthesized)
aatgtgggcaattcaagaaacactgaacacagctgagcgtgctgccatgtgcctgtagtttcagctttctagcc

SEQ ID NO: 486141 - DNA, 120 bp, Artificial Sequence
  ENSG00000162434_68 (sequence is synthesized)
gcccgggacccccgggggcgcaggatccggcgggaggagtctaagaggaggaggcggcggtgccggaggaggaggaggagggagggagaagagaggaagaccggagtccccgcggcggcg

SEQ ID NO: 486142 - DNA, 120 bp, Artificial Sequence
  ENSG00000162434_69 (sequence is synthesized)
gcggtccggagagagggcgagccccgcgcggcgccggggaccgggcgctaccacgaggccgggacgctggagtctgggctgccaccttcctggagaaagaccacacctgtgcttatccct

SEQ ID NO: 486143 - DNA, 120 bp, Artificial Sequence
  ENSG00000162434_70 (sequence is synthesized)
caaggcttggcagtgcctctggacagccaaggccagaggattgatgttcagggcctggggtggcgacagtggtgagctttcctgggtccactggctttcccctcaacagagcccctgggg

SEQ ID NO: 486144 - DNA, 120 bp, Artificial Sequence
  ENSG00000162434_71 (sequence is synthesized)
gggcgcaggtgcagtggtttgcagattgtcatcaatcttcaccttcacttaaaagtcacgttgactctctacagcaccaagctgccataagcattctttttctacaggcagcgcttctct

SEQ ID NO: 486145 - DNA, 120 bp, Artificial Sequence
  ENSG00000162434_72 (sequence is synthesized)
gcgcagcaccagaattatggaacatttatcaacagcctaaaataaagacaacacgaggagaatttggttgcttatatagattcaaggtacaatcctgctggattctggaagaaatatcac

SEQ ID NO: 486146 - DNA, 120 bp, Artificial Sequence
  ENSG00000162434_73 (sequence is synthesized)
agtgtgcatgcacagaagtacgaccatgtgaagaggtagcaagagagcagcaatctacaagccaaggaaagaggccacagaggaaaccaaccctgccagcatcttgatcttggacttcca

SEQ ID NO: 486147 - DNA, 120 bp, Artificial Sequence
  ENSG00000162434_74 (sequence is synthesized)
gtcccacagggctctcagcagcctggaagaatatcgttgttcagaccagattgaagattgtgttctgcccagagggagtttgttgggccctcatctctaccagatccaaggactgtttct

SEQ ID NO: 486148 - DNA, 120 bp, Artificial Sequence
  ENSG00000162434_75 (sequence is synthesized)
cacagagactcagtaggatgtggaagaagaaggccgtggctccgttggctcagggaacatctgccttttcccctcctgccacctcccctggcagtggagggtgacctgtctctctccttg

SEQ ID NO: 486149 - DNA, 120 bp, Artificial Sequence
  ENSG00000162434_76 (sequence is synthesized)
gcacctcatcagagattcttctctcttggacaacaccctccatcctcggaacccttttctttccttatctcgggaaaccttccatattgtacctacttctcattctcttattactgcctt

SEQ ID NO: 486150 - DNA, 120 bp, Artificial Sequence
  ENSG00000162434_77 (sequence is synthesized)
cctccgccatcaaacagcatttacccctcctgttggccattctgtcagaacccctctttgaacctctgtagctggttcactccttccttcctgcttgtcccagggagaggatcgtggcta

SEQ ID NO: 486151 - DNA, 120 bp, Artificial Sequence
  ENSG00000162434_78 (sequence is synthesized)
agttctcctgggcacgtgttctgttctacccttgaagagcagtgccaggcctgggtacagcatgagtggcagcctccctgccagctgatagccctagctttccactgtcaccagcggagg

SEQ ID NO: 486152 - DNA, 120 bp, Artificial Sequence
  ENSG00000162434_79 (sequence is synthesized)
gtaagggaacagtccagcagcttcagaggcctgacgtggctcatgctgcccgtggctctgcagatgtgtgattctttctgtgtgtgagagagacaccaaagcccacagtcaaattctcag

SEQ ID NO: 486153 - DNA, 120 bp, Artificial Sequence
  ENSG00000162434_80 (sequence is synthesized)
tcactttcgtaaattacaaggaagatgggctgtatagaatcattgaagattataaaaatgttggtttttacctttaaagtaacttctttgtttatcctttccatgttaattgctactccc

SEQ ID NO: 486154 - DNA, 120 bp, Artificial Sequence
  ENSG00000162434_81 (sequence is synthesized)
tgagtttattcatcttttgtttatctatcaagcatgtgttcagtagctgttaggtaccaggcactgggattcagtggtgagcaggacagctgcagcctttgcttccgtgcacagctcacg

SEQ ID NO: 486155 - DNA, 120 bp, Artificial Sequence
  ENSG00000162434_82 (sequence is synthesized)
gcattgctcgaatgatgccacaggcatctgcttctctctgccgcttccgtttctatcttccatggggcttccctcccaggagagcgtgcctcatatgtgcctggctttcgttctttgctc

SEQ ID NO: 486156 - DNA, 120 bp, Artificial Sequence
  ENSG00000162434_83 (sequence is synthesized)
tgcctgctttgcatggtccaggctctgtagcctggcatttaattattctgttccagcttcccttccttggtgctttttcccctcctgccacctcccctggcaatggagggcgacctgtct

SEQ ID NO: 486157 - DNA, 120 bp, Artificial Sequence
  ENSG00000162434_84 (sequence is synthesized)
cctcggcacctcgccagagactgtcatatgtccaaggacaacttatcctttaagcacagtgcctagagcacacacttgttaggggcccataaaatgtctaatttcacttaaaatcagaaa

SEQ ID NO: 486158 - DNA, 120 bp, Artificial Sequence
  ENSG00000162434_85 (sequence is synthesized)
acatagttgagaaatataacttgtaatattttttatggaggaagggaaaagtgtttagggcctatggaagtcacagtgtagtcctgcttgtgatacgtgccccattgtgtgttgctggat

SEQ ID NO: 486159 - DNA, 120 bp, Artificial Sequence
  ENSG00000162434_86 (sequence is synthesized)
agttgctgctggacctgaccggttgctcccagagacaggaactcacagagtacgagaaacatgcctgagagccctccacatctcaggccctaactcagggcctggcttgtcttaggctct

SEQ ID NO: 486160 - DNA, 120 bp, Artificial Sequence
  ENSG00000162434_87 (sequence is synthesized)
gcaaacatagcacagtgacagttgttgaagtgtagcagcagctttttgcagggaaagagggagttgtatttattgcttctccatgacatggttcttttctcattagttcatgggcaagtc

SEQ ID NO: 486161 - DNA, 120 bp, Artificial Sequence
  ENSG00000162434_88 (sequence is synthesized)
aagggaaagagacctaggtagcagctgagtctgtagcctacagatggcctgggctggcttggctcagtcacttcccttagtcacttccacacattccagaaattgtgtttttcttacagg

SEQ ID NO: 486162 - DNA, 120 bp, Artificial Sequence
  ENSG00000162434_89 (sequence is synthesized)
tgacagaggaagttatatatggaaggtagggttaggggcaccaaccccctgtgcaattgacaatccatgcataactttgaccctccaaaacatagctaataataatagcccactgttgac

SEQ ID NO: 486163 - DNA, 120 bp, Artificial Sequence
  ENSG00000162434_90 (sequence is synthesized)
tggaagccttaccaataacataaacagactagtaacctgtatatatcttatgtattcatgatgtacctttttctgaaattaaaaaaaaaaaatttctgtgctacacagttcgtcagtttt

SEQ ID NO: 486164 - DNA, 120 bp, Artificial Sequence
  ENSG00000162434_91 (sequence is synthesized)
ttcaaactgttgcaaatctccaaaaaaattttcaatatacttattgaaaaaaaaatctgtgtatgaatggacttctgtggttcaaacccatgctgttcaagggtcaactgtagtagttaa

SEQ ID NO: 486165 - DNA, 120 bp, Artificial Sequence
  ENSG00000162434_92 (sequence is synthesized)
gagaacaggcttttgtagttttaggtcacctagcctcttggaatctcagttttcctcatctgtaaaatgaatgaaaccttccttgtagagttgctgtgaagattaaataacataatatat

SEQ ID NO: 486166 - DNA, 120 bp, Artificial Sequence
  ENSG00000162434_93 (sequence is synthesized)
ataaagtgcttgttaactcgtttcatgatgcctgtagtggtgtttgggtagctctcttttaaaatcctattcatcatgtaagatacaccatcagttgaatagcagcaatctgggaagtag

SEQ ID NO: 486167 - DNA, 120 bp, Artificial Sequence
  ENSG00000162434_94 (sequence is synthesized)
gaaacactgccacgtaagctgtatatcttgattgcgtgatgaaactaagttgcaggaatgttaaaatgtcaatcaaattggtcttggattcgaggtagaatgggcttagcagtgtggctg

SEQ ID NO: 486168 - DNA, 120 bp, Artificial Sequence
  ENSG00000162434_95 (sequence is synthesized)
atggtaagcgtgcagggagctgtggtcagcatggagttccagtcagcaggtgtttccctattctggaagcatagtgagaagtcagaggagctgtctttgtgatcttcgggaagtcacttt

SEQ ID NO: 486169 - DNA, 120 bp, Artificial Sequence
  ENSG00000162434_96 (sequence is synthesized)
agctccctgagtcatagaggaggtgctgatgggacacttctcacgcagcgctagtaagaaggaaagagatggtgaggggctacaaggggcagggttgtctgcctgcttctcagggcactt

SEQ ID NO: 486170 - DNA, 120 bp, Artificial Sequence
  ENSG00000162434_97 (sequence is synthesized)
cgcagcccggactggccggaggcgcggccaccgctcttggtcggtccttaggctgcgcggcccgggctgctcctgagcgcagctcaggaccccgcggctcgggcggggaaggcggggatt

SEQ ID NO: 486171 - DNA, 120 bp, Artificial Sequence
  ENSG00000162434_98 (sequence is synthesized)
cggggatttccagccccgcggagccggcgggcggcgaggaggtcgccgggcgggggcccccggccgggagaagagcggttaagccaggccgccccctcccccagcgcgcacgttatctaa

SEQ ID NO: 486172 - DNA, 80 bp, Artificial Sequence
  ENSG00000162437_0 (sequence is synthesized)
cccgggcctcctcccgctttctctctccgcttcccctggagcctccgaggagtccgcagccgctgggcgcccgggaagat

SEQ ID NO: 486173 - DNA, 120 bp, Artificial Sequence
  ENSG00000162437_1 (sequence is synthesized)
tgcgcgggcagggcccctcagccgaagcgcacgagggcgccccggacccgatgcccgccgcgctgcaccctgaggaggtcgccgcgcgactgcagcggatgcagcgggagctgagcaacc

SEQ ID NO: 486174 - DNA, 120 bp, Artificial Sequence
  ENSG00000162437_2 (sequence is synthesized)
gccgcgcgactgcagcggatgcagcgggagctgagcaaccgcaggaaaatcctggtgaaaaacctgccccaggacagcaactgccaggaagttcatgatttgttaaaagactatgactta

SEQ ID NO: 486175 - DNA, 120 bp, Artificial Sequence
  ENSG00000162437_3 (sequence is synthesized)
aaatattgttatgtggacagaaataaacgaacagcttttgttaccttattgaatggggaacaagcccagaacgcaattcagatgtttcatcaatattcttttagaggaaaagacttaata

SEQ ID NO: 486176 - DNA, 120 bp, Artificial Sequence
  ENSG00000162437_4 (sequence is synthesized)
gtccagcttcagccaacagatgctttgttgtgtattaccaacgtgcccatttcttttacatcagaagagtttgaagaacttgttcgtgcttatggaaatattgagagatgttttctggtc

SEQ ID NO: 486177 - DNA, 120 bp, Artificial Sequence
  ENSG00000162437_5 (sequence is synthesized)
tatagtgaagttactggccattccaaaggctatggatttgtggaatacatgaaaaaggactttgctgcaaaggctagactggagctattgggtagacagttgggagcatcagcactcttt

SEQ ID NO: 486178 - DNA, 120 bp, Artificial Sequence
  ENSG00000162437_6 (sequence is synthesized)
gcacaatggatggatgttaatctattggcttcagagctcattcattctaagtgcctttgtattgataaactccccagtgactacagggattcagaagagctgttgcaaattttttccagt

SEQ ID NO: 486179 - DNA, 120 bp, Artificial Sequence
  ENSG00000162437_7 (sequence is synthesized)
gtccataaacctgtgttttgccagcttgcacaggatgaaggtagttacgttggtggctttgcagtggttgaatatagcactgcggagcaggctgaagaggtccagcaggcagcagacggt

SEQ ID NO: 486180 - DNA, 120 bp, Artificial Sequence
  ENSG00000162437_8 (sequence is synthesized)
atgaccatcaagggcagcaaagtccaggtttccttctgtgctcctggagcgccagggcgaagtacattagcagcattgatagcggctcaacgtgtgatgcacagtaatcaaaagggctta

SEQ ID NO: 486181 - DNA, 120 bp, Artificial Sequence
  ENSG00000162437_9 (sequence is synthesized)
cttccagagccaaatccagtacaaattatgaaaagtttaaacaaccctgccatgttgcaagttcttctacagccccagttatgtggacgagctgttaaaccagccgttcttggaacacct

SEQ ID NO: 486182 - DNA, 120 bp, Artificial Sequence
  ENSG00000162437_10 (sequence is synthesized)
cacagcttgccacatctgatgaatccatccatctctcctgcatttttacatttgaataaagcacatcagaatctttctcatataccactggcacaacaacaattaatgaagtttgagaat

SEQ ID NO: 486183 - DNA, 120 bp, Artificial Sequence
  ENSG00000162437_11 (sequence is synthesized)
attcatactaataataaacccggcttacttggagagcccccagctgtggtacttcagactgcactagggatagggtcagtgcttccattgaaaaaggagttgggacatcatcatggagaa

SEQ ID NO: 486184 - DNA, 120 bp, Artificial Sequence
  ENSG00000162437_12 (sequence is synthesized)
gcacataaaacatctagcctgattccaactcaaacaacgataacagctggaatgggcatgttaccattctttccaaatcagcacattgctggacaggctgggccagggcacagtaatact

SEQ ID NO: 486185 - DNA, 120 bp, Artificial Sequence
  ENSG00000162437_13 (sequence is synthesized)
caggagaaacagccagccacggtgggaatggcagaaggaaatttctcagggtcgcagccttatcttcagagctttccaaaccttgctgctggaagcttgctggtgggacaccataagcag

SEQ ID NO: 486186 - DNA, 120 bp, Artificial Sequence
  ENSG00000162437_14 (sequence is synthesized)
cagcaaagccagccaaaaggcacagagataagttcaggggctgcctctaagaatcaaacttcactcttgggagaaccaccaaaagaaattcggctcagtaaaaatccatacttgaatttg

SEQ ID NO: 486187 - DNA, 120 bp, Artificial Sequence
  ENSG00000162437_15 (sequence is synthesized)
gcaagtgtgttgcccagtgtgtgcttatcatcccctgcaagtaaaaccactcttcataagactggaattgcaagcagcattctggatgcaatctctcagggaagtgaatcacaacacgca

SEQ ID NO: 486188 - DNA, 120 bp, Artificial Sequence
  ENSG00000162437_16 (sequence is synthesized)
ttggaaaagtgcattgcttattctccaccttttggtgattatgcacaggtgtcatctttaagaaatgaaaagcgaggctcatcatatctcatctctgccccagaaggtggttcagtggaa

SEQ ID NO: 486189 - DNA, 120 bp, Artificial Sequence
  ENSG00000162437_17 (sequence is synthesized)
tgtgttgaccagcattctcagggcacaggagcatattacatggaaacttacttaaaaaagaagcgagtatactgagttaagctctctcctaataaccccctaaggttctctgcagtatct

SEQ ID NO: 486190 - DNA, 120 bp, Artificial Sequence
  ENSG00000162437_18 (sequence is synthesized)
tcctttaaatacgggtttatagtttcccagaaggaactgtgttgtgcagcaggcagaaatgccaaataaaaaatagcaataagaagagacatcaattgaggacattttccactagagtca

SEQ ID NO: 486191 - DNA, 120 bp, Artificial Sequence
  ENSG00000162437_19 (sequence is synthesized)
gatgcatcttaatcagtgtgctaacttacaatccattggagaaactaacaatgttccaatattccttgatttaggactgggaataattctgacaccatatataaaagaagtttgaagcaa

SEQ ID NO: 486192 - DNA, 120 bp, Artificial Sequence
  ENSG00000162437_20 (sequence is synthesized)
taaatgggaaacagtgttgtttcctgagccttagaagaatgagtttcttataagccaatgtgcatttcaatttactttccctagaagtaattgcatttatagatttttaggacttttcct

SEQ ID NO: 486193 - DNA, 120 bp, Artificial Sequence
  ENSG00000162437_21 (sequence is synthesized)
agaactacaagggtgcaagtaccaaatgtgctgatggtaatattataaagatgctctacatgcacactcaattacgcccacaccagccatgcaaaattaaacccggtaagagagtgacag

SEQ ID NO: 486194 - DNA, 120 bp, Artificial Sequence
  ENSG00000162437_22 (sequence is synthesized)
tgatatccaaggtatccactactaccgatgctttaagatgttgtttaccatttataccttctgtgaaaaatagaaggtattttaagaaaagtaactttggtgatctaataaaagggtttg

SEQ ID NO: 486195 - DNA, 120 bp, Artificial Sequence
  ENSG00000162437_23 (sequence is synthesized)
gcaaactacaccctgggtccacatttggtctaccacccgcttttgtgctgcctgcaagctaagactaatgtttacatttttaaatggttggaggaaaaaagaaaacttatgacatgaaat

SEQ ID NO: 486196 - DNA, 120 bp, Artificial Sequence
  ENSG00000162437_24 (sequence is synthesized)
ttatatgaaattcagatttcagtgtccataaataaacttttattgggacgttgccatgctcattcatttacgtgttgtctgtggcactcttacgctacaagggcagaactgattagcttc

SEQ ID NO: 486197 - DNA, 120 bp, Artificial Sequence
  ENSG00000162437_25 (sequence is synthesized)
aacagagactgtatggcctacaaagaccatatggcctaaaatttcaagtatctggccatttatatatagtttgctgatccctgatctaatagcactaattctaatagcaactattccttt

SEQ ID NO: 486198 - DNA, 120 bp, Artificial Sequence
  ENSG00000162437_26 (sequence is synthesized)
caattcacctaaagacagacctttagcctttagacagacttgtaagtggaaaggaacatgggtttctgtgctcatttcatagcgtagactagtaatgatctaatgactagaatggggcct

SEQ ID NO: 486199 - DNA, 120 bp, Artificial Sequence
  ENSG00000162437_27 (sequence is synthesized)
attttgatcactaaatgccctattatttccacaatatagtatagtaaagcagtcaatactgcactttctgatggagtcttaaggagtcacagtatttataaccattttgagctaataagc

SEQ ID NO: 486200 - DNA, 120 bp, Artificial Sequence
  ENSG00000162437_28 (sequence is synthesized)
tatacctcactctctgctttctctctcactctttttgatagtgtgttagggtgaaaaatcagttatttaacccaatttacttgtgaaagaagttttatctttatggactatgatgacttt

SEQ ID NO: 486201 - DNA, 120 bp, Artificial Sequence
  ENSG00000162437_29 (sequence is synthesized)
tgacatcaccatttcttgaagaccttggtattaaatgcatgagaaaccttttgccatctagaaatttctaagtttgtttatgttataagactgtaattaattgatagggaatttgggatc

SEQ ID NO: 486202 - DNA, 120 bp, Artificial Sequence
  ENSG00000162437_30 (sequence is synthesized)
tcaatccggggctttttgaaatcagatcattaaatatctcgtcactttggggacttgttatttttaactatgatgtggatatcctgttttaattatgaagtctagaattggtacatatgt

SEQ ID NO: 486203 - DNA, 120 bp, Artificial Sequence
  ENSG00000162437_31 (sequence is synthesized)
tgtatgctttgtaaagaatttcacttggtctaatttattgcatatactagcttctgttggaaaatgactgacagctagaaagtttaaggtaatttctaagtatactacctataagtaact

SEQ ID NO: 486204 - DNA, 120 bp, Artificial Sequence
  ENSG00000162437_32 (sequence is synthesized)
gataagaattaggcatcattcagtgatatagcagatgactaatgggtttttcaggccctgcacttctctttcccattttcctgttgcattcagcctcttcaatgcttagtcacacctcca

SEQ ID NO: 486205 - DNA, 120 bp, Artificial Sequence
  ENSG00000162437_33 (sequence is synthesized)
ctatagtacaaacaaacaaacaaacagaagaaaggaaagatggtgaattttgcaacagagctgcaaaaagtcagtcagtcaaagcaggaagaggttgaaggaactaaaacaaacaaacaa

SEQ ID NO: 486206 - DNA, 120 bp, Artificial Sequence
  ENSG00000162437_34 (sequence is synthesized)
aggtgtctggactacagcacagtggacatgccatccatactggcctgtgccccgttatcaatcactgggcacaacagtgaagaagtgcaaatcaagtggtgtttgtttgtttgttagtag

SEQ ID NO: 486207 - DNA, 120 bp, Artificial Sequence
  ENSG00000162437_35 (sequence is synthesized)
taaggaccgtaacccaccccttcctccccccaaaactatactgttatttttctatgtaagcaaattgtttgaaatgctttgaaaatgaaatcttaatattaaaaggcatatgcatgtaaa

SEQ ID NO: 486208 - DNA, 120 bp, Artificial Sequence
  ENSG00000162437_36 (sequence is synthesized)
accttttggtgattatgcacaggtaaataattcccaggttctgatgatactcagaaaaattggttcaactatatattgagttcactgaatatgaaattgtgatttctatattattaacgt

SEQ ID NO: 486209 - DNA, 120 bp, Artificial Sequence
  ENSG00000162437_37 (sequence is synthesized)
aggcaaatcaaattgcactgatctatgtatttcttactcatcatttgaaatttgggaatgtgttcaagacattatttagtatcattttgcactagatatttacctctcactgtttaccta

SEQ ID NO: 486210 - DNA, 120 bp, Artificial Sequence
  ENSG00000162437_38 (sequence is synthesized)
gtggttggcaaactacagcccatagaacaaatctagcccaccacctggttttgtaaataaatttgtattgtaatacagccatgtccattcattaacatattgtctatggtgctgtcatgc

SEQ ID NO: 486211 - DNA, 120 bp, Artificial Sequence
  ENSG00000162437_39 (sequence is synthesized)
agttgagtgatgacagtagagactatgtggcctgcaagattaaatatttactatctggttctttatagaaaaatgctgctaacctctggtttgcactagtgtagacctaagaaacccaag

SEQ ID NO: 486212 - DNA, 120 bp, Artificial Sequence
  ENSG00000162437_40 (sequence is synthesized)
ggaatgcctctgttcttctccactgattgtagatggagaaagatgatcatatttacagacactactgtgctaacttctaaaccagccaatcaataacataaaaatattatgttcataaga

SEQ ID NO: 486213 - DNA, 120 bp, Artificial Sequence
  ENSG00000162437_41 (sequence is synthesized)
tgtcctgtgtcattacttaaatatttcagttttgctttggcccttcttcagcttactcttagtggtgtaagctgaatatatatcatgttagccctgtgtgattatggaatcataagagtc

SEQ ID NO: 486214 - DNA, 120 bp, Artificial Sequence
  ENSG00000162437_42 (sequence is synthesized)
cacaagagtcttataattatcagttctgactcttactttcctagaacagccagcttcttctcagatctatcctgttcgttggagtcttgtctccactttgatttccctggagcagctttg

SEQ ID NO: 486215 - DNA, 120 bp, Artificial Sequence
  ENSG00000162437_43 (sequence is synthesized)
tgtttgcctgacccatccctaataaacttagaaaagaaaaccacttagaacaattgacgcctgattataagagtactagaaacagcccaagttctgtaaaaatggtgcagctggatatta

SEQ ID NO: 486216 - DNA, 120 bp, Artificial Sequence
  ENSG00000162437_44 (sequence is synthesized)
gtgaaatatttgccatctcttatatacctgggacaagacggaaaaatatgggttgggtagatgatgtaattaggtgacagtatatctatatttagagaacagtgatcacaaattgctgca

SEQ ID NO: 486217 - DNA, 120 bp, Artificial Sequence
  ENSG00000162437_45 (sequence is synthesized)
gtctgaaggcattctcttatattgattcataagagtcatcttcagtcctttattagataacatttgaagtaatgacttagataaagacattaattgtaaaatttacaagatatagtcctg

SEQ ID NO: 486218 - DNA, 120 bp, Artificial Sequence
  ENSG00000162437_46 (sequence is synthesized)
cctgtacaattccaatttgtttcttttcaagaaacaaactttttataaacaggagaagcacaataaattttttaaaaattcattaaatacatatttaagctttaaaaattttttgaactt

SEQ ID NO: 486219 - DNA, 120 bp, Artificial Sequence
  ENSG00000162437_47 (sequence is synthesized)
ttctttttaaatttgcctttttcttagcagttttgcttattagattactgtgatttattgtatacttatatccatggaaagactttctcattcacacatggagaaattctgtgataatga

SEQ ID NO: 486220 - DNA, 120 bp, Artificial Sequence
  ENSG00000162437_48 (sequence is synthesized)
tgccttttgcattactgtatgtcttctgcctccacacttgcttgcccagagatatggtggggaaatgaatcctccctgcactgttcagtgtctcctttgacagtccctgcttctagcgca

SEQ ID NO: 486221 - DNA, 120 bp, Artificial Sequence
  ENSG00000162437_49 (sequence is synthesized)
cgcttgttcataaaatgggatttgttctctctctcgtgttctttcttccttataaacttaattaaatgttactaatggaacattaaagtacatggaattaaactaatggaatactaaaat

SEQ ID NO: 486222 - DNA, 120 bp, Artificial Sequence
  ENSG00000162438_0 (sequence is synthesized)
agccagtcctgagcacctaaccatgttgggcatcactgtcctcgctgcgctcttggcctgtgcctccagctgtggggtgcccagcttcccgcccaacctatccgcccgagtggtgggagg

SEQ ID NO: 486223 - DNA, 120 bp, Artificial Sequence
  ENSG00000162438_1 (sequence is synthesized)
agaggatgcccggccccacagctggccctggcagatctccctccagtacctcaagaacgacacgtggaggcatacgtgtggcgggactttgattgctagcaacttcgtcctcactgccgc

SEQ ID NO: 486224 - DNA, 120 bp, Artificial Sequence
  ENSG00000162438_2 (sequence is synthesized)
ccactgcatcagcaacacccggacctaccgtgtggccgtgggaaagaacaacctggaggtggaagacgaagaaggatccctgtttgtgggtgtggacaccatccacgtccacaagagatg

SEQ ID NO: 486225 - DNA, 120 bp, Artificial Sequence
  ENSG00000162438_3 (sequence is synthesized)
gaatgccctcctgttgcgcaatgatattgccctcatcaagcttgcagagcatgtggagctgagtgacaccatccaggtggcctgcctgccagagaaggactccctgctccccaaggacta

SEQ ID NO: 486226 - DNA, 120 bp, Artificial Sequence
  ENSG00000162438_4 (sequence is synthesized)
cccctgctatgtcaccggctggggccgcctctggaccaacggccccattgctgataagctgcagcagggcctgcagcccgtggtggatcacgccacgtgctccaggattgactggtgggg

SEQ ID NO: 486227 - DNA, 120 bp, Artificial Sequence
  ENSG00000162438_5 (sequence is synthesized)
cttcagggtgaagaaaaccatggtgtgcgctgggggcgatggcgtcatctcagcctgcaatggggactccggtggcccactgaactgccagttggagaacggttcctgggaggtgtttgg

SEQ ID NO: 486228 - DNA, 120 bp, Artificial Sequence
  ENSG00000162438_6 (sequence is synthesized)
catcgtcagctttggctcccggcggggctgcaacacccgcaagaagccggtagtctacacccgggtgtccgcctacatcgactggatcaacgagaaaatgcagctgtgatttgttgctgg

SEQ ID NO: 486229 - DNA, 120 bp, Artificial Sequence
  ENSG00000162438_7 (sequence is synthesized)
gagcggcggcagcgagtccctgcaacagcaataaacttccttctcctcgggccacctggatccttgatttgtgcagcttctgttgcttccctcctctctggtgctgcccctttccacact

SEQ ID NO: 486230 - DNA, 120 bp, Artificial Sequence
  ENSG00000162438_8 (sequence is synthesized)
atggagccaaagagagaccccactcagccagtttcccccaccctgcattagacaggtggggaaacagaggccgggagagagggccaaggaaggagcctcctggggcattaatgggaggca

SEQ ID NO: 486231 - DNA, 120 bp, Artificial Sequence
  ENSG00000162438_9 (sequence is synthesized)
gggggctggggtggagagcccagggagtcctgcgtgaagccggaggggatgggagtgaaggacgcatcagacaccttccccgctccatctcacaagctgcgaacaggtgagaccctgatg

SEQ ID NO: 486232 - DNA, 120 bp, Artificial Sequence
  ENSG00000162438_10 (sequence is synthesized)
aaatcactcgcttctccgatcctacctccaccgaggggcctggcaggtcctcacagccccccagcagcaggtggaagacagggtctccccaaaagcagcgtcccccaggccagagagacc

SEQ ID NO: 486233 - DNA, 120 bp, Artificial Sequence
  ENSG00000162438_11 (sequence is synthesized)
aggccacaggaggatggccaaagctcagggacaaccactcctggggaaggggctccctagcagggaccccccacccccaccccgcagcacagaccccatggctgctgttggcaggggctc

SEQ ID NO: 486234 - DNA, 120 bp, Artificial Sequence
  ENSG00000162438_12 (sequence is synthesized)
tctgctttgagaagtgtttagtgagccagcccctgtgtccagtcctgtgctgggcatgatgagggtacaggaagaggaagagaccccagcatcatcctcaggagacatacgtttgaagaa

SEQ ID NO: 486235 - DNA, 120 bp, Artificial Sequence
  ENSG00000162438_13 (sequence is synthesized)
ggcaatggtttccacacagaatcacagtggtcagagctggatatgctttcattgcattagacaagtggggaaactgaggcccagagagaggaaggagttgggatagctggcaatgcctga

SEQ ID NO: 486236 - DNA, 120 bp, Artificial Sequence
  ENSG00000162438_14 (sequence is synthesized)
caggagaagagagttctcctgaggctgacaagaggccaagaggagccagagatgagatagacccagtgtccagggagggacatgccagtgggatcagaccctgatgacaggggcagccag

SEQ ID NO: 486237 - DNA, 120 bp, Artificial Sequence
  ENSG00000162438_15 (sequence is synthesized)
agatgagagagatccaatgtccagggagggacatgccagggggatcagaccctgatgataggggcctctggcctggcctgctcctgggaatgtcctgttctgtgggggtgcccccagccc

SEQ ID NO: 486238 - DNA, 120 bp, Artificial Sequence
  ENSG00000162438_16 (sequence is synthesized)
agcctctggacccctcgctggagagccctcggctgcagctacctcagactggcccaagagttgtcccttttctccaccagactttgtcccctgggagtggggaccatggtgtgactccca

SEQ ID NO: 486239 - DNA, 120 bp, Artificial Sequence
  ENSG00000162438_17 (sequence is synthesized)
cacccccatgatgccaaggcaagtctcaggaaagacttgacttactcaacaagcagtgggagctacagggagcccagcaccacccagacccgggaatccaggatgggggtaccccagctg

SEQ ID NO: 486240 - DNA, 120 bp, Artificial Sequence
  ENSG00000162438_18 (sequence is synthesized)
tgcaggagacagaccagtaaatagatcattaaattccctggtatacatttgaaaacagaaatacagaccagaagcatagaaacaggacacctgaagcagtgtcagttggcgggaggaatc

SEQ ID NO: 486241 - DNA, 120 bp, Artificial Sequence
  ENSG00000162438_19 (sequence is synthesized)
caggatggcttcctggaggtgatgatgcccaagcttggtcttaaaatttgactagaaggtacccaagtacagaacgtagtccttcttaagtttgcttaatctaaacttcattcccaccta

SEQ ID NO: 486242 - DNA, 120 bp, Artificial Sequence
  ENSG00000162438_20 (sequence is synthesized)
tcacaggtgtgagccaccacacccggtctcattcccagctatcttcttttgtgtatgtctttatattgggggttataaatgctaaatgcttgctgtcctcagatcccttgtagttaggga

SEQ ID NO: 486243 - DNA, 120 bp, Artificial Sequence
  ENSG00000162438_21 (sequence is synthesized)
gctaattaaaatgttaattaatattacaatgttatttaagcaatgttaaataatatctaacatttattgggcacttagtatgtgccaagcactatcctataggttttacattatctcaat

SEQ ID NO: 486244 - DNA, 120 bp, Artificial Sequence
  ENSG00000162438_22 (sequence is synthesized)
ccccagaaacaatcccatgaggtaggttactattaacatcatgcccattttacagatgagaaaactgaggccagacagggttagtgacttcccaatgtgtgaactagaaggtagtggagc

SEQ ID NO: 486245 - DNA, 120 bp, Artificial Sequence
  ENSG00000162438_23 (sequence is synthesized)
cggaatccagactttagtgatctgactccagggcctgtgctcttgtccaccatgctctgctgccctgcaatgtaaaacatcctccagaaaaaaaataaataaataaaaacttccctgatg

SEQ ID NO: 486246 - DNA, 120 bp, Artificial Sequence
  ENSG00000162441_0 (sequence is synthesized)
agtgcgtgcgtccagcggaagtgctcccccggcgcggtccgccaggccagtgccctcagcatctccaccccgaggtggtttgaactttgagccttttgtagtcctgatgaataatttcat

SEQ ID NO: 486247 - DNA, 120 bp, Artificial Sequence
  ENSG00000162441_1 (sequence is synthesized)
tttcctcaagtttatgacactcggaacgtcaagaactggaggtttgtgcaatttgagaccggtcggcactgtgcagagatcagagtactaagagacagagattaaaatggcttccagagg

SEQ ID NO: 486248 - DNA, 120 bp, Artificial Sequence
  ENSG00000162441_2 (sequence is synthesized)
aaagacagagacaagcaaattaaagcagaatttagaagaacagttggatagactcatgcaacaattacaagatctggaggaatgcagagaggaacttgatacagatgaatatgaagaaac

SEQ ID NO: 486249 - DNA, 120 bp, Artificial Sequence
  ENSG00000162441_3 (sequence is synthesized)
tattcaggcagctatcagccaggcctttaaaaccccagaggtcatcagattgtttgcaaagaaacaaccaggtcagcttcggacaaggttagcagagatggatagagatctgatggtagg

SEQ ID NO: 486250 - DNA, 120 bp, Artificial Sequence
  ENSG00000162441_4 (sequence is synthesized)
aaagctggaaagagacctgtacactcaacagaaagtggagatactaacagctcttaggaaacttggagagaagctgactgcagatgatgaggccttcttgtcagcaaatgcaggtgctat

SEQ ID NO: 486251 - DNA, 120 bp, Artificial Sequence
  ENSG00000162441_5 (sequence is synthesized)
actcagccagtttgagaaagtctctacagaccttggctctggagacaaaattcttgctctggcaagttttgaggttgaaaaaacaaaaaaatgacatggtgcagaagcttgtaacattga

SEQ ID NO: 486252 - DNA, 120 bp, Artificial Sequence
  ENSG00000162441_6 (sequence is synthesized)
tcacattcttaatgtaaatggtgtctttcttctggggttttcagttattgcaaagaaatgaagagattctggaaatgcatcaataacctaagaaaaagcgacataaaaatatacttatgg

SEQ ID NO: 486253 - DNA, 120 bp, Artificial Sequence
  ENSG00000162441_7 (sequence is synthesized)
ggaagtgctcccccggcgcggtccgccaggccagtgccctcaggtaggcggggcccctggccctaaactctgggactggcgggcggtcaggcggcacagggggaatcccgggggcctaag

SEQ ID NO: 486254 - DNA, 120 bp, Artificial Sequence
  ENSG00000162441_8 (sequence is synthesized)
gtgatcctgaacttgttgcgacagagggactcactggactctgttcgttatgatttgtctgtttaagagagaaaacaaagtggacttgatttttattaaggctgtttgtttttaagtgtt

SEQ ID NO: 486255 - DNA, 120 bp, Artificial Sequence
  ENSG00000162441_9 (sequence is synthesized)
gatagtgaacgaaaagatgtgaagtaatgatatttttctgcttacaacttatccccactcattggagtgaacagtgacgcaagctcaatagacttcataagtgttcatagaattttacaa

SEQ ID NO: 486256 - DNA, 120 bp, Artificial Sequence
  ENSG00000162441_10 (sequence is synthesized)
ttctgagtgatcttagaaatcatttctgtttttacaaacaaggaaactgaggtccagaaagagcaagcgactttgcttaaagtcgcatcagagagctgagggtaagactcaggtgtcctg

SEQ ID NO: 486257 - DNA, 120 bp, Artificial Sequence
  ENSG00000162441_11 (sequence is synthesized)
actcccagtttagtatcttttgaattttatttctgtaccatttaaaaaaaataattaacactatttgtgcaagtcagtgtttttgaaaattcagtgtcccaataaaaagtggactgcaca

SEQ ID NO: 486258 - DNA, 120 bp, Artificial Sequence
  ENSG00000162441_12 (sequence is synthesized)
ctaagggaccatcccccagcctgtaagctgtctgtattaatggggcccgttgtatctcggaattttgaggttggaacaatgggagccctgttgagcgtttcctaaagtgacttagccgcc

SEQ ID NO: 486259 - DNA, 120 bp, Artificial Sequence
  ENSG00000162441_13 (sequence is synthesized)
tgcgttgtttgaccagggaagcaacaggaaatggcagctagaggccctccctgtgcgtgacctcttgtcacactcagaggggggtaactgtcagctgttatctactcttcaggttttgga

SEQ ID NO: 486260 - DNA, 120 bp, Artificial Sequence
  ENSG00000162441_14 (sequence is synthesized)
gaaacacaaaataagttatgaggaaaagcaaatttctctcctgagtatttacatgtctctgtatgctcaaatatgcagatgtgtccctatgcgtgtatattagcttattttttaggctct

SEQ ID NO: 486261 - DNA, 120 bp, Artificial Sequence
  ENSG00000162441_15 (sequence is synthesized)
agccattttatattctttcatgtgcttctcaatattctttttctttgcactttatacaaattaaaagcatttttaaagcttcttctgtactgtaaactactaggtgctttgccaaccaga

SEQ ID NO: 486262 - DNA, 120 bp, Artificial Sequence
  ENSG00000162441_16 (sequence is synthesized)
cagattagaggacctccgctacactgatgccttatttggaacttaaaagaggtgaaattcatatatcataaaattcaccattttaaagtgtaccattcgttggcagaacatttacagtgg

SEQ ID NO: 486263 - DNA, 120 bp, Artificial Sequence
  ENSG00000162441_17 (sequence is synthesized)
tgtgcaaccatcactactctctagttgcagaacattcttatcacccccaaaggaggccctatacctattaagcagttagtccccattcccttctcctccgactgctaacaatagccacta

SEQ ID NO: 486264 - DNA, 120 bp, Artificial Sequence
  ENSG00000162441_18 (sequence is synthesized)
atctgcaccctgtctctgtggatttacctattctggatatttcatataaatggaatcatatgatatgtgacctttttatgtatctggcttctttcacttagcataatattttcttttctt

SEQ ID NO: 486265 - DNA, 120 bp, Artificial Sequence
  ENSG00000162441_19 (sequence is synthesized)
cctcagcttcccaagtagctgggattactagtgtgtaccaccacgcccagctaatttttgtacctttagtatagagacagggtttcaccatgttggcccagctggtcctgagctgacctc

SEQ ID NO: 486266 - DNA, 67 bp, Artificial Sequence
  ENSG00000162441_20 (sequence is synthesized)
gggacatcatcatattttcaagtttaaccaacattatagcatgtatcagtactttattcctttttat

SEQ ID NO: 486267 - DNA, 120 bp, Artificial Sequence
  ENSG00000162441_21 (sequence is synthesized)
ccaacattatagcatgtatcagtactttattcctttttatggctaaataatattccattgtatggatatcatattttgtttatccggtatctgttgatgatttgggttgtttccttcttt

SEQ ID NO: 486268 - DNA, 120 bp, Artificial Sequence
  ENSG00000162441_22 (sequence is synthesized)
tggctattgtgaataatgcttcagtgaacatttgtgtacaaatatttgtttgaatacctgttttcaatttttttgggtgtacacctaggaatggaattgctgcgtttgttgttgtgttgt

SEQ ID NO: 486269 - DNA, 89 bp, Artificial Sequence
  ENSG00000162441_23 (sequence is synthesized)
gggatgagccaccacacccagcctacgtttgttttttaagccatagaagattcttcccaccagtcgggcacagtggctcacacctgtaa

SEQ ID NO: 486270 - DNA, 120 bp, Artificial Sequence
  ENSG00000162441_24 (sequence is synthesized)
aaaaaaaaaaaaaaaaaagaggaagaagattcttcccttaccctgcaatagtagaccagaaaaattaggaatatcttgaatttgaaagggacctaatgcctggcacagtggctcacgcat

SEQ ID NO: 486271 - DNA, 120 bp, Artificial Sequence
  ENSG00000162441_25 (sequence is synthesized)
tgaatttgaaagggacctaatgcctggcacagtggctcacgcatgtaatctcagaactctgggaggcagaggtgggcggatcgcctgaactcaggatttgagaccagcctggccaacatg

SEQ ID NO: 486272 - DNA, 90 bp, Artificial Sequence
  ENSG00000162441_26 (sequence is synthesized)
gtgaaaccctgtctctaaaaaaaaaaaaaaaattagccaggcgtgatggcatgcactcagaggatcacctgaacctgggaagcagaggtt

SEQ ID NO: 486273 - DNA, 120 bp, Artificial Sequence
  ENSG00000162441_27 (sequence is synthesized)
ctgagatcacgccactgtactggctgacaaagtgagacccctgtctaaaaaaaagataaagagagttacctgaatctggaatccttaatcttggttttccttaaactttctataagtcca

SEQ ID NO: 486274 - DNA, 120 bp, Artificial Sequence
  ENSG00000162441_28 (sequence is synthesized)
gcatctgaaatattttgtcaattatcacattaatgtgttcattttgtaagtaagagtactcaatttaaaatgatcttactttaaaagtggcctagtttgcagtgcccagcaggacactga

SEQ ID NO: 486275 - DNA, 120 bp, Artificial Sequence
  ENSG00000162441_29 (sequence is synthesized)
cagtcacagctgtgtgactttttgtgggttacttaatttttttgagcctccttttctcttctattcaatgaggataatagggcctacctcataggattattatgcattcccctctgttaa

SEQ ID NO: 486276 - DNA, 120 bp, Artificial Sequence
  ENSG00000162441_30 (sequence is synthesized)
tgcacgtaaagtttttacttggaaaactaactcaccatttaacaaccattctaagcaccataggatatattttgtttcacaaatttggtattcattcagaataagtatttgaaaagtgag

SEQ ID NO: 486277 - DNA, 120 bp, Artificial Sequence
  ENSG00000162441_31 (sequence is synthesized)
taaattctatgcaattatagttattaaatgacttataaactgtgtttctcttccacttcttgctacatttaatcttctaggtgttcagatatctttggagattataggcagcaataaagc

SEQ ID NO: 486278 - DNA, 120 bp, Artificial Sequence
  ENSG00000162441_32 (sequence is synthesized)
taaggcagctaacctttcaacattcttgtgtcaggctaatattttggtgaaaggaattcttgtgtttctcaaagaactagagctgaagcagaaataagttccaatgagcaagtgtccaat

SEQ ID NO: 486279 - DNA, 120 bp, Artificial Sequence
  ENSG00000162441_33 (sequence is synthesized)
cggaccattgaatgaaatctagtgttttaaacaattctgatgtttcaatgttttgttctgttttcttttgatcttgtgagcagtaagacatattttatgtgggtggtaaaggaagaaatc

SEQ ID NO: 486280 - DNA, 120 bp, Artificial Sequence
  ENSG00000162441_34 (sequence is synthesized)
aagtaacagaatgaggaattgttcccaggaagagttagagttgggacaaatgggttgttaactttgatttttagatcttctctgaagacattaaacatggaatggtcatctttagaaaaa

SEQ ID NO: 486281 - DNA, 120 bp, Artificial Sequence
  ENSG00000162441_35 (sequence is synthesized)
taaaagactatgcaactccaccactgaaatggtatcttattacagtgaatgatggataatctgaaattactatagaaaaaaataaacccagaccattttgcctagagcctttcaaccacc

SEQ ID NO: 486282 - DNA, 72 bp, Artificial Sequence
  ENSG00000162441_36 (sequence is synthesized)
aggctggtctcaaactgctgacctcatgtgatccaccccccccccccccccaccctaagacattcttacctg

SEQ ID NO: 486283 - DNA, 120 bp, Artificial Sequence
  ENSG00000162441_37 (sequence is synthesized)
gcccagcctcctaagacattcttacctggtttctagaaccacctgtaacatttacccactcaactggactttgtttcattttgtttagctgactgcagatgatgaggccttcttgtcagc

SEQ ID NO: 486284 - DNA, 120 bp, Artificial Sequence
  ENSG00000162441_38 (sequence is synthesized)
ccccaagttacatgaactacctgctagactcacaccccagcaaaaatattgatgtccccagcaagattagcttcctgttaaagatccaggacctgtgaatacatgcgtaactgcaagaat

SEQ ID NO: 486285 - DNA, 120 bp, Artificial Sequence
  ENSG00000162441_39 (sequence is synthesized)
ggaagcaaaggatgaacccaagttaaagcccagcacaagaatatgatgtaagcgcttttgggaaatgcagagattttcttttctcttcaaataataaattacatctaaaaattaatgaga

SEQ ID NO: 486286 - DNA, 120 bp, Artificial Sequence
  ENSG00000162444_0 (sequence is synthesized)
gcccgccgggtttgtcccgcgatccccgaccatgcccgccgacctcagcggtacttggaccctgctcagcagcgacaacttcgagggctacatgctggccctaggtattgactttgccac

SEQ ID NO: 486287 - DNA, 120 bp, Artificial Sequence
  ENSG00000162444_1 (sequence is synthesized)
tcgtaaaatagccaagttgctgaagccacagaaagtgattgagcagaatggggattcttttaccatccacacgaacagcagcctaaggaactactttgtgaaatttaaagttggagaaga

SEQ ID NO: 486288 - DNA, 120 bp, Artificial Sequence
  ENSG00000162444_2 (sequence is synthesized)
gacaacagaaaatgcaagagtttggttatctgggacaatgacaggctcacctgtatccagaagggagaaaagaagaacagaggctggacccattggatcgaaggagacaaactccacctg

SEQ ID NO: 486289 - DNA, 120 bp, Artificial Sequence
  ENSG00000162444_3 (sequence is synthesized)
gaaatgttctgtgaaggtcaagtgtgcaaacagacattccagagagcctgatccacatccagcagcagagcccacttgtggctgcagctttatgccaaattatattgcagactgaacaga

SEQ ID NO: 486290 - DNA, 120 bp, Artificial Sequence
  ENSG00000162444_4 (sequence is synthesized)
cgtttatctatcccatttggcgacgaggactcgtggctggagagagccacacagcgtgtaacctgaagtcatctagattatggggaaactgctcagcttcaataaacctgtccaaatgac

SEQ ID NO: 486291 - DNA, 120 bp, Artificial Sequence
  ENSG00000162444_5 (sequence is synthesized)
gtcccggcccgagcctccggccgcccgccgggtttgtcccgcgatccccgaccatgcccgccgacctcagcggtacttggaccctgctcagcagcgacaacttcgagggctacatgctgg

SEQ ID NO: 486292 - DNA, 60 bp, Artificial Sequence
  ENSG00000162444_6 (sequence is synthesized)
gctacatgctggcccgcaacttccgtctccccggttcaaacaattctcctgcttcagcct

SEQ ID NO: 486293 - DNA, 120 bp, Artificial Sequence
  ENSG00000162456_0 (sequence is synthesized)
gccaaagcagaaatgtagccagacaggagtcccaagggtgggcttcagcttcagagggctttgagagaggaagagtaagctgggtgacctcgtacagatccctggtcaaggtgggactgg

SEQ ID NO: 486294 - DNA, 120 bp, Artificial Sequence
  ENSG00000162456_1 (sequence is synthesized)
ggggcccgtagtggagcagtggaataggactgcagataaatcccagggttccccacctatcatcttactgcccagaaactcctaccctgaagttggagcgccaacaaggagacatccaag

SEQ ID NO: 486295 - DNA, 120 bp, Artificial Sequence
  ENSG00000162456_2 (sequence is synthesized)
agcccagaaacttccaggacttttctggggccagactgcaccggctggaggcagtgccccgggtgggcctgcatggacatccccatcagcagcagagacttccgcggcctgcagctggcc

SEQ ID NO: 486296 - DNA, 120 bp, Artificial Sequence
  ENSG00000162456_3 (sequence is synthesized)
tgcgtggctctcgggctggtggctggcagcatcattatcggcatctccgtatccaaggctgcagctgccatgggcggtgtctttattggcgctgctgttctggggctcctcatcttggcc

SEQ ID NO: 486297 - DNA, 120 bp, Artificial Sequence
  ENSG00000162456_4 (sequence is synthesized)
aggggcagaccacggggaaggaagatccagcaccaatggcaacaaggaaggagcccgcagcagcctgtccaccgtgagcaggaccctggagaagctgaagccggggacccggggggctga

SEQ ID NO: 486298 - DNA, 120 bp, Artificial Sequence
  ENSG00000162456_5 (sequence is synthesized)
ggaatgctgaggcaaagtctgagcggctgcccatgccctgccctcccatcctgcctgctgcccctatgtcagtgccctcctgggttaggagacccggaccggagacaagccaggccctgc

SEQ ID NO: 486299 - DNA, 120 bp, Artificial Sequence
  ENSG00000162456_6 (sequence is synthesized)
agaccccagagcggctgggaacagtgtctggaatggggccttttgcactcgcccggccaagcctctccaaaatggattccactggtgtgggctgggacctggagcaaggtgtcgccggac

SEQ ID NO: 486300 - DNA, 120 bp, Artificial Sequence
  ENSG00000162456_7 (sequence is synthesized)
gcccccacagggttcccatgtttcaggctcctgccctggcctttctttctggactgcagctcagctttgttgcctgttcaatctactgatttgtttctctggaatttggggtccaaggcc

SEQ ID NO: 486301 - DNA, 120 bp, Artificial Sequence
  ENSG00000162456_8 (sequence is synthesized)
tgccccagtcccttgctctaacccggctacagaagtgaaccacaggcccacaagaaccacagacagggaccctccacccccacggtctagcccaggggctctagagctcactagcccaat

SEQ ID NO: 486302 - DNA, 120 bp, Artificial Sequence
  ENSG00000162456_9 (sequence is synthesized)
agaggggctagacaagattcttttccaaatatcaaaactcctggcagttcctcagggacaggctctgagcagcagtgaatcagatgggggaatttggggggctcacaaagggacaggtac

SEQ ID NO: 486303 - DNA, 120 bp, Artificial Sequence
  ENSG00000162456_10 (sequence is synthesized)
aaacaacttcgcctgggggtcagaggaggcaacttctcagctgagcccaggcctgagacccttggtgtcttaactccaccactcaaggctttttgtgatctgacttctctcttcctccca

SEQ ID NO: 486304 - DNA, 120 bp, Artificial Sequence
  ENSG00000162456_11 (sequence is synthesized)
tcttctcactgctccctgaacaagcaaaacacattcctgtctccaagctttgccctgtgttctccagcaccctccctgcttctgtctgcctatcaaacaccccacttttaaagtccccgt

SEQ ID NO: 486305 - DNA, 120 bp, Artificial Sequence
  ENSG00000162456_12 (sequence is synthesized)
caccaacctctgtcttgccacctttcaggcagggctgaagtcttccttttcacaaaacaattattaaaccatcttaagtctactgaacgttgcccctgctctagtgtctagcaccagacc

SEQ ID NO: 486306 - DNA, 120 bp, Artificial Sequence
  ENSG00000162456_13 (sequence is synthesized)
agtaggtgcttaataaatgttaatggattcaatttaatgtaaaaacaattccctaggctttccctgggaagccacttcaaagtcccatctaccgtgggtagagcaaggaggcccaggtgt

SEQ ID NO: 486307 - DNA, 120 bp, Artificial Sequence
  ENSG00000162456_14 (sequence is synthesized)
ggcctcacagaaaacattgttcctccctccacacctgcaccctccaggcagagttgtttgacctctacagagataccctctccatacggcctctggcctggtttagtgagcagaagacaa

SEQ ID NO: 486308 - DNA, 120 bp, Artificial Sequence
  ENSG00000162456_15 (sequence is synthesized)
gctagaaatcacgtccttcttccaggatcaatggagacggcacttcctcttagaagcctcccctgacttcactgtgcttcccagccccagggtttccctccttcacagaccaatctgagt

SEQ ID NO: 486309 - DNA, 120 bp, Artificial Sequence
  ENSG00000162456_16 (sequence is synthesized)
ggcctttgtctatttcccctcttgagagtgggagcagagggccaggcacccagacgacaccccagtggatgttggaaaaaccaaagttttctgaagcacagagtccatctcagatgggaa

SEQ ID NO: 486310 - DNA, 120 bp, Artificial Sequence
  ENSG00000162456_17 (sequence is synthesized)
agctgaggccccactggaaaaaggactcatcgagtcccatggtgaaagatcacggggccaggcctgcagccaggtctcctatctctccctatccaaggctctatcttctgctgtcctctg

SEQ ID NO: 486311 - DNA, 120 bp, Artificial Sequence
  ENSG00000162456_18 (sequence is synthesized)
cacaagtggcagggatcagttctctgacaacagtgcgacagacctccatgaaggggctgccttccacaaatgctggctaggtgtagagacttcgtttccttcagctgagagaagcaactt

SEQ ID NO: 486312 - DNA, 120 bp, Artificial Sequence
  ENSG00000162456_19 (sequence is synthesized)
cctctctttgaactgccctcctctccacccagctgctgcctattccctgccccttctcctttccttcattatcatcaacaatatctcaggctgctggtccctcctcaatcaatgaggaga

SEQ ID NO: 486313 - DNA, 120 bp, Artificial Sequence
  ENSG00000162456_20 (sequence is synthesized)
cccttcctcctatccatcttcgatcctcacctcagtgccccagagatgccccagggtggagggggtgggaatgggggatgtggagactgagctgtggagagtgtggttccctcccccctg

SEQ ID NO: 486314 - DNA, 120 bp, Artificial Sequence
  ENSG00000162456_21 (sequence is synthesized)
cccatcaacccctctcagccatgctctccccagggtggggctatggaatccccgatgcctggcagggccaggcagagagagatgctggggaccaggtggaataaatcaaggaatgaaagc

SEQ ID NO: 486315 - DNA, 120 bp, Artificial Sequence
  ENSG00000162458_0 (sequence is synthesized)
gggctccgctggctcgggcgtcggatcggagccgccggggcgcgggcggcccagagctggcctgaacctccaggacttcagcccttctaggagaatctgatcccaggtgagggaggtcac

SEQ ID NO: 486316 - DNA, 120 bp, Artificial Sequence
  ENSG00000162458_1 (sequence is synthesized)
ttggggtgtggcccagcaggcaggcgggactccagactgggaacggaagtcagccctgctggggctgggagctgaagcatctgttccttcctcgcgggtgtgagacaaggaagagtgatc

SEQ ID NO: 486317 - DNA, 120 bp, Artificial Sequence
  ENSG00000162458_2 (sequence is synthesized)
attgccacaccaggagctgaagccatggcctcaaagcctgagaagagggtggcatcgtctgtctttatcaccctggcacccccgcgccgcgatgtggccgtggcggaggaagtgaggcag

SEQ ID NO: 486318 - DNA, 120 bp, Artificial Sequence
  ENSG00000162458_3 (sequence is synthesized)
gcagtttgtgaggcccggcgtggccgcccctgggaggctcctgcccccatgaagacacccgaggctggcttggcggggaggcccagcccctggacaacccctggcagagctgcagccaca

SEQ ID NO: 486319 - DNA, 120 bp, Artificial Sequence
  ENSG00000162458_4 (sequence is synthesized)
gtgccggctgcacctatgcagctcttcaatggaggatgcccaccccctcctcctgtcctggatggtgaggacgtgcttcctgacctggacctcctcccaccccctccaccgccccctcca

SEQ ID NO: 486320 - DNA, 120 bp, Artificial Sequence
  ENSG00000162458_5 (sequence is synthesized)
gtgcttctgccttctgaagaggaggctcctgctccaatgggggcctcactcattgcagacttagagcagctgcacctgtccccgcccccgcccccaccacaggccccagcggagggacct

SEQ ID NO: 486321 - DNA, 120 bp, Artificial Sequence
  ENSG00000162458_6 (sequence is synthesized)
tcagtccagcccggtcccctcaggcccatggaggaagagctgccacctcccccggcagaacctgttgagaaaggggcatccacagacatctgtgccttctgccacaagaccgtgtccccc

SEQ ID NO: 486322 - DNA, 120 bp, Artificial Sequence
  ENSG00000162458_7 (sequence is synthesized)
cgagagctggctgtggaggccatgaagaggcagtaccatgcccagtgcttcacgtgccgcacctgccgccgccagctggctgggcagagcttctaccagaaggatgggcgacccctctgc

SEQ ID NO: 486323 - DNA, 120 bp, Artificial Sequence
  ENSG00000162458_8 (sequence is synthesized)
gaaccctgctaccaggacacactggagaggtgcggcaagtgtggcgaggtggtccgggaccacatcatcagggccctgggccaggccttccacccctcctgcttcacgtgtgtgacctgc

SEQ ID NO: 486324 - DNA, 120 bp, Artificial Sequence
  ENSG00000162458_9 (sequence is synthesized)
gcccggtgcattggggatgagagctttgccctgggcagccagaacgaggtgtactgcctggacgacttctacaggaaattcgcccccgtctgcagcatctgtgaaaatcccatcatccct

SEQ ID NO: 486325 - DNA, 120 bp, Artificial Sequence
  ENSG00000162458_10 (sequence is synthesized)
cgggatgggaaagatgccttcaaaatcgaatgcatgggaagaaacttccatgaaaattgctacaggtgtgaggactgcaggatcctcctgtctgtcgagcccacggaccaaggctgctac

SEQ ID NO: 486326 - DNA, 120 bp, Artificial Sequence
  ENSG00000162458_11 (sequence is synthesized)
cccctgaacaaccatctcttctgcaagccatgccatgtgaagcggagtgctgcggggtgctgctgagagtgcccgctgggcagtgaacagaccactagccccggctggggcccttccctg

SEQ ID NO: 486327 - DNA, 120 bp, Artificial Sequence
  ENSG00000162458_12 (sequence is synthesized)
acttggtttcccttcctaacctgctcttgcacactttccttctgagcctccatggagaccagcctgcaagccggcccagcctgtccaggatacagtggggctgagcacccccaggccttc

SEQ ID NO: 486328 - DNA, 120 bp, Artificial Sequence
  ENSG00000162458_13 (sequence is synthesized)
ccccacttccagggaaaagctgggggaggttggacccctctcactgactagctgtctggtaggggtgctaggaccagcctcgcctgtggggttgagctgtttgaggacaaactccaaggt

SEQ ID NO: 486329 - DNA, 60 bp, Artificial Sequence
  ENSG00000162458_14 (sequence is synthesized)
cgcctgtggggttgagctgtttgaggacaaactccaaggtcccttaaaaagtgcctttta

SEQ ID NO: 486330 - DNA, 75 bp, Artificial Sequence
  ENSG00000162458_15 (sequence is synthesized)
aagctgaggcaggagaattgcttcaatctggaaggcagaggttgcagtgagattgcaccattgcattccagcctg

SEQ ID NO: 486331 - DNA, 120 bp, Artificial Sequence
  ENSG00000162458_16 (sequence is synthesized)
gtctccaaaaaaaaaagtgctttttgaaaatgttgaggttgaaatgatgggaaccaacattctttggatttagtggggagcataatagcaaacacccccttggttcgcacatgtacagga

SEQ ID NO: 486332 - DNA, 120 bp, Artificial Sequence
  ENSG00000162458_17 (sequence is synthesized)
atgggacccagttggggcacagccatggacttccccgccctggaatgtgtggtgcaaagtggggccagggcccagacccaagaggagagggtggtccgcagacaccccgggatgtcagca

SEQ ID NO: 486333 - DNA, 120 bp, Artificial Sequence
  ENSG00000162458_18 (sequence is synthesized)
tcccccgacctgccttctggcggcacctcccgggtgctgtgttgagtcagcaggcatggggtgagagcctggtatatgctgggaacagggtgcaggggccaagcgttcctccttcagcct

SEQ ID NO: 486334 - DNA, 120 bp, Artificial Sequence
  ENSG00000162458_19 (sequence is synthesized)
tgacttgggccatgcaccccctctcccccaaacacaaacaagcacttctccagtatggtgccaggacaggtgtcccttcagtcctctggttatgacctcaagtcctacttgggccctgca

SEQ ID NO: 486335 - DNA, 120 bp, Artificial Sequence
  ENSG00000162458_20 (sequence is synthesized)
gcccagcctgtgttgtaacctctgcgtcctcaagaccacacctggaagattcttcttccctttgaaggagaatcatcattgttgctttatcacttctaagacattttgtacggcacggac

SEQ ID NO: 486336 - DNA, 120 bp, Artificial Sequence
  ENSG00000162458_21 (sequence is synthesized)
aagttaaacagaatgtgcttccctccctggggtctcacacgctcccacgagaatgccacaggggccgtgcactgggcaggcttctctgtagaaccccaggggcttcggcccagaccacag

SEQ ID NO: 486337 - DNA, 120 bp, Artificial Sequence
  ENSG00000162458_22 (sequence is synthesized)
cgtcttgccctgagcctagagcagggagtcccgaacttctgcattcacagaccacctccacaattgttataaccaaaggcctcctgttctgttatttcacttaaatcaacatgctatttt

SEQ ID NO: 486338 - DNA, 120 bp, Artificial Sequence
  ENSG00000162458_23 (sequence is synthesized)
gttttcactcacttctgactttagcctcgtgctgagccgtgtatccatgcagtcatgttcacgtgctagttacgtttttcttcttacacatgaaaataaatgcataagtgttagaagctc

SEQ ID NO: 486339 - DNA, 120 bp, Artificial Sequence
  ENSG00000162458_24 (sequence is synthesized)
gcgggccaggacgaatccctccatccgggagcagtggtggcggtggaacaggtggcctggggtgctggaggcaggccaacctggagaggtaggcagtggctacctccactttacagatga

SEQ ID NO: 486340 - DNA, 120 bp, Artificial Sequence
  ENSG00000162458_25 (sequence is synthesized)
agacactgaggctcaggaggtggcgtgactgctccgggtctcacgcttagtaaacggccgcagaaccctggtcggtttgacgcaagaccctggcggatcccagagccaaacagagctggc

SEQ ID NO: 486341 - DNA, 120 bp, Artificial Sequence
  ENSG00000162458_26 (sequence is synthesized)
cagccgggccctgccttccagagctcctggagcggcctgtcccccgggacaccgggacccacctgcagagggcttaccgctcaggagagcagaacaaggccaacctggagaggtaggcag

SEQ ID NO: 486342 - DNA, 120 bp, Artificial Sequence
  ENSG00000162458_27 (sequence is synthesized)
atcgacacccgagctgctgcgggccaggacgaatccctccatccgggagcagtggtggcggtggaacaggtggcctggggtgctggaggccaacctggagaggtaggcagtggctacctc

SEQ ID NO: 486343 - DNA, 120 bp, Artificial Sequence
  ENSG00000162458_28 (sequence is synthesized)
caggaggtgaacaccagccagcccgagttctgacagctaattaatttctgtggttgtggcatgaacgcctcccaagcatgggttcctttgcttctaggaaattcgcccccgtctgcagca

SEQ ID NO: 486344 - DNA, 120 bp, Artificial Sequence
  ENSG00000162458_29 (sequence is synthesized)
agaacgaggtgtactgcctggacgacttctacaggtacgagaagggtttgtgcactgggtggggtgcagggacagggcgagacccaagcagggtgaaggagctgagcttgagtcctgggt

SEQ ID NO: 486345 - DNA, 90 bp, Artificial Sequence
  ENSG00000162458_30 (sequence is synthesized)
gacccaagcagggtgaaggagctgagcttgagtcctgggtgctgggccagagtttcctgtctactggtttattataaagaatattacagg

SEQ ID NO: 486346 - DNA, 120 bp, Artificial Sequence
  ENSG00000162460_0 (sequence is synthesized)
gtgacgttggtctgtccttacgcagacctggccggaggctggggctccttccggggctgccatgttctctcttccatccctcccctcctggctccccggcctcccctccctcgagtgggg

SEQ ID NO: 486347 - DNA, 120 bp, Artificial Sequence
  ENSG00000162460_1 (sequence is synthesized)
ctctagcctccttgactccctcctgcaaggcctgatcggggcccttggagtcttggtcctgaacagcctcctgaaagtttacttcttcgtgggctgtgccaatgacccgcagcggcgacc

SEQ ID NO: 486348 - DNA, 120 bp, Artificial Sequence
  ENSG00000162460_2 (sequence is synthesized)
cgaaaaggagcggcttcgggcccagtgggcctccctggaaacggtgcacctggcagggctggccctgtttctgacggtcgtggggtcccgggtggctgccctcgtggtgctcgagttctc

SEQ ID NO: 486349 - DNA, 120 bp, Artificial Sequence
  ENSG00000162460_3 (sequence is synthesized)
cctccgggccgtgtccacgctgctgtccctgggcaagggctcccagggtgccgccgagaggctgcagctctacctgctgtgccagtactcgctgggctgcgggctgacctgtggcctgag

SEQ ID NO: 486350 - DNA, 120 bp, Artificial Sequence
  ENSG00000162460_4 (sequence is synthesized)
cttcctgcaggagggcgcccctcaccgcacgctgaacctgctgctgagcctcgggctggccacgctgctgggcctgggtgcccggcgcctccaccgccacgtctgccgcctctacgagct

SEQ ID NO: 486351 - DNA, 120 bp, Artificial Sequence
  ENSG00000162460_5 (sequence is synthesized)
gcacagcagccagcgctactgtggggtgtgcctgggcctgctggcccatgcacatggcctcccccagctgctgggccgtgccctggccatagcctttgccgtgggtgacctggcagctgt

SEQ ID NO: 486352 - DNA, 120 bp, Artificial Sequence
  ENSG00000162460_6 (sequence is synthesized)
cctcatcaaccaggacttcctgaccacctcggaggccatgcggttctggacaccgctcaccatctgctacacgctgctggtcatctacatgcaggaggagcagcggcagcaccccggcct

SEQ ID NO: 486353 - DNA, 120 bp, Artificial Sequence
  ENSG00000162460_7 (sequence is synthesized)
gcagagccaggtgcagacggtgctggtgcgcatgggcggcctcttcgtgctgctgctgactgtgggtcgctggctggacctgctgggcatccttgtctccctactgggcgagctctggtg

SEQ ID NO: 486354 - DNA, 120 bp, Artificial Sequence
  ENSG00000162460_8 (sequence is synthesized)
tctcgtgggcgtccgcaccctgcttgacctctgccagatacaggattttccatcccagaggcctccagtgtcaacaccaagccagcccctgccctcggcaccccagtcccagagttcggc

SEQ ID NO: 486355 - DNA, 120 bp, Artificial Sequence
  ENSG00000162460_9 (sequence is synthesized)
cccctcttgacctgcctcagggaggatctggagtctgtctcaagcccactagcctgatctccgaggccttgaccccagggcgatgcctggaggcagagtggcagagctggcctcctgccc

SEQ ID NO: 486356 - DNA, 120 bp, Artificial Sequence
  ENSG00000162460_10 (sequence is synthesized)
agagctcagcacaggccctgggagccccgagaagggaaggcaggatttggggatgggagcctctggagaggggacacctggggacccctggttgaaccctctttttcttggggtgggcaa

SEQ ID NO: 486357 - DNA, 120 bp, Artificial Sequence
  ENSG00000162460_11 (sequence is synthesized)
tgatgcagcctctcagacctgccttcctgggcaggggtgggggtgcatcctcaggagggctccccctttactggtctcccttcccttctccatgaacaataaagacgatgtctttctcaa

SEQ ID NO: 486358 - DNA, 120 bp, Artificial Sequence
  ENSG00000162461_0 (sequence is synthesized)
agaccgctggaacagctgagcagagcaggtggactgctgagatagaccagggacaccaggcagccacaggcctgtcagaccaggacccttaccctctagacatggcctcggtcccctgca

SEQ ID NO: 486359 - DNA, 120 bp, Artificial Sequence
  ENSG00000162461_1 (sequence is synthesized)
aaccccagccccgtagccctgcgaggttacagacagcctaaacgccaccaccacagggcctgtgccgtgcccctgacccgggcacagaaggccactggcccggaggccatggagacggtg

SEQ ID NO: 486360 - DNA, 120 bp, Artificial Sequence
  ENSG00000162461_2 (sequence is synthesized)
cccccagcagtggacctggtgctgggtgcttctgcctgctgcctggcctgtgtcttcaccaaccccctggaggtggtgaagacgcggctgcagctgcagggggagctgcaggcccggggc

SEQ ID NO: 486361 - DNA, 120 bp, Artificial Sequence
  ENSG00000162461_3 (sequence is synthesized)
acctacccacggccctaccatggcttcatagcctctgtcgctgctgtggcccgagcagacgggctgtggggcctgcagaaggggctggctgccggccttctgtaccaaggcctcatgaat

SEQ ID NO: 486362 - DNA, 120 bp, Artificial Sequence
  ENSG00000162461_4 (sequence is synthesized)
ggcgttcgtttctactgctacagcctggcgtgccaggctggcctcacgcagcaaccaggtggcaccgtggttgcgggagccgtggcgggggcactgggagccttcgtggggagccctgct

SEQ ID NO: 486363 - DNA, 120 bp, Artificial Sequence
  ENSG00000162461_5 (sequence is synthesized)
tacctgatcaaaacgcagctgcaagctcagacagtggccgcagtggccgtgggacaccagcacaatcaccagactgtcctgggtgccttggagaccatctggcggcagcaagggctcttg

SEQ ID NO: 486364 - DNA, 120 bp, Artificial Sequence
  ENSG00000162461_6 (sequence is synthesized)
gggctgtggcagggcgttggtggggctgtgccccgagtcatggtgggctcagctgcccagctggccaccttcgcctctgccaaggcctgggtacagaagcaacagtggctccctgaggac

SEQ ID NO: 486365 - DNA, 120 bp, Artificial Sequence
  ENSG00000162461_7 (sequence is synthesized)
agctggctggtggccctggctgggggcatgatcagcagcatagccgtggttgtcgtcatgactcccttcgatgtggtcagcacgcggctatacaatcagccggtggacacagctggcagg

SEQ ID NO: 486366 - DNA, 120 bp, Artificial Sequence
  ENSG00000162461_8 (sequence is synthesized)
ggccagctctatgggggcctcaccgactgcatggtgaagatctggcggcaggagggccccctggcactctacaagggcctgggccccgcctacctgcgcctgggcccccacaccatcctc

SEQ ID NO: 486367 - DNA, 120 bp, Artificial Sequence
  ENSG00000162461_9 (sequence is synthesized)
agcatgctcttctgggacgagcttcggaaactggctgggcgggcccagcacaagggcacctagacgacggccctcacccccacgtcctgacacggccggcacttggccggaagtgagagc

SEQ ID NO: 486368 - DNA, 120 bp, Artificial Sequence
  ENSG00000162461_10 (sequence is synthesized)
ctgctccaggacaactggctgtcccggggcgggccatgggcccaggccctgccagaggtcccgggagagtgtggacagctctggtccatccagccccttggcccacccaggtccagagca

SEQ ID NO: 486369 - DNA, 120 bp, Artificial Sequence
  ENSG00000162461_11 (sequence is synthesized)
tccacttcaagttaccacccattctgtcttccagacagttctcttccttctctgtactgcgtactgggtcaccacatcccagagccttgctcagttatagcaactgctgcgggcgtgcac

SEQ ID NO: 486370 - DNA, 120 bp, Artificial Sequence
  ENSG00000162461_12 (sequence is synthesized)
atggcataggcccagtaacttacatacatcggctcacttaggcctcagacagcagcacgaggcaggcacttttacttcttttaccattagaaagccaaggcctagagtggtgggctttga

SEQ ID NO: 486371 - DNA, 120 bp, Artificial Sequence
  ENSG00000162461_13 (sequence is synthesized)
cacaattttgaagtggcagagccaggactggagcttagccctgctcaccctagacctatgcgcttgacaagtgcgtgactgtgacaggcccatgggcccggactgcccataggggtcact

SEQ ID NO: 486372 - DNA, 120 bp, Artificial Sequence
  ENSG00000162461_14 (sequence is synthesized)
gtaccatggcaaaggctgaggtgcaccaggaggctgtggcgtcgtcacctgccttatttgctggagaagctgtagcaaagaaccacagactgggcgacttagacaatagaaatgtatttt

SEQ ID NO: 486373 - DNA, 120 bp, Artificial Sequence
  ENSG00000162461_15 (sequence is synthesized)
ctcacagttctggaggctggatgctggagaccaaggtgtcagtgggctggtttcttctgaggcctctgtccatggcttgcagatgctgctttctctctgtgtctgcacatggtggtccct

SEQ ID NO: 486374 - DNA, 120 bp, Artificial Sequence
  ENSG00000162461_16 (sequence is synthesized)
tggtccctcgatgtgcgtctgggtcctgatctcctcctcttataaggacacaaatcatgttggcttagggcccaccctcatgaccccactttaatttttttttttttttttgagatgaag

SEQ ID NO: 486375 - DNA, 120 bp, Artificial Sequence
  ENSG00000162461_17 (sequence is synthesized)
caggcatgagccacctcacttggcccaattttaacttaattatctctgtcaagagcctatctccatatacagtcacatcctgagctactagggggtaggacttcaacatgcacttctgca

SEQ ID NO: 486376 - DNA, 73 bp, Artificial Sequence
  ENSG00000162461_18 (sequence is synthesized)
tgagctactagggggtaggacttcaacatgcacttctgcaggggccgcagttcagccaacatcatggtggtgc

SEQ ID NO: 486377 - DNA, 86 bp, Artificial Sequence
  ENSG00000162461_19 (sequence is synthesized)
ccaacatcatctaagggctctcacggagggcctcccagctgcccgccctgtgggcatttgcacatatcctgacaagcctgaaagaa

SEQ ID NO: 486378 - DNA, 120 bp, Artificial Sequence
  ENSG00000162461_20 (sequence is synthesized)
cctgtgggcatttgcacatatcctgacaagcctgaaagaagctccgggtgcccattgttcagtccaggtgcccattgttcccgggactgaggcccgggaaagggaagcgacgtggcaggg

SEQ ID NO: 486379 - DNA, 120 bp, Artificial Sequence
  ENSG00000162461_21 (sequence is synthesized)
ccagcagcagaccctgggcctttctctagactgagcaccattccccgtgggtgtgctctcagcgccgcaccgaccttcacactgcagagatggatgccaactccctggcaggggcaggac

SEQ ID NO: 486380 - DNA, 120 bp, Artificial Sequence
  ENSG00000162461_22 (sequence is synthesized)
tgctgccgagcagccccacctgccctcccagccacaccccaagtctgtaagggccgctcccaggaacacctgctactgcacactccaaaccaataaagttttatattttgtttacttcaa

SEQ ID NO: 486381 - DNA, 120 bp, Artificial Sequence
  ENSG00000162461_23 (sequence is synthesized)
tatttcacttgacccctaagcttcaggctcgggaccatggagctgtgagtttcaggggcacgggggcagggcgccctcaacacacacagctcaccctggctctcccaggctccatcccca

SEQ ID NO: 486382 - DNA, 120 bp, Artificial Sequence
  ENSG00000162482_0 (sequence is synthesized)
ctggtgcttccgaccgctgcgcgcggctcctgggctgtcacagtctcccgttgccgccgtcatgtcccggcagctgtcgcgggcccggccagccacggtgctgggcgccatggagatggg

SEQ ID NO: 486383 - DNA, 120 bp, Artificial Sequence
  ENSG00000162482_1 (sequence is synthesized)
gcgccgcatggacgcgcccaccagcgccgcagtcacgcgcgccttcctggagcgcggccacaccgagatagacacggccttcgtgtacagcgagggccagtccgagaccatccttggcgg

SEQ ID NO: 486384 - DNA, 120 bp, Artificial Sequence
  ENSG00000162482_2 (sequence is synthesized)
cctggggctccggctgggcggcagcgactgcagagtgaaaattgataccaaggccattccactgtttgggaactccctgaagcctgacagtctccggttccagctggagacgtcactgaa

SEQ ID NO: 486385 - DNA, 120 bp, Artificial Sequence
  ENSG00000162482_3 (sequence is synthesized)
gcggctgcagtgtccccgagtggacctcttctacctgcatatgccagaccacagcaccccggtggaagagacactgcgtgcctgccaccagctgcaccaggagggcaagttcgtggagct

SEQ ID NO: 486386 - DNA, 120 bp, Artificial Sequence
  ENSG00000162482_4 (sequence is synthesized)
tggcctctccaactatgcagcctgggaagtggccgagatctgtaccctctgcaagagcaacggctggatcctgcccactgtgtaccagggcatgtacaatgccatcacccggcaggtgga

SEQ ID NO: 486387 - DNA, 120 bp, Artificial Sequence
  ENSG00000162482_5 (sequence is synthesized)
ctgcctcaggcactttggactgaggttctatgccttcaaccctctggctgggggcctgctgaccggcaagtacaagtatgaggacaagaatgggaaacagcccgtgggccgcttctttgg

SEQ ID NO: 486388 - DNA, 120 bp, Artificial Sequence
  ENSG00000162482_6 (sequence is synthesized)
gaatacctgggcagagatgtacaggaatcgctactggaaggagcaccactttgagggcattgccctggtggagaaggccctgcaggccgcgtatggcgccagcgcccccagcatgacctc

SEQ ID NO: 486389 - DNA, 120 bp, Artificial Sequence
  ENSG00000162482_7 (sequence is synthesized)
ggccaccctccggtggatgtaccaccactcacagctgcagggtgcccacggggacgcggtcatcctgggcatgtccagcctggagcagctggagcagaacttggcagcggcagaggaagg

SEQ ID NO: 486390 - DNA, 120 bp, Artificial Sequence
  ENSG00000162482_8 (sequence is synthesized)
gcccctggagccggctgtcgtggacgcctttaatcaagcctggcatttggttactcacgaatgtcccaactacttccgctaggcccatcgtttctcaggctgcccaaggctcttctgtaa

SEQ ID NO: 486391 - DNA, 120 bp, Artificial Sequence
  ENSG00000162482_9 (sequence is synthesized)
catcttttgttactcacattttctttaatttagaactgcctcagtaaattcttagggatggaagtatttggacaaaaacctaatagaagagtcaccaccaaatgaagaataaaactccca

SEQ ID NO: 486392 - DNA, 80 bp, Artificial Sequence
  ENSG00000162490_0 (sequence is synthesized)
agtcccgctcagcccgggcacatcctccggctgcccgcgcacctctccacgccggccccgttccgcggctcgccctcggc

SEQ ID NO: 486393 - DNA, 120 bp, Artificial Sequence
  ENSG00000162490_1 (sequence is synthesized)
tccccctacccgccggccggacagggaggagccaatggctgggcctgccatccacaccgctcccatgctgttcctcgtcctcctgctgcccctggagctgagcctggcaggcgcccttgc

SEQ ID NO: 486394 - DNA, 120 bp, Artificial Sequence
  ENSG00000162490_2 (sequence is synthesized)
acctgggacccctgcccggaacctccctgagaatcacattgacctcccaggcccagcgctgtggacgcctcaggccagccaccaccgccggcggggcccgggcaagaaggagtggggccc

SEQ ID NO: 486395 - DNA, 120 bp, Artificial Sequence
  ENSG00000162490_3 (sequence is synthesized)
aggcctgcccagccaggcccaggatggggctgtggtcaccgccaccaggcaggcctccaggctgccagaggctgaggggctgctgcctgagcagagtcctgcaggcctgctgcaggacaa

SEQ ID NO: 486396 - DNA, 120 bp, Artificial Sequence
  ENSG00000162490_4 (sequence is synthesized)
ggacctgctcctgggactggcattgccctaccccgagaaggagaaccgacctccaggttgggagaggaccaggaaacgcagcagggagcacaagagacgcagggacaggttgaggctgca

SEQ ID NO: 486397 - DNA, 120 bp, Artificial Sequence
  ENSG00000162490_5 (sequence is synthesized)
ccaaggccgagccttggtccgaggtcccagctccctgatgaagaaggcagagctctccgaagcccaggtgctggatgcagccatggaggaatcctccaccagcctggcgcccaccatgtt

SEQ ID NO: 486398 - DNA, 120 bp, Artificial Sequence
  ENSG00000162490_6 (sequence is synthesized)
ctttctcaccacctttgaggcagcacctgccacagaagagtccctgatcctgcccgtcacctccctgcggccccagcaggcacagcccaggtctgacggggaggtgatgcccacgctgga

SEQ ID NO: 486399 - DNA, 120 bp, Artificial Sequence
  ENSG00000162490_7 (sequence is synthesized)
catggccttgttcgactggaccgattatgaagacttaaaacctgatggttggccctctgcaaagaagaaagagaaacaccgcggtaaactctccagtgatggtaacgaaacatcaccagc

SEQ ID NO: 486400 - DNA, 120 bp, Artificial Sequence
  ENSG00000162490_8 (sequence is synthesized)
cgaaggggaaccatgcgaccatcaccaagactgcctgccagggacttgctgcgacctgcgggagcatctctgcacaccccacaaccgaggcctcaacaacaaatgcttcgatgactgcat

SEQ ID NO: 486401 - DNA, 120 bp, Artificial Sequence
  ENSG00000162490_9 (sequence is synthesized)
gtgtgtggaagggctgcgctgctatgccaaattccaccggaaccgcagggttacacggaggaaagggcgctgtgtggagcccgagacggccaacggcgaccagggatccttcatcaacgt

SEQ ID NO: 486402 - DNA, 120 bp, Artificial Sequence
  ENSG00000162490_10 (sequence is synthesized)
ctagcggccccgcgggactggggactgagcccaggaggtttgcacaagccgggcgatttgtttgtaactagcagtgggagatcaagttggggaacagatggctgaggctgcagactcagg

SEQ ID NO: 486403 - DNA, 120 bp, Artificial Sequence
  ENSG00000162490_11 (sequence is synthesized)
cccaggacactcaaccccaggaggggagccgctcggcgaatgagctgggtgggtgcccaggagccggcccgcagcacctgcacacacgaagtccggacccacgcagcctccatcccgcgt

SEQ ID NO: 486404 - DNA, 120 bp, Artificial Sequence
  ENSG00000162490_12 (sequence is synthesized)
gtcttgctctccgcgatggcaatgccgagagtgccctctactgtccgactccagcactgcaacagcttcaagttcaaaaccaagaggcgtttttgagagtggaaaagaaatttaaacttc

SEQ ID NO: 486405 - DNA, 120 bp, Artificial Sequence
  ENSG00000162490_13 (sequence is synthesized)
ccgaaagaaggtccaccatcaggagatgaatatggaacatctcctatgtaccaggcactgtgctaagtgctggaatacattatctcattgaattatcacaacgaccttttcaagtaggca

SEQ ID NO: 486406 - DNA, 120 bp, Artificial Sequence
  ENSG00000162490_14 (sequence is synthesized)
ttatcaccatgcgacaggttgaggaccgtgaggcacgctggagttatttgactcgacttgcccagggtcccaggtcagtgctcctcaaacctgaacatgctaagagtcacctggaggtcc

SEQ ID NO: 486407 - DNA, 70 bp, Artificial Sequence
  ENSG00000162490_15 (sequence is synthesized)
ctcctcaaacctgaacatgctaagagtcacctggaggtccagttaaaaatgtacatctggccgggcgcgg

SEQ ID NO: 486408 - DNA, 77 bp, Artificial Sequence
  ENSG00000162490_16 (sequence is synthesized)
acatctgactcagtgggctctgtgctctaacaagctcccagggaacgcgaggctgctggcccagggacccactgaga

SEQ ID NO: 486409 - DNA, 120 bp, Artificial Sequence
  ENSG00000162490_17 (sequence is synthesized)
ccagggaacgcgaggctgctggcccagggacccactgagaggtcctgggaagtacatggcagagcaaggacatgaacctgggccaaggctgtccagctccaaggcccacgttcttgctgc

SEQ ID NO: 486410 - DNA, 120 bp, Artificial Sequence
  ENSG00000162490_18 (sequence is synthesized)
tccacagccaagaatttcttccagattctctaaggcttttggcaagagaggctcacaccctggtattcccttcctctgtggctggaataacttgactgttctctgccttccctggataaa

SEQ ID NO: 486411 - DNA, 120 bp, Artificial Sequence
  ENSG00000162490_19 (sequence is synthesized)
ggtgtatcatgtttaaaaacaaaacaaaatacaacttaagcacatacttgcttgcaggaataagttgggcaggttgatccctgtggtctagtagctgatatcctgggataagaagtgttt

SEQ ID NO: 486412 - DNA, 120 bp, Artificial Sequence
  ENSG00000162490_20 (sequence is synthesized)
ggggaaaagaatcatgttggcctttatgtccctgtggtcctgatcatccagtcctggacaggcactttacagttttctggagcacttcccccccaggggttctgatgcaagcatggaatc

SEQ ID NO: 486413 - DNA, 120 bp, Artificial Sequence
  ENSG00000162490_21 (sequence is synthesized)
caaaaaaaccccacacatattgcccatgtttacccactttgcatactgtttagtgatttccaggaccacaaaaccatccctggaaccccaccccacatttttgcagcagagcccactggg

SEQ ID NO: 486414 - DNA, 120 bp, Artificial Sequence
  ENSG00000162490_22 (sequence is synthesized)
aagttgaggctcacctgaaattgaggtgctatctgaagctaactgcccctaacaggccagactcacaatgcccacccaggacatctgtcccagcagatctggcttcaggggtcacttcag

SEQ ID NO: 486415 - DNA, 120 bp, Artificial Sequence
  ENSG00000162490_23 (sequence is synthesized)
gagaaccatttaaatccccccacttggcatctcactcctggccaaccctctgttccagggcgaaccaggttgcaaatgacaaaagactttcctggccaaattcctcactggcctggatca

SEQ ID NO: 486416 - DNA, 120 bp, Artificial Sequence
  ENSG00000162490_24 (sequence is synthesized)
cgcccataagatgccagagatgtttactgcgttggaaaaatcagtcggggtcaggggtcaggcaccaaggaaagcaggcagatctagaagaaattaaatatgcttgttctctccctatcc

SEQ ID NO: 486417 - DNA, 120 bp, Artificial Sequence
  ENSG00000162490_25 (sequence is synthesized)
aagtttgatgggcatgggaaccttgtggggagggagcagggagggcaggggaactgggagatcaaagcaggctagctgaaaggcagatatggctagacacaatggctcatgcctgtaatc

SEQ ID NO: 486418 - DNA, 71 bp, Artificial Sequence
  ENSG00000162490_26 (sequence is synthesized)
caaatatacaaaaattaaggctgggcacgagggctcatgtctgacatcccagcactctgggaggccgaggt

SEQ ID NO: 486419 - DNA, 120 bp, Artificial Sequence
  ENSG00000162490_27 (sequence is synthesized)
atatacaaaaattaaggctgggcacgagggctcatgtctgacatcccagcactctgggaggccgaggtaggcagatcacttgaagtaaggcgttcgagaacagcctgaccaacatggtga

SEQ ID NO: 486420 - DNA, 120 bp, Artificial Sequence
  ENSG00000162490_28 (sequence is synthesized)
atgtaaaaaggcagatctgccagcagcttcgtacttgagaccagacaacccacacatgctgtgtgtgcctcacattaagtggtgactcgggactgtgctggctctgtggggctagaaccc

SEQ ID NO: 486421 - DNA, 120 bp, Artificial Sequence
  ENSG00000162490_29 (sequence is synthesized)
taaggagtaccgccggaagaaagcccagcattactatggctgggggacagctgttagatggtcctaggacatcagccatggagaacacagagggtcaggacaaagctaaaatgcccatag

SEQ ID NO: 486422 - DNA, 120 bp, Artificial Sequence
  ENSG00000162490_30 (sequence is synthesized)
aactgccactggttgccagggtagttccatggttggaaattcaaggcccgtctctttgccctagctatctctatttgacatttccaaagagggatgggtggatggaacctcttaactcca

SEQ ID NO: 486423 - DNA, 120 bp, Artificial Sequence
  ENSG00000162490_31 (sequence is synthesized)
gagctgggaatcccaaagccctctcaagtgtctaaccaacctctctgccaggaagttcttccttaggtctatcttaaatttattttgctcatacagaagccagtttcctctaatccaggg

SEQ ID NO: 486424 - DNA, 120 bp, Artificial Sequence
  ENSG00000162490_32 (sequence is synthesized)
tttagcaaacttttactgtgaggagccaaataaacattttaggatttgcaagccatctgatctccaccagctactcagctctgccgtagctcgaagcagccacagagagtgtgtaaatga

SEQ ID NO: 486425 - DNA, 120 bp, Artificial Sequence
  ENSG00000162490_33 (sequence is synthesized)
attcatggctatgctccaggaaaactatttctggacacacatgtgaattctgtatacttttcacatgtcacaaaatattattctctctttccttttttttttttttggagatggagtttt

SEQ ID NO: 486426 - DNA, 120 bp, Artificial Sequence
  ENSG00000162490_34 (sequence is synthesized)
caggtgtgagccaccgcacctggccataaaatattattagtttaattttctaaaaccatttaaaagtgcaaaaactgctctttgcttgccaactgcgcaaaaccaggcagtggggcagat

SEQ ID NO: 486427 - DNA, 120 bp, Artificial Sequence
  ENSG00000162490_35 (sequence is synthesized)
agatttggcctgagggtcacggtttgccaacccctgctcaagcctgctcactctcaacgctggctgcacgttgcaataatccaggaacattcacaggcctggggcccacccacaaagctt

SEQ ID NO: 486428 - DNA, 120 bp, Artificial Sequence
  ENSG00000162490_36 (sequence is synthesized)
ctgttttgtttggtctgggcttcatagtttttctcccaggtaacttcaggtgcagctggggcggagagtctctgctctccccttccatctgtagcagtgtggctggtgttaaatccacct

SEQ ID NO: 486429 - DNA, 120 bp, Artificial Sequence
  ENSG00000162490_37 (sequence is synthesized)
attccacctctcacagctttggcaaccttaggaaagtttcttaaggtctctgtgccttgattttttcatctgtaaaatgggaataataactctcccttcatagggttgttgtgagtagtg

SEQ ID NO: 486430 - DNA, 120 bp, Artificial Sequence
  ENSG00000162490_38 (sequence is synthesized)
cactgcgacctctgcctcctgggtacaagtgattctcccgcctcagcctctcgcgtacctgggattataggcaagcatcaccacgcccggttactgtttgtatttttagtagagatgggg

SEQ ID NO: 486431 - DNA, 85 bp, Artificial Sequence
  ENSG00000162490_39 (sequence is synthesized)
tgtgaacgcagaattcttataaggtgtttagaacagtgcctagcacctaataaacctccagtgttagctaatttgttattctagg

SEQ ID NO: 486432 - DNA, 120 bp, Artificial Sequence
  ENSG00000162490_40 (sequence is synthesized)
cctaataaacctccagtgttagctaatttgttattctaggagaattttagatgtcggttctttgacaatgacccatcacatactctgagatcatttctaagtcaccattcaagctccttc

SEQ ID NO: 486433 - DNA, 120 bp, Artificial Sequence
  ENSG00000162490_41 (sequence is synthesized)
cccaaagtgtgttccatagaacactgggaccatgagatgctctattagaaagggtcagggtacggttccatggtcagagaggtttggaaaactgttctggcctcagcccttggcagcatg

SEQ ID NO: 486434 - DNA, 120 bp, Artificial Sequence
  ENSG00000162490_42 (sequence is synthesized)
tgcagattccaggcaccgaggcagggctggaggagtaagtggctttgcaataaaatgggtgctggagtctaaaatgataccctgggtggagtgggggagctgagcaggaggccaggtggc

SEQ ID NO: 486435 - DNA, 120 bp, Artificial Sequence
  ENSG00000162490_43 (sequence is synthesized)
aaccagtagctgctgggcccgtggcctgaaccctcctgcactcctccagctggagtctcaccgcggatcccaggaatacctgctgttcccacagggctgcctttccgtagtttgtctgga

SEQ ID NO: 486436 - DNA, 120 bp, Artificial Sequence
  ENSG00000162490_44 (sequence is synthesized)
gacaccaagagtggtttccatgcctgctgggaataggctgagcatgcaatgacatgagggccaaggcttgtgggaaaatgacagcttcacagccccttgaggagtgaccaagccacaaag

SEQ ID NO: 486437 - DNA, 120 bp, Artificial Sequence
  ENSG00000162490_45 (sequence is synthesized)
taaatcctaaagccacaaccccttctaccactgagctgctggaggtgggtccttatttcaagccatattcaacccacccaacaaaacctaacattgaggtggtgggcacacggcccctgc

SEQ ID NO: 486438 - DNA, 120 bp, Artificial Sequence
  ENSG00000162490_46 (sequence is synthesized)
cgtggggctcactctgcagctggagagacagcatacctgaaacctgcaaggaaccggtttataaaacaacagaacagccaggaaaatggtgctaggagagacagtggagaggccagagaa

SEQ ID NO: 486439 - DNA, 120 bp, Artificial Sequence
  ENSG00000162490_47 (sequence is synthesized)
gcaaaccactgtggctcctcactgggggtttcacggggttggactgagccctgtcacctctgtgatagtcttcactctgacaggcaatggtgactgtgtgtgtttcctggggaggaggtt

SEQ ID NO: 486440 - DNA, 120 bp, Artificial Sequence
  ENSG00000162490_48 (sequence is synthesized)
agcagggacggttgcctttcctgggaagggcagtttgcagaaccaggggtttatattgcagggagtgtattttctgaattctaagtcagaacaagcagtctgatacaggatccatggctg

SEQ ID NO: 486441 - DNA, 120 bp, Artificial Sequence
  ENSG00000162490_49 (sequence is synthesized)
ggtcacttctgggtgcaagaggctttctagaccttagacactcaagattacggtcccgggccagtaacagcacctgggagcttggtagaaatgcagaatcttagcctaggcaacataggg

SEQ ID NO: 486442 - DNA, 73 bp, Artificial Sequence
  ENSG00000162490_50 (sequence is synthesized)
cttggtagaaatgcagaatcttagcctaggcaacatagggagacctcatctctgcaaaaaatactccaggctg

SEQ ID NO: 486443 - DNA, 120 bp, Artificial Sequence
  ENSG00000162490_51 (sequence is synthesized)
gccatgatcgcaccactgcactccagcttaggcaatacagcgagaccttgtctcaaaaaaagacaaaaaaaacaaaaagaaatgtagattcttgggccccaccaccccacgcctactgag

SEQ ID NO: 486444 - DNA, 120 bp, Artificial Sequence
  ENSG00000162490_52 (sequence is synthesized)
tgagccagaatctctgggggtggggcccagccatttggcttttcacaagttctccaggtcattcttgggcacgatcaaatttgagaatcacaggtctaggatacgacggggaaaacagaa

SEQ ID NO: 486445 - DNA, 120 bp, Artificial Sequence
  ENSG00000162490_53 (sequence is synthesized)
atgtggggtggtcagggacattcggataattcgggctatttgtattcaggtgtgagctggcaaatccgagacctgttttgcgtagctaattaccagcaatgacaaactcccaggctctga

SEQ ID NO: 486446 - DNA, 120 bp, Artificial Sequence
  ENSG00000162490_54 (sequence is synthesized)
ggcccaagcctcctgggctgcaactggtctttatttttggaggcaatgaatggagcacctcggcctgggaccctcagtgtagggttttctgactcttaggcaacttcctagggtgctgta

SEQ ID NO: 486447 - DNA, 120 bp, Artificial Sequence
  ENSG00000162490_55 (sequence is synthesized)
cttcctttttaaagttggggagcggcagggggagggggaagtgccacgcccttgtagtttcatgatgtcatgttgcatgtgctcttgagctgtaaataaagagacgatggttaaaaagcc

SEQ ID NO: 486448 - DNA, 120 bp, Artificial Sequence
  ENSG00000162493_0 (sequence is synthesized)
acttctcacttctgcccataacaagaaaaacatagacttgtgccttactcttaaaaaaataataataataaatataggttttttaaaatttatatataatttttaaaaccccgtttgttg

SEQ ID NO: 486449 - DNA, 120 bp, Artificial Sequence
  ENSG00000162493_1 (sequence is synthesized)
catgtggtccctttccctcctgttgttgagcagaataaaagcccattttgccagggcccgcagtcctggcggcccccgcagctgcggccctgtaactttaaacctggcctgagatcatcg

SEQ ID NO: 486450 - DNA, 120 bp, Artificial Sequence
  ENSG00000162493_2 (sequence is synthesized)
ttttggcgccggccaaacagagcccgagggcgggcctagcgcgcccggacggagaccaccttgcggccgaccccgctcccccgcctcctcgggagagataaatgctgactccgctcggaa

SEQ ID NO: 486451 - DNA, 120 bp, Artificial Sequence
  ENSG00000162493_3 (sequence is synthesized)
agttctcaactgcaaagtttgctgtccggctgcctagggtctgggaagctcgggcaccctccctctccggggctcctgctcccacccctccggcccccccaccgtcgcgctcctccaggc

SEQ ID NO: 486452 - DNA, 120 bp, Artificial Sequence
  ENSG00000162493_4 (sequence is synthesized)
tgggcctgtggccgcggtgctttttaattttcccccagctcagaatcttgctgctcggcccccaggagagcaacaactcaacgggaacgatgtggaaggtgtcagctctgctcttcgttt

SEQ ID NO: 486453 - DNA, 120 bp, Artificial Sequence
  ENSG00000162493_5 (sequence is synthesized)
tgggaagcgcgtcgctctgggtcctggcagaaggagccagcacaggccagccagaagatgacactgagactacaggtttggaaggcggcgttgccatgccaggtgccgaagatgatgtgg

SEQ ID NO: 486454 - DNA, 120 bp, Artificial Sequence
  ENSG00000162493_6 (sequence is synthesized)
tgactccaggaaccagcgaagaccgctataagtctggcttgacaactctggtggcaacaagtgtcaacagtgtaacaggcattcgcatcgaggatctgccaacttcagaaagcacagtcc

SEQ ID NO: 486455 - DNA, 120 bp, Artificial Sequence
  ENSG00000162493_7 (sequence is synthesized)
acgcgcaagaacaaagtccaagcgccacagcctcaaacgtggccaccagtcactccacggagaaagtggatggagacacacagacaacagttgagaaagatggtttgtcaacagtgaccc

SEQ ID NO: 486456 - DNA, 120 bp, Artificial Sequence
  ENSG00000162493_8 (sequence is synthesized)
tggttggaatcatagttggggtcttactagccatcggcttcattggtgcaatcatcgttgtggttatgcgaaaaatgtcgggaaggtactcgccctaaagagctgaagggttacgccctg

SEQ ID NO: 486457 - DNA, 120 bp, Artificial Sequence
  ENSG00000162493_9 (sequence is synthesized)
ctgccaacgtgcttaaaaaaagaccgtttctgactctgtgccctgtccctgagctcgtgggagaagatgacccgtggaacacttgcctggcccactcagaatccacggtgacctctccgc

SEQ ID NO: 486458 - DNA, 120 bp, Artificial Sequence
  ENSG00000162493_10 (sequence is synthesized)
ttgccaaaataaccgaaggaaagaccgttcaccagacttggctcctctaaacatttgctgttcaaacatgtttttgaatatacattctataaaagattatttgaaagacaaaattcatag

SEQ ID NO: 486459 - DNA, 120 bp, Artificial Sequence
  ENSG00000162493_11 (sequence is synthesized)
aaaatggagcaaaactgtataaactgatttgtaactaacactggaccattggatcgatattatatgctgtaaccatgtgtctccgtctgaccattcttgttattgttaaaatgcagagga

SEQ ID NO: 486460 - DNA, 120 bp, Artificial Sequence
  ENSG00000162493_12 (sequence is synthesized)
tctagtttggtctatcttttaaagcctgatctggtgtgaataatcaactaggaaatctaaacttggataacacgtggtgaacaactgcctttagctggtccagattaatcatttcaaaga

SEQ ID NO: 486461 - DNA, 120 bp, Artificial Sequence
  ENSG00000162493_13 (sequence is synthesized)
catccattttagatcacaagcaggaagtcgatagtctcaaaggcactttgtttctcccaagtaggccaccaggcagcctctagagttgctttacccaaatccttctccagccatgacttg

SEQ ID NO: 486462 - DNA, 120 bp, Artificial Sequence
  ENSG00000162493_14 (sequence is synthesized)
gtgactctaagcttgctcccacctgccccctccacttccctcagatgatgaggagccagggctaagggggcagccttctctcttcccagtgatgcacatccttcacattggctgctttgt

SEQ ID NO: 486463 - DNA, 120 bp, Artificial Sequence
  ENSG00000162493_15 (sequence is synthesized)
tctggaatatggatatctcagcctggatgccgaggaagctgctggatgcttaatggtgctagaggctcaagtgtgtttgaaaccaagagccagttgtcccccatgcagaaagaaatcctg

SEQ ID NO: 486464 - DNA, 120 bp, Artificial Sequence
  ENSG00000162493_16 (sequence is synthesized)
tgtgagcctctggtatgagaaataaaatctgccagttttataacattcactttctgcctctgaggaaagatacagggaacaaaaatcaatttgtacagtcttaatattaaaagcagcttg

SEQ ID NO: 486465 - DNA, 120 bp, Artificial Sequence
  ENSG00000162493_17 (sequence is synthesized)
actaaatacctgatttaaaaatagaagacatccccagtcctcatgacataccgcaaatatctgtggggtcctgttgaaaagaacaaaataaaggagcccaaggggtcattctgtctcagc

SEQ ID NO: 486466 - DNA, 120 bp, Artificial Sequence
  ENSG00000162493_18 (sequence is synthesized)
accatccagcctggcacttctcttcccatatatccattggatttttttttttttttcctaaacaaagtttttacactgagcagatgctctgtcatgatggcggttgtgcaattctggtat

SEQ ID NO: 486467 - DNA, 120 bp, Artificial Sequence
  ENSG00000162493_19 (sequence is synthesized)
cctctaaatttgtaagcattcataaaacaggaaaaagtaaactatcattcggaagcacagcccattcctcccattttttgcaatgatgtctggatgttattttaaacagtgtgtctgtgt

SEQ ID NO: 486468 - DNA, 120 bp, Artificial Sequence
  ENSG00000162493_20 (sequence is synthesized)
gttcccaaatccagctggccccaccagctcagattccattttttttgtgtgtgtgtgtgaaacgtagtctgcaactctgcctcccggcaattatacatgtgtcaggatgtcaaaaagcaa

SEQ ID NO: 486469 - DNA, 65 bp, Artificial Sequence
  ENSG00000162493_21 (sequence is synthesized)
agctgggactacaggttcctcggcgaggatgatctctatctcttgacctcgtgatctgcccgcct

SEQ ID NO: 486470 - DNA, 120 bp, Artificial Sequence
  ENSG00000162493_22 (sequence is synthesized)
tgggattacaggcgtgtgccactgcgctcggcctcagattccatatttgaacaccagctgattgagagaaggggaatgagaagagctggatgagtttaaataactcattgttcagattcc

SEQ ID NO: 486471 - DNA, 120 bp, Artificial Sequence
  ENSG00000162493_23 (sequence is synthesized)
aagagctggatgagtttaaataactcattgttcagattcctgaacaggagttgggataatggccatcttttctttcctatcctttcttcccccctcactgtgaaaaataacagtccaccc

SEQ ID NO: 486472 - DNA, 120 bp, Artificial Sequence
  ENSG00000162493_24 (sequence is synthesized)
caagtcatacactggacccagtgcctgcggggacaggactgtgggtttcttggtcacacctgtgttggtgctcaatgcagtgtagacatgttttcaaataaaacaaatgattgtgtacaa

SEQ ID NO: 486473 - DNA, 120 bp, Artificial Sequence
  ENSG00000162493_25 (sequence is synthesized)
agaaggaggtaagacccagcgcaagtggcttcctgccgtcgctgatggggacgagcgagcagagacttgctggaatgcccgggcctggtattcgagccagcacaggccagccagaagatg

SEQ ID NO: 486474 - DNA, 120 bp, Artificial Sequence
  ENSG00000162493_26 (sequence is synthesized)
atgtcgggaaggtactcgtaagtaaatagcttacacccatgtgataggcaaatgaaagccatcgtgtctagaactcaaatctttgaactaatagaaatctctgatataagctgggtgtgg

SEQ ID NO: 486475 - DNA, 120 bp, Artificial Sequence
  ENSG00000162493_27 (sequence is synthesized)
gacaatgtgcaaatgacaccgttttgtgctcaccagggcaaagcaagggagcgccctcacttcagcatctcagccctgctaaagaaaaagctgctggccagcacaggccagccagaagat

SEQ ID NO: 486476 - DNA, 120 bp, Artificial Sequence
  ENSG00000162493_28 (sequence is synthesized)
ctttttggcgagacaatgtgcaaatgacaccgttttgtgctcaccagggcaaagcaagggagcgccctcacttcagcatctcagccctgctaaagaaaaagctgctgggtaacatccttt

SEQ ID NO: 486477 - DNA, 120 bp, Artificial Sequence
  ENSG00000162493_29 (sequence is synthesized)
gtcggtgccaggtcccaaagacgcagctgcgcgggtgtgccgggaggagccccggaatccacaggctgcgaggggaaggcgtttaacaactcgggggtgaagcctggtggacagcggcag

SEQ ID NO: 486478 - DNA, 90 bp, Artificial Sequence
  ENSG00000162493_30 (sequence is synthesized)
gtttaacaactcgggggtgaagcctggtggacagcggcagggacatcataaatacagaagataattttaaagaagtgttccggccgactt

SEQ ID NO: 486479 - DNA, 120 bp, Artificial Sequence
  ENSG00000162494_0 (sequence is synthesized)
agacgtcgagtgcagcccgcccggtgcgcgcggcgtcttactgccagatctcggaaatcagctgccagggtggggccgcgttttggcgacggccactcggccacccctgccgctcccgcc

SEQ ID NO: 486480 - DNA, 120 bp, Artificial Sequence
  ENSG00000162494_1 (sequence is synthesized)
tctcccaagagatttttctagcgggttaatttcctgtccgggtaaaccctttggtgagtccctcgcccctccctccccgcccctcccctctccatccctgctgtcccggctccccagtcc

SEQ ID NO: 486481 - DNA, 80 bp, Artificial Sequence
  ENSG00000162494_2 (sequence is synthesized)
gccgccctctggctccccgcgcccggcagccagtgcctcaccgcgccgtcccgcgccagggctcgctccgagagccgctt

SEQ ID NO: 486482 - DNA, 80 bp, Artificial Sequence
  ENSG00000162494_3 (sequence is synthesized)
ccggccatgcgcccccgagccccagcctgcgccgccgcggcgctcgggctctgcagccttctgctgctgctcgcgcccgg

SEQ ID NO: 486483 - DNA, 120 bp, Artificial Sequence
  ENSG00000162494_4 (sequence is synthesized)
ccgggcacgcgtgccccgcgggctgcgcctgcaccgacccgcacaccgtggactgccgcgaccgcgggctgcccagcgtgccagaccctttccccctggacgtgcgcaagctgctggtgg

SEQ ID NO: 486484 - DNA, 120 bp, Artificial Sequence
  ENSG00000162494_5 (sequence is synthesized)
ccggcaaccgcatccagcggatccccgaggacttcttcatcttctacggcgacctggtctacctggacttcaggaacaactcgctgcgctcgctggaggagggcacgttcagcggctcgg

SEQ ID NO: 486485 - DNA, 120 bp, Artificial Sequence
  ENSG00000162494_6 (sequence is synthesized)
ccaagctcgtgttcctcgacctcagctacaacaacttgacccagctgggcgccggcgccttccgctcggccgggaggctggtgaagcttagcctggctaacaacaacctggtgggcgtgc

SEQ ID NO: 486486 - DNA, 120 bp, Artificial Sequence
  ENSG00000162494_7 (sequence is synthesized)
acgaggacgccttcgagaccctggagtcgctgcaggtgctggagctcaacgacaacaacctgcgcagcctcagcgtggccgccctggccgcgctgcccgcgctgcgctccctgcgtctgg

SEQ ID NO: 486487 - DNA, 120 bp, Artificial Sequence
  ENSG00000162494_8 (sequence is synthesized)
acgggaacccctggctgtgcgactgtgacttcgcccacctcttctcctggatccaggagaacgcatccaaactgcccaaaggccttgatgaaatccagtgctccctgcccatggagagca

SEQ ID NO: 486488 - DNA, 120 bp, Artificial Sequence
  ENSG00000162494_9 (sequence is synthesized)
tccctgcgtgagctgtcggaggccagcttcagcgagtgtaggttcagcctgtcactcacagacctctgcatcatcattttctccggtgtggccgtgtccattgcggccatcatctccagc

SEQ ID NO: 486489 - DNA, 120 bp, Artificial Sequence
  ENSG00000162494_10 (sequence is synthesized)
ttcttcctggccactgtggtgcagtgcctccagaggtgcgcacccaacaaagatgcggaggatgaagacgaggacaaggatgactgagccacctcctccctcctgcctcttactctccag

SEQ ID NO: 486490 - DNA, 120 bp, Artificial Sequence
  ENSG00000162494_11 (sequence is synthesized)
caccgaaccagaagctctctccaagacgagagggaaatgctgaaaatggaaaagcactggccaccatctgtgaactgaacagagcctgttccgtgtcttggcccctgggtacacctgctg

SEQ ID NO: 486491 - DNA, 120 bp, Artificial Sequence
  ENSG00000162494_12 (sequence is synthesized)
ggaccactgatctcagagtttagaatcagcagagcacagaagcccaggaaggatggagggaattattcctggagcataacctgcctctcagatcgaggtgtgtgttgggggagaagatga

SEQ ID NO: 486492 - DNA, 120 bp, Artificial Sequence
  ENSG00000162494_13 (sequence is synthesized)
ccgagtcaggcttcatagctgatgactaaaagcctcccccaggaaatgtgaagactggcagctttcaatggcaaagatgattttacgccattctttttctgacctgtactgggagatcat

SEQ ID NO: 486493 - DNA, 120 bp, Artificial Sequence
  ENSG00000162494_14 (sequence is synthesized)
gaaacatctgccttcctcccaagaaacagcagctcaaacagtggagattcaaattcggatcattcaccacaagaacgagaactttgatccttatataataggcctcagcaaccttgggat

SEQ ID NO: 486494 - DNA, 120 bp, Artificial Sequence
  ENSG00000162494_15 (sequence is synthesized)
gttatactgggaactaataaactcgtgtgcaatagactcaatgtttatgttcccccagattttatatgttgaaacctaatccccaatgtgatggtatttggaggtggggcttttgggagg

SEQ ID NO: 486495 - DNA, 120 bp, Artificial Sequence
  ENSG00000162494_16 (sequence is synthesized)
tgattaggtttagatcatatcatgaggatggggcccaaatgatgggattagtgccctcatgaaaggtggccccagagagctccttcaccccttcaatgcttgaggatgcagcaagaaatc

SEQ ID NO: 486496 - DNA, 120 bp, Artificial Sequence
  ENSG00000162494_17 (sequence is synthesized)
agctgcccatgaaccgagaagcaggccctcaccagaacccagccatgctggcacccagatctcagacttccagcctccagaactgggagaaataaataaatgtctgttgtttgtaagcca

SEQ ID NO: 486497 - DNA, 120 bp, Artificial Sequence
  ENSG00000162496_0 (sequence is synthesized)
cgatccacgcgcgctccacacccggaccctctccaagttggaaaggacaaaaagaaggcaataaatgctaaaaagggagagaaggggagctggatcgagcggcaactcccagcctctgct

SEQ ID NO: 486498 - DNA, 120 bp, Artificial Sequence
  ENSG00000162496_1 (sequence is synthesized)
ggaacagagagggagggagggagccggagcgagcgagcgcgcgcgagggcgagcgctgcacgtaaagaaactgacacccggaccccccacttctcctgcacgttgctggcaatcagatcg

SEQ ID NO: 486499 - DNA, 120 bp, Artificial Sequence
  ENSG00000162496_2 (sequence is synthesized)
cgtttaagcaatttcctgagcccaagaatagcaatgagtcgggagactttcgcgggctgaaattgggagctccaagcactttttccccccactttttttttttttttttttctggagacg

SEQ ID NO: 486500 - DNA, 90 bp, Artificial Sequence
  ENSG00000162496_3 (sequence is synthesized)
actttgaaaccgcgggaccgaggcagggtgcgcgcgtgtggttggtgcctttttttttttttcttcccctccctaaactcctctgtcagt

SEQ ID NO: 486501 - DNA, 120 bp, Artificial Sequence
  ENSG00000162496_4 (sequence is synthesized)
ttttttttttttcttcccctccctaaactcctctgtcagtctgtaaacattacctgagaattccccagccgaaacggctgctggggcaagaaacttcttgttagaactttccacctccgg

SEQ ID NO: 486502 - DNA, 120 bp, Artificial Sequence
  ENSG00000162496_5 (sequence is synthesized)
agaaacttcttgttagaactttccacctccggcttccccctccacctcttttaccgtcccaaccttaggagacgctttttctcccccagaggagaatttatctttttttttttttttttt

SEQ ID NO: 486503 - DNA, 120 bp, Artificial Sequence
  ENSG00000162496_6 (sequence is synthesized)
aagaggtgatttcaagagtggccaggtgggacgcctctctcctccttattcggtttactatttattgttcggggtgttttttaattcctgtattgctcggcccggggagtttcgccccct

SEQ ID NO: 486504 - DNA, 120 bp, Artificial Sequence
  ENSG00000162496_7 (sequence is synthesized)
gcccggctccgcggcgcggaggatggtgtggaaacggctgggcgcgctggtgatgttccctctacagatgatctatctggtggtgaaagcagccgtcggactggtgctgcccgccaagct

SEQ ID NO: 486505 - DNA, 120 bp, Artificial Sequence
  ENSG00000162496_8 (sequence is synthesized)
gcgggacctgtcgcgggagaacgtcctcatcaccggcggcgggagaggcatcgggcgtcagctcgcccgcgagttcgcggagcgcggcgccagaaagattgttctctggggccggactga

SEQ ID NO: 486506 - DNA, 120 bp, Artificial Sequence
  ENSG00000162496_9 (sequence is synthesized)
gcactgagtgccattacttcatctgtgatgtgggcaaccgggaggaggtgtaccagacggccaaggccgtccgggagaaggtgggtgacatcaccatcctggtgaacaatgccgccgtgg

SEQ ID NO: 486507 - DNA, 120 bp, Artificial Sequence
  ENSG00000162496_10 (sequence is synthesized)
tccatgggaagagcctaatggacagtgatgatgatgccctcctcaagtcccaacacatcaacaccctgggccagttctggaccaccaaggccttcctgccgcgtatgctggagctgcaga

SEQ ID NO: 486508 - DNA, 120 bp, Artificial Sequence
  ENSG00000162496_11 (sequence is synthesized)
atggccacatcgtgtgcctcaactccgtgctggcactgtctgccatccccggtgccatcgactactgcacatccaaagcgtcagccttcgccttcatggagagcctgaccctggggctgc

SEQ ID NO: 486509 - DNA, 120 bp, Artificial Sequence
  ENSG00000162496_12 (sequence is synthesized)
tggactgtccgggagtcagcgccaccacagtgctgcccttccacaccagcaccgagatgttccagggcatgagagtcaggtttcccaacctctttcccccactgaagccggagacggtgg

SEQ ID NO: 486510 - DNA, 120 bp, Artificial Sequence
  ENSG00000162496_13 (sequence is synthesized)
cccggaggacagtggaagctgtgcagctcaaccaggccctcctcctcctcccatggacaatgcatgccctcgttatcttgaaaagcatacttccacaggctgcactcgaggagatccaca

SEQ ID NO: 486511 - DNA, 120 bp, Artificial Sequence
  ENSG00000162496_14 (sequence is synthesized)
aattctcaggaacctacacctgcatgaacactttcaaagggcggacatagagacaggatgaagacatgcttgaggagccacggagtttgggggccacagcacctgggcacacacccgagc

SEQ ID NO: 486512 - DNA, 120 bp, Artificial Sequence
  ENSG00000162496_15 (sequence is synthesized)
acctgtccattggcatgcttctgctgggtgagcaggacagctcctgtccccagcgaagaatccggctgcccctgggccagtcccaggacctttgcacaggactgatgggtataactgacc

SEQ ID NO: 486513 - DNA, 120 bp, Artificial Sequence
  ENSG00000162496_16 (sequence is synthesized)
cccacagggaggcaggaaaacagccagaagccaccttgacacttttgaacatttccagttctgtagagtttattgtcaattgcttctcaagtctaaccagcctcagcagtgtgcatagac

SEQ ID NO: 486514 - DNA, 120 bp, Artificial Sequence
  ENSG00000162496_17 (sequence is synthesized)
catttccaggagggtctgtccccagatgctctgcctcccgttccaaaacccactcatcctcagcttgcacaaactggttgaacggcaggaatgaaaaataaagagagatggcttttgtga

SEQ ID NO: 486515 - DNA, 120 bp, Artificial Sequence
  ENSG00000162496_18 (sequence is synthesized)
gagtgcagggtgtgcgcactcctgggtagagctgggagccgcctgctagctggcgcctcgtattttccttggcaacccgctacccagccccaacctgggcggctgcagctctgaagacac

SEQ ID NO: 486516 - DNA, 120 bp, Artificial Sequence
  ENSG00000162496_19 (sequence is synthesized)
gagagagggtacttggtttgggtttgaaaagggaagagcggtcttgtatgcagtagtctggccggaccgacactgagaggcccaggtgtttggaaagcaggaaagaggaggccaggattg

SEQ ID NO: 486517 - DNA, 120 bp, Artificial Sequence
  ENSG00000162496_20 (sequence is synthesized)
ggaagcggagacagagaccctagaggagaggctgcccccggaggggtgggagctgccagcccccaggggtgctcgaggggagcgaggccgctccagggaggtgggtgcccgccagagggg

SEQ ID NO: 486518 - DNA, 120 bp, Artificial Sequence
  ENSG00000162496_21 (sequence is synthesized)
cggcgagggctgccgggacggttcacgcagcggccagcagactggctgcgtgttgcaatgtctggtggcgtttgcagcatcctgtccgtgtgtgcagctggggtaacctcgggccggcgg

SEQ ID NO: 486519 - DNA, 120 bp, Artificial Sequence
  ENSG00000162496_22 (sequence is synthesized)
aggagcgcgtgtggctcgtaggccctgcggccggaggctgctggcaccttgcatctcatttacagctccgggttcagccacagattgttctctggggccggactgagaaatgcctgaagg

SEQ ID NO: 486520 - DNA, 120 bp, Artificial Sequence
  ENSG00000162496_23 (sequence is synthesized)
ctggaagagagctctgcttatggcagaatggctttgcccggggcacctttggggactctcccatgaagctggccccagttacataggcagggattagggttgattacgtaacaggcgtaa

SEQ ID NO: 486521 - DNA, 120 bp, Artificial Sequence
  ENSG00000162496_24 (sequence is synthesized)
cctctgggaaaatccttctgactccagtcatctgtttgggctaaatatatcagtgacctccaagagagggaaacccaccctgactgtctggcacgtggtaatgttaactgtttttatgtc

SEQ ID NO: 486522 - DNA, 120 bp, Artificial Sequence
  ENSG00000162496_25 (sequence is synthesized)
gcagtaaactcatttattataaatatgctgtgtgccaggtacggtgtgtgccataaattatttctcctcctcagaacagtcctggtgcggcattagccccatctcacaaatcaagactgg

SEQ ID NO: 486523 - DNA, 120 bp, Artificial Sequence
  ENSG00000162496_26 (sequence is synthesized)
cgctcagagacgcagttctcttccccaggccctgtggctgctggtggtacggccaggtggctgctgggcctctatgtatgcaggataactggaactaggctggcagaaagtggcctgcgg

SEQ ID NO: 486524 - DNA, 120 bp, Artificial Sequence
  ENSG00000162496_27 (sequence is synthesized)
gaaggaatatctaagaaaaacttgtaaataacacatcaattgattgatcataaatggactcagaaattactcgttcacttaggagtaagccatatcccttttaaaaagtatattggaccg

SEQ ID NO: 486525 - DNA, 120 bp, Artificial Sequence
  ENSG00000162510_0 (sequence is synthesized)
aaccgtgccggctgctgcccgtgctgccagaactatgagggtcctctctggcactagcctcatgctctgcagcctgctgctgctgctccaggccctgtgcagccctggcctcgcccccca

SEQ ID NO: 486526 - DNA, 120 bp, Artificial Sequence
  ENSG00000162510_1 (sequence is synthesized)
gtccagaggccatctctgccggacgcggcccacagacctggtgtttgttgtcgacagctctcgcagcgttcggcctgttgaatttgagaaagtgaaggtattcctgtcccaggtcatcga

SEQ ID NO: 486527 - DNA, 120 bp, Artificial Sequence
  ENSG00000162510_2 (sequence is synthesized)
gtcgctggacgtggggcccaatgccacccgggtgggcatggtcaactatgccagcaccgtgaagcaggagttctcgctgcgggctcatgtctccaaggccgcactgctgcaggctgtgcg

SEQ ID NO: 486528 - DNA, 120 bp, Artificial Sequence
  ENSG00000162510_3 (sequence is synthesized)
ccgtatccagccgctgtccacaggcaccatgaccggcctggccatccagttcgctatcaccaaagccttcggcgatgcagagggtggtcgttccaggtcccctgacatcagcaaggtggt

SEQ ID NO: 486529 - DNA, 120 bp, Artificial Sequence
  ENSG00000162510_4 (sequence is synthesized)
catcgtggtgacagacgggaggccccaggacagcgtgcaggacgtgtctgcgcgggcccgggccagcggcgtcgagctgttcgccatcggagtgggcagcgtggacaaggccacgctgcg

SEQ ID NO: 486530 - DNA, 120 bp, Artificial Sequence
  ENSG00000162510_5 (sequence is synthesized)
gcagatcgccagcgagccgcaggacgaacacgtcgattacgtggagagctacagcgtcatcgagaagctgtccaggaagttccaggaggccttctgcgtggtgtcagacctgtgcgccac

SEQ ID NO: 486531 - DNA, 120 bp, Artificial Sequence
  ENSG00000162510_6 (sequence is synthesized)
aggggaccatgactgtgagcaggtgtgcatcagctcccccggttcctacacctgcgcctgccacgagggcttcactctgaacagcgacggcaagacctgcaatgtctgcagtggtggtgg

SEQ ID NO: 486532 - DNA, 120 bp, Artificial Sequence
  ENSG00000162510_7 (sequence is synthesized)
tggcagctcggccactgacctggtcttcctcattgacggatccaagagtgtgaggccagagaactttgagctggtgaagaagttcatcagtcagatcgtggatacgctggacgtgtcaga

SEQ ID NO: 486533 - DNA, 120 bp, Artificial Sequence
  ENSG00000162510_8 (sequence is synthesized)
caagctggcccaggtggggctggtgcagtactcaagctctgtgcgccaggagttccccctgggtcgcttccacaccaagaaggacatcaaggcggctgtgcggaatatgtcctacatgga

SEQ ID NO: 486534 - DNA, 120 bp, Artificial Sequence
  ENSG00000162510_9 (sequence is synthesized)
gaagggcacaatgactggggctgctctcaagtacctcattgacaattccttcactgtgtccagtggggctaggcccggggcccagaaggtgggcattgtcttcactgatggccggagcca

SEQ ID NO: 486535 - DNA, 120 bp, Artificial Sequence
  ENSG00000162510_10 (sequence is synthesized)
ggactacattaatgatgctgccaagaaggccaaagacctcggctttaagatgtttgctgtgggtgtgggcaatgccgtggaggatgagctgagggaaatagcctcagagcctgtggcaga

SEQ ID NO: 486536 - DNA, 120 bp, Artificial Sequence
  ENSG00000162510_11 (sequence is synthesized)
gcactacttctacacggctgacttcaagaccatcaaccagataggcaagaagttgcagaagaagatctgtgtggaggaagacccgtgtgcctgcgagtccctggtgaaattccaagccaa

SEQ ID NO: 486537 - DNA, 120 bp, Artificial Sequence
  ENSG00000162510_12 (sequence is synthesized)
agtggaggggctgctgcaggccctgaccaggaaactggaagctgtgagtaagcggctggccatcctggagaacacagttgtctaaggctgcctgtcaccactgtggcctctccaagcgtc

SEQ ID NO: 486538 - DNA, 120 bp, Artificial Sequence
  ENSG00000162510_13 (sequence is synthesized)
ctgcacgtgtccgccgtagctttaccattttagtgagggaagccagcccgggggtgggagggggtgtgtctgggtgtgcctattgagagcgtgtaatggcgtttgggagctcgtgtgtgt

SEQ ID NO: 486539 - DNA, 120 bp, Artificial Sequence
  ENSG00000162510_14 (sequence is synthesized)
gtgtgtgtgtgtgtgtgtgtgcacgtgcgcctgagggtgggcatgagtcttgccagaatgtgagtgtgagagtgataatgcaggggtgagtgtgagagggactgcgtttgcatttttata

SEQ ID NO: 486540 - DNA, 120 bp, Artificial Sequence
  ENSG00000162510_15 (sequence is synthesized)
tattctccggtgagaaacaattaaatgtgatttaacgtaagcagtgaatggggctagaggcagtgtggttatttggggaccagggaaaaggatggatgaagatgtggtgggaggggatgg

SEQ ID NO: 486541 - DNA, 120 bp, Artificial Sequence
  ENSG00000162510_16 (sequence is synthesized)
ttggaaggatggtaacagtggtggtgacagtgatgacagtgaccacaccaaaaccagctggtgtttgtcctgccttttcagttacatattcatttagttgacctcatttcacttccagta

SEQ ID NO: 486542 - DNA, 120 bp, Artificial Sequence
  ENSG00000162510_17 (sequence is synthesized)
accttacccagaaaagactcaaattatccccattacaaatgggaaagctgagagtctaaatgatgaaatgacttgctcagcagtgggtcgctgagagacaggacttgaatctaggactga

SEQ ID NO: 486543 - DNA, 120 bp, Artificial Sequence
  ENSG00000162510_18 (sequence is synthesized)
agaacatcaaaagaaaaaggcttcagagaaaaagggcaatgacaccagataggactcatttgttcattcattcattcgttcactcattcgttcaggtatcatgtacttacagggcaatgg

SEQ ID NO: 486544 - DNA, 120 bp, Artificial Sequence
  ENSG00000162510_19 (sequence is synthesized)
cggtggggggggatggtgctgtatgagacagacgtagttcctgccctaagagacatacagttgagcagggtgctcatgtcacccccaccagccagagggaccagccagaggaaaagagag

SEQ ID NO: 486545 - DNA, 120 bp, Artificial Sequence
  ENSG00000162510_20 (sequence is synthesized)
tgggtttaggtcgtaccaggggtttgtgcctcctcttgatacctgggagcccacggggtgagtgtgtgtgtgagatgatgggaagggctccagcctgggcctgggctgccctaggtgcct

SEQ ID NO: 486546 - DNA, 120 bp, Artificial Sequence
  ENSG00000162510_21 (sequence is synthesized)
ctcccctcccgcccccaacatgccctgttggagttctgtttgtttcctgtgcacaggcggcatcacccccaacccaaagtccccaacgcagatggcagcagccccacctcagagactgca

SEQ ID NO: 486547 - DNA, 120 bp, Artificial Sequence
  ENSG00000162510_22 (sequence is synthesized)
caagagaaagactcctggccccatgttcccttcctccagccctatgtggggtctgcaggtcacaccctgagatctcggccacctcccccaggcccctgttggaccagtgctgctccggaa

SEQ ID NO: 486548 - DNA, 120 bp, Artificial Sequence
  ENSG00000162510_23 (sequence is synthesized)
tctccatctctgtcctctcagagggggagctttggtgattttctgaacctattcttgtttaatggagcatttttagtgttactactagattcacacttgagagcatgtctaaaaggcttt

SEQ ID NO: 486549 - DNA, 120 bp, Artificial Sequence
  ENSG00000162510_24 (sequence is synthesized)
tacaagaagctcagaccacaccgaaagatcttcctcggaggcagttcaaagaggcagaataacaacacgaacggtacccaagagctacatcagtacaacagcacaaatacacaagcgcga

SEQ ID NO: 486550 - DNA, 120 bp, Artificial Sequence
  ENSG00000162510_25 (sequence is synthesized)
cttaactggggcacagccaccctcgcccccatgacctgactccacctcctacacagttcaccaaaccctttctctctgtccgtccctggggcaggagtttttctgctgtccaaggaggct

SEQ ID NO: 486551 - DNA, 120 bp, Artificial Sequence
  ENSG00000162510_26 (sequence is synthesized)
ccttgacacagccacctgagaagttatgactctgctcattcttcctttcttctgagattatccactcccctctcctccccacacaggtggggagggggagaggcagccatgttgatatgg

SEQ ID NO: 486552 - DNA, 120 bp, Artificial Sequence
  ENSG00000162510_27 (sequence is synthesized)
actgagaaggctcagcagtgtgtccccaaggaggaggagagggtcattagcggacgccatggcctgggagctggcgggcagaagcaacagatgtccctgatgagtggagtcagagatggg

SEQ ID NO: 486553 - DNA, 120 bp, Artificial Sequence
  ENSG00000162510_28 (sequence is synthesized)
gtggaagccctgcctgggaataggacctcgttcttccctgcccggtgggtggagtagtggcaggaccttgtcaccaggctctgatgaaggcagggaccagcttcttgggatctttcaatc

SEQ ID NO: 486554 - DNA, 120 bp, Artificial Sequence
  ENSG00000162510_29 (sequence is synthesized)
ccaaactcttgcccttcactcatcgcagttctccccacggctactccaggtcctcttgaaatccgtcctctccatggacttcccacatccctctctgctctaggtttgattaacagaagg

SEQ ID NO: 486555 - DNA, 120 bp, Artificial Sequence
  ENSG00000162510_30 (sequence is synthesized)
ttgtaaatgaaaaccagcatctcccgagggcagccatggtctactgacagatggcaagttactttgtaacctgtaattttgtttttttgaattttgtataaataaacaggactaaactaa

SEQ ID NO: 486556 - DNA, 120 bp, Artificial Sequence
  ENSG00000162510_31 (sequence is synthesized)
gggaaggcatggccctgaccttagagaccccaatttggcgatggggcatcacatccctccgggcatctcagagctgcctgcccgagggaggcgaagcagatggaaagccccccagccacg

SEQ ID NO: 486557 - DNA, 120 bp, Artificial Sequence
  ENSG00000162510_32 (sequence is synthesized)
tctctcagtcagaggaaacgggtctcctcttcggccagccgggtcctcttcccccgggtgccgcctggctgtgcgacccggcagtcctcccgcctctccgggcctcagcctcctctcctg

SEQ ID NO: 486558 - DNA, 120 bp, Artificial Sequence
  ENSG00000162510_33 (sequence is synthesized)
atatcccttcccagagggggctggggctggggaggggcgcaggccagtgttgggggaggcgggggcatggcccaagtgtggtcagttgggcaggcttctcttggcctgcttactgctgat

SEQ ID NO: 486559 - DNA, 120 bp, Artificial Sequence
  ENSG00000162510_34 (sequence is synthesized)
gggctgcattctggcagaataagctgaagccagcttgggtgcacaccctgtcaaaagcagagactcctagaaggtaaacaagaaaatgaggcagaagccaggatctagggactggacaca

SEQ ID NO: 486560 - DNA, 120 bp, Artificial Sequence
  ENSG00000162510_35 (sequence is synthesized)
caccagagtcctggacatgctctgaagaacatggagcccatggatgccccatttctcaggctcatggtgacgtgcctgaccccagtacccactcagaggtggggctgggccccagacagt

SEQ ID NO: 486561 - DNA, 120 bp, Artificial Sequence
  ENSG00000162510_36 (sequence is synthesized)
tcccctggctcagccaggactaggtggggaacccagcaggtctaaatctgcaactgagcagggctgggcactcgtggctcacagtaactggctgtgttttttggaaagcaccattctgag

SEQ ID NO: 486562 - DNA, 120 bp, Artificial Sequence
  ENSG00000162511_0 (sequence is synthesized)
agtgtctcagaggaggggacggcagcaccatggacccccgcttgtccactgtccgccagacctgctgctgcttcaatgtccgcatcgcaaccaccgccctggccatctaccatgtgatca

SEQ ID NO: 486563 - DNA, 120 bp, Artificial Sequence
  ENSG00000162511_1 (sequence is synthesized)
tgagcgtcttgttgttcatcgagcactcagtagaggtggcccatggcaaggcgtcctgcaagctctcccagatgggctacctcaggatcgctgacctgatctccagcttcctgctcatca

SEQ ID NO: 486564 - DNA, 120 bp, Artificial Sequence
  ENSG00000162511_2 (sequence is synthesized)
ccatgctcttcatcatcagcctgagcctactgatcggcgtagtcaagaaccgggagaagtacctgctgcccttcctgtccctgcaaatcatggactatctcctgtgcctgctcaccctgc

SEQ ID NO: 486565 - DNA, 120 bp, Artificial Sequence
  ENSG00000162511_3 (sequence is synthesized)
tgggctcctacattgagctgcccgcctacctcaagttggcctcccggagccgtgctagctcctccaagttccccctgatgacgctgcagctgctggacttctgcctgagcatcctgaccc

SEQ ID NO: 486566 - DNA, 120 bp, Artificial Sequence
  ENSG00000162511_4 (sequence is synthesized)
tctgcagctcctacatggaagtgcccacctatctcaacttcaagtccatgaaccacatgaattacctccccagccaggaggatatgcctcataaccagttcatcaagatgatgatcatct

SEQ ID NO: 486567 - DNA, 120 bp, Artificial Sequence
  ENSG00000162511_5 (sequence is synthesized)
tttccatcgccttcatcactgtccttatcttcaaggtctacatgttcaagtgcgtgtggcggtgctacagattgatcaagtgcatgaactcggtggaggagaagagaaactccaagatgc

SEQ ID NO: 486568 - DNA, 120 bp, Artificial Sequence
  ENSG00000162511_6 (sequence is synthesized)
tccagaaggtggtcctgccgtcctacgaggaagccctgtctttgccatcgaagaccccagaggggggcccagcaccacccccatactcagaggtgtgaccctcgccaggccccagcccca

SEQ ID NO: 486569 - DNA, 120 bp, Artificial Sequence
  ENSG00000162511_7 (sequence is synthesized)
gtgctgggaggggtggagctgcctcataatctgcttttttgctttggtggcccctgtggcctgggtgggccctcccgcccctccctggcaggacaatctgcttgtgtctccctcgctggc

SEQ ID NO: 486570 - DNA, 120 bp, Artificial Sequence
  ENSG00000162511_8 (sequence is synthesized)
ctgctcctcctgcagggcctgtgagctgctcacaactgggtcaacgctttaggctgagtcactcctcgggtctctccataattcagcccaacaatgcttggtttatttcaatcagctctg

SEQ ID NO: 486571 - DNA, 120 bp, Artificial Sequence
  ENSG00000162511_9 (sequence is synthesized)
tggccattctaaagttggtgagtttgtcaagcaactatcgacttgatcagttcagccaagcaactgacaaatcaaaaacccacttgtcagttcagtaaaataatttggtcaaacaacagt

SEQ ID NO: 486572 - DNA, 120 bp, Artificial Sequence
  ENSG00000162511_10 (sequence is synthesized)
ctattgcattgatttataaatagttgtcagttcacatagcaatttaatcaagtaatcattaattagttaccccctatatataaatatatgtaatcaatttcttcaaatagcttgcttaca

SEQ ID NO: 486573 - DNA, 120 bp, Artificial Sequence
  ENSG00000162511_11 (sequence is synthesized)
tgataatcaattagccaaccatgagtcatttagaatagtgataaatagaatacacagaatagtgatgaaattcaatttaaaaaatcacgttagcctccaaaccatttaattcaaatgaac

SEQ ID NO: 486574 - DNA, 120 bp, Artificial Sequence
  ENSG00000162511_12 (sequence is synthesized)
ccatcaactggatgccaactctggcgaatgtaggacctctgagtggctgtataattgttaattcaaatgaaattcatttaaacagttgacaaactgtcattcaacaattagctccaggaa

SEQ ID NO: 486575 - DNA, 120 bp, Artificial Sequence
  ENSG00000162511_13 (sequence is synthesized)
ataacagttatttcatcataaaacagtcccttcaaacacacaattgttctgctgaagagttgtcatcaacaatccaatgctcacctattcagttgctctgtggtcagtgtggctgcataa

SEQ ID NO: 486576 - DNA, 120 bp, Artificial Sequence
  ENSG00000162511_14 (sequence is synthesized)
cagtggattccatgaaaggagtcattttagtgatgagctgccagtccattcccaggccaggctgtcgctggccatccattcagtcgattcagtcataggcgaatctgttctgcccgaggc

SEQ ID NO: 486577 - DNA, 120 bp, Artificial Sequence
  ENSG00000162511_15 (sequence is synthesized)
ttgtggtcaagcaaaaattcagccctgaaatcaggcacatctgttcgttggactaaacccacaggttagttcagtcaaagcaggcaacccccttgtgggcactgaccctgccactggggt

SEQ ID NO: 486578 - DNA, 120 bp, Artificial Sequence
  ENSG00000162511_16 (sequence is synthesized)
catggcggttgtggcagctggggaggtttggccccaacagccctcctgtgcctgcttccctgtgtgtcggggtcctccagggagctgacccagaggtggaggccacggaggcagggtctc

SEQ ID NO: 486579 - DNA, 120 bp, Artificial Sequence
  ENSG00000162511_17 (sequence is synthesized)
tggggactgtcggggggtacagagggagaaggctctgcaagagctccctggcaatacccccttgtgtaattgctttgtgtgcgacagggaggaagtttcaataaagcagcaacaagcttc

SEQ ID NO: 486580 - DNA, 120 bp, Artificial Sequence
  ENSG00000162511_18 (sequence is synthesized)
agggccctggccagggatagccaggctagtgttggaggcactgccacctctccatggacgatggatgacctctggcaagtgtcttcctttcttggggcctcagctgtttcatccgcaaat

SEQ ID NO: 486581 - DNA, 120 bp, Artificial Sequence
  ENSG00000162511_19 (sequence is synthesized)
ggggatgttccacctgaccccacccacatctgcaggtggtgagagcagatggaatggcactttgcaaatccccaccagctggtaaaggtgatagcctcactcttctgcttaaagccgtca

SEQ ID NO: 486582 - DNA, 120 bp, Artificial Sequence
  ENSG00000162511_20 (sequence is synthesized)
gtggctgctcatcacactagaataaaatggaaactcctcaccataggatccagcctctgcccacctctctgacagcatctccctgcgattctccaccccacaccttgctccagccacact

SEQ ID NO: 486583 - DNA, 120 bp, Artificial Sequence
  ENSG00000162511_21 (sequence is synthesized)
gacctcaccaaccctgtccctgtctcaggccgattcctcattgctctcaggccactccccagggatgccttcctcagcctcaccctggctgaagtggaccccagcctgcacctccagccc

SEQ ID NO: 486584 - DNA, 120 bp, Artificial Sequence
  ENSG00000162511_22 (sequence is synthesized)
agcaccctctgtcgcatcctcctgtgctatgtgtgatgttctgcttttgtctttgtactcactccagactcaggactgcaagagggcagggcctgggctttcctgtgcatcctcatgtcc

SEQ ID NO: 486585 - DNA, 120 bp, Artificial Sequence
  ENSG00000162511_23 (sequence is synthesized)
ccaaaccagtggttccccaagtgtggtcctgggagcctggctggggtcccaggggcacccctgagcacctccctgctctccttgcctttcagctgacctgatctccagcttcctgctcat

SEQ ID NO: 486586 - DNA, 120 bp, Artificial Sequence
  ENSG00000162511_24 (sequence is synthesized)
atcccaatggccccaggggaaaatgagggtctcttctcattgaccagaatcgaaagctgaggccagggagaagccagaacctggccagggccacacagcagtgaggcagtggaggaggcc

SEQ ID NO: 486587 - DNA, 120 bp, Artificial Sequence
  ENSG00000162511_25 (sequence is synthesized)
tcctgctccccagctcttgtctcctgagctctgagtggctggggctggggcttggttgccagggaagggtgggcagatggctagagagatcctggagcctcaggggagcaagttcaacct

SEQ ID NO: 486588 - DNA, 80 bp, Artificial Sequence
  ENSG00000162512_0 (sequence is synthesized)
gtgggcgcggagctgcgaggcggagccgggcggccgagccgggagcccgcgagcctagagcgcgtcggtccagccgccgg

SEQ ID NO: 486589 - DNA, 120 bp, Artificial Sequence
  ENSG00000162512_1 (sequence is synthesized)
cccggggcccgcgggctgctcctgccaccgctgctgctgctgctgctggcggggcgcgccgcgggggcccagcgctggcgcagtgagaacttcgagagacccgtggacctggagggctct

SEQ ID NO: 486590 - DNA, 120 bp, Artificial Sequence
  ENSG00000162512_2 (sequence is synthesized)
ctctggggatgatgactcctttcccgatgatgaactggatgacctctactcggggtcgggctcgggctacttcgagcaggagtcgggcattgagacagccatgcgcttcagcccagatgt

SEQ ID NO: 486591 - DNA, 120 bp, Artificial Sequence
  ENSG00000162512_3 (sequence is synthesized)
agccctggcggtgtccaccacacctgcggtgctgcccaccacgaacatccagcctgtgggcacaccatttgaagagctcccctctgagcgccccaccctggagccagccaccagccccct

SEQ ID NO: 486592 - DNA, 120 bp, Artificial Sequence
  ENSG00000162512_4 (sequence is synthesized)
ggtggtgacagaagtcccggaagagcccagccagagagccaccaccgtctccactaccatggctaccactgctgccacaagcacaggggacccgactgtggccacagtgcctgccacagt

SEQ ID NO: 486593 - DNA, 120 bp, Artificial Sequence
  ENSG00000162512_5 (sequence is synthesized)
ggccaccgccacccccagcacccctgcagcacccccttttacggccaccactgctgttataaggaccactggcgtacggaggcttctgcctctcccactgaccacagtggctacggcacg

SEQ ID NO: 486594 - DNA, 120 bp, Artificial Sequence
  ENSG00000162512_6 (sequence is synthesized)
ggccactacccccgaggcgccctccccgcccaccacggcggctgtcttggacaccgaggccccaacacccaggctggtcagcacagctacctcccggccaagagcccttcccaggccggc

SEQ ID NO: 486595 - DNA, 120 bp, Artificial Sequence
  ENSG00000162512_7 (sequence is synthesized)
caccacccaggagcctgacatccctgagaggagcaccctgcccctggggaccactgcccctggacccacagaggtggctcagaccccaactccagagaccttcctgaccacaatccggga

SEQ ID NO: 486596 - DNA, 120 bp, Artificial Sequence
  ENSG00000162512_8 (sequence is synthesized)
tgagccagaggttccggtgagtggggggcccagtggagacttcgagctgccagaagaagagaccacacaaccagacacagccaatgaggtggtagctgtgggaggggctgcggccaaggc

SEQ ID NO: 486597 - DNA, 120 bp, Artificial Sequence
  ENSG00000162512_9 (sequence is synthesized)
atcatctccacctgggacactgcccaagggtgcccgcccgggccctggcctcctggacaatgccatcgactcgggcagctcagctgctcagctgcctcagaagagtatcctggagcggaa

SEQ ID NO: 486598 - DNA, 120 bp, Artificial Sequence
  ENSG00000162512_10 (sequence is synthesized)
ggaggtgctcgtagctgtgattgtgggcggggtggtgggcgccctctttgctgccttcttggtcacactgctcatctatcgtatgaagaaaaaggatgagggcagctacacgctggagga

SEQ ID NO: 486599 - DNA, 120 bp, Artificial Sequence
  ENSG00000162512_11 (sequence is synthesized)
acccaagcaggcgagcgtcacataccagaagcctgacaagcaggaggagttctatgcctagtggagccacagtgcctccctgcagcctcaacaccaccctgctgtccagtccccagcctg

SEQ ID NO: 486600 - DNA, 120 bp, Artificial Sequence
  ENSG00000162512_12 (sequence is synthesized)
gccccaccagcccaagcctgggactgggcctggaacctggccccagttcttctctgccctctctcccaaggtctgcccaggctgccagcctcacacagatcttccccgaggaagaggggc

SEQ ID NO: 486601 - DNA, 120 bp, Artificial Sequence
  ENSG00000162512_13 (sequence is synthesized)
tgctgccatctgccccagactgtgcccttacgagctcatctcttgttcccctcatccctgccaccagtctggggcttcaggacctcatgtcagatggatgggaggaagaaagctcctgat

SEQ ID NO: 486602 - DNA, 120 bp, Artificial Sequence
  ENSG00000162512_14 (sequence is synthesized)
tggctggtggtggaagaaagggtggggcttgagatgagcctgagccctgacttggcacccacagtgctcactgagatctcctttttggggcagagaggcactcaggctggtttccaggac

SEQ ID NO: 486603 - DNA, 120 bp, Artificial Sequence
  ENSG00000162512_15 (sequence is synthesized)
aaacatttggtaaacacagcccttgaaatcatctagacactgcaacctcttgctcgtatcccagggcctctctctagctgggtgagagggtgtcccttgtcaccagcctgttttgtcctg

SEQ ID NO: 486604 - DNA, 120 bp, Artificial Sequence
  ENSG00000162512_16 (sequence is synthesized)
gtctctctggggttgttgaatctctcctcttgcctgccaagtacacatgtacccagacttcatttctttctgcatcttcccccaagaaacagcttcctgagggtgctggggcagccactg

SEQ ID NO: 486605 - DNA, 120 bp, Artificial Sequence
  ENSG00000162512_17 (sequence is synthesized)
gtgaggaggggctgctctgatgtccctcctatgaggggactctgcacagacaccattgcccacactatcaccatattttcactcagtcacacacaagacaaaagcatgcaatgacaaaac

SEQ ID NO: 486606 - DNA, 120 bp, Artificial Sequence
  ENSG00000162512_18 (sequence is synthesized)
catacgcaatcctgaccgcccagccaatcaagacatatcacagaacacacgcgtccttccaagaatgtttatcctcatgcatcacttacacacccccagacacgtactgcaatgcaagtc

SEQ ID NO: 486607 - DNA, 120 bp, Artificial Sequence
  ENSG00000162512_19 (sequence is synthesized)
actagtcatggtcacatgacagtgacagtgtggcctcctcctaccccaaatacacccacactctggcaccacacacattgtctccagctttcaggcttactggggagggtggaatcgagc

SEQ ID NO: 486608 - DNA, 120 bp, Artificial Sequence
  ENSG00000162512_20 (sequence is synthesized)
gccaaccccagccagtgtcagacacaatcccatgtggatgcacagtctcactccacatgacctgctctcaatgctggagggaaacaggcaggcccttgcctttctcggaaaaagtgtggg

SEQ ID NO: 486609 - DNA, 120 bp, Artificial Sequence
  ENSG00000162512_21 (sequence is synthesized)
gccacagcccttttagggcattgcatgcaggtgggcctggcttcacccctacctgcttcctccccaccgcagctggcagagggggaggtttggggccagacccccactagctgggagcct

SEQ ID NO: 486610 - DNA, 120 bp, Artificial Sequence
  ENSG00000162512_22 (sequence is synthesized)
gggggctcctctaaggctgaggaaggaaatttggccccaggttgttggggggtcttgggtctcccaggacggaaggcccagggcagggagggggcatgtggttgggctcctttatctccc

SEQ ID NO: 486611 - DNA, 120 bp, Artificial Sequence
  ENSG00000162512_23 (sequence is synthesized)
tgtgtccccttcctgctttgagctagggggctgactctgcctcccaggacacaagtctccaaagtgcctgtgagggcgggccctccgcaccctctgccctctgcctggcaggccaacctc

SEQ ID NO: 486612 - DNA, 120 bp, Artificial Sequence
  ENSG00000162512_24 (sequence is synthesized)
agcccacctgcccagaggccctccctgtggacaccccctcacctatttggccaaacaattctggctgcagcttcaggggccatggctggaagcagcccctgcagatccctcaggccccga

SEQ ID NO: 486613 - DNA, 120 bp, Artificial Sequence
  ENSG00000162512_25 (sequence is synthesized)
ggtcagggtttgagggatgagaccaggtgatagtgggggaggggttacttcctttgttacctagcaagtagggctatttccatcggtattttaaatgtggggtcacagatcttttgggga

SEQ ID NO: 486614 - DNA, 120 bp, Artificial Sequence
  ENSG00000162512_26 (sequence is synthesized)
gggtgtgcttggcagggggcctcttggagccaaagggatgtggtgtgagttgcgattggctggcactcacacccccacccctcacccacatcccagattcaagtcaggaaggcaggtttt

SEQ ID NO: 486615 - DNA, 120 bp, Artificial Sequence
  ENSG00000162512_27 (sequence is synthesized)
atttcagggcccttttcaagatgccctggcagcagatttctgcaggatgaggggtagcggtgtgtaggcagtgagggggaggttccaggggctgtcccacagcctgtcttttccaggctg

SEQ ID NO: 486616 - DNA, 120 bp, Artificial Sequence
  ENSG00000162512_28 (sequence is synthesized)
ggctccatcttccagtcccaaaaccctccttcacagggcccagaggcttgtgaggaagccaggtggacccagccttagaagagtgggcatggggggcccctgatatctggagggggcggg

SEQ ID NO: 486617 - DNA, 120 bp, Artificial Sequence
  ENSG00000162512_29 (sequence is synthesized)
ttggcctcagtcatctttggagcagaagggctgggtcctggggccacagaccacaaggctcagcctccctaccctgctccctggggtgctgctgtcttggagagcacagctctggtgaga

SEQ ID NO: 486618 - DNA, 120 bp, Artificial Sequence
  ENSG00000162512_30 (sequence is synthesized)
cggcctgggcaggccgaggctgagaaaccagggaggatagaggagaaaagggcttgggcccccagccccagaagatgctggaccccaggtgggagacccaacagtgggtgcagtttctca

SEQ ID NO: 486619 - DNA, 120 bp, Artificial Sequence
  ENSG00000162512_31 (sequence is synthesized)
gtagggctggagccaatggtgggggtggccccggcaggcctggctcctcacatcccaggggttggcttctgatttggggcttgggctccaggcactggcttctcttctctgtgtccttag

SEQ ID NO: 486620 - DNA, 120 bp, Artificial Sequence
  ENSG00000162512_32 (sequence is synthesized)
catttgagagaagaggccaggggccttgttcatggatccctggacccaaggcagatgtccaggctttatcctcctgaggatgaggagtctgaccagcccaaatctgccctggccggcctg

SEQ ID NO: 486621 - DNA, 120 bp, Artificial Sequence
  ENSG00000162512_33 (sequence is synthesized)
accggggcaaggcagtccaagagagttcagtgaggaccagctaggctctcccaggtgcaatgtgggtgcagggccctcatgtccccctacccctgcctgtgatggagtgttctgaggggc

SEQ ID NO: 486622 - DNA, 120 bp, Artificial Sequence
  ENSG00000162512_34 (sequence is synthesized)
tttggcatttgctggaagcacagggagttccaaatgagagggagcttctgtggcttgagagcctctggggccttggctgccagagcacgaggcaggccaggacctggagagcccagaccc

SEQ ID NO: 486623 - DNA, 120 bp, Artificial Sequence
  ENSG00000162512_35 (sequence is synthesized)
tgtctccaggaggccaggaggccagatgggggccttgcctgaaagactggtccccttgatcgctggaggcatgtgggtggcaaccagggctgggcagggcttagggtgtgtgggccaaac

SEQ ID NO: 486624 - DNA, 120 bp, Artificial Sequence
  ENSG00000162512_36 (sequence is synthesized)
ccccctggggttggcaaagccgcctgtcaggcctcctggtgggggcccctggacacagggagcagaccctctgcctcatggggtaggagtggctgcctcctgtgttctctggatttcttc

SEQ ID NO: 486625 - DNA, 120 bp, Artificial Sequence
  ENSG00000162512_37 (sequence is synthesized)
tcccaacaactacaaccctggacttgcctccccaggcctcttgcctgtaaatagaagcccgcaaactgtacagatttacagaggcatcgagactgggccctgggagttgccatctgagag

SEQ ID NO: 486626 - DNA, 120 bp, Artificial Sequence
  ENSG00000162512_38 (sequence is synthesized)
ccgatggccccagcatcccccaggtgcctgcctggcaccacagtgaccctggcctcagcgtggcaaatgcatgtaaatatttttcgtaggcagcgtggctccagagagccccctgaagac

SEQ ID NO: 486627 - DNA, 120 bp, Artificial Sequence
  ENSG00000162512_39 (sequence is synthesized)
agtgtccctccctcctgtgagtcctttctcctgtacagaacctgcctggggtgggtgggggtctgccattccctcccccaggccttccctgccccttctctcccctgtaacctgtttatt

SEQ ID NO: 486628 - DNA, 120 bp, Artificial Sequence
  ENSG00000162512_40 (sequence is synthesized)
aaccatacctgtcctgagttcatggccaaaaccttaaataagaaaaacaaaagaaaaagacagtggaaaaaagagaccaaggcgcctgccccactgcgggtactctcctgttccagcctt

SEQ ID NO: 486629 - DNA, 62 bp, Artificial Sequence
  ENSG00000162512_41 (sequence is synthesized)
gtgaaggaacacttcctgtgctgtgcccatttataagaggaaataaaattaagctgaaatga

SEQ ID NO: 486630 - DNA, 120 bp, Artificial Sequence
  ENSG00000162512_42 (sequence is synthesized)
gcccagcgctggcgcagtgagaacttcgagagacccgtggacctggagggctctggggatgatgactcctttcccgatgatgaactggatgacctctactcggggtcgggctcgggctgt

SEQ ID NO: 486631 - DNA, 120 bp, Artificial Sequence
  ENSG00000162512_43 (sequence is synthesized)
aagtacccccctccctacctctgcctgggggcagtgaccagtctgtatccagcctcaactctgagaagcccacggggggcttgcttcagtgaggcagggggcattcactgcctgggtcag

SEQ ID NO: 486632 - DNA, 120 bp, Artificial Sequence
  ENSG00000162512_44 (sequence is synthesized)
gcaagttcttcttgctctggatccccagaacaagaagggcagaacatccttctggggatagaacaagacctgggaggacctcagggcccagaatgtccaggtctccagggtcccacgtct

SEQ ID NO: 486633 - DNA, 120 bp, Artificial Sequence
  ENSG00000162512_45 (sequence is synthesized)
gcatctttgtgtgtgctatgtggctttctctgcagaccttgcttggttccggtggtcccgtcaggtgcaataagctgtggccaatggtggggttagggcagtgatgacacagggcaggtg

SEQ ID NO: 486634 - DNA, 120 bp, Artificial Sequence
  ENSG00000162512_46 (sequence is synthesized)
cttcaagtggtgcctgggatggccccgccctggggaaggggagccaggtcagctgggtctagcagaatctcgggagagaagggcaccgcgaaccccactctgccatgtagcaactgtgtg

SEQ ID NO: 486635 - DNA, 120 bp, Artificial Sequence
  ENSG00000162512_47 (sequence is synthesized)
cccctcggtgctccccctccctgaatccctgtattttcacctgtggatggtgagaaatacgacttcttctcagtgcctctaggagggtttgggataggaagctggggtctggcacagagg

SEQ ID NO: 486636 - DNA, 120 bp, Artificial Sequence
  ENSG00000162512_48 (sequence is synthesized)
aggagctctcaaaatggtagcaaaaagaaggcagctgagactgggcccagtgagggcacgggctggcatctgaggagatggtacggggtctgcacgccacagagctggctccccacagcc

SEQ ID NO: 486637 - DNA, 120 bp, Artificial Sequence
  ENSG00000162512_49 (sequence is synthesized)
ctcgcctctggtctcccctccttagccaagtcctttgagcctctttcaaattaatctttgtaaaacccgtttatattgggtcacatctctattcgcaaagttccctggctcccctccctc

SEQ ID NO: 486638 - DNA, 120 bp, Artificial Sequence
  ENSG00000162512_50 (sequence is synthesized)
ctgcctggttccgagcccaggagctggctgtggcttctccctcccccatcccctactccccatctcatttcctcccaagttccttcactgtcccggctttgcgtcagccagattgctcaa

SEQ ID NO: 486639 - DNA, 120 bp, Artificial Sequence
  ENSG00000162512_51 (sequence is synthesized)
gcagttcccctgcctcaagggcttcttttcccttttaccctccgcctctgcctctgggggaagcccttagtgtaccacccctgccttgagcttgtggtaggggtgcctttggggtctgac

SEQ ID NO: 486640 - DNA, 120 bp, Artificial Sequence
  ENSG00000162512_52 (sequence is synthesized)
tcttcccagaatgccactcctgtgttcccctgcaagccccagcaagttttgcagccagtagcgcctcagttgctgctgcctggattcaacctcatagaaactgtaggctgggtgggcagg

SEQ ID NO: 486641 - DNA, 120 bp, Artificial Sequence
  ENSG00000162512_53 (sequence is synthesized)
aatagtcaaggaaggcttcccgggagaggcggcccccagaatttttgacttggcagagagaagttggggaacatcagcaactgaccacctttagctgggctgtgccttcctcctttctct

SEQ ID NO: 486642 - DNA, 120 bp, Artificial Sequence
  ENSG00000162512_54 (sequence is synthesized)
catcttttctgggaaaattgggtaaagagagggggttgggagacctaatcttgatggccattgcttacctgggatcctcatgcccctcacaaccacccagctccctagctctctccctct

SEQ ID NO: 486643 - DNA, 120 bp, Artificial Sequence
  ENSG00000162512_55 (sequence is synthesized)
ctgctgcctcccaggctccgttccccaacccctatttctctgtcccctctgggagttgcagctaccagcaccccctctgtagtgttcctgagagggcctcatgagtcccagcgcccatgc

SEQ ID NO: 486644 - DNA, 120 bp, Artificial Sequence
  ENSG00000162512_56 (sequence is synthesized)
ttctaagagaaagtcatcagccagacactgaaagccttctgggatgggaccccaggcccagcgctggcgcagtgagaacttcgagagacccgtggacctggagggctctggggatgatga

SEQ ID NO: 486645 - DNA, 120 bp, Artificial Sequence
  ENSG00000162512_57 (sequence is synthesized)
gtctaggagcgatgtgtgtttagggaacatacgtggccatggcggtgggtccgtgttgtgggccttggtgaggcccagcgctggcgcagtgagaacttcgagagacccgtggacctggag

SEQ ID NO: 486646 - DNA, 120 bp, Artificial Sequence
  ENSG00000162517_0 (sequence is synthesized)
gtcagaatcaccatggccagctatccttaccggcagggctgcccaggagctgcaggacaagcaccaggagcccctccgggtagctactaccctggaccccccaatagtggagggcagtat

SEQ ID NO: 486647 - DNA, 120 bp, Artificial Sequence
  ENSG00000162517_1 (sequence is synthesized)
ggtagtgggctaccccctggtggtggttatgggggtcctgcccctggagggccttatggaccaccagctggtggagggccctatggacaccccaatcctgggatgttcccctctggaact

SEQ ID NO: 486648 - DNA, 120 bp, Artificial Sequence
  ENSG00000162517_2 (sequence is synthesized)
ccaggaggaccatatggcggtgcagctcccgggggcccctatggtcagccacctccaagttcctacggtgcccagcagcctgggctttatggacagggtggcgcccctcccaatgtggat

SEQ ID NO: 486649 - DNA, 120 bp, Artificial Sequence
  ENSG00000162517_3 (sequence is synthesized)
cctgaggcctactcctggttccagtcggtggactcagatcacagtggctatatctccatgaaggagctaaagcaggccctggtcaactgcaattggtcttcattcaatgatgagacctgc

SEQ ID NO: 486650 - DNA, 120 bp, Artificial Sequence
  ENSG00000162517_4 (sequence is synthesized)
ctcatgatgataaacatgtttgacaagaccaagtcaggccgcatcgatgtctacggcttctcagccctgtggaaattcatccagcagtggaagaacctcttccagcagtatgaccgggac

SEQ ID NO: 486651 - DNA, 120 bp, Artificial Sequence
  ENSG00000162517_5 (sequence is synthesized)
cgctcgggctccattagctacacagagctgcagcaagctctgtcccaaatgggctacaacctgagcccccagttcacccagcttctggtctcccgctactgcccacgctctgccaatcct

SEQ ID NO: 486652 - DNA, 120 bp, Artificial Sequence
  ENSG00000162517_6 (sequence is synthesized)
gaggccttccgggagaaggacacagctgtacaaggcaacattcggctcagcttcgaggacttcgtcaccatgacagcttctcggatgctatgacccaaccatctgtggagagtggagtgc

SEQ ID NO: 486653 - DNA, 120 bp, Artificial Sequence
  ENSG00000162517_7 (sequence is synthesized)
accagggacctttcctggcttcttagagtgagagaagtatgtggacatctcttcttttcctgtccctctagaagaacattctcccttgcttgatgcaacactgttccaaaagagggtgga

SEQ ID NO: 486654 - DNA, 120 bp, Artificial Sequence
  ENSG00000162517_8 (sequence is synthesized)
gagtcctgcatcatagccaccaaatagtgaggaccggggctgaggccacacagataggggcctgatggaggagaggatagaagttgaatgtcctgatggccatgagcagttgagtggcac

SEQ ID NO: 486655 - DNA, 120 bp, Artificial Sequence
  ENSG00000162517_9 (sequence is synthesized)
agcctggcaccaggagcaggtccttgtaatggagttagtgtccagtcagctgagctccaccctgatgccagtggtgagtgttcatcggcctgttaccgttagtacctgtgttccctcacc

SEQ ID NO: 486656 - DNA, 120 bp, Artificial Sequence
  ENSG00000162517_10 (sequence is synthesized)
aggccatcctgtcaaacgagcccattttctccaaagtggaatctgaccaagcatgagagagatctgtctatgggaccagtggcttggattctgccacacccataaatccttgtgtgttaa

SEQ ID NO: 486657 - DNA, 120 bp, Artificial Sequence
  ENSG00000162517_11 (sequence is synthesized)
cttctagctgcctggggctggccctgctcagacaaatctgctccctgggcatctttggccaggcttctgccctctgcagctgggacccctcacttgcctgccatgctctgctcggcttca

SEQ ID NO: 486658 - DNA, 120 bp, Artificial Sequence
  ENSG00000162517_12 (sequence is synthesized)
gtctccaggagacagtggtcacctctccctgccaatactttttttaatttgcattttttttcatttggggccaaaagtccagtgaaattgtaagcttcaataaaaggatgaaactctgga

SEQ ID NO: 486659 - DNA, 120 bp, Artificial Sequence
  ENSG00000162517_13 (sequence is synthesized)
gggaccttggaccccacaggtccaggctggcgctggcctgggctccacagcctcccaaggccctcatgggggccttgggcgggggcatcagccatgaccggaggtttagagttctggttc

SEQ ID NO: 486660 - DNA, 120 bp, Artificial Sequence
  ENSG00000162517_14 (sequence is synthesized)
cgccgatctcatttggggcgtcggataaaaatccaggcttccggacccaccccacactgcatcagagtcatcaggaaactctggttgtagcaggcgccacaagtgagctggtttgaccac

SEQ ID NO: 486661 - DNA, 120 bp, Artificial Sequence
  ENSG00000162517_15 (sequence is synthesized)
tgacttagttcaacaccgccatttcgcgtgtagaaaagtgaaccccgagaagacacagaacttacctgaagtcaccaggcagttaggcagcagggccgaggtcagaacccgggctatctt

SEQ ID NO: 486662 - DNA, 120 bp, Artificial Sequence
  ENSG00000162517_16 (sequence is synthesized)
gggatatgttatctttgtggcagagagaaggagcaggagagctagcaagaatgcacaatgcctcttaaagcttctctgaagtggcgcccctcccaatgtggatcctgaggcctactcctg

SEQ ID NO: 486663 - DNA, 80 bp, Artificial Sequence
  ENSG00000162520_0 (sequence is synthesized)
gggatccggtgtcggttgcagctggcagtgcggcgggcgcgggcgccggagcgaggggcccgcgggcccggctattaata

SEQ ID NO: 486664 - DNA, 120 bp, Artificial Sequence
  ENSG00000162520_1 (sequence is synthesized)
cggagccccggcgcggcggggacggcgccgcccaggccgcgaggaaaacaagagtagaggccaattctcctcttccaaagaactctggatccctaaatgaggcagaagccttgaacccag

SEQ ID NO: 486665 - DNA, 120 bp, Artificial Sequence
  ENSG00000162520_2 (sequence is synthesized)
aagttactctatcttcagaggggtccttaaacctcgaagacattctctacctggaggacacaggtgaccttgatgagacactctatgtgcaagagactgagaaggcagaggaggccctgt

SEQ ID NO: 486666 - DNA, 120 bp, Artificial Sequence
  ENSG00000162520_3 (sequence is synthesized)
atattgaggaggccatgcagccagatgaggctctgcatgtggaggagcctgggaatccagaggagacagtgtgtgtggaggaaaccacggagccagatcggatacagtttgtggaggggc

SEQ ID NO: 486667 - DNA, 120 bp, Artificial Sequence
  ENSG00000162520_4 (sequence is synthesized)
ccgtggagccaggaaagcccacaagcccagagcacgttgtttatgagggagagacagtcacaagggcggagaaatctaaccctgaggagagcctcagagccgagcagagccccagcatgg

SEQ ID NO: 486668 - DNA, 120 bp, Artificial Sequence
  ENSG00000162520_5 (sequence is synthesized)
aggagaacctgagcatagaggacctggaattgctagaggggcgtttccagcagtgtgtccaagctgtggcccagctggaagaggagagggatcagctcatccatgagcttgtattgctcc

SEQ ID NO: 486669 - DNA, 120 bp, Artificial Sequence
  ENSG00000162520_6 (sequence is synthesized)
gggaaccagccctgcaggaggtacagcaagtccatcaagacatcctggctgcctacaagctccatgcccaagcagagctggagagagatggcctaagggaggagatccggctggtcaagc

SEQ ID NO: 486670 - DNA, 120 bp, Artificial Sequence
  ENSG00000162520_7 (sequence is synthesized)
agaagcttttcaaagtgacaaaggaatgtgtggcctaccaataccagctggagtgccgccagcaggacgtggctcagtttgccgatttccgggaagtgctgactacaagggcaacccagc

SEQ ID NO: 486671 - DNA, 120 bp, Artificial Sequence
  ENSG00000162520_8 (sequence is synthesized)
tctcagaggaactggcccagctccgggatgcctatcagaagcagaaggagcagctgcggcaacaactagaagcccctccaagccagagggatgggcactttctccaggaaagccggcgac

SEQ ID NO: 486672 - DNA, 120 bp, Artificial Sequence
  ENSG00000162520_9 (sequence is synthesized)
tctctgcccagtttgaaaatctcatggcagagagccgccaggacctggaggaggagtatgagcctcagttcctgcggctcctagagaggaaagaagctgggaccaaagctctgcagagaa

SEQ ID NO: 486673 - DNA, 120 bp, Artificial Sequence
  ENSG00000162520_10 (sequence is synthesized)
cccaggctgagatccaggaaatgaaggaggctctgagacccctgcaagcagaggcccggcagctccgcctgcaaaacaggaacctggaggaccagatcgcacttgtgaggcaaaaacgag

SEQ ID NO: 486674 - DNA, 120 bp, Artificial Sequence
  ENSG00000162520_11 (sequence is synthesized)
atgaagaggtgcagcagtacagggaacagctggaggaaatggaagaacgccagaggcagttaagaaatggggtgcaactccagcaacagaagaacaaagagatggaacagctaaggctca

SEQ ID NO: 486675 - DNA, 120 bp, Artificial Sequence
  ENSG00000162520_12 (sequence is synthesized)
gtcttgctgaagagctctctacttataaggctatgctactacccaagagcctggaacaggctgatgctcccacttctcaggcaggtggaatggagacacagtctcaaggggctgtttaga

SEQ ID NO: 486676 - DNA, 120 bp, Artificial Sequence
  ENSG00000162520_13 (sequence is synthesized)
aatatatggccaaatctgtaacccggaaacagcaaaaaacttcttagcaaaggatcactaagtaccctttggatgtactcttccaaccagacaagagtgccagaaacttggcaagcaatt

SEQ ID NO: 486677 - DNA, 120 bp, Artificial Sequence
  ENSG00000162520_14 (sequence is synthesized)
tggctgacctgcttaaaaagattctagagttggccggaggcagaacatgtcaactctttgctggattctatttcatctgctgttgatactgatctcaatgcaccaaggaaaggaaagatg

SEQ ID NO: 486678 - DNA, 120 bp, Artificial Sequence
  ENSG00000162520_15 (sequence is synthesized)
agcctcctgtcttccagcaacaaccctcacatatgcactgagtgaaggatgaatgtatggacacatctgggagtattttaaagaatgtatcttgccttgtgttgacccaaaccaaaaaca

SEQ ID NO: 486679 - DNA, 120 bp, Artificial Sequence
  ENSG00000162520_16 (sequence is synthesized)
tttttgaggggcacatgtggggtcaaaaagatagccaatttccattacatgggtttacaatttccattcttttgtgccacgagtgttagaatttaaatgaatacttttacaaagtctact

SEQ ID NO: 486680 - DNA, 120 bp, Artificial Sequence
  ENSG00000162520_17 (sequence is synthesized)
ttttgttcaaggatatgctgacccatatagtttactcttaaaattgtgtcaaggtatttctcactatactctaaaacaactagacttgaaaagaaaccatttgagatttgaatctaatgg

SEQ ID NO: 486681 - DNA, 120 bp, Artificial Sequence
  ENSG00000162520_18 (sequence is synthesized)
ttaacgctattcagattttcccaaagatcttacctcatgaaagtagttctgggtcagaatgatctactcagttaaaaaacaacaacaacaaaaaactaagcgattgggaaaaaacaggaa

SEQ ID NO: 486682 - DNA, 120 bp, Artificial Sequence
  ENSG00000162520_19 (sequence is synthesized)
ttttatctggttattgcatctggtgatagaggccttcaaagcctattatttctaacctaagtaaaggccccagtgaaaaacatactggggaaataaaacctctgagaaaaggttcaagca

SEQ ID NO: 486683 - DNA, 120 bp, Artificial Sequence
  ENSG00000162520_20 (sequence is synthesized)
ccttttccaaatttaaatcttgccttaaattctctctaccacactgcctttgacactcttggaagtccatgtagttctctacagatagacttcaaagaaacgttaccttatcaaagacta

SEQ ID NO: 486684 - DNA, 120 bp, Artificial Sequence
  ENSG00000162520_21 (sequence is synthesized)
atctgtgccacctctgattcagtgttttatgtctttcactttccctgggaaggagtaaagttcttttctacagctctgggactattacatttaattctgctcttgatagtcaaagaccat

SEQ ID NO: 486685 - DNA, 120 bp, Artificial Sequence
  ENSG00000162520_22 (sequence is synthesized)
ggacaacaactgtcatctgaaggactcttctagaagccagagactggtgtttgatggatgttttatactaaataaaacccatcagcatggggttatgtagaaaagcaatttattccattt

SEQ ID NO: 486686 - DNA, 120 bp, Artificial Sequence
  ENSG00000162520_23 (sequence is synthesized)
taagcacttacacagttagtcatggagagtaacaggcctgctggtgaaacaggtcacccaaaatggagatggcatcaaactagtggtcaaggactaactcctaaaaaaaaaaagcaactc

SEQ ID NO: 486687 - DNA, 120 bp, Artificial Sequence
  ENSG00000162520_24 (sequence is synthesized)
ttatcaaggattaatttaatttttaaaacaaatacaagttattgattcactcttctcaacttgacagtctacctgtggtataactgtcaggtaaaaacatacatctttacaacttggtgg

SEQ ID NO: 486688 - DNA, 120 bp, Artificial Sequence
  ENSG00000162520_25 (sequence is synthesized)
aaaaaaaaccaacaacaaaaaaaaaaacaccatttcacagacaggaaataaacaacatgaaaacagctcaagaaatacactaacgagcaaaaatatatgaatatatggggaaagaggaac

SEQ ID NO: 486689 - DNA, 120 bp, Artificial Sequence
  ENSG00000162520_26 (sequence is synthesized)
atatatggggaaagaggaacgtgttgttttgacttaactgaagaaaccaagaggaaactggtctacgtatgaaaatgtgcatcctggaaagtcaggtgtcaagattttcgagtaggaatc

SEQ ID NO: 486690 - DNA, 120 bp, Artificial Sequence
  ENSG00000162520_27 (sequence is synthesized)
tatatgacttgaatctccccctatttcctgaataaaagtgacatctttcagtatttatacttcatggctcagacacctacctcatttggctctattccttactcactctagcctttactt

SEQ ID NO: 486691 - DNA, 120 bp, Artificial Sequence
  ENSG00000162520_28 (sequence is synthesized)
aaatgagtctgaaaaacttggggatatagcataagaagaaaaataatcacacataatattcccctttctgtagctactttagacctgggttactagaaaattcctgaagaaaatttcaac

SEQ ID NO: 486692 - DNA, 120 bp, Artificial Sequence
  ENSG00000162520_29 (sequence is synthesized)
agctaagtggaaaaaggaatccgaaggaagaacgcctgaagcccaggtctgggaaggggcccagcagcttctctcttggggagaaagacgaaaacaagagtagaggccaattctcctctt

SEQ ID NO: 486693 - DNA, 120 bp, Artificial Sequence
  ENSG00000162520_30 (sequence is synthesized)
cctttgagcagcccgcccaaccctgcctccaccctcccaggctggacagggaaggtgctccctggggcttcagaccccccttctgactccccctgcaacgggacctcacgaaaggaaggg

SEQ ID NO: 486694 - DNA, 120 bp, Artificial Sequence
  ENSG00000162521_0 (sequence is synthesized)
ggaaacaatagaggccgcgcgcacagagcgagctcttgcagcctccccgcccctcccgcaacgctcgaccccaggattcccccggctcgcctgcccgccatggccgacaaggaagcagcc

SEQ ID NO: 486695 - DNA, 120 bp, Artificial Sequence
  ENSG00000162521_1 (sequence is synthesized)
ttcgacgacgcagtggaagaacgagtgatcaacgaggaatacaaaatatggaaaaagaacaccccttttctttatgatttggtgatgacccatgctctggagtggcccagcctaactgcc

SEQ ID NO: 486696 - DNA, 120 bp, Artificial Sequence
  ENSG00000162521_2 (sequence is synthesized)
cagtggcttccagatgtaaccagaccagaagggaaagatttcagcattcatcgacttgtcctggggacacacacatcggatgaacaaaaccatcttgttatagccagtgtgcagctccct

SEQ ID NO: 486697 - DNA, 120 bp, Artificial Sequence
  ENSG00000162521_3 (sequence is synthesized)
aatgatgatgctcagtttgatgcgtcacactacgacagtgagaaaggagaatttggaggttttggttcagttagtggaaaaattgaaatagaaatcaagatcaaccatgaaggagaagta

SEQ ID NO: 486698 - DNA, 120 bp, Artificial Sequence
  ENSG00000162521_4 (sequence is synthesized)
aacagggcccgttatatgccccagaacccttgtatcatcgcaacaaagactccttccagtgatgttcttgtttttgactatacaaaacatccttctaaaccagatccttctggagagtgc

SEQ ID NO: 486699 - DNA, 120 bp, Artificial Sequence
  ENSG00000162521_5 (sequence is synthesized)
aacccagacttgcgtctccgtggacatcagaaggaaggctatgggctttcttggaacccaaatctcagtgggcacttacttagtgcttcagatgaccataccatctgcctgtgggacatc

SEQ ID NO: 486700 - DNA, 120 bp, Artificial Sequence
  ENSG00000162521_6 (sequence is synthesized)
agtgccgttccaaaggagggaaaagtggtagatgcgaagaccatctttacagggcatacggcagtagtagaagatgtttcctggcatctactccatgagtctctgtttgggtcagttgct

SEQ ID NO: 486701 - DNA, 120 bp, Artificial Sequence
  ENSG00000162521_7 (sequence is synthesized)
gatgatcagaaacttatgatttgggatactcgttcaaacaatacttccaaaccaagccactcagttgatgctcacactgctgaagtgaactgcctttctttcaatccttatagtgagttc

SEQ ID NO: 486702 - DNA, 120 bp, Artificial Sequence
  ENSG00000162521_8 (sequence is synthesized)
attcttgccacaggatcagctgacaagactgttgccttgtgggatctgagaaatctgaaacttaagttgcattcctttgagtcacataaggatgaaatattccaggttcagtggtcacct

SEQ ID NO: 486703 - DNA, 120 bp, Artificial Sequence
  ENSG00000162521_9 (sequence is synthesized)
cacaatgagactattttagcttccagtggtactgatcgcagactgaatgtctgggatttaagtaaaattggagaggaacaatccccagaagatgcagaagacgggccaccagagttgttg

SEQ ID NO: 486704 - DNA, 120 bp, Artificial Sequence
  ENSG00000162521_10 (sequence is synthesized)
tttattcatggtggtcatactgccaagatatctgatttctcctggaatcccaatgaaccttgggtgatttgttctgtatcagaagacaatatcatgcaagtgtggcaaatggcagagaac

SEQ ID NO: 486705 - DNA, 120 bp, Artificial Sequence
  ENSG00000162521_11 (sequence is synthesized)
atttataatgatgaagaccctgaaggaagcgtggatccagaaggacaagggtcctagatatgtctttacttgttgtgattttagactccccttttttcttctcaaccctgagagtgattt

SEQ ID NO: 486706 - DNA, 120 bp, Artificial Sequence
  ENSG00000162521_12 (sequence is synthesized)
aacactggttttgagacagactttattcagctatccctctatataataggtaccaccgataatgctattagcccaaaccgtgggtgttttctaaatattaataggggggcttgattcaac

SEQ ID NO: 486707 - DNA, 120 bp, Artificial Sequence
  ENSG00000162521_13 (sequence is synthesized)
aaagccacagacttaacgttgaaattttcttcaggaattttctagtaacccaggtctaaagtagctacagaaaggggaatattatgtgtgattatttttcttcttatgctatatccccaa

SEQ ID NO: 486708 - DNA, 120 bp, Artificial Sequence
  ENSG00000162521_14 (sequence is synthesized)
gtttttcagactcatttaagtaaaggctagagtgagtaaggaatagagccaaatgaggtaggtgtctgagccatgaagtataaatactgaaagatgtcacttttattcaggaaatagggg

SEQ ID NO: 486709 - DNA, 120 bp, Artificial Sequence
  ENSG00000162521_15 (sequence is synthesized)
gagattcaagtcatatagattcctactcgaaaatcttgacacctgactttccaggatgcacattttcatacgtagaccagtttcctcttggtttcttcagttaagtcaaaacaacacgtt

SEQ ID NO: 486710 - DNA, 120 bp, Artificial Sequence
  ENSG00000162521_16 (sequence is synthesized)
cgttcctctttccccatatattcatatatttttgctcgttagtgtatttcttgagctgttttcatgttgtttatttcctgtctgtgaaatggtgtttttttttttgttgttggttttttt

SEQ ID NO: 486711 - DNA, 120 bp, Artificial Sequence
  ENSG00000162521_17 (sequence is synthesized)
ttttttttaacttgggaccaccaagttgtaaagatgtatgtttttacctgacagttataccacaggtagactgtcaagttgagaagagtgaatcaataacttgtatttgttttaaaaatt

SEQ ID NO: 486712 - DNA, 120 bp, Artificial Sequence
  ENSG00000162521_18 (sequence is synthesized)
aaattaatccttgataagagttgctttttttttttaggagttagtccttgaccactagtttgatgccatctccattttgggtgacctgtttcaccagcaggcctgttactctccatgact

SEQ ID NO: 486713 - DNA, 120 bp, Artificial Sequence
  ENSG00000162521_19 (sequence is synthesized)
aactgtgtaagtgcttaaaatggaataaattgcttttctacataaccccatgctgatgggttttatttagtataaaacatccatcaaacaccagtctctggcttctagaagagtccttca

SEQ ID NO: 486714 - DNA, 120 bp, Artificial Sequence
  ENSG00000162521_20 (sequence is synthesized)
gatgacagttgttgtccatggtctttgactatcaagagcagaattaaatgtaatagtcccagagctgtagaaaagaactttactccttcccagggaaagtgaaagacataaaacactgaa

SEQ ID NO: 486715 - DNA, 120 bp, Artificial Sequence
  ENSG00000162521_21 (sequence is synthesized)
tcagaggtggcacagattagtctttgataaggtaacgtttctttgaagtctatctgtagagaactacatggacttccaagagtgtcaaaggcagtgtggtagagagaatttaaggcaaga

SEQ ID NO: 486716 - DNA, 120 bp, Artificial Sequence
  ENSG00000162521_22 (sequence is synthesized)
tttaaatttggaaaaggtgcttgaaccttttctcagaggttttatttccccagtatgtttttcactggggcctttacttaggttagaaataataggctttgaaggcctctatcaccagat

SEQ ID NO: 486717 - DNA, 120 bp, Artificial Sequence
  ENSG00000162521_23 (sequence is synthesized)
gcaataaccagataaaattcctgttttttcccaatcgcttagttttttgttgttgttgttttttaactgagtagatcattctgacccagaactactttcatgaggtaagatctttgggaa

SEQ ID NO: 486718 - DNA, 120 bp, Artificial Sequence
  ENSG00000162521_24 (sequence is synthesized)
aatctgaatagcgttaaccattagattcaaatctcaaatggtttcttttcaagtctagttgttttagagtatagtgagaaataccttgacacaattttaagagtaaactatatgggtcag

SEQ ID NO: 486719 - DNA, 120 bp, Artificial Sequence
  ENSG00000162521_25 (sequence is synthesized)
catatccttgaacaaaaagtagactttgtaaaagtattcatttaaattctaacactcgtggcacaaaagaatggaaattgtaaacccatgtaatggaaattggctatctttttgacccca

SEQ ID NO: 486720 - DNA, 120 bp, Artificial Sequence
  ENSG00000162521_26 (sequence is synthesized)
catgtgcccctcaaaaatgtttttggtttgggtcaacacaaggcaagatacattctttaaaatactcccagatgtgtccatacattcatccttcactcagtgcatatgtgagggttgttg

SEQ ID NO: 486721 - DNA, 120 bp, Artificial Sequence
  ENSG00000162521_27 (sequence is synthesized)
ctggaagacaggaggctcatctttcctttccttggtgcattgagatcagtatcaacagcagatgaaatagaatccagcaaagagttgacatgttctgcctccggccaactctagaatctt

SEQ ID NO: 486722 - DNA, 120 bp, Artificial Sequence
  ENSG00000162521_28 (sequence is synthesized)
tttaagcaggtcagccagtatttgcaacttccacaggatgaattgcttgccaagtttctggcactcttgtctggttggaagagtacatccaaagggtacttagtgatcctttgctaagaa

SEQ ID NO: 486723 - DNA, 120 bp, Artificial Sequence
  ENSG00000162521_29 (sequence is synthesized)
gttttttgctgtttccgggttacagatttggccatatatttctaaacagcccctgtaaagttgaaagaaaaagtttataacagtgaacttctgaggtttagttactgcaggctttgttga

SEQ ID NO: 486724 - DNA, 120 bp, Artificial Sequence
  ENSG00000162521_30 (sequence is synthesized)
gaagagattgttacagtgtgatttatggatgatcagggatgactttcccctagcaaatatttggatgcctcctgtttgtcaaatagaatgaatggtgatggtgatgggagggatagttaa

SEQ ID NO: 486725 - DNA, 120 bp, Artificial Sequence
  ENSG00000162521_31 (sequence is synthesized)
acgttttctctgctaggttaacttcttacaggtataattacaatgcctgaaattctgtagtttcatttctttggattagtcgttgtcttttccagattgtacacaatctgatcaacacaa

SEQ ID NO: 486726 - DNA, 120 bp, Artificial Sequence
  ENSG00000162521_32 (sequence is synthesized)
cacagtataagaaaatcctcaaggctgggtgtgatggcttatgcctgtaatcccagctacttagcaggctgaggcaggagtattgtttgaacccaggaggcagagttgcagtgagccaag

SEQ ID NO: 486727 - DNA, 120 bp, Artificial Sequence
  ENSG00000162521_33 (sequence is synthesized)
atcgtgccactactccagcctgggcaaaatagcaagacccgaccccccatctctactaaaaagaaatttaaaaaaataaaatcctagaaaattagaaaaagcaacaatagttacttgtgg

SEQ ID NO: 486728 - DNA, 64 bp, Artificial Sequence
  ENSG00000162521_34 (sequence is synthesized)
atcctagaaaattagaaaaagcaacaatagttacttgcgtggatcacaaggtcaggagttcaag

SEQ ID NO: 486729 - DNA, 120 bp, Artificial Sequence
  ENSG00000162521_35 (sequence is synthesized)
actccagcctgggtggcagagcgagactgtctcaaaaaaaaaagaaagttgtgaatttgatgtaagcttaggaaatgaataaaatttataggcatctgtataatgtacaacttgacacgg

SEQ ID NO: 486730 - DNA, 120 bp, Artificial Sequence
  ENSG00000162521_36 (sequence is synthesized)
acggactttcttttatccttagtttctttcacggactctagaacttttatcagaatatactggtaaaacattgggggagggatcctgagtaggtgattggtcagaaagatgccttcagtt

SEQ ID NO: 486731 - DNA, 88 bp, Artificial Sequence
  ENSG00000162521_37 (sequence is synthesized)
tgtttaggccaactgggaggccgaggcaagtggatcacaaggtcaggagatgagaccatcttagccaacatggtgaaaccccgtctct

SEQ ID NO: 486732 - DNA, 83 bp, Artificial Sequence
  ENSG00000162521_38 (sequence is synthesized)
taagtctgtgtaacatgaacatctctgcttccacccaaaaccacagcctttgaatattatataaggaacttaatggatagata

SEQ ID NO: 486733 - DNA, 120 bp, Artificial Sequence
  ENSG00000162521_39 (sequence is synthesized)
cagcctttgaatattatataaggaacttaatggatagatatgtttattatttttgatagcacaactgctttctctgctattataaggaaaactgagaatagcaggtgggtagggtaggat

SEQ ID NO: 486734 - DNA, 120 bp, Artificial Sequence
  ENSG00000162521_40 (sequence is synthesized)
gaggaaacaagatgcccaaagcctagatgccacagaattcatggtgataatcagggcatattttgagtcctactagaaacaaacattccaaatgaactctgaatgcctgactcaggcgtt

SEQ ID NO: 486735 - DNA, 120 bp, Artificial Sequence
  ENSG00000162521_41 (sequence is synthesized)
ttggaggtttgggttatccccttgtcattaggcacacaagggttttttgttgtttttgttttttgggtttttgttttgttttgaggcagtctcactctgttgtacaagctggagtgctgt

SEQ ID NO: 486736 - DNA, 60 bp, Artificial Sequence
  ENSG00000162521_42 (sequence is synthesized)
tgaactcctgactctccggcctgtttttaaggcattaattagtattgttaggaaagcagt

SEQ ID NO: 486737 - DNA, 120 bp, Artificial Sequence
  ENSG00000162521_43 (sequence is synthesized)
ctgtttttaaggcattaattagtattgttaggaaagcagtaacaatgcaaacaccactcttctcttcacaaagatcaccttgagactgtgtctccattccacctgcctgagaagtgggag

SEQ ID NO: 486738 - DNA, 120 bp, Artificial Sequence
  ENSG00000162521_44 (sequence is synthesized)
catcagcctgttccaggctcttgggtagtagcatagccctttaaaaagagagagccattttccatgtgtttttggataagcacaatttgaaaatcatttcccaaatcctctttttgtttt

SEQ ID NO: 486739 - DNA, 120 bp, Artificial Sequence
  ENSG00000162521_45 (sequence is synthesized)
tgattctaaggtaaaattttccctaagccctcccaccatcccctcagccagtattagatgagatttgtatagcagcagaaactgacttataagtagagagctcttcagcaagactgagcc

SEQ ID NO: 486740 - DNA, 120 bp, Artificial Sequence
  ENSG00000162521_46 (sequence is synthesized)
ttagctgttccatctctttgttcttctgttgctggagttgcaccccatttcttaactgcctctggcgttcttccatttcctccagctgttcctgcatgagatggccaagaacatttctaa

SEQ ID NO: 486741 - DNA, 120 bp, Artificial Sequence
  ENSG00000162521_47 (sequence is synthesized)
tgagccaaacaataaaaactcacattgtccactcttacttataaaacacttttttgttcattgtttaatcttgatagcagtattgaggctggtatttatatgataggttatgaaacaggt

SEQ ID NO: 486742 - DNA, 120 bp, Artificial Sequence
  ENSG00000162521_48 (sequence is synthesized)
tcaaagaagttgtgtcttggaaaaaaagtgacaatgcttttgaaaatgatgacgaaaaaggcatcttgtctgttaaccacagcttgctttaatagaatcctgggagggtgattgggactt

SEQ ID NO: 486743 - DNA, 120 bp, Artificial Sequence
  ENSG00000162521_49 (sequence is synthesized)
tttagtattacaaccttagtgtcattgaggaggattttggtctagttagtgggctgagtttcatatacctctccctccatgtgcaggtttgttaagataattggtagtttttaataatat

SEQ ID NO: 486744 - DNA, 120 bp, Artificial Sequence
  ENSG00000162521_50 (sequence is synthesized)
aaaatacttaagttgaaatacaaaagtgtggcaacaattattaaatattggctagaattctaggagagttacacaactagtggaagtccatgtttagaaaataaatggcttgtttaagga

SEQ ID NO: 486745 - DNA, 120 bp, Artificial Sequence
  ENSG00000162521_51 (sequence is synthesized)
aaagtttttgtgtccaaagctccttaaagtcagagagatttctacctggtacttaacatcatatggaaattgatgctttagtgagggtgttggctatcctattgctaatttcctgcatcc

SEQ ID NO: 486746 - DNA, 80 bp, Artificial Sequence
  ENSG00000162521_52 (sequence is synthesized)
gtgagggtgttggctatcctattgctaatttcctgcatccttttttcttctttatttttgtttcctgggctcaagcagtc

SEQ ID NO: 486747 - DNA, 120 bp, Artificial Sequence
  ENSG00000162521_53 (sequence is synthesized)
gagccactgtgcccagcttatccttttttcattacacaaaaagactgaatttggttagttctaagttggaagataaagatggtatgcacaggaggcccttgggagccctcagataacttt

SEQ ID NO: 486748 - DNA, 120 bp, Artificial Sequence
  ENSG00000162521_54 (sequence is synthesized)
ctcattcttccagaatcaggctgggatgcattctgtaaattttccctgcctaggatgtatacctgaggaataaggtaaggaagatgtcagcaagtcagtctctggtttacctgctagctg

SEQ ID NO: 486749 - DNA, 120 bp, Artificial Sequence
  ENSG00000162521_55 (sequence is synthesized)
gcatggatccttaaggaagcaggagggagttgggaagagaggaaggggtgaagttggtatcttttaaagcgagagtgattttacctcagattttgaagaatactaaggaatccagttgtt

SEQ ID NO: 486750 - DNA, 120 bp, Artificial Sequence
  ENSG00000162521_56 (sequence is synthesized)
ggggtacatgctattattagaaggatctagataatttgtcctctgagtcatacttgacattgtacctgtggcacatcaatccgcactgtttgatactctggctgaatctcagctttcacc

SEQ ID NO: 486751 - DNA, 120 bp, Artificial Sequence
  ENSG00000162521_57 (sequence is synthesized)
aacattgtcaaaggaccttttttagtgcccagccatgcctaagagtgtgtcatctgaagagggaagcatctgcatactgctgtcctgattgctcagtcctcactacctaccagacccgtt

SEQ ID NO: 486752 - DNA, 120 bp, Artificial Sequence
  ENSG00000162521_58 (sequence is synthesized)
ggtaaggtacaaaagtacatgcttggaaaagcagtctgcaccaccagtgataagctgtgacagagtggaacagcctcaatgaaatgaaggaaggattgctacagtggcattaaggatggt

SEQ ID NO: 486753 - DNA, 120 bp, Artificial Sequence
  ENSG00000162521_59 (sequence is synthesized)
ctcttaatcctgtgttaaccactagattaactttacaatcaactcaaaatccttcaaaggctttccactttctttagtggcattcagaccccctctagtttgacccctacctccaacttg

SEQ ID NO: 486754 - DNA, 120 bp, Artificial Sequence
  ENSG00000162521_60 (sequence is synthesized)
aacctctgttactcttccgtatgaacattttcctctagccctggactactagtaccgaagtcactagtcacataggactcatttgaaatatgactagtctcaattgagatgtaatgtaag

SEQ ID NO: 486755 - DNA, 120 bp, Artificial Sequence
  ENSG00000162521_61 (sequence is synthesized)
tgtaaaatacacagcagatttctaagacagcacacaaaatgtaaaatatgtcaaaaatatttgatactgattacatgttgaaatatatgtgttgggttaaataaaatgcattaaagttaa

SEQ ID NO: 486756 - DNA, 120 bp, Artificial Sequence
  ENSG00000162521_62 (sequence is synthesized)
tatagccagtgtgcagctccctaatgatgatgctcagtttgatgcgtcacactacgacagtgagaaaggaggctgagtgcagtggtgcgatctcactgcagcctccgcctcctgggttca

SEQ ID NO: 486757 - DNA, 120 bp, Artificial Sequence
  ENSG00000162521_63 (sequence is synthesized)
attacagaatttggaggttttggttcagttagtggaaaaattgaaatagaaatcaagatcaaccatgaaggagaagtaaacagggcccgttatatgccccagaacccttgtatcatcgca

SEQ ID NO: 486758 - DNA, 120 bp, Artificial Sequence
  ENSG00000162521_64 (sequence is synthesized)
ctgtgagtttaattgcatgttactctgtgtaatttaacatcttgtgatttgtattgatatgtgtatatttttcttcattttgcctccatgaaaaaataatgcttttttacatagaacaaa

SEQ ID NO: 486759 - DNA, 120 bp, Artificial Sequence
  ENSG00000162521_65 (sequence is synthesized)
agttccctgggaccgatttcggtcgcagctggcgaagccagcggtggggcccccggccagtgtttgtttctcttcctgcctccgatatcggtttctcggcctctgtcccgagcgtgggga

SEQ ID NO: 486760 - DNA, 120 bp, Artificial Sequence
  ENSG00000162521_66 (sequence is synthesized)
caccgcttcctacccacaaggctcggagctcgggcctcctcgtcgggcttgtgagtttcggcgcgcacgagcgtgctccgaaggcctggctggccccttggcctggaacgggtaacggag

SEQ ID NO: 486761 - DNA, 120 bp, Artificial Sequence
  ENSG00000162521_67 (sequence is synthesized)
cccggagaaggcatgtgatcaaaacctcttggtgacattttttctaggccacaaagtaaggcaaaataacaaaatgattttgtaacttacctgacaagagaaaacatattggcgtttttt

SEQ ID NO: 486762 - DNA, 120 bp, Artificial Sequence
  ENSG00000162521_68 (sequence is synthesized)
tctcaatactgaattaaatagctgtagctgatgataatacctgtaataatagtggctgtaccaaataatagtacaaaacttgtcaactttcaaaaagtattatggccaggagcagtggct

SEQ ID NO: 486763 - DNA, 120 bp, Artificial Sequence
  ENSG00000162521_69 (sequence is synthesized)
cacacttggaatccgagcactttgggaggcccaggcaggagacttacttgaggccaggagttggagaccagccctgggaataccctcgtctctactgccccccacacaaaaaaagaaaaa

SEQ ID NO: 486764 - DNA, 120 bp, Artificial Sequence
  ENSG00000162521_70 (sequence is synthesized)
acgacagtgagaaaggaggtaggaatcttaaaggtgaaagaagtaaagatgtgtgggtcatatctgttatgtgcactttgataaagtaaactctgactttagaaacaatatttaaggttg

SEQ ID NO: 486765 - DNA, 120 bp, Artificial Sequence
  ENSG00000162521_71 (sequence is synthesized)
gaacccttgtatcatcgcaacaaagactccttccagtgatgttcttgtttttgactatacaaaacatccttctaaaccagggcatacggcagtagtagaagatgtttcctggcatctact

SEQ ID NO: 486766 - DNA, 120 bp, Artificial Sequence
  ENSG00000162521_72 (sequence is synthesized)
catagaacaaaatactggtgctgtttaagcattatctatttgatcataacggttcctatatcatttataaatgttaagagctttagacatcttgaccaaaattccattatgctcagtagg

SEQ ID NO: 486767 - DNA, 80 bp, Artificial Sequence
  ENSG00000162522_0 (sequence is synthesized)
ctccgcgcccgctcggcctccgccgcccaaacttttctccgggcgcgcgtccccggcggccgcccccggcatgggcaccg

SEQ ID NO: 486768 - DNA, 120 bp, Artificial Sequence
  ENSG00000162522_1 (sequence is synthesized)
cctgcggccgaggagccggggaacccgggcggccccccgcgcaggaagaagtcccgctccggcgcgtccggcctccgccgcgccttcagctggctgcggggcaagcggcgcaagaagaag

SEQ ID NO: 486769 - DNA, 120 bp, Artificial Sequence
  ENSG00000162522_2 (sequence is synthesized)
gctggctgcggggcaagcggcgcaagaagaaggcggcgggggccgagggcgccgaaccggccgccccccgggccaagaaggcggaggacaaggccaagagggccaagggcaaaggccgag

SEQ ID NO: 486770 - DNA, 120 bp, Artificial Sequence
  ENSG00000162522_3 (sequence is synthesized)
gctctgccaaggctgagaatgacaaacatctaagtgtagggcctggccaggggccagggtctgcagtggatgagcaccaggacaacgtcttctttcccagtgggcgacccccccacctgg

SEQ ID NO: 486771 - DNA, 120 bp, Artificial Sequence
  ENSG00000162522_4 (sequence is synthesized)
aagagctgcacactcaggcccaggaggggctccgctccctacaacaccaagagaaacagaaactgaacaagggtggctgggaccatggagacacccagagtatccagtcctcccggacgg

SEQ ID NO: 486772 - DNA, 120 bp, Artificial Sequence
  ENSG00000162522_5 (sequence is synthesized)
ggccggatgaagacaacatctccttctgcagtcagaccacatcctacgtggctgagagctccacagcagaggacgcgctctccatccgctcggagatgatccagcgcaaaggctccacct

SEQ ID NO: 486773 - DNA, 120 bp, Artificial Sequence
  ENSG00000162522_6 (sequence is synthesized)
tccgaccccatgactcatttcccaaatctggaaagtcagggcggcgtcggcgggagcggcggagcactgtgctgggactcccgcagcatgtgcagaaggagcttggcctgaggaatgagc

SEQ ID NO: 486774 - DNA, 120 bp, Artificial Sequence
  ENSG00000162522_7 (sequence is synthesized)
gtgaggcaccaggcacgccccgggctcctggtgcacgggatgccgtacgcatccccacagtggacggccgcccccgaggcacctcagggatgggggcccgggtgtccctgcaggcgctgg

SEQ ID NO: 486775 - DNA, 120 bp, Artificial Sequence
  ENSG00000162522_8 (sequence is synthesized)
aggcggaggcggaggctggcgctgagacagaggccatgctgcagcgccacattgaccgtgtctaccgggatgacacctttgttggccggtccacgggtacccgggccccaccattgaccc

SEQ ID NO: 486776 - DNA, 120 bp, Artificial Sequence
  ENSG00000162522_9 (sequence is synthesized)
ggcccatgtccctagcagtgcctggattgacaggaggggcagggcctgcagagcccctgagcccggccatgtccatctccccccaggccacctacctgtcgaagttgattccacatgctg

SEQ ID NO: 486777 - DNA, 120 bp, Artificial Sequence
  ENSG00000162522_10 (sequence is synthesized)
tgctgccgcctacagtggacgtggtggccctaggccgctgcagcctgcgcacactaagccgctgcagcctgcactcggccagcccagcctcagtccgctcgctggggcgcttctcctccg

SEQ ID NO: 486778 - DNA, 120 bp, Artificial Sequence
  ENSG00000162522_11 (sequence is synthesized)
tctccagcccacagccccgcagccgccacccatcctcctccagtgacacctggagccactctcaatcctccgacaccattgtgtctgacggttccaccctctcctctaagggtggctctg

SEQ ID NO: 486779 - DNA, 120 bp, Artificial Sequence
  ENSG00000162522_12 (sequence is synthesized)
agggccagccggagagctctacggctagcaatagcgtggtaccccctccccagggaggcagtgggaggggctctcccagtgggggcagcactgctgaggcctcagacacactcagcattc

SEQ ID NO: 486780 - DNA, 120 bp, Artificial Sequence
  ENSG00000162522_13 (sequence is synthesized)
ggagcagtgggcagttgtctggccggagtgtgtccctgcgtaagctgaagcggcctccaccccctccccgccggacccactccctccatcagcggggcttagcagtgcctgatgggccat

SEQ ID NO: 486781 - DNA, 120 bp, Artificial Sequence
  ENSG00000162522_14 (sequence is synthesized)
tagggttgccccctaagcctgagcgtaagcagcagccccagctgcctcggccacccaccactggtggctcagaaggggcgggggcagcaccctgtccacccaacccagccaacagctggg

SEQ ID NO: 486782 - DNA, 120 bp, Artificial Sequence
  ENSG00000162522_15 (sequence is synthesized)
tacctggcttgtctccgggtggttcccggcgccccccacggtccccagaacggacactttcgccctccagtggatactcgagccaaagtggtactcccaccctccctcccaagggcctgg

SEQ ID NO: 486783 - DNA, 120 bp, Artificial Sequence
  ENSG00000162522_16 (sequence is synthesized)
caggtccccctgcttccccaggcaaggcccagccccctaaaccagagcgtgtcacgtctcttcgctcccctggggcctccgtctcctcttccctcacgtctttatgttcctcctcctctg

SEQ ID NO: 486784 - DNA, 120 bp, Artificial Sequence
  ENSG00000162522_17 (sequence is synthesized)
acccagccccctcagaccgctctgggccacagatattgacccccctgggtgacaggtttgtcatacctcctcaccccaaggtgcctgcccccttctccccacctccctccaagcccagga

SEQ ID NO: 486785 - DNA, 120 bp, Artificial Sequence
  ENSG00000162522_18 (sequence is synthesized)
gccctaacccagctgcccctgctctagccgcccctgctgtggttcctgggcctgtttctaccactgacgccagtcctcagtcccctcccactccccagacaaccttgactccactgcagg

SEQ ID NO: 486786 - DNA, 120 bp, Artificial Sequence
  ENSG00000162522_19 (sequence is synthesized)
agtctcctgtcatctccaaagaccagtcacccccaccttccccacccccatcttatcatccacccccaccacccactaagaagccagaggtggttgtggaggcaccatctgcctcagaga

SEQ ID NO: 486787 - DNA, 120 bp, Artificial Sequence
  ENSG00000162522_20 (sequence is synthesized)
ctgctgaggagcccctccaagatcccaactggccccctcccccaccccctgcccctgaggagcaggacctgtccatggctgacttccccccaccagaggaggcttttttctctgtggcca

SEQ ID NO: 486788 - DNA, 120 bp, Artificial Sequence
  ENSG00000162522_21 (sequence is synthesized)
gccctgagcctgcaggcccttcaggctccccagagcttgtcagctccccggctgcttcgtcctcctcagctactgctttgcagattcagcccccgggtagcccagaccctcctccagctc

SEQ ID NO: 486789 - DNA, 120 bp, Artificial Sequence
  ENSG00000162522_22 (sequence is synthesized)
ccagggaggacgtaggtgcgcccctggtcacgccctcgctcctgcagatggtgcggctgcgctccgtgggtgctccaggaggggctcccaccccagcactggggccatcggccccccaga

SEQ ID NO: 486790 - DNA, 120 bp, Artificial Sequence
  ENSG00000162522_23 (sequence is synthesized)
aaccactgcgaagggccctgtcagggcgggccagcccagtgcctgccccctcctcagggctccatgctgcggtccgactcaaggcctgcagcctggccgccagtgaaggcctctcaagtg

SEQ ID NO: 486791 - DNA, 120 bp, Artificial Sequence
  ENSG00000162522_24 (sequence is synthesized)
ctcagcccaacggaccgcctgaggcagagccacggcctccccagtcccctgcctcaacggccagtttcatcttctccaagggctctaggaagctgcagctggagcggcccgtgtcccctg

SEQ ID NO: 486792 - DNA, 120 bp, Artificial Sequence
  ENSG00000162522_25 (sequence is synthesized)
agacccaggctgacctccagcggaatctggtggcagaactccggagcatctcagagcagcggccaccccaggccccaaagaagtcacctaaggctcccccacctgtggcccgcaagccgt

SEQ ID NO: 486793 - DNA, 120 bp, Artificial Sequence
  ENSG00000162522_26 (sequence is synthesized)
ctgtgggagtccccccacccgcctcccccagttaccctcgagctgagccccttactgctcctcccaccaatgggctccctcacacccaggacaggactaagagggagctggcggagaatg

SEQ ID NO: 486794 - DNA, 120 bp, Artificial Sequence
  ENSG00000162522_27 (sequence is synthesized)
gaggtgtcctgcagctggtgggcccagaggagaagatgggcctcccgggctcagactcacagaaagagctggcctgaccaccaggcacctcactggcactgctgacccatcccagaaaca

SEQ ID NO: 486795 - DNA, 120 bp, Artificial Sequence
  ENSG00000162522_28 (sequence is synthesized)
caatctcagggacccgagcagctccaaggacgagaggatacagcagacacaacctaatagagagggcgcctgcagccttaacctccacggccttcgatacttatgcaagcctggtgttgc

SEQ ID NO: 486796 - DNA, 120 bp, Artificial Sequence
  ENSG00000162522_29 (sequence is synthesized)
tcctgtcctcagagtcatcctgcgctcatgccttttcccgaatgggttcacctctggcagttgccgcttcagtcttggccttagcctcatcttgaagtgggtagctggcgggagagggtg

SEQ ID NO: 486797 - DNA, 120 bp, Artificial Sequence
  ENSG00000162522_30 (sequence is synthesized)
gctgcgccccctgctggccctgaggctgcagagttgggagcaggacacctcacctgagtttcattttttttcatgtccaaaccatgcacatactatagtccagaatcaaagcacttttga

SEQ ID NO: 486798 - DNA, 120 bp, Artificial Sequence
  ENSG00000162522_31 (sequence is synthesized)
aaagtggctgcatggccatcctccagggcccaggaagttgcattccaagggcctgtttacatggcagcagaatccatccccggcagtcagcccatagcttgggaccagtctgtgccctcc

SEQ ID NO: 486799 - DNA, 120 bp, Artificial Sequence
  ENSG00000162522_32 (sequence is synthesized)
tgcccagtccagtttactcctcttggttcctgaaggtggccaagtcattgtgttcccacaggcttctctaggctgggggcaggtgtggggctgtggaattccaaagcacaaaaggtgcag

SEQ ID NO: 486800 - DNA, 120 bp, Artificial Sequence
  ENSG00000162522_33 (sequence is synthesized)
aggggattggccttcctgtgcctcaactcaccaaccaccctcctgccttccagttctgccaggtgctccatgctggggacaagtaggagactgccagggcccaaagaaatgggtgagcag

SEQ ID NO: 486801 - DNA, 120 bp, Artificial Sequence
  ENSG00000162522_34 (sequence is synthesized)
tagagtcatctcggggcacttggcagtgtcaagcacctgccccttgcctccttgaccacactggggtgggtgggcccccagcacttcagaggcaggagcctttgggctgagcaagcactg

SEQ ID NO: 486802 - DNA, 120 bp, Artificial Sequence
  ENSG00000162522_35 (sequence is synthesized)
aggaggtggatggaagggagcatctggagggggggagcttccttgagcagtgggcccaggcctggccctccacacttcattctctgacctttctctctcctcatttcggtgcatgtcctt

SEQ ID NO: 486803 - DNA, 120 bp, Artificial Sequence
  ENSG00000162522_36 (sequence is synthesized)
tctgcagctgcctttcagcacaggtggttccactgggggcagctaacgctgagtgacaaggatgggaagccacaggtgcattttactcaagtcttctctagtcaatgaggggcacccagt

SEQ ID NO: 486804 - DNA, 120 bp, Artificial Sequence
  ENSG00000162522_37 (sequence is synthesized)
gcttctagggcaggctgggtggtggtcccctaggtatcagcctctcttactgtactctccgggaatgttaacctttctattttcagcctgtgccacctgtctaggcaagctggcttcccc

SEQ ID NO: 486805 - DNA, 120 bp, Artificial Sequence
  ENSG00000162522_38 (sequence is synthesized)
attggcccctgtgggtccacagcagcgtggctgccccccagggccaccgcttctttcttgatcctctttccttaacagtgacttgggcttgagtctggcaaggaaccttgcttttagctt

SEQ ID NO: 486806 - DNA, 120 bp, Artificial Sequence
  ENSG00000162522_39 (sequence is synthesized)
caccaccaaggagagaggttgacatgacctccccgccccctcaccaaggctgggaacagaggggatgtggtgagagccaggttcctctggccctctccagggtgttttccactagtcact

SEQ ID NO: 486807 - DNA, 120 bp, Artificial Sequence
  ENSG00000162522_40 (sequence is synthesized)
actgtcttctccttgtagctaatcaatcaatattcttcccttgcctgtgggcagtggagagtgctgctgggtgtacgctgcacctgcccactgagttggggaaagaggataatcagtgag

SEQ ID NO: 486808 - DNA, 120 bp, Artificial Sequence
  ENSG00000162522_41 (sequence is synthesized)
cactgttctgctcagagctcctgatctaccccaccccctaggatccaggactgggtcaaagctgcatgaaaccaggccctggcagcaacctgggaatggctggaggtgggagagaacctg

SEQ ID NO: 486809 - DNA, 120 bp, Artificial Sequence
  ENSG00000162522_42 (sequence is synthesized)
acttctctttccctctccctcctccaacattactggaactctatcctgttaggatcttctgagcttgtttccctgctgggtgggacagaggacaaaggagaagggagggtctagaagagg

SEQ ID NO: 486810 - DNA, 120 bp, Artificial Sequence
  ENSG00000162522_43 (sequence is synthesized)
cagcccttctttgtcctctggggtaaatgagcttgacctagagtaaatggagagaccaaaagcctctgatttttaatttccataaaatgttagaagtatatatatacatatatatatttc

SEQ ID NO: 486811 - DNA, 120 bp, Artificial Sequence
  ENSG00000162522_44 (sequence is synthesized)
tttaaatttttgagtctttgatatgtctaaaaatccattccctctgccctgaagcctgagtgagacacatgaagaaaactgtgtttcatttaaagatgttaattaaatgattgaaacttg

SEQ ID NO: 486812 - DNA, 120 bp, Artificial Sequence
  ENSG00000162522_45 (sequence is synthesized)
gtctggagccggtgctctgcggcggggcgggagggctcgcatccccatagtgctgggttacagtgaaggtacgccccgcgctctgctctggagaggcagggtgggatagggaacgtctcg

SEQ ID NO: 486813 - DNA, 120 bp, Artificial Sequence
  ENSG00000162522_46 (sequence is synthesized)
ggcccggcggccgggctggctgggccgcgcttgggttcccgcgccggctcccgcacccgcaatggggaactcacaccacaagaggaaggcccccagcggtccccgggtccgcagcttctg

SEQ ID NO: 486814 - DNA, 120 bp, Artificial Sequence
  ENSG00000162522_47 (sequence is synthesized)
tctgtagcttcttttcctccttatccagtgtttcaccaggctctctgattcaatgaattcgggaaacacagtaccctgtgtcctcttgcacattcgtgatacacactaactataaagcag

SEQ ID NO: 486815 - DNA, 120 bp, Artificial Sequence
  ENSG00000162526_0 (sequence is synthesized)
ccacccgccgctgtgtccagacagagaatgttctaacgctgggggcggctgcggatgaagtccttggggagaaaaggagcaggccaagggcgatggtggagtagagctgcctctcagagg

SEQ ID NO: 486816 - DNA, 120 bp, Artificial Sequence
  ENSG00000162526_1 (sequence is synthesized)
cagcatgagctgagagggtgataggaaggcggcgctagacagcatggaggactttctgctctccaatgggtaccagctgggcaagaccattggggaagggacctactcaaaagtcaaaga

SEQ ID NO: 486817 - DNA, 120 bp, Artificial Sequence
  ENSG00000162526_2 (sequence is synthesized)
agcattttccaaaaaacaccaaagaaaagtggcaattaaagttatagacaagatgggagggccagaagagtttatccagagattcctccctcgggagctccaaatcgtccgtaccctgga

SEQ ID NO: 486818 - DNA, 120 bp, Artificial Sequence
  ENSG00000162526_3 (sequence is synthesized)
ccacaagaacatcatccaggtgtatgagatgctggagtctgccgacgggaaaatctgcctggtgatggagctcgctgagggaggggatgtctttgactgcgtgctgaatggggggccact

SEQ ID NO: 486819 - DNA, 120 bp, Artificial Sequence
  ENSG00000162526_4 (sequence is synthesized)
tggtgtggcccaccgggacctcaaatgtgagaacgccttgttgcagggcttcaacctgaagctgactgactttggctttgccaaggtgttgcccaagtcacaccgggagctgagccagac

SEQ ID NO: 486820 - DNA, 120 bp, Artificial Sequence
  ENSG00000162526_5 (sequence is synthesized)
cttctgcggcagtacagcctatgctgcccccgaggtgctgcagggcattccccacgatagcaaaaaaggtgatgtctggagcatgggtgtggtcctgtatgtcatgctctgtgccagcct

SEQ ID NO: 486821 - DNA, 120 bp, Artificial Sequence
  ENSG00000162526_6 (sequence is synthesized)
accttttgacgacacagacatccccaagatgctgtggcagcagcagaagggggtgtccttccccactcatctgagcatctcggccgattgccaggacctgctcaagaggctcctggaacc

SEQ ID NO: 486822 - DNA, 120 bp, Artificial Sequence
  ENSG00000162526_7 (sequence is synthesized)
cgatatgatcctccggccttcaattgaagaagttagttggcatccatggctagcaagcacttgataaaagcaatggcaagtgctctccaataaagtagggggagaaagcaaacccaaaaa

SEQ ID NO: 486823 - DNA, 120 bp, Artificial Sequence
  ENSG00000162526_8 (sequence is synthesized)
gtagccaaggctagtcttgaattcgtgagctcaagtgaatcaccggccttggcctctcaagtctaggattacagaagaggaaactgaggttcacaatcgggcagtgaaaagccaaaagta

SEQ ID NO: 486824 - DNA, 120 bp, Artificial Sequence
  ENSG00000162526_9 (sequence is synthesized)
aaacctaggctttctacaactctgcctgctcctacaaaaggtgagacaacccttctgtgtgtccttgtccagctcagcatggggttcagggctcagagcccaggctgggccctgctcctc

SEQ ID NO: 486825 - DNA, 120 bp, Artificial Sequence
  ENSG00000162526_10 (sequence is synthesized)
gttctgagcccccagagcccagtacaggccctgacttgccccccaagttctgcagccatatttgggaatttaatgtttttcctccttggggactctccttcccttaatcccttccttttt

SEQ ID NO: 486826 - DNA, 120 bp, Artificial Sequence
  ENSG00000162526_11 (sequence is synthesized)
tccctgtcttcaaccatttttccttatcttcagcctcaccctccctgatggcttcttccataggcagacaaacaggctctagtctttcatatctttgaaaaaaagaaagccctccctcaa

SEQ ID NO: 486827 - DNA, 120 bp, Artificial Sequence
  ENSG00000162526_12 (sequence is synthesized)
ctccacatccttcgccagctcccctctgcagccagcattcttgaaggagttgtatacacacgttgtttctacttcctcactcagcccctgcaatctggcttcctcccccaccattccaca

SEQ ID NO: 486828 - DNA, 120 bp, Artificial Sequence
  ENSG00000162526_13 (sequence is synthesized)
agaagaggaaactgaggttcacaatcgggcagtgaaaagccaaaagtaaaacctaggctttctacaactctgcctgctcctacaaaagagtttatccagagattcctccctcgggagctc

SEQ ID NO: 486829 - DNA, 120 bp, Artificial Sequence
  ENSG00000162542_0 (sequence is synthesized)
cgggcgggaggagccgctcgccggttttgccgcctccgcctttgccttcgcagccgcctccagtgttgtacattataaaccggggctgctgatgaggagtggggaactggctctctggaa

SEQ ID NO: 486830 - DNA, 120 bp, Artificial Sequence
  ENSG00000162542_1 (sequence is synthesized)
cgtgtgacagcaggcagaagggggcaatttgcatatttctccaaagaaccatccagaacctgagcagcctgtcttcagacagagagaggcccacggctgtttcttgaaatctggcgctgg

SEQ ID NO: 486831 - DNA, 120 bp, Artificial Sequence
  ENSG00000162542_2 (sequence is synthesized)
gaatggccatgtggaacaggccatgccagaggctgcctcagcagcctctggtagctgagcccactgcagagggggagccacacctgcccacgggccgggagctgactgaggccaaccgct

SEQ ID NO: 486832 - DNA, 120 bp, Artificial Sequence
  ENSG00000162542_3 (sequence is synthesized)
tcgcctatgctgccctctgtggcatctccctgtcccagttatttcctgaacccgaacacagctccttctgcacagagttcatggcaggcctggtgcagtggctggagttgtctgaagctg

SEQ ID NO: 486833 - DNA, 120 bp, Artificial Sequence
  ENSG00000162542_4 (sequence is synthesized)
tcttgccaaccatgactgcttttgcgagcggcctgggaggtgaaggagcagatgtgtttgttcaaattttactgaaggaccccatcttgaaggacgacccgacggtgatcactcaggacc

SEQ ID NO: 486834 - DNA, 120 bp, Artificial Sequence
  ENSG00000162542_5 (sequence is synthesized)
ttctgagcttctcactcaaggatgggcactatgacgcccgggccagagtcctcgtttgccacatgacctccctgctccaagtgcccttggaggagctggatgtccttgaagagatgttcc

SEQ ID NO: 486835 - DNA, 120 bp, Artificial Sequence
  ENSG00000162542_6 (sequence is synthesized)
tggagagcctgaaggaaatcaaagaagaggaatctgaaatggccgaggcatcccgaaagaagaaagaaaaccggaggaaatggaagcgttatctcctgataggcctggcgactgtcggag

SEQ ID NO: 486836 - DNA, 120 bp, Artificial Sequence
  ENSG00000162542_7 (sequence is synthesized)
gcggaacggtgatcggtgtgactggaggtctagctgcaccccttgttgccgctggagcagcgacgattattggcagcgccggggcagcggctctgggctcagcagccggcatagccatca

SEQ ID NO: 486837 - DNA, 120 bp, Artificial Sequence
  ENSG00000162542_8 (sequence is synthesized)
tgacctcgctgtttggtgcagctggagctggcctgacaggatacaagatgaagaagcgagtgggagccattgaagagttcacgtttctgcctctgacggagggcaggcagctgcacatca

SEQ ID NO: 486838 - DNA, 120 bp, Artificial Sequence
  ENSG00000162542_9 (sequence is synthesized)
ccatcgccgtcacggggtggctcgcttctggcaaataccgcaccttcagtgccccgtgggctgccctggcccacagccgtgagcagtactgcctggcctgggaagccaagtacctgatgg

SEQ ID NO: 486839 - DNA, 120 bp, Artificial Sequence
  ENSG00000162542_10 (sequence is synthesized)
agctcggcaatgccctggagaccatcctcagtggtctcgccaacatggtggcccaggaggccctaaagtacacagtgttgtctggcattgtggctgccctgacctggccagcctcactcc

SEQ ID NO: 486840 - DNA, 120 bp, Artificial Sequence
  ENSG00000162542_11 (sequence is synthesized)
tcagtgtcgccaatgtcatcgacaacccctggggggtgtgtctccatcgatcagcagaggttggcaagcacctggcccacatcctgctctcccggcagcaggggcgacgacctgtcacct

SEQ ID NO: 486841 - DNA, 120 bp, Artificial Sequence
  ENSG00000162542_12 (sequence is synthesized)
cctgctgggtgcgcctgtggagggagaagccaagcattgggagcctttccggaaggtggtgtccgggaggatcatcaacggctactgcaggggagactggctgctgagtttcgtgtaccg

SEQ ID NO: 486842 - DNA, 120 bp, Artificial Sequence
  ENSG00000162542_13 (sequence is synthesized)
cacatcctcggtgcagctccgtgtcgccggcctacagcccgtgctgctgcaggacaggagggtggagaacgtggacctgacctctgtggtcagcggccacctggactatgccaagcagat

SEQ ID NO: 486843 - DNA, 120 bp, Artificial Sequence
  ENSG00000162542_14 (sequence is synthesized)
ggatgccatcctgaaggccgtgggcatccgcaccaagccaggctgggacgagaaggggctcttgctggccccaggctgcctgccctccgaggagcctcgccaggcagcagctgccgcctc

SEQ ID NO: 486844 - DNA, 120 bp, Artificial Sequence
  ENSG00000162542_15 (sequence is synthesized)
atcaggcgagaccccccaccaggttgggcaaacccagggtcccatatccggagacacctccaaattggccatgtccacagaccccagccaagcccaggtgccagtagggctggaccagtc

SEQ ID NO: 486845 - DNA, 120 bp, Artificial Sequence
  ENSG00000162542_16 (sequence is synthesized)
tgaaggggcctcccttcctgctgctgccagccctgaaaggccccccatctgcagccatggcatggaccccaacccactgggctgccccgattgtgcctgcaagacccagggccccagcac

SEQ ID NO: 486846 - DNA, 120 bp, Artificial Sequence
  ENSG00000162542_17 (sequence is synthesized)
ggggctggactgaccacagcaggggacctgagccgtcttccccagtctccatatgcagctctctcttataccctcgggttcctcccaggagctctggaggtacaggatttccacaggcct

SEQ ID NO: 486847 - DNA, 120 bp, Artificial Sequence
  ENSG00000162542_18 (sequence is synthesized)
ctttcctaaatggaaggaattggaactgaaagggaaaggaaatggaaggaaggggaatttggaggagagaacacgcccacccttgggaagctgcctgtccccagaggagccccaccaggg

SEQ ID NO: 486848 - DNA, 120 bp, Artificial Sequence
  ENSG00000162542_19 (sequence is synthesized)
agcagctgccccctcatcagagacctgcagagtcaaccaagcacaggttagagtcccaggaccggaaaccaactgtgggctttctgtacttctcatagctttggagtctggctgtccatc

SEQ ID NO: 486849 - DNA, 120 bp, Artificial Sequence
  ENSG00000162542_20 (sequence is synthesized)
aggaggtcccgagggctctctggggcctgaggctcccacaccagctctcccctggcctcaataaaaccaggtgcatgcctgttcttccatccacactccagggctgcccaccagctgaca

SEQ ID NO: 486850 - DNA, 120 bp, Artificial Sequence
  ENSG00000162542_21 (sequence is synthesized)
ggcaccatcaactggcagcaacagagcaggcgcaggtacaaagaaggcagctcactcctgctcttaggagatccaatcagatctgccctgtacagccatgtaggctgtgcgctgcataac

SEQ ID NO: 486851 - DNA, 120 bp, Artificial Sequence
  ENSG00000162542_22 (sequence is synthesized)
tccagggacatgagtcacacagacacaatgtgagtgtgctcccccgtcatgcaacatctggacaccactaacagagcatggtgaatacatgctgaattgcattcagtatggctgtgaact

SEQ ID NO: 486852 - DNA, 120 bp, Artificial Sequence
  ENSG00000162542_23 (sequence is synthesized)
aggcctggggacaagaatgaattttacatggaaagaatttcctgtagcaggaacagaggggataacaacagcaataaataataataagaagaagctaccacttcttgagcatgtaccaca

SEQ ID NO: 486853 - DNA, 120 bp, Artificial Sequence
  ENSG00000162542_24 (sequence is synthesized)
caaacagagaattccaggagggcttggggagcctctggagaaaaaccaggctcctcatgttacaaggaggccatgtcttctggtgcccatgcctgaagttacaggagggaagaattactg

SEQ ID NO: 486854 - DNA, 120 bp, Artificial Sequence
  ENSG00000162542_25 (sequence is synthesized)
caacagagtgagactccacctcaaaaaataaataattaataaaataaaatagataaaatggtgtaatgatcctttgaaggaatagattagacatataagaggcttgattcaggttctgga

SEQ ID NO: 486855 - DNA, 120 bp, Artificial Sequence
  ENSG00000162542_26 (sequence is synthesized)
actcagtaggtagaagcctccatgcctatccatgcatgtttgcgtgtttgcatgtgtgtacatgcacatttgcacatgattgtccacgttcacgtgtgtgcatgtgtatgtgtgtgacat

SEQ ID NO: 486856 - DNA, 120 bp, Artificial Sequence
  ENSG00000162542_27 (sequence is synthesized)
gtgctaagtctcagccctgtggccacctcaagctacggaggagtcagggaaacttcgtctttggctgggtggccgtgtgcccagtcaaactcaggagtaaaggacaaaggggagaatgat

SEQ ID NO: 486857 - DNA, 120 bp, Artificial Sequence
  ENSG00000162542_28 (sequence is synthesized)
attgggcagtggccagcagggttggcacaaagctcctgcaggattcgaatactgtttaacagaggattttctactgtggggcgacgacctgtcaccttgattggcttcagcctgggagcc

SEQ ID NO: 486858 - DNA, 120 bp, Artificial Sequence
  ENSG00000162542_29 (sequence is synthesized)
atcgcttgtctagttgcacgttcccgtcgtatatcgtcagtgacttgaatgttttcttcggccttgaactctgcccaaagtcagtaatcttcagccttccacttggaactgacttaagag

SEQ ID NO: 486859 - DNA, 120 bp, Artificial Sequence
  ENSG00000162542_30 (sequence is synthesized)
ttatcaattaagggtcaaggcagttcagggtcaaagtatatctccagcctgtgttgaggaggaaattattacaataataatgaaaagagtgataatagcaataaacatattgaataatta

SEQ ID NO: 486860 - DNA, 120 bp, Artificial Sequence
  ENSG00000162543_0 (sequence is synthesized)
gttgtttaccagcaggacagagcccgggcgcaggcggcggatggagcggaacggctaggggtcttgagaagcaatggccacagaagcccctgtgaatatagcaccacctgagtgtagcac

SEQ ID NO: 486861 - DNA, 120 bp, Artificial Sequence
  ENSG00000162543_1 (sequence is synthesized)
tgttgtcagcacagcagttgacagcctcatttggcagccaaactcactaaatatgcacatgataaggcccaagtccgccaagggacggacaagaccgagtctgcagaaatcccagggcgt

SEQ ID NO: 486862 - DNA, 120 bp, Artificial Sequence
  ENSG00000162543_2 (sequence is synthesized)
ggaggtgtgcgctcatcatataccatctccgcctccagccattccctatgagttgccaagcagccaaaaaccaggagcctgtgcacccaaatctccaaaccagggagcttctgatgagat

SEQ ID NO: 486863 - DNA, 120 bp, Artificial Sequence
  ENSG00000162543_3 (sequence is synthesized)
ccctgagctgcagcagcaagtacccactggggcttcctcttctctcaataagtatccagtccttccttccatcaacagaaagaacctggaggaggaggctgtggaaaccgttgccaaaaa

SEQ ID NO: 486864 - DNA, 120 bp, Artificial Sequence
  ENSG00000162543_4 (sequence is synthesized)
ggccagctcactgcaactgagcagtatccgggctctttaccaagacgagacgggcaccatgaagacaagtgaagaagattccagagctcgagcttgtgccgtggagaggaaattcatcgt

SEQ ID NO: 486865 - DNA, 120 bp, Artificial Sequence
  ENSG00000162543_5 (sequence is synthesized)
ccgaaccaagaaacagggctcttccagggctggaaatctggaggaaccatcggaccaagaaccaaggttgctgcttgctgttagatcaccaacaggccaaaggtttgtacgccatttccg

SEQ ID NO: 486866 - DNA, 120 bp, Artificial Sequence
  ENSG00000162543_6 (sequence is synthesized)
gccaacagatgatttgcaaaccattgttgctgtggccgaacagaaaaacaaaacctcctaccgacactgcagcattgaaacaatggaggtgcccaggaggcgattttctgacctcaccaa

SEQ ID NO: 486867 - DNA, 120 bp, Artificial Sequence
  ENSG00000162543_7 (sequence is synthesized)
atctctgcaagagtgcagaatcccccacaagtctgtgctgggcatctcactggaagatggggaagggtggccctgagtccacagccacccagctgaggtcctgggtctctgagcaaagga

SEQ ID NO: 486868 - DNA, 120 bp, Artificial Sequence
  ENSG00000162543_8 (sequence is synthesized)
gcatgcttgggcgttgtggcctcttaggcagcctgtttcaagtgccatgtggacctggtgcagctgggaagcttgggactctcgtctgcactgcgtgtcctctgaagcagtgaagtctgt

SEQ ID NO: 486869 - DNA, 120 bp, Artificial Sequence
  ENSG00000162543_9 (sequence is synthesized)
gcctatgccgagcgcgctaagaagtctcccttccagctgttccattctctccaccaccagcgtaactggcaagttaccaaggttgttcctgaaacagcagtgatcatgacttctcctttc

SEQ ID NO: 486870 - DNA, 120 bp, Artificial Sequence
  ENSG00000162543_10 (sequence is synthesized)
cagagttttgggtccttctgaattaatggtccttttcgaacaccggcttgcctttacagtgaactgtgattctctcgaagccaatgctttcctgtctgtatttgatgcaggattaaacac

SEQ ID NO: 486871 - DNA, 120 bp, Artificial Sequence
  ENSG00000162543_11 (sequence is synthesized)
ttcccagagaggattctagtctggtaaataaccacagtgtaggaactatctaactggcatttgtgtttcttgcgagtattttgaagaaacaggccgttgaccccatctttggaagtagcc

SEQ ID NO: 486872 - DNA, 120 bp, Artificial Sequence
  ENSG00000162543_12 (sequence is synthesized)
ctttaccatgcatggtcagtttcttagggatttactatttgtgtgaggtggcatctaagggaagaatgggttttcttccccaaaacatcagcatttctaaaatagtcctaaagcttgaaa

SEQ ID NO: 486873 - DNA, 120 bp, Artificial Sequence
  ENSG00000162543_13 (sequence is synthesized)
gtaagttgcttccatgagcatggattacccagtagctactttttaatagagactgactaggtttacaacttctgggagctactctgtgggctgaattcttccaaaaccgagaaaagccag

SEQ ID NO: 486874 - DNA, 120 bp, Artificial Sequence
  ENSG00000162543_14 (sequence is synthesized)
tgcagtctgatttcttttgcttttgtcagtaatggaatcttttgtttttaaaatgtacaaacctataagtttaaacaggtttgtactgacaacctccttggcttatttgggggtggagca

SEQ ID NO: 486875 - DNA, 120 bp, Artificial Sequence
  ENSG00000162543_15 (sequence is synthesized)
attgttttattccccagtttcagtgcgttgcccacttcaaacatggtgtgtcctttggagctgtgacagaggtgcctgttctgacttagaacctctggaggaggaggggggtgccttggt

SEQ ID NO: 486876 - DNA, 120 bp, Artificial Sequence
  ENSG00000162543_16 (sequence is synthesized)
ctcgtgttactttgctgtgcctgtgctgagagaccatgtgcccgagcatctggttgaccggcatgaagtacatcagcctgtcttagcctgagctgctttgaagaccatggggtcttgtgt

SEQ ID NO: 486877 - DNA, 120 bp, Artificial Sequence
  ENSG00000162543_17 (sequence is synthesized)
ttccaacttcgaagtgctgatgtggacagtttgccaatgttctcttctattgcaagttcagccagactccatgactcatctgatcccttttatggccaaatcatccttcagagtagggaa

SEQ ID NO: 486878 - DNA, 120 bp, Artificial Sequence
  ENSG00000162543_18 (sequence is synthesized)
cactcagacattctgtgcatgttgttcccccaaagcatggtcatcacaaagtcctgagttctggtgtgtgctcccgcctcctgggtatacagagagaaggcaggaatcaggagttccaga

SEQ ID NO: 486879 - DNA, 120 bp, Artificial Sequence
  ENSG00000162543_19 (sequence is synthesized)
agcatatacatgtggctaccccagcaacaagcgcatcctgtgctcagataagctgcatggttgggagtgttttttctcgcacgttgaggcttagtggagatgggcaccactgccatttgc

SEQ ID NO: 486880 - DNA, 120 bp, Artificial Sequence
  ENSG00000162543_20 (sequence is synthesized)
tcagaagaaggctggtctggtcctaactgcatcccacactgcccagatcattctagaataggttatttctgaatgttttatagaatttcttaataccatcctggtttggtcagccattcc

SEQ ID NO: 486881 - DNA, 120 bp, Artificial Sequence
  ENSG00000162543_21 (sequence is synthesized)
tttgattggaaaggtcagctggggccagtggtgcctcaggcaggcccacacaactggccacctcttcccgttaatgaccacagcagacagaatttgagcccagcacctaaaagtacagga

SEQ ID NO: 486882 - DNA, 120 bp, Artificial Sequence
  ENSG00000162543_22 (sequence is synthesized)
atttcacttcccaccaggacttgagcacataactctatgtctgatctaggaggctgggggaagagcctcccataaaatcacacctactctgtggtaagaataaaatcccacccacctggg

SEQ ID NO: 486883 - DNA, 120 bp, Artificial Sequence
  ENSG00000162543_23 (sequence is synthesized)
gtgaaatggagcaagcttgaaggagttagaatcttctgtgcttagggtttgctgctgctggtgagcttagaattttggggttgggaaaaagtggaaggcataagcatagaaatattttag

SEQ ID NO: 486884 - DNA, 120 bp, Artificial Sequence
  ENSG00000162543_24 (sequence is synthesized)
gatattttaggatatgtgaataaagctagactcaaaccatcataataaacattttttttttggacaaaagatgatacgataaaaaccaacttgtgtgaaactgagtcagtggagaagtgc

SEQ ID NO: 486885 - DNA, 120 bp, Artificial Sequence
  ENSG00000162543_25 (sequence is synthesized)
atctcgtattttaacctaaggcttcagctcccacacacgactggacagaggggtgtgttagcctgatcttcagttttctcattgggaaagcacttgttccactgttagaaccaagtcctc

SEQ ID NO: 486886 - DNA, 120 bp, Artificial Sequence
  ENSG00000162543_26 (sequence is synthesized)
ctccccggacacttctgatgcccactgcagaagcgacggggctcctgctctcagcttctgtcacagcacttagcttgtctggataagagtcacctgaatttttcctaaacatcattccaa

SEQ ID NO: 486887 - DNA, 120 bp, Artificial Sequence
  ENSG00000162543_27 (sequence is synthesized)
gtactctgattttggggattggcaagaacaaactaaatcagaattcagagttcctgatggctccacatgttgcattgcagctgaggccccctgtcctaaatgggctcaaccggcctagca

SEQ ID NO: 486888 - DNA, 120 bp, Artificial Sequence
  ENSG00000162543_28 (sequence is synthesized)
cactcctcttggtggctttgggtgggtcagccttgcccagtttggggtcatagacctcagttattcatttaaccgatggccattgagggcttacccagtgccacactttgagacaagcat

SEQ ID NO: 486889 - DNA, 120 bp, Artificial Sequence
  ENSG00000162543_29 (sequence is synthesized)
gggtgtcctgaaaagaaagtgttggcaagaaaacatgaacccaccattggactctcaactcaaaccttactgaagtcagtggctatagctttatctgcaaaggaccccaaagtgaggatc

SEQ ID NO: 486890 - DNA, 120 bp, Artificial Sequence
  ENSG00000162543_30 (sequence is synthesized)
ccacattgttactgctggctcttcatcccaccctctggagatgctaaggaagctcttgcccaccttttctagtgatggagtaggaactttgcataggacaaaccttcatgataggttact

SEQ ID NO: 486891 - DNA, 120 bp, Artificial Sequence
  ENSG00000162543_31 (sequence is synthesized)
ctagtatattccctcataaagtccaataggtaaattagtcttggcagcagaaggaacagcaggagaagtaagtgattcatcatctagaatccagaaaatttgcaccaacagatggcaggt

SEQ ID NO: 486892 - DNA, 120 bp, Artificial Sequence
  ENSG00000162543_32 (sequence is synthesized)
ggttataacacaacagatcttgccctgagaatatctggggacccagccaacagccttcaaggcagggcactcctgcggaagagatggcttgtgaacatgactgtggacccagagtcaccc

SEQ ID NO: 486893 - DNA, 120 bp, Artificial Sequence
  ENSG00000162543_33 (sequence is synthesized)
cagagctcccatataaaatgcttcacagagaaactaagagcagccttggggcattcattccaattaataaccttaaagactagagccagatccacctgcattacaaaagcaggcattcga

SEQ ID NO: 486894 - DNA, 120 bp, Artificial Sequence
  ENSG00000162543_34 (sequence is synthesized)
ggaactaaactttgcttttgttcatgctcttacctgccgttttaaatgggtttctaatgtcaaataaagccaccctgcctcttgggacaaagatgtttctctttacttagttttaaaaat

SEQ ID NO: 486895 - DNA, 120 bp, Artificial Sequence
  ENSG00000162543_35 (sequence is synthesized)
aaaatcctcataataagttcggataaaagagacttttacatggtaagaggatctacttttctaccttttaaacggaataaagaagacagctatattattttgctttagcattagtttaga

SEQ ID NO: 486896 - DNA, 120 bp, Artificial Sequence
  ENSG00000162543_36 (sequence is synthesized)
agtcattccaagaattaagcaggaacatctgttttctcagtccattaaggcaacaccccacagtaaagttaaaagttcacgagcctattgactctcatccagaaaccagaaccaaccaaa

SEQ ID NO: 486897 - DNA, 120 bp, Artificial Sequence
  ENSG00000162543_37 (sequence is synthesized)
ccccaccatataacagggaaggcctgaggtcgcttcggaggagttagcaatcaaaggagaacagacttttggtgactcagttaccaacacacaacactcataaaactaaaattaggtgtt

SEQ ID NO: 486898 - DNA, 120 bp, Artificial Sequence
  ENSG00000162543_38 (sequence is synthesized)
ttattttttgtctacacgggtggcgtgccactttcctttcctgattagggaagcttctcccagccctttctgacgttcatctgtgtgcctttatgttcaaacagtttaggaagcagcagc

SEQ ID NO: 486899 - DNA, 120 bp, Artificial Sequence
  ENSG00000162543_39 (sequence is synthesized)
cctcctaacagtcgacgcggaagcacaaatctctggaggtatttttggacacacttaaatcctatcccaagagactgaacgactgtggtgacaaatgcccacgggtaaaactgagcaagc

SEQ ID NO: 486900 - DNA, 120 bp, Artificial Sequence
  ENSG00000162543_40 (sequence is synthesized)
ctcattcagactgtcctgctcagaggcgccctctggctgccgtgttgaggggctggggtggaagatggaagacttgagtgctggaggtatgaaggtgaccagagagaggtgatggtggtt

SEQ ID NO: 486901 - DNA, 120 bp, Artificial Sequence
  ENSG00000162543_41 (sequence is synthesized)
cgggccagggtggtagccagagatgtcatgagaggtggccagattctggacatataatccattttcttaaggagaaaaaaaaggatagtttgacaagttgggattcacccaggtggactt

SEQ ID NO: 486902 - DNA, 120 bp, Artificial Sequence
  ENSG00000162543_42 (sequence is synthesized)
agcttgaccaatatcgccaacgtggattgtttctgcaaaaacaaacaagcaaacaaccaccacggcagcaaagcacatggcaggcaggggaaagacactgaccagcaggaacattcccat

SEQ ID NO: 486903 - DNA, 120 bp, Artificial Sequence
  ENSG00000162543_43 (sequence is synthesized)
caaggaaatgcacgagtgtttttggacaaagtgtacagagaaaatcaaagctattcattgttttaattaagagataaaactaaggtcactgtttcacttaatgttgagatataagttaaa

SEQ ID NO: 486904 - DNA, 120 bp, Artificial Sequence
  ENSG00000162543_44 (sequence is synthesized)
agtatcatctacctctaggggtatgatatgactgctgaccaaggttacttaataagaaatccttgttctagttaaatacactgtttatctctatctcctgtccttcatccctccctttct

SEQ ID NO: 486905 - DNA, 120 bp, Artificial Sequence
  ENSG00000162543_45 (sequence is synthesized)
tgccacccttccctccatttattccagtccagcagctgactggggatgcatttcttcttgggaaggcaaacaaagccatcattctggggcttaattaataaagctcctagtttcatagtt

SEQ ID NO: 486906 - DNA, 120 bp, Artificial Sequence
  ENSG00000162545_0 (sequence is synthesized)
atttctcctcgcagctcgctgcctcctctatccctgcctccctctcccccctctgtttttctcccttccttccctctccgaccctcttcctctccctcccgatcctttccctcctcctct

SEQ ID NO: 486907 - DNA, 120 bp, Artificial Sequence
  ENSG00000162545_1 (sequence is synthesized)
catctttcccctgtctctccgttctagctcgtcccccaccccaccttttcttctttctcctcctctccttcctctccccctctcctctgtctccttccaccgtctcccctgcctccctgt

SEQ ID NO: 486908 - DNA, 120 bp, Artificial Sequence
  ENSG00000162545_2 (sequence is synthesized)
ctttcagtccctgtttttcagccccgtctccctctcggtttctctcccccaccctccctccgggtttcctccccggtgccctccctcctctctccctcccctccccctccgcccctcgca

SEQ ID NO: 486909 - DNA, 80 bp, Artificial Sequence
  ENSG00000162545_3 (sequence is synthesized)
ccctcgcagccccgccgctcgcagctcccagtctgcctccccgaaccggcgccgccgcccgcactcgccgcaggaccggc

SEQ ID NO: 486910 - DNA, 80 bp, Artificial Sequence
  ENSG00000162545_4 (sequence is synthesized)
cggcccggcccccgcccagagccccagcgcgccgaggatgtgagtcctgctcgcctctggcggagcagcagccactcgcg

SEQ ID NO: 486911 - DNA, 120 bp, Artificial Sequence
  ENSG00000162545_5 (sequence is synthesized)
tgagtcctgctcgcctctggcggagcagcagccactcgcgcgcggagccggagcgcagcgcagcgcagccgcgggcgctctccgggccgctcgcgcgagtgccgcgctcttgccctagcg

SEQ ID NO: 486912 - DNA, 120 bp, Artificial Sequence
  ENSG00000162545_6 (sequence is synthesized)
gcgccgctgaccctgtccgccgcgggcggggacgcgggcggaggaggcgccgcggcggagcccccggacgcgaccatgtcggaggtgctgccctacggcgacgagaagctgagcccctac

SEQ ID NO: 486913 - DNA, 120 bp, Artificial Sequence
  ENSG00000162545_7 (sequence is synthesized)
gtgctgccctacggcgacgagaagctgagcccctacggcgacggcggcgacgtgggccagatcttctcctgccgcctgcaggacaccaacaacttcttcggcgccgggcagaacaagcgg

SEQ ID NO: 486914 - DNA, 120 bp, Artificial Sequence
  ENSG00000162545_8 (sequence is synthesized)
ccgcccaagctgggccagatcggccggagcaagcgggttgttattgaagatgataggattgatgacgtgctgaaaaatatgaccgacaaggcacctcctggtgtctaactcccccaaaga

SEQ ID NO: 486915 - DNA, 120 bp, Artificial Sequence
  ENSG00000162545_9 (sequence is synthesized)
aaaaagcatgaaaagagaaagcactttgaaatttattactagcttgctacccacgatgaaatcaacaacctgtatctggtatcaggccgggagacagatgaggcgagaggaggaggagga

SEQ ID NO: 486916 - DNA, 120 bp, Artificial Sequence
  ENSG00000162545_10 (sequence is synthesized)
ggaggagaaggctctgggctcctctgcaaaaataaaaataaaaaaataaataaaattttaaaaataataaaaattcactatatacacatataaagaaataaaaagaagtctcagttgcag

SEQ ID NO: 486917 - DNA, 120 bp, Artificial Sequence
  ENSG00000162545_11 (sequence is synthesized)
ctatttgtcaaaattaatatccatttctttttatatacggtgaatattgcgcaattatagatctggattttgaaccacttaatgaagcggcaacaccaggtgttttgaggtgttggcatt

SEQ ID NO: 486918 - DNA, 120 bp, Artificial Sequence
  ENSG00000162545_12 (sequence is synthesized)
cttcgctgatttggctgttcccaatgtttacattatttaatcttgcaaaaatggttctgtgcacttggatgtgaaatgctgtccagttttattttttttatgttgttatccttggatgta

SEQ ID NO: 486919 - DNA, 120 bp, Artificial Sequence
  ENSG00000162545_13 (sequence is synthesized)
caaaaaattcagaaaatgatctctgtagatattctgttttattttggtcatctttagaagttatcaggaatgtgtttaaaacaagaagagaacttttctaaggaatgatacatagaaaag

SEQ ID NO: 486920 - DNA, 120 bp, Artificial Sequence
  ENSG00000162545_14 (sequence is synthesized)
attttattttaaaatgagttgtaaagcttgtgtttctttgttgctgcaagctatctgcccaagttaatgcaaatggacacattttttatgtcagaaaaacacacacacacacacacacac

SEQ ID NO: 486921 - DNA, 120 bp, Artificial Sequence
  ENSG00000162545_15 (sequence is synthesized)
acacacacacacacgaaaaacaaagaaaaaaatgcttgagctttttctaacttccccttgcagtctgttgtgtgagcagcctgtttatttctctaatattatgtcagtttattctcttta

SEQ ID NO: 486922 - DNA, 120 bp, Artificial Sequence
  ENSG00000162545_16 (sequence is synthesized)
atggactgtaaaaaaatgtaatcacaagagtgccaaatatcttgaaatgccaaaaggcattttagtttcttttctctgtgctctgagtccacgtacaggaatgcttggagtgtcttttct

SEQ ID NO: 486923 - DNA, 120 bp, Artificial Sequence
  ENSG00000162545_17 (sequence is synthesized)
gttatttatagggattctcttaaggcacaccagctgcctgttttgcatggtatttgcaaaaatgcctcttgcgtgaggaaatcttttaccattttttgtttgcaactttggacctcaaga

SEQ ID NO: 486924 - DNA, 120 bp, Artificial Sequence
  ENSG00000162545_18 (sequence is synthesized)
ggtttcccttcccttccccgttccctcttttcttaattcaatattctgtatgttgcaccttgaaccagcacacagggctatttctccaatgtacaataaaagaattgttcctgtgtctca

SEQ ID NO: 486925 - DNA, 120 bp, Artificial Sequence
  ENSG00000162545_19 (sequence is synthesized)
gggaccgacggctgcagagagagactgagacgcagggatggaggggagggggtacgcgggagaccgagggtggcagagaccgagacaaagctcccgagaggggagctgaagcgggagaga

SEQ ID NO: 486926 - DNA, 120 bp, Artificial Sequence
  ENSG00000162545_20 (sequence is synthesized)
cagagccgaggacgcgcgtttggggaggacgcagaagccgccgaaacaataagggcgaccgacaccttagacagggagagacagagacctcgatcggctgccggccgtcgcgccgaggga

SEQ ID NO: 486927 - DNA, 120 bp, Artificial Sequence
  ENSG00000162551_0 (sequence is synthesized)
agaaactcccggtgtggcagctgagatggcccaggaaagaactatattaccttcaaaaagagaggtacatgcgatgtttgaggtggcatgaagctcagtggtgttatattggaatgagtg

SEQ ID NO: 486928 - DNA, 120 bp, Artificial Sequence
  ENSG00000162551_1 (sequence is synthesized)
agtgaccatcctggagccttcctgaaagaggattggaacatcagttaacatctgaccactgccagcccaccccctcccacccacgtcgattgcatctctgggctccagggataaagcagg

SEQ ID NO: 486929 - DNA, 120 bp, Artificial Sequence
  ENSG00000162551_2 (sequence is synthesized)
tcttggggtgcaccatgatttcaccattcttagtactggccattggcacctgccttactaactccttagtgccagagaaagagaaagaccccaagtactggcgagaccaagcgcaagaga

SEQ ID NO: 486930 - DNA, 120 bp, Artificial Sequence
  ENSG00000162551_3 (sequence is synthesized)
cactgaaatatgccctggagcttcagaagctcaacaccaacgtggctaagaatgtcatcatgttcctgggagatgggatgggtgtctccacagtgacggctgcccgcatcctcaagggtc

SEQ ID NO: 486931 - DNA, 120 bp, Artificial Sequence
  ENSG00000162551_4 (sequence is synthesized)
agctccaccacaaccctggggaggagaccaggctggagatggacaagttccccttcgtggccctctccaagacgtacaacaccaatgcccaggtccctgacagtgccggcaccgccaccg

SEQ ID NO: 486932 - DNA, 120 bp, Artificial Sequence
  ENSG00000162551_5 (sequence is synthesized)
cctacctgtgtggggtgaaggccaatgagggcaccgtgggggtaagcgcagccactgagcgttcccggtgcaacaccacccaggggaacgaggtcacctccatcctgcgctgggccaagg

SEQ ID NO: 486933 - DNA, 120 bp, Artificial Sequence
  ENSG00000162551_6 (sequence is synthesized)
acgctgggaaatctgtgggcattgtgaccaccacgagagtgaaccatgccacccccagcgccgcctacgcccactcggctgaccgggactggtactcagacaacgagatgccccctgagg

SEQ ID NO: 486934 - DNA, 120 bp, Artificial Sequence
  ENSG00000162551_7 (sequence is synthesized)
ccttgagccagggctgtaaggacatcgcctaccagctcatgcataacatcagggacattgacgtgatcatggggggtggccggaaatacatgtaccccaagaataaaactgatgtggagt

SEQ ID NO: 486935 - DNA, 120 bp, Artificial Sequence
  ENSG00000162551_8 (sequence is synthesized)
atgagagtgacgagaaagccaggggcacgaggctggacggcctggacctcgttgacacctggaagagcttcaaaccgagatacaagcactcccacttcatctggaaccgcacggaactcc

SEQ ID NO: 486936 - DNA, 120 bp, Artificial Sequence
  ENSG00000162551_9 (sequence is synthesized)
tgggtctcttcgagccaggggacatgcagtacgagctgaacaggaacaacgtgacggacccgtcactctccgagatggtggtggtggccatccagatcctgcggaagaaccccaaaggct

SEQ ID NO: 486937 - DNA, 120 bp, Artificial Sequence
  ENSG00000162551_10 (sequence is synthesized)
tcttcttgctggtggaaggaggcagaattgaccacgggcaccatgaaggaaaagccaagcaggccctgcatgaggcggtggagatggaccgggccatcgggcaggcaggcagcttgacct

SEQ ID NO: 486938 - DNA, 120 bp, Artificial Sequence
  ENSG00000162551_11 (sequence is synthesized)
cctcggaagacactctgaccgtggtcactgcggaccattcccacgtcttcacatttggtggatacaccccccgtggcaactctatctttggtctggcccccatgctgagtgacacagaca

SEQ ID NO: 486939 - DNA, 120 bp, Artificial Sequence
  ENSG00000162551_12 (sequence is synthesized)
agaagcccttcactgccatcctgtatggcaatgggcctggctacaaggtggtgggcggtgaacgagagaatgtctccatggtggactatgctcacaacaactaccaggcgcagtctgctg

SEQ ID NO: 486940 - DNA, 120 bp, Artificial Sequence
  ENSG00000162551_13 (sequence is synthesized)
tgcccctgcgccacgagacccacggcggggaggacgtggccgtcttctccaagggccccatggcgcacctgctgcacggcgtccacgagcagaactacgtcccccacgtgatggcgtatg

SEQ ID NO: 486941 - DNA, 120 bp, Artificial Sequence
  ENSG00000162551_14 (sequence is synthesized)
cagcctgcatcggggccaacctcggccactgtgctcctgccagctcggcaggcagccttgctgcaggccccctgctgctcgcgctggccctctaccccctgagcgtcctgttctgagggc

SEQ ID NO: 486942 - DNA, 120 bp, Artificial Sequence
  ENSG00000162551_15 (sequence is synthesized)
ccagggcccgggcacccacaagcccgtgacagatgccaacttcccacacggcagcccccccctcaaggggcagggaggtgggggcctcctcagcctctgcaactgcaagaaaggggaccc

SEQ ID NO: 486943 - DNA, 120 bp, Artificial Sequence
  ENSG00000162551_16 (sequence is synthesized)
aagaaaccaaagtctgccgcccacctcgctcccctctggaatcttccccaagggccaaacccacttctggcctccagcctttgctccctccccgctgccctttggccaacagggtagatt

SEQ ID NO: 486944 - DNA, 120 bp, Artificial Sequence
  ENSG00000162551_17 (sequence is synthesized)
tctcttgggcaggcagagagtacagactgcagacattctcaaagcctcttatttttctagcgaacgtatttctccagacccagaggccctgaagcctccgtggaacattctggatctgac

SEQ ID NO: 486945 - DNA, 120 bp, Artificial Sequence
  ENSG00000162551_18 (sequence is synthesized)
gccgcgttgcgctcccgccactccgcgcccgctatcctggctccgtgctcccacgcgcttgtgcctggacggaccctcgccagtgctctgcgcaggattggaacatcagttaacatctga

SEQ ID NO: 486946 - DNA, 120 bp, Artificial Sequence
  ENSG00000162551_19 (sequence is synthesized)
ccttacctctggaaccccccaggccctacaatgctcatgtccctgtccccaggcccagccctccttcaggggagttgaggtctttctcctcaggacaaggccttgctcactcactcactc

SEQ ID NO: 486947 - DNA, 120 bp, Artificial Sequence
  ENSG00000162551_20 (sequence is synthesized)
caagaccaccagggtcccaggaagccggtgcctgggtggccatcctacccagcgtggcccaggccgggaagagccacctggcagggctcacactcctgggctctgaacacacacgccagc

SEQ ID NO: 486948 - DNA, 120 bp, Artificial Sequence
  ENSG00000162551_21 (sequence is synthesized)
tcctctctgaagcgactctcctgtttggaacggcaaaaaaaaatttttttttctctttttggtggtggttaaaagggaacacaaaacatttaaataaaactttccaaatatttccgagga

SEQ ID NO: 486949 - DNA, 120 bp, Artificial Sequence
  ENSG00000162551_22 (sequence is synthesized)
gttgcgctcccgccactccgcgcccgctatcctggctccgtgctcccacgcgcttgtgcctggacggaccctcgccagtgctctgcgcagagaaagagaaagaccccaagtactggcgag

SEQ ID NO: 486950 - DNA, 120 bp, Artificial Sequence
  ENSG00000162551_23 (sequence is synthesized)
aacagcccttgcccaccgcagttcctcatgttgccctgctaacatcggtatgtatacacacacatgcacacacgtgaacatgtttgcacatatgctccccacgcatacacacatgctcag

SEQ ID NO: 486951 - DNA, 120 bp, Artificial Sequence
  ENSG00000162551_24 (sequence is synthesized)
cgcctccgccttccagaggtgagcgtccgccagcccagcttggctgctttcttgccaaaccccggggttcccactcgagcacagcggtcttggcctggccccgaacaggcctctgacgcc

SEQ ID NO: 486952 - DNA, 120 bp, Artificial Sequence
  ENSG00000162552_0 (sequence is synthesized)
cccgcggccgcagccgctgccccgggccgggcgcccgcggcggcaccatgagtccccgctcgtgcctgcgttcgctgcgcctcctcgtcttcgccgtcttctcagccgccgcgagcaact

SEQ ID NO: 486953 - DNA, 120 bp, Artificial Sequence
  ENSG00000162552_1 (sequence is synthesized)
gagcaactggctgtacctggccaagctgtcgtcggtggggagcatctcagaggaggagacgtgcgagaaactcaagggcctgatccagaggcaggtgcagatgtgcaagcggaacctgga

SEQ ID NO: 486954 - DNA, 120 bp, Artificial Sequence
  ENSG00000162552_2 (sequence is synthesized)
agtcatggactcggtgcgccgcggtgcccagctggccattgaggagtgccagtaccagttccggaaccggcgctggaactgctccacactcgactccttgcccgtcttcggcaaggtggt

SEQ ID NO: 486955 - DNA, 120 bp, Artificial Sequence
  ENSG00000162552_3 (sequence is synthesized)
gacgcaagggactcgggaggcggccttcgtgtacgccatctcttcggcaggtgtggcctttgcagtgacgcgggcgtgcagcagtggggagctggagaagtgcggctgtgacaggacagt

SEQ ID NO: 486956 - DNA, 120 bp, Artificial Sequence
  ENSG00000162552_4 (sequence is synthesized)
gcatggggtcagcccacagggcttccagtggtcaggatgctctgacaacatcgcctacggtgtggccttctcacagtcgtttgtggatgtgcgggagagaagcaagggggcctcgtccag

SEQ ID NO: 486957 - DNA, 120 bp, Artificial Sequence
  ENSG00000162552_5 (sequence is synthesized)
cagagccctcatgaacctccacaacaatgaggccggcaggaaggccatcctgacacacatgcgggtggaatgcaagtgccacggggtgtcaggctcctgtgaggtaaagacgtgctggcg

SEQ ID NO: 486958 - DNA, 120 bp, Artificial Sequence
  ENSG00000162552_6 (sequence is synthesized)
agccgtgccgcccttccgccaggtgggtcacgcactgaaggagaagtttgatggtgccactgaggtggagccacgccgcgtgggctcctccagggcactggtgccacgcaacgcacagtt

SEQ ID NO: 486959 - DNA, 120 bp, Artificial Sequence
  ENSG00000162552_7 (sequence is synthesized)
caagccgcacacagatgaggacctggtgtacttggagcctagccccgacttctgtgagcaggacatgcgcagcggcgtgctgggcacgaggggccgcacatgcaacaagacgtccaaggc

SEQ ID NO: 486960 - DNA, 120 bp, Artificial Sequence
  ENSG00000162552_8 (sequence is synthesized)
catcgacggctgtgagctgctgtgctgtggccgcggcttccacacggcgcaggtggagctggctgaacgctgcagctgcaaattccactggtgctgcttcgtcaagtgccggcagtgcca

SEQ ID NO: 486961 - DNA, 120 bp, Artificial Sequence
  ENSG00000162552_9 (sequence is synthesized)
gcggctcgtggagttgcacacgtgccgatgaccgcctgcctagccctgcgccggcaaccacctagtggcccagggaaggccgataatttaaacagtctcccaccacctaccccaagagat

SEQ ID NO: 486962 - DNA, 120 bp, Artificial Sequence
  ENSG00000162552_10 (sequence is synthesized)
actggttgtattttttgttctggtttggtttttgggtcctcatgttatttattgccgaaaccaggcaggcaaccccaagggcaccaaccagggcctccccaaagcctgggcctttgtggc

SEQ ID NO: 486963 - DNA, 120 bp, Artificial Sequence
  ENSG00000162552_11 (sequence is synthesized)
tgccactgaccaaagggaccttgctcgtgccgctggctgcccgcatgtggctgccactgaccactcagttgttatctgtgtccgtttttctacttgcagacctaaggtggagtaacaagg

SEQ ID NO: 486964 - DNA, 120 bp, Artificial Sequence
  ENSG00000162552_12 (sequence is synthesized)
agtattaccaccacatggctactgaccgtgtcatcggggaagagggggccttatggcagggaaaataggtaccgacttgatggaagtcacaccctctggaaaaaagaactcttaactctc

SEQ ID NO: 486965 - DNA, 120 bp, Artificial Sequence
  ENSG00000162552_13 (sequence is synthesized)
cagcacacatacacatggactcctggcagcttgagcctagaagccatgtctctcaaatgccctgagaaagggaacaagcagataccaggtcaagggcaccaggttcatttcagcccttac

SEQ ID NO: 486966 - DNA, 120 bp, Artificial Sequence
  ENSG00000162552_14 (sequence is synthesized)
atggacagctagaggttcgatatctgtgggtccttccaggcaagaagagggagatgagagcaagagacgactgaagtcccaccctagaacccagcctgccccagcctgcccctgggaaga

SEQ ID NO: 486967 - DNA, 120 bp, Artificial Sequence
  ENSG00000162552_15 (sequence is synthesized)
aaccactccccagacccacctaggcaggcatataggctgccatcctggaccagggatcccggctgtgcctttgcagtcatgcccgagtcacctttcacagcgctgttcctccatgaaact

SEQ ID NO: 486968 - DNA, 120 bp, Artificial Sequence
  ENSG00000162552_16 (sequence is synthesized)
cacacacacacacggacacacacacacacctgcgagagagagggaggaaagggctgtgcctttgcagtcatgcccctgagtcacctttcacagcactgttcctccatgaaactgaaaaag

SEQ ID NO: 486969 - DNA, 120 bp, Artificial Sequence
  ENSG00000162552_17 (sequence is synthesized)
cacagcactgttcctccatgaaactgaaaaaggaaaacacacacacacacacctgcgagagggagggaggaaagggctgtgcaataaagtcctctcccattatcttactcaacacaattt

SEQ ID NO: 486970 - DNA, 120 bp, Artificial Sequence
  ENSG00000162552_18 (sequence is synthesized)
attgagcaaatactacgtgttctaggccctgtacaggccatctcacttgatggccacaacagtcctgggaagcagacaaaccaagaatgctaatgcccatctgacatcagagacggcagt

SEQ ID NO: 486971 - DNA, 120 bp, Artificial Sequence
  ENSG00000162552_19 (sequence is synthesized)
gctccccagacctctcacagcaagctggatggacaggcagggccagaagagtcctccagccaagcctcctccttggttcttgtacccaaaggtagagaaactgcaggtcttcttgggtct

SEQ ID NO: 486972 - DNA, 120 bp, Artificial Sequence
  ENSG00000162552_20 (sequence is synthesized)
gagcctggggcaggggttctggctggacgaaaaggggcagggaagcagcaggagccagagaccacaggctgagctggagcccacatggttcctaagggcagaacaggctctgaggaaaga

SEQ ID NO: 486973 - DNA, 120 bp, Artificial Sequence
  ENSG00000162552_21 (sequence is synthesized)
tgtgaacagctggaaggctgacagtgaggtctcagcagtgtggtgcacccctccccagcacatccgagtccctggggtcccaggtaccataggtactgcaagatttcccaagagacagca

SEQ ID NO: 486974 - DNA, 120 bp, Artificial Sequence
  ENSG00000162552_22 (sequence is synthesized)
ccagcaacctgggcctgaccctgtacaaccgccaaaccatcacgagccccgcccaggcttgtgagaaggacatgcatggatcaagaccttgcccttgacccatctgcttctcagatgggc

SEQ ID NO: 486975 - DNA, 120 bp, Artificial Sequence
  ENSG00000162552_23 (sequence is synthesized)
tcccaatcaccagaggaagttgctgtaagcccactttccagactgcccccacactggggctctaagtttcaggtcggagattttatgctctgtgatcccccacttggggttcccagactc

SEQ ID NO: 486976 - DNA, 120 bp, Artificial Sequence
  ENSG00000162552_24 (sequence is synthesized)
caagctcctggctcctgtgttcagtggctgaattcaacgtccgagattcggaatatgggctccagcctgcagaaactcttctccaggcattgtggtttgtgcctcctagtgttggctccc

SEQ ID NO: 486977 - DNA, 120 bp, Artificial Sequence
  ENSG00000162552_25 (sequence is synthesized)
tcatgaaaagagggtcaacacccttggcccccagccaagatctctgctcaatgtccatacaaggaggaagccaaaaccaagtgaggtgctggagccacattcaaatgtggttgataatct

SEQ ID NO: 486978 - DNA, 120 bp, Artificial Sequence
  ENSG00000162552_26 (sequence is synthesized)
tggggcaggccagctctgatgtggatgaaagctgatccaactgtcgccacagctgcccagctgggtccgctgctcccctggctggctgttcagctgtctactaagcccaaaaaaaatact

SEQ ID NO: 486979 - DNA, 120 bp, Artificial Sequence
  ENSG00000162552_27 (sequence is synthesized)
atgcctcactagcagaggctagacccagaaagagggaacaatgaggacccctcccctcccagaggaaagagctgagccactctccccatccagggaacagtaggtccaggctggatgctg

SEQ ID NO: 486980 - DNA, 120 bp, Artificial Sequence
  ENSG00000162552_28 (sequence is synthesized)
gtatgatgggaactgcccttttcacctgccagggagttcctaaagctgatcttcctggggttctgaaggttgcgacctaggttaatgagaccaaattctaggaaccactgcccaggccaa

SEQ ID NO: 486981 - DNA, 120 bp, Artificial Sequence
  ENSG00000162552_29 (sequence is synthesized)
ccaccgccagtgctgcagagatcaaagaaatccacagccacaggaaaaggagcttctttggacatgcccagctccaaactgtcccagggggaactggcacagcccttacatagcccaccc

SEQ ID NO: 486982 - DNA, 120 bp, Artificial Sequence
  ENSG00000162552_30 (sequence is synthesized)
cctcttggcctcaccgtggcctggaaattggccagagggtccacatcctgcccaaaccactctcctctcgtcccaaggcaaaggtgatgccctgaggcctagggctggataaagcccagc

SEQ ID NO: 486983 - DNA, 120 bp, Artificial Sequence
  ENSG00000162552_31 (sequence is synthesized)
tctggatgctgctaacccactctgctgccccaccccatcctccaatttttatactaggctctttgccattgtgacgtcccatgacatagtctgatgcacgataaaacaattatttcttta

SEQ ID NO: 486984 - DNA, 120 bp, Artificial Sequence
  ENSG00000162552_32 (sequence is synthesized)
aaggaggtagcctggggcaatgctggcctgaagccatcgtgggtactcaggaccccatgagaagccctccttacctttgggggaggaaccaagggggcacccacaccggctcagcatctg

SEQ ID NO: 486985 - DNA, 120 bp, Artificial Sequence
  ENSG00000162552_33 (sequence is synthesized)
agggacactgagattcctactaggcctgggtggtacctgctctggactaaagtctgactggtggagtcgaacgtccaatcccctttggagagggacatgtcaaggtgccgagactaagcc

SEQ ID NO: 486986 - DNA, 120 bp, Artificial Sequence
  ENSG00000162552_34 (sequence is synthesized)
agtcacactcggcaggtgccagtcacacctggagaaggaggctgagctctgcccactcatcaaactcctcccttttacgtttttggttttcttccctagtaaaattcctcttggaaactt

SEQ ID NO: 486987 - DNA, 120 bp, Artificial Sequence
  ENSG00000162552_35 (sequence is synthesized)
tggtgagtgagccaagagagcttccctaaactcctcctgtcctcccaatcacagcgtcttaagcccacttcccggatgagaaaacggaggctcagagtcaagaccctgctgcctggggcg

SEQ ID NO: 486988 - DNA, 120 bp, Artificial Sequence
  ENSG00000162552_36 (sequence is synthesized)
cgcccagaccttgtggctagccagaagcgaggtttcggattcccacagtctcgggccactgtcccaagctgcccaaagctggggaggccccgtccagctcccggaaggctgtagggaggt

SEQ ID NO: 486989 - DNA, 120 bp, Artificial Sequence
  ENSG00000162571_0 (sequence is synthesized)
aggaccttgtgggctgggcagcggcctccggccgggaggcaccagctcttcgaacaatgtttaaaagtctcttctgttcatcctaccggggtgccgtctcctgccggtcttttcatctca

SEQ ID NO: 486990 - DNA, 120 bp, Artificial Sequence
  ENSG00000162571_1 (sequence is synthesized)
ccagggccctcgcccgggcaccccccggccaatggaccacagctgcacccggttcatccaccgccggggaccacccactcggacccgagccggcttcaagaggggcaagaggccaaggat

SEQ ID NO: 486991 - DNA, 120 bp, Artificial Sequence
  ENSG00000162571_2 (sequence is synthesized)
ccagcagaggcctcgggctcgagtctcagggaccatccctgcgtcacgtctgcacccagcaccggcctcacagcccggcccctgccctgcaccaggccactgccctgttggcccggccca

SEQ ID NO: 486992 - DNA, 120 bp, Artificial Sequence
  ENSG00000162571_3 (sequence is synthesized)
cgagaggccaatggggagcagccaggaggagggactccggtgtcagccaagccagccagaccacgacgcagatggacactgtgggccggacctggagggggcagaaagagcctctgccac

SEQ ID NO: 486993 - DNA, 120 bp, Artificial Sequence
  ENSG00000162571_4 (sequence is synthesized)
acccggaccccctgggctcctgaacagccaccggcctgcagactcggatgacactaacgccgccgggccctcagctgccctcctggaggggctcctgctggggggtgggaagccatcgcc

SEQ ID NO: 486994 - DNA, 120 bp, Artificial Sequence
  ENSG00000162571_5 (sequence is synthesized)
ccacagcacccggccggggcccttcttctacattggaggcagcaacggggccacaatcatcagctcctactgcaaaagcaagggctggcagcgcatccatgacagccgccgggacgacta

SEQ ID NO: 486995 - DNA, 120 bp, Artificial Sequence
  ENSG00000162571_6 (sequence is synthesized)
cacgctgaagtggtgtgaggtcaagagccgagacagctacggcagcttccgggaaggagagcagctgctgtaccagcttcccaacaacaagctcctcaccaccaagatcgggctgctcag

SEQ ID NO: 486996 - DNA, 120 bp, Artificial Sequence
  ENSG00000162571_7 (sequence is synthesized)
cacccttcggggacgggcacgggccatgagcaaggccagcaaggtgccggggggggtccaggccaggctggaaaaggacgcagcagcgcccgccctggaggacctcccgtggacaagccc

SEQ ID NO: 486997 - DNA, 120 bp, Artificial Sequence
  ENSG00000162571_8 (sequence is synthesized)
aggatacctcaggccacagagggtcctgagaatggaagagtttttcccagagacctaccgcctggacctcaaacacgagagagaggcctttttcaccttgtttgatgaaacccagatatg

SEQ ID NO: 486998 - DNA, 120 bp, Artificial Sequence
  ENSG00000162571_9 (sequence is synthesized)
ggacgaccccatccaccacaagacgccgttccgggggcctcaggcgcgggtggtgcagaggtacatccagaacccgctgctggtggacgggagaaagtttgacgtgcgctcctacctgct

SEQ ID NO: 486999 - DNA, 120 bp, Artificial Sequence
  ENSG00000162571_10 (sequence is synthesized)
cattgcctgcaccacaccctacatgatcttctttggccacggctatgctcgcctcacccttagcctttacgacccccattccagcgacctcggcggccacttgaccaaccagttcatgca

SEQ ID NO: 487000 - DNA, 120 bp, Artificial Sequence
  ENSG00000162571_11 (sequence is synthesized)
gaagaagagccctctgtacatgctgctgaaggagcacacggtgtggagcatggaacacctcaaccgctacatcagtgacacgttctggaaggcccggggcctcgccaaggactgggtctt

SEQ ID NO: 487001 - DNA, 120 bp, Artificial Sequence
  ENSG00000162571_12 (sequence is synthesized)
caccaccctcaagaagcggatgcagcagatcatggcccactgctttctggccgccaagcccaagctggactgcaagctgggttactttgacctcattggctgtgacttcctgattgatga

SEQ ID NO: 487002 - DNA, 120 bp, Artificial Sequence
  ENSG00000162571_13 (sequence is synthesized)
caacttcaaggtatggctgctggagatgaattctaacccagccctgcacaccaactgcgaggtcctgaaggaggtcatcccaggtgtggtcatcgagaccctggacctggtgctcgagac

SEQ ID NO: 487003 - DNA, 120 bp, Artificial Sequence
  ENSG00000162571_14 (sequence is synthesized)
cttccggaagagcctgcgcggccagaagatgttgcctctgctgtcccagcgccgcttcgtgctcctgcacaacggtgaggccgacccgcggccgcacctggggggctcgtgcagcctccg

SEQ ID NO: 487004 - DNA, 80 bp, Artificial Sequence
  ENSG00000162571_15 (sequence is synthesized)
ccgctggccgcccctgcccacccgccaggccaagtcctccgggccacccatgccgcatgccccagaccagccgggcgccc

SEQ ID NO: 487005 - DNA, 120 bp, Artificial Sequence
  ENSG00000162571_16 (sequence is synthesized)
gccacccggccccgacctggacagcgcccacgatggggagccccaggccccgggcacggagcagtcgggcacaggcaacaggcacccggcgcaagagccttccccggggacagccaagga

SEQ ID NO: 487006 - DNA, 120 bp, Artificial Sequence
  ENSG00000162571_17 (sequence is synthesized)
ggaacgcgaggagcctgagaacgcgaggccctaggggcagccacccgcgcccagcgccccgcgccccgcgccccagccgtgctgcctgccctcagggacctataaagcccactttgctac

SEQ ID NO: 487007 - DNA, 120 bp, Artificial Sequence
  ENSG00000162571_18 (sequence is synthesized)
acagcccggcccctgccctgcaccaggccactgccctgttggtgaggagggtcggaggggcgacctccctgccccctgctccaagctccccacccccacctggaacctgccggcaggaag

SEQ ID NO: 487008 - DNA, 120 bp, Artificial Sequence
  ENSG00000162571_19 (sequence is synthesized)
tccctcggggcgggggtgtgtggtcaggctgggcaccaggcacacagatgtccgtggcgtgcgtgggcggctgcgctgaagtgtgacctgaccgtgtggaaccaaacccttccagcgtct

SEQ ID NO: 487009 - DNA, 120 bp, Artificial Sequence
  ENSG00000162571_20 (sequence is synthesized)
ctgctcacttagctggcagtgcctgtccccagcagccagcaaaggcccggacggaaagcccagtcgggggtctgtcggcacgagtcccgcgggcagcctcgccgtagggtcaggggacag

SEQ ID NO: 487010 - DNA, 120 bp, Artificial Sequence
  ENSG00000162571_21 (sequence is synthesized)
ctcggcttcagtgacagccaccatgtgaagagtctttgttcctttcagatcctccacttggcaggcagggccaacagcagcccccgggccaggtgtcctggagcagcagcagctgcccgt

SEQ ID NO: 487011 - DNA, 120 bp, Artificial Sequence
  ENSG00000162571_22 (sequence is synthesized)
gcaggcccggactctccctagctaagggccatgtgcggtggagtgtcctaattttgcagggttcctttctgtgggggtacctgtggggtacttcaaacagccctagcagcaaaggccctt

SEQ ID NO: 487012 - DNA, 120 bp, Artificial Sequence
  ENSG00000162571_23 (sequence is synthesized)
gagcagcgcggtgtgaaactgggataaaaacggggcttggccgaaggacttttatctgtcttggtcaccccggccaggccccggaagcagcagccagggatggtccttcctcacccacag

SEQ ID NO: 487013 - DNA, 120 bp, Artificial Sequence
  ENSG00000162571_24 (sequence is synthesized)
gcgtgtgtcactgtggctgggacggcagcgctcagaggagcctccagttactttcctcacatctcccaaactctctcttaattgcgataattcacagaacataaaattcacgatcttaaa

SEQ ID NO: 487014 - DNA, 120 bp, Artificial Sequence
  ENSG00000162571_25 (sequence is synthesized)
atcagctcctactgcaaaagcaagggctggcagcgcatccatgacagccgccgggacgactacacgctgaagtggtgtgaggtcaagagccgagacagctacggcagcttccgggaaggt

SEQ ID NO: 487015 - DNA, 120 bp, Artificial Sequence
  ENSG00000162571_26 (sequence is synthesized)
agcgggagccggcaccagaggcgggcagcctgcaggggcctcctgggccggagcacagggcaggttggaggggtggggaccgaggtcctgcgctccctccacacgagccctggcctctga

SEQ ID NO: 487016 - DNA, 120 bp, Artificial Sequence
  ENSG00000162571_27 (sequence is synthesized)
ttgtttcctggcccaggctcccaggaccttgtgggctgggcaggtcgtgcaccaagtttccacgccgcctttacaccgtgtccccaccgaggggcgtcacaaccgtcctccacaccgggc

SEQ ID NO: 487017 - DNA, 120 bp, Artificial Sequence
  ENSG00000162571_28 (sequence is synthesized)
gtcaccggcttcccaagtcccaccgctataaaggacacgtcagtcagcatctcggagtgagacgctttccttctggattcagaatcgcgtccgtcagagactccaaagcacatttgctag

SEQ ID NO: 487018 - DNA, 84 bp, Artificial Sequence
  ENSG00000162571_29 (sequence is synthesized)
gggaggctgcgtcccacctgcattcaggccccgggttcaccacacacacagcgggcagctgcttaagaaacctttgatttcagt

SEQ ID NO: 487019 - DNA, 120 bp, Artificial Sequence
  ENSG00000162571_30 (sequence is synthesized)
tcaaccgctacatcagtgacacgttctggaaggcccggggcctcgccaaggactgggtcttcaccaccctcaagtgcctgacacaggacaggagctgcacgagtttgttgagtgagtttc

SEQ ID NO: 487020 - DNA, 120 bp, Artificial Sequence
  ENSG00000162572_0 (sequence is synthesized)
tgcaacagcacgggcggcgactgcttttaccgaggctacacgtcaggcgtggcggctgtccaggactggtaccacttccactatgtggatatcctggccctgctgcccgcggcatgggag

SEQ ID NO: 487021 - DNA, 120 bp, Artificial Sequence
  ENSG00000162572_1 (sequence is synthesized)
gacagccacgggagccaggacggccacttcgtcctctcctgcagttacgatggcctggactgccaggcccgacagttccggaccttccaccaccccacctacggcagctgctacacggtc

SEQ ID NO: 487022 - DNA, 120 bp, Artificial Sequence
  ENSG00000162572_2 (sequence is synthesized)
gatggcgtctggacagctcagcgccccggcatcacccacggtgggtgccagcccctggccggtgcgggggcaggggtgcaggtcaggtggcctcacaccagcccttggcctcccaggagt

SEQ ID NO: 487023 - DNA, 120 bp, Artificial Sequence
  ENSG00000162572_3 (sequence is synthesized)
gtaaccacacgcccttcctggggcaccacagcttcagcgtccggccagggacggaggccaccatcagcatccgagaggacgaggtgcaccggctcgggagcccctacggccactgcaccg

SEQ ID NO: 487024 - DNA, 120 bp, Artificial Sequence
  ENSG00000162572_4 (sequence is synthesized)
ccggcggggaaggcgtggaggtggagctgctacacaacacctcctacaccaggcaggcctgcctggtgtcctgcttccagcagctgatggtggagacctgctcctgtggctactacctcc

SEQ ID NO: 487025 - DNA, 120 bp, Artificial Sequence
  ENSG00000162572_5 (sequence is synthesized)
accctctgccggcgggggctgagtactgcagctctgcccggcaccctgcctggggacactgcttctaccgcctctaccaggacctggagacccaccggctcccctgtacctcccgctgcc

SEQ ID NO: 487026 - DNA, 120 bp, Artificial Sequence
  ENSG00000162572_6 (sequence is synthesized)
ccaggccctgcagggagtctgcattcaagctctccactgggacctccaggtggccttccgccaagtcagctggatggactctggccacgctaggtgaacaggggctgccgcatcagagcc

SEQ ID NO: 487027 - DNA, 120 bp, Artificial Sequence
  ENSG00000162572_7 (sequence is synthesized)
agccacaatctctggcaagcacctaggaccttgtccccgcctgccaagtagccgcccgggccatgtgtgccctgtctcctcggcagcaagccccctgccgcgagcttggagaggcacccc

SEQ ID NO: 487028 - DNA, 120 bp, Artificial Sequence
  ENSG00000162572_8 (sequence is synthesized)
agccccatctggcactcaaggaaatcagctcagagaggttgagtaactcgggaaggccacacagccagtgacgaagctgtgattcacacaggcctgggtgactccagcatggctttcctc

SEQ ID NO: 487029 - DNA, 120 bp, Artificial Sequence
  ENSG00000162572_9 (sequence is synthesized)
gcaggaggccagaggctccatcctgcttcagagctgccagctgcccccgcaatggctgagcaccgaagcatggacgggagaatggaagcagccacacgggggggctctcacctccaggct

SEQ ID NO: 487030 - DNA, 120 bp, Artificial Sequence
  ENSG00000162572_10 (sequence is synthesized)
gcagcccagacgccccccaggccggggccaccatcagcaccaccaccaccacccaaggaggggcaccaggaggggctggtggagctgcccgcctcgttccgggagctgctcaccttcttc

SEQ ID NO: 487031 - DNA, 120 bp, Artificial Sequence
  ENSG00000162572_11 (sequence is synthesized)
tgcaccaatgccaccatccacggcgccatccgcctggtctgctcccgcgggaaccgcctcaagacgacgtcctgggggctgctgtccctgggagccctggtcgcgctctgctggcagctg

SEQ ID NO: 487032 - DNA, 120 bp, Artificial Sequence
  ENSG00000162572_12 (sequence is synthesized)
aaaaaaaaagagttgttatcagtagaagggaatgtctggttacagtatggcgttgtgcagatgaaggtcttatcgcagatgaagccaccaggtcacaagcctcagagagaatcaactata

SEQ ID NO: 487033 - DNA, 120 bp, Artificial Sequence
  ENSG00000162572_13 (sequence is synthesized)
aatgcttctcatcagactcaaggcctgaggtgatgctgatgctgtgcctgaattccagcagggaggaggcatgagggcagtgctgtcacagaagacaacaccgctccctcgttacctgtg

SEQ ID NO: 487034 - DNA, 120 bp, Artificial Sequence
  ENSG00000162572_14 (sequence is synthesized)
gcccggccacctcagcggcccaaggaggctcacctggtcatggtgcagtgaccacaggacccccacatgccgggagctgggttcgccccaccccaccccctgcaccgggccagcgagggg

SEQ ID NO: 487035 - DNA, 120 bp, Artificial Sequence
  ENSG00000162572_15 (sequence is synthesized)
atggcccagaagagggggaggaccatgtggattcaccagtgctggacatgtgctctgtggctaccccctctgcctactctctggcccgatacaggggtgtgggacaggcctgggtgactc

SEQ ID NO: 487036 - DNA, 120 bp, Artificial Sequence
  ENSG00000162572_16 (sequence is synthesized)
cgcaagctgctcccgctggtcaccctgtgtgacgggaacccacgtcggccgagtccggtcctccgccatctggagctgctggacgagtttgccagggagaacattgactccctgtacaac

SEQ ID NO: 487037 - DNA, 120 bp, Artificial Sequence
  ENSG00000162572_17 (sequence is synthesized)
gtgccgcagctgctctcggccatgggcagcctctgcagcctgtggtttggggcctccgtcctctccctcctggagctcctggagctgctgctcgatgcttctgccctcaccctggtgcta

SEQ ID NO: 487038 - DNA, 120 bp, Artificial Sequence
  ENSG00000162572_18 (sequence is synthesized)
cctcaggggcgtccagcatcaagccagaggccagtcagatgcccccgcctgcaggcggcacgtcagatgacccggagcccagcgggcctcatctcccacgggtgatgcttccaggggttc

SEQ ID NO: 487039 - DNA, 120 bp, Artificial Sequence
  ENSG00000162572_19 (sequence is synthesized)
tggcgggagtctcagccgaagagagctgggctgggccccagccccttgagactctggacacctgaaccagacctgccagggctgtgcgatctcttggcctggtccttgcagctgtggcag

SEQ ID NO: 487040 - DNA, 120 bp, Artificial Sequence
  ENSG00000162572_20 (sequence is synthesized)
cagcaggctccccagcggcccagggtgggccagaccagcagcccaggaagcagcacacgcggccgtggggaggcaggcaccgggcatgtcggcgcctctggtcaaaccacctacactgcc

SEQ ID NO: 487041 - DNA, 120 bp, Artificial Sequence
  ENSG00000162572_21 (sequence is synthesized)
tggggtgggtctcaaggaggcccggggcggaggggggttcccgcgtgcacacgagtgcggctggacgtgccgacacgcggtgatgtacccatgctccgtgtgtctgtgtctgcatgtcca

SEQ ID NO: 487042 - DNA, 120 bp, Artificial Sequence
  ENSG00000162572_22 (sequence is synthesized)
cacgtctgatgcacctgtgtacgtgtgtcaagcctagccacctcagctgcagggaggcagaaggcaaggcaggccccacggacacacttgggctgctctgaaataaagctgttgactcca

SEQ ID NO: 487043 - DNA, 120 bp, Artificial Sequence
  ENSG00000162572_23 (sequence is synthesized)
tataaatgcttctcatcagactcaaggcctgaggtgatgctgatgctgtgcctgaattccagcagggaggaggcatgaggtgcgtccgactcccttcccatcacagctgagctagttttt

SEQ ID NO: 487044 - DNA, 120 bp, Artificial Sequence
  ENSG00000162572_24 (sequence is synthesized)
caggttaactttggaatgcccatggctaagaccaggggtccatccagacagttcagggcttataattttatttttggtttatgagggaacctagaaggcagcccacacgcaccttactcc

SEQ ID NO: 487045 - DNA, 120 bp, Artificial Sequence
  ENSG00000162572_25 (sequence is synthesized)
tcccagcaggggacaccggccagaccccaagctccacactcccaccctcagcacccacccaggccagcagccgggggcaccttggtgccaccttagtgcctgttctgcggaggctccact

SEQ ID NO: 487046 - DNA, 120 bp, Artificial Sequence
  ENSG00000162572_26 (sequence is synthesized)
ggacagtgcagttgatgcccggggccgagggggctctgcctgggaggctgttcacctgcctgggtgcaggaccccagagggaccccaggccacccctggcctgcccatgcccacgggaat

SEQ ID NO: 487047 - DNA, 120 bp, Artificial Sequence
  ENSG00000162572_27 (sequence is synthesized)
cccgaccttgggctgcctgtctattgcaccagaaccgtcccagggctgactcagagtgaccctgagtgggggacgctcaccccaggggaggaaacggggctctgggataggaggtcctgg

SEQ ID NO: 487048 - DNA, 120 bp, Artificial Sequence
  ENSG00000162572_28 (sequence is synthesized)
ctggggtcccacagatgccaggcgcctgccatctccagggcagtgctgtcacagaagacaacaccgctccctcgttacctgtggcccggccacctcagcggcccaaggaggtgagctcac

SEQ ID NO: 487049 - DNA, 120 bp, Artificial Sequence
  ENSG00000162572_29 (sequence is synthesized)
agccatgctcggtcaatggggcctggccgtctttcctgggagagagcagaggcatgggcccaaagggagccagggatgcctgcccgtcccttctctcattcaggctcacctggtcatggt

SEQ ID NO: 487050 - DNA, 120 bp, Artificial Sequence
  ENSG00000162572_30 (sequence is synthesized)
gtcaacctcagcaaaggcagagccgccctctccgccactgtcccccgccacgagccccccttccacctggaccgggagatccgtctgcagaggctgagccactcgggcagccgggtcaga

SEQ ID NO: 487051 - DNA, 120 bp, Artificial Sequence
  ENSG00000162576_0 (sequence is synthesized)
gtgggacaaagcctggggctgggcgggggccatggcgctgccatcccgaatcctgctttggaaacttgtgcttctgcagagctctgctgttctcctgcactcagggtcctcggtacccgc

SEQ ID NO: 487052 - DNA, 120 bp, Artificial Sequence
  ENSG00000162576_1 (sequence is synthesized)
cgctgctggcagctccgtggtgtccgagtccgcggtgagctgggaggcgggcgcccgggcggtgctgcgctgccagagcccgcgcatggtgtggacccaggaccggctgcacgaccgcca

SEQ ID NO: 487053 - DNA, 120 bp, Artificial Sequence
  ENSG00000162576_2 (sequence is synthesized)
gtgctccactgggacctgcgcggccccgggggtggccccgcgcggcgcctgctggacttgtactcggcgggcgagcagcgcgtgtacgaggcgcgggaccgcggccgcctggagctctcg

SEQ ID NO: 487054 - DNA, 120 bp, Artificial Sequence
  ENSG00000162576_3 (sequence is synthesized)
ctcggcctcggccttcgacgacggcaacttctcgctgctcatccgcgcggtggaggagacggacgcggggctgtacacctgcaacctgcaccatcactactgccacctctacgagagcct

SEQ ID NO: 487055 - DNA, 120 bp, Artificial Sequence
  ENSG00000162576_4 (sequence is synthesized)
ggccgtccgcctggaggtcaccgacggccccccggccacccccgcctactgggacggcgagaaggaggtgctggcggtggcgcgcggcgcacccgcgcttctgacctgcgtgaaccgcgg

SEQ ID NO: 487056 - DNA, 120 bp, Artificial Sequence
  ENSG00000162576_5 (sequence is synthesized)
gcacgtgtggaccgaccggcacgtggaggaggctcaacaggtggtgcactgggaccggcagccgcccggggtcccgcacgaccgcgcggaccgcctgctggacctctacgcgtcgggcga

SEQ ID NO: 487057 - DNA, 120 bp, Artificial Sequence
  ENSG00000162576_6 (sequence is synthesized)
gcgccgcgcctacgggcccctttttctgcgcgaccgcgtggctgtgggcgcggatgcctttgagcgcggtgacttctcactgcgtatcgagccgctggaggtcgccgacgagggcaccta

SEQ ID NO: 487058 - DNA, 120 bp, Artificial Sequence
  ENSG00000162576_7 (sequence is synthesized)
ctcctgccacctgcaccaccattactgtggcctgcacgaacgccgcgtcttccacctgacggtcgccgaaccccacgcggagccgcccccccggggctctccgggcaacggctccagcca

SEQ ID NO: 487059 - DNA, 120 bp, Artificial Sequence
  ENSG00000162576_8 (sequence is synthesized)
cagcggcgccccaggcccagaccccacactggcgcgcggccacaacgtcatcaatgtcatcgtccccgagagccgagcccacttcttccagcagctgggctacgtgctggccacgctgct

SEQ ID NO: 487060 - DNA, 120 bp, Artificial Sequence
  ENSG00000162576_9 (sequence is synthesized)
cggagttcgctgtggctgcaggggaccagatgctttacaggagtgaggacatccagctagattacaaaaacaacatcctgaaggagagggcggagctggcccacagccccctgcctgcca

SEQ ID NO: 487061 - DNA, 120 bp, Artificial Sequence
  ENSG00000162576_10 (sequence is synthesized)
agtacatcgacctagacaaagggttccggaaggagaactgcaaatagggaggccctgggctcctggctgggccagcagctgcacctctcctgtctgtgctcctcggggcatctcctgatg

SEQ ID NO: 487062 - DNA, 120 bp, Artificial Sequence
  ENSG00000162576_11 (sequence is synthesized)
ctccggggctcaccccccttccagcggctggtcccgctttcctggaatttggcctgggcgtatgcagaggccgcctccacacccctctcccaggggcttggtggcagcatagcccccacc

SEQ ID NO: 487063 - DNA, 120 bp, Artificial Sequence
  ENSG00000162576_12 (sequence is synthesized)
cctgcggcctttgctcacgggtggccctgcccacccctggcacaaccaaaatcccactgatgcccatcatgccctcagacccttctgggctctgcccgctgggggcctgaagacattcct

SEQ ID NO: 487064 - DNA, 120 bp, Artificial Sequence
  ENSG00000162576_13 (sequence is synthesized)
ggaggacactcccatcagaacctggcagccccaaaactggggtcagcctcagggcaggagtcccactcctccagggctctgctcgtcgggggctgggagatgttcctggaggaggacact

SEQ ID NO: 487065 - DNA, 120 bp, Artificial Sequence
  ENSG00000162576_14 (sequence is synthesized)
cccatcagaacttggcagccttgaagttggggtcagcctcggcaggagtcccactcctcctggggtgctgcctgccaccgagagctcccccacctgtaccaccatgtgggactccaggca

SEQ ID NO: 487066 - DNA, 120 bp, Artificial Sequence
  ENSG00000162576_15 (sequence is synthesized)
ccatctgttctccccagggacctgctgacttgaatgccagcccttgctcctctgtgttgctttgggccacctggggctgcaccccttgccctttctctgccccatccctaccctagcctt

SEQ ID NO: 487067 - DNA, 120 bp, Artificial Sequence
  ENSG00000162576_16 (sequence is synthesized)
gctctcagccaccttgatagtcactgggctccctgtgacttctgaccctgacacccctcccttggactctgcctgggctggagtctagggctggggctacatttggcttctgtactggct

SEQ ID NO: 487068 - DNA, 120 bp, Artificial Sequence
  ENSG00000162576_17 (sequence is synthesized)
gaggacaggggagggagtgaagttggtttggggtggcctgtgttgccactctcagcaccccacatttgcatctgctggtggacctgccaccatcacaataaagtccccatctgattttta

SEQ ID NO: 487069 - DNA, 120 bp, Artificial Sequence
  ENSG00000162576_18 (sequence is synthesized)
aagaaggctggcggtgtttcctcttagaggggagaaactcagcctgggtaggagacccagccccacgcagggaaaactgtgctaacgcttccgatgtgcgtggcaggtgcggcggcggcg

SEQ ID NO: 487070 - DNA, 120 bp, Artificial Sequence
  ENSG00000162576_19 (sequence is synthesized)
aatacggtttgtcctcgagcctaaccctgtctgtgttggtgtcagcagtggcccccctaccacacacacagggtccctggcgtcccaagaccactcctggcagccccgccactggctgcg

SEQ ID NO: 487071 - DNA, 120 bp, Artificial Sequence
  ENSG00000162576_20 (sequence is synthesized)
cctggaagccgcgtcctcaggcctcgcctggcatttgctgtcacagaggttgcttccttgggtccgtccgtcctcgcccctccagcctgggcgccccccgacccctgtctcattccctcc

SEQ ID NO: 487072 - DNA, 120 bp, Artificial Sequence
  ENSG00000162576_21 (sequence is synthesized)
accacatgcagcacagtccaggaggctggggtccaagagggccatggctggcacccggcttagtgctgagtccccagtgcccagcaagcctggcacccaggaggtggtcagcaaacgctt

SEQ ID NO: 487073 - DNA, 120 bp, Artificial Sequence
  ENSG00000162576_22 (sequence is synthesized)
caggagactgaggtgggcgggagggtggtcctctgggctgggggacctgcggaaggggcggcactgcccccaatgtgagtctccttcccaggctacgaatactcggaccagaagtcggga

SEQ ID NO: 487074 - DNA, 80 bp, Artificial Sequence
  ENSG00000162576_23 (sequence is synthesized)
gaggtcaccgacggccgtgagtgcttcccccccgccccccagctcccgcccctcgaccctcgaccgccgccccggcccgc

SEQ ID NO: 487075 - DNA, 120 bp, Artificial Sequence
  ENSG00000162576_24 (sequence is synthesized)
tacaaaaacaacatcctgaaggagagggcggagctggcccacagccccctgcctgccaagtacatcgacctagacaaagacccttctgggctctgcccgctgggggcctgaagacattcc

SEQ ID NO: 487076 - DNA, 80 bp, Artificial Sequence
  ENSG00000162576_25 (sequence is synthesized)
gcggccgcctggagctctcggcctcggccttcgacgacggcaacttctcgctgctcatccgcggtgcggggaccggggac

SEQ ID NO: 487077 - DNA, 120 bp, Artificial Sequence
  ENSG00000162576_26 (sequence is synthesized)
ctgtccccattccacctcacctgggaccaacgatggcaggcaccagccaggcccggggcccctgccacctcaggctcagaaatccctggggagtcctgcgggggggtctgccctgtgtct

SEQ ID NO: 487078 - DNA, 120 bp, Artificial Sequence
  ENSG00000162576_27 (sequence is synthesized)
atgtcctcggaccttcttgtccctccaagggtgcggtcaccacccctccccaggcctgaccggtgaggggctgggcctctgctcccacactgcccctccccagcaggccagcaacgatgg

SEQ ID NO: 487079 - DNA, 120 bp, Artificial Sequence
  ENSG00000162576_28 (sequence is synthesized)
gggaggccaaggggcccggcaggagccagagggggcggtccccagaccgtagacaggcccaggcctccgtgatgtcaccgcgggtgctaaggagggggagggggtagggctgtttttctg

SEQ ID NO: 487080 - DNA, 120 bp, Artificial Sequence
  ENSG00000162576_29 (sequence is synthesized)
gagagagacttagagccgagtgggacaaagcctggggctgggcgggggccatggcgctgccatcccgaatcctgctttggaaacttgtgcttctgcagagctctgctgttctcctgcact

SEQ ID NO: 487081 - DNA, 80 bp, Artificial Sequence
  ENSG00000162585_0 (sequence is synthesized)
tggggttgagccgccggaggccgcgcccggcgggcgggccttctggcggccgcccctggtttctcctggggggtgatgag

SEQ ID NO: 487082 - DNA, 120 bp, Artificial Sequence
  ENSG00000162585_1 (sequence is synthesized)
gtgatgagcgggagcggctctgggccgagctactgcgcacggtgagcccggagctgatcctggatcacgaggtgccttcactgcccgccttcccaggacaggagcccaggtgcggcccgg

SEQ ID NO: 487083 - DNA, 120 bp, Artificial Sequence
  ENSG00000162585_2 (sequence is synthesized)
agcccactgaagtcttcactgtcggacccaagaccttttcctggacaccctttccgccggacctgtggggcccgggccgttcctaccggctgcttcacggggcaggagggcacctggaat

SEQ ID NO: 487084 - DNA, 120 bp, Artificial Sequence
  ENSG00000162585_3 (sequence is synthesized)
caggtccctgccccagcgcccggcacctgatccctgcagggcccccagggtggagcagcagccgtctgtggagggtgccgcggccctgcgcagctgccccatgtgccagaaggagttcgc

SEQ ID NO: 487085 - DNA, 120 bp, Artificial Sequence
  ENSG00000162585_4 (sequence is synthesized)
ccccaggctgacccagctggatgttgacagccacctggcccagtgcttggccgaaagcacagaagacgtgacgtggtgagcgccatccaagagccctgcgcagagtgcggcgcccggaca

SEQ ID NO: 487086 - DNA, 120 bp, Artificial Sequence
  ENSG00000162585_5 (sequence is synthesized)
cgctctcccccgccagcagccccgcctctcggctcccccgccagcagccccgcctctcggctcccccgcatgcgcattaaagcagggcgggctcctgtctgtctctgtgttgtgatgaaa

SEQ ID NO: 487087 - DNA, 74 bp, Artificial Sequence
  ENSG00000162585_6 (sequence is synthesized)
gctcgggaatgcgaaggcaccggagtccaaagttggcagccaacaacaacaacaacaaaaagaggctgaggcag

SEQ ID NO: 487088 - DNA, 120 bp, Artificial Sequence
  ENSG00000162585_7 (sequence is synthesized)
aacatggcaagatcccatctttacatgcctgggcgtggtggcgcgtgcctgtggtcctagctactctggaggctgaagtgggaggattcccttgagccaggaattggaggctgtagtgaa

SEQ ID NO: 487089 - DNA, 63 bp, Artificial Sequence
  ENSG00000162585_8 (sequence is synthesized)
acactgcacccggacaattttccttttcttacaagaacactgctcacactgcattcagggcca

SEQ ID NO: 487090 - DNA, 120 bp, Artificial Sequence
  ENSG00000162585_9 (sequence is synthesized)
ttttcttacaagaacactgctcacactgcattcagggccaaccctaacccagtatcgcctcatcctggtttgattatatcggcacagaccttgcttccgagcgaggccactttctcaggt

SEQ ID NO: 487091 - DNA, 120 bp, Artificial Sequence
  ENSG00000162585_10 (sequence is synthesized)
actggtggacatgagtcttcggagacgctgctcaacccacagtgctcctccagcttggtttctgtgacttgccttccccagaggaggggtgccctgagaggtctccactccctgaccggc

SEQ ID NO: 487092 - DNA, 120 bp, Artificial Sequence
  ENSG00000162585_11 (sequence is synthesized)
tccttggtgccgcgcactctgagaggcttcccagggaacagagcacacaggaccgccctcctgggtagaccaatcagcatctgagctcacaatttcccagcagggcagtggggtggagag

SEQ ID NO: 487093 - DNA, 120 bp, Artificial Sequence
  ENSG00000162585_12 (sequence is synthesized)
agaagcctgggctgggctgggctgggctgggctggggaagcttctccgggcggggggacgtcagagcaggatctggggctgataaaagcccgcccctgggtgggggctgagtggtgcgga

SEQ ID NO: 487094 - DNA, 120 bp, Artificial Sequence
  ENSG00000162585_13 (sequence is synthesized)
agctgagcccgacacgtggggatggaggacaggctgtgggagggtgtgaaccggatactgcttgaaggggtgctggggactttgagagagggcggctggccctgtctggtcggggatgct

SEQ ID NO: 487095 - DNA, 120 bp, Artificial Sequence
  ENSG00000162585_14 (sequence is synthesized)
ggcccagacacaggccatggctgggatggggttcagaaacaggaccgctgtctctcccgggccagggccctccccagctgctcctggctttctggttcttggggtcaggggcaggcctgt

SEQ ID NO: 487096 - DNA, 120 bp, Artificial Sequence
  ENSG00000162585_15 (sequence is synthesized)
gccatgaccccgccactgaggctgtgaggaggctgtcggtgcccaagggcaccaaggcacacccctactcttgcaccccatgtgtgggcccgagcacctgctctgctgccccaaagatct

SEQ ID NO: 487097 - DNA, 120 bp, Artificial Sequence
  ENSG00000162585_16 (sequence is synthesized)
ggcgatgtttcccaggcaactgtctctcacagcctgtctgcctggcactcccgtatcccataaatgccaccacatctggctatgggtgggcgtgcctgcctggcatccacgggccagcag

SEQ ID NO: 487098 - DNA, 120 bp, Artificial Sequence
  ENSG00000162585_17 (sequence is synthesized)
gtgtggtggagcacagcccagttcctggctgcgtcagaaggctgcccgggccttttggctgtccttgccagcaggtgagcactgccagggcaccgtgtgtgggtgctgggccatttagcc

SEQ ID NO: 487099 - DNA, 120 bp, Artificial Sequence
  ENSG00000162585_18 (sequence is synthesized)
ccagtgccttcagcatgtgcccagggtgcctgtcggccacaggtctcatttggaaattgggagggtgcacggccaccgggctgcttaggcctgccagcctcagggcccgtcaccgctgtc

SEQ ID NO: 487100 - DNA, 120 bp, Artificial Sequence
  ENSG00000162585_19 (sequence is synthesized)
ttagcctgatttgcagggtgtcagcgctgggcagagatgaacatttgggtgactctgaggatgccagtggctgggacacttgttcttccgcggtggaaggagttggagaggcctggctcc

SEQ ID NO: 487101 - DNA, 120 bp, Artificial Sequence
  ENSG00000162585_20 (sequence is synthesized)
ctgacctacggccagcctggcttctgaaaccagctcagtgggctggggcctgattcatcatccataaatgtgtccttttttgccacagagggtaaggggcctcctagcccaccggtctgc

SEQ ID NO: 487102 - DNA, 120 bp, Artificial Sequence
  ENSG00000162585_21 (sequence is synthesized)
aggtgcgggagtaggagatgggtggctctgatgcccccacccactcgatcaccttctgctctgcctgggatgcaaactcccacagctgaaacgttcttttgtaaacatgaattttggctt

SEQ ID NO: 487103 - DNA, 120 bp, Artificial Sequence
  ENSG00000162585_22 (sequence is synthesized)
agaaaaaactcatttccactgtgcacgtgtcagtcccaaccagaaattattttccaataaagcaaaactccgtcaccacagcagcagatggctccgaagaagtggagcgttttcatcagg

SEQ ID NO: 487104 - DNA, 120 bp, Artificial Sequence
  ENSG00000162585_23 (sequence is synthesized)
acaggagagccggccagccacgggctccatgggcagttgccccgcaccacgcccacgcaggcccactgtgcagcccccaagtcaccagagttttcgagaaccacttccaaaagacaccgt

SEQ ID NO: 487105 - DNA, 120 bp, Artificial Sequence
  ENSG00000162585_24 (sequence is synthesized)
cgtgaccggagccattagcaaatatcaggatttttcaaaccacacttcaatacatccttcactttaatttataaaacaaattactgaatataaaagtctcccctctgatgagcacagcat

SEQ ID NO: 487106 - DNA, 120 bp, Artificial Sequence
  ENSG00000162585_25 (sequence is synthesized)
tactcacatattgtgtacaagaacggccaaactggtaaccggcacgctactggcaacacggcagtatttagccaccagccgcacaatggggtggagcggcccctgagtcatggaggcctg

SEQ ID NO: 487107 - DNA, 120 bp, Artificial Sequence
  ENSG00000162585_26 (sequence is synthesized)
caatttccacacctgtgcaccaggcctcactcagaggcatgaggtggcgcgaccccctctcccagggagctcagaagacggctctgccacacctgacacctggcagctggcagccctgcc

SEQ ID NO: 487108 - DNA, 120 bp, Artificial Sequence
  ENSG00000162585_27 (sequence is synthesized)
tctaggaagcctcagctctggacagctgtgccttcacctgaggggtacttcaactcccgcccccacctgtgtcccgctggctcctaagctgcccccctacgtgtgggttgcgtctgagat

SEQ ID NO: 487109 - DNA, 120 bp, Artificial Sequence
  ENSG00000162585_28 (sequence is synthesized)
gtggggcaggcgccactcacggaaaaaaggcatcagaggagcttccacatcatcggaacattttattcctcaggacgctacacgctcactttcctggcggagcaggtcagtgcatcgagt

SEQ ID NO: 487110 - DNA, 120 bp, Artificial Sequence
  ENSG00000162585_29 (sequence is synthesized)
tctgtttccgtggaaaatgtgcaccttggaaaccgcatgacagccccctcggcagggtccccgcggatccgccgcgacgcaggcacagcagcaagttcctccagcacgaagctggcctgc

SEQ ID NO: 487111 - DNA, 120 bp, Artificial Sequence
  ENSG00000162585_30 (sequence is synthesized)
ccgggcccaggtgtgagggactgttctgctcccagcagcgcccgctgacgcttccctctgcggtctcggcgcaagcgtctgtccctggccgccctcggagccgtgcccagcctggcatgc

SEQ ID NO: 487112 - DNA, 120 bp, Artificial Sequence
  ENSG00000162585_31 (sequence is synthesized)
atatgcggtggttaaggatacagttaaagggtcaatcacgcgtgtccacgacagagacgcacgcggcctcacaccgactcctcggtggacagcaataatgggttgatatactcaaagcct

SEQ ID NO: 487113 - DNA, 120 bp, Artificial Sequence
  ENSG00000162585_32 (sequence is synthesized)
tcgaactctgactggtcgatcctctttatggcatccctgtgggcaaaggtggcaggggggaggggggtgaccgtgtgttcattcccttgggggaagcggagtcacgttcgcataagaatc

SEQ ID NO: 487114 - DNA, 120 bp, Artificial Sequence
  ENSG00000162585_33 (sequence is synthesized)
ctcccccaacgcccactggagagatgacaccaggcgggtgggactcaagggcaggctgggtcaccagctgcccaaggtgccggcctgccatggggctgcccgaggggtgctccagggacc

SEQ ID NO: 487115 - DNA, 120 bp, Artificial Sequence
  ENSG00000162585_34 (sequence is synthesized)
cgcacccagtgggactcactcatcgtctggggtcagctgcacgggctcgctggtgaactgtgtgtcaaagttgtccagaccgtagtcgtctgtgatctgtggctggaatggagggagcgc

SEQ ID NO: 487116 - DNA, 120 bp, Artificial Sequence
  ENSG00000162585_35 (sequence is synthesized)
ctgcttcttctccagcttggaaaaacaataggagaagggtcagctccgcgcgggcatcatccctaccagattgagtgttttgcacgcacttcaatcacaaaatgaaacagtgagaaagtc

SEQ ID NO: 487117 - DNA, 120 bp, Artificial Sequence
  ENSG00000162585_36 (sequence is synthesized)
gaacatggatgcctcgcttttcagagactcgcgttcttggaacttacacccttttgggtttgctatttttacccaccctgagccttccggtctccatggcgacgcctccaaacagcagat

SEQ ID NO: 487118 - DNA, 120 bp, Artificial Sequence
  ENSG00000162585_37 (sequence is synthesized)
tccaggcggcaatgacgtcatctctccctttcctgccgcccaggccttggagagatccaaggcctgtgggccacggctgcgcctctcctgactccagcttgcccgtctgtccttgggggc

SEQ ID NO: 487119 - DNA, 120 bp, Artificial Sequence
  ENSG00000162585_38 (sequence is synthesized)
agcgtccttccttctctcggccccagacgcagctgcatcctggagtccttctgagaaatgtgggacctgccccagctccaccccaggggcagcgagggaggcgttggatggagccacccc

SEQ ID NO: 487120 - DNA, 120 bp, Artificial Sequence
  ENSG00000162585_39 (sequence is synthesized)
acggctcctctgtgaaggtctgcacgtcactcagaaagttgaagcaaaccaagcagggttggagcccacagttcacagccggctgcacaggggatgcaccaagcacagtttcctatgaca

SEQ ID NO: 487121 - DNA, 120 bp, Artificial Sequence
  ENSG00000162585_40 (sequence is synthesized)
agtggaaacctgtgcgccacaggtgagctgggtcctggaaggtgcagggaccaggcagcatctcatctcaggacatcaagggctgtccccagccagcagatttcccataaaaacgtgctg

SEQ ID NO: 487122 - DNA, 120 bp, Artificial Sequence
  ENSG00000162585_41 (sequence is synthesized)
aactggggacaaagctgattctacagagccgagaagccagaccttccctggggactcccgagggggtcccagccaccctctccacctgcagaggtttcctggcccacttggaggaccttg

SEQ ID NO: 487123 - DNA, 120 bp, Artificial Sequence
  ENSG00000162585_42 (sequence is synthesized)
ggggatcctccaagggcccccttccagctcttggcccatgggggagcctcttcctcagctccgggtgtggtggacaggagaccgagggctccccgcacccagctgggctcagcgttttca

SEQ ID NO: 487124 - DNA, 120 bp, Artificial Sequence
  ENSG00000162585_43 (sequence is synthesized)
agctgaacttggtgcgtggcggcttggaaagccgggagcctgctgcgtgtctcctggggctgctgtgaaaaaatgaccacacactgggagcctaaaacgagtgacatgtatattctcaca

SEQ ID NO: 487125 - DNA, 120 bp, Artificial Sequence
  ENSG00000162585_44 (sequence is synthesized)
gttcaggcagctggtgtccaaaatcagtggttgggagggtggagctccgcctaaaggctctgggtggctgctgcctgccccttccagccccgggcccccggcattccctggcgtgcagct

SEQ ID NO: 487126 - DNA, 120 bp, Artificial Sequence
  ENSG00000162585_45 (sequence is synthesized)
cccgggcccccggcattccctggcgtgcagctgctccacccccaaccccaaagcctccttcctgtgtctctgtgtccaaattttccttacctttttttttttttttttgagatagagttt

SEQ ID NO: 487127 - DNA, 66 bp, Artificial Sequence
  ENSG00000162585_46 (sequence is synthesized)
actcctgacctcaagcacctggccaattttccttttctttctctctctcttttttttttgagacgg

SEQ ID NO: 487128 - DNA, 71 bp, Artificial Sequence
  ENSG00000162585_47 (sequence is synthesized)
agtgctgaaattacaggcatgagccacagcacctggccaattttccttttctttctctctaaatggcacaa

SEQ ID NO: 487129 - DNA, 120 bp, Artificial Sequence
  ENSG00000162585_48 (sequence is synthesized)
ccgctcactgtcatgacaagtggacagatgccccgggcctcagttgacccatctgtaagtggggccacgcgacagcacctctgtcacagggctgggtgtggggtgaacaggctggtccct

SEQ ID NO: 487130 - DNA, 120 bp, Artificial Sequence
  ENSG00000162585_49 (sequence is synthesized)
ggaggcaagtagtgtggtgccctgaggcctgaggccaggctccaggaccgctcaaggaacaggggatttgaggcaactcagagaggacaggcccagcagccggccccagcctgatatctt

SEQ ID NO: 487131 - DNA, 120 bp, Artificial Sequence
  ENSG00000162585_50 (sequence is synthesized)
agctgcctaccttccctgtcaggtgcacaggtcagcgccaggccaaccccagagcgagaacacctgtgctggactgagctggagcagcagggtggcctgcaccggggcagcgagggaggc

SEQ ID NO: 487132 - DNA, 120 bp, Artificial Sequence
  ENSG00000162585_51 (sequence is synthesized)
gtactgttgggagccctggggagaaatccatgctcttggctgaagctctgagatccttgttgctgtcagggtgctgccccccgccccccggggaggggcttttgtctttgcatcgcctgc

SEQ ID NO: 487133 - DNA, 120 bp, Artificial Sequence
  ENSG00000162585_52 (sequence is synthesized)
ttttccagatagtctaaaaaaagacttctgaagacaaggacgttcacgaggaaaaacttgccattttgagctttttaagcagttgctgaaagcttggcagactgcctcaatttttcctaa

SEQ ID NO: 487134 - DNA, 120 bp, Artificial Sequence
  ENSG00000162585_53 (sequence is synthesized)
gtaggcgtcaatgaagtcaggtccaggccttggtgtgtctggaatgcttcaagcacattcgaacacttgatcgtaagggagagccggtactttggaaccggaactcacccgaggctgtgg

SEQ ID NO: 487135 - DNA, 120 bp, Artificial Sequence
  ENSG00000162585_54 (sequence is synthesized)
ccaccgcatgggcaggctagctgggggacaagccccatatctttgggaacaagggtttgcacagccaccctgggatgccctgggactcctgaccgcacaggaccccagcagggaggccgc

SEQ ID NO: 487136 - DNA, 120 bp, Artificial Sequence
  ENSG00000162585_55 (sequence is synthesized)
ctggattggagggtctggtctaacagccggacttggtcttgaaccgtcgccctgtcccgcacaggcgcctgctgagcctggagccctggcagaggcgggtctggggagtggagctgccag

SEQ ID NO: 487137 - DNA, 120 bp, Artificial Sequence
  ENSG00000162585_56 (sequence is synthesized)
gaggcctcccatttctcacagccttggtgttctccgggtcacccagaggaccgtcaaatgctggatttgacaaactatgtagaatgttctttgtgtctttaagatcttcttgtggtccta

SEQ ID NO: 487138 - DNA, 120 bp, Artificial Sequence
  ENSG00000162585_57 (sequence is synthesized)
ttttaaagccctgtttcacactggaaaggtggcccagtgctgtggcctggcatgtccaggtggctctctgtcacgggtctggggtccacctgcttgccgtgctctgtgggcagggcaggc

SEQ ID NO: 487139 - DNA, 120 bp, Artificial Sequence
  ENSG00000162585_58 (sequence is synthesized)
tgggggcccacagaacagcacagaaggaaggctgggagcactggccccgggtccacctggccatcctggaatctggtggcaccagcgtccccaggcccagagcacaggaacaccttcccg

SEQ ID NO: 487140 - DNA, 120 bp, Artificial Sequence
  ENSG00000162585_59 (sequence is synthesized)
agagtgcgtcatgggttttaaaaatgaagatcgtcttttttgtctggagatgctttttcttatttttgaaacccaacgtatatttttatgtattttttaagtaaaggggaatggaaccca

SEQ ID NO: 487141 - DNA, 120 bp, Artificial Sequence
  ENSG00000162585_60 (sequence is synthesized)
gttttgctaacaagataacccaaactgcccagtgcctggccttgtgtctggcgacctctgggcccttggcctccggagcaggtcctggggctggggtggtgtgaatgatgctggttcgta

SEQ ID NO: 487142 - DNA, 120 bp, Artificial Sequence
  ENSG00000162585_61 (sequence is synthesized)
acttttggttgagttaatgggcggcaggtttcagagcttatggagaccaggtccttcagtcatgcctgatgcccctggtcttccagaagcaaaaacagctcgggaatgcgaaggcaccgg

SEQ ID NO: 487143 - DNA, 120 bp, Artificial Sequence
  ENSG00000162585_62 (sequence is synthesized)
agctgggcacctggtgaggggtgaggatgttgagagccagagctgcgttttgtctctgttgatgtggcgaggccctgggttggtcactgggatttttttttttttttgagacggtgtctc

SEQ ID NO: 487144 - DNA, 120 bp, Artificial Sequence
  ENSG00000162585_63 (sequence is synthesized)
tcgttgggattttaacagccctgaggcccctcacgctgccaggtgccagcccaccctgcagccctgctcccctgcccacacgcagaagccaccagaggcttctggactgagcccccactg

SEQ ID NO: 487145 - DNA, 120 bp, Artificial Sequence
  ENSG00000162585_64 (sequence is synthesized)
tcctgcagccgggctggcctgtccacaccacagggcgtgctcagctactgagcagaagcgtcacggacagggcagatcaggccaggacaaagctcttccgccacaggcgggggtctgaag

SEQ ID NO: 487146 - DNA, 120 bp, Artificial Sequence
  ENSG00000162585_65 (sequence is synthesized)
gcatctcagagggcccccaaacaagggacgctgcctggaaaccccgggacaagatgacctcggttcagatcttagcaccttctggcaaccttagagaaagcttctggagggaggggctgg

SEQ ID NO: 487147 - DNA, 120 bp, Artificial Sequence
  ENSG00000162585_66 (sequence is synthesized)
ttcccaggatgggcagaagccggaaagtctcagactgagtgaccctcgggggcttcagaaggcactgggtgggctctgccagagtgagaaggcagctgatggctgctggagccagccccg

SEQ ID NO: 487148 - DNA, 120 bp, Artificial Sequence
  ENSG00000162585_67 (sequence is synthesized)
ggagtgggggtccagctatggtctggagagggggacttgagggttgcagtggccacacagacggggcacaggagccaaaggaagggacacagcaaagcccaagggtaaaacggcgcgccg

SEQ ID NO: 487149 - DNA, 120 bp, Artificial Sequence
  ENSG00000162585_68 (sequence is synthesized)
tggactggtctgagggcagaggctgtaggggagcgaggggcggtgtggctgacaggtggacacagggacacgtgtcctgtggacttggccgctcagtgggggtgtgtcccccagcagtgg

SEQ ID NO: 487150 - DNA, 120 bp, Artificial Sequence
  ENSG00000162585_69 (sequence is synthesized)
cgtgtgagggatggtcactctgatgggacactgaccacttggcctccagcaagatctaggcccaagtctaggctgaagccgcccactcagccccgggacatcgtccccggcagctctgct

SEQ ID NO: 487151 - DNA, 120 bp, Artificial Sequence
  ENSG00000162585_70 (sequence is synthesized)
gagcacgccagctccggcactctccgggagtcatggccggaagtcaactgtcctggcttccagggccacaccttggccaggcctggtgatggtcatttccagccgctccagttgggctga

SEQ ID NO: 487152 - DNA, 120 bp, Artificial Sequence
  ENSG00000162585_71 (sequence is synthesized)
tggggccacatgaggccggggatagaaggtggctgcgctcagacacccctcccggccccactggatgcccagggcgctgacctgcaggactcggatgggttttctcctgccacccctgcc

SEQ ID NO: 487153 - DNA, 120 bp, Artificial Sequence
  ENSG00000162585_72 (sequence is synthesized)
tggccggccaccatcccagcgccagcgccctcctgagaggtgcaggggccgcgtggggcctcccagagtggcaggttggcagcctgcacgccggtgacggcgtccttctccgtggtgagg

SEQ ID NO: 487154 - DNA, 120 bp, Artificial Sequence
  ENSG00000162585_73 (sequence is synthesized)
cttggtccctcctcgccagaaacaccaattctctgacgtgagctgcacatccactgcccagccatgtttactcttctgcctcctgtagacgcagccgcggcggctctccctggcaggcca

SEQ ID NO: 487155 - DNA, 120 bp, Artificial Sequence
  ENSG00000162585_74 (sequence is synthesized)
cccgccgtcctgccttttctccgggtcaggccgcctgtctgccgggctccacgatgagcgcgttctcaagctgagcaggcgccagaatcccatagagaggcttgttgagacacagcttcc

SEQ ID NO: 487156 - DNA, 120 bp, Artificial Sequence
  ENSG00000162585_75 (sequence is synthesized)
ccacccccagctcggacgcaggggcctggcgtggcctcctcacgggcacggtgtggaaacaccactggcggttaccgtggtctgccgggtgcatgagcccctggggtggccccgtccctt

SEQ ID NO: 487157 - DNA, 120 bp, Artificial Sequence
  ENSG00000162585_76 (sequence is synthesized)
gtttctgaccagccggatcctctccagcggcaggagcagagagggcccggaggtccagacggtgctctctgcggccagcatgccgcggaggtggccgagtgagtgtggcccctcccttgc

SEQ ID NO: 487158 - DNA, 120 bp, Artificial Sequence
  ENSG00000162585_77 (sequence is synthesized)
cctttcctgccgcccaggccttggagagatccaaggcctgtgggccacggctgcgcctctcctgactccagcttgcccgtctgtccttgggggcagcgtccttccttctctcggcccctt

SEQ ID NO: 487159 - DNA, 120 bp, Artificial Sequence
  ENSG00000162585_78 (sequence is synthesized)
ggatcctgggaggaggctacacgctggcgctgagacagcaacctgcctggcctgggaagccccccgcagcccctacatcagaagcttgctcttggcgcagtggctcacgcctgtaatccc

SEQ ID NO: 487160 - DNA, 120 bp, Artificial Sequence
  ENSG00000162585_79 (sequence is synthesized)
cttttgtggggtcagtgcccacagggttgagcaccacgtgcctggctgggcagtgctcctgccagggtccccttctccactgtaggaaacacggctgctcctgcagccgcgtctgctctg

SEQ ID NO: 487161 - DNA, 120 bp, Artificial Sequence
  ENSG00000162585_80 (sequence is synthesized)
ggaaacacggctgctcctgcagccgcgtctgctctgctgcatctccagctcctgccaggcatggtgtgcgcggccccaagacagggagtttccatagagacagggtttcaccgtgttagc

SEQ ID NO: 487162 - DNA, 120 bp, Artificial Sequence
  ENSG00000162585_81 (sequence is synthesized)
gcgtgagccaccacgcccggcccccagagccttagtctcagaatcacacccaccccacgcccagggcgtctgtcacagctttccaatccatgagcccatcaatcggactggacacagata

SEQ ID NO: 487163 - DNA, 120 bp, Artificial Sequence
  ENSG00000162585_82 (sequence is synthesized)
catgagcccatcaatcggactggacacagataaactgggacaggacgccgggtggcaaaggccgggagagctgggccactccctccaaaaggccccagacgcagctgcatcctggagtcc

SEQ ID NO: 487164 - DNA, 120 bp, Artificial Sequence
  ENSG00000162591_0 (sequence is synthesized)
actgtgctcaacgcgccggggcgagttcctgcagggtggacccggcgatcaggtctccgcggtgccactttgggcgcgggcgggaagccgggacgctccgcacctgcagcgaccttgggc

SEQ ID NO: 487165 - DNA, 120 bp, Artificial Sequence
  ENSG00000162591_1 (sequence is synthesized)
cggagcgggcgcgggcacctgtggctgcgtcctatggcgcacgtggaggcggaggctccggggagccgccggggccgcctgtgagccggagagcggaggaggcaccggcgcgcacgatgt

SEQ ID NO: 487166 - DNA, 120 bp, Artificial Sequence
  ENSG00000162591_2 (sequence is synthesized)
atgtcgttccttgaagaggcgagggcagcggggcgcgcggtggtcctggcgttggtgctgctgctgctccccgccgtgcccgtgggcgccagcgttccgccgcggcccctgctcccgctg

SEQ ID NO: 487167 - DNA, 120 bp, Artificial Sequence
  ENSG00000162591_3 (sequence is synthesized)
cagcccggcatgccccacgtgtgtgctgagcaggagctgaccctggtgggccgccgccagccgtgcgtgcaggccttaagccacacggtgccggtgtggaaggccggctgtgggtggcag

SEQ ID NO: 487168 - DNA, 120 bp, Artificial Sequence
  ENSG00000162591_4 (sequence is synthesized)
gcgtggtgcgtgggtcatgagcggagaaccgtctactacatgggctacaggcaggtgtataccacggaggcccggaccgtgctcaggtgctgccgagggtggatgcagcagcccgacgag

SEQ ID NO: 487169 - DNA, 120 bp, Artificial Sequence
  ENSG00000162591_5 (sequence is synthesized)
gagggctgcctctcggctgaatgcagcgccagcctctgttttcacggtggccgttgtgtgccaggctcagcccagccgtgtcactgtccccccggcttccagggaccccgctgtcagtat

SEQ ID NO: 487170 - DNA, 120 bp, Artificial Sequence
  ENSG00000162591_6 (sequence is synthesized)
gatgtggacgaatgccgaacccacaacggtggctgccagcaccggtgcgtgaacaccccaggctcctacctctgtgagtgcaagcccggcttccggctccacactgacagcaggacctgc

SEQ ID NO: 487171 - DNA, 120 bp, Artificial Sequence
  ENSG00000162591_7 (sequence is synthesized)
ctggccattaactcctgcgccctgggcaatggcggctgccagcaccactgtgtccagctcacaatcactcggcatcgctgccagtgccggcccgggttccagctccaggaggacggcagg

SEQ ID NO: 487172 - DNA, 120 bp, Artificial Sequence
  ENSG00000162591_8 (sequence is synthesized)
cattgtgtccgtagaagcccgtgtgccaacaggaacggcagctgcatgcacaggtgccaggtggtccggggcctcgcccgctgtgagtgccacgtgggctatcagctagcagcggacggc

SEQ ID NO: 487173 - DNA, 120 bp, Artificial Sequence
  ENSG00000162591_9 (sequence is synthesized)
aaggcctgtgaagatgtggacgaatgtgccgcagggctggcccagtgtgcccatggctgcctcaacacccaggggtccttcaagtgcgtgtgtcacgcgggctatgagctgggcgccgat

SEQ ID NO: 487174 - DNA, 120 bp, Artificial Sequence
  ENSG00000162591_10 (sequence is synthesized)
ggccggcagtgctaccggattgagatggaaatcgtgaacagctgtgaggccaacaacggcggctgctcccatggctgcagccacaccagtgctgggcccctgtgcacatgtccccgcggc

SEQ ID NO: 487175 - DNA, 120 bp, Artificial Sequence
  ENSG00000162591_11 (sequence is synthesized)
tacgagctggacacagatcagaggacctgcatcgatgtcgacgactgtgcagacagcccgtgctgccagcaggtgtgcaccaacaaccctggcgggtacgagtgcggctgctacgccggc

SEQ ID NO: 487176 - DNA, 120 bp, Artificial Sequence
  ENSG00000162591_12 (sequence is synthesized)
taccggctcagtgccgatggctgcggctgtgaggatgtggatgagtgcgcctccagccgtggcggctgcgagcaccactgcaccaacctggccggctccttccagtgctcctgcgaggcc

SEQ ID NO: 487177 - DNA, 120 bp, Artificial Sequence
  ENSG00000162591_13 (sequence is synthesized)
ggctaccggctgcacgaggaccgtaggggctgcagccccctggaggagccgatggtggacctggacggcgagctgcctttcgtgcggcccctgccccacattgccgtgctccaggacgag

SEQ ID NO: 487178 - DNA, 120 bp, Artificial Sequence
  ENSG00000162591_14 (sequence is synthesized)
ctgccgcaactcttccaggatgacgacgtcggggccgatgaggaagaggcagagttgcggggcgaacacacgctcacagagaagtttgtctgcctggatgactcctttggccatgactgc

SEQ ID NO: 487179 - DNA, 120 bp, Artificial Sequence
  ENSG00000162591_15 (sequence is synthesized)
agcttgacctgtgatgactgcaggaacggagggacctgcctcctgggcctggatggctgtgattgccccgagggctggactgggctcatctgcaatgagacttgtcctccggacaccttt

SEQ ID NO: 487180 - DNA, 120 bp, Artificial Sequence
  ENSG00000162591_16 (sequence is synthesized)
gggaagaactgcagcttctcctgcagctgtcagaatggtgggacctgcgactctgtcacgggggcctgccgctgccccccgggtgtcagtggaactaactgtgaggatggctgccccaag

SEQ ID NO: 487181 - DNA, 120 bp, Artificial Sequence
  ENSG00000162591_17 (sequence is synthesized)
ggctactatggcaagcactgtcgcaagaaatgcaactgtgccaaccggggccggtgccaccgcctctacggggcctgcctctgcgacccagggctctacggccgcttctgccacctcacc

SEQ ID NO: 487182 - DNA, 120 bp, Artificial Sequence
  ENSG00000162591_18 (sequence is synthesized)
tgcccgccgtgggcctttgggccgggctgctcggaggagtgccagtgtgtgcagccccacacgcagtcctgtgacaagagggatggcagctgctcctgcaaggctggcttccggggcgag

SEQ ID NO: 487183 - DNA, 120 bp, Artificial Sequence
  ENSG00000162591_19 (sequence is synthesized)
cgctgtcaggcagagtgtgagctgggctactttgggccggggtgctggcaggcatgcacctgcccagtgggcgtggcctgtgactccgtgagcggcgagtgtgggaagcggtgtcctgct

SEQ ID NO: 487184 - DNA, 120 bp, Artificial Sequence
  ENSG00000162591_20 (sequence is synthesized)
ggcttccagggagaggactgtggccaagagtgcccggtggggacgtttggcgtgaactgctcgagctcctgctcctgtgggggggccccctgccacggggtcacggggcagtgccggtgt

SEQ ID NO: 487185 - DNA, 120 bp, Artificial Sequence
  ENSG00000162591_21 (sequence is synthesized)
ccgccggggaggactggggaagactgtgaggcagattgtcccgagggccgctgggggctgggctgccaggagatctgcccagcatgccagcacgctgcccgctgcgaccctgagaccgga

SEQ ID NO: 487186 - DNA, 120 bp, Artificial Sequence
  ENSG00000162591_22 (sequence is synthesized)
gcctgcctgtgcctccctggcttcgtcggcagccgctgccaggacgtgtgcccagcaggctggtatggtcccagctgccagacaaggtgctcttgtgccaatgatgggcactgccaccca

SEQ ID NO: 487187 - DNA, 120 bp, Artificial Sequence
  ENSG00000162591_23 (sequence is synthesized)
gccaccggacactgcagctgtgcccccgggtggaccggctttagctgccagagagcctgtgatactgggcactggggacctgactgcagccacccctgcaactgcagcgctggccacggg

SEQ ID NO: 487188 - DNA, 120 bp, Artificial Sequence
  ENSG00000162591_24 (sequence is synthesized)
agctgtgatgccatcagcggcctgtgtctgtgtgaggctggctacgtgggcccgcggtgcgagcagcagtgtccccagggccactttgggcccggctgtgagcagcggtgccagtgtcag

SEQ ID NO: 487189 - DNA, 120 bp, Artificial Sequence
  ENSG00000162591_25 (sequence is synthesized)
catggagcagcctgtgaccacgtcagcggggcctgcacctgcccggccggctggaggggcaccttctgcgagcatgcctgcccggccggcttctttggattggactgtcgcagtgcctgc

SEQ ID NO: 487190 - DNA, 120 bp, Artificial Sequence
  ENSG00000162591_26 (sequence is synthesized)
aactgcaccgccggagctgcctgtgatgccgtgaatggctcctgcctctgccccgctggccgccggggcccccgctgtgccgagacctgcccagcccacacctacgggcacaattgcagc

SEQ ID NO: 487191 - DNA, 120 bp, Artificial Sequence
  ENSG00000162591_27 (sequence is synthesized)
caggcctgtgcctgctttaacggggcctcctgtgaccctgtccacgggcagtgccactgtgcccctggctggatggggccctcctgcctgcaggcctgccctgccggcctgtacggcgac

SEQ ID NO: 487192 - DNA, 120 bp, Artificial Sequence
  ENSG00000162591_28 (sequence is synthesized)
aactgtcggcattcctgcctctgccagaacggagggacctgtgaccctgtctcaggccactgtgcgtgcccagagggctgggccggcctggcctgtgagaaggagtgcctcccccgggac

SEQ ID NO: 487193 - DNA, 120 bp, Artificial Sequence
  ENSG00000162591_29 (sequence is synthesized)
gtcagagctggctgccggcacagcggcggttgcctcaacgggggcctgtgtgacccgcacacgggccgctgcctctgcccagccggctggactggggacaagtgtcagagcccctgcctg

SEQ ID NO: 487194 - DNA, 120 bp, Artificial Sequence
  ENSG00000162591_30 (sequence is synthesized)
cggggctggtttggagaggcctgtgcccagcgctgcagctgcccgcctggcgctgcctgccaccacgtcactggggcctgccgctgtccccctggcttcactggctccggctgcgagcag

SEQ ID NO: 487195 - DNA, 120 bp, Artificial Sequence
  ENSG00000162591_31 (sequence is synthesized)
tgcccacccggcagctttggggaggactgtgcgcagatgtgccagtgtcccggtgagaacccggcctgccaccctgccaccgggacctgctcatgtgctgctggctaccacggccccagc

SEQ ID NO: 487196 - DNA, 120 bp, Artificial Sequence
  ENSG00000162591_32 (sequence is synthesized)
tgccagcaacgatgtccgcccgggcggtatgggccaggctgtgaacagctgtgtgggtgtctcaacgggggctcctgtgatgcggccacgggggcctgccgctgccccactgggttcctc

SEQ ID NO: 487197 - DNA, 120 bp, Artificial Sequence
  ENSG00000162591_33 (sequence is synthesized)
gggacggactgcaacctcacctgtccgcagggccgcttcggccccaactgcacccacgtgtgtgggtgtgggcagggggcggcctgcgaccctgtgaccggcacctgcctctgccccccg

SEQ ID NO: 487198 - DNA, 120 bp, Artificial Sequence
  ENSG00000162591_34 (sequence is synthesized)
gggagagccggcgtccgctgtgagcgaggctgcccccagaaccggtttggcgtgggctgcgagcacacctgctcctgcagaaatgggggcctgtgccacgccagcaacggcagctgctcc

SEQ ID NO: 487199 - DNA, 120 bp, Artificial Sequence
  ENSG00000162591_35 (sequence is synthesized)
tgtggcctgggctggacggggcggcactgcgagctggcctgtccccctgggcgctacggagccgcctgccatctggagtgctcctgccacaacaacagcacgtgtgagcctgccacgggc

SEQ ID NO: 487200 - DNA, 120 bp, Artificial Sequence
  ENSG00000162591_36 (sequence is synthesized)
acctgccgctgcggccccggcttctatggccaggcctgcgagcacccctgtccccctggcttccacggggctggctgccaggggttgtgctggtgtcaacatggagccccctgcgacccc

SEQ ID NO: 487201 - DNA, 120 bp, Artificial Sequence
  ENSG00000162591_37 (sequence is synthesized)
atcagtggccgatgcctctgccctgccggcttccacggccacttctgtgagagggggtgtgagccaggttcatttggagagggctgccaccagcgctgtgactgtgacgggggggcaccc

SEQ ID NO: 487202 - DNA, 120 bp, Artificial Sequence
  ENSG00000162591_38 (sequence is synthesized)
tgtgaccctgtcaccggtctctgcctttgcccaccagggcgctcaggagccacctgtaacctggattgcagaaggggccagtttgggcccagctgcaccctgcactgtgactgcgggggt

SEQ ID NO: 487203 - DNA, 120 bp, Artificial Sequence
  ENSG00000162591_39 (sequence is synthesized)
ggggctgactgcgaccctgtcagtgggcagtgtcactgtgtggatggctacatggggcccacgtgccgggaaggtgggcccctccggctccccgagaacccgtccttagcccagggctca

SEQ ID NO: 487204 - DNA, 120 bp, Artificial Sequence
  ENSG00000162591_40 (sequence is synthesized)
gcgggcacactgcccgcctccagcagacccacatcccggagcggtggaccagcgaggcactagtagaggcagtcccgtggagcccgcctctccagtcccagccagaggggaccctggcct

SEQ ID NO: 487205 - DNA, 120 bp, Artificial Sequence
  ENSG00000162591_41 (sequence is synthesized)
ttggtgaccactgagaaggacacttcacgggcccagagctcctggtactgcccttcctttgagggccgtggagggctgtggacagcccagcaacctgtcgctcttggaggctggtgtggc

SEQ ID NO: 487206 - DNA, 120 bp, Artificial Sequence
  ENSG00000162591_42 (sequence is synthesized)
cttgaggagggaagcctcgcatggccgctggaagagaggcgcctcctggcctggctctgcagaacccaggggcacgctctgggcctgggctgaggaagtcccgctctccccgcggctctg

SEQ ID NO: 487207 - DNA, 120 bp, Artificial Sequence
  ENSG00000162591_43 (sequence is synthesized)
agttggactgaggacaggtgtgggcgccagtgtgggtgcaggcgcaggtgcaggcacagggccactgtcctccaggcaggctttttggtgctaggccctgggactggaagtcgcccagcc

SEQ ID NO: 487208 - DNA, 120 bp, Artificial Sequence
  ENSG00000162591_44 (sequence is synthesized)
cgtatttatgtaaaggtatttatgggccactgcacatgcccgctgcagccctgggatcagctggaagctgcctgtcatctcctgcccaatccccagaaaccctgattcaggtctgcaggc

SEQ ID NO: 487209 - DNA, 120 bp, Artificial Sequence
  ENSG00000162591_45 (sequence is synthesized)
tcctgcgggctcaccaggctgctggctccggtaccatgtaaacctaggaaggtaaaggagcaggcaacctcctcgtggcctgtgtgtttgctgtgttacgtggactctgtgtgggctcct

SEQ ID NO: 487210 - DNA, 120 bp, Artificial Sequence
  ENSG00000162591_46 (sequence is synthesized)
ccctggggcccggccagcataacggtgcacccagggacctcccagtgcacccggggccctttgcaggggtgggggtgccacacaagtgaagaagttgggactcatctcagttcccagtgc

SEQ ID NO: 487211 - DNA, 120 bp, Artificial Sequence
  ENSG00000162591_47 (sequence is synthesized)
tattgaggagaacgctggggctgcattcattaccgctgagacccagagactggctgttcccagagaatggcccagggggaggagggctggtgtggaggggcaacctggactgaggccgaa

SEQ ID NO: 487212 - DNA, 120 bp, Artificial Sequence
  ENSG00000162591_48 (sequence is synthesized)
ctcccttgggctcaccccacccacccctacctgagcatcagcagtggggggagggcagcatcgcaggggcagggactccctgggtgaggacagaccagccctcccgagcacctggcactc

SEQ ID NO: 487213 - DNA, 120 bp, Artificial Sequence
  ENSG00000162591_49 (sequence is synthesized)
atgggctgaggctgacttctcctggaagaagggcccagagtggaaggaagaggcagagggtagaggtggtggctgggggctcctctgcagagtggggtggccaatggagagggctgcact

SEQ ID NO: 487214 - DNA, 120 bp, Artificial Sequence
  ENSG00000162591_50 (sequence is synthesized)
cacaccgcaacataggactctctctcccttaagaaggcccccttagggtctgggctgccgcccccatcaccctaaaaccagccaaggtagctgaggccccagggcagacaatttcaccag

SEQ ID NO: 487215 - DNA, 120 bp, Artificial Sequence
  ENSG00000162591_51 (sequence is synthesized)
caggaggaggaggagtccagtgagcttggttgctcacagacagcaagggagctgtcacagaggaagctgatgaatggaccgctgtggggagactttaaagtagaacagtgataagggagg

SEQ ID NO: 487216 - DNA, 120 bp, Artificial Sequence
  ENSG00000162591_52 (sequence is synthesized)
gcaggatggtggggatgcagaagcagcagccagagagagacggactggggtgcagacggagtgtggaaaacgcataccttgaaatgaagcatccagcagatggggtgagtggatacagct

SEQ ID NO: 487217 - DNA, 120 bp, Artificial Sequence
  ENSG00000162591_53 (sequence is synthesized)
caggagattctcccaggaatagcagggaggcgtaaagagagacaacgtacagagatagatgaatggaaatgggtaagggaggtgttcattcacatccatctaactgcaaaatacaaaagt

SEQ ID NO: 487218 - DNA, 120 bp, Artificial Sequence
  ENSG00000162591_54 (sequence is synthesized)
aagaagtcattgacatgaagcaacgacgaccaagacgttctcagatctaaaggtgaatgatctcagtcagcctggaaatgcacaaggtggaaaaataacataaaaaagccataagacctt

SEQ ID NO: 487219 - DNA, 120 bp, Artificial Sequence
  ENSG00000162591_55 (sequence is synthesized)
gaagaacatcaatgtcaaagataaattctaaagtcccagagaaaaaagaatgggaatcaaattgacctcagactatacgtgagaaacacggagagccagaaaactgtgatgttccatcct

SEQ ID NO: 487220 - DNA, 120 bp, Artificial Sequence
  ENSG00000162591_56 (sequence is synthesized)
cagagtttgaaggaaatatttgaaggctgaattttacatccagctaaactatcaaaggcatgcaaagtccatgttattcttaggccttcaaggcctcggccatttttctacagaaaagcc

SEQ ID NO: 487221 - DNA, 120 bp, Artificial Sequence
  ENSG00000162591_57 (sequence is synthesized)
tgattttaaaatgctcttagagacgttctccagccagaagagaaagaagccaggagggtgctctgagatattcagtcaccacagttcccaaatggcctaggaattcagagagtcagaata

SEQ ID NO: 487222 - DNA, 120 bp, Artificial Sequence
  ENSG00000162591_58 (sequence is synthesized)
tcaccattactccccaatgggaacccccgacagtctcagcatggtgtgagggtgtggacggggggcctggcaggtaccaatcactcatcccgctcagtgaagacacagtgttcagctacg

SEQ ID NO: 487223 - DNA, 120 bp, Artificial Sequence
  ENSG00000162591_59 (sequence is synthesized)
gaagccataaggcaggccgagcttctgcccatccggaggaaatctcagctatccaacggcggtcaggagcagaggaaaataaagcagaataactagaaaacacgctcacagatcctaatg

SEQ ID NO: 487224 - DNA, 120 bp, Artificial Sequence
  ENSG00000162591_60 (sequence is synthesized)
ttaacggttacaaatgacgacggaaaaacaaactcctgaccatatattatatagtttcaagcagcaagaaggaggatattgaacattctcaacacacataataaacgcttgagatgatga

SEQ ID NO: 487225 - DNA, 120 bp, Artificial Sequence
  ENSG00000162591_61 (sequence is synthesized)
tatgctcattaccctgatttgatcactagacatcccatgtatcaaaacatcactgtgtatccgatgaatatctacaattattgtcaattaaaaacatcattaaaaacagactagactgca

SEQ ID NO: 487226 - DNA, 120 bp, Artificial Sequence
  ENSG00000162591_62 (sequence is synthesized)
gagaacttaaaggcgaggggcggggcgcgcccggcccagagcggctcccgggcggcgccgagcggagcggatcccggggctgggattgcgcgcccgcccggaacccagaaccagcccgag

SEQ ID NO: 487227 - DNA, 80 bp, Artificial Sequence
  ENSG00000162591_63 (sequence is synthesized)
ttggtcctcgccccctcccgcccgccggcctaccaggccatgggggcgtcccgggaccgcgggctggccgcgctctggtg

SEQ ID NO: 487228 - DNA, 120 bp, Artificial Sequence
  ENSG00000162591_64 (sequence is synthesized)
ggtgccttgggctcctggggggcctggcgcgcgtcgcgggcacgcactaccgctacctctggaggggctgctacccatgtcacctgggccaggccggctaccccgtgagcgccggtgacc

SEQ ID NO: 487229 - DNA, 120 bp, Artificial Sequence
  ENSG00000162591_65 (sequence is synthesized)
gacttccctgatctgccagctgtggactgggggacatcaagggggctgtggcccctccagcccagagggccccacctgaggataggagggtctcacctgaggataggagggacccacctg

SEQ ID NO: 487230 - DNA, 120 bp, Artificial Sequence
  ENSG00000162591_66 (sequence is synthesized)
aggataggaggggctcacctgaggatagcaggggctcacctgaggataggagggacccacctgaggataggaggggctcacctgaggataagaggggctcacctgaggataggaggggct

SEQ ID NO: 487231 - DNA, 120 bp, Artificial Sequence
  ENSG00000162591_67 (sequence is synthesized)
cacctgaggataggagggacccacctgaggataggaggggctcacctgaggatagcaggggctcacctgaggataggagggacccacctgaggataggaggggctcacctgctggggctg

SEQ ID NO: 487232 - DNA, 120 bp, Artificial Sequence
  ENSG00000162591_68 (sequence is synthesized)
cttacctggccttgtggctctcaggcctgttgtgccctgagggggcatccctgaacactggctcctgtttgccctcctggggcggggcaggaactcggtggtgactctggacgtgtgcct

SEQ ID NO: 487233 - DNA, 120 bp, Artificial Sequence
  ENSG00000162591_69 (sequence is synthesized)
gcccaaggtcttagctcccgcacacacccaggcagaaggcttcactccacctgggctctgccgcgggcccctaggcccaggctccttggcgcggggaaggcaaggatgatgctcaggttt

SEQ ID NO: 487234 - DNA, 120 bp, Artificial Sequence
  ENSG00000162591_70 (sequence is synthesized)
gtgccaagggcacattcgggcctcactgtgaggggcgctgtgcctgccggtggggaggcccctgccaccttgccaccggggcctgcctctgccctccggggtggcggggggctccaggtg

SEQ ID NO: 487235 - DNA, 120 bp, Artificial Sequence
  ENSG00000162591_71 (sequence is synthesized)
gaggacgggcaggagggggcttttctcgggcccctggattggcgggttttactcactctgggcaaactggacatttctgccaccgtgtgcccttgtctcgtggtaaccggcgtccttcag

SEQ ID NO: 487236 - DNA, 120 bp, Artificial Sequence
  ENSG00000162591_72 (sequence is synthesized)
gcactgcgagctgggtgagtgtgcggggccagcgggaccccagcatcccctcagggaggtgccctgggctgccatagggctgggcaaggctggtgccgaaggactgcccaccctgccctg

SEQ ID NO: 487237 - DNA, 120 bp, Artificial Sequence
  ENSG00000162592_0 (sequence is synthesized)
gatctcctcccactgcaccagccagcaggttcatgttcgaggccatcttcccctccacaccccaagccaggctgaagagagatccacgggaaaagccgggcctgtcctcattcaggtcca

SEQ ID NO: 487238 - DNA, 120 bp, Artificial Sequence
  ENSG00000162592_1 (sequence is synthesized)
cattcaggcaacaaagctcacttggtctttgcatcccacgcctcatgttacctaaggaggccagcccatctcagaggcacagttcgatgtccagctcgatggccagggccctggtgctcc

SEQ ID NO: 487239 - DNA, 120 bp, Artificial Sequence
  ENSG00000162592_2 (sequence is synthesized)
tccagagcatggccagccgggacgcccggtgcccagaatggaaaccgcaccaaaagccacgcacgctcagcaagtcggtccagaccatcagccgctactacaggaagacgagtgaaccca

SEQ ID NO: 487240 - DNA, 120 bp, Artificial Sequence
  ENSG00000162592_3 (sequence is synthesized)
aggatgccgccagcctcaccggcttcatgtccaaaatggaacttcgaagggtcttccccacgcatcctgactgcccccagttcagcaccagggccacatccatgtcccactgtggttcac

SEQ ID NO: 487241 - DNA, 120 bp, Artificial Sequence
  ENSG00000162592_4 (sequence is synthesized)
ccactgaggccgatttgtccggagagattgacaacagctcggagacctggagaggcacccaggacctgttcttggccaggcggggctcagacacgaacgtggacgggtacctccttccct

SEQ ID NO: 487242 - DNA, 120 bp, Artificial Sequence
  ENSG00000162592_5 (sequence is synthesized)
tcagtaagagcatctgcgagttcgattacttgcggaagaggagaaaatcccagactttgagtccggtcaccagcagctcagtcgcatctcagagctgcctgagaaagaggatgccctggt

SEQ ID NO: 487243 - DNA, 120 bp, Artificial Sequence
  ENSG00000162592_6 (sequence is synthesized)
acctctcagtcatccacgagaaggatcactgcctgtctgagctggagatacaggttcagaagaaagacgaggagatcctgctgctccaggaggagagggaggccctgaagatgcagctga

SEQ ID NO: 487244 - DNA, 120 bp, Artificial Sequence
  ENSG00000162592_7 (sequence is synthesized)
aatgccttctgaaaggcaaaggccaagagacatccatgtccccaggcaggagggagcagctctcagacgcttcgctgaagctgggcaggctgagcctcctgaaggccttctccagacatg

SEQ ID NO: 487245 - DNA, 120 bp, Artificial Sequence
  ENSG00000162592_8 (sequence is synthesized)
ggaggacgagggcctggaaggggagcccgatggggtggaggacacgggtgcctggggaggtgtgagccagatgggatccgtgcatgaggagggaagcgaggaggaggaagaggaggaagg

SEQ ID NO: 487246 - DNA, 120 bp, Artificial Sequence
  ENSG00000162592_9 (sequence is synthesized)
ggacagggatgaggactcagaggaaagggagctgccggaggaagaggagatccccaggagaagggcctcctccctggccgagtcgtttgaggaggagctgctggcccagctggaggagta

SEQ ID NO: 487247 - DNA, 120 bp, Artificial Sequence
  ENSG00000162592_10 (sequence is synthesized)
cgagcaggtcatcctggacttccagttcaacctggaggccaccaggaccagatactcccttgcaacaggagtgattgcgtctttacaacaacaagtggatttccaagaaacccagctgcg

SEQ ID NO: 487248 - DNA, 120 bp, Artificial Sequence
  ENSG00000162592_11 (sequence is synthesized)
aaagatcaatacggaaaatgagacgctgcagaaggagctccgagagcggaggcagcagctacaagccatgaccgacaagttctccaacctccgagaagataagaaacaccaagagatgat

SEQ ID NO: 487249 - DNA, 120 bp, Artificial Sequence
  ENSG00000162592_12 (sequence is synthesized)
ggggctcattgaaaaggacaaccagctcctccgacagcaagtgtcggaactggagagaaagctcaccaagcgggactgtgtcatctcagagttggacaccaaggtcagccagctgcagga

SEQ ID NO: 487250 - DNA, 120 bp, Artificial Sequence
  ENSG00000162592_13 (sequence is synthesized)
gcaggtggaactggaccagaaccacctgcagaggtggaagcagctgcaggaggatttgcagagcaagaaggagatgattcagcaggcagagcagcacacccgcgtggccctggagagctc

SEQ ID NO: 487251 - DNA, 120 bp, Artificial Sequence
  ENSG00000162592_14 (sequence is synthesized)
ccagtccaggctcgagaggttaaggaataagatcatccaggccacctttagcatctccgggaccaagtccttggccaacgagatctctgacaatgacatcctggaagccctgcagagaat

SEQ ID NO: 487252 - DNA, 120 bp, Artificial Sequence
  ENSG00000162592_15 (sequence is synthesized)
tatctcagagagaagcgactactataatcagctgaagcagaaaggcgtcaaagtgccccccctgcaacagtcagaggccttcctgaccagcaaatccaagaaggggacctccaagtaggc

SEQ ID NO: 487253 - DNA, 120 bp, Artificial Sequence
  ENSG00000162592_16 (sequence is synthesized)
ccagccaggcccccaaatacggtcagcccagcagaggccggggcccagctccagaaccacccgcccccaccatgcgtcctgctctcagactcagaattaaaccccggtgttggcactgtc

SEQ ID NO: 487254 - DNA, 120 bp, Artificial Sequence
  ENSG00000162592_17 (sequence is synthesized)
cactggtggcaggcagatgctctcccactccctggaccctgcagcagcctggaaggaggcgccctccccggtgcccccgccatgagcattagagccctctgccctgggggtgccccgcag

SEQ ID NO: 487255 - DNA, 120 bp, Artificial Sequence
  ENSG00000162592_18 (sequence is synthesized)
gaatcctaaaatagcccgcagcccgctgggatgactcctgaaacaccagcgttggcactgacatttacatgagaatgggcgtccgcaggccgtgctgcctgcccgaggacaggtgttcca

SEQ ID NO: 487256 - DNA, 120 bp, Artificial Sequence
  ENSG00000162592_19 (sequence is synthesized)
ggatgcggtccctccgcacgcgcacgggcagctcgcaggccctgcagtaaagggtctccaccacagacgtgtccccagagtcactgtgctcaatcaggtgcttcaccaccaggttggagt

SEQ ID NO: 487257 - DNA, 68 bp, Artificial Sequence
  ENSG00000162592_20 (sequence is synthesized)
aggagttttatcaataaaggccctgaaggcccaggttgcttttcctctctcatctccacctgaagaga

SEQ ID NO: 487258 - DNA, 120 bp, Artificial Sequence
  ENSG00000162592_21 (sequence is synthesized)
gcccaggttgcttttcctctctcatctccacctgaagagaaatacccacaggtgtggatggggcaggcccccttcaaatttccttcagtcagcaagcagagaagcctttcttcccattca

SEQ ID NO: 487259 - DNA, 120 bp, Artificial Sequence
  ENSG00000162592_22 (sequence is synthesized)
gcctctgcctgcacctgctgggcccctgagctcgaggcctgcttcttgcagggtcgctgcttgtgccctgcggaattccctcccgggactgtctgcctcctgaggactcacacagaaagg

SEQ ID NO: 487260 - DNA, 120 bp, Artificial Sequence
  ENSG00000162592_23 (sequence is synthesized)
cctccgggcctcccttgtgcagaactagccctgccttccctgacagcataggctgcagtccccccaggaccgtggccccttgtctttagtaaaaatcgtagttgaaagttttgtcccctt

SEQ ID NO: 487261 - DNA, 120 bp, Artificial Sequence
  ENSG00000162592_24 (sequence is synthesized)
agaccccccgggacactgctcccgcagacaggtgtgcctgtttccatttaccaagaggaaattcccagcaccatgtctcctttcttgccttaactggaggaaacctagagtctgtagtga

SEQ ID NO: 487262 - DNA, 120 bp, Artificial Sequence
  ENSG00000162592_25 (sequence is synthesized)
actggaggaaacctagagtctgtagtgaccagctcccctcaacctcaggaaggtggagaatctcctccctcctctcagtttaaagatggagaaactgggccgggcgcagtggctcacgcc

SEQ ID NO: 487263 - DNA, 88 bp, Artificial Sequence
  ENSG00000162592_26 (sequence is synthesized)
gggaggctgaggcagagaattgcttgaatttggtaggcagaggttacagtgagctgaaatcgtgccactgcactccagcttgggagat

SEQ ID NO: 487264 - DNA, 120 bp, Artificial Sequence
  ENSG00000162592_27 (sequence is synthesized)
aaaaaaaaagagagatgggaaaactgaggctccaggaggggacaagcaaccaggtgtgcagagacagcatcaggatgaccccctcgtcccgactcccagctccggctcgtttgtcctggg

SEQ ID NO: 487265 - DNA, 120 bp, Artificial Sequence
  ENSG00000162592_28 (sequence is synthesized)
tgtctcggccagagcttccgcaccttcctgcactccctcagcacgcgctgtgctgggtgtgggcgccccatcgtgttcacagcagcaccacactgtgtcctcaaaatgagggtgacaaga

SEQ ID NO: 487266 - DNA, 120 bp, Artificial Sequence
  ENSG00000162592_29 (sequence is synthesized)
gttaggagacagattggagtctgtctgggcagataggggtttccgagggaagtctcggaagggtggatgtcgtcatcgaagacgccagaggagctcggcagggaagggtctcatttctca

SEQ ID NO: 487267 - DNA, 120 bp, Artificial Sequence
  ENSG00000162592_30 (sequence is synthesized)
aggacagccctgctccctgacaggctctggttctagtatctggttagctgcatcaagcaggtccccatggcctaaaatgacctccagaccccctgctttgacaaagctcctcacccctgt

SEQ ID NO: 487268 - DNA, 120 bp, Artificial Sequence
  ENSG00000162592_31 (sequence is synthesized)
ccatcctcaccccagtgggtggcagttacgccggcatggaactcagactcaccggcacgcatgacttccaaccgtccacacatctttgcacccacagtatctgcttcagagaatgtattc

SEQ ID NO: 487269 - DNA, 120 bp, Artificial Sequence
  ENSG00000162594_0 (sequence is synthesized)
aggcagtgaggaaagaagacatgacacagccaacaagggtggcagcctggctctgaagtggaattatgtgcttcaaacaggttgaaagagggaaacagtcttttcctgcttccagacatg

SEQ ID NO: 487270 - DNA, 120 bp, Artificial Sequence
  ENSG00000162594_1 (sequence is synthesized)
aatcaggtcactattcaatgggatgcagtaatagccctttacatactcttcagctggtgtcatggaggaattacaaatataaactgctctggccacatctgggtagaaccagccacaatt

SEQ ID NO: 487271 - DNA, 120 bp, Artificial Sequence
  ENSG00000162594_2 (sequence is synthesized)
tttaagatgggtatgaatatctctatatattgccaagcagcaattaagaactgccaaccaaggaaacttcatttttataaaaatggcatcaaagaaagatttcaaatcacaaggattaat

SEQ ID NO: 487272 - DNA, 120 bp, Artificial Sequence
  ENSG00000162594_3 (sequence is synthesized)
aaaacaacagctcggctttggtataaaaactttctggaaccacatgcttctatgtactgcactgctgaatgtcccaaacattttcaagagacactgatatgtggaaaagacatttcttct

SEQ ID NO: 487273 - DNA, 120 bp, Artificial Sequence
  ENSG00000162594_4 (sequence is synthesized)
ggatatccgccagatattcctgatgaagtaacctgtgtcatttatgaatattcaggcaacatgacttgcacctggaatgctgggaagctcacctacatagacacaaaatacgtggtacat

SEQ ID NO: 487274 - DNA, 120 bp, Artificial Sequence
  ENSG00000162594_5 (sequence is synthesized)
gtgaagagtttagagacagaagaagagcaacagtatctcacctcaagctatattaacatctccactgattcattacaaggtggcaagaagtacttggtttgggtccaagcagcaaacgca

SEQ ID NO: 487275 - DNA, 120 bp, Artificial Sequence
  ENSG00000162594_6 (sequence is synthesized)
ctaggcatggaagagtcaaaacaactgcaaattcacctggatgatatagtgataccttctgcagccgtcatttccagggctgagactataaatgctacagtgcccaagaccataatttat

SEQ ID NO: 487276 - DNA, 120 bp, Artificial Sequence
  ENSG00000162594_7 (sequence is synthesized)
tgggatagtcaaacaacaattgaaaaggtttcctgtgaaatgagatacaaggctacaacaaaccaaacttggaatgttaaagaatttgacaccaattttacatatgtgcaacagtcagaa

SEQ ID NO: 487277 - DNA, 120 bp, Artificial Sequence
  ENSG00000162594_8 (sequence is synthesized)
ttctacttggagccaaacattaagtacgtatttcaagtgagatgtcaagaaacaggcaaaaggtactggcagccttggagttcactgttttttcataaaacacctgaaacagttccccag

SEQ ID NO: 487278 - DNA, 120 bp, Artificial Sequence
  ENSG00000162594_9 (sequence is synthesized)
gtcacatcaaaagcattccaacatgacacatggaattctgggctaacagttgcttccatctctacagggcaccttacttctgacaacagaggagacattggacttttattgggaatgatc

SEQ ID NO: 487279 - DNA, 120 bp, Artificial Sequence
  ENSG00000162594_10 (sequence is synthesized)
gtctttgctgttatgttgtcaattctttctttgattgggatatttaacagatcattccgaactgggattaaaagaaggatcttattgttaataccaaagtggctttatgaagatattcct

SEQ ID NO: 487280 - DNA, 120 bp, Artificial Sequence
  ENSG00000162594_11 (sequence is synthesized)
tacagagataaaagaaatcttcatcccagaacacaagcctacagactacaagaaggagaatacaggacccctggagacaagagactacccgcaaaactcgctattcgacaatactacagt

SEQ ID NO: 487281 - DNA, 120 bp, Artificial Sequence
  ENSG00000162594_12 (sequence is synthesized)
tgtatatattcctgatctcaacactggatataaaccccaaatttcaaattttctgcctgagggaagccatctcagcaataataatgaaattacttccttaacacttaaaccaccagttga

SEQ ID NO: 487282 - DNA, 120 bp, Artificial Sequence
  ENSG00000162594_13 (sequence is synthesized)
ttccttagactcaggaaataatcccaggttacaaaagcatcctaattttgctttttctgtttcaagtgtgaattcactaagcaacacaatatttcttggagaattaagcctcatattaaa

SEQ ID NO: 487283 - DNA, 120 bp, Artificial Sequence
  ENSG00000162594_14 (sequence is synthesized)
tcaaggagaatgcagttctcctgacatacaaaactcagtagaggaggaaaccaccatgcttttggaaaatgattcacccagtgaaactattccagaacagaccctgcttcctgatgaatt

SEQ ID NO: 487284 - DNA, 120 bp, Artificial Sequence
  ENSG00000162594_15 (sequence is synthesized)
tgtctcctgtttggggatcgtgaatgaggagttgccatctattaatacttattttccacaaaatattttggaaagccacttcaataggatttcactcttggaaaagtagagctgtgtggt

SEQ ID NO: 487285 - DNA, 120 bp, Artificial Sequence
  ENSG00000162594_16 (sequence is synthesized)
caaaatcaatatgagaaagctgccttgcaatctgaacttgggttttccctgcaatagaaattgaattctgcctctttttgaaaaaaatgtattcacatacaaatcttcacatggacacat

SEQ ID NO: 487286 - DNA, 120 bp, Artificial Sequence
  ENSG00000162594_17 (sequence is synthesized)
gttttcatttcccttggataaatacctaggtaggggattgctgggccatatgataagcatatgtttcagttctaccaatcttgtttccagagtagtgacatttctgtgctcctaccatca

SEQ ID NO: 487287 - DNA, 120 bp, Artificial Sequence
  ENSG00000162594_18 (sequence is synthesized)
ccatgtaagaattcccgggagctccatgcctttttaattttagccattcttctgcctcatttcttaaaattagagaattaaggtcccgaaggtggaacatgcttcatggtcacacataca

SEQ ID NO: 487288 - DNA, 120 bp, Artificial Sequence
  ENSG00000162594_19 (sequence is synthesized)
ggcacaaaaacagcattatgtggacgcctcatgtattttttatagagtcaactatttcctctttattttccctcattgaaagatgcaaaacagctctctattgtgtacagaaagggtaaa

SEQ ID NO: 487289 - DNA, 120 bp, Artificial Sequence
  ENSG00000162594_20 (sequence is synthesized)
aacagctctctattgtgtacagaaagggtaaataatgcaaaatacctggtagtaaaataaatgctgaaaattttcctttaaaatagaatcattaggccaggcgtggtggctcatgcttgt

SEQ ID NO: 487290 - DNA, 120 bp, Artificial Sequence
  ENSG00000162594_21 (sequence is synthesized)
aatgggaggccagtcagggcccagacaattttattccgggactttgagccttcagggaagaagacttcctcttctagtctgcctgttatgacaatttgagccttatgctatgggagccac

SEQ ID NO: 487291 - DNA, 120 bp, Artificial Sequence
  ENSG00000162594_22 (sequence is synthesized)
tatgaagatcctaagagtggagtcaatccaggggaagaaaactgagagctggacctgggcagtatcatttgagcccagggtcaagcgatcactgaacttagagctactctagacctcttc

SEQ ID NO: 487292 - DNA, 120 bp, Artificial Sequence
  ENSG00000162594_23 (sequence is synthesized)
ttttgcctcccaccatgattctgaggccttaccagccatgtggaactgttaaagaatttgacaccaattttacatatgtgcaacagtcagaattctacttggagccaaacattaagtacg

SEQ ID NO: 487293 - DNA, 120 bp, Artificial Sequence
  ENSG00000162595_0 (sequence is synthesized)
acacaatcgggcttcctagccgctggcggacccgatggggcgtcctgcgagggttcggcgagggttctgccaggatagtagcattgcgcccaaggagtgagaggcacccggggctactgg

SEQ ID NO: 487294 - DNA, 120 bp, Artificial Sequence
  ENSG00000162595_1 (sequence is synthesized)
agccagaccctcaacccgccctagtgggaggcgaagaacaacgaaagcctcgtattcccatttctctaatggctaatgacattaaagtatcatttgtggaaaagattatctgtcctgcat

SEQ ID NO: 487295 - DNA, 120 bp, Artificial Sequence
  ENSG00000162595_2 (sequence is synthesized)
taaactgcttttggactttcgtctaaaatcagttggaccggtttttgttggcaaagttttgcctgaagcttattccaacagatgccaagcggacctcgcgccgctctgcgttgggccagc

SEQ ID NO: 487296 - DNA, 120 bp, Artificial Sequence
  ENSG00000162595_3 (sequence is synthesized)
ccctcacagctggtttcttaccacgtattgcgcaagcggaatctatgcctgttacccacactccctgcgcccccgcaccccgctcctgtgcgcaagtcggaatataaaaccgcggaggag

SEQ ID NO: 487297 - DNA, 120 bp, Artificial Sequence
  ENSG00000162595_4 (sequence is synthesized)
tgagctcttggggtgtccagttggttgccgcggcagtctctccgagcagcgcatttgtcttctaggctgcttggttcgtgcctccgagaaaggggtctcctgctgccagctaagtgtggg

SEQ ID NO: 487298 - DNA, 120 bp, Artificial Sequence
  ENSG00000162595_5 (sequence is synthesized)
agaacttgtgcacgtatctcccctccgaatcccaacgatgggtaacgccagctttggctccaaggaacagaagctgctgaagcggttgcggcttctgcccgccctgcttatcctccgcgc

SEQ ID NO: 487299 - DNA, 120 bp, Artificial Sequence
  ENSG00000162595_6 (sequence is synthesized)
cttcaagccccacaggaagatcagagattaccgcgtcgtggtagtcggcaccgctggtgtggggaaaagtacgctgctgcacaagtgggcgagcggcaacttccgtcatgagtacctgcc

SEQ ID NO: 487300 - DNA, 120 bp, Artificial Sequence
  ENSG00000162595_7 (sequence is synthesized)
gaccattgaaaatacctactgccagttgctgggctgcagccacggtgtgctttccctgcacatcaccgacagcaagagtggcgacggcaaccgcgctctgcagcgccacgttatagcccg

SEQ ID NO: 487301 - DNA, 120 bp, Artificial Sequence
  ENSG00000162595_8 (sequence is synthesized)
cttcgtcctggtctactcagtcaccaagaaggaaaccctggaagagctgaaggccttctatgagctgatctgcaagatcaaaggtaacaacctgcataagttccccatcgtgctggtggg

SEQ ID NO: 487302 - DNA, 120 bp, Artificial Sequence
  ENSG00000162595_9 (sequence is synthesized)
caataaaagtgatgacacccaccgggaggtggccctgaatgatggtgccacctgtgcgatggagtggaattgcgccttcatggagatttcagccaagaccgatgtgaatgtgcaggagct

SEQ ID NO: 487303 - DNA, 120 bp, Artificial Sequence
  ENSG00000162595_10 (sequence is synthesized)
gttccacatgctgctgaattacaagaaaaagcccaccaccggcctccaggagcccgagaagaaatcccagatgcccaacaccactgagaagctgcttgacaagtgcataatcatgtgagc

SEQ ID NO: 487304 - DNA, 120 bp, Artificial Sequence
  ENSG00000162595_11 (sequence is synthesized)
cctgggccttaagagccagctcttcctatcctgtagcgtgtagaaaacgtggactcatttcactatgttacatgtacatggttgattttgtgctgttgtttggactgtaacatccatgtt

SEQ ID NO: 487305 - DNA, 120 bp, Artificial Sequence
  ENSG00000162595_12 (sequence is synthesized)
gtcaatacgtataccttgtaagtggataacttttctttttcccaggccagagaattcaaattgttaaaacattggcatttgaagaggagaacaaaatgtagcatgatgtatttaaagtaa

SEQ ID NO: 487306 - DNA, 120 bp, Artificial Sequence
  ENSG00000162595_13 (sequence is synthesized)
ggcctttagtaatgaatgtaatgagagaaaatgttttgaaaagaacaaaacatcaaaatgaatagaaagaaaaattggaaggcgtccttttggtaacccgattattgtgtattaccttta

SEQ ID NO: 487307 - DNA, 120 bp, Artificial Sequence
  ENSG00000162595_14 (sequence is synthesized)
aatatttcacatcctgtaagtgcttaatcatatcttttaattgtgtatttaagaaaagtgttttcacaacaaaagcttttgataaattgctgcgtgacatatactaaataaaaaaatgaa

SEQ ID NO: 487308 - DNA, 120 bp, Artificial Sequence
  ENSG00000162595_15 (sequence is synthesized)
tatgttgatcattaggggtgtgggagcagagaaaattgtgaaagtgactctcactaaagatgttagtagtttctcatgtcatttaaaaatgtttgagtattctgcatagcagtttgtaaa

SEQ ID NO: 487309 - DNA, 120 bp, Artificial Sequence
  ENSG00000162595_16 (sequence is synthesized)
agtgtaacagcttattgacttaataaagcttttcctgcatgcaatcagctgtaagaatttgtctcaccagaaaacaaaacattgcccattgtattaaaatttaaaccatatctgttaaaa

SEQ ID NO: 487310 - DNA, 120 bp, Artificial Sequence
  ENSG00000162598_0 (sequence is synthesized)
gggtctgagagtgtcagcttcctggggagaagcacggaccgcgcacctctgagctgccagggtggggacgctgccctagcgggatctgaagggattttgaaaggaatcatgtcttcagcc

SEQ ID NO: 487311 - DNA, 120 bp, Artificial Sequence
  ENSG00000162598_1 (sequence is synthesized)
tggaagactccccgtggatcagatgcaatgcctgagatcatggtgaaaatcattggaagtaaacactttcaatacctcgtggagaagccaaagatcaaggagaatgacagcttgaaaaca

SEQ ID NO: 487312 - DNA, 120 bp, Artificial Sequence
  ENSG00000162598_2 (sequence is synthesized)
gaaacccaaacaatgcaccagaaaccaatgactgataatgcaaggcagatgagcagagacaccccagttcccattaacttcactgatcagcaaaccactgataatccagatgatgtgaaa

SEQ ID NO: 487313 - DNA, 120 bp, Artificial Sequence
  ENSG00000162598_3 (sequence is synthesized)
gagaaaaagcacccagagaacaaccagaaatcagaaaacaaccagaaactactaacaggggcaaacagtagcagattcctggatggcaatattcccagtcaagcaaatgtccactgcagc

SEQ ID NO: 487314 - DNA, 120 bp, Artificial Sequence
  ENSG00000162598_4 (sequence is synthesized)
tctgtaccaaccggagaccagtccttatcctatgtgcatggcattcccaggagaaagcttagagactggtccttggaacagatggtgagaggcagctctgaccaacctgaggatattggc

SEQ ID NO: 487315 - DNA, 120 bp, Artificial Sequence
  ENSG00000162598_5 (sequence is synthesized)
cagagcccaagtgggacaacaaatgaagacgcttttcttcttgccctggtcagaagagaactcaagtcacgtcctttgagttccaacttattagaaaagcttcagaaagagctgaagatc

SEQ ID NO: 487316 - DNA, 120 bp, Artificial Sequence
  ENSG00000162598_6 (sequence is synthesized)
ctggacccaatctcttcaggatttcttctccaatctcagctgagccgcctctttttgaagcatgaagtccctctacagttaccaacagttaaaatcctttgtcagagattttctaagagg

SEQ ID NO: 487317 - DNA, 120 bp, Artificial Sequence
  ENSG00000162598_7 (sequence is synthesized)
ggttctcctgaaatggtgaattatgaaaagctactctggtttttaaacagtgcagcatcagattatccacagcaaaataaagcagctgcagacctgagaaaaactgagagtcatggcact

SEQ ID NO: 487318 - DNA, 120 bp, Artificial Sequence
  ENSG00000162598_8 (sequence is synthesized)
atagacaatctcaatctgagttttcgaaaagaagatcgctcgttctctggctgcctccctctacctaaggtcagggctatatgtgggaagcatggattatatctgaccctgagcctgctg

SEQ ID NO: 487319 - DNA, 120 bp, Artificial Sequence
  ENSG00000162598_9 (sequence is synthesized)
gaaacattgcttaaccatcaagatttgggttaccaaaatgaaataaaatggcagaattttgttgagatgctgaccagagcttcttctgatttgttatctgatttgcctacagggaagaat

SEQ ID NO: 487320 - DNA, 120 bp, Artificial Sequence
  ENSG00000162598_10 (sequence is synthesized)
gaaaagaaagcccctgcccctccaatggagcctgaagtccccgagatgtctcaaagcaaaactgaacatatgaaaactccagaagaggagctgcagccagaaagctctcctgctgaaact

SEQ ID NO: 487321 - DNA, 120 bp, Artificial Sequence
  ENSG00000162598_11 (sequence is synthesized)
tcagcctgcaaagatcctctgaaacctttaaagatcaggccagtctcccagcccttcgtgaatccagctgtgaagaacaaggctgaggaatgtgagacgtggatagacaggttcaggaag

SEQ ID NO: 487322 - DNA, 120 bp, Artificial Sequence
  ENSG00000162598_12 (sequence is synthesized)
ctggaaaatgccctctacctgtgtgatctgagtaacacaggagttctggagaaggaacgagccagacgcctcattcacaactacaatctcatttacaacctgtccctgagccctcagaaa

SEQ ID NO: 487323 - DNA, 120 bp, Artificial Sequence
  ENSG00000162598_13 (sequence is synthesized)
atcgaccaggccttgcgcagattccgttcgggagaaaatatgctcttggagccagcactgcggtacttaaaggagctatgataacaagcccatattgtgagaacagatgtttcccttatc

SEQ ID NO: 487324 - DNA, 120 bp, Artificial Sequence
  ENSG00000162598_14 (sequence is synthesized)
tccctttttacccagacacatgtttctccccagcctaagtgtagtggcggaggcattgtcagagtggaggccgatgcagctattgtagatgcttttgatttggacttagtttctggctat

SEQ ID NO: 487325 - DNA, 120 bp, Artificial Sequence
  ENSG00000162598_15 (sequence is synthesized)
gatgctcactcataagcagttcaaagtgatcagaggaaacctagttttatcttttgatgtggcaagaacccagctacttagaatctccttctgttttaataaaacttattattaatatta

SEQ ID NO: 487326 - DNA, 120 bp, Artificial Sequence
  ENSG00000162598_16 (sequence is synthesized)
attccatacagctgattcttggactgcgacataatttaaggctctaagaaggtggctgcacttggatctcttacaaagcatcatattttcaatgaggagaccattgaagtgatgtcacgt

SEQ ID NO: 487327 - DNA, 120 bp, Artificial Sequence
  ENSG00000162598_17 (sequence is synthesized)
atcaaactatgttgtttcaaaccccacaattccacatagtaaaaaaaacattaaatgttgccacttccccacagtgcctggaacctagtagacctatgaacatcatttttggataggtaa

SEQ ID NO: 487328 - DNA, 120 bp, Artificial Sequence
  ENSG00000162598_18 (sequence is synthesized)
atcatcccttctcctggtcattattctaggaaggatttccataccataagaaaaataaaagtattaccaatacactatcttaatcttaagcagtagaagaaacatttcaagtgaggtttt

SEQ ID NO: 487329 - DNA, 120 bp, Artificial Sequence
  ENSG00000162598_19 (sequence is synthesized)
ctgaacaagtccaatattttctgcagtacaaaactaaacaacattacactgtctccaggggtattttccaaaagtccaagatagaagttttgaggaaggactccttgggacaaagcgttt

SEQ ID NO: 487330 - DNA, 120 bp, Artificial Sequence
  ENSG00000162598_20 (sequence is synthesized)
tgggaataggtaacatcctttgctctgcctggacaggaaaaccaggtggaactttccatcagctcccatagttcttctgttcttaacatcccccctgactttgcaccactcacatagcac

SEQ ID NO: 487331 - DNA, 120 bp, Artificial Sequence
  ENSG00000162598_21 (sequence is synthesized)
gtatcacaccatacaggtagcatgagctcattgaagaaacactggcctggagcttcagagacaatgtgctcccagcaccatcactaatactgggtgatcagggtactgagtttccaatct

SEQ ID NO: 487332 - DNA, 120 bp, Artificial Sequence
  ENSG00000162598_22 (sequence is synthesized)
gtgtgccagacaaaatgaacaagttaggtcaaggggaaaatcaaacagaaaggcctctgagcatccctttctatccattttataaaatgaggtgcttcatgtactcttatagacaaggcc

SEQ ID NO: 487333 - DNA, 120 bp, Artificial Sequence
  ENSG00000162598_23 (sequence is synthesized)
ttaagaacaaaactatttggatccactgaaataaatggtctctaagggtcttctagtctgacctgctttggtttttataatccttgagttgtccagaaaaatgactcttgaaaccgactg

SEQ ID NO: 487334 - DNA, 120 bp, Artificial Sequence
  ENSG00000162598_24 (sequence is synthesized)
accaccctttctagaacccttggactttctggctgccttttaggtcaaaagagcaagcaaatagacacggctttctcattctaacaaaatgccaagtaaggacaattagaatagtaggtc

SEQ ID NO: 487335 - DNA, 120 bp, Artificial Sequence
  ENSG00000162598_25 (sequence is synthesized)
aaaaatttaatatgccttgagcaactattgtgtttgaggaacctgacatactttgtttggtctatctctgacaattcaataagacaggtttcacagctctgtttcacagatgaggaaaca

SEQ ID NO: 487336 - DNA, 120 bp, Artificial Sequence
  ENSG00000162598_26 (sequence is synthesized)
gactcagaggacaagaaagctgtttggttgtgccagttaatatctgctagaaggttcgtgcttcctgtgaaggactggtcaactgatactgagaaggtctcactttacccttcatctctg

SEQ ID NO: 487337 - DNA, 120 bp, Artificial Sequence
  ENSG00000162598_27 (sequence is synthesized)
ggactgctgaacattcaagaagcttccaaagtactttgaacaacggtctatgtgaaatggcatagggaggtcaggccactactacaagctgtgtcattgtgaacttctaataaccactgt

SEQ ID NO: 487338 - DNA, 120 bp, Artificial Sequence
  ENSG00000162598_28 (sequence is synthesized)
gttgggaaagtctggtgtcagtcttgaccagtgtcctccaaaaaaaccttcccaaatggatgtctgtggatagtggactggttatccttcagtgtgctctggagatgcttggtgtcaatt

SEQ ID NO: 487339 - DNA, 120 bp, Artificial Sequence
  ENSG00000162598_29 (sequence is synthesized)
gagtatgtcccaactcccccaaaaacctcaggctttaaggatggaaagggcacagaatgacagaggcaggttctcatcagctgggcagactctttcccagctgtgtggccctgaacaagt

SEQ ID NO: 487340 - DNA, 120 bp, Artificial Sequence
  ENSG00000162598_30 (sequence is synthesized)
ccctacttacctgagagcatcattcatattaaatgagataatgcatgcaaattgcccagtgctatgcctggcacatagacatgctccataagggaaactagcttattttagtcttataca

SEQ ID NO: 487341 - DNA, 120 bp, Artificial Sequence
  ENSG00000162598_31 (sequence is synthesized)
ggatttcattttaccccatccaatgggccaaatggttgaatgccttttccaggtacagacattttccaagcccacagatggttcaccgactgtgtggtcctggagggcacagaatatgtg

SEQ ID NO: 487342 - DNA, 120 bp, Artificial Sequence
  ENSG00000162598_32 (sequence is synthesized)
ttccacattcctgtctctcattctctgtcctgtacttactccacaaagtaaaccaatgaggttggcattaccatgcccattgtacaggtgagaaacagaggctcagggtagtgtatgtac

SEQ ID NO: 487343 - DNA, 120 bp, Artificial Sequence
  ENSG00000162598_33 (sequence is synthesized)
ttgcctaaggacttatagctgtgagtgactgagccaggattagaacccagtcttgcataactccaagttcctcaatgctgttggccacagttagagcaaataaaccatacaattctcttt

SEQ ID NO: 487344 - DNA, 77 bp, Artificial Sequence
  ENSG00000162598_34 (sequence is synthesized)
caacagcagtagcaactgcagaaactgatggcagaattttgttgagatgctgaccagagcttcttctgatttgttat

SEQ ID NO: 487345 - DNA, 90 bp, Artificial Sequence
  ENSG00000162599_0 (sequence is synthesized)
tttctccccccttctccctctttctcctctctcacccacactcacgcacacctccaaaccgcacacccagacgcacacgcataccccagc

SEQ ID NO: 487346 - DNA, 120 bp, Artificial Sequence
  ENSG00000162599_1 (sequence is synthesized)
cctccaaaccgcacacccagacgcacacgcataccccagcgcccggcagttatgtattctccgctctgtctcacccaggatgaatttcatcctttcatcgaagcacttctgccccacgtc

SEQ ID NO: 487347 - DNA, 120 bp, Artificial Sequence
  ENSG00000162599_2 (sequence is synthesized)
cgagcctttgcctacacatggttcaacctgcaggcccgaaaacgaaaatacttcaaaaaacatgaaaagcgtatgtcaaaagaagaagagagagccgtgaaggatgaattgctaagtgaa

SEQ ID NO: 487348 - DNA, 120 bp, Artificial Sequence
  ENSG00000162599_3 (sequence is synthesized)
aaaccagaggtcaagcagaagtgggcatctcgacttctggcaaagttgcggaaagatatccgacccgaatatcgagaggattttgttcttacagttacagggaaaaaacctccatgttgt

SEQ ID NO: 487349 - DNA, 120 bp, Artificial Sequence
  ENSG00000162599_4 (sequence is synthesized)
gttctttccaacccagaccagaaaggcaagatgcgaagaattgactgcctccgccaggcagataaagtctggaggttggaccttgttatggtgattttgtttaaaggtattccgctggaa

SEQ ID NO: 487350 - DNA, 120 bp, Artificial Sequence
  ENSG00000162599_5 (sequence is synthesized)
agtactgatggcgagcgccttgtaaagtccccacaatgctctaatccagggctctgtgtccaaccccatcacataggggtttctgttaaggaactcgatttatatttggcatactttgtg

SEQ ID NO: 487351 - DNA, 120 bp, Artificial Sequence
  ENSG00000162599_6 (sequence is synthesized)
catgcagcagattcaagtcaatctgaaagtcccagccagccaagtgacgctgacattaaggaccagccagaaaatggacatttgggcttccaggacagttttgtcacatcaggtgttttt

SEQ ID NO: 487352 - DNA, 120 bp, Artificial Sequence
  ENSG00000162599_7 (sequence is synthesized)
agtgtcactgagctagtaagagtgtcacagacaccaatagctgcaggaactggcccaaatttttctctctcagatttggaaagttcttcatactacagcatgagtccaggagcaatgagg

SEQ ID NO: 487353 - DNA, 120 bp, Artificial Sequence
  ENSG00000162599_8 (sequence is synthesized)
aggtctttacccagcacatcctctacgagctccacaaagcgcctcaagtctgtggaggatgaaatggacagtcctggtgaggagccattttatacaggccaagggcgctccccaggaagt

SEQ ID NO: 487354 - DNA, 120 bp, Artificial Sequence
  ENSG00000162599_9 (sequence is synthesized)
ggcagtcagtcaagtggatggcatgaagtggagccaggaatgccatctccaaccacactgaagaagtcggagaagtctggtttcagcagcccctccccttcacagacctcctccctggga

SEQ ID NO: 487355 - DNA, 120 bp, Artificial Sequence
  ENSG00000162599_10 (sequence is synthesized)
acggcgttcacacagcatcaccgacctgtcattacaggacccagagcaagtccgcatgcaacaccatcgactcttcatttcccgacatcacccattatccagcagcctgggccttacttc

SEQ ID NO: 487356 - DNA, 120 bp, Artificial Sequence
  ENSG00000162599_11 (sequence is synthesized)
aatttgtccaacttgtctgccctgatgctggtcagcaggctggacaggtggggttcctcaatcccaatgggagcagccaaggcaaggtgcacaacccattccttcccaccccaatgttgc

SEQ ID NO: 487357 - DNA, 120 bp, Artificial Sequence
  ENSG00000162599_12 (sequence is synthesized)
caccgccaccgccaccaccgatggccaggcctgtgcctctgccggtgccagacacaaagcctccaaccacgtcaacagaaggaggtgcagcctcccccacgtcaccaatcctggtacctg

SEQ ID NO: 487358 - DNA, 120 bp, Artificial Sequence
  ENSG00000162599_13 (sequence is synthesized)
ggataaaagttgcagcgtcccaccatccaccagacagaccacctgaccccttctcaactctgtaacatggacgcaacctcaacccagcgcagttacaacttcactatcagcggaagggga

SEQ ID NO: 487359 - DNA, 120 bp, Artificial Sequence
  ENSG00000162599_14 (sequence is synthesized)
gaaaaaccgattcaaatcaacttgtacatggaaacagcaagcattatggtcaaacagcaaaggccataaccttttgggatttttttttttttaaaatactttagggactgttgtaatttc

SEQ ID NO: 487360 - DNA, 120 bp, Artificial Sequence
  ENSG00000162599_15 (sequence is synthesized)
tcatatggtgctggaaatggttgggctttgtaacatttgaagtgtttccatggtagcgtgagcattaggtgacgtggctagcggaggactacccttgctcactgacttcctgttgtaaca

SEQ ID NO: 487361 - DNA, 120 bp, Artificial Sequence
  ENSG00000162599_16 (sequence is synthesized)
cactttccttacggagcctggctgtttcacagtatttcatgaatttacccacacaggtgtgatcctccttgagcattgaggaggcacatggagaactaaatcttttgtagtagctgagat

SEQ ID NO: 487362 - DNA, 120 bp, Artificial Sequence
  ENSG00000162599_17 (sequence is synthesized)
ctgcaatatataacgggacagtcaaagggcaatgtttttctgtaacatattggaaaaagaaaatgcagttatattccttttttatttgttcctttagtttgttttggttcagcagtcagc

SEQ ID NO: 487363 - DNA, 120 bp, Artificial Sequence
  ENSG00000162599_18 (sequence is synthesized)
agttaagtatataacatggcccgcaaggacaatgaatccactcacattgcagaacaattccgaaaatggcaaactactactactactgttcagttttttaaaagttttgaaatgctgcac

SEQ ID NO: 487364 - DNA, 120 bp, Artificial Sequence
  ENSG00000162599_19 (sequence is synthesized)
ttacatttaaaaaaacaacaacaacattttttcaacaatttcaacaatgacacaaaaattcacatggaaatggggaagatggtctgttttgacagaaactgacaggaatcaatcaaaaca

SEQ ID NO: 487365 - DNA, 120 bp, Artificial Sequence
  ENSG00000162599_20 (sequence is synthesized)
atcgaattttgaattgagtaaagtgcaatttcattggatagctaaatatctttgtaagatagagattgttgaaaattctatttttgtttttctagtcctttcaccccaggactctaaatt

SEQ ID NO: 487366 - DNA, 120 bp, Artificial Sequence
  ENSG00000162599_21 (sequence is synthesized)
attggggtaaaaaacagccttgcaagaaaaaggggagctatttttgctttttatgttttttattgttaaacttgtatccctttaaaaactgaaggaaattaaaaaaaaaaaacaaaaaaa

SEQ ID NO: 487367 - DNA, 120 bp, Artificial Sequence
  ENSG00000162599_22 (sequence is synthesized)
gctaattaattattttctgttatcaaagcacatgactaaaatgaaatcatggtatctgttaattttataagctagaagtcactataatggattacgccaattctaaaaaattttacacct

SEQ ID NO: 487368 - DNA, 120 bp, Artificial Sequence
  ENSG00000162599_23 (sequence is synthesized)
atctggcatcataggatttatcagttatcagacacctcattgtaccagagattgtccagaagttttaaagacctttgcatccctgaactgggctatgggaaataataatagtaataataa

SEQ ID NO: 487369 - DNA, 120 bp, Artificial Sequence
  ENSG00000162599_24 (sequence is synthesized)
taataataataatgatgaaaccaatactgacacaaatgctggtgcccattcagatcaagggtacttgttagggaaaaaaaaaaaagtttgcacccccaaacgtcctgtatcttatgaaaa

SEQ ID NO: 487370 - DNA, 120 bp, Artificial Sequence
  ENSG00000162599_25 (sequence is synthesized)
acaaaaacaaaaaaaaaacacaaaaaaccacagaaacaaaaacaaaaaaaagtgcaagtgatttttctaccagacagcgaagcacccctttgcttcccatgcgacttcaagaaggtttcc

SEQ ID NO: 487371 - DNA, 120 bp, Artificial Sequence
  ENSG00000162599_26 (sequence is synthesized)
aagaaggtttcctatactatacatatatatacgttctggttggcaagccctgctgatcagagaaagtctctgcatgttctagtgttagtaactaatttttatatagttaatgtaggataa

SEQ ID NO: 487372 - DNA, 120 bp, Artificial Sequence
  ENSG00000162599_27 (sequence is synthesized)
agtagagtgcattaagacacaatattgtaatccctactctaggcacttgcctttaaactatgtttttcagcccttcagaagggttctactactgtcctatacaatcaagtaactgaaatt

SEQ ID NO: 487373 - DNA, 120 bp, Artificial Sequence
  ENSG00000162599_28 (sequence is synthesized)
cttgggaagacactttgctcctcatctttctccccgaaacaatgttgttttgttttgttttttttccttaatttgcacgaaaacaaaaattccatatcaatgtgccttgccctggatagc

SEQ ID NO: 487374 - DNA, 120 bp, Artificial Sequence
  ENSG00000162599_29 (sequence is synthesized)
gattatttgtggaattgttgcacatgctcctctattgaaaggggtttttccctagtcaagcatttggagacactttttgtaaatgtgacttttatgtcagccatcgtcagtttcaacatc

SEQ ID NO: 487375 - DNA, 120 bp, Artificial Sequence
  ENSG00000162599_30 (sequence is synthesized)
tagaactaaatagaaagctagttgttccgcagataggagtagtctttattgtcctgtacggtcggtggcagtgctattctgagatctgtagatgcttagaatatcagtattttggatgtt

SEQ ID NO: 487376 - DNA, 120 bp, Artificial Sequence
  ENSG00000162599_31 (sequence is synthesized)
gctgcattttacaatttatttggagtcttcctttattttcccccagatatatgaaaatatgcaatacctgcttatatcatgtagaaaagcttagcaattattaatttttcttttattttt

SEQ ID NO: 487377 - DNA, 120 bp, Artificial Sequence
  ENSG00000162599_32 (sequence is synthesized)
ttttatttgaccaaagtcggtgctgcacttgacgcagtgtgttttaggtgtttgtctttgtacttttttgtgatttttgaatgcacgtgcgcaggaagggctcctcttagagaagcagtc

SEQ ID NO: 487378 - DNA, 120 bp, Artificial Sequence
  ENSG00000162599_33 (sequence is synthesized)
aaactgtgaagcactaagctgaccctgcttcaagcaattttgtttttacaactgttcctttcacaagcaagccttaaaaaaaaaaaagacaacttcctttttcttcagctcccacacccc

SEQ ID NO: 487379 - DNA, 120 bp, Artificial Sequence
  ENSG00000162599_34 (sequence is synthesized)
atttttcttagcagactgcagtcaatccacattcaataaaaagtatataatgcccatttttatatgcacgtttttaaacttccaagttctgaaaattgtttactggttatctctatttaa

SEQ ID NO: 487380 - DNA, 120 bp, Artificial Sequence
  ENSG00000162599_35 (sequence is synthesized)
ggaaaaaaaaataaaataaaacattttggattttcatatgtgtctgataagtggttgaatagtcgtttggcgctgttgtatggtgtgattgtcagtgtatggtgtcacttcctatagcca

SEQ ID NO: 487381 - DNA, 120 bp, Artificial Sequence
  ENSG00000162599_36 (sequence is synthesized)
atagcagctttcagtgcttcacagtgaagggaaaaaagcctagacaaacattttgtcagaaccttgcaataagccaaggtattaccagtaaattggttgtatatacaataaaattgcacc

SEQ ID NO: 487382 - DNA, 120 bp, Artificial Sequence
  ENSG00000162599_37 (sequence is synthesized)
cttttttaaacaaaacaaactaagcaatagtttgggcagttttagttgtttttagtgagcatgttgtagtcatgactgcaaagagagagaataaactgcccgctcagaagatatgtaatt

SEQ ID NO: 487383 - DNA, 120 bp, Artificial Sequence
  ENSG00000162599_38 (sequence is synthesized)
tgtattgttgtatagttttattgattacactgatttattctaccctattttataatgcaggacttttgtaatgttgtttaaatgaggaaaaatttctgtcaaattagcctagtaaaattt

SEQ ID NO: 487384 - DNA, 120 bp, Artificial Sequence
  ENSG00000162599_39 (sequence is synthesized)
ctgatcgttcattataaaggcagcgttcatagaattgcttttctttctttttaccccccctttgggaactggatttaagtttaaaactttcctgtttcctttttttttttttttttgtaa

SEQ ID NO: 487385 - DNA, 120 bp, Artificial Sequence
  ENSG00000162599_40 (sequence is synthesized)
gtatttaaatacaattatttttttctctcaatggtatagcatattcctatgcttgagaagtataggtctactgaaaaaccattgtaaatggacgttacaggtatgctgtatttttgaagg

SEQ ID NO: 487386 - DNA, 120 bp, Artificial Sequence
  ENSG00000162599_41 (sequence is synthesized)
tattttgttgtattaagtttgatgaagctaaaattagggaactctgaacagatttgcaggaaaaaatgttttaaaggctttaaaacattagggaggcagtctagggtgataacgaacagg

SEQ ID NO: 487387 - DNA, 120 bp, Artificial Sequence
  ENSG00000162599_42 (sequence is synthesized)
ggttaagtattaaatacacgaagttacatttttgttcatgtttcattgtccagaaagcagcaggaaactattcagttgtgatcaagcaggaaaaaagaaacaccaacagttgccagtgtt

SEQ ID NO: 487388 - DNA, 120 bp, Artificial Sequence
  ENSG00000162599_43 (sequence is synthesized)
tttgctttttagcttaaaagcatagtgaagatgcttgaggaagactttgctacctggggtgtgtagacagacagactgagagctatcagcatttgaaggcccagcccttgactctgagac

SEQ ID NO: 487389 - DNA, 120 bp, Artificial Sequence
  ENSG00000162599_44 (sequence is synthesized)
acatttgaattttttctttcccatcaaatggcattaacaagattgggcaaagatgagtccctcaaatttctgtgttttttgtttgtttgtttgtttgttttttctttgggaactgaagtc

SEQ ID NO: 487390 - DNA, 120 bp, Artificial Sequence
  ENSG00000162599_45 (sequence is synthesized)
agaggcacgaacactaactcttagcatttttctgtagactttttcttctggcccttgtccctgccagcaaaacgccccttttctgatcattcgtgcgcagagggcctcccagtaatgcca

SEQ ID NO: 487391 - DNA, 120 bp, Artificial Sequence
  ENSG00000162599_46 (sequence is synthesized)
cgctctccatgctagagagccttctctttcctctgaggtttgaactgatgttctgtgtcttcacaccctggcatgacagttacgtgtggtcagcccgctccccaggcccgtccctgccgc

SEQ ID NO: 487392 - DNA, 120 bp, Artificial Sequence
  ENSG00000162599_47 (sequence is synthesized)
cgccaggtgtgggctctaggcaggccgacaaggttacacctcccagagcttgtgatcttcattttctgacagtcaaagtgtgaaggaacccagacttccccgagccacggtgttcagtca

SEQ ID NO: 487393 - DNA, 120 bp, Artificial Sequence
  ENSG00000162599_48 (sequence is synthesized)
gcccacaggaatatgcaagacccatctccaaaagtttgtctttgattttttccaagcccttagccccataagctttgaatcctgtagttacagtggcataaaggactgacaaaacctgga

SEQ ID NO: 487394 - DNA, 120 bp, Artificial Sequence
  ENSG00000162599_49 (sequence is synthesized)
taaggaaaaaccttttttttctatgaattttttttgttttttaggggaaagggattctaagaatgtcatttaatgtactttgcatcatgtctctagaaatatctttgtccatagtggtgg

SEQ ID NO: 487395 - DNA, 120 bp, Artificial Sequence
  ENSG00000162599_50 (sequence is synthesized)
tggagtctctctctctctctctctttttgtttgcttctgttttctttcttgtcttcattctttcttttcttttttatttctggtagcaggcctccatagaacaaatctaaaacacaacca

SEQ ID NO: 487396 - DNA, 120 bp, Artificial Sequence
  ENSG00000162599_51 (sequence is synthesized)
ccatagtaatgtaaggagagcttcagtggcacctcaaaacccacccttcgagatctgtccaaagacagtctcagaaagctgcactgcccaccggctcagctttcattcaaaaaggcttcc

SEQ ID NO: 487397 - DNA, 120 bp, Artificial Sequence
  ENSG00000162599_52 (sequence is synthesized)
aaggccaattctgtcttgaagtcaatgcatgtatttactgtttgacagtaaacccgctctgccttctccacgtccaaggctgtgcattcgtctaattagcgtcgtgtatgttttcctttt

SEQ ID NO: 487398 - DNA, 120 bp, Artificial Sequence
  ENSG00000162599_53 (sequence is synthesized)
attttttccaataaaaaagcagtgggatgaaaattgctttgatatatagcaggtaacattgaagctattccatagcacttaactgtagtgaatactgtgtcaccaattttgaaatcaatt

SEQ ID NO: 487399 - DNA, 120 bp, Artificial Sequence
  ENSG00000162599_54 (sequence is synthesized)
taatgtttaatgcaaatccattacatggtgctattataggctgacaaaatgatttacacaaatgtgacaacttgggctcaattcactctgctttccaacagtgtaaatgcatagcagtgt

SEQ ID NO: 487400 - DNA, 120 bp, Artificial Sequence
  ENSG00000162599_55 (sequence is synthesized)
ttatctgcatgagaactatgcactaatctatctgaagaaaaaaactatatcaactttggtatctactttccgtttacttcaatccttgcctttttggtcattgttataatgccagcttta

SEQ ID NO: 487401 - DNA, 120 bp, Artificial Sequence
  ENSG00000162599_56 (sequence is synthesized)
ggacagaaagaattataagaaaaccagcataatacctgatatattaaaatgtagtgcctgtgaaatctgtattatattgctcttctgaagtaagatttttctacaccggtagccttcgct

SEQ ID NO: 487402 - DNA, 120 bp, Artificial Sequence
  ENSG00000162599_57 (sequence is synthesized)
gtctgtcagtcaggaccttctggtataggtgatgtaaaataaccgtacaatattaatgcatgcgattccataatgcttagtgaactgtatgaatattactcaaagttatgttagtctttt

SEQ ID NO: 487403 - DNA, 120 bp, Artificial Sequence
  ENSG00000162599_58 (sequence is synthesized)
tttccgacttggttcttgtcagctaggtttaaaggtatttcactgagaacgcaaattctgtcttttcttgatttcggctgttttcagtattttggaggtatacatttacttaaattcagt

SEQ ID NO: 487404 - DNA, 120 bp, Artificial Sequence
  ENSG00000162599_59 (sequence is synthesized)
ttttgtttttgttttttgttttctttttcctaggggacaagcatgggtgtttgatttcagaaatcagtacctggcgagatttttgtctcaaaacgactatttgaatttcaagaactgtgc

SEQ ID NO: 487405 - DNA, 120 bp, Artificial Sequence
  ENSG00000162599_60 (sequence is synthesized)
atttcaagaactgtgctgcgaagacactctgagaacatttgcaagtcaggggcattttccttgacccttgactgatgctatgcggagactgatacattttcttaatggacaatgttcaag

SEQ ID NO: 487406 - DNA, 120 bp, Artificial Sequence
  ENSG00000162599_61 (sequence is synthesized)
ccaggtacccatgcttgatctgtcttcacaccagacctcctcatattaaaaggaaaaataagaaaaaaaatgtaagaaatcacatggctatttagtttcatgcacagttgcaatattttc

SEQ ID NO: 487407 - DNA, 120 bp, Artificial Sequence
  ENSG00000162599_62 (sequence is synthesized)
ttcaaaaataaaactctgtacaaactttgggcccgattcataagaaaaagaagtttgctattaacacgggatttttttaatatactttttttggtctaaatttgaaattacttgcttccc

SEQ ID NO: 487408 - DNA, 120 bp, Artificial Sequence
  ENSG00000162599_63 (sequence is synthesized)
aaattaaataaatttcatctcatttttttccctaaaccagcacccatctgccttttattccccaaagagttacctttcccagattagggggatggtatgtggggagcagatagcggaaat

SEQ ID NO: 487409 - DNA, 120 bp, Artificial Sequence
  ENSG00000162599_64 (sequence is synthesized)
gcttagaaagataagggggaccacccacagctggtcgtgagaacagggagacagtgtgtgggggtgggacctcatctgtgtgcctggtatcctgagttttacatgtagatgcattcgcct

SEQ ID NO: 487410 - DNA, 120 bp, Artificial Sequence
  ENSG00000162599_65 (sequence is synthesized)
atttgattcagaaaaataaactttcccaaaatgtgtctgaaccacaagagcatacagtggaagtgctacctctaatctaaccagagcaccttcatggtggaagacacccaccaggtcata

SEQ ID NO: 487411 - DNA, 120 bp, Artificial Sequence
  ENSG00000162599_66 (sequence is synthesized)
caatgtgaacttttgtatctctgcagtggtttcaaggacaaatagtgtccaatgtattgggccatttttcctgctgtttttatactcaacttctcaaaatgaaaaaagcttttatttttc

SEQ ID NO: 487412 - DNA, 120 bp, Artificial Sequence
  ENSG00000162599_67 (sequence is synthesized)
gaaaaaagcttttatttttcctttgacttatttgtgttgttcttattttttaaatttttattttttgataatagtctgtaagttagcctttttgggttttttttttttttttttggcttt

SEQ ID NO: 487413 - DNA, 120 bp, Artificial Sequence
  ENSG00000162599_68 (sequence is synthesized)
tcttttgacattgcaaccgaaggtcataaggccgctagctccgctgggacagaggcttgagagaactaacggctcggtgccttctccctggtctcagaccatcgtctctgcactgcgaag

SEQ ID NO: 487414 - DNA, 120 bp, Artificial Sequence
  ENSG00000162599_69 (sequence is synthesized)
gcatttggtagcctcgccactgagatactaactagacctagactaggagctttatcaggttctaggaggtcctttaggaagactctcaaaggcaaatccctgatcccccgccccaccctt

SEQ ID NO: 487415 - DNA, 120 bp, Artificial Sequence
  ENSG00000162599_70 (sequence is synthesized)
agccctgccctctcaccagagcaaaattcactggggacttttcccaccacacatggaaatctgtccactcggaatacctctgttttccatttcaaattgtagggggaggggatggaacac

SEQ ID NO: 487416 - DNA, 120 bp, Artificial Sequence
  ENSG00000162599_71 (sequence is synthesized)
ttccagtgatggtaagagatctgttatgaaacgaaacaccccccgtgttaataacttggtctgaaatctgtttttatgagccgggccccctgtgcctctagtatacttgtattgactctc

SEQ ID NO: 487417 - DNA, 120 bp, Artificial Sequence
  ENSG00000162599_72 (sequence is synthesized)
atagttacccttttagttttactgtgttctgtgaaaatttgtaattggttgagaatcactgtgggcgtccattcttattcaactaaatctccacaggttttttgagctggtgtggattag

SEQ ID NO: 487418 - DNA, 120 bp, Artificial Sequence
  ENSG00000162599_73 (sequence is synthesized)
tttaactcttgtattcaaccattagtgctaccaccttctcacattacaatacaattactggaagcaagtactgcatttcctatgcaacaaaaaaggaaaaataaaaaattgctaatgcta

SEQ ID NO: 487419 - DNA, 120 bp, Artificial Sequence
  ENSG00000162599_74 (sequence is synthesized)
gtacaatccaaagcacgcaaggcaaaaccagagcgaatctgagaaccagccagcccgggttggatcgctttcaaaagagagagtgagagcgagcgagcgagcgagcgagagcgagacagt

SEQ ID NO: 487420 - DNA, 120 bp, Artificial Sequence
  ENSG00000162599_75 (sequence is synthesized)
gagagagggagagagcgcgccttgcaattgcaaaagccttctgatttggagttaaaaaaaaaattctccaagaagcctgcaattggccaacagctttttaaaaaatctcttccgggtttt

SEQ ID NO: 487421 - DNA, 120 bp, Artificial Sequence
  ENSG00000162599_76 (sequence is synthesized)
caacggttccaagtttatttagatattttttaaatgcaaaaaaaaggggacaacaaatgaagcaattcgtctgagcattttaaagtttctcacgtactctttttacattgcaatggatga

SEQ ID NO: 487422 - DNA, 120 bp, Artificial Sequence
  ENSG00000162599_77 (sequence is synthesized)
agagcggaggcggaggcgggcgcgcgggcagctcgcgggcacccggccgggccggcgcgggagcgggaaagggtgcgctatgcctttaacacccgcgtacagtaggcatgtatagtggag

SEQ ID NO: 487423 - DNA, 120 bp, Artificial Sequence
  ENSG00000162599_78 (sequence is synthesized)
ttgtgaaagagtcagactctgaaatctgcttatactttgctatttacaaatccttcatttttagtatacttttaaaattgaacacacacaacactttggttcctaaagtaatgataacaa

SEQ ID NO: 487424 - DNA, 120 bp, Artificial Sequence
  ENSG00000162599_79 (sequence is synthesized)
tctcaattaggtgtcttatctcccgtgagttagcatcagatgaagcttgctgacagcgtaatggcagggaaagcttccgacggctccatcaaatggcagctctgctacgacatctcggcc

SEQ ID NO: 487425 - DNA, 120 bp, Artificial Sequence
  ENSG00000162599_80 (sequence is synthesized)
agaacttggtggatgactcccaagttacatcgtttcagcctgaacgcatggacccaagagccctcaagctctgtcttgcctgttccttcaacacattgttgaactctccatggtctgaac

SEQ ID NO: 487426 - DNA, 120 bp, Artificial Sequence
  ENSG00000162599_81 (sequence is synthesized)
ttttcctgactcctgccaacaaacactcctttgtccccctccccatcagacagaccagtgcctgctgagacatgtgcctcctgatatgtttccccatccaggatgaatttcatcctttca

SEQ ID NO: 487427 - DNA, 120 bp, Artificial Sequence
  ENSG00000162599_82 (sequence is synthesized)
tatctgagctttcacgagaatgcggcggccccttgcagaccaactctgagcattttcttgccactcactcctttgctgttggtttgcttatttttctgtggcttggaattttaaactttc

SEQ ID NO: 487428 - DNA, 120 bp, Artificial Sequence
  ENSG00000162599_83 (sequence is synthesized)
tttggacatacctaatattcatcttttattgttgttcatgttttctattattatgctatgtatctgtaaagcttcagatgtgtgtaatgaaggatgaagtctttatcagactcgagtgta

SEQ ID NO: 487429 - DNA, 120 bp, Artificial Sequence
  ENSG00000162599_84 (sequence is synthesized)
ccacaggaccgaagctgcacaaagtttgcaggattgtgtgcataattacctctgccgacgaatctattcccacagaaagcttcgctggagagattacaatgctttgagccttaccgcatt

SEQ ID NO: 487430 - DNA, 120 bp, Artificial Sequence
  ENSG00000162599_85 (sequence is synthesized)
cacaaagcctccaaccacgtcaacagaaggaggtgcagcctcccccacgtcaccaaggtgccacatgacaggacgagtattatgggaaacattgatctcactccgatggtgtggacctga

SEQ ID NO: 487431 - DNA, 120 bp, Artificial Sequence
  ENSG00000162599_86 (sequence is synthesized)
tgccggattcttcctgagctccccaagttgcaggccacgtacatgaagccagtgtggtttcaaagattgagagaggtgccaccttcattcaggtgaaaaagcatagctttgagcgaattc

SEQ ID NO: 487432 - DNA, 120 bp, Artificial Sequence
  ENSG00000162599_87 (sequence is synthesized)
tcactaagttcagctcttttggtaagtagtgttttcagaggcgttggtaatcagatatgtgatatgtttaaatcacattttttgatgaggggatgagagaagcctcgtgaaaaccctttt

SEQ ID NO: 487433 - DNA, 120 bp, Artificial Sequence
  ENSG00000162599_88 (sequence is synthesized)
aataaagagtatattttaactgacaaatgatctagtttaaaagcatttattttggtattgaggcaatatttttagttggttttctgctgggagtgtttttaacctactgaggcctcttga

SEQ ID NO: 487434 - DNA, 120 bp, Artificial Sequence
  ENSG00000162599_89 (sequence is synthesized)
accccttgccaattaagaagttggaggtagattactatcaaattgctgatcatttaggaaggaaaaataatcacattaatacgcagacttagtagctttgtatttaggaattcttagtgt

SEQ ID NO: 487435 - DNA, 120 bp, Artificial Sequence
  ENSG00000162599_90 (sequence is synthesized)
tgtctcagatagctaagggaaacaaaccagctctttcagtaattgatggagaggttaatattaaaaataaccaacctgtatattgcatgaacacattgaaaaattgctattgataattga

SEQ ID NO: 487436 - DNA, 120 bp, Artificial Sequence
  ENSG00000162599_91 (sequence is synthesized)
tgtagtgagttgctttgattgtaaaatcttaaattttttttctgttttttcaaggcatgtcttacctgtgcatgtttcagtgtttagaatagcatgcaggataaaactattgaggactgg

SEQ ID NO: 487437 - DNA, 120 bp, Artificial Sequence
  ENSG00000162599_92 (sequence is synthesized)
ataaaataatgcatttttactttgttcctttcgtcttgttttagacaaaaggctcattgtgctatgtgaacgctcaggtcttgtgtaacttgttgactttatatatgtacatatcggtct

SEQ ID NO: 487438 - DNA, 120 bp, Artificial Sequence
  ENSG00000162599_93 (sequence is synthesized)
gtcttgctagattaccttcatggcagttacttgagccagatggaagaaagagggttgtggaatcctaccagtaggttgttttggggttcaaatatttaacgtttttttttcttttttttt

SEQ ID NO: 487439 - DNA, 120 bp, Artificial Sequence
  ENSG00000162599_94 (sequence is synthesized)
ttttttacaaaggagagatgttacctgtaaaaacactgcacttttcttcaaaacatttttaattctaaaaatgttagtgagtttttaaagaagccagctgatagcctgttctctattatt

SEQ ID NO: 487440 - DNA, 120 bp, Artificial Sequence
  ENSG00000162599_95 (sequence is synthesized)
tttctcaatatatgttttagaaagagaacttttgttatccatctgcccttacataagaaactggagaaattagctttgcaagcatgtcacatcatcatttgcattctgttggcaggggat

SEQ ID NO: 487441 - DNA, 120 bp, Artificial Sequence
  ENSG00000162599_96 (sequence is synthesized)
agatgagtattttagaggatgtgagctgtaagtgtttcaaatatttgggttttcaaaaatgtatacttaattataagaattgccttttgctttagccaattctgggtagcaagaatgaaa

SEQ ID NO: 487442 - DNA, 120 bp, Artificial Sequence
  ENSG00000162599_97 (sequence is synthesized)
agtcagcacctctcaagtgacctctaagcaggaataagtagcccttttttaacccactcttaaccctgttgttgttcatttgttttgtttactgaaaaagtaaagttaaaatttttaaaa

SEQ ID NO: 487443 - DNA, 120 bp, Artificial Sequence
  ENSG00000162599_98 (sequence is synthesized)
aatgtgtctgcatatgttaagcacagcaaaacgcaaaaaaagtataggtgttacaggtgctttcaagaagcactctttaaaatcttgtttttaccttttagatatttagaaaaatataac

SEQ ID NO: 487444 - DNA, 120 bp, Artificial Sequence
  ENSG00000162599_99 (sequence is synthesized)
ctataaattatcccgaatagatgaccaacatcgaaacttgaaagtgccaacaggtgatgcagatcatgatgtgtgcttccatataagataacatcaaaatgaaatacctgtgaagttttt

SEQ ID NO: 487445 - DNA, 120 bp, Artificial Sequence
  ENSG00000162599_100 (sequence is synthesized)
gtcggtgtaagcagtgtccattctaagttttcgtcttaaacatttctctgttatttaaagaaatgcaatcttttcgctgttctcattacgtgccttctttttcgtcgttggtttgttact

SEQ ID NO: 487446 - DNA, 120 bp, Artificial Sequence
  ENSG00000162599_101 (sequence is synthesized)
gtgctattgctcccaatccttgaactaacacagttgttggttgttgcaatgcctgaaggggttatgttggtaaaatgacatttagaaggttacttaggagagttagcatccttattgctt

SEQ ID NO: 487447 - DNA, 120 bp, Artificial Sequence
  ENSG00000162599_102 (sequence is synthesized)
atgaaagatttattgacagcagcatagatcagactactcttcggtttggttttcctgatgtatcccagaatcccttgttatgcctgaatgccagccaaatgtttggccattggttttcac

SEQ ID NO: 487448 - DNA, 120 bp, Artificial Sequence
  ENSG00000162599_103 (sequence is synthesized)
gggaccgcagtaatggctgcttctctgtgcgcgcaacaggaagactgtaaaagaaaatattaagggtcttttgtctgaaaatatttcaaatttgatttaagagattcagagacctgttat

SEQ ID NO: 487449 - DNA, 120 bp, Artificial Sequence
  ENSG00000162599_104 (sequence is synthesized)
ttgtggaagggaagctgccaatacaaatatgaggtagatcggtcaacttacatacaactgatttgacaagcatctgttataatactgaagatttgtaaacactaaacaatgtttttacct

SEQ ID NO: 487450 - DNA, 120 bp, Artificial Sequence
  ENSG00000162599_105 (sequence is synthesized)
ccttaaaagttttgagaacttgccagtattggcaggaggcagagactctgaaacgtgcttcaagatacatgccaaaaccattgtggccttttcacctataatgcgttttttctcgctctt

SEQ ID NO: 487451 - DNA, 120 bp, Artificial Sequence
  ENSG00000162599_106 (sequence is synthesized)
tcttttaaattgttatatttttttcctttccagaatgcctttttttccccctagatggtcatagaaattagatcttcttttccttctgaaatttgtgtgtaataattcttgctttatgtg

SEQ ID NO: 487452 - DNA, 120 bp, Artificial Sequence
  ENSG00000162599_107 (sequence is synthesized)
tccacctttctttggtaggaagttgaaatctcagaacatacgtgagaatactagaagcaaatgcagaatcaatctttttttttttaaagcggaggtgatttattctaagacttattgaca

SEQ ID NO: 487453 - DNA, 120 bp, Artificial Sequence
  ENSG00000162599_108 (sequence is synthesized)
tgctaaaatataatacataaactacattccagttttttccctctaaatccagtggcattagaactgtgaattttgtggctgataagcagtaacaagtgtaatgaaattggagtgatttca

SEQ ID NO: 487454 - DNA, 120 bp, Artificial Sequence
  ENSG00000162599_109 (sequence is synthesized)
taagcctgagaatttcatcttgttaaaagaacaaaaccattttatgcccttaatttggtctcaatttgagttgtccttcccatgtatcatatgacaacttggggatactatggtattgtg

SEQ ID NO: 487455 - DNA, 120 bp, Artificial Sequence
  ENSG00000162599_110 (sequence is synthesized)
gcaaatggttttctttgtgggtgtgtaacagtaaagctaatttatgaccagtctttaccagatgatctgtatcagaatctacaatatacccggcacgtggcaaggtcacaatttaagttg

SEQ ID NO: 487456 - DNA, 120 bp, Artificial Sequence
  ENSG00000162599_111 (sequence is synthesized)
ttaaggtcataaccttagccaccaggcatttgaccttttagataaagttaacctttgttcattagtaggcactcaaccgagaagtttctggagagttgttgtttttttttttttaaccac

SEQ ID NO: 487457 - DNA, 120 bp, Artificial Sequence
  ENSG00000162599_112 (sequence is synthesized)
ttctgtataaacttctggtaatgtaatcagattctagaaagattctcagtcaaattagttagattttgtgaaaggttatactttttaaggactcatttcttggatagaggcaggttgcta

SEQ ID NO: 487458 - DNA, 120 bp, Artificial Sequence
  ENSG00000162599_113 (sequence is synthesized)
tttttaggccatagaatgacagtttcacaatttatatttgatattattacctgccatggggtagaataaaagcttggaggcagctgtgtggggacatttaaaatctaaaattaaacaaat

SEQ ID NO: 487459 - DNA, 120 bp, Artificial Sequence
  ENSG00000162599_114 (sequence is synthesized)
taatttatgtttaattcaactaaggcctttgctaattttcaagtgacattaggcctaaaagctaaatcacagtgagccatcttcactttttgcagatgaggaattttctaacattagaag

SEQ ID NO: 487460 - DNA, 120 bp, Artificial Sequence
  ENSG00000162599_115 (sequence is synthesized)
tatttttagcagtcttaaaattcagtttgaaagattaataagtgaccacaatttgtcaggtaattgctttaattgttaattagccagtgacaaagcaagttgctgttgtcctaatggcag

SEQ ID NO: 487461 - DNA, 120 bp, Artificial Sequence
  ENSG00000162599_116 (sequence is synthesized)
cagtatgagtacttgttagttttaaggtagaaagagaacacttttgcacggtaatcttttagtgcagtagttactgattgcttccatgctgctaccattattacctttacttaattttgc

SEQ ID NO: 487462 - DNA, 120 bp, Artificial Sequence
  ENSG00000162599_117 (sequence is synthesized)
ttgcatcaggaatagcaaagatcctttcaatcactgaaggagctgtttcagtgtctcggaagcctgatacctgtcctataaacctactcaacagtattactgattaccacattacctgta

SEQ ID NO: 487463 - DNA, 120 bp, Artificial Sequence
  ENSG00000162599_118 (sequence is synthesized)
ccatattgttcacttaattatgctgacatgaatgctcatttcaaattatttagattcttgctagttttgttctgctgtacctcatattattccatttcagccaaaagagagctactccca

SEQ ID NO: 487464 - DNA, 120 bp, Artificial Sequence
  ENSG00000162599_119 (sequence is synthesized)
ttcaggtgcattttagttttattttggcttcgtgattgccattccttcatatagtaatagagaaagccgtgatatgcagatagaccagatggtcatgttgacagattgagaattcacttc

SEQ ID NO: 487465 - DNA, 120 bp, Artificial Sequence
  ENSG00000162599_120 (sequence is synthesized)
ctactgcttcagagcaggtgtaagattaggagtgtctgtgtaggggcgtgtgtgtgcttcgtgtgcatgtgcgtgcacatccaggctgcacagagtgctgtttgagcaatgggaatgatt

SEQ ID NO: 487466 - DNA, 120 bp, Artificial Sequence
  ENSG00000162599_121 (sequence is synthesized)
atgggaatgatttcttttttgaaatgctagtattttaaatacagtgtaattatacagataaggttttcagtgcatatagaatattataatttttataaataaatcgcattagattgttac

SEQ ID NO: 487467 - DNA, 120 bp, Artificial Sequence
  ENSG00000162599_122 (sequence is synthesized)
tatgccaaattaattatgaaaattattttaatttttaggtaacttcctacattagtttgaggcaacattgcatatccaaaatatattcaatatattcttttagcagctacatgtatgtgt

SEQ ID NO: 487468 - DNA, 120 bp, Artificial Sequence
  ENSG00000162599_123 (sequence is synthesized)
gtttacattcaaatctaggactatacgtttttgtaattaaactttttcagtaacttaataaacaccctagtagaaagttgtgcagttacttcctgtgatttgtaattattaataaagtgt

SEQ ID NO: 487469 - DNA, 120 bp, Artificial Sequence
  ENSG00000162599_124 (sequence is synthesized)
gtttggaaaaagaatatacactgtatattgtatacacaatatacacaatatacactgtatattgtaaaactaatatacagtgatatttaaattaggagagtaaggatcaccctatcaaac

SEQ ID NO: 487470 - DNA, 120 bp, Artificial Sequence
  ENSG00000162599_125 (sequence is synthesized)
tctagctttaagctcaaggtggattttttggctgatcaagctattgtaaattattgatatatggcatatttttagaaattttaatttatcttttaattcttcaaaaaagatagcagtagc

SEQ ID NO: 487471 - DNA, 120 bp, Artificial Sequence
  ENSG00000162599_126 (sequence is synthesized)
agtcaacaaatttgagataaatattgattttacatccttgagtgttttctgtgtaacttgaggatagtaacaatatcctttacctagaatgtagtaacaaaatcctttatctggaatgta

SEQ ID NO: 487472 - DNA, 120 bp, Artificial Sequence
  ENSG00000162599_127 (sequence is synthesized)
gtgcaaaagatggtagttctaaggcagagagtgtacaggaatagggagaaatagttgttctggagtaaacctttgaatggaagtcagttcatttatggctaagaggttgagtgtgttggt

SEQ ID NO: 487473 - DNA, 120 bp, Artificial Sequence
  ENSG00000162599_128 (sequence is synthesized)
aagaaaatttcccaatgcttctggcttggattttccttgtcttcttttccaccctgtgatgaatagcattaatttaaacctatttaaggctagtgtgggagaaaccacagcctttgttgt

SEQ ID NO: 487474 - DNA, 120 bp, Artificial Sequence
  ENSG00000162599_129 (sequence is synthesized)
ggtcactgctgtacacagtaggactgggtgtttcatttggttaaggcctcaagctgcttccagaggacacgggacagcctgtcggcattttaaatcttgcacagaagcagcaacaattct

SEQ ID NO: 487475 - DNA, 120 bp, Artificial Sequence
  ENSG00000162599_130 (sequence is synthesized)
aattgctcacaaatgtcaatatagatttttgaaaccaattttgaggattagactagaagaaaaaacataaaatgcagattgagttcagtgaatgtgctaaacactgatttattaccattt

SEQ ID NO: 487476 - DNA, 120 bp, Artificial Sequence
  ENSG00000162599_131 (sequence is synthesized)
tagtaataattttcccatggttatttaagggttagagcttgcttttgaattattataaattgtaaacccatgggggttgagtaagggaaggaagaagtcaggtggaggaggaagagaatg

SEQ ID NO: 487477 - DNA, 120 bp, Artificial Sequence
  ENSG00000162599_132 (sequence is synthesized)
aatgaactcgtatgctttgttaaagagaaacataaaaccctgaacttaatcacaaatggagataccgtaaaagtattttggtttcagtaatgactgtaaagcagtcttgggcagtgagct

SEQ ID NO: 487478 - DNA, 120 bp, Artificial Sequence
  ENSG00000162599_133 (sequence is synthesized)
atcaagtggagaattttataatttgtcttcccacaattttttgcatagcttttttcagactaagacactatttagagctttgggagtttttattcaagtttttaggaaaaggttttgcaa

SEQ ID NO: 487479 - DNA, 120 bp, Artificial Sequence
  ENSG00000162599_134 (sequence is synthesized)
aaattctttttagaatttaggagtccagttagagacatcattgcacacttaagctcagaaaaggggccatggagatgtttattctttttactattttgctttctaaggtggcagttcaga

SEQ ID NO: 487480 - DNA, 120 bp, Artificial Sequence
  ENSG00000162599_135 (sequence is synthesized)
gtattgtcaaatttttggctctttcccagtaggcaacggtaagatactcattattgatccaaacttttgggtccctgaacttaacagaattatttagttgctgcttagacagaaatgact

SEQ ID NO: 487481 - DNA, 120 bp, Artificial Sequence
  ENSG00000162599_136 (sequence is synthesized)
tttttccttagattttccccaaaatattagaaaacaattcctcatgttttgttttaactccacagcgtaaagcatattttatctaatggaattagtcctcccgttagtgttctagctaaa

SEQ ID NO: 487482 - DNA, 120 bp, Artificial Sequence
  ENSG00000162599_137 (sequence is synthesized)
taaacatggcttatgaagtgaagaaataagtccaacaaatgacaagttgcagcaactctgaagcagaagatatttttgcttttctgtttgtaaaacaagctaaataagataaaactgaga

SEQ ID NO: 487483 - DNA, 120 bp, Artificial Sequence
  ENSG00000162599_138 (sequence is synthesized)
aaaagaagttcatttgtattgtgtattttggcaaatcttggtcttctttaaaatgttgctaaccctaaaacaagaaatgatgaggataattatgataactagagattgaagtggaataac

SEQ ID NO: 487484 - DNA, 120 bp, Artificial Sequence
  ENSG00000162599_139 (sequence is synthesized)
tgtaatgttctttgagaactttaaacttacttcttttcatgtctttcaaatacttccctagtggtagatattttggacctagatcaattgggagtagagaaaaggagatggaaggaagga

SEQ ID NO: 487485 - DNA, 120 bp, Artificial Sequence
  ENSG00000162599_140 (sequence is synthesized)
aaggaaataacttttattgaatgtctgttctgcagcaggcactgagtaaggtttgtcatagtcatatattgtagcttgctgtcgctttcatagcagtattatgaattagtaatgcactct

SEQ ID NO: 487486 - DNA, 120 bp, Artificial Sequence
  ENSG00000162599_141 (sequence is synthesized)
ctatttgaacggatgaggatagactcttcagagtggccaggttacatgtccagagcaagattcaaacccaggtcttctgatttcaaatcttatgctcttaaacaattcaaattcattttg

SEQ ID NO: 487487 - DNA, 120 bp, Artificial Sequence
  ENSG00000162599_142 (sequence is synthesized)
tatccttctttatatcttattgtttagggttggatgtcgttttcatggtatcacacacctgtcttgaatcaaagggaaagtaaaaagtcaaaatccaaacccctcccattgagatatttc

SEQ ID NO: 487488 - DNA, 120 bp, Artificial Sequence
  ENSG00000162599_143 (sequence is synthesized)
actgtcaaattcagatgttagccacagaatgaggccacacttgataaagagagaaatgatgttacacttgtcactgttagggtcaaaatctgaaatgatttgttcttttttgtttttata

SEQ ID NO: 487489 - DNA, 120 bp, Artificial Sequence
  ENSG00000162599_144 (sequence is synthesized)
atgttgaaatttagtgaatagaagcattatgacacaggtttaagatttttagttgttgttaagacaaagttaaactaattcgttctagatgctttgagaagcctttgtgtattaaactaa

SEQ ID NO: 487490 - DNA, 120 bp, Artificial Sequence
  ENSG00000162599_145 (sequence is synthesized)
ctaagcactattttaaaaactaaattgcatgtaatttttactatgcagatttttgtacatggttttatatgtacaagacataatatatatttctaatttcccctatacattacatatatt

SEQ ID NO: 487491 - DNA, 120 bp, Artificial Sequence
  ENSG00000162599_146 (sequence is synthesized)
tatatatatttacagacagagaaatatatatctatttctaacttcccctaatgattggattttaaaatgtaaaattcactttgctctgaaaaaatcctttggttatggctgtgtgtgtaa

SEQ ID NO: 487492 - DNA, 120 bp, Artificial Sequence
  ENSG00000162599_147 (sequence is synthesized)
ttatttaaaataaagccaaaatcatgtttgagaaaagaatggaattttattagtttaaaattaaaaaattaaaataggaaaaaaattgaagatggacatgtttcaatttcgtgcccttaa

SEQ ID NO: 487493 - DNA, 120 bp, Artificial Sequence
  ENSG00000162599_148 (sequence is synthesized)
tggacatgtttcaatttcgtgcccttaaattagtgaattagtgagcttttttttgttgttgttgttgtttgagacggagtttagcccttgttttctaggctggagtgcagtggcatgatc

SEQ ID NO: 487494 - DNA, 68 bp, Artificial Sequence
  ENSG00000162599_149 (sequence is synthesized)
ctcaccgcaattgattacaggcatgcacccccatgcatgtaatttttagtagagacagggtttctcca

SEQ ID NO: 487495 - DNA, 65 bp, Artificial Sequence
  ENSG00000162599_150 (sequence is synthesized)
gagtggagatggggtttcaccatcttggtgaggctggactcgaactcctgactttgtgatctgcc

SEQ ID NO: 487496 - DNA, 120 bp, Artificial Sequence
  ENSG00000162599_151 (sequence is synthesized)
acaggcgtgagccaccgcgcctggcgacaagattagttcttaatgatttcagtgcaaaaactcaaagcctcactcaacataatttttataattgtaaatagaaaaagatgaccaataagt

SEQ ID NO: 487497 - DNA, 120 bp, Artificial Sequence
  ENSG00000162599_152 (sequence is synthesized)
tgtaaatagaaaaagatgaccaataagtataatttatactatattaagtcattatacatattaattcttctaaggtttaatttaaaaataagcagctgaactgaacttacagcaaagaaa

SEQ ID NO: 487498 - DNA, 120 bp, Artificial Sequence
  ENSG00000162599_153 (sequence is synthesized)
caaagaaaataaaatagctttctttttaagaaatattaatgaatcttaaagttagggttgtgtagcatcagttatgctagaaagggaaaactgagtttgaggcatgtgaagaaaagtgat

SEQ ID NO: 487499 - DNA, 120 bp, Artificial Sequence
  ENSG00000162599_154 (sequence is synthesized)
taaattggttaaaaaaatagtactcatatcctattgtcaactgtatctagttccatactgtatgtatttttatatctctggtaagtgcttatggtggtcccaaataacttgtgagtttcc

SEQ ID NO: 487500 - DNA, 120 bp, Artificial Sequence
  ENSG00000162599_155 (sequence is synthesized)
agacatagacagttctcagagcatgtgtattcatataaatttttaaatggctattgctgtagtgctctacaggttaaaaaaagtgaggcgaaattgaaacatttaaaaaatactgtacta

SEQ ID NO: 487501 - DNA, 120 bp, Artificial Sequence
  ENSG00000162599_156 (sequence is synthesized)
tttaaaaatttgtatgaatgtctgtgtagcagctgccattttcaggctgtctttgttgctatggtttggttgattttatttccttttgtaattttgccagccagtgattgggtagtacat

SEQ ID NO: 487502 - DNA, 120 bp, Artificial Sequence
  ENSG00000162599_157 (sequence is synthesized)
tgcattcatgctgttggggaagatatatctgtggtgagtcagatagcttgatctgagtagtaatttttagtagggaaaggtatttgtcagtgggtaatagaaactgtagtgttacattac

SEQ ID NO: 487503 - DNA, 120 bp, Artificial Sequence
  ENSG00000162599_158 (sequence is synthesized)
ccatcttcatttaattttcaaatttacagacatgtcacttaatatcagaaattcagaaccatctcttttgcagtgatatgtacttgcctctctccttttgtcctgtcagatgcacttaga

SEQ ID NO: 487504 - DNA, 120 bp, Artificial Sequence
  ENSG00000162599_159 (sequence is synthesized)
attctgtgtagtttaatcttaaagggattagttatttaattttaagctcctacataaaatgaatattgtacatacagggtcccatcattgtcactttcaaatattccattgcctttcaaa

SEQ ID NO: 487505 - DNA, 120 bp, Artificial Sequence
  ENSG00000162599_160 (sequence is synthesized)
ggagctgacatgacaagtccttaggttgacaaattctcatcaacttttatgaaaatgttggctgcagaaggagtaaagtcaaaggagggccatagacagatggctttcagtgttgagatg

SEQ ID NO: 487506 - DNA, 120 bp, Artificial Sequence
  ENSG00000162599_161 (sequence is synthesized)
acatcaagcccttcttcgtggcattttttaacattccaaatgaatgagggatggagatgcttaaagagcttactatagaataagtaattaagatattgtgtatctgcatgtaaacccctg

SEQ ID NO: 487507 - DNA, 120 bp, Artificial Sequence
  ENSG00000162599_162 (sequence is synthesized)
ttgcatactattaaacagagttgtgcaggctcagatataatagcagattaacaatgacaattgtaaatatcttttatgctgaatgtaactcataaataatattacacattaacatgttgc

SEQ ID NO: 487508 - DNA, 120 bp, Artificial Sequence
  ENSG00000162599_163 (sequence is synthesized)
tgatggaaaactgtgtacctgagaacatattttcaacattagataattgagaactaacgataagtgggttaccagtgtttgaaatgaagcaaagattctagataagaacttggcaaaagc

SEQ ID NO: 487509 - DNA, 120 bp, Artificial Sequence
  ENSG00000162599_164 (sequence is synthesized)
ttatttgcataagaaattttgcgtctttatatgactatgacaagatttttttggatggatgcacaccatataaaaattactaagttactaaagtttctgatggattcatttagttggctt

SEQ ID NO: 487510 - DNA, 120 bp, Artificial Sequence
  ENSG00000162599_165 (sequence is synthesized)
tcctccccctcttcttttaaatggtagaggttctcttttggagagtagtttcaagtaacttctgagaatgaagtctttgtaacgatgctgttcaacagcgtaactattgttgtgcattcc

SEQ ID NO: 487511 - DNA, 120 bp, Artificial Sequence
  ENSG00000162599_166 (sequence is synthesized)
tgtcagggaaagatagtcattgcagtacttttattgtatggcctcttaatatgtgacaaggacttttattaagaattcttttcttaacatacttttagaagtctctccttttcccacatt

SEQ ID NO: 487512 - DNA, 120 bp, Artificial Sequence
  ENSG00000162599_167 (sequence is synthesized)
cccacattcaatcagtaactacagttttaaaaaaatatttaaatgaacttttattgatttcttagcttactgtatagacaaaaatcttacgtttaaaaaaggttttaaaattaatgtatt

SEQ ID NO: 487513 - DNA, 120 bp, Artificial Sequence
  ENSG00000162599_168 (sequence is synthesized)
tcagtaaaatgaagtgggaacaaaaattaacaaaaaagtgccatctcattggatccaggatatgtagtaatacacacacacagttctatgtctgtgtaaccatatatatatatgtataca

SEQ ID NO: 487514 - DNA, 120 bp, Artificial Sequence
  ENSG00000162599_169 (sequence is synthesized)
cagttctttggagaatgaggatatttcagtccaaaatgttatggttgaagaactaattgttctaaagatatttgcccctggccccagaaaagacgacaaacatgcaaaatggataaatgt

SEQ ID NO: 487515 - DNA, 120 bp, Artificial Sequence
  ENSG00000162599_170 (sequence is synthesized)
aatcctttgtacttttaccacctacatttttaaactacagtaactctgatttctctagaaaggtcagaggtttcagacagaaagctttgtaattcttcaaagaaagacattttcagtttg

SEQ ID NO: 487516 - DNA, 120 bp, Artificial Sequence
  ENSG00000162599_171 (sequence is synthesized)
gctgtataaagactgattatgcatagctttttactttatgtgcggttgaatcttggaggtgctggagtggggtggggacgatgaataagtgaagctgtgttttgagacattagaattgga

SEQ ID NO: 487517 - DNA, 120 bp, Artificial Sequence
  ENSG00000162599_172 (sequence is synthesized)
gggaaacagacagattggagaggaacatagattcatatttttgggctttttactatcaagtcacccagtctaaaactcaggacagagcagcattaaccattcattttgctttgtgataga

SEQ ID NO: 487518 - DNA, 120 bp, Artificial Sequence
  ENSG00000162599_173 (sequence is synthesized)
gcattcgattaccaactctttaaactcttttggcaattcaaggaggttgcctatctgggtaccatttcttaggatttgctttgttggattttctaaattgtggatgtgagtttctttggt

SEQ ID NO: 487519 - DNA, 120 bp, Artificial Sequence
  ENSG00000162599_174 (sequence is synthesized)
tttgcattttttaaaaaaattttttggtcctttttaacttttccaagttttggagaatttttcatgttgggcggtgttggagaagtagagattgtagatgaccttcgttgtggcttactc

SEQ ID NO: 487520 - DNA, 120 bp, Artificial Sequence
  ENSG00000162599_175 (sequence is synthesized)
ctgttatttgggaaatagacgttcagagagcatctcacttgaggccacaccaacagttaagaggcaaagccagcatttaagccaactcccttagatcccagacttttgccctaaaactat

SEQ ID NO: 487521 - DNA, 120 bp, Artificial Sequence
  ENSG00000162599_176 (sequence is synthesized)
attatttaaattatcttttcttatgtgtttttaaattagcccttcatataaacttcaaattttaggtaggggagcttttatggttccctttatgccagtgaggaaacagccagagaggtt

SEQ ID NO: 487522 - DNA, 120 bp, Artificial Sequence
  ENSG00000162599_177 (sequence is synthesized)
gagtaacttgtccagggttatatggttaataagtggttaggattagtaactaggccagacccttctatggcctgtttttatctctaagatgatccccagtatgttagacttgaaactatg

SEQ ID NO: 487523 - DNA, 120 bp, Artificial Sequence
  ENSG00000162599_178 (sequence is synthesized)
gatggagtgaaaaatattctctgcaaatacatcaacactctgaaagccattgttttctctgtttagaaagtagttgaaaaagtagtgagaaactagagctttttcttttctggtgttagt

SEQ ID NO: 487524 - DNA, 120 bp, Artificial Sequence
  ENSG00000162599_179 (sequence is synthesized)
ttcagcttcctaccttgaagggaaccttaaggcccaaaccttcttttttacatttgaggattctaagtccatgcatctcggaaactatggagacgggaacttcttgtgtgagttggagag

SEQ ID NO: 487525 - DNA, 120 bp, Artificial Sequence
  ENSG00000162599_180 (sequence is synthesized)
cagttgtagaccgttatcatttccatcggtgcggatgctctttgggtggtggtggcatagaagatctgttttggttacctttattgacaagctctactgtgtgactggcagttcagttca

SEQ ID NO: 487526 - DNA, 120 bp, Artificial Sequence
  ENSG00000162599_181 (sequence is synthesized)
gcagataggtttccagcactaatcttaggcactgtgatagattcccgagatgcaaaactgaagaaaataccttgagacaagtcagtgccatctcagatataatttcctcagaaatcaaga

SEQ ID NO: 487527 - DNA, 120 bp, Artificial Sequence
  ENSG00000162599_182 (sequence is synthesized)
ttttagagcatttgatgtttttaaattagagtcctttcaactaatagcctgtatgaagtttttaaaacacttataaaaaatttatggtgattattattattttgagacagggtcttgctc

SEQ ID NO: 487528 - DNA, 120 bp, Artificial Sequence
  ENSG00000162599_183 (sequence is synthesized)
tgttgcctagctggagtgcagtggtgcagtcgtagctcactgctgcctcaaacttctgggcccacacaatcctcctacttcagcctcctaagtagctgggactaaaggtgaatcccaaca

SEQ ID NO: 487529 - DNA, 120 bp, Artificial Sequence
  ENSG00000162599_184 (sequence is synthesized)
ccctgggctaacttaaaaaaatattttgtggagatagagtctcactacattgcccaggctggtcactgaactcccagcttccagtgatcctcccacctcagcctctcaaagttctgagat

SEQ ID NO: 487530 - DNA, 120 bp, Artificial Sequence
  ENSG00000162599_185 (sequence is synthesized)
tctaagtatgagctgccaaacctggcctatatgaagttttaaacatttgtagaaccagttgttaacattgctttttttttttttaccataaaattggtatatgtcgaggaattctatcgt

SEQ ID NO: 487531 - DNA, 120 bp, Artificial Sequence
  ENSG00000162599_186 (sequence is synthesized)
ttgactatatttctattgtgttaaattttttgttttcttatatcaaaaatatttttgtaaatgtaaagaaaattcaagcagacagaagatggtgcaggtgctttctattatttaatagtt

SEQ ID NO: 487532 - DNA, 120 bp, Artificial Sequence
  ENSG00000162599_187 (sequence is synthesized)
ccatctcaaaaaaaaaaaaaaaaaaagtagttcgccaccatagcatgttttctctaaagaaagctggttgtgcacagaaaagttctattttttttaaagggcatccttctagtaatgctg

SEQ ID NO: 487533 - DNA, 120 bp, Artificial Sequence
  ENSG00000162599_188 (sequence is synthesized)
agttctattttttttaaagggcatccttctagtaatgctgaaatataaaacaaatagcgttataggaaaatgaaacagcaggagaacgagagagtagaaaacagaaaggaagcgaaggcc

SEQ ID NO: 487534 - DNA, 120 bp, Artificial Sequence
  ENSG00000162599_189 (sequence is synthesized)
ttggagagcaggcggtagtgaattcatttggcagttcctaaaacacagccaagtcccagtagcatagccacctaaattccctattttgctccttcttggaaaaaagttagcagtctcgag

SEQ ID NO: 487535 - DNA, 120 bp, Artificial Sequence
  ENSG00000162599_190 (sequence is synthesized)
acttttacgctgaagtggattttaagttgtcagaagtgtcaagctgatttgcctttttttctctcttttattaaaagaaaagagatacatactacattcagacagaaagcatgtaagggg

SEQ ID NO: 487536 - DNA, 120 bp, Artificial Sequence
  ENSG00000162599_191 (sequence is synthesized)
tcttataagtgtgagcatgtgttagtggattaatgggacaatgtgtgtggatggtgatagaaaatatgagagaactattgcttggctgataaatgaaataacaacaagaaaaatctggtg

SEQ ID NO: 487537 - DNA, 120 bp, Artificial Sequence
  ENSG00000162599_192 (sequence is synthesized)
gcccaatatatattggatttgttgttattctctgttatatctgctggttgttcaatctgaaagtgaaatctgtttctccattcattaatacgtgtgcttttctttgtatagagcacagaa

SEQ ID NO: 487538 - DNA, 120 bp, Artificial Sequence
  ENSG00000162599_193 (sequence is synthesized)
caaattatttgttccataattatttttaaaaagcagaaaatgtgtttgtaacatttaagaaatggcatgggattgtcatagaaactcattctgaacactgtaaataaaaatggttgggga

SEQ ID NO: 487539 - DNA, 120 bp, Artificial Sequence
  ENSG00000162599_194 (sequence is synthesized)
ttagtcacagtaacatgtaggacatcatgaaattcaagacagatttctttgtctaacagtcagtaagagacatgaagcgaacttgatatagttcatgagatattagcagttcagttcctt

SEQ ID NO: 487540 - DNA, 120 bp, Artificial Sequence
  ENSG00000162599_195 (sequence is synthesized)
cagagaaagagaaaaccatgttgcttcatattaaataagccatctgtatacaaatctcacaatttacttgatgattttagcaatatttgatgtttcctttcagagtcttatttccaaata

SEQ ID NO: 487541 - DNA, 120 bp, Artificial Sequence
  ENSG00000162599_196 (sequence is synthesized)
atgaaagcttaaaaaatttgaaaatctctctgtttttgctactaaatctttagaaccatatccctccttttcttctttccctatcttattttttggtaatcttgaatagcattttaaaag

SEQ ID NO: 487542 - DNA, 120 bp, Artificial Sequence
  ENSG00000162599_197 (sequence is synthesized)
aaagttttagctttattctgtttcctttagttttcccttacttcatataatatgaataaaactgaacacattaatgataaatagccttcaataatactatatatttttaaatatttcagg

SEQ ID NO: 487543 - DNA, 120 bp, Artificial Sequence
  ENSG00000162599_198 (sequence is synthesized)
aattatgagtctgcagtattaccattaacatctttttctgtttttcttttaatccagtatttagaaggaaattgtttcagggtactttttttctccaactctgtccaacatctggaagaa

SEQ ID NO: 487544 - DNA, 120 bp, Artificial Sequence
  ENSG00000162599_199 (sequence is synthesized)
cgattgcctgtctttaaatttggaattaatctccaattgcatactcctgctaggctgatgtttcagtaaattctaacgcatcagcctcagatctttgattccttgagcttttggaagtag

SEQ ID NO: 487545 - DNA, 120 bp, Artificial Sequence
  ENSG00000162599_200 (sequence is synthesized)
aagttaaagtctgagagggtgtttcaagacttaggaaacttagtgctgtggaatgacctgtgcatctgacaaggcccctttaacaatgttgtgtgtcactgcatgttcttatttgtaatc

SEQ ID NO: 487546 - DNA, 120 bp, Artificial Sequence
  ENSG00000162599_201 (sequence is synthesized)
aaaacagtaggtacaatatttcaataagggtaagtgtatttagacaaatgtagcctgataaaagtggataaattaccttttgtggttgagttaattagtgaacacaacgaaccttgaaac

SEQ ID NO: 487547 - DNA, 120 bp, Artificial Sequence
  ENSG00000162599_202 (sequence is synthesized)
tggtgggagcatgtgcaaagacatatgtgaaaatgttggtacatggaacatatggaaccatcttgtcttcctgcctgtgtacacaggttctattgtagtacaggtatatgcacgcatatt

SEQ ID NO: 487548 - DNA, 120 bp, Artificial Sequence
  ENSG00000162599_203 (sequence is synthesized)
tttgttttattccttgtagtagtcctacttgggatgtcctcacccacctttacttggctaacattatttatactttaaggctcagctgtaacatcatttcctcaaggaagctttcttttc

SEQ ID NO: 487549 - DNA, 120 bp, Artificial Sequence
  ENSG00000162599_204 (sequence is synthesized)
cccccaaggttaggctaaggactgcttccctgcctgcccacagcatccattagcagcatattagtacttgccattagcacttcctttatcataataaaactatttgtctacatctgtatt

SEQ ID NO: 487550 - DNA, 120 bp, Artificial Sequence
  ENSG00000162599_205 (sequence is synthesized)
tccagattgggctgtgatttctttctgagcagggactgggttgtattcagtgtttttgtacccccacataggggtgcatagaacctggcacttaactgtgcactcagtatctttgtttag

SEQ ID NO: 487551 - DNA, 120 bp, Artificial Sequence
  ENSG00000162599_206 (sequence is synthesized)
ctggtgactagatgagaaatctggattgaacaaaacaagaacttgagaagcttataatatggatcttaaaactaggtaacatataaaatagtttttgggcatttaccttaggactgaatt

SEQ ID NO: 487552 - DNA, 120 bp, Artificial Sequence
  ENSG00000162599_207 (sequence is synthesized)
taagcctatgttttttacagaatgattttcctttctcaccctaccatgtcaatggatttctatttcttcacccaaatccatagtttcatattaacccaaaggaattattgacatgtaagt

SEQ ID NO: 487553 - DNA, 120 bp, Artificial Sequence
  ENSG00000162599_208 (sequence is synthesized)
aattataattctgaaaacaaaggtctgatgatgctagacaattgatgatgctaaaccatttaggctatctgtttttccctttaagatcctggtcttgacttttatttgagctttttatct

SEQ ID NO: 487554 - DNA, 120 bp, Artificial Sequence
  ENSG00000162599_209 (sequence is synthesized)
agaaaagatgatttggtgatgatggagtaatatagtaactgctctagcttatatgtgagggtataatctttataccaataataatttatcaagtgcctactatgtgctgggtaccctgct

SEQ ID NO: 487555 - DNA, 120 bp, Artificial Sequence
  ENSG00000162599_210 (sequence is synthesized)
aggggaggaaataaaggatttcaatttaatgctattgcatttttaaagagcacaattttgattaaaaattgacccattctcttcagagtggacactcacattttttgtgggttttgaatc

SEQ ID NO: 487556 - DNA, 120 bp, Artificial Sequence
  ENSG00000162599_211 (sequence is synthesized)
acatagtgtcttgctgtgcaggaaaagggcctgtcagtcatgtctttatttctcttgagcatttgtacgttgtatgtctgtcctcacttatcagggtgtttttggcatggttacttaatc

SEQ ID NO: 487557 - DNA, 120 bp, Artificial Sequence
  ENSG00000162599_212 (sequence is synthesized)
ctaagctctgagaggcacaggaagtaaaagaaaagttaaagatgacaattaaggtgttgggcccagttagatatagtgaagtcagaattttccctcattaaaactgttagaccaatttca

SEQ ID NO: 487558 - DNA, 120 bp, Artificial Sequence
  ENSG00000162599_213 (sequence is synthesized)
ttagacggaaatgcacccacatatgtaaatcttctttgtttaattggagacctattgattgtaggtaacataagcctctctaagggaaacagaacccaactgaagataagagtttcttcc

SEQ ID NO: 487559 - DNA, 120 bp, Artificial Sequence
  ENSG00000162599_214 (sequence is synthesized)
ccccaacacatacagcattcatgattttatttctctaggcgtgttcattatcaaaatcattctactgcagactttcccataaagtgtttctgtctggccctgttttcatatctaaaagct

SEQ ID NO: 487560 - DNA, 120 bp, Artificial Sequence
  ENSG00000162599_215 (sequence is synthesized)
tctagtggtttcagcaagaaatgatggaaacattttgacagaatatatatttctttttttaaaactaagatcttaaaattaaagagaaacaaaaacttacaaaatcacatgaaaatataa

SEQ ID NO: 487561 - DNA, 120 bp, Artificial Sequence
  ENSG00000162599_216 (sequence is synthesized)
tgctttaaagagactgagaataattgtcttcttttgtgctttcatagaatgctaaaagaaaccaaattctgatcttctttggtgagcaatcaccaaaaatattgcagtggggaatgaaaa

SEQ ID NO: 487562 - DNA, 120 bp, Artificial Sequence
  ENSG00000162599_217 (sequence is synthesized)
atagaatggatttttaaaaaaacttacattctaattaggtctcaatgctgcagagaaaatagtgtaccagtgcaaactctacactgtggtataaggcacaggattttcccgctgcgcttc

SEQ ID NO: 487563 - DNA, 120 bp, Artificial Sequence
  ENSG00000162599_218 (sequence is synthesized)
caaggatagggtcatcctattataactgtttaataataggggattgtgtgtattttcttatatatcttcttgcaattccatgtttctgaagtgtgagattcaggtcaaggtcaatgtgtg

SEQ ID NO: 487564 - DNA, 120 bp, Artificial Sequence
  ENSG00000162599_219 (sequence is synthesized)
gccagttgtttataaagtattaagaatctcatgaaggagaaatacagtttagatgtagattttcttacgataactcaaattatgtttaaatgacaaaaactaggtaggtattgaggaggt

SEQ ID NO: 487565 - DNA, 120 bp, Artificial Sequence
  ENSG00000162599_220 (sequence is synthesized)
aaatatctctatttttcatttcttaacattacactacaatatgtgtaatatttagaatttgaattaggaagaactttaacttttttattccttagggtattactgatctctaaacaagat

SEQ ID NO: 487566 - DNA, 120 bp, Artificial Sequence
  ENSG00000162599_221 (sequence is synthesized)
gtttaattagcagaattatagcatcttagataaaattggttatttttaacttaatcacgtagttgatgctacagaaatgaattcatggcctttcttgtggtgctcgtctttttcttgttt

SEQ ID NO: 487567 - DNA, 120 bp, Artificial Sequence
  ENSG00000162599_222 (sequence is synthesized)
gatgttgctagttgaacacatctcaggttgtgagaagtgcatatttagatgggaacatcttggagagatcttgattggtagagagtaactttatatcagtgagtataatgcttatcagtg

SEQ ID NO: 487568 - DNA, 120 bp, Artificial Sequence
  ENSG00000162599_223 (sequence is synthesized)
aaattctaactcatttaattattacttaattttctgattatgtttttgtatttgagagaagattatttccattatggcaaagtatggatggatggacattgctattgccatttcttgact

SEQ ID NO: 487569 - DNA, 120 bp, Artificial Sequence
  ENSG00000162599_224 (sequence is synthesized)
tagcacacctaggaaggcattttgaaacatactttttaaaaaaagaattgcatatctgtgcacctacaacagtgggtgtgctgaaattctgacttgggttttgatgaaagaattccccaa

SEQ ID NO: 487570 - DNA, 120 bp, Artificial Sequence
  ENSG00000162599_225 (sequence is synthesized)
ttcagttaaattcatccttgactgtcgtgtgccactcatgttcacttggttaaaaaaaaattgttttttggagattatttgtagaatctcggttctgtaaccagatattgaatattacca

SEQ ID NO: 487571 - DNA, 120 bp, Artificial Sequence
  ENSG00000162599_226 (sequence is synthesized)
ccagatattgaatattaccactggagggaagctttgaactcatttatcacccttctgccaaaccacaaaaatcctctctctctctctcatgcatctatctatctatctatctatctatct

SEQ ID NO: 487572 - DNA, 120 bp, Artificial Sequence
  ENSG00000162599_227 (sequence is synthesized)
ttcatatatatatttcttcatatatatgatatatgacactgtatatttacagcatatatattacagcacagctatttacagcaacctggatcattcattcttagccccttctcaagaatg

SEQ ID NO: 487573 - DNA, 120 bp, Artificial Sequence
  ENSG00000162599_228 (sequence is synthesized)
gaagtttattttaaaccagacataaacaggacataaaatgaaatattaaaagactggataatgcattttaagtcagacatacatttggatagctgttgtttgagtttgtccatgctggag

SEQ ID NO: 487574 - DNA, 120 bp, Artificial Sequence
  ENSG00000162599_229 (sequence is synthesized)
ttacctcctcctcactgcaccctccctgtttgcatggggagctgagattagattttaactacaaattattcacattagtcaaataaaaaagaatgacatttcccccaaatttgattatta

SEQ ID NO: 487575 - DNA, 120 bp, Artificial Sequence
  ENSG00000162599_230 (sequence is synthesized)
ttgtattttcttggagaaaaagatcgtgttagtaaaataattcaaaatggaaatccaaatgtatttcttttaaaatttttcaaatctgttgctaaaaagctgtagaatatcgtggaaaat

SEQ ID NO: 487576 - DNA, 120 bp, Artificial Sequence
  ENSG00000162599_231 (sequence is synthesized)
ttattgtaacaaacattcctggtttaatttcttattttcactttatttttaatataaatatatatgtaacttataacacatagtatgaactgaaaatctgtgaaccaagaaagataacaa

SEQ ID NO: 487577 - DNA, 120 bp, Artificial Sequence
  ENSG00000162599_232 (sequence is synthesized)
acaaccaatacctttcatttacctgtgtgttcttttcctctcccattaccctgaaattcctcctattatcctgaattttgtgtttgtaattcccctcctataaaataaatggtttatcac

SEQ ID NO: 487578 - DNA, 120 bp, Artificial Sequence
  ENSG00000162599_233 (sequence is synthesized)
tattgttcagttttgcttgtttttttaagttttataaaaaatcatatatacacacatacatatacatacatatatatatataaatacatatacacacacacttctgggaattgctttttt

SEQ ID NO: 487579 - DNA, 120 bp, Artificial Sequence
  ENSG00000162599_234 (sequence is synthesized)
tgggaattgctttttttcactctacaatatgttcataatgtcatatatactgtaatttattattgtttcttgtgtaatattctgtgatggatctatagaaggtttccagtttcttggtct

SEQ ID NO: 487580 - DNA, 120 bp, Artificial Sequence
  ENSG00000162599_235 (sequence is synthesized)
tagcaagtgctatgaactgtaacatgtcttctagagcaagtgtgtaaaagtttctttatggtatgtgcctaggacttaaattgttgaattacagggtgtgtaaatgttaagttttttttt

SEQ ID NO: 487581 - DNA, 120 bp, Artificial Sequence
  ENSG00000162599_236 (sequence is synthesized)
ttaagaaaagatagtgatattttatcttactaacaagttatgcctgtttatacgatcactcgctgtagcagtatacaaaaaattctgttgatctgcattctctccagaatttggcactgc

SEQ ID NO: 487582 - DNA, 120 bp, Artificial Sequence
  ENSG00000162599_237 (sequence is synthesized)
cagatttttctttttgccaatcttgaggctaaaaaagagtatttcattgtgtttttaatttgcatttataatttgattactaatgagactaaacatctttttgtatatgtatgagccact

SEQ ID NO: 487583 - DNA, 120 bp, Artificial Sequence
  ENSG00000162599_238 (sequence is synthesized)
ttactgtggaataaatgtttttgtcatttattcatttttttctattttattgcttattgtttacttattggtttgtaggagttctttatagattctgcattctaatttttggccagtgta

SEQ ID NO: 487584 - DNA, 120 bp, Artificial Sequence
  ENSG00000162599_239 (sequence is synthesized)
cgtttgccaatatattttcgtagtttctggcttgttttaaaattttcttcatgttatctttgatcaacaaaaattcttaattttaatacagtaaaatttatcaatctttatcacatggtt

SEQ ID NO: 487585 - DNA, 120 bp, Artificial Sequence
  ENSG00000162599_240 (sequence is synthesized)
attgcttttttgtcttgttgaagatatccttttttactccaagtttagaagtatatggtattttttgtatatcttttaagtgttcatctcacattaggtttgtattccatccggaatttg

SEQ ID NO: 487586 - DNA, 120 bp, Artificial Sequence
  ENSG00000162599_241 (sequence is synthesized)
tgtatggtgtgaggtagggatccaatttcattttattctgtatgaatggacagttttcactttatcacttattgaataatttctctattccccaaataatgtaaaatgatacctctgtca

SEQ ID NO: 487587 - DNA, 120 bp, Artificial Sequence
  ENSG00000162599_242 (sequence is synthesized)
tttattttttatatttgtgtatgtctgtttttggattctttgctctgttacactgatcaacttgtctgccctataccatcaccacaatttttcacttactaagcccttataatgagtctt

SEQ ID NO: 487588 - DNA, 120 bp, Artificial Sequence
  ENSG00000162599_243 (sequence is synthesized)
gataaagcaaaatttcacacctctttttgaaataaattttttagttattctttacccctcactattccatatatatcatggcattactttgtcaagttttgtgaaacatcctattgggac

SEQ ID NO: 487589 - DNA, 120 bp, Artificial Sequence
  ENSG00000162599_244 (sequence is synthesized)
tttgtttagaaatatattgaatctacagataaaggaaattgacatctttttttaactatcaaatattattatctatgaacatggtatgtctcttcatttatttagatcttattcttggtt

SEQ ID NO: 487590 - DNA, 120 bp, Artificial Sequence
  ENSG00000162599_245 (sequence is synthesized)
acactgaattttatttttcaccaggttttgaacacttttgtgaagctgcttttgtaaattgtttttaatattttgtttttaactctaatttctagtatagaaatacagttactttgtgta

SEQ ID NO: 487591 - DNA, 120 bp, Artificial Sequence
  ENSG00000162599_246 (sequence is synthesized)
tagtgatcttatattcagcgatatttacatatttttagccaataatgtattggtaagttcttttttgtttactatttcgataatcatatcaaatgcaaacagtgagaaagatgttcattt

SEQ ID NO: 487592 - DNA, 120 bp, Artificial Sequence
  ENSG00000162599_247 (sequence is synthesized)
ctattctatgcttttatcttccttacccttctcattgcactgagatctgcaactcagtgttaaattaacctgtgatagtgggcattcttgatttttttttcttgatttcctatttatttt

SEQ ID NO: 487593 - DNA, 120 bp, Artificial Sequence
  ENSG00000162599_248 (sequence is synthesized)
taatccctgaatgaatcagagttaatgccttaatatttaaatattactttcgctgctcacattttaatcagagaaaggacaagacctgacctagttttgttaattttcctcttattttta

SEQ ID NO: 487594 - DNA, 120 bp, Artificial Sequence
  ENSG00000162599_249 (sequence is synthesized)
aaaattttatggtttggtatatgctaccataattgaaacctcagattctcctcacaaattactttatgccaagtggtatagtatctgttaattagtgggtaaatagtgtttttaaagaat

SEQ ID NO: 487595 - DNA, 120 bp, Artificial Sequence
  ENSG00000162599_250 (sequence is synthesized)
gcagtcatctaaaatttcaaaatataaggctcatttgtatgaattaattattttaggtatttcagggaaaagaattaccatatttcatactgatgagattttttgatactgtgttgtgtg

SEQ ID NO: 487596 - DNA, 120 bp, Artificial Sequence
  ENSG00000162599_251 (sequence is synthesized)
gctcagtctcttacgttttgatttgaactatagaacccttaagtagcattctgttttttacaatttaaaatgtctggtttgcatgggtttactttttcctttttcctcatgtaatttttg

SEQ ID NO: 487597 - DNA, 120 bp, Artificial Sequence
  ENSG00000162599_252 (sequence is synthesized)
ttaagacttgaatagattactcttctaatcttgtgagcagactgcaggaagacaactattaagagtagaaagctattaagcagtcaggggtttattatgctttagtgttttgtttaagtc

SEQ ID NO: 487598 - DNA, 120 bp, Artificial Sequence
  ENSG00000162599_253 (sequence is synthesized)
tgttcttaattggttgattaatgtacgagaagtccttttcccccctccatctctacagatggcaaatggtaggtcccaactgtcattgttcacaaaaaaggttatggttcaaagtcaaag

SEQ ID NO: 487599 - DNA, 120 bp, Artificial Sequence
  ENSG00000162599_254 (sequence is synthesized)
attcagagataccacaataatcaatcataggaacttgtctcagagtgcccagccaggcaaaagttaggcagagtaataatatttactgagaatctcttatgagtatttttttttggtgtg

SEQ ID NO: 487600 - DNA, 120 bp, Artificial Sequence
  ENSG00000162599_255 (sequence is synthesized)
tgtgttctttattttatttagaaaatattatttaattaattgaaatgcctctgaatttagtgacaagcatttaaataaatatgaaaaataatggtcaaaaagttttctgtttatcggttt

SEQ ID NO: 487601 - DNA, 120 bp, Artificial Sequence
  ENSG00000162599_256 (sequence is synthesized)
agatagtgctagaatacataattttaaaatgggtgtaacacagaaaataacattcttaatatattgagattaacagaacattttcaaaggaatacctttttaccattttcatgtgaagat

SEQ ID NO: 487602 - DNA, 120 bp, Artificial Sequence
  ENSG00000162599_257 (sequence is synthesized)
tatttataatagttaacttccttttttaggaggaagagtagaattatgttctggtattgatccacaaagaggatttgcattttattcatactataaaagtacctttaatggagaccttgt

SEQ ID NO: 487603 - DNA, 120 bp, Artificial Sequence
  ENSG00000162599_258 (sequence is synthesized)
ggtaattgaatctatactgtgtatcactatcaaagtatctttttaattattttatgttatacaatttaagtcatggaaagggggatgactgtattgtatcttttaagtataatgtatagc

SEQ ID NO: 487604 - DNA, 120 bp, Artificial Sequence
  ENSG00000162599_259 (sequence is synthesized)
ctttaatattcttaaagtggatgttagttaaggacaatttttagttgagagagagtgaaagagagagagataaggggggcagagaggattccattacattcagcacagtatgaaactaag

SEQ ID NO: 487605 - DNA, 120 bp, Artificial Sequence
  ENSG00000162599_260 (sequence is synthesized)
tcaaaggagttttgttaattaaattcaattgccatccattagaccagtggaatgagatgactctgcctggtgctgacacagcacaggtatgcaatttggctaaatggccatttccaaacc

SEQ ID NO: 487606 - DNA, 120 bp, Artificial Sequence
  ENSG00000162599_261 (sequence is synthesized)
atagcacacatttgtctacttgttcacttttttttttttttacatgagagtttttactcttagaaaagtcaaagagtaacccagtgcttgtcgaggggtaaaggtatcatttttatgcag

SEQ ID NO: 487607 - DNA, 120 bp, Artificial Sequence
  ENSG00000162599_262 (sequence is synthesized)
catattgtgaagtgattaattttttaggtgaaaaatatatagttcacatagagattatttgggagaaaatgattttttaaaaaatatgcagtatctgcgggcaagcatacgaacaaatat

SEQ ID NO: 487608 - DNA, 120 bp, Artificial Sequence
  ENSG00000162599_263 (sequence is synthesized)
atatacacacacacgtatcagtatagaaaaatgtgtacttttaaaattcagttgtcttaatctgaagctatttgagtcatattctctggattttttaaagcatcctacaatctgtatata

SEQ ID NO: 487609 - DNA, 120 bp, Artificial Sequence
  ENSG00000162599_264 (sequence is synthesized)
taattaggggaagttgtaataattgcaggagttataaaagcgaaatttaggtggtgggtaagtgtatctacattttggcataaatcactacttttagaggatttatatgtcagactgata

SEQ ID NO: 487610 - DNA, 120 bp, Artificial Sequence
  ENSG00000162599_265 (sequence is synthesized)
agtttcttaccatggtgaaatgacaagaataccactcaggcattggctgagacataattttgacagccagcaagcttgcagtgttgctgagtgcacagatttccacttcctgccaagatt

SEQ ID NO: 487611 - DNA, 120 bp, Artificial Sequence
  ENSG00000162599_266 (sequence is synthesized)
aaaattggcaaaaaccaaaaaggatattagggattgtcactttaagaagaaataacatgttaatgttctgcatttgcttaagaaatgtaagagtgatctcttgaactgtagtctgttgaa

SEQ ID NO: 487612 - DNA, 120 bp, Artificial Sequence
  ENSG00000162599_267 (sequence is synthesized)
acttacaagtttgcaatcaatagaagagtttgattaatatgagcatcaaaaattaaaataagtagaggctctctgacacttgttagaattaagactcattataggtttacttaataggac

SEQ ID NO: 487613 - DNA, 120 bp, Artificial Sequence
  ENSG00000162599_268 (sequence is synthesized)
ataattactttccttctatataagatgaattcttcacaaaagctatgaaatagttttcctcacagtccctgaagaacaaaggcctactttaagtttgtagatttgaagactgaatgcttg

SEQ ID NO: 487614 - DNA, 120 bp, Artificial Sequence
  ENSG00000162599_269 (sequence is synthesized)
ctttacttcctgaattttcttattttttcctgtgtgagcagatggtttttctttttataagttgccagatctttcctataacaataactgccattattgagaacctactgtgcgcttatt

SEQ ID NO: 487615 - DNA, 120 bp, Artificial Sequence
  ENSG00000162599_270 (sequence is synthesized)
ctgtactgagcactcagatcttcagagttttttcttacttaggactttttgtttaactctaggtgtaaaaatgaagaaaaaattatatctcatgttgtgaaagagtcagactctgaaatc

SEQ ID NO: 487616 - DNA, 120 bp, Artificial Sequence
  ENSG00000162599_271 (sequence is synthesized)
tgcttatactttgctatttacagtaagtacttttgaaacagctgtagacgttcaaatgaaagtagcaatgtggagtggggaatgtgggaacattcatttgtgaagactttgcatttcttc

SEQ ID NO: 487617 - DNA, 120 bp, Artificial Sequence
  ENSG00000162599_272 (sequence is synthesized)
agctttatagccaacagaaaaggagattgttgtgcattctattaaatactgccagtatgattaatttaaagggttacattttattgaaccctggtgtagatgttctttgtcaacccacat

SEQ ID NO: 487618 - DNA, 120 bp, Artificial Sequence
  ENSG00000162599_273 (sequence is synthesized)
tcacagctagttagagtgtgtgtagcatttatcaaaactttctggagcccctctcacctcattagcatctgaatctctattcagcagttaatgtccgttactgctagagtgctcaattct

SEQ ID NO: 487619 - DNA, 120 bp, Artificial Sequence
  ENSG00000162599_274 (sequence is synthesized)
tgttttcaataagccagttgtaaaatgtcagactgtcacttacaatataaaaaaccaaaaatgatggtatttgtaaaaatgttatcacctcataaaaacaaattgtaaagacatgaaagt

SEQ ID NO: 487620 - DNA, 120 bp, Artificial Sequence
  ENSG00000162599_275 (sequence is synthesized)
gatcttgctatgctggtctttcagaagtgagttagtacagctactttaaataccagttgtgtagattcccacacttttctaccaatggagaggtttacacaagcataatttaagttacaa

SEQ ID NO: 487621 - DNA, 120 bp, Artificial Sequence
  ENSG00000162599_276 (sequence is synthesized)
ttacactaattaacatctcatttgcataaattgttgaagtcaaaacaacaaagaattgtctaagaagcttaatcctatttgtccaaaatagaaagattttttttttttaaaaaaaaacta

SEQ ID NO: 487622 - DNA, 120 bp, Artificial Sequence
  ENSG00000162599_277 (sequence is synthesized)
tgctctaaaaattggcagcttaagtatgtctttagtatgttgagctgtgtccttttaaaaataaatgttttcaattttcttaataatatatttctctattctttttagaatccttcattt

SEQ ID NO: 487623 - DNA, 120 bp, Artificial Sequence
  ENSG00000162599_278 (sequence is synthesized)
ttagtatacttttaaaattgaacacacacaacactttggttcctaaagtaatgataacaagaaattaaaatcaaggtacagtatcatttatatgtagtagtacagagtaaccatgactta

SEQ ID NO: 487624 - DNA, 120 bp, Artificial Sequence
  ENSG00000162599_279 (sequence is synthesized)
ctaggtgttatgatgaaggtgtatgtgtgtgtatatgtgtgcatgcatgtagataagtgtgtgcatttgcacacataagagttttaagctgctcctgtcatttattgatggtcaaaggtt

SEQ ID NO: 487625 - DNA, 120 bp, Artificial Sequence
  ENSG00000162599_280 (sequence is synthesized)
tcttttggctattgctggactcttaagattgtcttgtaattgtctttttgttgttgttgaaaattaagggtgtatattaaaggtagtttttacccagatcttatatgtgtgatagctcac

SEQ ID NO: 487626 - DNA, 120 bp, Artificial Sequence
  ENSG00000162599_281 (sequence is synthesized)
atctgtaatcagaaacttactgtttaatggccacccaattgccattagcttcctagagggtgatttaataaactatcttctttaaaactcatttaaaattagagacatgtttgcatacaa

SEQ ID NO: 487627 - DNA, 120 bp, Artificial Sequence
  ENSG00000162599_282 (sequence is synthesized)
tggattaatgacgttttcatactaacccacaaaagtctgctgcactttcttttgtaggcctaacattcatttcatatgcattgattattattgttgaacttgcattaattacatcgtgca

SEQ ID NO: 487628 - DNA, 120 bp, Artificial Sequence
  ENSG00000162599_283 (sequence is synthesized)
tatatggacatacaatgtcatctgcagaatttaggattttttattgttaatttttatagtgactgtggattgaggaattaaaattagcatgcttcatttataatagtatttctagtgttt

SEQ ID NO: 487629 - DNA, 120 bp, Artificial Sequence
  ENSG00000162599_284 (sequence is synthesized)
cattagccctaaaaatgtgataagatcaggaataagattggaatgaaaatttctccttaaaatggtacgtcttttgaaaacattttgtttataatatatagctaatcctaatttattaca

SEQ ID NO: 487630 - DNA, 120 bp, Artificial Sequence
  ENSG00000162599_285 (sequence is synthesized)
gtctttcaatatattctttaatttgattctataaggcttataaatcactgtctttgagataagtttcttaattcacaggtttgtatcagttgtactaggtttggtgaaggatgtcatcct

SEQ ID NO: 487631 - DNA, 120 bp, Artificial Sequence
  ENSG00000162599_286 (sequence is synthesized)
agatatacagtgtagacgtgctttatgaaacatacttcttcttagggacatttttaaataccaaatgagaatatgtttggtgggccaggtgcaggggatcacacctggaatcccagcact

SEQ ID NO: 487632 - DNA, 120 bp, Artificial Sequence
  ENSG00000162599_287 (sequence is synthesized)
aaaaaaaaaaaaaaaaaaaagagaatatgtttggtagaaatctgaaagagaatttatgctgaattgagaccatttggaaggcttcttgggtaaaactgatttgagttgtggatgaaggat

SEQ ID NO: 487633 - DNA, 120 bp, Artificial Sequence
  ENSG00000162599_288 (sequence is synthesized)
tgaaggattgtttggaaatgagagaatgagcagaggccatggtggagagaagagttggagagcaggtgaaaggcgtgagcacagctgcagaagcagacatatgcacgatttgtcctagag

SEQ ID NO: 487634 - DNA, 120 bp, Artificial Sequence
  ENSG00000162599_289 (sequence is synthesized)
caggtcggttggcgagtttggttagaatggggggtttacatagcggagggtattgaatgccaatttaaagatctaggcagtaagaatcatgtagggtttttgaacagggatatgacatgc

SEQ ID NO: 487635 - DNA, 120 bp, Artificial Sequence
  ENSG00000162599_290 (sequence is synthesized)
ttcaagaggttttttttgaaaggattaatcatgaagtccaaatgtagggagcattgaaaacaagagtagagtgacagacagtggaacagtagctttgtctcggcacaaaattataaatca

SEQ ID NO: 487636 - DNA, 120 bp, Artificial Sequence
  ENSG00000162599_291 (sequence is synthesized)
tgatggtttttatttcctgtgccctgagtaatatcataaacaaaatatacaaaatggcaagagcacttttgagataatacatggtttctgattctgagtagtacttgaaacttcaaaaat

SEQ ID NO: 487637 - DNA, 120 bp, Artificial Sequence
  ENSG00000162599_292 (sequence is synthesized)
aacattatacgataaaacacatgttatttctttgttatcttaaaatagcaacaaattctatatacgtagaaagacctatgtagaaaaaaaatgaacattctagcctggacaacatagcaa

SEQ ID NO: 487638 - DNA, 120 bp, Artificial Sequence
  ENSG00000162599_293 (sequence is synthesized)
tagaaaaaaaatgaacattctagcctggacaacatagcaagaccccatcttaaaaaaattttttttttttagtcagccaggtgtggtggcctttgcctgtagtcccagctactcaggaga

SEQ ID NO: 487639 - DNA, 120 bp, Artificial Sequence
  ENSG00000162599_294 (sequence is synthesized)
ccagcctgggcaacagagcaagatcctttctcaaaacataaagcaaaaaacattatttcctttctcctttcagaggaaaattatttccagattattttttcttatatttttttaaaagtt

SEQ ID NO: 487640 - DNA, 120 bp, Artificial Sequence
  ENSG00000162599_295 (sequence is synthesized)
tattttttcttatatttttttaaaagttggctttaagggagcacgtttctctttgagggtggcctgtttcattgtcaatatttgctcttcattggaagctgaggtcatgtcagagttact

SEQ ID NO: 487641 - DNA, 120 bp, Artificial Sequence
  ENSG00000162599_296 (sequence is synthesized)
caggagaaagacctggacttttcttcttatcttttaatggtttatcattgataagtttggacatggtatgcatggtgacttttttcactcttgtcacttttctatatttaccttgttcat

SEQ ID NO: 487642 - DNA, 120 bp, Artificial Sequence
  ENSG00000162599_297 (sequence is synthesized)
agtatgtaatctgagtgccttcaagacactagaaaagatttgatctcaaacaccacattttgggtattttaatataatcaggagaaaagtggatataatattcagacaggaagctggaat

SEQ ID NO: 487643 - DNA, 120 bp, Artificial Sequence
  ENSG00000162599_298 (sequence is synthesized)
acactggcataggtagaagtattcatttcaacattaagtgaatatatatatatttgttgttgtttgttttgttttgtttttgtttattttggttagaatctcactctgtcacccaggctg

SEQ ID NO: 487644 - DNA, 88 bp, Artificial Sequence
  ENSG00000162599_299 (sequence is synthesized)
tggtgcgatcttggcccactgcaacctacacctcccgggttcaaactattctctttgaaggccaccacgcccagctaactttttgtat

SEQ ID NO: 487645 - DNA, 120 bp, Artificial Sequence
  ENSG00000162599_300 (sequence is synthesized)
ctgcacccagccgcaaatatatattgataacttactggaagtaaggtaacatggtacaggttggtagaagaaatatagagaaaaacaggaagctgggcttcccttccagatgtccctaga

SEQ ID NO: 487646 - DNA, 120 bp, Artificial Sequence
  ENSG00000162599_301 (sequence is synthesized)
ttcaaaggggaagaggcaaaatgtattaaatgctgtcttacacatagactacaagggatttacttggccagggagagaacagggttgattctgagctggagagaatgaggatggcttctg

SEQ ID NO: 487647 - DNA, 120 bp, Artificial Sequence
  ENSG00000162599_302 (sequence is synthesized)
tgaaggagatgacctaaagcagggcctcgaaggttggcaagggacttgcagggacagagcatggagatgggcatatgtagcgtgtgttctggacacggcacgtggaggcagagcacacat

SEQ ID NO: 487648 - DNA, 120 bp, Artificial Sequence
  ENSG00000162599_303 (sequence is synthesized)
gcatagagtgtgtaatgcttcacttccatccttgttccttcagcaagcacccgtgctttacctcgtgctgacccttgagcaaggctgcccgtgagaaacttcccaacttcatgggcaatg

SEQ ID NO: 487649 - DNA, 120 bp, Artificial Sequence
  ENSG00000162599_304 (sequence is synthesized)
ttgaaaacatttgtccacttgcccttgccccagagagggagaaggtccacatatggtgcctttgacatgttatcccttggcataaagtttggcccaaatgtacatttgaaacctcacgtt

SEQ ID NO: 487650 - DNA, 120 bp, Artificial Sequence
  ENSG00000162599_305 (sequence is synthesized)
ccctcgataaatttaaagtatgaaacttttgaaactctaaaaaggtggtgaagaccacagttctccctgttctttttcttctttcactctgcagctggattctgcctttcctccagtggt

SEQ ID NO: 487651 - DNA, 120 bp, Artificial Sequence
  ENSG00000162599_306 (sequence is synthesized)
tatctgaggagtgtctgccatgtcttctgtttttttttttttttgccttgttttgaggagtccccttttttcctcccctgggagagtttaaatatgatgctgatttcttgtcatcttagg

SEQ ID NO: 487652 - DNA, 120 bp, Artificial Sequence
  ENSG00000162599_307 (sequence is synthesized)
gctcctcagctacaacaaagttaaatggtataaaagcaaagcccaaattagagaccctaaaataaccttggagaaggagagttctcagttatcagtagaattgtcttaggaatttgagga

SEQ ID NO: 487653 - DNA, 120 bp, Artificial Sequence
  ENSG00000162599_308 (sequence is synthesized)
agcccttgtatacagtgaaaatgagaccctaagttaattaacaaaatgaaaataacttacagtacatatctgccacttccagtactgctataaataattgcaagtgtaaggatttttagt

SEQ ID NO: 487654 - DNA, 120 bp, Artificial Sequence
  ENSG00000162599_309 (sequence is synthesized)
gcaaatatgcagaaaacatgggcatagaaagtttagatgaccttaatgaagaaacagagttggctctgaaactgtgcttagcaggaacaacgttttgtgcacttgataaacactgtcagt

SEQ ID NO: 487655 - DNA, 120 bp, Artificial Sequence
  ENSG00000162599_310 (sequence is synthesized)
tgttaaggcatcttctgataggtgaaaagcggttttttgatgcagtactgcctggcatgcatcttctcgatggtctgttatcttgtgggaatgacattcgttaagttgttttctgtgtgc

SEQ ID NO: 487656 - DNA, 120 bp, Artificial Sequence
  ENSG00000162599_311 (sequence is synthesized)
atcccacccaaataaagaatgtttcatcagcaaagtgaattgccgtatagtcatcagactctagaaataaattatcaacgatgactgcagtgggtgaggctgtttgtttatcacatcact

SEQ ID NO: 487657 - DNA, 120 bp, Artificial Sequence
  ENSG00000162599_312 (sequence is synthesized)
tgagaacagagtaaagtgagtttcatattttcctgagtcttgaattctcattttagacatctgttcagaagctttctaagccatggagtattctaaatgagcattttgttaaatggatga

SEQ ID NO: 487658 - DNA, 120 bp, Artificial Sequence
  ENSG00000162599_313 (sequence is synthesized)
aggaagacttagttttccattgttaggtgaaacctaattaaaaattaaataatgaccttgtgttggcttgtaaattccttatttcctgcatgtgtgagtgtattttgttagaacattcca

SEQ ID NO: 487659 - DNA, 120 bp, Artificial Sequence
  ENSG00000162599_314 (sequence is synthesized)
ttttaaagcatgccttttttatgacaagaaatacttttaaaatactatttgcttttgaaattacagtagggaatcaaaggatagtctcttgttgagaggaaggtattagaagcatgtagc

SEQ ID NO: 487660 - DNA, 120 bp, Artificial Sequence
  ENSG00000162599_315 (sequence is synthesized)
tttatgaactatattttctgtgaatatagcagaattagtttaattgttcaatttcaccctctccagcatgattgcacccatcagggcagttaacagagacaccgctatttgtgttatact

SEQ ID NO: 487661 - DNA, 120 bp, Artificial Sequence
  ENSG00000162599_316 (sequence is synthesized)
aggaattctttataaacttaataaatgaaagctttttctcttataggcccgattctctagtggacttctggtgaaattatgtggctaccttccattaatgttaatggaggttatggatat

SEQ ID NO: 487662 - DNA, 120 bp, Artificial Sequence
  ENSG00000162599_317 (sequence is synthesized)
aaatccctccatagtgatggaagaatgagccccagagagaagaatgtttctaatgaatcactggattgtgatataggattaacttggtgtccctaataccatttttttttcctcctgaaa

SEQ ID NO: 487663 - DNA, 120 bp, Artificial Sequence
  ENSG00000162599_318 (sequence is synthesized)
gtttaaggtcttatgtttaggaactagtttctctccaccttaatcctttattgtcaagtctgcaataatgttaagaacaggaaaaaaaaatgtagattcctggataggcacagtttttat

SEQ ID NO: 487664 - DNA, 120 bp, Artificial Sequence
  ENSG00000162599_319 (sequence is synthesized)
attaatgtaactatataggcatagtttttatattaatgtaactatacagcacctatttttgtgttttactattacttggcagacatcttgagtgttttacaaggttatcgtatatttcac

SEQ ID NO: 487665 - DNA, 120 bp, Artificial Sequence
  ENSG00000162599_320 (sequence is synthesized)
taataatcgttgcttgataatttggtgtcctgacagactgcagtttattatttagtattaaagctctcaaatgtatttattgagcacctgctgggtacaaggctttgagcttagtgatga

SEQ ID NO: 487666 - DNA, 120 bp, Artificial Sequence
  ENSG00000162599_321 (sequence is synthesized)
aagcatatgacatagtctgtagcctcaaattttctataatctcgtgataaaagtaggtaccagttcattagttgctttccagtggggcacaaattatggaacatcgtctggctggccggg

SEQ ID NO: 487667 - DNA, 82 bp, Artificial Sequence
  ENSG00000162599_322 (sequence is synthesized)
tgtctggctaaagaaaggaaaagaattcttattcagaatcagcatgatcacttctgggaatctgaatggagaaaataattct

SEQ ID NO: 487668 - DNA, 120 bp, Artificial Sequence
  ENSG00000162599_323 (sequence is synthesized)
catgatcacttctgggaatctgaatggagaaaataattctatatgtaatgatgttttcaatcaatattattttaggtggtttatttattcagccaactgttgttggctgcccactgtata

SEQ ID NO: 487669 - DNA, 120 bp, Artificial Sequence
  ENSG00000162599_324 (sequence is synthesized)
ccaggcagtgtgctagatactgggagtacagcagtgagcagcacagagacagccctggtctcatggagtgtgcactttgagtgtgggaaacagtatgtgggtacataaacaaaataattt

SEQ ID NO: 487670 - DNA, 120 bp, Artificial Sequence
  ENSG00000162599_325 (sequence is synthesized)
ctaatgtgatagatctctaaaggaaacaggcaaggtgatagagaataactaagaggacctgctttagatgggaatgtgaaggatgaggccgcattcatactaagcatccaagtaaggaga

SEQ ID NO: 487671 - DNA, 75 bp, Artificial Sequence
  ENSG00000162599_326 (sequence is synthesized)
gagactgaaggccattatggctggacagttaagggagagtgacctaaataaagttcatattggcgggagagcagc

SEQ ID NO: 487672 - DNA, 120 bp, Artificial Sequence
  ENSG00000162599_327 (sequence is synthesized)
agagtgacctaaataaagttcatattggcgggagagcagcttgccacagggttacacagaataggcagtggtggtaaaggcagcatttgaatccaggtccatttggctttggaatgtgct

SEQ ID NO: 487673 - DNA, 120 bp, Artificial Sequence
  ENSG00000162599_328 (sequence is synthesized)
gttatagcagcagagggcaagtgtgaaacataattcaaggaaataattgctgtagccatccagaccagaggaggatcgctttgatctaggaaaacatctcagtagtctttgaaaaaatgt

SEQ ID NO: 487674 - DNA, 120 bp, Artificial Sequence
  ENSG00000162599_329 (sequence is synthesized)
acagaatatgaaagatattataggtcttttcctcctataatacaaccaggaaattattcaggctaattttttcagaaaaattattacaataaattatgatctccctttgaaaggtataat

SEQ ID NO: 487675 - DNA, 120 bp, Artificial Sequence
  ENSG00000162599_330 (sequence is synthesized)
gtattcaaacctttttaattagctaatcttttcctgtgaaatcttaaatatttgcacgtataattggtaattttagcttttatgtaggtatgtttccccctggtgttacttacaaaacct

SEQ ID NO: 487676 - DNA, 120 bp, Artificial Sequence
  ENSG00000162599_331 (sequence is synthesized)
ggcttactcaaggcccaaagtccaccccactagtaaactctctcgtctctgttcctgtgccaagtgctcttcctttgttaccaggtccacataattaatagctttatcatatgaggtaat

SEQ ID NO: 487677 - DNA, 120 bp, Artificial Sequence
  ENSG00000162599_332 (sequence is synthesized)
tcagttactcagcaaaacaaatgatatacacttttagaaatagctctagaaagtaaacttgaacgtaaaattgtttagtaagaggaaatttctgtttgtctttaattaagagaaactgta

SEQ ID NO: 487678 - DNA, 120 bp, Artificial Sequence
  ENSG00000162599_333 (sequence is synthesized)
tggaaatgtaagctaaggatgcattaatcagagaagttggcattgcactgttcttcatttttatttggcatagattgcatgggtgctcattaaataatttgtatgactgaaataacttgt

SEQ ID NO: 487679 - DNA, 120 bp, Artificial Sequence
  ENSG00000162599_334 (sequence is synthesized)
gatagttcttgctaaagttttgcatggactcagactaaagaaactttaaaatttgaattaaaaaacattcaattcttaggtttgaaggtttgagttacttattataactgaaaatcttta

SEQ ID NO: 487680 - DNA, 120 bp, Artificial Sequence
  ENSG00000162599_335 (sequence is synthesized)
ttatcaaaatgtgtgttcattatagtgtttgcttgccttcttgggtgaagaaatacttattatgagagtatgtagattttccgtgaagaattagtaatcatgcatcaggttgatacctgg

SEQ ID NO: 487681 - DNA, 120 bp, Artificial Sequence
  ENSG00000162599_336 (sequence is synthesized)
tgagtagatatttgtatttaatgctcttaaattttaacagccttgcctctgtatgccctgctcatctgtgtcttaccaactttgatattgtttgaaaaataaacatttgaaggaagaagt

SEQ ID NO: 487682 - DNA, 120 bp, Artificial Sequence
  ENSG00000162599_337 (sequence is synthesized)
ttgcatatttagagggttggtagttcattacctgcatgtaggttatgcccacatcgcaaagaaatctgatctatatgggtaacatatttggataatcaaggccaaggtaaagggattcat

SEQ ID NO: 487683 - DNA, 120 bp, Artificial Sequence
  ENSG00000162599_338 (sequence is synthesized)
tcccccttcttgaattttatggtttctgtatgtcaaaccagatttcattggtttaaatcttgtggtgtacacttggccattgatttggtttgagctctgtaatatttgtaattatgtgag

SEQ ID NO: 487684 - DNA, 120 bp, Artificial Sequence
  ENSG00000162599_339 (sequence is synthesized)
atgacaagattgaattaacttaattgtagagttttacatagtgtctgtatcaacatcctaataaaataatatgaaattcaataagtaatgccaagtgggacagtgagccactcacataag

SEQ ID NO: 487685 - DNA, 120 bp, Artificial Sequence
  ENSG00000162599_340 (sequence is synthesized)
cttactaaacttgatatattcttatggcactcctccagaatgtagaagaaacacatttatctaggtgattagtattctttctgtctgccagatttaaggattgtttggaaatattgttag

SEQ ID NO: 487686 - DNA, 120 bp, Artificial Sequence
  ENSG00000162599_341 (sequence is synthesized)
aatcaaaatcaacgtttgttactacacagggttgagcattccaggcacactctggtcgttttgttattctaatgtccacttatttcatgtctgccgtgaccgtgacagttttcagtcaca

SEQ ID NO: 487687 - DNA, 120 bp, Artificial Sequence
  ENSG00000162599_342 (sequence is synthesized)
cagagctgccatcaaaagagtgataagcttgtaagtgaagcctttggggaagcaataaagtcatttttctggtcccatctcaaaagacattattggaaatttatttaaaagtgatcaagg

SEQ ID NO: 487688 - DNA, 120 bp, Artificial Sequence
  ENSG00000162599_343 (sequence is synthesized)
tagcacatacgaggccttctacagtttgcattttggaagttattaacaatctgcagttaagtccatttaaaactgaaagtggctcttccacaaactactttttaaatagcttgctggttc

SEQ ID NO: 487689 - DNA, 120 bp, Artificial Sequence
  ENSG00000162599_344 (sequence is synthesized)
taaatttaaggagaatggaaatattggaaattaaaagtcaaaagaaatttctggggcataagatcctttcaagtttacaatttctcactttagatttaaaacttgaacacggccatactt

SEQ ID NO: 487690 - DNA, 120 bp, Artificial Sequence
  ENSG00000162599_345 (sequence is synthesized)
tgcattttatgatatctaattagtgccttgtaatatattttgtgaacagtatctgttagccataatatcagggacagtttaaaaaatcttcagtacatttatgataaaagtattagcatt

SEQ ID NO: 487691 - DNA, 120 bp, Artificial Sequence
  ENSG00000162599_346 (sequence is synthesized)
gtaaggtcttaaattgacatctaggacattaggaaatcaaatttaaagcattgcattgtctgttactcaatggagtggactgaggacagcgtgtgacttgtgtactgcaaatgatgcaat

SEQ ID NO: 487692 - DNA, 120 bp, Artificial Sequence
  ENSG00000162599_347 (sequence is synthesized)
agctaaatatcctagtgtgagttaaggttgattaagtgatcatctttaactctgcttttcccagggctctttgaactcttgttttattaggtaatatgctatgctgttattttattgctg

SEQ ID NO: 487693 - DNA, 120 bp, Artificial Sequence
  ENSG00000162599_348 (sequence is synthesized)
tttaaaaaaccttctcttttgggaaagaaaacatgtgaattctttggtttctagatagaaattagcaatcttttgctcggaatgtaaaagtatgctgtattatcacaaactgaccctcct

SEQ ID NO: 487694 - DNA, 120 bp, Artificial Sequence
  ENSG00000162599_349 (sequence is synthesized)
cctccccaagaattctagggagtaaaatgcgtgcacaggaaatcagaaatggatcaacagagttataggttttaaaaaaactgccttgcatttttgccctggaattaattttcagtgaaa

SEQ ID NO: 487695 - DNA, 120 bp, Artificial Sequence
  ENSG00000162599_350 (sequence is synthesized)
attaaaatattttttctgttcatctggaatcagtttttacttcattagcaggaaatggtaaatatacattcagcacaaatagagttttctttatgggacacaggatttgtactccatagg

SEQ ID NO: 487696 - DNA, 120 bp, Artificial Sequence
  ENSG00000162599_351 (sequence is synthesized)
tagatgtgtaacataaaagaatctttctgctctccttgtaattttctccctcttaccctcaataagttaaaagaaaggaaaattttttaacctaacctgttaggaaccattttagtgtag

SEQ ID NO: 487697 - DNA, 120 bp, Artificial Sequence
  ENSG00000162599_352 (sequence is synthesized)
cctctagtattttgataaaacaaaatgttcactagctggaccctggtggtgatagcatgaaggactggggtagaactctctttttcattttcttttaatcctgaagttacatcactgtgc

SEQ ID NO: 487698 - DNA, 120 bp, Artificial Sequence
  ENSG00000162599_353 (sequence is synthesized)
agtcagctcaacttgtgtcattgcagtaggaagatatgtaggtggaaagctattccagaaggaggctggagctaccttccctgacaagaaaaaaaatccaagcaaatacatacataaaaa

SEQ ID NO: 487699 - DNA, 120 bp, Artificial Sequence
  ENSG00000162599_354 (sequence is synthesized)
gacactcaaagcatcataggatgttatagttataagggaccataggtttcatttaacgcacattttagcatccaggtcctacataaaatgtatattttgtgattgtgaatgggagttttc

SEQ ID NO: 487700 - DNA, 120 bp, Artificial Sequence
  ENSG00000162599_355 (sequence is synthesized)
catatttaaaagttaagtttattaatgtgtcattttacccatcatgtatttgtggccatttttttaataccacgaatgggaacatactgtatcatagtttctttttatttgtctggatgc

SEQ ID NO: 487701 - DNA, 120 bp, Artificial Sequence
  ENSG00000162599_356 (sequence is synthesized)
ttgtgtatgccttttagtctactaatatgctcacatgtgcaaactaacaagagaagatggcaatccggtattataaactggtaaagagttatagtgcagtaagactggattaactgtgct

SEQ ID NO: 487702 - DNA, 120 bp, Artificial Sequence
  ENSG00000162599_357 (sequence is synthesized)
ttcagcagtcaagttgctgtaagagttatattgtaaagttttagactaacttgcatgtatcccagagtttgcacggtgttgctgagtgtctcgttagacatacaccctacctactattct

SEQ ID NO: 487703 - DNA, 120 bp, Artificial Sequence
  ENSG00000162599_358 (sequence is synthesized)
ctcctgacataaaaaaaggtggtaattgagctggcatctagaaagtggtggtagcactacagattgtatcactaatcccaaacaaaggagttgcaaaacacctttctttaaatattttct

SEQ ID NO: 487704 - DNA, 120 bp, Artificial Sequence
  ENSG00000162599_359 (sequence is synthesized)
cttcatggtgcaactggggagggccaaattccagccttaataaagttttaacctgaccagttggtagaaatggcagagtaatagaatgtttggtccagaaaccaatgtgtggactgtgtc

SEQ ID NO: 487705 - DNA, 120 bp, Artificial Sequence
  ENSG00000162599_360 (sequence is synthesized)
taggattagactctgcatttctgtctgttccagatgagctgctcatttcttttctttttttaatttaaatttttaagttctggagtacgtgtgaaggatgtgcaggtttgtttcataggt

SEQ ID NO: 487706 - DNA, 120 bp, Artificial Sequence
  ENSG00000162599_361 (sequence is synthesized)
gccatggtggtttgctgcacctgtcagccatcttctaggttttaagcccagcatgcatttgctatttttcctaatgctctcccccacccagcccaagctcttcatttctactcagtacgt

SEQ ID NO: 487707 - DNA, 120 bp, Artificial Sequence
  ENSG00000162599_362 (sequence is synthesized)
cagtacgtatgtccatgtatccaggagaaatggagagttctacttttggattcttctagagagattccctgtgggacttctaacccctaatcagtattcttccgttgatgataatctact

SEQ ID NO: 487708 - DNA, 120 bp, Artificial Sequence
  ENSG00000162599_363 (sequence is synthesized)
taaatgatatcctatcatcagaatccctttatggaattatctttgtattttgcacgttcttccattctagcttctaaatgtaatttttcctcccttaaatcatttttctaatggagacaa

SEQ ID NO: 487709 - DNA, 120 bp, Artificial Sequence
  ENSG00000162599_364 (sequence is synthesized)
cattcaaatacataggacagagcccacagccagggcgggaaacctgcatagtgaggctggttttgatacgcaggccatcctactggcagctgttttgtaggcagcttcatgtaatagtgc

SEQ ID NO: 487710 - DNA, 120 bp, Artificial Sequence
  ENSG00000162599_365 (sequence is synthesized)
agagggtacagagagagagacctacactgtgatttctttcgtttgtatattttgtattgaaattgtagattttttggttggaatttatttgagatgattcaagacattttgcatagtact

SEQ ID NO: 487711 - DNA, 120 bp, Artificial Sequence
  ENSG00000162599_366 (sequence is synthesized)
caaatataggtgaaagaatttcaagtttgctcattttggcataattctaaaacaaaagtgttactgttggatctgggcatgtgatgggtgaatgagtgtttcagtgaaatgacataagtc

SEQ ID NO: 487712 - DNA, 120 bp, Artificial Sequence
  ENSG00000162599_367 (sequence is synthesized)
tgtataatttggagggtaatgatgccttagaacaagaataaatctggagcgatggaaaggctccatattctagatgaatgcatgcttcctcttatgactctgaaaaataaaattaaatct

SEQ ID NO: 487713 - DNA, 120 bp, Artificial Sequence
  ENSG00000162599_368 (sequence is synthesized)
ttatttatacaaatccagtgaggggggaaggctacatggtttggcttaatgatatatttcagaacaggaatattagccttaacctctttcctcacattgcatatgatatttaatccatca

SEQ ID NO: 487714 - DNA, 120 bp, Artificial Sequence
  ENSG00000162599_369 (sequence is synthesized)
tctttgttttaaacaaacaatacacaagctgttgctggcattggtataaagctgatggtccatctggagagcaggaatatagatcaggaaaataagagaattgaaattgggtgcaagggc

SEQ ID NO: 487715 - DNA, 120 bp, Artificial Sequence
  ENSG00000162599_370 (sequence is synthesized)
agatttgcatgtgtaaaaacctttctgttttaccagcttttatcaaattatttaatactgggcaaaacagattcctttttcttgaagctgagaaagatacctcctcctagaggaagagtt

SEQ ID NO: 487716 - DNA, 120 bp, Artificial Sequence
  ENSG00000162599_371 (sequence is synthesized)
gcttcagtgttctaggaagaacaattggttttgaaagacaataaaataatgagccattaggatcatgttttgtaatatagggagttggtgtggaagaggagagagaggactgctggtgta

SEQ ID NO: 487717 - DNA, 120 bp, Artificial Sequence
  ENSG00000162599_372 (sequence is synthesized)
gtgagttcttgttctagctgtgtatgatcattggccagtcgttcagcttcttggccttcagtgcttcctttgactcaagtcaattcagcaaccatttattgaggcaaatgtgaggatgtt

SEQ ID NO: 487718 - DNA, 120 bp, Artificial Sequence
  ENSG00000162599_373 (sequence is synthesized)
ctgtgggctacctatttagctaggcattgtggatccatagacaagtatgactgggtcctatgcttatgaaactccaggtcttacaatggaaacatactgtggttgaacgatgtagagagt

SEQ ID NO: 487719 - DNA, 120 bp, Artificial Sequence
  ENSG00000162599_374 (sequence is synthesized)
gttgtatatgagatatgggtgcacaaaaacaggaaaagtcaattctgtctggtgtagacaggaagaattgtattacaaatccttcttaaggattttctattttgacatgcaagaggagca

SEQ ID NO: 487720 - DNA, 120 bp, Artificial Sequence
  ENSG00000162599_375 (sequence is synthesized)
ggcattccaggtatttgaatactgagagattcaaattatcagcaaggttctttccagttccacgtttgttgtgttatcagtgtaaaattatttgaatagctttccactgatgagttatta

SEQ ID NO: 487721 - DNA, 120 bp, Artificial Sequence
  ENSG00000162599_376 (sequence is synthesized)
gctgaaaagtgtttattgtcatggttgaaagaaaataataatgaaagaagaaacgattacctttagtgataaagttggggccggatgggacgaagcagtgcaatttttttctttataatt

SEQ ID NO: 487722 - DNA, 120 bp, Artificial Sequence
  ENSG00000162599_377 (sequence is synthesized)
attcccctatttgaaaaatcaacttgtatatgaggcagcaaacaccttgcagagcagcattcccttttagtttcaggacgtggtggtggatggaaccactgtaacctggcctccctccat

SEQ ID NO: 487723 - DNA, 120 bp, Artificial Sequence
  ENSG00000162599_378 (sequence is synthesized)
gagaggagggaatccaggtggccatgttgaaatgtgcctgtgtgcagcaaggcttctgaaatgacaagagagcccagcagcttccaaagcagctgtgactctggatctcacccatcatct

SEQ ID NO: 487724 - DNA, 120 bp, Artificial Sequence
  ENSG00000162599_379 (sequence is synthesized)
ctgcttctcactgttagaggagtgaatctgtgctgccttaggaggcatggaacctgggacttttcttccttgtttaatgtttaattttattaaaataatttgtaagtgatagatgttgat

SEQ ID NO: 487725 - DNA, 120 bp, Artificial Sequence
  ENSG00000162599_380 (sequence is synthesized)
ctcgtgacaaaagagagattccctctttataaaactattctaactaaagatcttttgtaagcccatgtgttagaaataaaacttgaatatccccttttttgttgttgtttatgaatggcc

SEQ ID NO: 487726 - DNA, 120 bp, Artificial Sequence
  ENSG00000162599_381 (sequence is synthesized)
aataatttattcacatgtgacatttgagctggcattttttcctcctgagatgacagtagcgtccgctgtgttgtattctaaagcaaagtcagaatagccctttgcttttgtcccgattag

SEQ ID NO: 487727 - DNA, 120 bp, Artificial Sequence
  ENSG00000162599_382 (sequence is synthesized)
tagttctgttttgccttcttgccttttccatttagaccttatggtatttcctaaaccttagactgttttgaaaggctttgattaaaatatgctgataaaagaattcgataaccaagttag

SEQ ID NO: 487728 - DNA, 120 bp, Artificial Sequence
  ENSG00000162599_383 (sequence is synthesized)
gaacgacaaggctatctggagaagaccaaatgacttggcagcctaacaaattctattcagagcacacaaagagatcctggaacgttttatagggactcgtgtgtggggaatggtatgaac

SEQ ID NO: 487729 - DNA, 120 bp, Artificial Sequence
  ENSG00000162599_384 (sequence is synthesized)
tcaggttacctgcaaaatatggtgtcatatggaaacatttaagagcttatggaaaattctttgaaataaagtggaatgagctagcaagcatattatacctaagaagaaaaacaagagcat

SEQ ID NO: 487730 - DNA, 120 bp, Artificial Sequence
  ENSG00000162599_385 (sequence is synthesized)
tcattctggttttttaaggtagctgctcaaggaagggagatagatgaaagtaaattgttttctactttgtacacataatatagaagagatcacctaagcctagttttgctaaccagaccc

SEQ ID NO: 487731 - DNA, 120 bp, Artificial Sequence
  ENSG00000162599_386 (sequence is synthesized)
tagacttaaaattagaggtcatgatgtctagccaccttcctctgtaggaacctctcgtgataccctgaaagcctctgcttaaatacttccagagaaaagtgaggaaggtaggggtgggga

SEQ ID NO: 487732 - DNA, 120 bp, Artificial Sequence
  ENSG00000162599_387 (sequence is synthesized)
tgaaggtttgcaggaactcgtgttgagtacctagtatctgcaagatactagagtaggtactttatcgccatctcatctgacttatgtatgagtgcaggttttataaccctcaagtttaca

SEQ ID NO: 487733 - DNA, 120 bp, Artificial Sequence
  ENSG00000162599_388 (sequence is synthesized)
agtgaggaaactaagtttatataagtgtcacgaaacttgcttcagttcagatgtctagcttgaggcaaatctgaaattagaacctaggtccatcttcttgcattacactaaactgcctct

SEQ ID NO: 487734 - DNA, 120 bp, Artificial Sequence
  ENSG00000162599_389 (sequence is synthesized)
caggatgagggagagctcccttcatggctaaggcaacctcttctgtctaataatgcagattctttaaaaattctttcttttatttaactgaaatctgcctcccattaacatctctcattg

SEQ ID NO: 487735 - DNA, 120 bp, Artificial Sequence
  ENSG00000162599_390 (sequence is synthesized)
gtcctgattcggcctcaggaggatcacagagctgatgcaattctctttccttatgcaggtatgtttgcaaccactgctgccaaaatggcctctgccatcttttacctagttggttttttt

SEQ ID NO: 487736 - DNA, 120 bp, Artificial Sequence
  ENSG00000162599_391 (sequence is synthesized)
cacacacacacacacacactcacagaaatatcctcttattgactgcaatccatctttcaacatatggagttctttttgaatactagaggtatagccttaaagaatatgagtatcagaaga

SEQ ID NO: 487737 - DNA, 120 bp, Artificial Sequence
  ENSG00000162599_392 (sequence is synthesized)
agccttaaagaatatgagtatcagaagatactttagtttcatctttccctgcctgattcatcagccaattgttagtatgccatcagtcaagccattaataaaaataatgaacaaggtgaa

SEQ ID NO: 487738 - DNA, 120 bp, Artificial Sequence
  ENSG00000162599_393 (sequence is synthesized)
caggataggttaacttgtagtctatgtataagtttctgaagttgcatgcagaatttagcctatatgtgaatttttctggaaaaatggtcagtaactattgtcagattccttttttttttt

SEQ ID NO: 487739 - DNA, 76 bp, Artificial Sequence
  ENSG00000162599_394 (sequence is synthesized)
tgtccggccaggctggtctcctcctgacctcaggcagtctgcctgcctcggcttcccaaagcgctgagattaaaat

SEQ ID NO: 487740 - DNA, 79 bp, Artificial Sequence
  ENSG00000162599_395 (sequence is synthesized)
cgccatgatggccaggctggtctcctcctgacctcaggcagtctgcctgcctcggcttcccaaagcgctgagattaaaa

SEQ ID NO: 487741 - DNA, 65 bp, Artificial Sequence
  ENSG00000162599_396 (sequence is synthesized)
ctgcactccagcctgggtgacagaacaaaactcccatctcaaaaaaaaaaaaaaatgccaggtag

SEQ ID NO: 487742 - DNA, 120 bp, Artificial Sequence
  ENSG00000162599_397 (sequence is synthesized)
gcactccagcctgggtgacagggcaagattccatattaaaaaaaaaaaaagtattgagaagtactcagagtagagaacttactcccgaatgaatatactaacctctttgaggagagctcc

SEQ ID NO: 487743 - DNA, 120 bp, Artificial Sequence
  ENSG00000162599_398 (sequence is synthesized)
ccgaatgaatatactaacctctttgaggagagctccccaaatgaccataaattcatatagctcagccatcactagaccgtgtatttcagccagaagatatggtgaatggtcttgtaagat

SEQ ID NO: 487744 - DNA, 120 bp, Artificial Sequence
  ENSG00000162599_399 (sequence is synthesized)
gcctgactaaattaaagtattaaagtatttcttgaattctcttgatattcctggactttgagaaagaataattatgcccttaaaaatggaaaaagagactgcaatattgttatacaggcc

SEQ ID NO: 487745 - DNA, 120 bp, Artificial Sequence
  ENSG00000162599_400 (sequence is synthesized)
ttttaaaaaaaaagtatccttaaatttttagttacagagttcacttttttcccctacttttctttgttttagattataagcccaggattgttcaccagaaggttaccctttagtctgcag

SEQ ID NO: 487746 - DNA, 120 bp, Artificial Sequence
  ENSG00000162599_401 (sequence is synthesized)
gaacctttgaaaacagatgtggtattgaagaatatctctgtaagcccagaacttatccattgtataaagaattttattttccccagtagaccgggagctcctcaagggcagggacctttg

SEQ ID NO: 487747 - DNA, 120 bp, Artificial Sequence
  ENSG00000162599_402 (sequence is synthesized)
caagtctttgactccctagcactgaacccagcatctggcaaatcttatttcatgtgactttattttggctgaatggcctaaaaatgcgcttgtactgagcacctaatacatttaatttaa

SEQ ID NO: 487748 - DNA, 120 bp, Artificial Sequence
  ENSG00000162599_403 (sequence is synthesized)
catttaatttaatttttaaatttttattcaataatgtagacgtggagtccccctatgttgcccacgctggctcaaactcctggcctcaaggatgttcctgcctcagtctcccaaagtgct

SEQ ID NO: 487749 - DNA, 120 bp, Artificial Sequence
  ENSG00000162599_404 (sequence is synthesized)
atgagccactgcaccaagccctaatacatttaataaattgtaaggaggaagaacagtggaccgcagtgagatatggtctacagggaaaatgaagaacctcttcaaaaatgatgatcttca

SEQ ID NO: 487750 - DNA, 86 bp, Artificial Sequence
  ENSG00000162599_405 (sequence is synthesized)
aaacatagcgaaaccacatctctaccgaaaaatacaaaaattagccatgcttgtagtcctagctattaatacgtgggaggctgagg

SEQ ID NO: 487751 - DNA, 120 bp, Artificial Sequence
  ENSG00000162599_406 (sequence is synthesized)
atgcttgtagtcctagctattaatacgtgggaggctgaggtgggaagatggtttgagtccgggaggtggaggttacagtgagccactgtaccccaacctgggtgacagagtgagacccca

SEQ ID NO: 487752 - DNA, 120 bp, Artificial Sequence
  ENSG00000162599_407 (sequence is synthesized)
tctcaaaaccaaaaaagatgacctttattatgtttgacatttaaaaaaatgtagccaaagtaaaagtgttgattagcataaccccgatcacatgttgttgttgaaaatgagcactggctt

SEQ ID NO: 487753 - DNA, 120 bp, Artificial Sequence
  ENSG00000162599_408 (sequence is synthesized)
gcataaaatggacattcatggacatgaaatggacattaatgattttacatatgttaagaagagaattttagacttgagaccttagggagatctgttgatagaattccctatgctctacag

SEQ ID NO: 487754 - DNA, 120 bp, Artificial Sequence
  ENSG00000162599_409 (sequence is synthesized)
tccctatgctctacagataaggatacttagtgaagggactttcctaagctcacagacccagaagagtagtactctttccagccaatggtgatgcttacttatgttttttttttttttttt

SEQ ID NO: 487755 - DNA, 120 bp, Artificial Sequence
  ENSG00000162599_410 (sequence is synthesized)
caggtgtgagccaccgcgcccggcctacttatgtgttttagaaaaatctttaaaatgttaaaagatgacaggtaatttctagaccatatgaagtagcccagttgtcccaggattagttta

SEQ ID NO: 487756 - DNA, 120 bp, Artificial Sequence
  ENSG00000162599_411 (sequence is synthesized)
ttagtttattatgtgtatatcagccattattttacagagtcatctcacataaatccacacaaccttaaaggattaaaggatggtttctgtgcaactgaaacatatgcacagaatgacaat

SEQ ID NO: 487757 - DNA, 60 bp, Artificial Sequence
  ENSG00000162599_412 (sequence is synthesized)
ccgagtagctgggattataggtgcacgccacatcttggaactcctgacctcaagtgatcc

SEQ ID NO: 487758 - DNA, 77 bp, Artificial Sequence
  ENSG00000162599_413 (sequence is synthesized)
tcatgctactttataatctgaagttaccagttctttgcagtgtttcacattaggggcattctccaaagggaacttta

SEQ ID NO: 487759 - DNA, 120 bp, Artificial Sequence
  ENSG00000162599_414 (sequence is synthesized)
cagtgtttcacattaggggcattctccaaagggaactttagagataacaaatatgttaaaaatatcgaataaagttagagatgtggggagacattcctactcctacagagagcaaccata

SEQ ID NO: 487760 - DNA, 120 bp, Artificial Sequence
  ENSG00000162599_415 (sequence is synthesized)
ccttcctatagactgtgcactgaagaaagggcggaggggatgcgcctgttagagttagaatcttggcttgataggcaaggaaattgacccggtgtggtggttcttatattggtaagaaga

SEQ ID NO: 487761 - DNA, 120 bp, Artificial Sequence
  ENSG00000162599_416 (sequence is synthesized)
cccttctttggtttctttttttccagatagctaaagtcaatgtcagtgattgcttcaagcatgatagtcttaccagcctacactctaagcttttcttatgcttccagaatgacttactca

SEQ ID NO: 487762 - DNA, 120 bp, Artificial Sequence
  ENSG00000162599_417 (sequence is synthesized)
gcaatcacttctactttgtattaaaacagttttggttattcaggtaggaagaagagaaaaaaaccaggctgtttccagttgtctggggtttacattatgttacctctcagactgttagtg

SEQ ID NO: 487763 - DNA, 120 bp, Artificial Sequence
  ENSG00000162599_418 (sequence is synthesized)
aaatcagggagactagtggtttttacggcatcagagataccaaatgtacaacagacagatgtcatcttactctttttaagtcatggacaaaaagacagacacattgccctgtaactttca

SEQ ID NO: 487764 - DNA, 120 bp, Artificial Sequence
  ENSG00000162599_419 (sequence is synthesized)
gatcttctgtaacctttttaaacaacataggagagaagttggtacttgtacccaagggaagagaaagttaatgagtagaaaagacagaatttatttaggaaaacgatggaattaagctct

SEQ ID NO: 487765 - DNA, 120 bp, Artificial Sequence
  ENSG00000162599_420 (sequence is synthesized)
ggacaaaacatgcatcagtgatgcataacatttttgttaattgggtcttaacaggtttctgactcatatggtaatcattgtagaagtgggtcttactagaccacgccagtggcaaattgc

SEQ ID NO: 487766 - DNA, 120 bp, Artificial Sequence
  ENSG00000162599_421 (sequence is synthesized)
gaagctgtaagaactcttacctccctgtgtgtgtgcacctgagtgtgtgggggggcgtacgtttctgtagcttaatttaggttccacatacacttcagtggttaaacctgagctagactc

SEQ ID NO: 487767 - DNA, 120 bp, Artificial Sequence
  ENSG00000162599_422 (sequence is synthesized)
aaatagtttgtttccattaagaaaatgaatcttttatgtggaccaaggtcaggttagttaatttgtttgcttttattggaataacttttcccattccaattcatcacttaattttaagtg

SEQ ID NO: 487768 - DNA, 120 bp, Artificial Sequence
  ENSG00000162599_423 (sequence is synthesized)
gttctactaaaatacccattaaagtcctttacatttctcacagactagggctatgacagattcataagacgtttcttttttcctcaaggcacaaaaggtagcttttctggtcatcaatct

SEQ ID NO: 487769 - DNA, 120 bp, Artificial Sequence
  ENSG00000162599_424 (sequence is synthesized)
agtcttccttgttcctaatttcacaacagtggggcaacattttatataataccaatatgaactctaattgcaaagagactaaatgaaatcttcacacgaagcaagattaattaaaatata

SEQ ID NO: 487770 - DNA, 120 bp, Artificial Sequence
  ENSG00000162599_425 (sequence is synthesized)
aaatgtgcttgactgtggtaaaacatttcttttaaaaaaaatagtatgacttttttttttttttttgctaaatctttcttttttgtacacctcaccctcttcttcactgatgcattttcc

SEQ ID NO: 487771 - DNA, 120 bp, Artificial Sequence
  ENSG00000162599_426 (sequence is synthesized)
agcaactggaagttcactctggctaggaaagtaactaaatgtgatgttatcattctaattagtgattacaaaagatcaattaatgttataattaaaaacagtgtctagatctgttgtttg

SEQ ID NO: 487772 - DNA, 120 bp, Artificial Sequence
  ENSG00000162599_427 (sequence is synthesized)
tagtgaataaatgtgacaattactttgttcattgacatagatgtgttgaatttcctccctagattttaaggggatgcattttagtgctgatgtgtgcatttaactgtggacagtaggaac

SEQ ID NO: 487773 - DNA, 120 bp, Artificial Sequence
  ENSG00000162599_428 (sequence is synthesized)
aaggcaagcatattaggggaagagtagggcccctaatgtctaagctacagacatattttagcatgcttgacacctttccttggtatatgatgctatatcagcaacttgtactcattggat

SEQ ID NO: 487774 - DNA, 120 bp, Artificial Sequence
  ENSG00000162599_429 (sequence is synthesized)
ctggagcctctagcttttaatattttatcactaaatgcttaagtgtttatgttgcaaaaagaaaaggaaaaaaaaaagattcccacttggactctcaaaccatgtgaacaggctactcta

SEQ ID NO: 487775 - DNA, 120 bp, Artificial Sequence
  ENSG00000162599_430 (sequence is synthesized)
tgataactatgtcattaatgattttggtttcatttatggcaataatttttaagttgatcagtcaggatagtaagtatgtgatttttgcagatctggttgaatttttttctgatacagacc

SEQ ID NO: 487776 - DNA, 120 bp, Artificial Sequence
  ENSG00000162599_431 (sequence is synthesized)
aagctgtttttcatacattgaagcctgggaaagctctgttactgttaaaagagtaaccatatctcttcactgaattgttgccaagcagatgtagacttttggagtgtgcccagaaaacct

SEQ ID NO: 487777 - DNA, 120 bp, Artificial Sequence
  ENSG00000162599_432 (sequence is synthesized)
ctacagctgatactttggtgacttgttcctactcctggctttactggcacctatttaaatagcagaggaacataattgtgttttggtaggtcaaaattttatacacttctgtagaaaaaa

SEQ ID NO: 487778 - DNA, 120 bp, Artificial Sequence
  ENSG00000162599_433 (sequence is synthesized)
ttatatataggtaagccaattggtagaaatgaagtaaacccaatttgcttgttgagattagcactgaagatatgctaagctttggttatgtcatttggtcaaaaaagaatgaggaaaatc

SEQ ID NO: 487779 - DNA, 120 bp, Artificial Sequence
  ENSG00000162599_434 (sequence is synthesized)
cctcagaaaagttatctgagagatcagcactgaacgtcaagccagcctgtccactcccattactaaaagaaatctccccttttaacttcatcccataaatggatcatgcttcctggatcc

SEQ ID NO: 487780 - DNA, 120 bp, Artificial Sequence
  ENSG00000162599_435 (sequence is synthesized)
acccgaggaggacgtggtttagttttagattcttagattacagacttccaccatcagtttcagtattcttttcacgatattaatgttatgaaaactgttagaaatgaggaaataccgcca

SEQ ID NO: 487781 - DNA, 120 bp, Artificial Sequence
  ENSG00000162599_436 (sequence is synthesized)
tgtcaggttcactcatggatcaagaaatgagcattttcttaaacatcagtccaaaacaacaaacctcaagtaccataagttcagataacttgggagcagttgaaatcctttaagccacaa

SEQ ID NO: 487782 - DNA, 120 bp, Artificial Sequence
  ENSG00000162599_437 (sequence is synthesized)
agatagtgtcttttggcatggctggtgaaagaaggaagctggttgaattcattgactaactctgttgctggctaaaaagacaattaaggagaaaagggatggaagaagaaaagaaccaaa

SEQ ID NO: 487783 - DNA, 120 bp, Artificial Sequence
  ENSG00000162599_438 (sequence is synthesized)
gaaactaaaatctgtttctttttcaggaggagttggaagatgaggagtaacacaacactttagatatacatgttaaaaacttataacaaatcatagatcatactaaaggattaccgaagt

SEQ ID NO: 487784 - DNA, 120 bp, Artificial Sequence
  ENSG00000162599_439 (sequence is synthesized)
ttagaacatggctgagggtatagatgtcagattttcttacacaatagtgggtcttttgtttcagagttcactcttggcaagcaactccctaccactgcgttaatttcctgtcgatctttc

SEQ ID NO: 487785 - DNA, 120 bp, Artificial Sequence
  ENSG00000162599_440 (sequence is synthesized)
attcagcaacagacctagagatggggagcagacactgccccccccacccaggctttttaagactgtgctttgtgtagattaaaaagacgaaggaaaaaagaataaactttttccaaacaa

SEQ ID NO: 487786 - DNA, 120 bp, Artificial Sequence
  ENSG00000162599_441 (sequence is synthesized)
aaaccggagcgtcctctctaaaggcacaggctgctgctgcatttccctctctttcttttctctttccatcttttctttttttcatgtctcatgtcatttctgtaatgttccctttcttag

SEQ ID NO: 487787 - DNA, 120 bp, Artificial Sequence
  ENSG00000162599_442 (sequence is synthesized)
ggacccagagcttttctttggagcctcccatagaagagagactgggatttaaaggctgatgccagaaagcaaaagctaacgtgaaaagaatccaagtctctgtccagtgtgtgagaatct

SEQ ID NO: 487788 - DNA, 120 bp, Artificial Sequence
  ENSG00000162599_443 (sequence is synthesized)
acaatgctttgagccttaccgcatttcagtgggggaaaaaaagttacctaggaggtctgatttttcaaagaaatttgcatacatgcaaatgtgccgcccggcctcctcctcggttctcta

SEQ ID NO: 487789 - DNA, 120 bp, Artificial Sequence
  ENSG00000162599_444 (sequence is synthesized)
caaaccgattcgtcagtgttggaccacgggatccaagctttgtaaatatccctcaacagacacagggatgcagctgctgaatctgggtactgggaatgccacaacctgcagttttgccag

SEQ ID NO: 487790 - DNA, 120 bp, Artificial Sequence
  ENSG00000162600_0 (sequence is synthesized)
gtcaccgctttcgcttctgcttgagtagtcaagtgaaaaaatgagcttcatctgtggattgcagtctgctgctagaaaccatgttttcttccgatttaattcactgtctaactggagaaa

SEQ ID NO: 487791 - DNA, 120 bp, Artificial Sequence
  ENSG00000162600_1 (sequence is synthesized)
atgtaacacattagcatccacctcacggggctgtcatcaagtacaagttaaccatatagtaaataagtatcagggactgggagtaaatcagtgtgacaggtggagttttctgcctggaaa

SEQ ID NO: 487792 - DNA, 120 bp, Artificial Sequence
  ENSG00000162600_2 (sequence is synthesized)
ctttcatttttatagtacttttaacaacaaaagaacaggaggcctctcaagtaccaaaagtaaggaaatttggaggattaccagcaaatgtactgtatggaatgatgctttttcaagaca

SEQ ID NO: 487793 - DNA, 120 bp, Artificial Sequence
  ENSG00000162600_3 (sequence is synthesized)
gctgctaataaaagaagttacagcagtccctagtctgtcagtattgcatcctctaagccctgcttccataagagctattaggaatttccatacttctccacggtttcaagctgctccggt

SEQ ID NO: 487794 - DNA, 120 bp, Artificial Sequence
  ENSG00000162600_4 (sequence is synthesized)
tcctctcttgttgatgattcttaaaccagtacagaagttatttgcaatcattgtaggcaggggcataaggaaatggtggcaggcacttcctcctaacaagaaggaagtagttaaagaaaa

SEQ ID NO: 487795 - DNA, 120 bp, Artificial Sequence
  ENSG00000162600_5 (sequence is synthesized)
tataaggaagaataaatggaagctattccttggtttgagtagttttggattgctctttgtggtgttttattttactcacctggaagtaagtccaatcacaggaaggagcaagctactatt

SEQ ID NO: 487796 - DNA, 120 bp, Artificial Sequence
  ENSG00000162600_6 (sequence is synthesized)
attggggaaagaacagttcagacttttatcggaactggaatatgaagcatggatggaagaatttaaaaatgatatgctaactgagaaagatgcccgatacctggctgttaaagaagtgct

SEQ ID NO: 487797 - DNA, 120 bp, Artificial Sequence
  ENSG00000162600_7 (sequence is synthesized)
catgtggttgattccccaattattaatgccttcgtgcttccaaatggacaaatgtttgttttcactggatttttaaatagtgtaaccgatattcatcaactttctttccttctgggccat

SEQ ID NO: 487798 - DNA, 120 bp, Artificial Sequence
  ENSG00000162600_8 (sequence is synthesized)
gaaatagcacatgcagtacttgggcatgctgcagaaaaggctggcatggttcatttgttggatttcctaggtatgattttcctcacaatgatttgggccatttgtcctcgagatagcttg

SEQ ID NO: 487799 - DNA, 120 bp, Artificial Sequence
  ENSG00000162600_9 (sequence is synthesized)
gcacttttgtgccagtggatacagtctaaattgcaggagtatatgtttaatagaccatacagcagaaaattggaggccgaagctgacaaaattggactactgcttgctgcaaaggcttgt

SEQ ID NO: 487800 - DNA, 120 bp, Artificial Sequence
  ENSG00000162600_10 (sequence is synthesized)
gcagacataagagccagttcagtgttttggcagcaaatggagttcgttgatagcctgcatggccaacccaagatgccagaatggttatctacacacccttctcatggcaatcgagttgag

SEQ ID NO: 487801 - DNA, 120 bp, Artificial Sequence
  ENSG00000162600_11 (sequence is synthesized)
tacttggatagacttatacctcaggctctcaaaattagagagatgtgtaattgtccaccactgtctaatccagaccctcgattactattcaaactcagcacgaagcattttcttgaagaa

SEQ ID NO: 487802 - DNA, 120 bp, Artificial Sequence
  ENSG00000162600_12 (sequence is synthesized)
tcagagaaagaagacctaaatatcacgaagaaacagaaaatggatactcttcctattcaaaaacaggagcaaataccattaacatacatagttgagaaaagaacgggcagttgaattaaa

SEQ ID NO: 487803 - DNA, 120 bp, Artificial Sequence
  ENSG00000162600_13 (sequence is synthesized)
atttatgagacacaagatatatgaagaatgttgcagtccttatcattttatgttactttttaaaaaatgatgtttgaagtgaaaaaaaaaaggatattcagggtcaaatcatgtacatta

SEQ ID NO: 487804 - DNA, 120 bp, Artificial Sequence
  ENSG00000162600_14 (sequence is synthesized)
gggtcaaatcatgtacattacagatattatctaaattcttctagaatttatttttcatgaaatattgatgtattttaatctatgttaaaatatcttcaatgaggaaaatgtcacagaata

SEQ ID NO: 487805 - DNA, 120 bp, Artificial Sequence
  ENSG00000162600_15 (sequence is synthesized)
gggaagtgatgaataaatgaaagaaggtcagccaggcggaatgtttctgcttcatctctgctcatatacagtgtagcggccatggaggggtaccactcagatcactcttcaagtgagtcc

SEQ ID NO: 487806 - DNA, 120 bp, Artificial Sequence
  ENSG00000162600_16 (sequence is synthesized)
tctgtggcatgcatgactgacaaatgctccagctgtcacaccttcaggcccatggtaactgaatatagcaggggcactagagctgggccgttcctgctgcacatgagatggtgtcatgga

SEQ ID NO: 487807 - DNA, 120 bp, Artificial Sequence
  ENSG00000162600_17 (sequence is synthesized)
tgactattgcatgaggactccctgttgacctggccaaaactttcttagaactgcactgtagtcacagctcttcctacttcctcctccttctttcccactctcctttctcgcacttcagac

SEQ ID NO: 487808 - DNA, 120 bp, Artificial Sequence
  ENSG00000162600_18 (sequence is synthesized)
tcacatcatggtctgaaggctctctctgcctcctcctgatcctctcctttgtcatgcaccagagcttctccaatacatctcatgcacagctaatcccatcttggtgtctacttcctgaag

SEQ ID NO: 487809 - DNA, 120 bp, Artificial Sequence
  ENSG00000162600_19 (sequence is synthesized)
aatgctaatgcaaagacacagtgactctgtttttcagcccacatgtctctcacctgggaaacagatcaattctatgatatcatcatgcaatggaatactatagggcagtcaaaatgaacg

SEQ ID NO: 487810 - DNA, 120 bp, Artificial Sequence
  ENSG00000162600_20 (sequence is synthesized)
aattagagatataggcatcaacatacatacatctcaaaaagataatgttgagcaaaaacaaaaatgttgcagagtgatacatacagtatgtaacatttatacaaagttttaaaacttgtg

SEQ ID NO: 487811 - DNA, 120 bp, Artificial Sequence
  ENSG00000162600_21 (sequence is synthesized)
acatttatacaaagttttaaaacttgtgaaacaatgtcatatataatttgtagatgagtacatatgtgacaaaagcataaaaacacactaagggctgggtgcggtggctcgcgcctgtaa

SEQ ID NO: 487812 - DNA, 120 bp, Artificial Sequence
  ENSG00000162600_22 (sequence is synthesized)
gcttctgcttgagtcagtcctcacgctactcatggatgtctttttaagaatgcatacagttctcattctgttgcccacgccggagtgtagtggcacaattttggctcactgcagtctctt

SEQ ID NO: 487813 - DNA, 120 bp, Artificial Sequence
  ENSG00000162600_23 (sequence is synthesized)
aggaaactgaagcacataaggtcaaatgaacagcctgaggttacctgcttaataagaagtctggctaagttgtatgctattgaagttaaagggatttaatgcgggatatttgtcttctgg

SEQ ID NO: 487814 - DNA, 120 bp, Artificial Sequence
  ENSG00000162600_24 (sequence is synthesized)
gtgaaaatctaaagcaatggctccccatattctgaccaccgatgaccacatatctgattttcttacatcattaactccacccttgaaagatttcatccaataaaaacactgtactcatta

SEQ ID NO: 487815 - DNA, 120 bp, Artificial Sequence
  ENSG00000162600_25 (sequence is synthesized)
gatagacttatacctcaggatatgcatgtatccccaagggcagccagggactttgaaagagcccagtggaacctacacctaagtggaaatggaattctttccttttattaaaaccttcag

SEQ ID NO: 487816 - DNA, 120 bp, Artificial Sequence
  ENSG00000162600_26 (sequence is synthesized)
acttttgtgccagtggatacagtctaaattgcaggagtatatgtttaatagaccatacagcagaaaattggaggccgaagctgacaaaattggactactgcttgctgcaaaggctctcaa

SEQ ID NO: 487817 - DNA, 120 bp, Artificial Sequence
  ENSG00000162601_0 (sequence is synthesized)
aggtcccatcatggcggctgaagaggcggatgtggatatcgaaggggacgtggtagcggcggcgggggcacagccaggaagtggtgaaaatacagcatcagttttacaaaaagatcacta

SEQ ID NO: 487818 - DNA, 120 bp, Artificial Sequence
  ENSG00000162601_1 (sequence is synthesized)
tcttgattcatcttggagaacagagaatggccttattccttggaccttggataacaccatcagtgaagagaacagagctgttattgagaaaatgttgttggaagaagaatattatttatc

SEQ ID NO: 487819 - DNA, 120 bp, Artificial Sequence
  ENSG00000162601_2 (sequence is synthesized)
taaaaaatcacaaccggaaaaagtctggcttgatcaaaaggaagatgataaaaaatacatgaagagtctgcagaaaacagcaaaaatcatggtacactctcctacaaaaccagccagtta

SEQ ID NO: 487820 - DNA, 120 bp, Artificial Sequence
  ENSG00000162601_3 (sequence is synthesized)
ctcagtaaagtggacgatagaagaaaaagagctgtttgaacaagggctggctaaatttggccgaagatggaccaaaatttcaaagctaattggaagccgcactgttttacaagtgaagag

SEQ ID NO: 487821 - DNA, 120 bp, Artificial Sequence
  ENSG00000162601_4 (sequence is synthesized)
ttatgcaagacagtattttaaaaataaggtcaaatgcggtctggataaagaaacaccaaatcagaagaccggccataatcttcaagttaaaaatgaagataaagggacaaaggcatggac

SEQ ID NO: 487822 - DNA, 120 bp, Artificial Sequence
  ENSG00000162601_5 (sequence is synthesized)
accatcatgtttaaggggacgtgctgatcccaacttgaatgctgtaaaaattgaaaagttatctgatgatgaagaagtagacatcacagatgaggtggacgagttgtcttctcaaacacc

SEQ ID NO: 487823 - DNA, 120 bp, Artificial Sequence
  ENSG00000162601_6 (sequence is synthesized)
ccagaagaattctagcagtgatctcttgttagactttcctaatagtaaaatgcatgaaaccaatcaaggagaattcattacttctgacagccaggaagctctcttttctaagtcttccag

SEQ ID NO: 487824 - DNA, 120 bp, Artificial Sequence
  ENSG00000162601_7 (sequence is synthesized)
gggctgtcttcaaaatgaaaagcaagatgaaacactttcaagctcagaaattacactgtggactgagaaacagagcaatggtgacaaaaaatcaattgaattaaatgaccagaaatttaa

SEQ ID NO: 487825 - DNA, 120 bp, Artificial Sequence
  ENSG00000162601_8 (sequence is synthesized)
tgaattgattaaaaactgcaacaagcatgatggaaggggaataatagttgatgccaggcagttgccttctccagagccttgtgaaattcagaaaaatttgaatgataatgaaatgctttt

SEQ ID NO: 487826 - DNA, 120 bp, Artificial Sequence
  ENSG00000162601_9 (sequence is synthesized)
tcattcttgccaaatggtagaggaaagccatgaggaagaagagcttaagccaccagaacaggaaatagaaatagatagaaatatcattcaagaagaagaaaaacaagcaattcctgagtt

SEQ ID NO: 487827 - DNA, 120 bp, Artificial Sequence
  ENSG00000162601_10 (sequence is synthesized)
ttttgaggggcgccaagctaaaacaccagaacgctatttgaaaattagaaattatattttggatcaatgggagatatgcaaaccaaaatacttaaataagacctcagtacgtcctggcct

SEQ ID NO: 487828 - DNA, 120 bp, Artificial Sequence
  ENSG00000162601_11 (sequence is synthesized)
gaagaactgtggagatgttaattgtattggacggattcatacatacctcgaattgataggagcaatcaattttggatgtgaacaggctgtgtataataggccacaaacagttgacaaagt

SEQ ID NO: 487829 - DNA, 120 bp, Artificial Sequence
  ENSG00000162601_12 (sequence is synthesized)
acgaatcagagacagaaaagatgcagtagaagcataccaacttgcccagcgtctgcagtctatgcgtacaaggagacgtagggtccgagacccatggggaaactggtgtgatgcaaagga

SEQ ID NO: 487830 - DNA, 120 bp, Artificial Sequence
  ENSG00000162601_13 (sequence is synthesized)
cttagaaggacaaacgtttgagcatctctctgctgaggagttggcaaaaagaagagaagaggaaaaaggcagacctgttaaatctttaaaagtgccaagaccaacaaaaagctcgtttga

SEQ ID NO: 487831 - DNA, 120 bp, Artificial Sequence
  ENSG00000162601_14 (sequence is synthesized)
tcccttccaactgataccttgtaatttttttagtgaagaaaagcaggagccatttcaggtgaaagtggcttcagaagcacttttaataatggatttgcatgctcatgtttctatggcaga

SEQ ID NO: 487832 - DNA, 120 bp, Artificial Sequence
  ENSG00000162601_15 (sequence is synthesized)
agtgattggtctgttaggaggaagatactcagaagttgataaagtagttgaagtctgtgcagcagaaccatgtaacagtctgagtacaggactacagtgtgagatggatcctgtatcaca

SEQ ID NO: 487833 - DNA, 120 bp, Artificial Sequence
  ENSG00000162601_16 (sequence is synthesized)
aacacaggcctcagaaaccttggctgttagaggcttcagtgttattggatggtatcattctcatcctgcttttgatcctaatccttccttacgagatattgacacacaagctaaatacca

SEQ ID NO: 487834 - DNA, 120 bp, Artificial Sequence
  ENSG00000162601_17 (sequence is synthesized)
gagttacttctccagaggaggtgcaaagttcattgggatgattgttagtccctataatcgaaataatcccttaccatattctcagattacctgcctggttataagtgaggaaattagccc

SEQ ID NO: 487835 - DNA, 120 bp, Artificial Sequence
  ENSG00000162601_18 (sequence is synthesized)
agatggctcttatcgcttaccttacaaatttgaagtacagcagatgttagaagaacctcagtggggattagtatttgaaaagacaagatggataatagaaaaatacaggctctcccatag

SEQ ID NO: 487836 - DNA, 120 bp, Artificial Sequence
  ENSG00000162601_19 (sequence is synthesized)
cagcgtccccatggataaaatctttcgccgggattctgacctgacttgtttgcagaaacttttggagtgtatgaggaagactctgagcaaagtgaccaattgctttatggctgaagaatt

SEQ ID NO: 487837 - DNA, 120 bp, Artificial Sequence
  ENSG00000162601_20 (sequence is synthesized)
cttgactgaaatagaaaatttgttcctttccaattataaaagcaaccaagagaatggagtaaccgaagagaactgtacaaaggaattgttaatgtgattattttaaagttaagacatttt

SEQ ID NO: 487838 - DNA, 120 bp, Artificial Sequence
  ENSG00000162601_21 (sequence is synthesized)
aatcttgacacagtagatcttactttcaaagttataaacttgaagtgattgtagttaacattggcacagctttggtattttttctctatttcacaaaatccaaactttgccacataaatc

SEQ ID NO: 487839 - DNA, 120 bp, Artificial Sequence
  ENSG00000162601_22 (sequence is synthesized)
atgtgaaaaggaagagatacaaatttgttttcatatagtgattatcagagtgttctgcaaaccagggtccaccacggtgttctagtcctttactgagcaatgctgtaggctgtgaaacta

SEQ ID NO: 487840 - DNA, 120 bp, Artificial Sequence
  ENSG00000162601_23 (sequence is synthesized)
agcaacctggtcggctttactgttgtgttcagcttgggatttggactatgtctctaagtcatttcttccctgaactagtcatttatgttccattgtggtatctcctatttcatttaaaag

SEQ ID NO: 487841 - DNA, 120 bp, Artificial Sequence
  ENSG00000162601_24 (sequence is synthesized)
cacttccattctttccatatattctgctgagatttgtttatggctataaatgagatatggatgggtggtcactgagataattaatatggtttagaactactgattaataaatctaacagg

SEQ ID NO: 487842 - DNA, 120 bp, Artificial Sequence
  ENSG00000162601_25 (sequence is synthesized)
agaccaggagaggcatgacaagaaaatcttaaaaacaggaaaaacccaaaggagagaactaaattaccagtttctaatcatagatactatcttccatttcattgtatagcagtagtatca

SEQ ID NO: 487843 - DNA, 120 bp, Artificial Sequence
  ENSG00000162601_26 (sequence is synthesized)
taagatatgccattttctcagctatctgaaaatttttaaccaattttacacacataaaataattagcttcaattgtgagtccacttacattagtaggtgtgataaaacctcatttaactg

SEQ ID NO: 487844 - DNA, 120 bp, Artificial Sequence
  ENSG00000162601_27 (sequence is synthesized)
gaacataggtaatcataactcaaactttttttctactgcctactactaggagaaagaggcaaatgataataaagctggaataaatcagagatttaatttttaaaacaagcctttcaggac

SEQ ID NO: 487845 - DNA, 120 bp, Artificial Sequence
  ENSG00000162601_28 (sequence is synthesized)
atgttacatattcagcccagtttcatatgctttctgaatctataatggaggtcagtgaacttttttaatgtaaagggccagtttgtaaataattttggcttttcaggccacatatgatgt

SEQ ID NO: 487846 - DNA, 120 bp, Artificial Sequence
  ENSG00000162601_29 (sequence is synthesized)
tgtgtgtgtgtgtgtgtgtgtgttttacagccctttaaaatgataaaaaccattgttaactcacaggcctcataaaacataggctgttggctattattctccaacccttgatctagagaa

SEQ ID NO: 487847 - DNA, 120 bp, Artificial Sequence
  ENSG00000162601_30 (sequence is synthesized)
ggctattattctccaacccttgatctagagaattttaaacattagaattttgttttacatttgttaagctttacgtcatcttcaaatgacaccaaaactcagaattatgatctgcattta

SEQ ID NO: 487848 - DNA, 120 bp, Artificial Sequence
  ENSG00000162601_31 (sequence is synthesized)
agccaattttaaaataaaataagcagtcaatgctgcctcatttattgaaattcagtagattttagtttatttcttagtagtcagagaattgatttatagctattcaccaaacattcttac

SEQ ID NO: 487849 - DNA, 120 bp, Artificial Sequence
  ENSG00000162601_32 (sequence is synthesized)
ataaggagtattggaagaagcagtgagtcagctttaggtgacctggttcttgtctcaactttgtgatttggggagatacagtttactttccctgagccttaattcttgtgtaactgaagt

SEQ ID NO: 487850 - DNA, 120 bp, Artificial Sequence
  ENSG00000162601_33 (sequence is synthesized)
ctaacttaacttcttaatgtccttccagaactaaaattttattgttcattctaatcgttggactactcttgtgaagtttatattttgagttaatacagtttccaaattaacatacattta

SEQ ID NO: 487851 - DNA, 120 bp, Artificial Sequence
  ENSG00000162601_34 (sequence is synthesized)
aaaaaaaaagggtagtatttttccatttctctgtgtgcacttaggataaacagtgaagtatagcttataaaacaattagtttgagggctgagagtgtaagaggaactataccaaaagtca

SEQ ID NO: 487852 - DNA, 120 bp, Artificial Sequence
  ENSG00000162601_35 (sequence is synthesized)
ggaaacctgagctcttaccctaactctgttaccaactttgctgtgtgaccttaatcaaaacacataacctggaccccatgctcctcaccagtaaatcaagggcctgaattttatggctta

SEQ ID NO: 487853 - DNA, 120 bp, Artificial Sequence
  ENSG00000162601_36 (sequence is synthesized)
gtattcccttccaagctccgaagttgcgtgattctgtgaaaggcagtgattgattcctttgtactcatcttccttttgacctgtttcctcatgatatattggggaacaaatactaaaaag

SEQ ID NO: 487854 - DNA, 120 bp, Artificial Sequence
  ENSG00000162601_37 (sequence is synthesized)
tgttttatactagctttcttgattgacatttccctataatactgatgaatttgggtgatggaaagtaatggaaattgttaaaagttctgctctcaaatctgagtctccttgccctgtgtg

SEQ ID NO: 487855 - DNA, 120 bp, Artificial Sequence
  ENSG00000162601_38 (sequence is synthesized)
ccaatgtttaaccatatttgctaatctaagccatattgcgaggatctcaaggatgatacttgtcaagagtttggggccttgagagcacagttttcaaaataatacttagtattttctgac

SEQ ID NO: 487856 - DNA, 120 bp, Artificial Sequence
  ENSG00000162601_39 (sequence is synthesized)
tatagagtacatttgtcttgtaaagtatattttaaaatacagagaagtgtgaagtacaaatatctcagtgctactatttaaaaaaacacaattagtatataaatccttccccattttttt

SEQ ID NO: 487857 - DNA, 120 bp, Artificial Sequence
  ENSG00000162601_40 (sequence is synthesized)
gacagtataattttagtatgttaaacttggttacttctttctctcttcctccatcattttccctgcttcctttttcttttgtcatattcttaaaacaattttgcaaccacaggtacccac

SEQ ID NO: 487858 - DNA, 120 bp, Artificial Sequence
  ENSG00000162601_41 (sequence is synthesized)
attgctggcactaccagccttgggctactaccgaggataatggagccagggccttgtagaagcacagaggaagtctagaactgagggggcctatgatacaggaagttcaggaggcagagt

SEQ ID NO: 487859 - DNA, 120 bp, Artificial Sequence
  ENSG00000162601_42 (sequence is synthesized)
ctcaaaggaacacctgcctttaataatgtttacagaagtggagaaaggactaaaggacttaaagacatgcaggtgtcttcatcctgattctgtctttgttattgcacaatgactataaaa

SEQ ID NO: 487860 - DNA, 120 bp, Artificial Sequence
  ENSG00000162601_43 (sequence is synthesized)
taatgacctaatttttttttttttctggcttggctaatggaaatcgacactagcgcttccccagtattagacttaatctaattccaaagtaacattcaagaaaagaaaaaccagtggaac

SEQ ID NO: 487861 - DNA, 120 bp, Artificial Sequence
  ENSG00000162601_44 (sequence is synthesized)
aggatcagtaagctcagactctccatctccattattttagccttgaccattcttctctaatccttttaaattatcttcagtttccagttcaagttacattgcttcagttacagtttgttt

SEQ ID NO: 487862 - DNA, 120 bp, Artificial Sequence
  ENSG00000162601_45 (sequence is synthesized)
gaccctgtattcagagctgcattatgattcttgtgggccctagatagttttgccatcttagaccccttcttccatacaaaattaaaagtgatattttacaattgtatctgtatgaaatga

SEQ ID NO: 487863 - DNA, 120 bp, Artificial Sequence
  ENSG00000162601_46 (sequence is synthesized)
atgtattaatattttagattaaaacattttgtttagaagttcagttttttcttatgaggctaaaaaaaattaaaacatttttgtgggcttctaaaaaactgtgggccttaggtactgtgc

SEQ ID NO: 487864 - DNA, 120 bp, Artificial Sequence
  ENSG00000162601_47 (sequence is synthesized)
ctaatggataagttggcattgcctgtattctgaagggcatcattggaaaaatagcagtcattattctgtccccttctcccaccaccacagtccttggagaagcctttgccactccatcca

SEQ ID NO: 487865 - DNA, 120 bp, Artificial Sequence
  ENSG00000162601_48 (sequence is synthesized)
ggagcactgcagtttccacggttatagatctatagacttgaacttacttccttcccaacctaacgaaaactcacaaggattacttgggaccattcatcctcaaaaaagataggaggcagt

SEQ ID NO: 487866 - DNA, 120 bp, Artificial Sequence
  ENSG00000162601_49 (sequence is synthesized)
ggtttgttttagtcttcagatatttttgttttggtcagtccctaatctgtagttttgaaactcgtgccacacttgaaagggaaacatcctactacctttctttcctctccatttcccaca

SEQ ID NO: 487867 - DNA, 120 bp, Artificial Sequence
  ENSG00000162601_50 (sequence is synthesized)
aaccctttccttcatcatcactccctgcattcttacttctcagcatataaatacaagacccttctttctattatttgttgaaagctaggcctgtaaaatagagatggacagaccatgcat

SEQ ID NO: 487868 - DNA, 120 bp, Artificial Sequence
  ENSG00000162601_51 (sequence is synthesized)
gtttccatgaagctatttaatgctgctcccagtcttctgtccataccattccttccctgcccctaggagtggggttgaggtctgtgacatgcagactgtaagcacagtcagaacctctgc

SEQ ID NO: 487869 - DNA, 120 bp, Artificial Sequence
  ENSG00000162601_52 (sequence is synthesized)
agctctcaacccaacagaggagactgtggcttcaacatgccaacctgagcaggtctcctctgcattaccttcctcccatttctcttcctgggtcctgatgaggtgagctggaggaaccaa

SEQ ID NO: 487870 - DNA, 120 bp, Artificial Sequence
  ENSG00000162601_53 (sequence is synthesized)
tagtcaggatgccctggaattgatgttgctctgttttgtgctcacaaaacagccatgtaacacatgagcacctgagttgaagccatccagtcgcaagtcagcagacagcagttgatggaa

SEQ ID NO: 487871 - DNA, 120 bp, Artificial Sequence
  ENSG00000162601_54 (sequence is synthesized)
ttctcagtagaaattcagtaagggtgcccaaattttattttttttttcacctatactctaccaatatatggtatttaggaaaacttcttttatccaagcacaaagaaaagcacacacatt

SEQ ID NO: 487872 - DNA, 120 bp, Artificial Sequence
  ENSG00000162601_55 (sequence is synthesized)
tttataatcatctgcttcatcagggtaaataaataatttaacaaatttgatcagcatctctagtttaccagtactttaatattagttttcttacaaattaatgtattttgcaatatttcc

SEQ ID NO: 487873 - DNA, 120 bp, Artificial Sequence
  ENSG00000162601_56 (sequence is synthesized)
agaaaatcactgtgggagaataatgtaatatactttaggatatatttcctgaccttttcttaaatggcttcatgtgctattcccccaaattctgctttctctattttcttttttatttaa

SEQ ID NO: 487874 - DNA, 120 bp, Artificial Sequence
  ENSG00000162601_57 (sequence is synthesized)
cctataattatactttctagtatattctgagtctatcttctaagccaccttacatttttcctggaacaagggagggaataaatagttgcctccactaaatcaggaaaaaataaaaatatc

SEQ ID NO: 487875 - DNA, 120 bp, Artificial Sequence
  ENSG00000162601_58 (sequence is synthesized)
ccaggggagctgtgattatgccaagagctctaaacagaagtttgagaaggtaaaaattaagttgtagtatctgagttgtttttattttcttcctttggtgtttatgaaggtattcataag

SEQ ID NO: 487876 - DNA, 120 bp, Artificial Sequence
  ENSG00000162601_59 (sequence is synthesized)
aactttaatttcaggggaaaaaaatgcctgatttgctatttttgacatttcctcgtctcttaagaagtcagttaaatatgttttcatagtttatattcctgtttcatagattactgtgaa

SEQ ID NO: 487877 - DNA, 120 bp, Artificial Sequence
  ENSG00000162601_60 (sequence is synthesized)
acatgtatttaaacctatgaattataaaatagtatttagattctagcgtgagttaaatagattagtcatatatcttttagatttgtggatttgacatgtaaattatgtgttgtgtataag

SEQ ID NO: 487878 - DNA, 120 bp, Artificial Sequence
  ENSG00000162601_61 (sequence is synthesized)
taagttagttactaaacatatggcatggttattgataaacttgttgctatttttttccaaatgctatcagtgtttgtggacttttaaaaattagtttgaattttggaatgttctgtgata

SEQ ID NO: 487879 - DNA, 120 bp, Artificial Sequence
  ENSG00000162601_62 (sequence is synthesized)
aaatgtaatttcaactattttgtacatttaaatatgccatgttgtatatgtctgtatttaaaaatgttgtaaatacctgcattttaagaattatgaaagattttcctcaaaaatgacaga

SEQ ID NO: 487880 - DNA, 120 bp, Artificial Sequence
  ENSG00000162601_63 (sequence is synthesized)
actctccatacttaattgtgacacattataagatatctgattttaagcttttggattttgttctaaaaattaagtttaaacatgctgaaaattccataaaaataaaattttgaaaataaa

SEQ ID NO: 487881 - DNA, 120 bp, Artificial Sequence
  ENSG00000162601_64 (sequence is synthesized)
ctcctgagtagctgggattatgggcgcacaccaccacacctggctgattttttatattatttatctaaaaaatcacaaccggaaaaagtctggcttgatcaaaaggaagatgataaaaaa

SEQ ID NO: 487882 - DNA, 120 bp, Artificial Sequence
  ENSG00000162601_65 (sequence is synthesized)
ggaaaaagtctggcttgatcaaaaggaagatgataaaaaatacatgaagagtctgcagaaaacagcaaaaatcattgttaccctcactcagacccaaggattatgtcttttggggctccc

SEQ ID NO: 487883 - DNA, 120 bp, Artificial Sequence
  ENSG00000162601_66 (sequence is synthesized)
caactgataccttgtaatttttttagtgaagaaaagcaggcgtaagacagagtatggaagacgtgtattttggatcttaactgtcctcttttacaaggaatctaaaaataagtcttttct

SEQ ID NO: 487884 - DNA, 120 bp, Artificial Sequence
  ENSG00000162601_67 (sequence is synthesized)
tttatacagcaccagactgctattatataatttcatgttacctatgtatgcaaaaagcagcattttcttcctcaggttctgttttactgtaacatctgagatctgattgcatattttgag

SEQ ID NO: 487885 - DNA, 120 bp, Artificial Sequence
  ENSG00000162601_68 (sequence is synthesized)
tttctgtcactagccaactgtttatgatatctgaatattgagtagaaatgatagaatatttaagtcattttgaaccttaagtccaagcttgcatttttaagttatataagctgaaaccca

SEQ ID NO: 487886 - DNA, 120 bp, Artificial Sequence
  ENSG00000162601_69 (sequence is synthesized)
gagatgttaattttccaagggcacagagttggaacatgtaaaagttcttctcacttcataatttacaggtgttacgtgggaggaatctaaataaaaagcacaaaacaaatactatagaat

SEQ ID NO: 487887 - DNA, 120 bp, Artificial Sequence
  ENSG00000162601_70 (sequence is synthesized)
gctttatccaggcacattcatgatcaacaaaggcagttagaatagccaacatcatcttcacttcaccctggaagacctggggggatgactcagggagatagagtcttactctgtcaccca

SEQ ID NO: 487888 - DNA, 120 bp, Artificial Sequence
  ENSG00000162601_71 (sequence is synthesized)
gccaccgcgcccggccactcttcttatttggatatcatatcagcaaagtttcagtgtgggaaatagaaaccatgtaaatattttatacaagaggggatttaacacaggaaattggatgct

SEQ ID NO: 487889 - DNA, 120 bp, Artificial Sequence
  ENSG00000162601_72 (sequence is synthesized)
tataaaactgttggaaaggggtgcagctctgggttctactcaaggctgccagaaatgaccaccagatgattcttactgtccaactgagggaactagaacctctgaggccacaattagggc

SEQ ID NO: 487890 - DNA, 120 bp, Artificial Sequence
  ENSG00000162601_73 (sequence is synthesized)
ctgctagaattaagaatttaccactgctgcagtgaccactactatttctgctgcctctgaacactgggaagctgtggctctgaccacccagggatcaggaagccaagcaagcagcccttg

SEQ ID NO: 487891 - DNA, 120 bp, Artificial Sequence
  ENSG00000162601_74 (sequence is synthesized)
ccaccagtgaatgaaggggccctacaaagcagttctccagaaaattcacatctccacagtcccacttgctagcgtccccctcgctgcccttttacatctcctgaacatctaaatggcaga

SEQ ID NO: 487892 - DNA, 120 bp, Artificial Sequence
  ENSG00000162601_75 (sequence is synthesized)
acccaatcagcatgcagaactctgatattctgggacttgaaatggttagttttctaaccattccagctagaggaaggacctggaatacaggtggagagtcgatccacacagtccaaagga

SEQ ID NO: 487893 - DNA, 120 bp, Artificial Sequence
  ENSG00000162601_76 (sequence is synthesized)
ggcagctgcatgcgaaggtcctgctaggtggaaggcgtaccctctatagacagaggacagtagagtacctgaaggaggaatcgttcctgatttaggttctctggggaagggaagggtgtc

SEQ ID NO: 487894 - DNA, 120 bp, Artificial Sequence
  ENSG00000162601_77 (sequence is synthesized)
ttagatcagataacaacagacagggggctctaatagctgtcttggccttcaccgtgaagttgggcctatgttgtgagtagaaatatatcacttaagaatatactggagaatattcttata

SEQ ID NO: 487895 - DNA, 120 bp, Artificial Sequence
  ENSG00000162601_78 (sequence is synthesized)
atacttgcctttcaagcaatgcacaaaaatcagaagccacaagggaaaaatatttttcccttcatggtaaaaaaaaattaaacaattaaaatccataatacataaagaaccccttaaaga

SEQ ID NO: 487896 - DNA, 120 bp, Artificial Sequence
  ENSG00000162601_79 (sequence is synthesized)
caacaagattgaaacattcaatggcagcaggtcacctacatgcttttccatagactggtgtgttgtacgtgctctatcttctgtcaagagcatttccactctagcctacctggaaaccct

SEQ ID NO: 487897 - DNA, 120 bp, Artificial Sequence
  ENSG00000162601_80 (sequence is synthesized)
ctattaatatcttaaccctcttagtaatgtatcttcttgatgcgttgcctgattttctctctgtggtggatactgaggtgcatggccagattgtccttcagggtcagggggccagtctct

SEQ ID NO: 487898 - DNA, 120 bp, Artificial Sequence
  ENSG00000162601_81 (sequence is synthesized)
ccagctgccaaggcagctgagtcttgtacctctacagaaagaagctggtatccaatgattagttatccaatgactggtaactataggagtacaaatacctggagtccttgcctcaatagg

SEQ ID NO: 487899 - DNA, 120 bp, Artificial Sequence
  ENSG00000162601_82 (sequence is synthesized)
acaactcagtagagacatgccagctccagagatgctcatgggattggcgatggcctctgttcagcttttcctgtgtccaaacaatcctgcctccctcaccccagacaagtgttgttgcca

SEQ ID NO: 487900 - DNA, 120 bp, Artificial Sequence
  ENSG00000162601_83 (sequence is synthesized)
agagtacttcccaaaaaactcttgcaaatctcaccagagtatcagagtctgtctgggaacctgaactatgaaactctactgttgatggtttatagattttttccatagtgatatgtgtca

SEQ ID NO: 487901 - DNA, 120 bp, Artificial Sequence
  ENSG00000162601_84 (sequence is synthesized)
atttgtttcattcatcttaatggcatcccattatataaacatactacagtttagttattcttccctttcgatgaaaatgtaggtcatttccaatatttgtgatgtcacaaactgtgctgc

SEQ ID NO: 487902 - DNA, 120 bp, Artificial Sequence
  ENSG00000162601_85 (sequence is synthesized)
gttaacaaaaggattaatgggttgcttaaattagtgagcttcatcagttttatttttaattccttgagataatgaattttaaaagcaataaatacaatgctgtagtttttgacttctttt

SEQ ID NO: 487903 - DNA, 120 bp, Artificial Sequence
  ENSG00000162601_86 (sequence is synthesized)
ctaaatatttacatggatttacatgaaagaactaaagagatagtatttgtggaaccaatttaaactcttacatgcctttcaggatttgggaatgtattaacacctgctgctttgtatcca

SEQ ID NO: 487904 - DNA, 120 bp, Artificial Sequence
  ENSG00000162601_87 (sequence is synthesized)
gtctaagggagcctatttgtttgttatcacattgacttcctttgatgtcttttagtgttaccctcactcagacccaaggattatgtcttttggggctcccatcatcctgagctagagaca

SEQ ID NO: 487905 - DNA, 120 bp, Artificial Sequence
  ENSG00000162601_88 (sequence is synthesized)
tcttatcaaatcctctggtgcaagaattaaggttttctagaagccatgggataccttgtgctacagtacttttaactcaggtcatatctttacaatatctctaatggtttaatgttttct

SEQ ID NO: 487906 - DNA, 120 bp, Artificial Sequence
  ENSG00000162601_89 (sequence is synthesized)
ttacttgtgacaggcaggaaatatatttagtgatcagttttcttctgatattttagtggataaaaatattctctataaaagaaacttattgactttaaaagtaccttttttaacttaaaa

SEQ ID NO: 487907 - DNA, 120 bp, Artificial Sequence
  ENSG00000162601_90 (sequence is synthesized)
aatattcttaaaaataccaaatagacctgtatataatttgtgtgtatgttttcatgtttttgcatcagcatagattgaaaatgcattatttacctctctttattttcatcttcaactttc

SEQ ID NO: 487908 - DNA, 120 bp, Artificial Sequence
  ENSG00000162601_91 (sequence is synthesized)
attgagagtaggagtcactctactggattcagatcccagctctgacatttattgcttattttaccttgggcagtctactccctcattctcctttgctacatctgtaaaatgagaaaaaat

SEQ ID NO: 487909 - DNA, 120 bp, Artificial Sequence
  ENSG00000162601_92 (sequence is synthesized)
ggttttcagtgggtggttatcattatatagatggtatccatgtttagtaagtaatcaaagcatgtcaagtaaatgactgttatcaccataaggagtttgcttaataccccgtgtactata

SEQ ID NO: 487910 - DNA, 120 bp, Artificial Sequence
  ENSG00000162601_93 (sequence is synthesized)
gtgtgtcactcttcttaagtttttggagaagaggaaaattgagcaattaaataaaaaagatcagtcatcatcatcaggcttgctgtcccctttccttccaaacacctgaaaaaatgcctt

SEQ ID NO: 487911 - DNA, 120 bp, Artificial Sequence
  ENSG00000162601_94 (sequence is synthesized)
tttagagcatattgacatttaagctatgctttatttcattgtgaggaaataattgtatttttccccttttttttttccatgccttctgatttgctggcattttatttattccttaccatg

SEQ ID NO: 487912 - DNA, 120 bp, Artificial Sequence
  ENSG00000162601_95 (sequence is synthesized)
gtagaaacccagttgaggcagtattatgtataagttaaaagcagaactctcgagcctgactgcctgggttcaaatcctgccaatgccttttatatctgatcatgagcaggttaacctttc

SEQ ID NO: 487913 - DNA, 120 bp, Artificial Sequence
  ENSG00000162601_96 (sequence is synthesized)
tatgacgtagtgtcctcatcgaaaaaaaaaaaaggggggggtgaataatggcagctacttcatttaagtgatttcacattaagttttaggtggcacatagtatgcattataagtgttact

SEQ ID NO: 487914 - DNA, 120 bp, Artificial Sequence
  ENSG00000162601_97 (sequence is synthesized)
atgatggtatcagcctttgctagtgaatcagctgagcttttaaaaaaatgctatagatgcatttgcatgggggtcttgaaggatatgtgaaaaattgctaagataactcatcgtttggta

SEQ ID NO: 487915 - DNA, 120 bp, Artificial Sequence
  ENSG00000162601_98 (sequence is synthesized)
ttttttcctttctagatgaatatatgatgttcaccccttgggcttctttctttcctccagagtttagtataacaactttgactcaaagcagttgctgcctccccagagttcatcctatcc

SEQ ID NO: 487916 - DNA, 120 bp, Artificial Sequence
  ENSG00000162601_99 (sequence is synthesized)
tcttgtctagtcttagattagctcttctagggaggtggaatgagtttgggctcagaagtgaggcaaacctgctgggttttaacatctgtgtcctgccactttgctagcctaaatatgatt

SEQ ID NO: 487917 - DNA, 120 bp, Artificial Sequence
  ENSG00000162601_100 (sequence is synthesized)
tttaatgtatctcagcttcagttttctcacctgttaaaaaaaaaacaataacttacagcattgttgtaagcttaataacctgtatatatatatatttttaattatcactaggatggcaat

SEQ ID NO: 487918 - DNA, 120 bp, Artificial Sequence
  ENSG00000162601_101 (sequence is synthesized)
atgtcttagtttgtctaggataatcccactttaaacctgcggttcaggcataattattaatagtaccttctttcattcaaaaagtctcttggtttaggtgataaattacgtgatcatccc

SEQ ID NO: 487919 - DNA, 120 bp, Artificial Sequence
  ENSG00000162601_102 (sequence is synthesized)
atcatagtgccatgcgtagaattgtcatgtaaatggcacttttactcattattattattaatagcttggcattaatatgcttagtggaccaagtacaatcgggcaataaatatttaatga

SEQ ID NO: 487920 - DNA, 120 bp, Artificial Sequence
  ENSG00000162601_103 (sequence is synthesized)
atgcccactatgtttaaagtgctgttcagctgatctgcaaagctatggctgtaaaaacaccgaagggaattttaagtataattaaaaggagattggagagttaagaaatagttgatgaca

SEQ ID NO: 487921 - DNA, 120 bp, Artificial Sequence
  ENSG00000162601_104 (sequence is synthesized)
acattttttatccttacagcacttattcatttctatgatggttagaattcaagtagttataggtatatagaattcagaggtgctgtaacattatttaataaatgttttattaagatttta

SEQ ID NO: 487922 - DNA, 120 bp, Artificial Sequence
  ENSG00000162604_0 (sequence is synthesized)
gagaaagtgtcggtctccaagatggcggccgcctggccgtctggtccgtctgctccggaggccgtgacggccagactcgttggtgtcctgtggttcgtctcagtcactacaggaccctgg

SEQ ID NO: 487923 - DNA, 120 bp, Artificial Sequence
  ENSG00000162604_1 (sequence is synthesized)
ggggctgttgccacctccgccgggggcgaggagtcgcttaagtgcgaggacctcaaagtgggacaatatatttgtaaagatccaaaaataaatgacgctacgcaagaaccagttaactgt

SEQ ID NO: 487924 - DNA, 120 bp, Artificial Sequence
  ENSG00000162604_2 (sequence is synthesized)
acaaactacacagctcatgtttcctgttttccagcacccaacataacttgtaaggattccagtggcaatgaaacacattttactgggaacgaagttggttttttcaagcccatatcttgc

SEQ ID NO: 487925 - DNA, 120 bp, Artificial Sequence
  ENSG00000162604_3 (sequence is synthesized)
cgaaatgtaaatggctattcctacaaagtggcagtcgcattgtctctttttcttggatggttgggagcagatcgattttaccttggataccctgctttgggtttgttaaagttttgcact

SEQ ID NO: 487926 - DNA, 120 bp, Artificial Sequence
  ENSG00000162604_4 (sequence is synthesized)
tgtggaattgggagcctaattgatttcattcttatttcaatgcagattgttggaccttcagatggaagtagttacattatagattactatggaaccagacttacaagactgagtattact

SEQ ID NO: 487927 - DNA, 120 bp, Artificial Sequence
  ENSG00000162604_5 (sequence is synthesized)
aatgaaacatttagaaaaacgcaattatatccataaatattttttaaaagaaacagatttgagcctccttgattttaatagagaacttctagtgtatggatttaaagatttctctttttc

SEQ ID NO: 487928 - DNA, 120 bp, Artificial Sequence
  ENSG00000162604_6 (sequence is synthesized)
attcatataccattttatgagttctgtataattttttgtggtttttgttttgttgagttaaagtatattattgtgagatttatttaataggacttcctttgaaagctgtataatagtgtt

SEQ ID NO: 487929 - DNA, 120 bp, Artificial Sequence
  ENSG00000162604_7 (sequence is synthesized)
tctcgggcttctgtctctatgagagatagcttattactctgatactctttaatcttttacaaaggcaagttgccacttgtcatttttgtttctgaaaaataaaagtataacttattcaca

SEQ ID NO: 487930 - DNA, 120 bp, Artificial Sequence
  ENSG00000162604_8 (sequence is synthesized)
agcgggtgaagcacctgattgcctaaaccactcgtttccttcctccagcactcaaagattaaccttagctccttccaagggttcgtgggggaaaattcgcctcgagggactgggtacatg

SEQ ID NO: 487931 - DNA, 120 bp, Artificial Sequence
  ENSG00000162604_9 (sequence is synthesized)
catattttaaaagggtctcccaatgtgattccacgggctcacgggcagaagaacacgcgaagagacggaactggcctctatcctatgcgaggtccctttaagaacctcgccctgttgccc

SEQ ID NO: 487932 - DNA, 70 bp, Artificial Sequence
  ENSG00000162604_10 (sequence is synthesized)
ctcaaagtgggacaatatcctctgtggagaacacccccccatggaggcgagggtcttactctgtcgccct

SEQ ID NO: 487933 - DNA, 120 bp, Artificial Sequence
  ENSG00000162604_11 (sequence is synthesized)
aaacaaattgaagaaaaagaaactatgacattctcaagtttatactaacatgctttgtgaagaggaatacatttcggaaatatgaaatacgctggataaaacctcagcagacaattttct

SEQ ID NO: 487934 - DNA, 120 bp, Artificial Sequence
  ENSG00000162604_12 (sequence is synthesized)
ggctggagtgcagtggcgtgatcataactcattgcagcctcgaattcctgggttcaaacaatcttcctgcctcagcctcccatccagtatgggatattttaaaagattgttggaccttca

SEQ ID NO: 487935 - DNA, 120 bp, Artificial Sequence
  ENSG00000162604_13 (sequence is synthesized)
catccagtatgggatattttaaaagattgttggaccttcagatggaagtagttacattatagattactatggaaccagacttacaagactgagtattactaatgaaacatttagaaaaac

SEQ ID NO: 487936 - DNA, 120 bp, Artificial Sequence
  ENSG00000162604_14 (sequence is synthesized)
tatcttatagtggtatattattcatataaaattatgagaattttaggaccatagaaaattttaagaaaccgtataaacctctcaggtacccctatgcctgaaacatctccaatcctttga

SEQ ID NO: 487937 - DNA, 120 bp, Artificial Sequence
  ENSG00000162604_15 (sequence is synthesized)
gttctatttaaaatgtttagtatacgaggaagcagagaagaatggttgtttccatttttcttcatgtactagatctaaggaatcctggtcatgtttccaactagcatttctcaaactgtg

SEQ ID NO: 487938 - DNA, 120 bp, Artificial Sequence
  ENSG00000162604_16 (sequence is synthesized)
ctctaccagttagtagttctcaaagacataagaagttcattaaaaaatatcccgtgctcaaatatgatttgtaaatgtgagttcaattgagttaaagaagtttctttactgaataagttc

SEQ ID NO: 487939 - DNA, 120 bp, Artificial Sequence
  ENSG00000162604_17 (sequence is synthesized)
tcaaaatctttttaatatatgttgtctctaagagggattgtggttatttttcaaacccgtttcttttcctcatagtcactgtcaccttgtcaattaccataaaagcattgataggattct

SEQ ID NO: 487940 - DNA, 120 bp, Artificial Sequence
  ENSG00000162604_18 (sequence is synthesized)
gttatacatatgggcattgtggaagcagagacaagattttcttttgcactggacaggcactccatactagtattgtgttgtttgcaaattacagaaactgaaatccagctagcttaagct

SEQ ID NO: 487941 - DNA, 120 bp, Artificial Sequence
  ENSG00000162604_19 (sequence is synthesized)
gggatttactgagtctagaggctttcctttattctgtgacatatttgttgttatcatctttgttttatggataggaaaattgtcacgagattaagagatttacccaaggacactcagcta

SEQ ID NO: 487942 - DNA, 120 bp, Artificial Sequence
  ENSG00000162604_20 (sequence is synthesized)
gtgacctcaatttgaacccaaattttctggctccagagatcatgctttatttactgtagtactctgcttctatattagcccttcactgagcaaatttaaagtttttgaatgctctgccta

SEQ ID NO: 487943 - DNA, 120 bp, Artificial Sequence
  ENSG00000162604_21 (sequence is synthesized)
ctagctagcaaagctaaccttatttcttccatgttgctacccacaaaagatgaaagagaagtcttcactgtggggttgatggtagatatatttctgacagctatactaaaactcagtgtt

SEQ ID NO: 487944 - DNA, 120 bp, Artificial Sequence
  ENSG00000162604_22 (sequence is synthesized)
gtaagttcctaagtaaaagtcatgaagtactatatatacttgtttagttaattaaacatatattcaacatttaaataactaagtgatatggaaataatgatgaaggtcacagtgtatatt

SEQ ID NO: 487945 - DNA, 120 bp, Artificial Sequence
  ENSG00000162604_23 (sequence is synthesized)
ggttaaaaataaaataaatatgttagtaggccaatttatggtacagcgctgtaacagaaccataaccgtgctgtgagagtacagaaaagggactgatgcagttgacttaaggaagttctt

SEQ ID NO: 487946 - DNA, 120 bp, Artificial Sequence
  ENSG00000162604_24 (sequence is synthesized)
agatatggtgacatttgagctagggtttgaaggatgaaaagattacagaggttgaaggcattgcagagaacagcatgtgtaaagcatatagtgtacactgggagattaggggacaattta

SEQ ID NO: 487947 - DNA, 120 bp, Artificial Sequence
  ENSG00000162604_25 (sequence is synthesized)
gctgatcgtgtaggaagaacaatgcaggaggtgacactgcctacagaggtagtctatggtccgattataaaatgctttgagtatcttgctatggagttgggtcctttagatatcaaaagt

SEQ ID NO: 487948 - DNA, 86 bp, Artificial Sequence
  ENSG00000162604_26 (sequence is synthesized)
gtatcttgctatggagttgggtcctttagatatcaaaagttatccttttaggtatcagaagcaatagagacagagtctcactctgt

SEQ ID NO: 487949 - DNA, 89 bp, Artificial Sequence
  ENSG00000162604_27 (sequence is synthesized)
gctctgccccaagctgacttatttcggtatttttctgtagagatgggattttgccgtgttgcacaggctgctctagaactcctgggctc

SEQ ID NO: 487950 - DNA, 120 bp, Artificial Sequence
  ENSG00000162604_28 (sequence is synthesized)
gcctggccaatttaaaatttttaagtattttaaataaattgtaatttctattaagaattcaaggttaaggaatttaggcatttttattttaaatgatcactgcctcaaaaaaaattctta

SEQ ID NO: 487951 - DNA, 120 bp, Artificial Sequence
  ENSG00000162604_29 (sequence is synthesized)
actacgtaatacaatgttgactgcaatgaaagtagttatagacaaaatctaaaattcaattttttgctgggtgcggtggtgtgtgcccatagacttagctactcaacaggctgaggttgg

SEQ ID NO: 487952 - DNA, 120 bp, Artificial Sequence
  ENSG00000162604_30 (sequence is synthesized)
ttgcttgaggccaggagtttgaggccagcagagacaacatagtgacatagtgagatcccatttctacaaaaaagaaaaaaaaaaatcccattttacaactaaccttacttagtctttctt

SEQ ID NO: 487953 - DNA, 120 bp, Artificial Sequence
  ENSG00000162604_31 (sequence is synthesized)
tcttcatggttatgaaaagcagtggtcctacttatattagctttttttttttccttcatagtgctaattataaatctgttagcctcggggatttgtttattcattcatttcagtcttcct

SEQ ID NO: 487954 - DNA, 120 bp, Artificial Sequence
  ENSG00000162604_32 (sequence is synthesized)
ggatttgtttattcattcatttcagtcttcctctggaatatacattcttttttttttttttttaggcggagtttcactcttgttgcccaggatagagtgcaatggtgcgatcttggctca

SEQ ID NO: 487955 - DNA, 85 bp, Artificial Sequence
  ENSG00000162604_33 (sequence is synthesized)
atgtacattcttaaaggcagaggccttatctgtcttaggcaagttggtatcctgaacagaacctgacagtaagactctgataaat

SEQ ID NO: 487956 - DNA, 120 bp, Artificial Sequence
  ENSG00000162604_34 (sequence is synthesized)
ggtatcctgaacagaacctgacagtaagactctgataaatatttgtcatatgaatatcaaaaaaaactagaaacaggctaaatgttcagtagggaggaactgtctaaaaaaattaaggta

SEQ ID NO: 487957 - DNA, 120 bp, Artificial Sequence
  ENSG00000162604_35 (sequence is synthesized)
cagtgcgtaacacaacagaatactatgcagccatttaaaacaatcacatagaaatatgtttattgggaaagtaatgtaataacacccataacagagtaagatgataaatttaagaaaatc

SEQ ID NO: 487958 - DNA, 120 bp, Artificial Sequence
  ENSG00000162604_36 (sequence is synthesized)
tagatactttgctacagaacactttcttagggatgcttcacaaaaatgaacatgagaggtttctgctaagataaaatattggataagggaataatatctttgtttggaactggtaaatat

SEQ ID NO: 487959 - DNA, 120 bp, Artificial Sequence
  ENSG00000162604_37 (sequence is synthesized)
tacctactcctggagtaatacatttaaggaaactagagaacagatcagagataatatttaaaagtttaaggaactaacaaatttatagtgacagaaagcagataagtgcttgctggggaa

SEQ ID NO: 487960 - DNA, 120 bp, Artificial Sequence
  ENSG00000162604_38 (sequence is synthesized)
agacgggggcaaggagagacaagaagtagaaattacaaaggggcatgaggaaactattgggtgtgacagatatgttctttttttattatagtgattgtttcacaggtgtttacaagtgtc

SEQ ID NO: 487961 - DNA, 120 bp, Artificial Sequence
  ENSG00000162604_39 (sequence is synthesized)
aaatttatcaaattgtacattttaaatatgtacagtgtatgtcattgcatgtcatttaggtcattgtatgtcattttaatgtatgtcatttataactcaataaagctgttttaaaaaatc

SEQ ID NO: 487962 - DNA, 120 bp, Artificial Sequence
  ENSG00000162604_40 (sequence is synthesized)
tagttagagtgccactctgcagaatgaagacaagcagagctaagcaaggaggcagggaagccaagggcctcagggagcacagaattcagtccttggttcctgtagcttttcttttgatcc

SEQ ID NO: 487963 - DNA, 120 bp, Artificial Sequence
  ENSG00000162604_41 (sequence is synthesized)
tttgagctatcccagtatatcccagtagttgtttttagctacatgagccactaaattacctatttttgcttaggttagagctggatttttgttgcttctgaaatacttttattaacaact

SEQ ID NO: 487964 - DNA, 120 bp, Artificial Sequence
  ENSG00000162607_0 (sequence is synthesized)
gaaaacgcgccaagttcccctcggtggcggagtgctaaagaccctagcggttcaggcgttcggcgagcggggccgctgcttgttgcgctcctggctctcccggggcgggcgcagatgggc

SEQ ID NO: 487965 - DNA, 120 bp, Artificial Sequence
  ENSG00000162607_1 (sequence is synthesized)
gccgctcccgggatgtagttggtgttggtgcaagacgggagcgagcggcggtcggggttcccgctcttgggagcggatggtcactcccccgcggggagggcgagccgaccagattttcct

SEQ ID NO: 487966 - DNA, 120 bp, Artificial Sequence
  ENSG00000162607_2 (sequence is synthesized)
ggggccggggacccggcgggctcggggcagggactcacctgtcgcacccacactcattcgggttggacttgccggcgtcaccgccgcggacttcgctttgggccatgaccagatataatt

SEQ ID NO: 487967 - DNA, 120 bp, Artificial Sequence
  ENSG00000162607_3 (sequence is synthesized)
ggtgattacaactttcctctataaattaactcttgacactccttgggatttgaagaaaaaaatgcctggtgtcatacctagtgaaagtaatggactttcaagaggtagcccttcaaagaa

SEQ ID NO: 487968 - DNA, 120 bp, Artificial Sequence
  ENSG00000162607_4 (sequence is synthesized)
aaacagactttccttaaagttttttcagaaaaaggaaactaagagagctttggatttcacagattctcaagaaaatgaagaaaaagcttctgaatatagagcatctgaaattgatcaagt

SEQ ID NO: 487969 - DNA, 120 bp, Artificial Sequence
  ENSG00000162607_5 (sequence is synthesized)
tgttcctgcagcacagtcttcacctataaactgtgagaagagagaaaacttgttaccatttgtgggactgaataatctcggcaatacttgctatcttaatagtatacttcaggtattata

SEQ ID NO: 487970 - DNA, 120 bp, Artificial Sequence
  ENSG00000162607_6 (sequence is synthesized)
tttttgtcccggttttaaatctggagtaaagcacttatttaatattatttcaaggaagaaagaagctctaaaggatgaagccaatcaaaaagacaagggaaattgcaaagaagattcttt

SEQ ID NO: 487971 - DNA, 120 bp, Artificial Sequence
  ENSG00000162607_7 (sequence is synthesized)
ggcaagttatgaattgatatgcagtttacagtccttaatcatttcggttgaacagctccaggctagttttctcttaaatccagagaaatatactgatgaacttgccactcagccaaggcg

SEQ ID NO: 487972 - DNA, 120 bp, Artificial Sequence
  ENSG00000162607_8 (sequence is synthesized)
actgcttaacacactgagggaactcaaccctatgtatgaaggatatctacagcatgatgcacaggaagtattacaatgtattttgggaaacattcaagaaacatgccaactcctaaaaaa

SEQ ID NO: 487973 - DNA, 120 bp, Artificial Sequence
  ENSG00000162607_9 (sequence is synthesized)
agaagaagtaaaaaatgtggcagaattacctactaaggtagaagaaatacctcatccgaaagaggaaatgaatggtattaacagcatagagatggacagtatgaggcattctgaagactt

SEQ ID NO: 487974 - DNA, 120 bp, Artificial Sequence
  ENSG00000162607_10 (sequence is synthesized)
taaagagaaactcccaaaaggaaatgggaaaagaaaaagtgacactgaatttggtaacatgaagaaaaaagttaaattatccaaggaacaccagtcattggaagagaaccagagacaaac

SEQ ID NO: 487975 - DNA, 120 bp, Artificial Sequence
  ENSG00000162607_11 (sequence is synthesized)
tagatcaaaaagaaaagctacaagtgatacattagagagtcctcctaaaataattcccaagtatatttctgaaaatgagagtccaagaccctcacaaaagaaatcaagagttaaaataaa

SEQ ID NO: 487976 - DNA, 120 bp, Artificial Sequence
  ENSG00000162607_12 (sequence is synthesized)
ttggttaaagtctgcaactaagcaacccagcattctttctaaattttgtagtctgggaaaaataacaacaaaccaaggagtcaaaggacaatctaaagaaaatgaatgtgatcctgaaga

SEQ ID NO: 487977 - DNA, 120 bp, Artificial Sequence
  ENSG00000162607_13 (sequence is synthesized)
ggacttggggaagtgtgaaagtgataacacaactaatggttgtggacttgaatctccaggaaatactgttacacctgtaaatgttaatgaagttaaacccataaacaaaggtgaagaaca

SEQ ID NO: 487978 - DNA, 120 bp, Artificial Sequence
  ENSG00000162607_14 (sequence is synthesized)
aattggttttgagctagtggagaaattatttcaaggtcagctggtattaaggacgcgttgcttggaatgtgaaagtttaacagaaagaagagaagattttcaagacatcagtgtgccagt

SEQ ID NO: 487979 - DNA, 120 bp, Artificial Sequence
  ENSG00000162607_15 (sequence is synthesized)
aagaagatgagctttccaaagtagaggagagttctgaaatttctccagagccaaaaacagaaatgaagaccctgagatgggcaatttcacaatttgcttcagtagaaaggattgtaggag

SEQ ID NO: 487980 - DNA, 120 bp, Artificial Sequence
  ENSG00000162607_16 (sequence is synthesized)
aagataaatatttctgtgaaaactgccatcattatactgaagctgaacgaagtcttttgtttgacaaaatgcctgaagttataactattcatttgaagtgctttgctgctagtggtttgg

SEQ ID NO: 487981 - DNA, 120 bp, Artificial Sequence
  ENSG00000162607_17 (sequence is synthesized)
agtttgattgttatggtggtggactttccaagatcaacactcctttattgacacctcttaaattgtcactagaagaatggagcacaaagccaactaacgacagctatggattatttgcgg

SEQ ID NO: 487982 - DNA, 120 bp, Artificial Sequence
  ENSG00000162607_18 (sequence is synthesized)
ttgtgatgcatagtggcattacaattagtagtgggcattacactgcttctgttaaagtcactgaccttaacagtttagaactagataaaggaaattttgtggttgaccaaatgtgtgaaa

SEQ ID NO: 487983 - DNA, 120 bp, Artificial Sequence
  ENSG00000162607_19 (sequence is synthesized)
taggtaagccagaaccattgaatgaggaggaagcaaggggtgtggttgagaattataatgatgaagaagtgtcaattagagttggtggaaatacacagccaagtaaagttttgaacaaaa

SEQ ID NO: 487984 - DNA, 120 bp, Artificial Sequence
  ENSG00000162607_20 (sequence is synthesized)
aaaatgtagaagctattggacttcttggaggacaaaagagcaaagcagattatgagctatacaacaaagcctctaatcctgataaggttgctagtacagcgtttgctgaaaatagaaatt

SEQ ID NO: 487985 - DNA, 120 bp, Artificial Sequence
  ENSG00000162607_21 (sequence is synthesized)
ctgagactagtgatactactgggacccatgaatctgatagaaacaaggaatccagtgaccaaacaggcattaatattagtggatttgagaacaaaatttcatacgtagtgcaaagcttaa

SEQ ID NO: 487986 - DNA, 120 bp, Artificial Sequence
  ENSG00000162607_22 (sequence is synthesized)
aggagtatgaggggaagtggttgctttttgatgattctgaagtcaaagttactgaagagaaggactttctgaattctctttccccttctacatctcctacttctactccttacttgctat

SEQ ID NO: 487987 - DNA, 120 bp, Artificial Sequence
  ENSG00000162607_23 (sequence is synthesized)
tttataagaaattatagagtgagtgtattttccttgtgtatatattaaacacacccatacaaacattggtaaagttgattacatcaaagaatctttagcttatcttttgaagctactgga

SEQ ID NO: 487988 - DNA, 120 bp, Artificial Sequence
  ENSG00000162607_24 (sequence is synthesized)
tattattggtctctctaggtttttatataaatagtgaaatttgaattactgaaaaccatgttaatttttagaactcattttcctcagtagagactagtgatgcattagcttctgggaaca

SEQ ID NO: 487989 - DNA, 120 bp, Artificial Sequence
  ENSG00000162607_25 (sequence is synthesized)
aacttgtatcggttcttaattaaattatccaaaacggaggcatttaaacacttggatttacaccagtcttttgtgtttgctttttaaaataaagtgctcgtatttgtattctccatattt

SEQ ID NO: 487990 - DNA, 120 bp, Artificial Sequence
  ENSG00000162607_26 (sequence is synthesized)
tggagtaattatctacatgatgtttatagttcctgtggtttttcacccaagaagcagaatctcattcagtacatttagttttataagagtcatgaagctaaatccttgggctatgtcaga

SEQ ID NO: 487991 - DNA, 120 bp, Artificial Sequence
  ENSG00000162607_27 (sequence is synthesized)
ggcacaaagtctagaatgtgtgtattcacaatggtgtatgtacattttgtgccttgattcacttagaagtgtctcagaaaacctggacagttcgcttctacacaagaattttatatgtat

SEQ ID NO: 487992 - DNA, 120 bp, Artificial Sequence
  ENSG00000162607_28 (sequence is synthesized)
ttatgaagatgattctgtaccctagtatatctttttgggcatggactaatttgtatctgtttaactcatattctgcacgatctgtatatagtacatcaaacttagaggtgtgaccttaaa

SEQ ID NO: 487993 - DNA, 120 bp, Artificial Sequence
  ENSG00000162607_29 (sequence is synthesized)
tttaactttttttaaaaactgggaggtcaataaaatttaaactgcttaactatgtatatgaatatttgaattttttacttgtatatttttataaatacagctgagttttcttaaagcgaa

SEQ ID NO: 487994 - DNA, 120 bp, Artificial Sequence
  ENSG00000162607_30 (sequence is synthesized)
ggggcttaccgcgagggcctcgctccggaagccgcaccctccgcggcgtcccaccgtcgaggattaacaaaacgccaaacaagattttaacagtcggcagcgaaagcgcgcactcgagcg

SEQ ID NO: 487995 - DNA, 120 bp, Artificial Sequence
  ENSG00000162607_31 (sequence is synthesized)
ccaatgagagcggaaggaggggcaccgcgcctgaggaacactccgtatgtcgaacaatgattggctggagcccacctttcttcttttttgctattagatgggcttgctgctcccgcccat

SEQ ID NO: 487996 - DNA, 120 bp, Artificial Sequence
  ENSG00000162613_0 (sequence is synthesized)
acggccgccattttctttctttcttagctgttagctgagaggaagtctctgaacaggcggcagcggctcttatagtgcaaccatggcagactattcaacagtgcctcccccctcttctgg

SEQ ID NO: 487997 - DNA, 120 bp, Artificial Sequence
  ENSG00000162613_1 (sequence is synthesized)
ctcagctggtggcggtggtggcggcggtggtggtggaggagttaacgacgctttcaaagatgcactgcagagagcccggcagattgcagcaaaaattggaggtgatgcagggacatcact

SEQ ID NO: 487998 - DNA, 120 bp, Artificial Sequence
  ENSG00000162613_2 (sequence is synthesized)
gaattcaaatgactatggttatgggggacaaaaaagacctttagaagatggagatcaaccagatgctaagaaagttgctcctcaaaatgactcttttggaacacagttaccaccgatgca

SEQ ID NO: 487999 - DNA, 120 bp, Artificial Sequence
  ENSG00000162613_3 (sequence is synthesized)
tcagcagcaaagcagatctgtaatgacagaagaatacaaagttccagatggaatggttggattcataattggcagaggaggtgaacagatctcacgcatacaacaggaatctggatgcaa

SEQ ID NO: 488000 - DNA, 120 bp, Artificial Sequence
  ENSG00000162613_4 (sequence is synthesized)
aatacagatagctcctgacagtggtggccttccagaaaggtcctgtatgttaactggaacacctgaatctgtccagtcagcaaaacggttactggaccagattgttgaaaaaggaagacc

SEQ ID NO: 488001 - DNA, 120 bp, Artificial Sequence
  ENSG00000162613_5 (sequence is synthesized)
agctcctggcttccatcatggcgatggaccgggaaatgcagttcaagaaatcatgattccagctagcaaggcaggattagtcattggaaaagggggagaaactattaaacagcttcagga

SEQ ID NO: 488002 - DNA, 120 bp, Artificial Sequence
  ENSG00000162613_6 (sequence is synthesized)
acgggctggagttaaaatggttatgattcaagacgggccgcagaacactggtgctgacaaacctcttaggattacaggagacccatataaagttcaacaagccaaggaaatggtgttaga

SEQ ID NO: 488003 - DNA, 120 bp, Artificial Sequence
  ENSG00000162613_7 (sequence is synthesized)
gttaattcgtgatcaaggcggtttcagagaagttcggaatgagtatgggtcaagaataggaggaaatgaagggatagatgtccccattccaagatttgctgttggcattgtaataggaag

SEQ ID NO: 488004 - DNA, 120 bp, Artificial Sequence
  ENSG00000162613_8 (sequence is synthesized)
aaatggagagatgatcaaaaaaatacaaaatgatgctggtgttcgcattcagtttaagccagatgatgggacaacacccgaaaggatagcacaaataacaggacctccagaccgatgtca

SEQ ID NO: 488005 - DNA, 120 bp, Artificial Sequence
  ENSG00000162613_9 (sequence is synthesized)
gcaactggaacatgggaccacctggtggactacaggaatttaattttattgtgccaactgggaaaactggattaataataggaaaaggaggtgaaaccataaaaagcataagccagcagt

SEQ ID NO: 488006 - DNA, 120 bp, Artificial Sequence
  ENSG00000162613_10 (sequence is synthesized)
ctggtgcaagaatagaacttcagagaaatcctccaccaaatgcagatcctaatatgaagttatttacaattcgtggcactccacaacagatagactatgctcggcaactcatagaagaaa

SEQ ID NO: 488007 - DNA, 120 bp, Artificial Sequence
  ENSG00000162613_11 (sequence is synthesized)
agattggtggcccagtaaatcctttagggccacctgtaccccatgggccccatggtgtcccaggcccccatggacctcctgggcctccagggcctggaactccaatgggaccatacaacc

SEQ ID NO: 488008 - DNA, 120 bp, Artificial Sequence
  ENSG00000162613_12 (sequence is synthesized)
ctgcaccttataatcctggaccaccaggcccggctcctcatggtcctccagccccatatgctccccagggatggggaaatgcatatccacactggcagcagcaggctcctcctgatccag

SEQ ID NO: 488009 - DNA, 120 bp, Artificial Sequence
  ENSG00000162613_13 (sequence is synthesized)
ctaaggcaggaacggatccaaattcagcagcttgggctgcttattacgctcactattatcaacagcaagcacagccaccaccagcagcccctgcaggtgcaccaactacaactcaaacta

SEQ ID NO: 488010 - DNA, 120 bp, Artificial Sequence
  ENSG00000162613_14 (sequence is synthesized)
atggacaaggagatcagcagaatccagccccagctggacaggttgattataccaaggcttgggaagagtactacaagaaaatgggtcaggcagttcctgctccgactggggctcctccag

SEQ ID NO: 488011 - DNA, 120 bp, Artificial Sequence
  ENSG00000162613_15 (sequence is synthesized)
gtggtcagccagattatagtgcagcctgggctgagtattatagacaacaagcagcctattatgcccagacaagtccccagggaatgccacagcatcctccagcacctcagggccaataat

SEQ ID NO: 488012 - DNA, 120 bp, Artificial Sequence
  ENSG00000162613_16 (sequence is synthesized)
aagaagtggacaatacagtatttgcttcattgtgtgggggaaaaaaacctttgttaaatatatggatgcagacgacttgatgaagatcttaattttgtttttggtttaaaatagtgtttc

SEQ ID NO: 488013 - DNA, 120 bp, Artificial Sequence
  ENSG00000162613_17 (sequence is synthesized)
cttttttttttttttttttgaaaatgtacaaaatatctatcactactgataggaggttaatatttctgtgtagaaatgaaaattggtttgtttttagtatttagtgtagatgtacacatt

SEQ ID NO: 488014 - DNA, 120 bp, Artificial Sequence
  ENSG00000162613_18 (sequence is synthesized)
ccagcaaatgtatttgcaattatgtggttgatgctttgtgatataaatgtactttttcaatgtatactttcacttttaaaatgcctgttttgtgctttacaataaatgatatgaaacctc

SEQ ID NO: 488015 - DNA, 120 bp, Artificial Sequence
  ENSG00000162613_19 (sequence is synthesized)
catttatattaaccactttttctttcttaaaggattcactcctgaattagctccatttcaaggattttctttaactttttgtgtatttcttatgtatctcttctgcacagggccaataat

SEQ ID NO: 488016 - DNA, 120 bp, Artificial Sequence
  ENSG00000162613_20 (sequence is synthesized)
ttgatccagccagtatagaactagctctgtaggggtgaggaggactgtgctgtgtatcatccttgattgtgttccttcaaggagcattgcacttgccttcccagaccttccaccttaggt

SEQ ID NO: 488017 - DNA, 120 bp, Artificial Sequence
  ENSG00000162613_21 (sequence is synthesized)
agcaccagtgctgaagatgctgcaagcaccaaatcatagctcataaaatcaggtcctgagatagttacccataaagaggaatcctttgagtgtatgccattggtgagccgatgagcatgg

SEQ ID NO: 488018 - DNA, 120 bp, Artificial Sequence
  ENSG00000162613_22 (sequence is synthesized)
accatagaagggctcaatgtagaagaaactacccgtgtgtaaaaagaagattggcttaaaatggctactgtgatgggaacagtgtcttagggagatgcagcttggacttgaggtaaattg

SEQ ID NO: 488019 - DNA, 120 bp, Artificial Sequence
  ENSG00000162613_23 (sequence is synthesized)
aatactttacaactgtggtttagagtttgctttaatgacattgtatgtaaaaggtcacatgattgctgtaattttgtattcattatggtttcctcaataaatgtacattgatgactatta

SEQ ID NO: 488020 - DNA, 120 bp, Artificial Sequence
  ENSG00000162613_24 (sequence is synthesized)
ggaactactgctgtccgcaaacaagctaaaggaaatttaattgctaatttaaatttaatttaatttaaattgcatttaattgctactgctattgattttagtgaattttacatgtctcat

SEQ ID NO: 488021 - DNA, 120 bp, Artificial Sequence
  ENSG00000162613_25 (sequence is synthesized)
tattatggcagatgaaatagtttttgcaaaatgaatgaggaaaggaaggaaaacctaaaatttgttatttgtgactataagagggtagaaatggatgattatttggccgtagagttgttt

SEQ ID NO: 488022 - DNA, 120 bp, Artificial Sequence
  ENSG00000162613_26 (sequence is synthesized)
ttactctttaacactcatgctgaagttctgatattttgttgaaatccattgttttactctttgcatatttgttggctctttgcatattaatatattagactacatgcaaatacagtctgt

SEQ ID NO: 488023 - DNA, 120 bp, Artificial Sequence
  ENSG00000162613_27 (sequence is synthesized)
cagtatttttctgatttaataatattttaataactgacgctgcatttaatttttttgccagtttaaaatgtttgtgtgtttttatagatgattttaactggtacatattttgagttaagt

SEQ ID NO: 488024 - DNA, 120 bp, Artificial Sequence
  ENSG00000162613_28 (sequence is synthesized)
tgaatgtatgaaagcagcatcttatcagttttgtttattcgatttctaaaatgtgctgatccttttaaaactcctgcttatctctgcaacaaagaaaaatattcaaaaatactgccttca

SEQ ID NO: 488025 - DNA, 120 bp, Artificial Sequence
  ENSG00000162613_29 (sequence is synthesized)
acatagtacttccctcctaccctcactgtcacattgcaggcccctgccagctcctgcacccaaggaaacggccaaaattgccttttaaaaactttaattctgttttttgttttgttttgc

SEQ ID NO: 488026 - DNA, 120 bp, Artificial Sequence
  ENSG00000162613_30 (sequence is synthesized)
ctgtttgggagtgtttgccttttaaatttttatctggcaaagtataataactatttaaatgaagtactacggtgtattgtttgggtttttttgttttttataatgctttccagcatctga

SEQ ID NO: 488027 - DNA, 120 bp, Artificial Sequence
  ENSG00000162613_31 (sequence is synthesized)
atatacacaaatatataagctttccccatgaaatattgagtttttaaacactggcatgtttttccccccttgcagtatagtggtagattggaggatcttttccatttattgtattggctc

SEQ ID NO: 488028 - DNA, 120 bp, Artificial Sequence
  ENSG00000162613_32 (sequence is synthesized)
tttcagcacaagtaatcctgatatcttcattttttttccttctgtttgattaaaaactgcatgtgtgtacaatgatcttttggcatacttccattgcattaacagtgaaatttcctttta

SEQ ID NO: 488029 - DNA, 120 bp, Artificial Sequence
  ENSG00000162613_33 (sequence is synthesized)
tacatgaccactgtttcagacctgtactgctgctataacagttaacctttctgttcttaatttgataatacttgatttccaagactgtttcggcataactaattttaaacagttttcaga

SEQ ID NO: 488030 - DNA, 120 bp, Artificial Sequence
  ENSG00000162613_34 (sequence is synthesized)
tagtgaatatgagtagtctaataagaacagtttttttccatgtgaagcaactctttcaatgtatataatgttagtgtgtttctttctaaatttaggatagaaaagtgaatagtgtgcaaa

SEQ ID NO: 488031 - DNA, 120 bp, Artificial Sequence
  ENSG00000162613_35 (sequence is synthesized)
aagtatagctacattgcatctgccattgaaacataaatggggtatggaaacgttcaagctttttttttttctttatgcagtatagataagctttgttttgtaaatgcacaagtccaatca

SEQ ID NO: 488032 - DNA, 120 bp, Artificial Sequence
  ENSG00000162613_36 (sequence is synthesized)
gtaagtattttttatatgctttagctatagctaaagaaaactgatacttaacaaagttgaatagtattattcactggtgctcctaaaatattgtttttcagtgtaaaatatgcatatctt

SEQ ID NO: 488033 - DNA, 120 bp, Artificial Sequence
  ENSG00000162613_37 (sequence is synthesized)
ctatatttaatatgaaagtcttgaaatgtatcagacagaaggggatttcagtttgcaaataatgagcaatgtagcaattttaacacatttcataaatatatattttgtcattggtggaga

SEQ ID NO: 488034 - DNA, 120 bp, Artificial Sequence
  ENSG00000162613_38 (sequence is synthesized)
gcaccatttgttgttttgaatatactttaaaggaagaggtacaaggacataaatgttgagattacctacaggatggaaatagcagtacagttcattgtagatattttgaaatgtttttga

SEQ ID NO: 488035 - DNA, 120 bp, Artificial Sequence
  ENSG00000162613_39 (sequence is synthesized)
ttgttttatataacctagagtgacttcccttacccttatttagatctgcatatatagttctagtatgaagtttaatagttaaggagttagctatttgttatctttaagagtagggtattg

SEQ ID NO: 488036 - DNA, 120 bp, Artificial Sequence
  ENSG00000162613_40 (sequence is synthesized)
acgtgaacaattgcagtattttgcatgatactgttttatagatgaccttttaggaaagtggtgcatttattaattgaactgaagaagtagttcagttgaattcagtatcataattcacaa

SEQ ID NO: 488037 - DNA, 120 bp, Artificial Sequence
  ENSG00000162613_41 (sequence is synthesized)
attggaggctgttgattttgattcatttaaggtttaaaatctttattaattgcaaacagtgcaattatttatacttcacagtgccttcccagaccttccaccttaggttctgctgcaaaa

SEQ ID NO: 488038 - DNA, 120 bp, Artificial Sequence
  ENSG00000162614_0 (sequence is synthesized)
agaggactcccagcggctggagcagaagtgttagcggccagagctcccagacccctacccacagccaggcgggacgcgcacagtccctccacgcggaaagaagtaccttcgccggtcacc

SEQ ID NO: 488039 - DNA, 120 bp, Artificial Sequence
  ENSG00000162614_1 (sequence is synthesized)
ggctcctgcagggtgcaaatatatacagagcttcataatcagcccaagaccacatagagcaaacatgaatgatatttcccaaaaggctgagattctgctttcttcatctaaacctgtccc

SEQ ID NO: 488040 - DNA, 120 bp, Artificial Sequence
  ENSG00000162614_2 (sequence is synthesized)
aaaaacctatgtaccaaaacttggcaagggtgatgtaaaggataagtttgaagccatgcagagagccagggaagaaagaaatcaaaggagatctagagacgaaaaacaaagaagaaaaga

SEQ ID NO: 488041 - DNA, 120 bp, Artificial Sequence
  ENSG00000162614_3 (sequence is synthesized)
acaatatattagagagagagaatggaacaggagaaagcaggagattaaagaaatgcttgcttctgatgatgaggaagatgtatcttctaaagtagaaaaggcttatgttccaaaattaac

SEQ ID NO: 488042 - DNA, 120 bp, Artificial Sequence
  ENSG00000162614_4 (sequence is synthesized)
aggaactgtgaagggtagatttgctgaaatggagaaacaaagacaagaggaacaaaggaagagaacggaggaggaacgaaaacgcagaattgagcaggatatgttagaaaagaggaaaat

SEQ ID NO: 488043 - DNA, 120 bp, Artificial Sequence
  ENSG00000162614_5 (sequence is synthesized)
acagcgtgaattagcaaaaagggctgaacagattgaggacataaacaatacgggaactgaatcagcatcagaggaaggagatgattcactacttataactgtggtacctgtcaaatcata

SEQ ID NO: 488044 - DNA, 120 bp, Artificial Sequence
  ENSG00000162614_6 (sequence is synthesized)
taaaacatctggaaaaatgaaaaagaattttgaggatctagaaaaagaacgtgaagagaaagaaaggatcaagtacgaggaagataaaagaataagatatgaagaacaacgaccatctct

SEQ ID NO: 488045 - DNA, 120 bp, Artificial Sequence
  ENSG00000162614_7 (sequence is synthesized)
caaggaagcaaagtgtctttcattagttatggatgatgaaatagaaagtgaagcaaaaaaagaatcactttctcccggaaaattgaaactaacttttgaagaactggagcgacaaagaca

SEQ ID NO: 488046 - DNA, 120 bp, Artificial Sequence
  ENSG00000162614_8 (sequence is synthesized)
agaaaaccgaaagaagcaagctgaagaggaagcaagaaaacgtttagaagaagagaagcgtgcttttgaagaagcaaggcggcaaatggtaaatgaagatgaggaaaaccaagacacagc

SEQ ID NO: 488047 - DNA, 120 bp, Artificial Sequence
  ENSG00000162614_9 (sequence is synthesized)
aaaaatttttaaagggtaccgccctggtaaactcaaactcagttttgaagaaatggaaaggcaaagaagagaagatgaaaaaaggaaagcagaagaagaagccagaaggagaatagagga

SEQ ID NO: 488048 - DNA, 120 bp, Artificial Sequence
  ENSG00000162614_10 (sequence is synthesized)
tcttacaccgggaaaactggaaattaattttgaagaattattaaaacaaaaaatggaagaagaaaaacgacgaacagaggaggaacggaagcataagctagaaatggagaaacaagaatt

SEQ ID NO: 488049 - DNA, 120 bp, Artificial Sequence
  ENSG00000162614_11 (sequence is synthesized)
tgaacaactgagacaggaaatgggagaggaagaggaagaaaatgaaacctttggattgagcagagaatatgaagaactgatcaaattaaaaaggagtggctctattcaagctaaaaacct

SEQ ID NO: 488050 - DNA, 120 bp, Artificial Sequence
  ENSG00000162614_12 (sequence is synthesized)
aaaaagcaagtttgaaaaaattggacagttgtctgaaaaagaaatacagaaaaaaatagaagaagagcgagcaagaaggagagcaattgaccttgaaattaaagagcgagaagctgaaaa

SEQ ID NO: 488051 - DNA, 120 bp, Artificial Sequence
  ENSG00000162614_13 (sequence is synthesized)
ttttcatgaggaagatgatgttgatgttaggcctgcaagaaaaagcgaggctccatttactcacaaagtgaatatgaaagctagatttgaacaaatggctaaggcaagagaagaagaaga

SEQ ID NO: 488052 - DNA, 120 bp, Artificial Sequence
  ENSG00000162614_14 (sequence is synthesized)
acaaagaagaattgaagaacaaaagttactacgcatgcagtttgaacaaagggaaattgatgcagcactacaaaagaaaagagaagaggaggaggaggaagaaggtagcatcatgaatgg

SEQ ID NO: 488053 - DNA, 120 bp, Artificial Sequence
  ENSG00000162614_15 (sequence is synthesized)
ctccactgctgaagatgaagagcaaaccagatcaggagctccatggttcaagaagcctcttaaaaacacatcagttgtagacagtgagccagtcagatttacggttaaagtaacaggaga

SEQ ID NO: 488054 - DNA, 120 bp, Artificial Sequence
  ENSG00000162614_16 (sequence is synthesized)
acccaaaccagaaattacatggtggtttgaaggagaaatactgcaggatggagaagactatcaatatattgaaaggggagaaacttactgcctttacttaccagaaactttcccagaaga

SEQ ID NO: 488055 - DNA, 120 bp, Artificial Sequence
  ENSG00000162614_17 (sequence is synthesized)
tggaggagagtatatgtgtaaagcagtcaacaataaaggatctgcagctagtacctgtattcttaccattgaaagtaagaattaatcactctttttatcttttattctattaattttttt

SEQ ID NO: 488056 - DNA, 120 bp, Artificial Sequence
  ENSG00000162614_18 (sequence is synthesized)
ttccttaaaatcacttttcttcttctcttttttagctgatgactactagctcccctcccctctccctggaactttctctttcactccaactttcttactacatccatcttttctgtggcg

SEQ ID NO: 488057 - DNA, 120 bp, Artificial Sequence
  ENSG00000162614_19 (sequence is synthesized)
gggccaaaaaaggaaaccaggagtgccactatgctgacttcttattccttttcataacagtcttcaaagcacagctcatctaaagaatgcctacttcttttccaaataagcatcagattt

SEQ ID NO: 488058 - DNA, 120 bp, Artificial Sequence
  ENSG00000162614_20 (sequence is synthesized)
atcgcctattatgcagtaacagtcaataaaatgtacttatgggggggaattactcaattattctatcagaacctattataaagactgtatttcccatagacgtttacagcaactatgttt

SEQ ID NO: 488059 - DNA, 120 bp, Artificial Sequence
  ENSG00000162614_21 (sequence is synthesized)
catttctgagctttttacacctaaaattaggctgaaatagctgagataattaatttggaacctatcaatttgagtggactttttctttagtagtacaccattttggttgttgtagtttca

SEQ ID NO: 488060 - DNA, 120 bp, Artificial Sequence
  ENSG00000162614_22 (sequence is synthesized)
aagtctttctgaagcagatatattgggattggagcggggtggggaaaactgtcactcctttcagaggaaaaggggaggagcatggagaaaaacaaaaattaaaggacttaaagaatggct

SEQ ID NO: 488061 - DNA, 120 bp, Artificial Sequence
  ENSG00000162614_23 (sequence is synthesized)
atacagtgttgagtgttgaggatattaaacatgttatttttcaaacgtatgtaatatatattaaatttataaagcaaatttatgttgtgatcttgcctgaacaaattatattttaatgaa

SEQ ID NO: 488062 - DNA, 120 bp, Artificial Sequence
  ENSG00000162614_24 (sequence is synthesized)
aaaactttctattaatagttcacgcaagagaaaacactttcaacatagtcgaaggcttcaagatctaagtgtatcagacttagggaaaaagtggcacaaccttcgatttaaaattctagt

SEQ ID NO: 488063 - DNA, 120 bp, Artificial Sequence
  ENSG00000162614_25 (sequence is synthesized)
ctttaaaatgagtttgtaaataattagctattacgttctattaagttgttttatattttaattttctggaagacaattttattttacaacgtgaacccaaataaagtaacttctgtattt

SEQ ID NO: 488064 - DNA, 120 bp, Artificial Sequence
  ENSG00000162614_26 (sequence is synthesized)
acgaccatctctcaaggaagcaaagtgtctttcattagttatggtaaatttttgtttgtttgttttctaagaaacaaatcaaggcagtttaagttagcagcattttcctttatgactaaa

SEQ ID NO: 488065 - DNA, 120 bp, Artificial Sequence
  ENSG00000162614_27 (sequence is synthesized)
gtaatttatccaggaataagtattgtaatttcataccatagcttagttcatgcatatgtaaaatttaaaaatttcaggcaatctttgaattgtaaaccacttaaacattgtttctgagtt

SEQ ID NO: 488066 - DNA, 120 bp, Artificial Sequence
  ENSG00000162614_28 (sequence is synthesized)
gaaatagttctgtggtaaagcctggattaccttgataaaacttggagcaaatgaataataccccttgcctctctcattcccctgtgtgtatttcaaccacagagtcacagttcaggccag

SEQ ID NO: 488067 - DNA, 78 bp, Artificial Sequence
  ENSG00000162614_29 (sequence is synthesized)
cctgtgtgtatttcaaccacagagtcacagttcaggccagagggttatgttataccgcgcccggcctataatctttta

SEQ ID NO: 488068 - DNA, 120 bp, Artificial Sequence
  ENSG00000162614_30 (sequence is synthesized)
aaacaaaaactaaaaacaaacaaaaaaaagaaatcccagtttcttcaagaaatagtccctttttagtatgtgtaattctggccagagtgataaaataattattttaaataggtagtagat

SEQ ID NO: 488069 - DNA, 120 bp, Artificial Sequence
  ENSG00000162614_31 (sequence is synthesized)
gcattctgacctttttcagttaagtgctatcaaaaccaagcagagttggtaggacaaacaggctaggatcccagtgatattgtgatctttacatttggagaaaaagtctataactaagag

SEQ ID NO: 488070 - DNA, 120 bp, Artificial Sequence
  ENSG00000162614_32 (sequence is synthesized)
aatgcttcataaatgtatctatcacttttcctgaactggagagttagaaaaaatctgagtgtctgcagtgtagcaaaaatatgcattataaacatgttaatcattttgtgcttctaaaca

SEQ ID NO: 488071 - DNA, 120 bp, Artificial Sequence
  ENSG00000162616_0 (sequence is synthesized)
aggattgaatacagagacgctgtctgcttgctgccttaagacagctagctgaattgctgattaacttttaaaatacccagcttggtttatttttcttagaatctgttgctaagactgggg

SEQ ID NO: 488072 - DNA, 120 bp, Artificial Sequence
  ENSG00000162616_1 (sequence is synthesized)
acgctgttttcttttacaaagggaaatctaagttaatttcaaggcattcgaaatggggaaagactattattgcattttgggaattgagaaaggagcttcagatgaagatattaaaaaggc

SEQ ID NO: 488073 - DNA, 120 bp, Artificial Sequence
  ENSG00000162616_2 (sequence is synthesized)
ttaccgaaaacaagccctcaaatttcatccggacaagaacaaatctcctcaggcagaggaaaaatttaaagaggtcgcagaagcttatgaagtattgagtgatcctaaaaagagagaaat

SEQ ID NO: 488074 - DNA, 120 bp, Artificial Sequence
  ENSG00000162616_3 (sequence is synthesized)
atatgatcagtttggggaggaagggttgaaaggaggagcaggaggtactgatggacaaggaggtaccttccggtacacctttcatggcgatcctcatgctacatttgctgcatttttcgg

SEQ ID NO: 488075 - DNA, 120 bp, Artificial Sequence
  ENSG00000162616_4 (sequence is synthesized)
agggtccaacccctttgaaattttctttggaagacgaatgggtggtggtagagattctgaagaaatggaaatagatggtgatccttttagtgcctttggtttcagcatgaatggatatcc

SEQ ID NO: 488076 - DNA, 120 bp, Artificial Sequence
  ENSG00000162616_5 (sequence is synthesized)
aagagacaggaattctgtggggccatcccgcctcaaacaagatcctccagttattcatgaacttagagtatcacttgaagagatatatagtggttgtaccaaacggatgaagatttctcg

SEQ ID NO: 488077 - DNA, 120 bp, Artificial Sequence
  ENSG00000162616_6 (sequence is synthesized)
aaaaaggctaaacgctgatggaaggagttacagatctgaggacaaaattcttaccattgagattaaaaaagggtggaaagaaggcaccaaaattacttttccaagagaaggagatgaaac

SEQ ID NO: 488078 - DNA, 120 bp, Artificial Sequence
  ENSG00000162616_7 (sequence is synthesized)
accaaatagtattccagcagacattgtttttatcattaaagacaaagatcatccaaaatttaaaagggatggatcaaatataatttatactgctaaaattagtttacgagaggcattgtg

SEQ ID NO: 488079 - DNA, 120 bp, Artificial Sequence
  ENSG00000162616_8 (sequence is synthesized)
tggctgctcaattaatgtaccaacactggatggaagaaacatacctatgtcagtaaatgatattgtgaaacccggaatgaggagaagaattattggatatgggctgccatttccaaaaaa

SEQ ID NO: 488080 - DNA, 120 bp, Artificial Sequence
  ENSG00000162616_9 (sequence is synthesized)
tcctgaccaacgtggtgaccttctaatagaatttgaggtgtccttcccagatactatatcttcttcatccaaagaagtacttaggaaacatcttcctgcctcatagaatgaagaactttg

SEQ ID NO: 488081 - DNA, 120 bp, Artificial Sequence
  ENSG00000162616_10 (sequence is synthesized)
ttacacatattttgataaggcactgaaaatataaaaggactggtagtttactgatgtagatgtgaattctgtataaagatgtgtaaattcttttgagggttcattaaattgcatgaatag

SEQ ID NO: 488082 - DNA, 120 bp, Artificial Sequence
  ENSG00000162616_11 (sequence is synthesized)
agacgggtcaaataaataggcaaaagggatttttacagttagagataaaagagaaaaccattcactgtattttatttcatttctcctgattcagatatttttagtaatttgcttatatgt

SEQ ID NO: 488083 - DNA, 120 bp, Artificial Sequence
  ENSG00000162616_12 (sequence is synthesized)
tggatatatttctaatgaagtgctagactatccaattacttaatttcttatacctttagataatcagtatgaaaagttcccatttataatggaaatgaaaattcttaactaaactataca

SEQ ID NO: 488084 - DNA, 120 bp, Artificial Sequence
  ENSG00000162616_13 (sequence is synthesized)
tgtaatatgtatttctagaagagaataaaaacccaagtcagttattagatttaaatcaccttctgaaatgctgctatagggctggtatctgtaaaagaatatcctgatgcatctgtttca

SEQ ID NO: 488085 - DNA, 120 bp, Artificial Sequence
  ENSG00000162616_14 (sequence is synthesized)
ccattttgatttttaaagtatgctgtagcatttcttaataacatcgttgtgatgttcttaaggcagatctttcttcataaaaaggaaagtaatggcaatttctctcctgtggaaatccca

SEQ ID NO: 488086 - DNA, 120 bp, Artificial Sequence
  ENSG00000162616_15 (sequence is synthesized)
attgcttgaattactgatattttagaatagactttttaaaatgccatatgtaattttatgcaagttgactatatatcttgtacttaataaattataggctcattttgttctctgctagtt

SEQ ID NO: 488087 - DNA, 120 bp, Artificial Sequence
  ENSG00000162616_16 (sequence is synthesized)
taaagtaattcgtttaataatagatgtgtttttagaggaaatgctgttacttggaattaattttccagttatacagtcttctataacttactaataatattctatatgtactttatgtaa

SEQ ID NO: 488088 - DNA, 120 bp, Artificial Sequence
  ENSG00000162616_17 (sequence is synthesized)
tttccctaaaaagaatgaactaccactacactatggtgttaaaccaaaatatagggaaaataaacactaactgctgcttatggataatgttgcaactacttgttatgcatataaatattt

SEQ ID NO: 488089 - DNA, 120 bp, Artificial Sequence
  ENSG00000162616_18 (sequence is synthesized)
ttttcacatgtatagattgcatttcttaggtgttttaattttttaaatatatttatgttttaaaaatttagttttgttttctgttttataactatagtgagaatgatgttttgaagcaaa

SEQ ID NO: 488090 - DNA, 120 bp, Artificial Sequence
  ENSG00000162616_19 (sequence is synthesized)
ttttgaagcaaaatttttggttataaaatagttttcaggattatatatatatatactggatcctatcgccttttagtagaatatgaaatattcttttagaaatccaatataaataggtta

SEQ ID NO: 488091 - DNA, 120 bp, Artificial Sequence
  ENSG00000162616_20 (sequence is synthesized)
atattctttattactttattgagatataatttacatgccataaagtttacccttaaaatatataattcagtggtttttagtgatatttacaaagtggtacaatcatcatcactttctaat

SEQ ID NO: 488092 - DNA, 120 bp, Artificial Sequence
  ENSG00000162616_21 (sequence is synthesized)
tccagaatattttcatcaccccaaaaagaaatcctaaatccattagcagttacttcccattcttcccttcctccagcccctgaaaacactaccatctacttttcatctgtatggatttgt

SEQ ID NO: 488093 - DNA, 120 bp, Artificial Sequence
  ENSG00000162616_22 (sequence is synthesized)
ctgttctggacatttcacataaatagactcaaacaatatatggctttttttttttttggtctggcctctttcatttagcttaatgttttcaaggttcatctatgttgtatcacgtatcag

SEQ ID NO: 488094 - DNA, 120 bp, Artificial Sequence
  ENSG00000162616_23 (sequence is synthesized)
tactttattttttgtgtggcacgtcatatggatataccacaatttgtttatcttttcattaattatgggcatttggcttatttctacttttttggctattataaataatgctgctgtgaa

SEQ ID NO: 488095 - DNA, 120 bp, Artificial Sequence
  ENSG00000162616_24 (sequence is synthesized)
gcgctggtgtgggttagggctgagaaagaacgacaggaacagagacgtcgcgaggattaagtttaagacttcgcgagaacagaatttcttttggcacctcctctccgcgcgttcttgggg

SEQ ID NO: 488096 - DNA, 120 bp, Artificial Sequence
  ENSG00000162616_25 (sequence is synthesized)
gcgcgttcttggggtgaggctgggtaattgttcctgcagggtggtgggtgatagtggccagttgactgcgactgtgtttgggtggtgggaagcctgaagaaaaggttgtttcttaccggt

SEQ ID NO: 488097 - DNA, 120 bp, Artificial Sequence
  ENSG00000162616_26 (sequence is synthesized)
cgctgcctcagggaggtagtgcggtagaattttccgctatgggtcattctcggtgtccgcggggaagggcgtgacaacgacgggcgtgacggcgaagcaacagtgtctcgagagcgctgc

SEQ ID NO: 488098 - DNA, 120 bp, Artificial Sequence
  ENSG00000162616_27 (sequence is synthesized)
cgcccggagggcgccaggagaagtgcgtccgagacgccgcgcggtgatgctcctgaaaacgtctgcccggcgtagcgggaacccagcatgattttcaggggttgaaaggaggagcaggag

SEQ ID NO: 488099 - DNA, 120 bp, Artificial Sequence
  ENSG00000162616_28 (sequence is synthesized)
gttaaggtctcttaagttaagaacagcattgtttcttgaccaaaatagattttgtagcttcttaggcgtagtttctcccaccccatcctgtgggtactcaaatgtaagatcatattctga

SEQ ID NO: 488100 - DNA, 78 bp, Artificial Sequence
  ENSG00000162616_29 (sequence is synthesized)
taagtttaagacttcgcgagaacagaatttcttttggcacctcctctccgcgcgttcttgagcctcccaggttcaaga

SEQ ID NO: 488101 - DNA, 120 bp, Artificial Sequence
  ENSG00000162618_0 (sequence is synthesized)
ggcgcccggtcccgggtccacagccgcactcactccgccgcgctctccgccaccgccaccactgcggccaccgccaatgaaacgcctcccgctcctagtggttttttccactttgttgaa

SEQ ID NO: 488102 - DNA, 120 bp, Artificial Sequence
  ENSG00000162618_1 (sequence is synthesized)
ttgttcctatactcaaaattgcaccaagacaccttgtctcccaaatgcaaaatgtgaaatacgcaatggaattgaagcctgctattgcaacatgggattttcaggaaatggtgtcacaat

SEQ ID NO: 488103 - DNA, 120 bp, Artificial Sequence
  ENSG00000162618_2 (sequence is synthesized)
ttgtgaagatgataatgaatgtggaaatttaactcagtcctgtggcgaaaatgctaattgcactaacacagaaggaagttattattgtatgtgtgtacctggcttcagatccagcagtaa

SEQ ID NO: 488104 - DNA, 120 bp, Artificial Sequence
  ENSG00000162618_3 (sequence is synthesized)
ccaagacaggtttatcactaatgatggaaccgtctgtatagaaaatgtgaatgcaaactgccatttagataatgtctgtatagctgcaaatattaataaaactttaacaaaaatcagatc

SEQ ID NO: 488105 - DNA, 120 bp, Artificial Sequence
  ENSG00000162618_4 (sequence is synthesized)
cataaaagaacctgtggctttgctacaagaagtctatagaaattctgtgacagatctttcaccaacagatataattacatatatagaaatattagctgaatcatcttcattactaggtta

SEQ ID NO: 488106 - DNA, 120 bp, Artificial Sequence
  ENSG00000162618_5 (sequence is synthesized)
caagaacaacactatctcagccaaggacaccctttctaactcaactcttactgaatttgtaaaaaccgtgaataattttgttcaaagggatacatttgtagtttgggacaagttatctgt

SEQ ID NO: 488107 - DNA, 120 bp, Artificial Sequence
  ENSG00000162618_6 (sequence is synthesized)
gaatcataggagaacacatcttacaaaactcatgcacactgttgaacaagctactttaaggatatcccagagcttccaaaagaccacagagtttgatacaaattcaacggatatagctct

SEQ ID NO: 488108 - DNA, 120 bp, Artificial Sequence
  ENSG00000162618_7 (sequence is synthesized)
caaagttttcttttttgattcatataacatgaaacatattcatcctcatatgaatatggatggagactacataaatatatttccaaagagaaaagctgcatatgattcaaatggcaatgt

SEQ ID NO: 488109 - DNA, 120 bp, Artificial Sequence
  ENSG00000162618_8 (sequence is synthesized)
tgcagttgcatttgtatattataagagtattggtcctttgctttcatcatctgacaacttcttattgaaacctcaaaattatgataattctgaagaggaggaaagagtcatatcttcagt

SEQ ID NO: 488110 - DNA, 120 bp, Artificial Sequence
  ENSG00000162618_9 (sequence is synthesized)
aatttcagtctcaatgagctcaaacccacccacattatatgaacttgaaaaaataacatttacattaagtcatcgaaaggtcacagataggtataggagtctatgtgcattttggaatta

SEQ ID NO: 488111 - DNA, 120 bp, Artificial Sequence
  ENSG00000162618_10 (sequence is synthesized)
ctcacctgataccatgaatggcagctggtcttcagagggctgtgagctgacatactcaaatgagacccacacctcatgccgctgtaatcacctgacacattttgcaattttgatgtcctc

SEQ ID NO: 488112 - DNA, 120 bp, Artificial Sequence
  ENSG00000162618_11 (sequence is synthesized)
tggtccttccattggtattaaagattataatattcttacaaggatcactcaactaggaataattatttcactgatttgtcttgccatatgcatttttaccttctggttcttcagtgaaat

SEQ ID NO: 488113 - DNA, 120 bp, Artificial Sequence
  ENSG00000162618_12 (sequence is synthesized)
tcaaagcaccaggacaacaattcacaaaaatctttgctgtagcctatttcttgctgaacttgtttttcttgttgggatcaatacaaatactaataagctcttctgttcaatcattgccgg

SEQ ID NO: 488114 - DNA, 120 bp, Artificial Sequence
  ENSG00000162618_13 (sequence is synthesized)
actgctacactacttctttttagctgcttttgcatggatgtgcattgaaggcatacatctctatctcattgttgtgggtgtcatctacaacaagggatttttgcacaagaatttttatat

SEQ ID NO: 488115 - DNA, 120 bp, Artificial Sequence
  ENSG00000162618_14 (sequence is synthesized)
attatggcacaaccaaagtatgttggcttagcaccgaaaacaactttatttggagttttataggaccagcatgcctaatcattcttgttaatctcttggcttttggagtcatcatataca

SEQ ID NO: 488116 - DNA, 120 bp, Artificial Sequence
  ENSG00000162618_15 (sequence is synthesized)
aagtttttcgtcacactgcagggttgaaaccagaagttagttgctttgagaacataaggtcttgtgcaagaggagccctcgctcttctgttccttctcggcaccacctggatctttgggg

SEQ ID NO: 488117 - DNA, 120 bp, Artificial Sequence
  ENSG00000162618_16 (sequence is synthesized)
ttctccatgttgtgcacgcatcagtggttacagcttacctcttcacagtcagcaatgctttccaggggatgttcatttttttattcctgtgtgttttatctagaaagattcaagaagaat

SEQ ID NO: 488118 - DNA, 120 bp, Artificial Sequence
  ENSG00000162618_17 (sequence is synthesized)
attacagattgttcaaaaatgtcccctgttgttttggatgtttaaggtaaacatagagaatggtggataattacaactgcacaaaaataaaaattccaagctgtggatgaccaatgtata

SEQ ID NO: 488119 - DNA, 120 bp, Artificial Sequence
  ENSG00000162618_18 (sequence is synthesized)
tgactcatcaaattatccaattattaactactagacaaaaagtattttaaatcagtttttctgtttatgctataggaactgtagataataaggtaaaattatgtatcatatagatatact

SEQ ID NO: 488120 - DNA, 120 bp, Artificial Sequence
  ENSG00000162618_19 (sequence is synthesized)
tactatgtttttctatgtgaaatagttctgtcaaaaatagtattgcagatatttggaaagtaattggtttctcaggagtgatatcactgcacccaaggaaagattttctttctaacacga

SEQ ID NO: 488121 - DNA, 120 bp, Artificial Sequence
  ENSG00000162618_20 (sequence is synthesized)
gaagtatatgaatgtcctgaaggaaaccactggcttgatatttctgtgactcgtgttgcctttgaaactagtcccctaccacctcggtaatgagctccattacagaaagtggaacataag

SEQ ID NO: 488122 - DNA, 120 bp, Artificial Sequence
  ENSG00000162618_21 (sequence is synthesized)
agaatgaaggggcagaatatcaaacagtgaaaagggaatgataagatgtattttgaatgaactgttttttctgtagactagctgagaaattgttgacataaaataaagaattgaagaaac

SEQ ID NO: 488123 - DNA, 120 bp, Artificial Sequence
  ENSG00000162618_22 (sequence is synthesized)
acattttaccattttgtgaattgttctgaacttaaatgtccactaaaacaacttagacttctgtttgctaaatctgtttctttttctaatattctaaaaaaaaaaaaaaggtttacctcc

SEQ ID NO: 488124 - DNA, 120 bp, Artificial Sequence
  ENSG00000162618_23 (sequence is synthesized)
acaaattgaaaaaaaaaaagtgaaaaaaatctgtttctaaggttagactgagatatatactatttccttacttatttcacagattgtgactttggatagttaatcagtaaaatataaatg

SEQ ID NO: 488125 - DNA, 120 bp, Artificial Sequence
  ENSG00000162618_24 (sequence is synthesized)
tgtcaagatataatattgtttatacctatcaatgtaaaaacagtgtaataaagctgaagtattctattacctttcagtgaagtgaaagttatactatctcattagtatatttgaatcctt

SEQ ID NO: 488126 - DNA, 120 bp, Artificial Sequence
  ENSG00000162618_25 (sequence is synthesized)
atttttaattttataaatatcacagttcacattgcaatattccctttaatttactatttttaaaggggtattgtaaatatgaaagtatttataaagtgaattgctattttttctgttcag

SEQ ID NO: 488127 - DNA, 120 bp, Artificial Sequence
  ENSG00000162618_26 (sequence is synthesized)
tcagaaaagtacacacttaaaattgttattgttaacaatgtgtaaacacatttaaaattgttattgttaacaaagaaatcatggagaactgtagaggttttcacagtggatccattttct

SEQ ID NO: 488128 - DNA, 120 bp, Artificial Sequence
  ENSG00000162618_27 (sequence is synthesized)
gacagttttctactatctattaaatcatatctgcttaaatatatagcttctatctgtctttaaatcttctcattaaaatgtataagcagtgattttgatctcaaaaataggtaatttttc

SEQ ID NO: 488129 - DNA, 120 bp, Artificial Sequence
  ENSG00000162618_28 (sequence is synthesized)
tttgccgacctgtaaaagtgtgccaatacactaaatttgtgattttaaattaattcctccagctgttgaaatgaagtctgccaaatcttgctctaacaaataaaatgttatctaaatgaa

SEQ ID NO: 488130 - DNA, 120 bp, Artificial Sequence
  ENSG00000162618_29 (sequence is synthesized)
agaggcaacaagactgatatgaggtttaatccatgccaagacaacttgtgcttgtgggctctagcttgctcttgcacttctccgttttacattcatctttccttttctgttgcctgccct

SEQ ID NO: 488131 - DNA, 120 bp, Artificial Sequence
  ENSG00000162618_30 (sequence is synthesized)
gtagtcttcaagtaccaacagcatcagatgcacagatgacagctttacagaaactgcttagccagctcctacaattgtgtaaggtgtcaggcccatattgtgtctggagttggttcctgc

SEQ ID NO: 488132 - DNA, 120 bp, Artificial Sequence
  ENSG00000162618_31 (sequence is synthesized)
tggtgggttcgtggtctcgctgacttcaagaatggagctgcagaccttccaagagcaatgaagtggtgtgatgcattgcaagctatgaaaaaaaggcttctcatggtgaaaccaactcta

SEQ ID NO: 488133 - DNA, 120 bp, Artificial Sequence
  ENSG00000162618_32 (sequence is synthesized)
aaatttgtacttagtaatgacacacatttgtttgcctgattcccagctctcttaggataggtcttcttgggaaatgctttcatttctaatgcaaagaaaattgtgcaggcagccacgtta

SEQ ID NO: 488134 - DNA, 120 bp, Artificial Sequence
  ENSG00000162618_33 (sequence is synthesized)
agatgtttttctgacaataatcggccaagatattccactgtgtctcgaggccactcctgaaaagaggaagtttgttttcctgttgttctgacaggaagaggtggatctacttcatcaaca

SEQ ID NO: 488135 - DNA, 120 bp, Artificial Sequence
  ENSG00000162618_34 (sequence is synthesized)
attatcccacaaatgatttgttaggcatgcaggtttgtattgtttctgatactataaggacaacaaatacagctcttttttttcaaactgctacacccaggaagctggaagaagagtaga

SEQ ID NO: 488136 - DNA, 120 bp, Artificial Sequence
  ENSG00000162618_35 (sequence is synthesized)
aagctaaaaaggagggcatccttccttgaatgtggggtaggaacctttccgaagtggggatcttatgacctacaaggtaggtcagagaatttctttacagccaactctaagacagaaggg

SEQ ID NO: 488137 - DNA, 120 bp, Artificial Sequence
  ENSG00000162618_36 (sequence is synthesized)
caagagaagatttctgccttgaagagaaaaaggagcagtggttttttccactttgttgaattgttcctatactcaaaattgcaccaagacaccttgtctcccaaatgcaaaatgtgaaat

SEQ ID NO: 488138 - DNA, 120 bp, Artificial Sequence
  ENSG00000162618_37 (sequence is synthesized)
agggtgcttaaaatttccagcaataaggtgttattctaaaaaagaagaatttgaatattttacagtatatcacttatcagcattttacatatactataattaaaaaatacatgtatatct

SEQ ID NO: 488139 - DNA, 120 bp, Artificial Sequence
  ENSG00000162618_38 (sequence is synthesized)
ttaaatataaaatataataatactttttaaatataaaaaaaatcatgtatagcttttaaattcaaagctattacaattcatttgcccctcttgatggagtatagatgtctgcataacata

SEQ ID NO: 488140 - DNA, 120 bp, Artificial Sequence
  ENSG00000162618_39 (sequence is synthesized)
tcttgatggagtatagatgtctgcataacatagaggaaaaagcattttttgcttatcagtaatacctcggcatgcttcaacacacagagtgtgccaaccagctgataatttggcatttta

SEQ ID NO: 488141 - DNA, 120 bp, Artificial Sequence
  ENSG00000162618_40 (sequence is synthesized)
ttatgacctacaagtggttttttccactttgttgaattgttcctatactcaaaattgcaccaagacaccttgtctcccaaatgcaaaatgtgaaatacgcaatggaattgaagcctgcta

SEQ ID NO: 488142 - DNA, 120 bp, Artificial Sequence
  ENSG00000162618_41 (sequence is synthesized)
tctgttcccaagtctgttggacaccccccttcacgtcatcgaagtgcctgcttagacataatctaggagacgtcccttggacaaccctccatatcactttctttcttcttacccagggtc

SEQ ID NO: 488143 - DNA, 120 bp, Artificial Sequence
  ENSG00000162618_42 (sequence is synthesized)
tgagtttctgatggatgctgtgacctgggtgtagttcctgaattgattactcagttaaaaaaatataaaagttcctgagggtatacacctgaaagtaaaacagtggtagatgactgtgaa

SEQ ID NO: 488144 - DNA, 120 bp, Artificial Sequence
  ENSG00000162618_43 (sequence is synthesized)
attaagaaccttcagatggggagactatcttggattatccagatggcagaaggagccatgaacaaaggaatatgggcagcctctaaaatctggaaaaggcaaggaaatagattctcccct

SEQ ID NO: 488145 - DNA, 120 bp, Artificial Sequence
  ENSG00000162618_44 (sequence is synthesized)
acaagatctggagaccagtgagaccaatattggacttctaactcacaaaactgtacttctgctgctcaacatcaagattcaaggagttcatcacttggatgagactggggaagaggatgg

SEQ ID NO: 488146 - DNA, 120 bp, Artificial Sequence
  ENSG00000162618_45 (sequence is synthesized)
ggcgcccggtcccgggtccacagccgcactcactccgccgcgctctccgccaccgccaccactgcggccaccgccaatgaaacgcctcccgctcctaggtgagtgctcagcgcccctggt

SEQ ID NO: 488147 - DNA, 120 bp, Artificial Sequence
  ENSG00000162620_0 (sequence is synthesized)
aaccacgcccccggagcgccttggctggcgcccggaaaaccatgatgtggagaacttggatgttgtcttgtttctctagcaacggtctcaggagcagatggccgcccagcgatttgtctg

SEQ ID NO: 488148 - DNA, 120 bp, Artificial Sequence
  ENSG00000162620_1 (sequence is synthesized)
actgtgttggggctgggccacttgtctccaactcataagggcttgcagcccagttgacccgatgtttcatggaacagtcacagaagagctaaccagtcatgaagaatggagtcactataa

SEQ ID NO: 488149 - DNA, 120 bp, Artificial Sequence
  ENSG00000162620_2 (sequence is synthesized)
tgaaaacataagagaaggtcaaaaagattttgtttttgtgaagttcaatggccttcatttaaagtctatggaaaatttgcagtcttgcatctctcttagagtatgcatcttctcaaacaa

SEQ ID NO: 488150 - DNA, 120 bp, Artificial Sequence
  ENSG00000162620_3 (sequence is synthesized)
ttttattacagatattcatccacttcaaagttgtataaaattaatcaaacttgatctccatggaaatcagataaagagtctaccaaataccaaattttggaatggattgaagaacctaaa

SEQ ID NO: 488151 - DNA, 120 bp, Artificial Sequence
  ENSG00000162620_4 (sequence is synthesized)
actactctatcttcatgacaatgggtttgcaaagttaaagaatatatgtgtattatctgcctgtccaaccctcattgccctcactatgtttgattgtccagtaagccttaaaaaaggata

SEQ ID NO: 488152 - DNA, 120 bp, Artificial Sequence
  ENSG00000162620_5 (sequence is synthesized)
tagacatgttcttgttaacagtatatggcctctcaaagcgctggatcatcatgtgatttctgatgaagaaataattcagaactggcatcttcctgaaagattcaaagcatgtaaccatcg

SEQ ID NO: 488153 - DNA, 120 bp, Artificial Sequence
  ENSG00000162620_6 (sequence is synthesized)
acttttctttaatttctgcccagctttgagaaagggaacaacctatgaagaggaaattaataatattaaacatattacttcaaaaattaatgcaattctggctcataattcaccagtttt

SEQ ID NO: 488154 - DNA, 120 bp, Artificial Sequence
  ENSG00000162620_7 (sequence is synthesized)
gattgttcaaagatggatacgtggtttcttagttagaaaaaatttgagccctgtgtttttccacaaaaaaaaacagcaggaaaaaattattagaggatatgaagcaaaatggatttacat

SEQ ID NO: 488155 - DNA, 120 bp, Artificial Sequence
  ENSG00000162620_8 (sequence is synthesized)
aaccaaagggtatgaagataagctccttaaggatctctttttcaaacctgaaactaatataaaaggaaagcttgcatattggaaacataatatatattatcctgttgatttaaaaaattc

SEQ ID NO: 488156 - DNA, 120 bp, Artificial Sequence
  ENSG00000162620_9 (sequence is synthesized)
cagtgaacacagaaaacatgtgtcatctattttatgtgaattaaaaccaaaagatctaggcatgaaatcaaaaacatcaagacatctcattcaaaaaggtcaggagtctgaagatgaaat

SEQ ID NO: 488157 - DNA, 120 bp, Artificial Sequence
  ENSG00000162620_10 (sequence is synthesized)
tgtggatgaaaaattggataccagttttaggatatcagttttcaaactacccatatacacttcaggttcattgaagaataatgcagtattgagagagaaaaaacaacatttttttcctgc

SEQ ID NO: 488158 - DNA, 120 bp, Artificial Sequence
  ENSG00000162620_11 (sequence is synthesized)
agagctggtatgaaactccgaacatttagtgatattgacaaatattacacagaacaaaagaagcaggaataccataaagaaaaagtaagagttgtagccatggcacaagttgctcgagaa

SEQ ID NO: 488159 - DNA, 120 bp, Artificial Sequence
  ENSG00000162620_12 (sequence is synthesized)
agagttagagtagctgttaatgaacatttgaatcagaaaaaatatgctacacaaaaactaattgaagaaaataaagagacaattcagaacagtttacgacaagtttggcaaaacagattc

SEQ ID NO: 488160 - DNA, 120 bp, Artificial Sequence
  ENSG00000162620_13 (sequence is synthesized)
aactaccttgaaaaagctagagagagaaaagctctgtttctaaaagaaaaatcccaaaaggcttcagagcgtttattagttcaaaacttaaataatgagcgcactcttttgaccagagga

SEQ ID NO: 488161 - DNA, 120 bp, Artificial Sequence
  ENSG00000162620_14 (sequence is synthesized)
ctacttaaaattgacagactggagaagaatgaggctgtcctaaaagagaaaagcctgattgttaagcaaaaactaaaagcagaaaaatatagaaagaatttacttaaagaaatgaaaaaa

SEQ ID NO: 488162 - DNA, 120 bp, Artificial Sequence
  ENSG00000162620_15 (sequence is synthesized)
gttagatctcaagaaatatataaaagacattgtgaagaaaaatttgttatggatatgattgcctttgaaaaagcctgtgaaagacttcaagatgctaaaacaaaagtagcaattgtgaaa

SEQ ID NO: 488163 - DNA, 120 bp, Artificial Sequence
  ENSG00000162620_16 (sequence is synthesized)
acaaatttagactttaaagttcccaatggactgataaaatgaatcaatgccagatcacatcctatgatcatcttaaattatagtcattatttttagttgaaggaatttgaaataatactc

SEQ ID NO: 488164 - DNA, 120 bp, Artificial Sequence
  ENSG00000162620_17 (sequence is synthesized)
taaagcaagaaatactctacatcacaagatggatttatatataagtcttctaaaaatataaagattagttaaaatgtttctcttattggtcataatttaacttaaagttgacttagcacc

SEQ ID NO: 488165 - DNA, 120 bp, Artificial Sequence
  ENSG00000162620_18 (sequence is synthesized)
tctgaaaaatttcttagatcagatgcctaaggaacaattaaactgatttaatgtattgcagacaatgttgcaatgacattgctgatattctgtttcatattctttctaaatatagcaatt

SEQ ID NO: 488166 - DNA, 120 bp, Artificial Sequence
  ENSG00000162620_19 (sequence is synthesized)
cataagctaatttaggtttttctggaaaccttagaatagtaatttctactccaactgctgacttttattaagacactgtgtacgttgatgacttttattacctgcttttatatatttcct

SEQ ID NO: 488167 - DNA, 120 bp, Artificial Sequence
  ENSG00000162620_20 (sequence is synthesized)
tcctgcttattttgttaaaacaatttctgaatttattttttaaagtatggtttcaatattttgtcagtgatatatgctgttataaaaattcagaaaatatgaactatgaaaagtaaatta

SEQ ID NO: 488168 - DNA, 120 bp, Artificial Sequence
  ENSG00000162620_21 (sequence is synthesized)
ttcttatcaccttccttgaagactgtaagatttttgtatatttacttttgatgggtttgccctgtttggtatacatgtgaagacagggaaaagacagaggagagaagcaagagacaaccc

SEQ ID NO: 488169 - DNA, 120 bp, Artificial Sequence
  ENSG00000162620_22 (sequence is synthesized)
acccatataattatatattggaatcataaaatatacagaaatggtatatattaaccataagtctgtttaatacataccaatggtagaaaatttgaaaaataaactgttaaaaaagacaga

SEQ ID NO: 488170 - DNA, 120 bp, Artificial Sequence
  ENSG00000162620_23 (sequence is synthesized)
ggaacttacccaatattggacagcaaatgagtcatgaggtgggatttcaacaagtctgcagtcaacattgcatcacaaatgacagacagtgcagagatttgagtgtacttttcacactga

SEQ ID NO: 488171 - DNA, 120 bp, Artificial Sequence
  ENSG00000162620_24 (sequence is synthesized)
gtgtggaaagaggagaagaataagtgtggaaatactcctctactattttgaagctggataactgggacagaaaagaacttatttaacagaaatggcagcacttaaagacttttggtgaaa

SEQ ID NO: 488172 - DNA, 120 bp, Artificial Sequence
  ENSG00000162620_25 (sequence is synthesized)
agataagtttggtcatacttctttgaggcaggatattaaagaagaaataataactagacattggaaatgaaaaacaaaaattcagaaatagtgttctggacttgattgtaaattcaggag

SEQ ID NO: 488173 - DNA, 120 bp, Artificial Sequence
  ENSG00000162620_26 (sequence is synthesized)
tatttgcttggggtcatagttaaagcctagttctctcaggtaaatacagggatcaataaaggctgaaaactaaggacacaaccttggggcactgtctcattttgtgggtagaaagcagtg

SEQ ID NO: 488174 - DNA, 90 bp, Artificial Sequence
  ENSG00000162620_27 (sequence is synthesized)
gagtcatattggaagaattttttatggtaaagaggatgtcgcatctttagaatttcaatagcttgcagttgttggacatgaaattgtggt

SEQ ID NO: 488175 - DNA, 120 bp, Artificial Sequence
  ENSG00000162620_28 (sequence is synthesized)
aatttcaatagcttgcagttgttggacatgaaattgtggtgggttatatataactgccaagtatagaacctttactgagaatattttggacagaagaaaaataaagctttaactatagga

SEQ ID NO: 488176 - DNA, 120 bp, Artificial Sequence
  ENSG00000162620_29 (sequence is synthesized)
aatagaatttatgaaagatttattaaagtgaagtggtacttgcctcactttaacttaccaaatatataatttaccatatttataaactgaggataaatgagttttgattagaaagagaaa

SEQ ID NO: 488177 - DNA, 120 bp, Artificial Sequence
  ENSG00000162620_30 (sequence is synthesized)
gttgtataaaattaatcaaacttgatctccatggaaatcaggtaagcaatagccatttcagatatttgcatataaacgaaatttcagtcttataataagtacttatgttacctatccaca

SEQ ID NO: 488178 - DNA, 120 bp, Artificial Sequence
  ENSG00000162620_31 (sequence is synthesized)
gtatttcttcaacatggtcttttgtctaaaatataaacaaaaatttaacaataaattaaaagcatgtaagatgtatataaatacggacactttgatgtaaatgaaaatacataaatagtg

SEQ ID NO: 488179 - DNA, 120 bp, Artificial Sequence
  ENSG00000162620_32 (sequence is synthesized)
tgtaatctggtatgtttcacttcttaaatctatagcctggattaagaatgcctcatgattccttaattttccttaggtaaggaaagtattttagaaaagtttaaagagtcaacctattac

SEQ ID NO: 488180 - DNA, 120 bp, Artificial Sequence
  ENSG00000162620_33 (sequence is synthesized)
aaagaaattttctttgaacaaaaaagtatggttatgcattttactatgcgaataataataaattatctcagatacccagtgtattatggttttcaactggccatcattggataattataa

SEQ ID NO: 488181 - DNA, 120 bp, Artificial Sequence
  ENSG00000162620_34 (sequence is synthesized)
atactctgtttgcttattaattagaaacttgctatttggggaatattgaattttatatgtgtaatattttaccattttctgtgctattcgaaaaaagtaattttggaatttaaaagattt

SEQ ID NO: 488182 - DNA, 120 bp, Artificial Sequence
  ENSG00000162620_35 (sequence is synthesized)
gagaaaggtaattggcttctttagggtttcattttaattaaatgtataaaagggaaattttagcttctgagttctatatctaaattatataaactttttaatatttttgcatcatttata

SEQ ID NO: 488183 - DNA, 120 bp, Artificial Sequence
  ENSG00000162620_36 (sequence is synthesized)
tgtaatgtctttctatctgaaacttgataaaagtttgcatgccaactacattaaacaaagcctgaaatgatcaaattgtagagaaacaaatttttgttttttaaattgaaagtaaatctc

SEQ ID NO: 488184 - DNA, 120 bp, Artificial Sequence
  ENSG00000162620_37 (sequence is synthesized)
taatttattcagaatttggtatatgaaagactccattgagaaatacttaatgttttttaagagcgttaaaggatgacttagattattattagaagataaaatatttaattcttacacaat

SEQ ID NO: 488185 - DNA, 120 bp, Artificial Sequence
  ENSG00000162620_38 (sequence is synthesized)
tgatttggttatttgacaagataaaaccatcattatctattgatttataaaatgttagaagaagtgattgtgaaaagttgataccaagttaacggatacagactaattaagtggatttac

SEQ ID NO: 488186 - DNA, 120 bp, Artificial Sequence
  ENSG00000162620_39 (sequence is synthesized)
acgttctttataacacatgaataaatattagaacaaatcatttaagagttcaaaagagggggttaaattaggtacaagatatagtaacaataagttgcaggaaatgtttgtaatatgttc

SEQ ID NO: 488187 - DNA, 120 bp, Artificial Sequence
  ENSG00000162620_40 (sequence is synthesized)
taaagatatgtgaagtcacatatatgtgtgtagaaattttgaggaagaatagaacataattttgaacagtgagtatatctaaaagaatatataaacattgaacagtgattatgcgtggaa

SEQ ID NO: 488188 - DNA, 120 bp, Artificial Sequence
  ENSG00000162620_41 (sequence is synthesized)
gcgtggaaaaactgaaaattacaaagttggaagaattttattactgcatataatttttttaattagggacatattagtgattttgtaatagttttaaaaatttaggattttggtaataat

SEQ ID NO: 488189 - DNA, 120 bp, Artificial Sequence
  ENSG00000162620_42 (sequence is synthesized)
aatagttaaaaatataaaaaacaaggtagtatttaagtctgatatcttaacctgggccctaaataaagaatttcacttaggtacttcagttgcgtagtatggcataatgaaaggtggcaa

SEQ ID NO: 488190 - DNA, 120 bp, Artificial Sequence
  ENSG00000162620_43 (sequence is synthesized)
caggcatgacccttttaaggataatcgaagtgacagattcatttaaggaagtaatggaaagttgggcagtgggcattgagaaagaacttggatgacctactaaagagcttagacttgatg

SEQ ID NO: 488191 - DNA, 120 bp, Artificial Sequence
  ENSG00000162620_44 (sequence is synthesized)
aatataatgaagattaattgaaattatttgagtaggaaaattagggtaggtccctcatagtaagtgctctatgaataaatggtattgacaaggtttttaaaaggtgatcaacccaacatt

SEQ ID NO: 488192 - DNA, 120 bp, Artificial Sequence
  ENSG00000162620_45 (sequence is synthesized)
ttgctagcagattaatggaggatagaagccaaatgagggcaaggggatcaattactgtaggttcaaaatgatgtgattaggattgatataggcagataccagtaataaagaagaaagaac

SEQ ID NO: 488193 - DNA, 120 bp, Artificial Sequence
  ENSG00000162620_46 (sequence is synthesized)
acagtgtagaggacagacacatattcagtgaatgccattgtggtaggcgctttatacattttatttcttcattctttcaccaagtatatactgagtacctaatatatgaaaaggactgtc

SEQ ID NO: 488194 - DNA, 120 bp, Artificial Sequence
  ENSG00000162620_47 (sequence is synthesized)
tgggacttggagattcagtggtaaataatactgacaaaattcttgtcctcattaagtccaagggaaaggcacagagaatagacaaatctggaaacaaaaataaaactaaacaaccataaa

SEQ ID NO: 488195 - DNA, 120 bp, Artificial Sequence
  ENSG00000162620_48 (sequence is synthesized)
atgtcagctagtgttagttgctaaagaaaagaaagtaaggcattaacacagactgaaaggggtagagatttgggctacattagctagggtggatggggaaggcctttttgaagaatattt

SEQ ID NO: 488196 - DNA, 120 bp, Artificial Sequence
  ENSG00000162620_49 (sequence is synthesized)
tgtgtccaagaaagcgagaaaaaaaaaacattttttttctaatttttaagttgatagaaaaatattaatctagtttccttgaaatataaaatctattgaaaataaagaaatgtttcatgt

SEQ ID NO: 488197 - DNA, 120 bp, Artificial Sequence
  ENSG00000162620_50 (sequence is synthesized)
cagtgccaaaaggaattatgcacatcattcattggacaacaggatgaaaacttgtctctgattggacactagggatatcagctgtacacacaagataagtgtaaagttgaaaagagaaat

SEQ ID NO: 488198 - DNA, 120 bp, Artificial Sequence
  ENSG00000162620_51 (sequence is synthesized)
acacttagtaattcactcaagctagcatttattaacactttaaaacttgcattaaaatgttcatgatattatttccttcctcatataagaaagctaacattacaattcttaaattgaatg

SEQ ID NO: 488199 - DNA, 120 bp, Artificial Sequence
  ENSG00000162620_52 (sequence is synthesized)
aaacataccatcataaaaattgctttgcagagactgctaatgcaaaaacttttaagctgttcatccttttttaatgaaaaagataataagatcaataaaagcaccattctttaccactta

SEQ ID NO: 488200 - DNA, 120 bp, Artificial Sequence
  ENSG00000162620_53 (sequence is synthesized)
aatgacaaagatttgtgttttatgacttacctatacatcaacagcactgaattttctcaaaacttatttaggcagcatgacttggaaggaaaatattaactattgaatcacactgatgct

SEQ ID NO: 488201 - DNA, 120 bp, Artificial Sequence
  ENSG00000162620_54 (sequence is synthesized)
ctctggtctagttaagatagttttttagatactccatataagcctgggttttgctgacaaaattcacctacaaagcccagagagacttacagtcacttgcaggcatttctttatattaag

SEQ ID NO: 488202 - DNA, 120 bp, Artificial Sequence
  ENSG00000162620_55 (sequence is synthesized)
gcctttaaaaataaaatatacaagattctgacaacacttgccttaattgcttaagaacttaaaataagcttgttggtagaaatggtttgccaactagggcagttttgagtcaccttatcc

SEQ ID NO: 488203 - DNA, 120 bp, Artificial Sequence
  ENSG00000162620_56 (sequence is synthesized)
agtccccggaatattggagtcttgtaaataattaacatttgggcagtggctgaaatatttctgaccagagcagtaggcataaagttattaagcaagctatgctgaatacaatgtggagtg

SEQ ID NO: 488204 - DNA, 120 bp, Artificial Sequence
  ENSG00000162620_57 (sequence is synthesized)
aaacagactaagatttgtactgaggctgtagaattttcaggctgcctaccttgggtgagtgatagcagtttactgagactgagcctcaggagatatatatgtacatacataagcacgtgt

SEQ ID NO: 488205 - DNA, 120 bp, Artificial Sequence
  ENSG00000162620_58 (sequence is synthesized)
atttggcggagaagaaacataactatacttcatatgagacagtcattttaggcttcagtattgtaataaaaacttacatgaagtaacacttaagaaatattctgaaatcctaaaatgaat

SEQ ID NO: 488206 - DNA, 120 bp, Artificial Sequence
  ENSG00000162620_59 (sequence is synthesized)
atattgttccaagttgcagggggataaaacctcaattttagaaaatattattcaagtaattgttattgagtcaatttcataatttatcaatatgtgtttataaagtacatgcaagtagat

SEQ ID NO: 488207 - DNA, 120 bp, Artificial Sequence
  ENSG00000162620_60 (sequence is synthesized)
tgtaatatgccttactttagagatataattatatatatatagctactttgttaataggagacatttttctcatgaaaaaatataaatccctcctcagattcaaactcaaacttaaaacac

SEQ ID NO: 488208 - DNA, 120 bp, Artificial Sequence
  ENSG00000162620_61 (sequence is synthesized)
ataaattctaaattgctggattacttaaggtgtttaggtaaagtaagagcaaactaatcagtaataaaatattggcaagtccccgtttgtggcttttttctaaatctttcataaatatag

SEQ ID NO: 488209 - DNA, 120 bp, Artificial Sequence
  ENSG00000162620_62 (sequence is synthesized)
acattgttcaaatatacttagaaatatagagtcttgagctatgtattttattgttaagaaaaaagaatttccctcttgaaaattccattttattgcccatcattaaattttacatgaccc

SEQ ID NO: 488210 - DNA, 120 bp, Artificial Sequence
  ENSG00000162620_63 (sequence is synthesized)
tatgaacttttcagaattgcaaattacttaagcagtgtaaactcatattactcatatacgtatgtctctttcattaaaatgattagatttataaattgaaaatattatcgtaactaattg

SEQ ID NO: 488211 - DNA, 120 bp, Artificial Sequence
  ENSG00000162620_64 (sequence is synthesized)
gcctaaaacatgaggtttaataaaatgcagattttaatcaggagcttaagaatttagcctatgctttctactatgtttttctcactttcaatgcctttttttcttgttttcacatctaca

SEQ ID NO: 488212 - DNA, 120 bp, Artificial Sequence
  ENSG00000162620_65 (sequence is synthesized)
tagggaaataatcagtaaattatgaaatattttgaaaaagacataatttaaatatttactaataataactttgtgcctatgtttaatattatgccatggatatagctgccattcaataca

SEQ ID NO: 488213 - DNA, 120 bp, Artificial Sequence
  ENSG00000162620_66 (sequence is synthesized)
tagttgttgaataaactaatcaaatttattatccttttttgttgtttgtgacttgataatacaacagattgaagaatacaatcaaactggtgcggaaatatcaagataagtaaaccacaa

SEQ ID NO: 488214 - DNA, 120 bp, Artificial Sequence
  ENSG00000162620_67 (sequence is synthesized)
cctcagtcctcagagagagtaatttttactaggggttatccaaaatcatctgaagatatgttttcctgatctgacatagttcttcagaagtgaatatgaatatatattatcctgttgatt

SEQ ID NO: 488215 - DNA, 120 bp, Artificial Sequence
  ENSG00000162621_0 (sequence is synthesized)
gatgctggacagttaactcagtaggtctcagattcatcatccaccttttaatgtagagattcacaaactacaagctgtgagacctttgggtggatggctggtactctttgccatcatgtt

SEQ ID NO: 488216 - DNA, 120 bp, Artificial Sequence
  ENSG00000162621_1 (sequence is synthesized)
gcggttggtggcagcttgccctgagtcatgtgtggtgtgcaccaaagatgtaaccctctgtcaccagctaacctatatagtagcagcccctatgaccacgagggttttaatcatcaccga

SEQ ID NO: 488217 - DNA, 120 bp, Artificial Sequence
  ENSG00000162621_2 (sequence is synthesized)
tggatatctctcctctattgagagcacaaacctgtctctcttgtttaatcttgccctgctctccctaagcagaaatggtatcgaggatgttcaggaagatgccctgcatgggcttacgat

SEQ ID NO: 488218 - DNA, 120 bp, Artificial Sequence
  ENSG00000162621_3 (sequence is synthesized)
gttgcggaccttgttgctggagcacaaccaaatatccagctcttcgctcactgatcacaccttcagcaagcttcacagcctgcaggtactggtgctgagcaataatgctctccgcaccct

SEQ ID NO: 488219 - DNA, 120 bp, Artificial Sequence
  ENSG00000162621_4 (sequence is synthesized)
acgagggtcttggttccgaaacacaagcggcctgacccggctccagctggatgggaatcagattactaatctcacagacagttctttcggaggcacgaatctccacagtctcaggtatct

SEQ ID NO: 488220 - DNA, 120 bp, Artificial Sequence
  ENSG00000162621_5 (sequence is synthesized)
ggatttatccaacaattttatttcctacattgggaaagatgccttccggcccctgcctcaactacaggaagtggacctttcccgaaataggttagcccacatgccggatgtgtttactcc

SEQ ID NO: 488221 - DNA, 120 bp, Artificial Sequence
  ENSG00000162621_6 (sequence is synthesized)
actgaagcagttaatccttctgagcttagataagaaccagtggagctgcacttgtgatctccatccccttgctcggtttttaagaaactacattaagtcttctgctcacacgctcaggaa

SEQ ID NO: 488222 - DNA, 120 bp, Artificial Sequence
  ENSG00000162621_7 (sequence is synthesized)
tgccaaggacctaaattgccagccatctaccgcagctgtggcagctgcacagagtgtgctgaggctgtctgagaccaactgtgattccaaagctcccaacttcactctggttctaaagga

SEQ ID NO: 488223 - DNA, 120 bp, Artificial Sequence
  ENSG00000162621_8 (sequence is synthesized)
cagaagtcccctcctcccaggaccagatgtggccctgctgactgtccttggcttcgcaggagctgttggtctcacttgcctaggtttagttgtatttaactggaaactccaccaaggcaa

SEQ ID NO: 488224 - DNA, 120 bp, Artificial Sequence
  ENSG00000162621_9 (sequence is synthesized)
agcaaatgaacacacatcagaaaacctttgttgcagaaccttcgatgaacccctgtgtgctcatgaggcaagaaattaccacactaagggatactgcaactgccacttaactcaggaaaa

SEQ ID NO: 488225 - DNA, 120 bp, Artificial Sequence
  ENSG00000162621_10 (sequence is synthesized)
cgagataaaggtcatgtccactgtggggtccagaaaagaaatgccacttttacaggaaaatagccatcaagcaacatcggcctctgagtctgcaacccttgacggatcatttagaaacct

SEQ ID NO: 488226 - DNA, 120 bp, Artificial Sequence
  ENSG00000162621_11 (sequence is synthesized)
gaaaaagaaagaccgtggggtaggcagcactttattttgccaggatggtagattgctgcattcggaatgttcagagcctcctggaaatatgagagcttttaatgaagcaggcttacttac

SEQ ID NO: 488227 - DNA, 120 bp, Artificial Sequence
  ENSG00000162621_12 (sequence is synthesized)
aacatataatccaaggaaagttcaaaagctatggaatcttgagcctggagaagtccagcctcaaactctgcaacaccatataataagaacagaagatatcagcagtgacatatttagaag

SEQ ID NO: 488228 - DNA, 120 bp, Artificial Sequence
  ENSG00000162621_13 (sequence is synthesized)
aagatatgcaacacccgcttcagccttggcaggagaaagtcttgagaagcgtttaacaaatgaatcatggcagcctccaatagaaaaagaagacaatggcttacaccctcataggcaaag

SEQ ID NO: 488229 - DNA, 120 bp, Artificial Sequence
  ENSG00000162621_14 (sequence is synthesized)
acattttattacaagctcatcatccaagccttgtgagcctgaggaacactatgtacaaaagatcgtacaaaaaaatagatcaaaatatgatgatccttgtggactgttaaaacagagcaa

SEQ ID NO: 488230 - DNA, 120 bp, Artificial Sequence
  ENSG00000162621_15 (sequence is synthesized)
acctaggtattttcagccaaacaattctcttatctgtaaatatgtgccctgtgagcaatttgaagattacatgaaagaaaagaagccaaatcgtagacaacactcaaagcctgagaaaga

SEQ ID NO: 488231 - DNA, 120 bp, Artificial Sequence
  ENSG00000162621_16 (sequence is synthesized)
gcaatagaaaaatttcttatgagtgaggacaacatagatttatcaggattatcaacaaaaaccaagaaagcatattccccaaagagggttatcttccatgatcctgatttagtagaaata

SEQ ID NO: 488232 - DNA, 120 bp, Artificial Sequence
  ENSG00000162621_17 (sequence is synthesized)
aataggtcgatgatgtcacccaaaatatcaaccccttggaaacgacagaaaaatcaaagtaaccaactgactaagttggatgttaaaaaatttagcaacactggggagagaaacaaagga

SEQ ID NO: 488233 - DNA, 120 bp, Artificial Sequence
  ENSG00000162621_18 (sequence is synthesized)
gaaaaatggtttactaattcatgggttctgaaaaggaagagaacccctcagtctgacctcaaagggaaaattaaaggacaaaacttaaaattaaatttacatccttttagaaaagtcaga

SEQ ID NO: 488234 - DNA, 120 bp, Artificial Sequence
  ENSG00000162621_19 (sequence is synthesized)
gtccatccagaaaaatccttgtcaagtctcccaaagcaatgcaagcaggtattgttgcctcctaagaaattatccaaaacttctgagacagaagccaaaataaatactgtgtgttctgca

SEQ ID NO: 488235 - DNA, 120 bp, Artificial Sequence
  ENSG00000162621_20 (sequence is synthesized)
gattttcttcaacagtcagagagtagcaactatgttagactcacttcaaagaggctgcctctgaaacatgactcaaagcagaccccatattatcaacgaaacactaaacgtgcccccctg

SEQ ID NO: 488236 - DNA, 120 bp, Artificial Sequence
  ENSG00000162621_21 (sequence is synthesized)
ctcagtgctaacaacttgcgtgtagtcaaccagagctctatagaaagcagctgttactcagctggccacattcctgatggaaacacatcaaaattgccccaacctacacccactgatgct

SEQ ID NO: 488237 - DNA, 120 bp, Artificial Sequence
  ENSG00000162621_22 (sequence is synthesized)
gagcacaggcactcacattctcaattctcaactgagcaaatggaagatgcaactcagcttgaatcaaaagtgcttagttatttagcaactacttgggaaaatacaggaagtgatgtttta

SEQ ID NO: 488238 - DNA, 120 bp, Artificial Sequence
  ENSG00000162621_23 (sequence is synthesized)
ccattccaacattccaggagggctactgaccaagggacaacggagtccactgagcacatgggacagaatgtatcaaagaccagtgagttaaatcagttttctttgtccccgaggaatcaa

SEQ ID NO: 488239 - DNA, 120 bp, Artificial Sequence
  ENSG00000162621_24 (sequence is synthesized)
acacaacttttagatgctcacaagactgacagctacaacaaggaatacactttagaccaaaatgaagccttacaacacagagagcaaaattcaagtcatgcacagcttgaaaataaagaa

SEQ ID NO: 488240 - DNA, 120 bp, Artificial Sequence
  ENSG00000162621_25 (sequence is synthesized)
aaaacattaatgacaaaaccccaaatatcacatcaaattgtggaaaattgtattatggataaggaagaaaatgatgtagaaaaaaaactttcaaaaacagaaacttatgattcctctctc

SEQ ID NO: 488241 - DNA, 120 bp, Artificial Sequence
  ENSG00000162621_26 (sequence is synthesized)
attccccaaacacaatccaagaacaacctatcatttatgaagacaaattcaattccataccaaaatagaatagaacttcccaaggatatcagtacttctcctgttagtagtcaagccgtt

SEQ ID NO: 488242 - DNA, 120 bp, Artificial Sequence
  ENSG00000162621_27 (sequence is synthesized)
tggcacctaaccaatagtagcgaaaaaggaattgacagcacaaatgcattgcccagaaatgacggcactgaagcactagagataaaaatagtagggaaagaagagaaaaatatgcttgat

SEQ ID NO: 488243 - DNA, 120 bp, Artificial Sequence
  ENSG00000162621_28 (sequence is synthesized)
gaaagcaagacagattctagtatgttaactcagatctcacaaatgaccttaaaaggcatcacaaaagaaaggcagcaaacttgggaaaatggaacaagtgaaaaatatatattacatgat

SEQ ID NO: 488244 - DNA, 120 bp, Artificial Sequence
  ENSG00000162621_29 (sequence is synthesized)
gcaagctctgccgaggagaccattacagctaaagatttaagtatcacaagttcccatgaaacccaaaatagaatactttgcagtgaagtagatcctgaagttaacagtaatgtacataat

SEQ ID NO: 488245 - DNA, 120 bp, Artificial Sequence
  ENSG00000162621_30 (sequence is synthesized)
tttagagaagttcaaaatattcaaccagataaagatagtgcacataaagaaggcgcaatgacagtggagacacatgaagcgctttccttcttaccagggttaaaagacagttttgaggca

SEQ ID NO: 488246 - DNA, 120 bp, Artificial Sequence
  ENSG00000162621_31 (sequence is synthesized)
gaaaatgaggtgtttttagttcctagcagaataaatgaagctgaaaactctgctccaaaacctgtactgtatccaccatctgctgaatatgctactacatcacctttagaaacagaataa

SEQ ID NO: 488247 - DNA, 120 bp, Artificial Sequence
  ENSG00000162623_0 (sequence is synthesized)
cttttcggccaccgctcgcttcaatatggctgcccccagggagagacgaggctaccatgaaggagccgagcgcagaccctgagtccgtcacccatggatcgcagcgcggagttcaggaaa

SEQ ID NO: 488248 - DNA, 120 bp, Artificial Sequence
  ENSG00000162623_1 (sequence is synthesized)
tggaaggcgcaatgtttgagcaaagcggacctcagccggaagggcagtgttgacgaggatgtggtagagcttgtgcagtttctgaacatgcgagatcagtttttcaccaccagctcctgc

SEQ ID NO: 488249 - DNA, 120 bp, Artificial Sequence
  ENSG00000162623_2 (sequence is synthesized)
gctggccgcatcctactccttgaccggggtataaatggttttgaggttcagaaacaaaactgttgctggctactggttacacacaaactttgtgtaaaagatgatgtgattgtagctctg

SEQ ID NO: 488250 - DNA, 120 bp, Artificial Sequence
  ENSG00000162623_3 (sequence is synthesized)
aagaaagcaaatggtgatgccactttgaaatttgaaccatttgttcttcatgtgcagtgtcgacaattgcaggatgcacagattctgcattccatggcaatagattctggtttcaggaac

SEQ ID NO: 488251 - DNA, 120 bp, Artificial Sequence
  ENSG00000162623_4 (sequence is synthesized)
tctggcataacggtgggaaagagaggaaaaactatgttggctgtccggagtacacatggcttagaagttccattaagccataagggaaaactgatggtgacagaggaatatattgacttc

SEQ ID NO: 488252 - DNA, 120 bp, Artificial Sequence
  ENSG00000162623_5 (sequence is synthesized)
ctgttaaatgtggcaaatcaaaaaatggaggaaaacaagaaaagaattgagaggttttacaactgcctacagcatgctttggaaagggaaacgatgactaacttacatcccaagatcaaa

SEQ ID NO: 488253 - DNA, 120 bp, Artificial Sequence
  ENSG00000162623_6 (sequence is synthesized)
gagaaaaataactcatcatatattcataagaaaaaaagaaacccagaaaaaacacgtgcccagtgtattactaaagaaagtgatgaagaacttgaaaatgatgatgatgatgatctagga

SEQ ID NO: 488254 - DNA, 120 bp, Artificial Sequence
  ENSG00000162623_7 (sequence is synthesized)
atcaatgttaccatcttccctgaagattactaagctttggttctgatgtgtcttggccgtaatgtttctagtaggttttataaagctgctcttcataagagtattttagtttgttgagtg

SEQ ID NO: 488255 - DNA, 120 bp, Artificial Sequence
  ENSG00000162623_8 (sequence is synthesized)
tatcagccattcataagccagtaatgacaagtgcagagcttcaaactataactttgttgcccagaggatgtgcagttgtcatctaagctctcagcagtacccggcttatcctacgacttc

SEQ ID NO: 488256 - DNA, 120 bp, Artificial Sequence
  ENSG00000162623_9 (sequence is synthesized)
acctgaaatgctatagttatccctacttttttaccagtttctcccagaagcacctgcttaataaatcaaagatgtttgaatggtgtcttattctgaaataacctgacctaagacaggtat

SEQ ID NO: 488257 - DNA, 120 bp, Artificial Sequence
  ENSG00000162623_10 (sequence is synthesized)
ttagattattttggatacattttgaaaagggatagcataaatattttaagtaaaaagacctttattttaaataatagtggatattttaatgctggaaattagcattatagttgatatgcc

SEQ ID NO: 488258 - DNA, 120 bp, Artificial Sequence
  ENSG00000162623_11 (sequence is synthesized)
agaaattatatctttggttgtgatttaaacttatgctataaactaaattaatgatgtaaatacatagttttaaacattcttttagggacatgtaacttttaagtatcacttcaataatac

SEQ ID NO: 488259 - DNA, 120 bp, Artificial Sequence
  ENSG00000162623_12 (sequence is synthesized)
gtattattataggaacaaagatttgggaataattgattacaggtgaggaagtactggaattccagttcaaggagataccatttcatttaggactaaaaggacaagatacaagttcacatg

SEQ ID NO: 488260 - DNA, 120 bp, Artificial Sequence
  ENSG00000162623_13 (sequence is synthesized)
atgggaaaaatcagaaaacctctcgcagacaaagggtatataatggatatgaggcatcaaaaagcatggtatagtcagtgatggggaatagtccagaaaggctgaaacacagcatgtgat

SEQ ID NO: 488261 - DNA, 120 bp, Artificial Sequence
  ENSG00000162623_14 (sequence is synthesized)
tggctgcatatcagaattacctaggtcaggacgaggcatggagatgctactttaataggccctgccgcagatcttccaaaccagaatcttaatcctggagtctaggaatctttatttttc

SEQ ID NO: 488262 - DNA, 120 bp, Artificial Sequence
  ENSG00000162623_15 (sequence is synthesized)
acacaactcatccaagtggttctgataaaatcagtccagcacttttagaacccactgataacagacttattcctggagacagcatttgaggaggaattgaagatttttctaatgaaaaga

SEQ ID NO: 488263 - DNA, 120 bp, Artificial Sequence
  ENSG00000162623_16 (sequence is synthesized)
aaaagggtcacatgaacagatgttgcagtgtacctgtgccagggatttcatgtgtacactttataggagaataagcaagagcttaggtaagttatagtccttaccattgggtctaaggca

SEQ ID NO: 488264 - DNA, 120 bp, Artificial Sequence
  ENSG00000162623_17 (sequence is synthesized)
gtttccaggaaagcatggcaactcgttcagctatgtaagttgaactctgtaccacttgggagggaacattcccctagatgacaatgtcagtggcactcgaagttgtgcagtgcacattct

SEQ ID NO: 488265 - DNA, 120 bp, Artificial Sequence
  ENSG00000162623_18 (sequence is synthesized)
tatctaccaacatatacagcagtccttctgggaaggaaatttgggcaggaaagggaactcacagtgtcggaatgcctggagcatttcttctagtctggtggacagaatatgaaagtatct

SEQ ID NO: 488266 - DNA, 120 bp, Artificial Sequence
  ENSG00000162623_19 (sequence is synthesized)
gcctggcagtgcagtaaatgaaaagagaagataaatgaataaaaaaaaaagttataaataacagtaggaaagagagagtgcaggtggaacgagcctatcctgtggtgaaatgacaacaca

SEQ ID NO: 488267 - DNA, 120 bp, Artificial Sequence
  ENSG00000162623_20 (sequence is synthesized)
ttctgcagttttaaaatctaagaggctcattgacttttcttcattcatttaaattgatctccaagaaaactatgtattttaaagattccataaactgaatatatgaatgagaattaagaa

SEQ ID NO: 488268 - DNA, 120 bp, Artificial Sequence
  ENSG00000162623_21 (sequence is synthesized)
gagaggggctgcttcctaatctgtttatataaggtatagtatagtataatctgtttatataaggttagtagagaggagacaccaggtgctggccataaacctaagaagacattgaatccc

SEQ ID NO: 488269 - DNA, 120 bp, Artificial Sequence
  ENSG00000162623_22 (sequence is synthesized)
attcactccttaacattccttaatatacattcatgagctacataacattttaatcatcaatgatggaccatataccatatacgatatggtggccccataagattataatggacctgaaaa

SEQ ID NO: 488270 - DNA, 120 bp, Artificial Sequence
  ENSG00000162623_23 (sequence is synthesized)
attcctattgctagtgatgtggtcattgtaaagctgtagcacaacacattacccacgtttgtggtgacagtcatataaaagtatggtacatataattatgtacagtgcatacataatact

SEQ ID NO: 488271 - DNA, 120 bp, Artificial Sequence
  ENSG00000162623_24 (sequence is synthesized)
tgataatatgttactggtttgtgtctttgctatgctttttatcattattttagggtatactacttaaaatgttaactgtaaaacagcttctgacaggtccttcaggaagtactccagaag

SEQ ID NO: 488272 - DNA, 120 bp, Artificial Sequence
  ENSG00000162623_25 (sequence is synthesized)
aaggcattgttatcatagaaggtgacagcttcatgtgtgttattgcccctgaagaccttccagtggtacaagatgtggaggaggaagacagtgatactgaggattctgaccctgtgtagg

SEQ ID NO: 488273 - DNA, 120 bp, Artificial Sequence
  ENSG00000162623_26 (sequence is synthesized)
cttaggctaatgtgtgtgtttatatcttagtttttcacaaaaaggtttttccaatgttaaaaaaaatatataaaaaagcttatagaataaggatataaagaaatattttgtacagctgta

SEQ ID NO: 488274 - DNA, 120 bp, Artificial Sequence
  ENSG00000162623_27 (sequence is synthesized)
caataagctaagcattattaccaaagagtcaaaaagttttaagaaattaaagtttataaaccaaatgttcattgtgagccaaggttaatttattgaagaaataaaacatttttaatgaaa

SEQ ID NO: 488275 - DNA, 120 bp, Artificial Sequence
  ENSG00000162623_28 (sequence is synthesized)
tgaaattgcactcatcctttaaaatcccaactcaattgctgcctttcccataaagctgagttcttagactcagttgcttctcttcaacattttcttgccagtgtgtgtgtatgtgtgtgt

SEQ ID NO: 488276 - DNA, 120 bp, Artificial Sequence
  ENSG00000162623_29 (sequence is synthesized)
atgtacatgcacatgcatgcatgtgtgtttcttctgtcataagtcttaaagccagaggtcatgttatagtcaccctgtatcttcatgccttatagggagcctagaacattgcagatgctc

SEQ ID NO: 488277 - DNA, 120 bp, Artificial Sequence
  ENSG00000162623_30 (sequence is synthesized)
cttgaccccaccctaggtcttctggcactgcccagccctcaagatccctaacctcagtctttaccattgtctcccgactagtcttcttactttaggtcttctccttgagtccctccaacc

SEQ ID NO: 488278 - DNA, 120 bp, Artificial Sequence
  ENSG00000162623_31 (sequence is synthesized)
aaaaaccttaatagcttttagggttatatatgtttctgtagtttgtggagccaaacagatgatctggttacccacagtatcaaaatgtaacaagttttattttcttacagcattccatgg

SEQ ID NO: 488279 - DNA, 120 bp, Artificial Sequence
  ENSG00000162623_32 (sequence is synthesized)
tggcaaatcaaaaaatggaggaaaacaagaaaagaattgagaggctgtgtggaacatgagaaggataccagtcattgacatcacctaagatggtgacaagacctagaaagaaagatcaag

SEQ ID NO: 488280 - DNA, 120 bp, Artificial Sequence
  ENSG00000162623_33 (sequence is synthesized)
tcaagcatagaagttttcatcaatgttttacaactgcctacagcatgctttggaaagggaaacgatgactaacttacatcccaagatcaaagagaaaaataactcatcatatattcataa

SEQ ID NO: 488281 - DNA, 120 bp, Artificial Sequence
  ENSG00000162623_34 (sequence is synthesized)
atttttttttcatttttaaatactgtgctagccaaatagctagagtacaactcaggtgctgctagtattatcccttatactaatccctttttttcttgcaaaatcatgaccatatttcag

SEQ ID NO: 488282 - DNA, 120 bp, Artificial Sequence
  ENSG00000162623_35 (sequence is synthesized)
aagatgtttatcaagtagttttacctttcacataattttctacctcaagttatttgggctcattcttattctgggttaacattacccaaaaacataccgaattgtttttattaatactta

SEQ ID NO: 488283 - DNA, 120 bp, Artificial Sequence
  ENSG00000162624_0 (sequence is synthesized)
ctcacttaacctgagacatggagactgtaatttgggagatgaagcctcgagcctaaggcgctctcaggtccattgtcaggggctcatgtcagaggagtgcgggcggactacagccctggc

SEQ ID NO: 488284 - DNA, 120 bp, Artificial Sequence
  ENSG00000162624_1 (sequence is synthesized)
ggccgggaggactcgcaaaggcgccggggaagagggactggtgagccccgagggagcgggggacgaggactcgtgctcctcctcggccccgctgtccccgtcgtcctcgccccggtccat

SEQ ID NO: 488285 - DNA, 120 bp, Artificial Sequence
  ENSG00000162624_2 (sequence is synthesized)
ggcctcgggctccggctgccctcctggcaagtgtgtgtgcaacagttgcggcctggagatcgtggacaaataccttctcaaggtgaatgacctatgctggcatgtccggtgtctctcctg

SEQ ID NO: 488286 - DNA, 120 bp, Artificial Sequence
  ENSG00000162624_3 (sequence is synthesized)
cagtgtttgcagaacctccctaggaaggcacaccagctgttatattaaagacaaagacattttctgcaaacttgattatttcagaaggtatggaactcgctgctctcgatgtgggagaca

SEQ ID NO: 488287 - DNA, 120 bp, Artificial Sequence
  ENSG00000162624_4 (sequence is synthesized)
catccattctactgactgggtccggagagccaaggggaatgtctatcacttggcatgctttgcctgcttttcctgcaaaaggcaactttccacaggagaggagtttgctttggtggaaga

SEQ ID NO: 488288 - DNA, 120 bp, Artificial Sequence
  ENSG00000162624_5 (sequence is synthesized)
gaaagtcctctgcagagtacattatgactgcatgctggataatttaaaaagagaagtagaaaatgggaatgggattagtgtggaaggtgccctcctcacagagcaagatgttaaccatcc

SEQ ID NO: 488289 - DNA, 120 bp, Artificial Sequence
  ENSG00000162624_6 (sequence is synthesized)
aaaaccagcaaaaagagctcggaccagctttacagcagatcagcttcaggttatgcaagcacaatttgctcaggacaacaacccagatgcacagacactccagaaattggcagaaaggac

SEQ ID NO: 488290 - DNA, 120 bp, Artificial Sequence
  ENSG00000162624_7 (sequence is synthesized)
ctccaccccagtcacagcagtcccaccctccaggctgtctccacccatgttagaagaaatggcttattctgcctacgtgccccaagatggaacgatgttaactgcgctgcatagttatat

SEQ ID NO: 488291 - DNA, 120 bp, Artificial Sequence
  ENSG00000162624_8 (sequence is synthesized)
ggatgctcattcaccaacaactcttggactccagcccttgttaccccattcaatgacacaactgccaataagtcatacctaattcttttttcagggatagacttgattaaggatataaat

SEQ ID NO: 488292 - DNA, 120 bp, Artificial Sequence
  ENSG00000162624_9 (sequence is synthesized)
ttgtcatttattatgtataaaataccattgaaaagatattactgttaattttttatttaacacctaaagcatttccaacatcactttgctgcccaggtatgtatctatagttggcctgca

SEQ ID NO: 488293 - DNA, 120 bp, Artificial Sequence
  ENSG00000162624_10 (sequence is synthesized)
agacacttttattaattcttcattttttgtaaaacttatgtttacaagaagaaaacaaatcaaaacattttttgtattgtctggaaatagttcactctagtgtgtatctgttaatttatt

SEQ ID NO: 488294 - DNA, 120 bp, Artificial Sequence
  ENSG00000162624_11 (sequence is synthesized)
tgtcatcaaaagagcactttgcctaaaagaaaggactgacaagtgtgcaaaatgtttacaatcttttgtgaaattgtagtttatcattagtttgtatctgtaagttattgtaataaatat

SEQ ID NO: 488295 - DNA, 120 bp, Artificial Sequence
  ENSG00000162624_12 (sequence is synthesized)
tacctgtattttttgttatatacaactttatactttgaagcttgtatctgtgaatttgcaactgaaatttattttgccaatgttttctgaatgaactgaataaagcttctgttgtagcat

SEQ ID NO: 488296 - DNA, 120 bp, Artificial Sequence
  ENSG00000162624_13 (sequence is synthesized)
gccatgcaaacacattattgtgtttgtggttgatgaattatggctgtaaataacactatagtttaataagcccaccattctgagtttattaaacattttccattcttgtgaaaatttcaa

SEQ ID NO: 488297 - DNA, 120 bp, Artificial Sequence
  ENSG00000162624_14 (sequence is synthesized)
tttcctcaacttttttctttgtgtttgtcttgaaaaagttttaccatactgtgcctgggtgtgcttcttgaatatgtagtttgatgtctttcattatggaaaattctcagcttttgcctc

SEQ ID NO: 488298 - DNA, 120 bp, Artificial Sequence
  ENSG00000162624_15 (sequence is synthesized)
ctcaaatattgtttttgctcctatgaaaaaattttcttgttttcttctgaactatttttctagttcactaatgctctctatatctaatatcctgtaaaaaaatcatccaccgacttctta

SEQ ID NO: 488299 - DNA, 120 bp, Artificial Sequence
  ENSG00000162624_16 (sequence is synthesized)
atttattatgtttttcagttttaagatttccatttatatgctgaaatcatccattttgtcactttatccttatttaaattgttatactaaagttcaggtgtgataactccaatatctgga

SEQ ID NO: 488300 - DNA, 120 bp, Artificial Sequence
  ENSG00000162624_17 (sequence is synthesized)
tctttggtgggtctattctgttttcttaattttcctctttattttctttcaagtcatgtcttgttatttgtcttcttatttgctattgcatttcagatgttgggtatgagtaactaaaaa

SEQ ID NO: 488301 - DNA, 120 bp, Artificial Sequence
  ENSG00000162624_18 (sequence is synthesized)
taatttgaggctgtggatgatatctttcactagagaagattagttttaccccccaggtagtcagaatagggtgaaatcaacttaatccaatcaggcacaaatccttaagagggctggtat

SEQ ID NO: 488302 - DNA, 120 bp, Artificial Sequence
  ENSG00000162624_19 (sequence is synthesized)
atttttgttttactactccttggagttagccctttggaatcacaaatgaatccctgttttgttttgttttctgttgttgtttttaactagggcttctcctcttcagcgggccctgctctt

SEQ ID NO: 488303 - DNA, 120 bp, Artificial Sequence
  ENSG00000162624_20 (sequence is synthesized)
taatttttgtttctcaccactctgccaaagtctaacttctgaatgctctgctaaacttcttggcctatcagacatttgttttgttttaaattgtcactatccttgcgggaggaaaagcat

SEQ ID NO: 488304 - DNA, 120 bp, Artificial Sequence
  ENSG00000162624_21 (sequence is synthesized)
cctcattttctttccctccactctgggactttgtaagtcctcactacttaagtgtctttcagatgccttcaaacagattttaaaaattttgtccagatttcctagttggtctcagagaaa

SEQ ID NO: 488305 - DNA, 120 bp, Artificial Sequence
  ENSG00000162624_22 (sequence is synthesized)
ggtttggtttgaagcaacatagcccttgctgaaagcagaaacttcattttaagttttggttagataaaaaatcagagcctgtactgttgttgccatttacttatactagcattaaaattg

SEQ ID NO: 488306 - DNA, 120 bp, Artificial Sequence
  ENSG00000162624_23 (sequence is synthesized)
tgaaagaaacttggggaagatcatcctatacaaacaccttcatgagaaagctagcagcagcatctctgaagaggaacccatgtctttctagcttcagggtgaagtgcagtgaatggggta

SEQ ID NO: 488307 - DNA, 120 bp, Artificial Sequence
  ENSG00000162624_24 (sequence is synthesized)
tggatggaggacattaaaatggcaaaatcttgtggccccaaataaagatttgggggtaaaactgttcctggactctcactatgctgaataggttaatgcttctgctgaggtcagtggaat

SEQ ID NO: 488308 - DNA, 120 bp, Artificial Sequence
  ENSG00000162624_25 (sequence is synthesized)
gagtgtagcttggtgccctcagctataatgagtgatgaaaacaatgccttggattgtttttgtttgtttataaatcagttttatgcaccctacaaaactgatccacaaatttctttctat

SEQ ID NO: 488309 - DNA, 120 bp, Artificial Sequence
  ENSG00000162624_26 (sequence is synthesized)
agaggcaagaggctagcggctggaccacttgtgctggagtggtaaagaactatcatgaatccatttactgaaagtgtccatttctgaactcaccctaaagaggacaaacaccgcaaagta

SEQ ID NO: 488310 - DNA, 120 bp, Artificial Sequence
  ENSG00000162624_27 (sequence is synthesized)
gttaaaagtcaggcattcgcgtcggacgtctgggtttgaattctgccctggcttgactggaaacgcttcccctatttcttccgtagcggaccgggagagcttactggcgctctgcgaacc

SEQ ID NO: 488311 - DNA, 120 bp, Artificial Sequence
  ENSG00000162624_28 (sequence is synthesized)
ggctggaaagaaacaccgagtcactcgtacagactcttggtcgcagaacttggctttccgctattggtcctccagaaccgcttgaaacaactggccccagctggcgcatcagaccgcagt

SEQ ID NO: 488312 - DNA, 120 bp, Artificial Sequence
  ENSG00000162624_29 (sequence is synthesized)
gaggaatgccgcggggcgggtggcgaaggcagggtctgcccgccagtggattcccgggtgtcccgcgtggagcaggcttgcccagctgggaagcccatcaaacctcagtcttggcccaca

SEQ ID NO: 488313 - DNA, 120 bp, Artificial Sequence
  ENSG00000162624_30 (sequence is synthesized)
gtgggagagagaccagtgggtcccagacggaggccctcgcccgcttttggcgacctccactggcgtgaataaaagcacccctctcttaccctcagaaactgtgggtagcaaggtataaaa

SEQ ID NO: 488314 - DNA, 120 bp, Artificial Sequence
  ENSG00000162624_31 (sequence is synthesized)
cggagtctgggaccggtaagtcccaaggtgagcccgtatacagctctgccatctctgaggggttatgcagattctgagcaggtgtcaggggctcatgtcagaggagtgcgggcggactac

SEQ ID NO: 488315 - DNA, 80 bp, Artificial Sequence
  ENSG00000162627_0 (sequence is synthesized)
gcactctcgggatggagggcgagcgccgggcatcgcaggcgccctcctcgggcctcccggccgggggcgccaacggggag

SEQ ID NO: 488316 - DNA, 120 bp, Artificial Sequence
  ENSG00000162627_1 (sequence is synthesized)
cttccgccctgctgcaggcggaggtgctggatctggacgaggacgaggacgacctggaggtgttcagcaaggatgcctcattgatggacatgaactccttcagccctatgatgccaacat

SEQ ID NO: 488317 - DNA, 120 bp, Artificial Sequence
  ENSG00000162627_2 (sequence is synthesized)
cccctttatcaatgataaaccaaatcaagtttgaggatgaaccagatttaaaggatctcttcatcacagttgatgaacctgaaagtcatgttactacaatagaaactttcattacgtata

SEQ ID NO: 488318 - DNA, 120 bp, Artificial Sequence
  ENSG00000162627_3 (sequence is synthesized)
ggattattactaagacatctcgtggggaatttgactccagtgaatttgaagttaggagacgatatcaagatttcctttggttgaagggaaaactggaagaagcacaccccactctgatta

SEQ ID NO: 488319 - DNA, 120 bp, Artificial Sequence
  ENSG00000162627_4 (sequence is synthesized)
ttccaccattgccagaaaagtttatagtaaaaggaatggtggaacgctttaacgatgacttcattgagacacgcaggaaggctttacataaatttttgaaccgaattgctgatcatccaa

SEQ ID NO: 488320 - DNA, 120 bp, Artificial Sequence
  ENSG00000162627_5 (sequence is synthesized)
ctttaacatttaatgaagacttcaaaatttttctcactgcacaagcttgggaactctcttctcacaagaagcaaggtcctggcttgctaagcaggatggggcaaaccgtcagagctgttg

SEQ ID NO: 488321 - DNA, 120 bp, Artificial Sequence
  ENSG00000162627_6 (sequence is synthesized)
cgtcctcaatgagaggagttaaaaaccgcccagaggagttcatggaaatgaataactttattgaactatttagccagaaaataaatttgatagataaaatatctcagagaatttataagg

SEQ ID NO: 488322 - DNA, 120 bp, Artificial Sequence
  ENSG00000162627_7 (sequence is synthesized)
tcagcgtcagaagaggatctggttgatactctaaaggatgttgccagctgcattgacagatgctgtaaggccactgaaaagcggatgtctggactctcagaggccctgcttcctgttgta

SEQ ID NO: 488323 - DNA, 120 bp, Artificial Sequence
  ENSG00000162627_8 (sequence is synthesized)
catgagtacgtgctttatagtgaaatgttaatgggtgttatgaaaagaagagaccaaatacaagcagaactggattccaaagttgaagttttgacctataaaaaggcagatactgatctg

SEQ ID NO: 488324 - DNA, 120 bp, Artificial Sequence
  ENSG00000162627_9 (sequence is synthesized)
cttccagaggagattggaaaacttgaagataaagtggaatgtgctaataatgccctgaaagcagattgggagagatggaaacaaaatatgcaaaatgatatcaagttagcatttacagat

SEQ ID NO: 488325 - DNA, 120 bp, Artificial Sequence
  ENSG00000162627_10 (sequence is synthesized)
atggctgaggagaatatccattattatgaacagtgccttgctacgtgggagtcattccttacatcacagaccaaccttcacttggaagaagcctctgaagataaaccttaatcccattga

SEQ ID NO: 488326 - DNA, 120 bp, Artificial Sequence
  ENSG00000162627_11 (sequence is synthesized)
ggacttctgtttgatctttgggagacagcatttattaaccaaagttattctttctggatctgccgtgtccttataaagtggatgaaaaatgttttgtacccatctggaaaaccaacaact

SEQ ID NO: 488327 - DNA, 120 bp, Artificial Sequence
  ENSG00000162627_12 (sequence is synthesized)
tgaaatctcaggtattccaggtcactgacatgaatttgaagatatatctatctgtatggatatatatctatatgtatatagatatataaatacagagagatatctggcttggttttaatt

SEQ ID NO: 488328 - DNA, 120 bp, Artificial Sequence
  ENSG00000162627_13 (sequence is synthesized)
atgttcttaaatttgtgtgccaataattgcatatagattttttttcttaaatatttgactgtggaacatgccattttaaatatgttgtaaggactgttttaataaaaagtttagtatgaa

SEQ ID NO: 488329 - DNA, 120 bp, Artificial Sequence
  ENSG00000162627_14 (sequence is synthesized)
aggtgctggatctggacgaggacgaggacgacctggaggtgttcagcaagggaggttgaatgtcactccagtttctcaagttgctgctgagagaagacctgagttcagatcacaacgctg

SEQ ID NO: 488330 - DNA, 120 bp, Artificial Sequence
  ENSG00000162627_15 (sequence is synthesized)
atcttcctcgcggcagctcccgaacctgggaggctggtggctcaaaaccgctcccgccagctgcttttcgggcgaggccagccctgaactctgggagagcagccaagtttagagaaatta

SEQ ID NO: 488331 - DNA, 120 bp, Artificial Sequence
  ENSG00000162630_0 (sequence is synthesized)
acatttaaactgctgcctgcctgtgcagcagctgaggaaccgtggatttcatattatagactaaaaccccattaaaactgctcaaaatccttcctgcagctgccaggcaacaacgaaaga

SEQ ID NO: 488332 - DNA, 120 bp, Artificial Sequence
  ENSG00000162630_1 (sequence is synthesized)
agagaggtaaatcctattcttttccaatacaactgaagcactacattttagctctggctgctttacattgcagctcagtgttattagtagaaatatggatactgagacgagaacacagca

SEQ ID NO: 488333 - DNA, 120 bp, Artificial Sequence
  ENSG00000162630_2 (sequence is synthesized)
ctgcattgtccagccaggaaaatagcagatgtaaaaagcttcaatgcatcaactgtcgggaagagtcaacagtgctacaagcagaacgggcaactacagctcttttgtttaacgaaagag

SEQ ID NO: 488334 - DNA, 120 bp, Artificial Sequence
  ENSG00000162630_3 (sequence is synthesized)
agaaaatgaaagaaagggaaaatttcagaagactaggacccatatgaacaaggagggtaactcgaagacaagcagacagatggacactttggatactgtgaaaagcaatcgcaggaggca

SEQ ID NO: 488335 - DNA, 120 bp, Artificial Sequence
  ENSG00000162630_4 (sequence is synthesized)
gactgttgggggatgtgcgcatgttcgatagcatcttttttgctgaagtgatggcgtgccaaaagtattttcagtgggcataatcctcttcacataaatggcctgaccaaggaagaatga

SEQ ID NO: 488336 - DNA, 120 bp, Artificial Sequence
  ENSG00000162630_5 (sequence is synthesized)
ctacaagagagacaatgtgactgaattagaaaatgattgccaaagaatagtattaaggagaagaaaacatttttggtcaccaatctctcatataccactactggatatttacaacatgct

SEQ ID NO: 488337 - DNA, 120 bp, Artificial Sequence
  ENSG00000162630_6 (sequence is synthesized)
tcagtggaggagaagacactgctgctttgcaaagatgacctggaatgccaaaaggtctctgttccgcactcatcttattggagtactttctctagtgtttctttttgctatgtttttgtt

SEQ ID NO: 488338 - DNA, 120 bp, Artificial Sequence
  ENSG00000162630_7 (sequence is synthesized)
tttcaatcatcatgactggctgccaggcagagctggattcaaagaaaaccctgtgacatacactttccgaggatttcggtcaacaaaaagtgagacaaaccacagctcccttcggaacat

SEQ ID NO: 488339 - DNA, 120 bp, Artificial Sequence
  ENSG00000162630_8 (sequence is synthesized)
ttggaaagaaacagtccctcaaaccctgaggcctcaaacagcaactaactctaataacacagacctgtcaccacaaggagttacaggcctggagaatacacttagtgccaatggaagtat

SEQ ID NO: 488340 - DNA, 120 bp, Artificial Sequence
  ENSG00000162630_9 (sequence is synthesized)
ttacaatgaaaaaggtactggacatccaaattcttaccatttcaaatatattattaatgagcctgaaaaatgccaagagaaaagtccttttttaatactactaatagctgcagagcctgg

SEQ ID NO: 488341 - DNA, 120 bp, Artificial Sequence
  ENSG00000162630_10 (sequence is synthesized)
acaaatagaagctagaagagctattcggcaaacttggggcaatgaaagtctagcacctggtattcaaatcacaagaatatttttgttgggcttaagtattaagctaaatggctaccttca

SEQ ID NO: 488342 - DNA, 120 bp, Artificial Sequence
  ENSG00000162630_11 (sequence is synthesized)
acgtgcaatactggaagaaagcagacaatatcatgatataattcaacaggaatacttagatacgtactataatttgaccattaaaacactaatgggcatgaactgggttgcaacatactg

SEQ ID NO: 488343 - DNA, 120 bp, Artificial Sequence
  ENSG00000162630_12 (sequence is synthesized)
tccacatattccatatgttatgaaaactgacagtgacatgtttgtcaacactgaatatttaatcaataagttactgaagccagatctgcctcccagacataactatttcactggttacct

SEQ ID NO: 488344 - DNA, 120 bp, Artificial Sequence
  ENSG00000162630_13 (sequence is synthesized)
aatgcgaggatatgcacccaatcgaaacaaagatagcaagtggtacatgccaccagacctctacccaagtgagcgttatcctgtcttctgttctggaactggttatgttttttctggaga

SEQ ID NO: 488345 - DNA, 120 bp, Artificial Sequence
  ENSG00000162630_14 (sequence is synthesized)
ggatctgtcttgccaagttgagaattgatcctgtaccccctcccaatgagtttgtgttcaatcactggcgagtctcttattcgagctgtaaatacagccacctaattacctctcatcagt

SEQ ID NO: 488346 - DNA, 120 bp, Artificial Sequence
  ENSG00000162630_15 (sequence is synthesized)
tccagcctagtgaactgataaaatactggaaccatttacaacaaaataagcacaatgcctgtgccaacgcagcaaaagaaaaggcaggcaggtatcgccaccgtaaactacattagaaaa

SEQ ID NO: 488347 - DNA, 120 bp, Artificial Sequence
  ENSG00000162630_16 (sequence is synthesized)
gacaattttttttcaaatgtgcaatttgtaaatattgctaaaagcatgtatagttagaactgattacatccgtaggacaagttttagttaaaactcatcacataaagaaattcaagaagt

SEQ ID NO: 488348 - DNA, 120 bp, Artificial Sequence
  ENSG00000162630_17 (sequence is synthesized)
atttttttaatttctgaagaagttaattcttaaaactataacattatataacaaaaaaggtttcccaaaacaatctatttaaaaaactgtataaggagattctgtgtattaacatgcaat

SEQ ID NO: 488349 - DNA, 120 bp, Artificial Sequence
  ENSG00000162630_18 (sequence is synthesized)
aacaagcatgcataaatcaatggttcaagtcttctgttaggggccaataaaatgtatctgcatatgttttccacataaattttaattcaagaaatgacagtcaaaagatccttcatttta

SEQ ID NO: 488350 - DNA, 120 bp, Artificial Sequence
  ENSG00000162630_19 (sequence is synthesized)
gattaagcttttcattttaatatataatttaatgtaaataaaacatcactatcaattttaaggaaactttttaattgtgcaaaggataaattttttgacctattttagggttctaaatgc

SEQ ID NO: 488351 - DNA, 120 bp, Artificial Sequence
  ENSG00000162630_20 (sequence is synthesized)
aataagatttagttgagttattccacaaacacattataaagttcagatgtttcatcaatgcagttctcacgaaagtatttactttttaaaaataactgagatattattttaaatttcttt

SEQ ID NO: 488352 - DNA, 120 bp, Artificial Sequence
  ENSG00000162630_21 (sequence is synthesized)
tattaatactttcttttattaatatatgggggaaaattattttgacatgacgtggtaaaatgtgaaaaactaatgtgtctcaggctcaagtttttatagttattaaatgtttcaaaatag

SEQ ID NO: 488353 - DNA, 120 bp, Artificial Sequence
  ENSG00000162630_22 (sequence is synthesized)
acaagttttgtttcctcattgatgttaagaaccaaactcctatttcaatgagttattggattagaccaattactgcactcttaaacagcaccaccatttaatttcatgtatatctaactt

SEQ ID NO: 488354 - DNA, 120 bp, Artificial Sequence
  ENSG00000162630_23 (sequence is synthesized)
cgaatatatctgtaaagataatcgaagcaaaagtaatcacttaaaggcacaaataggatgtactgttgaaaaagataaagagtgcaggtgcagtttcattcaacacatttttaagatgca

SEQ ID NO: 488355 - DNA, 120 bp, Artificial Sequence
  ENSG00000162630_24 (sequence is synthesized)
tgtctgccaaaatgcaacatacgggaagtttatttcctgacagcaggtgtacacatgccaacacttaatcattttatggcacctatttctttcttggagtgccaagtttgcaaacctgca

SEQ ID NO: 488356 - DNA, 120 bp, Artificial Sequence
  ENSG00000162630_25 (sequence is synthesized)
gtttttaatttggtagatgacaaatattctgaatcaccaattaaaaacctttttgggagggatggggaaaactacaaacgtttgacaaacacaattctaggatgaacaatgtatacaatg

SEQ ID NO: 488357 - DNA, 120 bp, Artificial Sequence
  ENSG00000162630_26 (sequence is synthesized)
cacttttatgaagtttttaaaaataaaggaaaacaaaaaactttactgagtgttataagtattttcacaataattttgtttgactccatcatgaattttaaaatcaagaaataccaacct

SEQ ID NO: 488358 - DNA, 120 bp, Artificial Sequence
  ENSG00000162630_27 (sequence is synthesized)
actaactaaaatagtgtttttattccatacaagtatgtaaatctgtcaatcttaatttagtcagaatgtttcttaattctaataacaatcatttttacctcttattctattattaaggga

SEQ ID NO: 488359 - DNA, 120 bp, Artificial Sequence
  ENSG00000162630_28 (sequence is synthesized)
taaatcaccagaagagaattgtaacatttgtgaaacttgaaaacactaaaactgtttaagtgcttatctccatttcaaatcagtagcctaagtgttctactctaaatcaagtgattctga

SEQ ID NO: 488360 - DNA, 120 bp, Artificial Sequence
  ENSG00000162631_0 (sequence is synthesized)
taaaagtttaaggcgagaagtgtcagaggcagcggagcgaggaggcgcggaggagagccggcgagcaggggactgggctggcacgacctccgaaggctgagatctcattattaatatcac

SEQ ID NO: 488361 - DNA, 120 bp, Artificial Sequence
  ENSG00000162631_1 (sequence is synthesized)
tatatttttggagggagaggcacctttctcatcctctcttcctctccgcccacccttactccctccccctcatctacctgtcaaagtcactgatcttttgcatttcggaagaggacgtca

SEQ ID NO: 488362 - DNA, 120 bp, Artificial Sequence
  ENSG00000162631_2 (sequence is synthesized)
acgggaaggaattccccctctgggtgcgggctccgagagggggcgacttgcaggaggctccccccgggggcggaggcgaagggtgttggtgccagaagaaaagaatgattgatgggaaac

SEQ ID NO: 488363 - DNA, 120 bp, Artificial Sequence
  ENSG00000162631_3 (sequence is synthesized)
agacaccgggctatagacactcatccttttgcttcagatactgatatctcagcctgcttgagcatcccttgtgagctgtgaacattgaggatcactcagggttatcggatgtacaacggg

SEQ ID NO: 488364 - DNA, 120 bp, Artificial Sequence
  ENSG00000162631_4 (sequence is synthesized)
agagccatcgctttgctaaattattatctgcaattggacatcttttacaaaaaccaaactagacctgagtctaatagatatgttctaagacaaagaaaaagctgcaagttgttaacgcct

SEQ ID NO: 488365 - DNA, 120 bp, Artificial Sequence
  ENSG00000162631_5 (sequence is synthesized)
aacacacaagtatgttaggcttccaccaaagtcctcaatatacctgaatacgcacaatatcttaactcttcatatttggttttgggatctgctttgaggtcccatcttcatttaaaaaaa

SEQ ID NO: 488366 - DNA, 120 bp, Artificial Sequence
  ENSG00000162631_6 (sequence is synthesized)
aatacagagacctacctacccgtacgcatacatacatatgtgtatatatatgtaaactagacaaagatcgcagatcataaagcaagctctgctttagtttccaagaagattacaaagaat

SEQ ID NO: 488367 - DNA, 120 bp, Artificial Sequence
  ENSG00000162631_7 (sequence is synthesized)
ttagagatgtatttgtcaagattcctgtcgattcatgccctttgggttacggtgtcctcagtgatgcagccctaccctttggtttggggacattatgatttgtgtaagactcagatttac

SEQ ID NO: 488368 - DNA, 120 bp, Artificial Sequence
  ENSG00000162631_8 (sequence is synthesized)
acggaagaagggaaagtttgggattacatggcctgccagccggaatccacggacatgacaaaatatctgaaagtgaaactcgatcctccggatattacctgtggagaccctcctgagacg

SEQ ID NO: 488369 - DNA, 120 bp, Artificial Sequence
  ENSG00000162631_9 (sequence is synthesized)
ttctgtgcaatgggcaatccctacatgtgcaataatgagtgtgatgcgagtacccctgagctggcacacccccctgagctgatgtttgattttgaaggaagacatccctccacattttgg

SEQ ID NO: 488370 - DNA, 120 bp, Artificial Sequence
  ENSG00000162631_10 (sequence is synthesized)
cagtctgccacttggaaggagtatcccaagcctctccaggttaacatcactctgtcttggagcaaaaccattgagctaacagacaacatagttattacctttgaatctgggcgtccagac

SEQ ID NO: 488371 - DNA, 120 bp, Artificial Sequence
  ENSG00000162631_11 (sequence is synthesized)
caaatgatcctggagaagtctctcgattatggacgaacatggcagccctatcagtattatgccacagactgcttagatgcttttcacatggatcctaaatccgtgaaggatttatcacag

SEQ ID NO: 488372 - DNA, 120 bp, Artificial Sequence
  ENSG00000162631_12 (sequence is synthesized)
catacggtcttagaaatcatttgcacagaagagtactcaacagggtatacaacaaatagcaaaataatccactttgaaatcaaagacaggttcgcgttttttgctggacctcgcctacgc

SEQ ID NO: 488373 - DNA, 120 bp, Artificial Sequence
  ENSG00000162631_13 (sequence is synthesized)
aatatggcttccctctacggacagctggatacaaccaagaaactcagagatttctttacagtcacagacctgaggataaggctgttaagaccagccgttggggaaatatttgtagatgag

SEQ ID NO: 488374 - DNA, 120 bp, Artificial Sequence
  ENSG00000162631_14 (sequence is synthesized)
ctacacttggcacgctacttttacgcgatctcagacataaaggtgcgaggaaggtgcaagtgtaatctccatgccactgtatgtgtgtatgacaacagcaaattgacatgcgaatgtgag

SEQ ID NO: 488375 - DNA, 120 bp, Artificial Sequence
  ENSG00000162631_15 (sequence is synthesized)
cacaacactacaggtccagactgtgggaaatgcaagaagaattatcagggccgaccttggagtccaggctcctatctccccatccccaaaggcactgcaaatacctgtatccccagtatt

SEQ ID NO: 488376 - DNA, 120 bp, Artificial Sequence
  ENSG00000162631_16 (sequence is synthesized)
ttgcgtgagctgtaaacacaacactagagggcagcactgtgagttatgcaggctgggctacttcagaaatgcttctgcacaactggacgatgagaatgtgtgcatagagtgttattgtaa

SEQ ID NO: 488377 - DNA, 120 bp, Artificial Sequence
  ENSG00000162631_17 (sequence is synthesized)
ccctttgggctcaatccatgatcgttgtaatggctcaggattttgtgagtgtaagactggaacaacagggcctaagtgtgatgagtgtctgccgggaaattcctggcactacggctgtca

SEQ ID NO: 488378 - DNA, 120 bp, Artificial Sequence
  ENSG00000162631_18 (sequence is synthesized)
accgaatgtctgcgacaacgagctcctgcactgccagaacggagggacgtgccacaacaacgtgcgctgcctgtgcccggccgcatacacgggcatcctctgcgagaagctgcggtgcga

SEQ ID NO: 488379 - DNA, 120 bp, Artificial Sequence
  ENSG00000162631_19 (sequence is synthesized)
ggaggctggcagctgcggctccgactctggccagggcgcgcccccgcacggctccccagcgctgctgctgctgaccacgctgctgggaaccgccagccccctggtgttctaggtgtcacc

SEQ ID NO: 488380 - DNA, 120 bp, Artificial Sequence
  ENSG00000162631_20 (sequence is synthesized)
tccagccacaccggacgggcctgtgccgtggggaagcagacacaacccaaacatttgctactaacataggaaacacacacatacagacacccccactcagacagtgtacaaactaagaag

SEQ ID NO: 488381 - DNA, 120 bp, Artificial Sequence
  ENSG00000162631_21 (sequence is synthesized)
gcctaactgaactaagccatatttatcacccgtggacagcacatccgagtcaagactgttaatttctgactccagaggagttggcagctgttgatattatcactgcaaatcacattgcca

SEQ ID NO: 488382 - DNA, 120 bp, Artificial Sequence
  ENSG00000162631_22 (sequence is synthesized)
gctgcagagcatattgtggattggaaaggctgcgacagccccccaaacaggaaagacaaaaaacaaacaaatcaaccgacctaaaaacattggctactctagcgtggtgcgccctagtac

SEQ ID NO: 488383 - DNA, 120 bp, Artificial Sequence
  ENSG00000162631_23 (sequence is synthesized)
gactccgcccagtgtgtggaccaaccaaatagcattctttgctgtcaggtgcattgtgggcataaggaaatctgttacaagctgccatattggcctgcttccgtccctgaatcccttcca

SEQ ID NO: 488384 - DNA, 120 bp, Artificial Sequence
  ENSG00000162631_24 (sequence is synthesized)
acctgtgctttagtgaacgttgctctgtaacccttgttggttgaaagatttctttgtctgatgttagtgatgcacatgtgtaacagccccctctaaaagcgcaagccagtcatacccctg

SEQ ID NO: 488385 - DNA, 120 bp, Artificial Sequence
  ENSG00000162631_25 (sequence is synthesized)
tatatcttagcagcactgagtccagtgcgagcacacacccactatacaagagtggctataggaaaaaagaaagtgtatctatccttttgtattcaaatgaagttatttttcttgaactac

SEQ ID NO: 488386 - DNA, 120 bp, Artificial Sequence
  ENSG00000162631_26 (sequence is synthesized)
tgtaatatgtagattttttgtattattgccaatttgtgttaccagacaatctgttaatgtatctaattcgaatcagcaaagactgacattttattttgtcctctttcgttctgttttgtt

SEQ ID NO: 488387 - DNA, 120 bp, Artificial Sequence
  ENSG00000162631_27 (sequence is synthesized)
tcactgtgcagagatttctctgtaagggcaacgaacgtgctggcatcaaagaatatcagtttacatatataacaagtgtaataagattccaccaaaggacattctaaatgttttcttgtt

SEQ ID NO: 488388 - DNA, 120 bp, Artificial Sequence
  ENSG00000162631_28 (sequence is synthesized)
gctttaacactggaagatttaaagaataaaaactcctgcataaacgatttcaggaatttgtattgcaatttcttaagatgaaaggaacagccaccaagcagtttcacactcactttactg

SEQ ID NO: 488389 - DNA, 120 bp, Artificial Sequence
  ENSG00000162631_29 (sequence is synthesized)
atttctgtgtggactgagtacattcagctgacgaatttagttcccaggaagatggattgatgttcactagcttggacaacttctgcaaaatatgagactatttccacttgggaaaaatta

SEQ ID NO: 488390 - DNA, 120 bp, Artificial Sequence
  ENSG00000162631_30 (sequence is synthesized)
aaaaaaaaaaaaaaaaaaaaaatctaagtgattgccaagattatgccaaagcctgttggcagagtactaagagacttttatttttaagtcatgctattttcacagattgatggtgatcat

SEQ ID NO: 488391 - DNA, 120 bp, Artificial Sequence
  ENSG00000162631_31 (sequence is synthesized)
gatggtgatcatgtgactctagggatgctgatctatgtatctttccaaatacagtgtttacatggagtatcacaagacgcaacctggggaaccaggaagggagcagggaaattgagtgat

SEQ ID NO: 488392 - DNA, 120 bp, Artificial Sequence
  ENSG00000162631_32 (sequence is synthesized)
ttgcaatttgactttgaatatattcagacttaagtatttagaggaaatatcaaaatataaagcagcaagtagacataactgctgttcctgagaataaagtttgttttaagtgctgcccaa

SEQ ID NO: 488393 - DNA, 120 bp, Artificial Sequence
  ENSG00000162631_33 (sequence is synthesized)
gaggtacacgaggagttactggaaacggcgcttctgtggaggagccgggggggatggggagtagagggagggggccctgttgcctcagcgccccgaggtcgtggagcggcagcagctgca

SEQ ID NO: 488394 - DNA, 120 bp, Artificial Sequence
  ENSG00000162631_34 (sequence is synthesized)
tttcaaagaggctaagacagtgtgcatttcgttcccagcacactgttgtcctacagattacaagtgtattagcagcagcatctcctggaatcaaaaacaattatcagcccgaaccagagt

SEQ ID NO: 488395 - DNA, 120 bp, Artificial Sequence
  ENSG00000162631_35 (sequence is synthesized)
cttaaggacaatgaaattctacatgacttggtagaacaataacctatgatagtgtaaggtcagaaacctagttccagtctgaattcttcaccctgctgccactccttgctgaaacaggga

SEQ ID NO: 488396 - DNA, 120 bp, Artificial Sequence
  ENSG00000162631_36 (sequence is synthesized)
aggggggaggaatgtctcctgataaataacctgggtaaaaactagatgaaggaacagcatgtcttattggttttgttcccagaaaagccaattcgaagaaggcaataaaaggtaaacagg

SEQ ID NO: 488397 - DNA, 120 bp, Artificial Sequence
  ENSG00000162631_37 (sequence is synthesized)
taatgcctgtgctgcctgccaccccacgtctaagtctattgaatgtttgttattcaaaccaacagtctcttttgatgtaagaaataaggaaagatggaaataaattagagcttaggctta

SEQ ID NO: 488398 - DNA, 120 bp, Artificial Sequence
  ENSG00000162631_38 (sequence is synthesized)
gtgccagagtggccaaccagaaattggagatttacgttggaagcataaatagaaaattatatttcaggctcaccaaagaaacacatgaaaatgctgataacatagggagtttgagattat

SEQ ID NO: 488399 - DNA, 120 bp, Artificial Sequence
  ENSG00000162631_39 (sequence is synthesized)
ttataatgaggtggatttctgatattaaaattagagtttaagttgtcttatagtttattagcacaaaccaaaggcagcccatgttatttctggcaaagatgcactttatcgttatctgct

SEQ ID NO: 488400 - DNA, 120 bp, Artificial Sequence
  ENSG00000162631_40 (sequence is synthesized)
catggctttgtcgcaacgctcaggaatcagacactgcacacttcaatagttgggattccaaaagctaattctaaaatttaatgaaggcctgatttaaactgattcatctgcattttatct

SEQ ID NO: 488401 - DNA, 120 bp, Artificial Sequence
  ENSG00000162631_41 (sequence is synthesized)
ttatgaggccataagaatctaaattgatgaggaatatctttcattccgtgtatttagatatagttttctgaatttcctgaagcgatgtgatctgcttttaataaaaattcacttttaggt

SEQ ID NO: 488402 - DNA, 120 bp, Artificial Sequence
  ENSG00000162631_42 (sequence is synthesized)
cgcccgaggcggaccaggctggctgcgcagggccgccgccccgcgccgtcggctcggctcccgcccggcgcaagggcaaacgagccacacgggtgttggtgccagaagaaaagaatgatt

SEQ ID NO: 488403 - DNA, 120 bp, Artificial Sequence
  ENSG00000162631_43 (sequence is synthesized)
ggtaatcctccaaagtttaataggatatggccgaatatttcttcccttgaggtttctaacccaaaacaagttgctcccaaattagctttgtcaacagtttcttctgttcaagttgcaaac

SEQ ID NO: 488404 - DNA, 120 bp, Artificial Sequence
  ENSG00000162631_44 (sequence is synthesized)
ttttctggatgccgtgaaatgagatatatttcacccactgaagaccaccatgaaggcattcaggattctatatactgcactactaatttggtggtatttccttactgtggaatttaagac

SEQ ID NO: 488405 - DNA, 120 bp, Artificial Sequence
  ENSG00000162631_45 (sequence is synthesized)
ggataatcttaaaacttttgcatggaaacagtttatttgaacataaagctggtttcctgttaatatttttgttttgtcagttttcaatgggtatatgtgttaaaatgattcaggttagcc

SEQ ID NO: 488406 - DNA, 120 bp, Artificial Sequence
  ENSG00000162631_46 (sequence is synthesized)
tttctgatgtaatagggtattttctttgtgaattgcatttttgtgttggttttctgcacagatctggtgagaacacagataaagtgattatttgtgcataactccatgaacatggcagtg

SEQ ID NO: 488407 - DNA, 120 bp, Artificial Sequence
  ENSG00000162631_47 (sequence is synthesized)
ctatgacttttctgactactcttaaccagtgagggctacctagactcaggtgcaattccttagataatcatcattcaggaaaaatataagtagtcctatttatccatacttagcaaccaa

SEQ ID NO: 488408 - DNA, 120 bp, Artificial Sequence
  ENSG00000162631_48 (sequence is synthesized)
caaacaaattgaactctctcttagactggatttggatgtctgacataattttaaaaagcagaaaatgaaagccaatgaatgccttgggtatatgcatcagaacccaagaaaaagtccatg

SEQ ID NO: 488409 - DNA, 120 bp, Artificial Sequence
  ENSG00000162631_49 (sequence is synthesized)
taatgcattaaattctatgttttgtgaaggcctgaaacaggcaaatttgtgatcagtagtctctctggagagataaaggaaaaagagaatctgtacattcatttctccttcctaaaatac

SEQ ID NO: 488410 - DNA, 120 bp, Artificial Sequence
  ENSG00000162631_50 (sequence is synthesized)
gatgatctatgtcttcttgactacttagctttgagtttgatatagaaagagtataaaaaatatgtgcagaatttgggagtgagagtactagaaattcctttaataaatctgttagtatga

SEQ ID NO: 488411 - DNA, 120 bp, Artificial Sequence
  ENSG00000162631_51 (sequence is synthesized)
atccaagcaattgaagagaaaccgctcttcaaccatctgtagaacacttccccagtatcactacaaagaactttcttccagctatcatgggagaaccaggtgtagctcccgcttcatgtg

SEQ ID NO: 488412 - DNA, 120 bp, Artificial Sequence
  ENSG00000162631_52 (sequence is synthesized)
taaaataatgatgccctcatgccaagcctgaaattcacattaagaaaatgcccagtaactttacagagcaaaattttaaatttttttttatacattgcaccctttatctctaatggctaa

SEQ ID NO: 488413 - DNA, 120 bp, Artificial Sequence
  ENSG00000162631_53 (sequence is synthesized)
aatctttgaacaactactaagtaactgattacaaataaattaccgagaaagcaagattacgcatggtaagcggagagaattttcactgtagtgtcatcccctcacaggcttgtgtcatag

SEQ ID NO: 488414 - DNA, 120 bp, Artificial Sequence
  ENSG00000162631_54 (sequence is synthesized)
gtgctgtgccaggcagggtgatcgcagtgtaaatagccattgaatgattgcgattcccagcatccatctaaaaagcaatactctgataatttggataaagcaacttcctgcttcttataa

SEQ ID NO: 488415 - DNA, 120 bp, Artificial Sequence
  ENSG00000162631_55 (sequence is synthesized)
atgcacagtcaggtgtcccaatttataaatcaacccagtttacttgagcttgtgaataggcctggacactgatttgttaagcgctagatgtggtaaatgccatgaaaattggccactttg

SEQ ID NO: 488416 - DNA, 120 bp, Artificial Sequence
  ENSG00000162631_56 (sequence is synthesized)
taaatagaagtagtgttcacatccatttagagataccagcctaatgctacagcatcctctttgtgatcttgttgaaacagcatcagtgttaaaaacttgcaaatgaaaaccttcagctct

SEQ ID NO: 488417 - DNA, 120 bp, Artificial Sequence
  ENSG00000162631_57 (sequence is synthesized)
aatagtctaatttttctgctttagtatcccccttggcatttgcctaactgtatatataccccacaatgtgctcctttcaggccttgacaattgcatttgcacgtgcattttagtgcaaca

SEQ ID NO: 488418 - DNA, 120 bp, Artificial Sequence
  ENSG00000162631_58 (sequence is synthesized)
gggaagcaagtagaagcaagctgacacagattattgaggctgctatagtgatctggcctgtcagaagtttcagaaatggatggatggaaaagtagttctttggcgttggggtgtctttct

SEQ ID NO: 488419 - DNA, 120 bp, Artificial Sequence
  ENSG00000162631_59 (sequence is synthesized)
gtttggagtgtcagttgtatgttgcatggcccctctaactgtactgctcactcgacatcccattcggccgcctccaccacattccccatatctgagcatcagcagatgttgaccttttac

SEQ ID NO: 488420 - DNA, 120 bp, Artificial Sequence
  ENSG00000162631_60 (sequence is synthesized)
acatcaaatcaggaaatttctgttttgttttgttttgttttgttttgaaatcagtggtgacctgaaaggatgcttcgttgtgcctttgaaaaaaatatattaacctttattatcgagaac

SEQ ID NO: 488421 - DNA, 120 bp, Artificial Sequence
  ENSG00000162631_61 (sequence is synthesized)
ctaggaaaatttactcctaataaaaaccctctgactaaaagtgatattttggactctcccttcaatatgcctctggctgttccgcttagaatgcaatgggtattttctcagatttccagc

SEQ ID NO: 488422 - DNA, 120 bp, Artificial Sequence
  ENSG00000162631_62 (sequence is synthesized)
aaacaggatgtaagagcttccagaggtcacccaacatcacacatgactagcttacctgtttcctggcttttaaggtaaagagttacagtaaaaccatcaaacgtgattgtatcttctagg

SEQ ID NO: 488423 - DNA, 120 bp, Artificial Sequence
  ENSG00000162631_63 (sequence is synthesized)
ctgctttaatggcattcgaaagttccttctttgtgggcttataagttgctttttgcgtgcactcgtggattcctttcccctccaaagggcaagaattcacacgtagacgacactgcctgt

SEQ ID NO: 488424 - DNA, 120 bp, Artificial Sequence
  ENSG00000162631_64 (sequence is synthesized)
tccagagggcacgggaatggggttttcaaggtgcaagccagagaaaaggaagctgtttggatatttagctaagttatgggtgtttgccagtgctttttgcattaccccaaagaaggaatc

SEQ ID NO: 488425 - DNA, 120 bp, Artificial Sequence
  ENSG00000162631_65 (sequence is synthesized)
aatgactataattccactaactatatagaaagataccattatagcagatgtaacacccctgagaccccgattatcacagcatagctcaaggaaaataaatgatgtatattatcgatgtag

SEQ ID NO: 488426 - DNA, 120 bp, Artificial Sequence
  ENSG00000162631_66 (sequence is synthesized)
attattgatgtatataaccatcagtttacatacatattctgtatacacagtgattaaaggttttggggccctaataaatttcagtatagatctcaaaatgccaacgcctgtattaaggtt

SEQ ID NO: 488427 - DNA, 120 bp, Artificial Sequence
  ENSG00000162631_67 (sequence is synthesized)
caaatgcatggatagggtggtcatcctttccgatcatctgctaaaaatgtttttgaaacaaatttcccattaaggtcattcgtacctgctgttgtctatctattaacaaataggtttccc

SEQ ID NO: 488428 - DNA, 120 bp, Artificial Sequence
  ENSG00000162631_68 (sequence is synthesized)
ataatcctaaggatacttgacttagaactcagtcattctgatctgctttggccatggctgaaaaaatgctggtgatattgtcagcaattaatgaatcccaaaataaatctgtagcctttg

SEQ ID NO: 488429 - DNA, 120 bp, Artificial Sequence
  ENSG00000162631_69 (sequence is synthesized)
cacacacgtaccgctctggtttcttctgttggcattttctgctgcttctgttgcctgacaaacctgataaatgaaagccactgattcaaagccaatattttacacagagaaaggagattc

SEQ ID NO: 488430 - DNA, 120 bp, Artificial Sequence
  ENSG00000162631_70 (sequence is synthesized)
gcgatctcagacataaaggtgcgaggaagtaagaacttgaagaaagtggactggaaaactcccatcaacatcttcagtatttaccctttaacaaaatattcctgaaggtataaatgacca

SEQ ID NO: 488431 - DNA, 120 bp, Artificial Sequence
  ENSG00000162631_71 (sequence is synthesized)
ttatagaacatttacagaatcctgtggaatactactatgtaaaaggctagtgaaattgtgatggaagagtcagcaaagatgtgaaaaatgaaatgccaagtggtacaatctggtgtattt

SEQ ID NO: 488432 - DNA, 80 bp, Artificial Sequence
  ENSG00000162636_0 (sequence is synthesized)
cggcgagctgagcaccaaaagggcgctcacctccccgggcgagctgcagcacgaccgctccccgcgggcggtcggggtcc

SEQ ID NO: 488433 - DNA, 120 bp, Artificial Sequence
  ENSG00000162636_1 (sequence is synthesized)
gccatggggctgggctgatccggggctcggccaagctgaggcggcggcgcccggccgtgcgcccagcttgcaggcgcctggctctcacgatgatgaagaagaagaagtttaagtttaagg

SEQ ID NO: 488434 - DNA, 120 bp, Artificial Sequence
  ENSG00000162636_2 (sequence is synthesized)
tggacttcgagctcgaggagctctcctcagtgcccttcgtcaatggggtcctcttctgcaagatgcggctgctggacggcggcagcttcaccgccgagtcctccagggaggtggtacaag

SEQ ID NO: 488435 - DNA, 120 bp, Artificial Sequence
  ENSG00000162636_3 (sequence is synthesized)
caaactgtgttcgctggagaaagaagttctcatttatgtgcaaaatgagtgcaagtgctgccacaggcatcctagatccttgtatctacagagtatccgtgaggaaggaattaaaaggtg

SEQ ID NO: 488436 - DNA, 120 bp, Artificial Sequence
  ENSG00000162636_4 (sequence is synthesized)
gaaaagcttatgcaaagctgggctttgcagatctaaacctggcagagtttgctggatcaggaaataccactcgccgctgtttactggaaggctatgataccaaaaatacaagacaggata

SEQ ID NO: 488437 - DNA, 120 bp, Artificial Sequence
  ENSG00000162636_5 (sequence is synthesized)
attccattcttaaagttttgatcagtatgcaactgatgtctggtgacccatgttttaaaacgcctccctccacttcaatgtctataccaattgctggtgaatctgaatctttgcaagaag

SEQ ID NO: 488438 - DNA, 120 bp, Artificial Sequence
  ENSG00000162636_6 (sequence is synthesized)
atagaaaaggtggagagactctcaaagtgcatcttggaatagcagatctttcagcaaagagtgcctctgttccagacgaacttggtgcctgtggacattctagaacatcaagctatgcaa

SEQ ID NO: 488439 - DNA, 120 bp, Artificial Sequence
  ENSG00000162636_7 (sequence is synthesized)
gtcagcagtcaaaagtatcagggtatagcacgtgtcactcccggtcatctagtttctctgagctctgccacaggagaaatacctcagtgggaagcacatcaacaggagttgaaagtattc

SEQ ID NO: 488440 - DNA, 120 bp, Artificial Sequence
  ENSG00000162636_8 (sequence is synthesized)
tagagccatgtgatgaaattgagcagaaaatcgctgagccaaatcttgatacagctgataaagaagatacagcttcagaaaaactcagcagatgcccagtgaaacaagattctgtagaat

SEQ ID NO: 488441 - DNA, 120 bp, Artificial Sequence
  ENSG00000162636_9 (sequence is synthesized)
ctcagctgaagcgagttgatgacaccagggtggatgcagatgacattgtagagaaaatattacaaagtcaagacttcagcctagattccagtgcggaagaagaaggactaaggctatttg

SEQ ID NO: 488442 - DNA, 120 bp, Artificial Sequence
  ENSG00000162636_10 (sequence is synthesized)
tgggtcctgggggaagtacaacctttggcagtcatcatcttccaaatagggtggggtctggagcttatgaacaagttgtgatcaaacgctagaagtcaagtcggtgaaaacatttccttg

SEQ ID NO: 488443 - DNA, 120 bp, Artificial Sequence
  ENSG00000162636_11 (sequence is synthesized)
tggatttaagatgtgagtagttgatgtatcaaggcattttattcaagcacttaatagaaaatgaacctcaactatcaagaggaaagccaatgctggtttcttctctggaaggacccaccg

SEQ ID NO: 488444 - DNA, 120 bp, Artificial Sequence
  ENSG00000162636_12 (sequence is synthesized)
ccatcctgtaccagccaccaaaggggaacatctacatggcagtctccaggcactgtgccactgtgtgccttggaagcacctggcttctgtggtcactgcacatcataatgaaaagcctgc

SEQ ID NO: 488445 - DNA, 120 bp, Artificial Sequence
  ENSG00000162636_13 (sequence is synthesized)
tttttctttcagaacaccccagcggagaaaacagcattatatacatcggagtatcattttaggattcaagtgtaaaaatctgtgatcaagaggctcaatagatttgggctctatggtttg

SEQ ID NO: 488446 - DNA, 120 bp, Artificial Sequence
  ENSG00000162636_14 (sequence is synthesized)
gtttttttagtttgagagacagtacatgaatataacttaaaccctatagattttgtcaagatagttgtaattcctgttctggaaatcttccctattacactacctacagcattgtataaa

SEQ ID NO: 488447 - DNA, 120 bp, Artificial Sequence
  ENSG00000162636_15 (sequence is synthesized)
gtgtgggtgttcatgctttgggaaaatgttagactacaatttaaacatgtgatgtgcttattcataattctcagtgtatcagtcataaatgaaataacaagtgcatttaagtcagagata

SEQ ID NO: 488448 - DNA, 120 bp, Artificial Sequence
  ENSG00000162636_16 (sequence is synthesized)
cgtgaatggatgtaatgccgttatgcagtatatattgttaattgtcattaatattagatgagctgcagaaccacccccaagcactacataaaagactcaaaataagtttaacacttactg

SEQ ID NO: 488449 - DNA, 120 bp, Artificial Sequence
  ENSG00000162636_17 (sequence is synthesized)
tgttgggcaccctaacagaagagctatcttaactcattgaatattaagatctgctggtttcaggagtcaaaatgtagaaaaagaggagaattgtaatatggtcagaaacagagaagcctt

SEQ ID NO: 488450 - DNA, 120 bp, Artificial Sequence
  ENSG00000162636_18 (sequence is synthesized)
ttctatgtaaattcagacttatctgaggctaacagttttccgaagtggtggtgggtagcagcatgacagctgcttgccatgactgatgcagactactaggtttccattttagctctctgt

SEQ ID NO: 488451 - DNA, 120 bp, Artificial Sequence
  ENSG00000162636_19 (sequence is synthesized)
aggtactgttttcttccccactgtgtcgaaagtgatttgttttgaagcaagagtagaatataacatctatcaaatatagcttttaaaataagaatacctggtctggatccagttgagcag

SEQ ID NO: 488452 - DNA, 120 bp, Artificial Sequence
  ENSG00000162636_20 (sequence is synthesized)
cacagcagataaaccttagagtttttctgttcttacatgacggtttccatgtggaaagatctaaactttcttggaatcactattagtgaagaaaaatgtagaatctgtataaccagtaat

SEQ ID NO: 488453 - DNA, 120 bp, Artificial Sequence
  ENSG00000162636_21 (sequence is synthesized)
tccccaattcttactttcaaagtcatatccaagaaagacaatatgtcagaatagaatgactttggtctaggtgttttcacgttggcaaaaataaggaggaaattatattattttaatatc

SEQ ID NO: 488454 - DNA, 120 bp, Artificial Sequence
  ENSG00000162636_22 (sequence is synthesized)
tttcaaggattgagtattctgcattaatccaatactattccaacaaagagattctggaagtttttaaaaaatgataccctgttttatattttgaatgtagagagactctgagagagagaa

SEQ ID NO: 488455 - DNA, 120 bp, Artificial Sequence
  ENSG00000162636_23 (sequence is synthesized)
tgttctgagttatactttttattttttaagatttatttttaagaataaaacattgacctgaacattttagcctaaccaagggacttaagtggtaaagacttgcattatgtcttcatgtga

SEQ ID NO: 488456 - DNA, 120 bp, Artificial Sequence
  ENSG00000162636_24 (sequence is synthesized)
tgcattatgtcttcatgtgaactgatccgttcattatatattatgggaaaaatcaaagaaagttttttatagagatatgaagatattatttagagagatatttattatgacattttttaa

SEQ ID NO: 488457 - DNA, 120 bp, Artificial Sequence
  ENSG00000162636_25 (sequence is synthesized)
aaaatattatttctaggctatatttttattggtgctgtgcaaatgattttgcagttttgaaaatgataaaactagattgtaagtggggttcagtgaggacattcatcagacacgtaagag

SEQ ID NO: 488458 - DNA, 120 bp, Artificial Sequence
  ENSG00000162636_26 (sequence is synthesized)
gtgctgcaatcagggtgatgcccatcttactcatccttggctgcccttggtccgacacctctctatacaagactggttctcagtattttaaatggtacagaattctttttaaaaagtaga

SEQ ID NO: 488459 - DNA, 120 bp, Artificial Sequence
  ENSG00000162636_27 (sequence is synthesized)
gagattttgaaaagcataaaaatcatgcctttataatcttagcagccatcagatacaccttgatttatgtagtagtaaatataacaaatattttaataaatagaaacactgataaggaag

SEQ ID NO: 488460 - DNA, 120 bp, Artificial Sequence
  ENSG00000162636_28 (sequence is synthesized)
aaaaaagaactaatgtctatgtcttctgtagtcagcaaaagtctggatccattttctattttgtgttccattggcacactttgtgttcaaatttcagtgcagtcctttcaaaatactcgc

SEQ ID NO: 488461 - DNA, 120 bp, Artificial Sequence
  ENSG00000162636_29 (sequence is synthesized)
taagggttgcctaagtgtctgccttactttctgattgtccttttctgagagcatggttaagaacatcttaaccatatagctgttgaaaaaatctgtttattaaataacaagttcacttct

SEQ ID NO: 488462 - DNA, 120 bp, Artificial Sequence
  ENSG00000162636_30 (sequence is synthesized)
gtttatgttttgagtttagaaaatttgacttgaaaatttagattattaataaatttatttttaaatattaaagtcaaatttcaaatcacccagtgttgaagaatttgcagatgtatacaa

SEQ ID NO: 488463 - DNA, 120 bp, Artificial Sequence
  ENSG00000162636_31 (sequence is synthesized)
tactttttctaattatgtcttttctatctccatgcctggctttttctaattatatcctagagaaaaagactaatggtatttcaaagctgtgtatttgtgacgagataaagaagagtctta

SEQ ID NO: 488464 - DNA, 120 bp, Artificial Sequence
  ENSG00000162636_32 (sequence is synthesized)
aacatcttgtttgggagaatgcacaggccagtcaggagacccacctcctcctgtgccctgagctgctgagacccgacagatcatgaaggctagtaaagggcagagaaggccctgagccat

SEQ ID NO: 488465 - DNA, 120 bp, Artificial Sequence
  ENSG00000162636_33 (sequence is synthesized)
cagtttacactcgaattgttgactcccctttgtggtgtttttgaaggctgcttataccaacagctaatgtggattagtgcttatgatcttgaaaaagtcttgaccaagaatcctaaactc

SEQ ID NO: 488466 - DNA, 120 bp, Artificial Sequence
  ENSG00000162636_34 (sequence is synthesized)
caccactcctcccattccagcttaacactatcagaataatatccaaattccagatttttttcttttttacttttttttcttccttttttaagagagacagtgtcttgctcggtcacctag

SEQ ID NO: 488467 - DNA, 120 bp, Artificial Sequence
  ENSG00000162636_35 (sequence is synthesized)
taagagagacagtgtcttgctcggtcacctaggctggagtgtagtggcgcaatcgttgctcactacagcctcccaactcccaggctcaaatgagcctcccaccttggcctcccaaagtgc

SEQ ID NO: 488468 - DNA, 120 bp, Artificial Sequence
  ENSG00000162636_36 (sequence is synthesized)
ctagtttcttttctgtatgctttttttacaaaactgtgagccacagaggttgaccacttagccaatttgttgctagaagggagaaaaaaatctccaactagcctccagacaaaacatact

SEQ ID NO: 488469 - DNA, 120 bp, Artificial Sequence
  ENSG00000162636_37 (sequence is synthesized)
caaattcaaacagcagttagttttaattaacatacagaagtaattttagactttcagatttctatgctgactagaacactttgcaggctgaagctgacattattaccaaatacttcattt

SEQ ID NO: 488470 - DNA, 120 bp, Artificial Sequence
  ENSG00000162636_38 (sequence is synthesized)
aagtacatactctgaagtgtcaggcttccagtatatatagcaacgctctgagagacaaactgggctcatatgacggggttgcattttattttcttaacaggtctttaaattgggcagttc

SEQ ID NO: 488471 - DNA, 120 bp, Artificial Sequence
  ENSG00000162636_39 (sequence is synthesized)
tgaaattctgtttggtcagttctagatggtacgtcatgtgaatgcaaccaagcactgtagttgaaattgtgttatgccactactcatgttgtcttaggtactacgcataatgttaatagc

SEQ ID NO: 488472 - DNA, 120 bp, Artificial Sequence
  ENSG00000162636_40 (sequence is synthesized)
tgagatgttaaagaatttgaagtctaaaatataaaagatgaatatacccatattaatcctatgttaagatgctctggaaataaaggccttattcccttacacatgcgatttttgtaagat

SEQ ID NO: 488473 - DNA, 120 bp, Artificial Sequence
  ENSG00000162636_41 (sequence is synthesized)
aatatatacacagtatattttaaatgtttgtgtgggtggtctgtgtagttactccccatacaacaaagctgacaaaatttttaatttacacaatgtattctgcattttcaaatgtttatg

SEQ ID NO: 488474 - DNA, 120 bp, Artificial Sequence
  ENSG00000162636_42 (sequence is synthesized)
ttgtgtatatagcaaagaaattatcttactgatatgcgttgaccaaatcccatggagaaaagacatctcatttgaggttccccttcctctcatgtgtttgattttttggaaggtgataca

SEQ ID NO: 488475 - DNA, 120 bp, Artificial Sequence
  ENSG00000162636_43 (sequence is synthesized)
gtatgtgggtaaccatgcaaatgtttatgaataactttactgaagtgattccatccgtattctgttctaatacttggagaatgaccttcatatttatatattttatttctttgtttcaac

SEQ ID NO: 488476 - DNA, 120 bp, Artificial Sequence
  ENSG00000162636_44 (sequence is synthesized)
tatccagtgataattcaggaaatgtttccttttttttttttttttacaaaaactttttatttgtaaaatgtttgtaataatgtaaaggtgaacatgttcaataaaaatcatatattaaaa

SEQ ID NO: 488477 - DNA, 120 bp, Artificial Sequence
  ENSG00000162636_45 (sequence is synthesized)
ctgggggaagtacaacctttggcagtcatcatcttccaaatagtgccctggaagctccctccttgctttgagttgtccccgcctttctggatggaaccaatgtacttcttacatatattg

SEQ ID NO: 488478 - DNA, 89 bp, Artificial Sequence
  ENSG00000162636_46 (sequence is synthesized)
atgtgccccgaccaccctgagtacatgttgtcaggacctcctgagactgtgtcatgggagcgtgtcctcaaccttggcaaaataaactt

SEQ ID NO: 488479 - DNA, 120 bp, Artificial Sequence
  ENSG00000162636_47 (sequence is synthesized)
ctataccaattgctggtgaatctgaatctttgcaagaagatagaaaaggtggagagactctcaaagtgcatcttggaatagcaggtatggatgtgtggcttactggttttttaatttgtg

SEQ ID NO: 488480 - DNA, 120 bp, Artificial Sequence
  ENSG00000162636_48 (sequence is synthesized)
agagacgacttgatgccctaaaaattctttgggaattgtgtgggtatttgacttgaaacaggccaataagaatcaacagttttaattatgtaattcttggttgatccagtgctttatttt

SEQ ID NO: 488481 - DNA, 120 bp, Artificial Sequence
  ENSG00000162636_49 (sequence is synthesized)
gtctaaagtattgtgctctgacagattaaaaactagatgttacaatgacactctcctcactgtatgcatctactccccacaggtacaagagaatactacaggattttttccatttttccc

SEQ ID NO: 488482 - DNA, 120 bp, Artificial Sequence
  ENSG00000162636_50 (sequence is synthesized)
gttccattaccctgcaacttctgcaaagcagcttctgcctctcgggtgtcgctcctcttccatgaatcgctttccctctgtcagtggttctcaagccctagtgtgcatcagagtctcctg

SEQ ID NO: 488483 - DNA, 120 bp, Artificial Sequence
  ENSG00000162636_51 (sequence is synthesized)
gagggcttgtgaaaacacaggttgctggcggcagcagccagagtgttcgattcagtagatctgggttagagcctgaagttttgtatcactaaggcattcccacaagacgctgatgctgct

SEQ ID NO: 488484 - DNA, 120 bp, Artificial Sequence
  ENSG00000162636_52 (sequence is synthesized)
agtccctgaccacaccttgagatccacatttccagacacacttctggcagcagtcagaatctgctccagaagtaaaagcatggtggggataatgtcaaggttgcaggaggaaaaggactt

SEQ ID NO: 488485 - DNA, 120 bp, Artificial Sequence
  ENSG00000162636_53 (sequence is synthesized)
aggagcttccttctttcttcagtattatgtgaacaggatgtattgtttgaaagaagggaaaggtgaagttatataattaaccctttcactgccttttaaaatatgcaaatatttggtttc

SEQ ID NO: 488486 - DNA, 120 bp, Artificial Sequence
  ENSG00000162636_54 (sequence is synthesized)
ttataaataatggtgactctgaaatttcctgttttgggatcagtggatcttttgggaacttgtaaccattccattagctccttctcttcagcatgtaaatatgctgatttctttctccta

SEQ ID NO: 488487 - DNA, 120 bp, Artificial Sequence
  ENSG00000162636_55 (sequence is synthesized)
ctgaaaaaatgaaaacaaaaactccttagccctacatccttctctatctactgcactcccttagactccagcaggctggcgcatgtgctcacatgctctctctcttcccccactctgccc

SEQ ID NO: 488488 - DNA, 62 bp, Artificial Sequence
  ENSG00000162636_56 (sequence is synthesized)
aagatcagcaagagatgatatatgtaccacacacttcttatagccaaacttctagaaagaat

SEQ ID NO: 488489 - DNA, 120 bp, Artificial Sequence
  ENSG00000162636_57 (sequence is synthesized)
tgtaccacacacttcttatagccaaacttctagaaagaatatactgtccatttattcctaaacacattagcagtctggcttccatcatctgccctctcttgctgctatcccctgatacat

SEQ ID NO: 488490 - DNA, 120 bp, Artificial Sequence
  ENSG00000162636_58 (sequence is synthesized)
gattgtcaagtcctgtggacatttgttctggtcttatctgatggccagttattcattcttgatgctttctcttcccttggctcctacctctctgatctttccttttctagcttcttagag

SEQ ID NO: 488491 - DNA, 120 bp, Artificial Sequence
  ENSG00000162636_59 (sequence is synthesized)
gcttcttcatcttcctccaacttccctttacatattgatgttccaaagggtttggtcccctcacttccttgagcaataccatctatacccttggctttatctatcacataaatgtaaatg

SEQ ID NO: 488492 - DNA, 120 bp, Artificial Sequence
  ENSG00000162636_60 (sequence is synthesized)
tgattctgtgatgtacatgtgatcaaatgctttggggaaaggtccacttcataccaaatgtaacactgaaatccatctgtttctctttctacccagccagagtctaactaagttcttcat

SEQ ID NO: 488493 - DNA, 120 bp, Artificial Sequence
  ENSG00000162636_61 (sequence is synthesized)
gatcaggtcttatttatttctgtatccccagcagaaggcccgggacacagtagatgagtgactgttgaataggcatcctcaggtgtctctaattccgcatatctagcacaagtcttccta

SEQ ID NO: 488494 - DNA, 120 bp, Artificial Sequence
  ENSG00000162636_62 (sequence is synthesized)
ccttttcctcctgtcttttctacttcagttttcctgacacaaacttctcctttcttattgagtcctgctatttgtgcctatgaaacatctctccctctcagctggattattatgaaaacc

SEQ ID NO: 488495 - DNA, 120 bp, Artificial Sequence
  ENSG00000162636_63 (sequence is synthesized)
tacactcttatgccccctgtttatcctgttgccagagtgttcttcccaaaatgtagatttgatcatgtcacaccctttcttaaagccactgaactgttttcttctttaaactcatagaag

SEQ ID NO: 488496 - DNA, 120 bp, Artificial Sequence
  ENSG00000162636_64 (sequence is synthesized)
gttcttcatcaacaggcatctactcatctttctagccccttttccctcggttattatactccactaccctatatgccaactttaccaaacgatctgcttccctacaaagaaggcatgctc

SEQ ID NO: 488497 - DNA, 120 bp, Artificial Sequence
  ENSG00000162636_65 (sequence is synthesized)
ttcccggtgcctttccttgctcatctagctcaggagttcctatacgtcgctcaagtcctggggttaacctcctctgttaccaggttgtgtcagatgcactgtcctttggagctcttaata

SEQ ID NO: 488498 - DNA, 120 bp, Artificial Sequence
  ENSG00000162636_66 (sequence is synthesized)
gctgcttttttgtgcttgtatttttgtacttaccacattgtataagttttgcttctacctctaaactctaagcatgtattttgtcttattttgtacttcctataccttgtacagtattag

SEQ ID NO: 488499 - DNA, 120 bp, Artificial Sequence
  ENSG00000162636_67 (sequence is synthesized)
gcacctgactgggtaaaatattaataaatattgattgaatgaataaattttgaaaaccagaagatatgtggatgacttaagatctgggccaaacccagaagtaaagagcgctgcataact

SEQ ID NO: 488500 - DNA, 120 bp, Artificial Sequence
  ENSG00000162636_68 (sequence is synthesized)
cgatatgaaccaactttttgagttcagattttgctgaatgtttgcttttggaccacttatactctgtccagaaatgagaaacctttgcagaaggaccaggttactccagtattttccttg

SEQ ID NO: 488501 - DNA, 120 bp, Artificial Sequence
  ENSG00000162636_69 (sequence is synthesized)
ttttgcagcatttgttggtccaactgcatgcagtatcatttatagaatagctgctataatagctatgttactcaattgctttccttctgcttctaagttaaaaacagttcttgtttccaa

SEQ ID NO: 488502 - DNA, 120 bp, Artificial Sequence
  ENSG00000162636_70 (sequence is synthesized)
atatgattgtgccctagggaaaatggtcacagttctgcattctctggaagaagcctggttctgaaaatatgtaattggcacctggaacatacacatgatcagaaactattagaaatggct

SEQ ID NO: 488503 - DNA, 120 bp, Artificial Sequence
  ENSG00000162636_71 (sequence is synthesized)
ttgacactgccttttgtacatttactttgaatatgaatactataatcactttcttaagaacttttactctcagtgctacgtcccatgctgtgttgatttaagccacagacattgcccaaa

SEQ ID NO: 488504 - DNA, 120 bp, Artificial Sequence
  ENSG00000162636_72 (sequence is synthesized)
ttatagcctagcactaacaacactaacattaaagtaatagagtactctttagcttgctgttgtgatggatttttaaggaagcagtatttccttagaaaccacattaaaacctaccaattt

SEQ ID NO: 488505 - DNA, 120 bp, Artificial Sequence
  ENSG00000162636_73 (sequence is synthesized)
tgtgaacatttataagaatacatctgagtcatttttgttagagaaatactgaacactaaaactgtagcagttttaagatagagtgctgttaaatgttttgaacaacaggagtttattgca

SEQ ID NO: 488506 - DNA, 120 bp, Artificial Sequence
  ENSG00000162636_74 (sequence is synthesized)
tagactgaactaataaaggactgaaataattttttaatgttatgaaaaatataattcttcagcgaactaaggtatttaaatactttgtatatcttgcaatacagttacttccattgcact

SEQ ID NO: 488507 - DNA, 120 bp, Artificial Sequence
  ENSG00000162636_75 (sequence is synthesized)
gacttaaaaggatgtccctcattttgtaacttattgttttgataatgaacttggcagagtttataaagtctgcagagtagaatacaaattgaccattaactttttggcaataagaatgac

SEQ ID NO: 488508 - DNA, 120 bp, Artificial Sequence
  ENSG00000162636_76 (sequence is synthesized)
atcatgttatgacatattacagatctttcagcaaagagtgcctctgttccagacgaacttggtgcctgtggacattctagaacatcaagctatgcaagtcagcagtcaaaagtatcaggt

SEQ ID NO: 488509 - DNA, 120 bp, Artificial Sequence
  ENSG00000162636_77 (sequence is synthesized)
agaggctaacagtgaagttgaattccttattgttccaaagggacttgaaactgctgtggtgtgggggaacgatgtcagattgcagagtgtttgatatgagtattatatccaaggtgattt

SEQ ID NO: 488510 - DNA, 120 bp, Artificial Sequence
  ENSG00000162639_0 (sequence is synthesized)
gtttttaggcctttgccacgcctcgggagcgccacgaactcaacagccgcccaagccgccttccggctcgcggtctgcggacgcgctcggagttgggggccttcgccaacagctgccgta

SEQ ID NO: 488511 - DNA, 120 bp, Artificial Sequence
  ENSG00000162639_1 (sequence is synthesized)
ccgtgccgcgtcgcagccgcacgctagcggggtcaacggcgcggcaggcgcaggggtcctcgccaaggttcggaagaggaccttgaaaatggcttctgggcatgcgccacagcggccgtt

SEQ ID NO: 488512 - DNA, 120 bp, Artificial Sequence
  ENSG00000162639_2 (sequence is synthesized)
acgagacgcaaaaccgacgccttggaactgagagcctagagggacggagctcggcgcaccatgaggctcccggggcccaaggccgaccgtgagagcgcacgagctgagtcagtgctgatt

SEQ ID NO: 488513 - DNA, 120 bp, Artificial Sequence
  ENSG00000162639_3 (sequence is synthesized)
ctctcaaatagagcttgaaggataaatcttcatttttgtttcaacaaaacttcgaaacaaaatggaagaaaataatctacagtgcagtagtgtggttgacggtaattttgaagaagttcc

SEQ ID NO: 488514 - DNA, 120 bp, Artificial Sequence
  ENSG00000162639_4 (sequence is synthesized)
cagggagacggcaattcagtttaaacctccactatacagacagcggtaccagttcgttaaaaatttagtggatcaacatgagcctaagaaggttgcagacctgggatgtggtgatacttc

SEQ ID NO: 488515 - DNA, 120 bp, Artificial Sequence
  ENSG00000162639_5 (sequence is synthesized)
actcttaaggctgctaaaagtcaatccatgcattgaattgcttgttggagtagatattaatgaggataaattacgatggagaggggattcgttagctcctttcctgggggattttctgaa

SEQ ID NO: 488516 - DNA, 120 bp, Artificial Sequence
  ENSG00000162639_6 (sequence is synthesized)
acctcgggatctgaatttgaccatcacattgtatcatggctccgttgtggagagagactctcgtttgcttggatttgacttgataacgtgtattgaattaatagaacatttggattcagg

SEQ ID NO: 488517 - DNA, 120 bp, Artificial Sequence
  ENSG00000162639_7 (sequence is synthesized)
ctgaattcaatcccctgtttccatcagtgaccttaagagattcagatcataaatttgagtggaccagaatggagtttcagacctgggctttatatgtggcaaatcgctatgattactctg

SEQ ID NO: 488518 - DNA, 120 bp, Artificial Sequence
  ENSG00000162639_8 (sequence is synthesized)
tggagtttactggtgtcggggaaccaccagctggagctgagaatgttggatactgtacccagataggaatcttccggaaaaatggaggaaaggcaacagaatcatgtctttcagagcagc

SEQ ID NO: 488519 - DNA, 120 bp, Artificial Sequence
  ENSG00000162639_9 (sequence is synthesized)
atgatcagcatgtttataaagctgtttttaccacctcatacccaagcttacagcaggaaaggttctttaaacttgtgttggttaatgaggtgtcccaacaagtggaaagcttaagagtga

SEQ ID NO: 488520 - DNA, 120 bp, Artificial Sequence
  ENSG00000162639_10 (sequence is synthesized)
gccacctgccaaggcggaaagaacaggctggggaacggggtgataagcccaaagacattggtggctcaaaggcccctgtcccatgctttggaccagtcttcacagaggttgagaaggcca

SEQ ID NO: 488521 - DNA, 120 bp, Artificial Sequence
  ENSG00000162639_11 (sequence is synthesized)
agatagagaactctcccacacccttctgtgttggagataaatttttcgtacctctgcagagactccttgcgtatcccaagttgaaccgcttatgtgctaatgaagagatgatgagatcag

SEQ ID NO: 488522 - DNA, 120 bp, Artificial Sequence
  ENSG00000162639_12 (sequence is synthesized)
tcattgctgactcaattcctctgagcagtgatggttctgcagtggtggctgacctgcgtaattattttgatgaacagtttgagttttgaaccatgtttatttcctgaaatttcagggtct

SEQ ID NO: 488523 - DNA, 120 bp, Artificial Sequence
  ENSG00000162639_13 (sequence is synthesized)
cagcgatagttgtgctcacttagaatttagttttttttgtgtaatcctaattcaagtaatgtttttaaagtttcactgcaaaagtctatgttccaagccattggacagacctgcttgaga

SEQ ID NO: 488524 - DNA, 120 bp, Artificial Sequence
  ENSG00000162639_14 (sequence is synthesized)
tatggccagactgcagtgagccctgagaaagatatgagggtttaaaacgggtgctttcctttgattttggacttttttgttttctcaagaataaagaagttggatgtggtaatatgttaa

SEQ ID NO: 488525 - DNA, 120 bp, Artificial Sequence
  ENSG00000162639_15 (sequence is synthesized)
agcgtcacgcagcgaggccgtgcgtgcgcgggcgtcagggcggcgctgagttgaggacgctggcggctccgcgacgagctttgttttttcggttgggcatgctgcttaccgcaggatgat

SEQ ID NO: 488526 - DNA, 74 bp, Artificial Sequence
  ENSG00000162639_16 (sequence is synthesized)
ataattgttcttaggtcatataagcattattacatattcaaagaagggagaaatcgatacacagatggaaattg

SEQ ID NO: 488527 - DNA, 120 bp, Artificial Sequence
  ENSG00000162639_17 (sequence is synthesized)
tattcaaagaagggagaaatcgatacacagatggaaattgtttttgataaatcaattagaaaaataggtgcaagtgaagctagattttattatgtctttctcattaaccattttagaata

SEQ ID NO: 488528 - DNA, 120 bp, Artificial Sequence
  ENSG00000162639_18 (sequence is synthesized)
gctggcggctccgcgacgagctttgttttttcggttgggcatgctgcttaccgcaggatgatggaagcgacggcccgtacaaagacagaagcgttggtttcatgcagtagtgtggttgac

SEQ ID NO: 488529 - DNA, 120 bp, Artificial Sequence
  ENSG00000162641_0 (sequence is synthesized)
acctgacttcagaaaatcaatttggattctacagaaaggttctgttggattctgagtggaacctctttggatatgcctttggatttcaagattgagccaagtgttgacatgggaagatgc

SEQ ID NO: 488530 - DNA, 120 bp, Artificial Sequence
  ENSG00000162641_1 (sequence is synthesized)
tccagttcctccagttatctcaaagaagctcattaccttgctaaggaatagcacacagtgaagacagtcagtgagaaccagagctattgttacaactgacagcagccagctcaggaggca

SEQ ID NO: 488531 - DNA, 120 bp, Artificial Sequence
  ENSG00000162641_2 (sequence is synthesized)
gaggacgagagcgatcgggctgcacacacatggatgaggctgatttttcagaacacacgacttataagcaggaggatttgccttatgatggggacctctctcagattaagataggcaatg

SEQ ID NO: 488532 - DNA, 120 bp, Artificial Sequence
  ENSG00000162641_3 (sequence is synthesized)
attacagttttacctcaaaaaaggatggccttgaagtcttaaatcaaattattttcatagcagatgaccctcaagagaaggctatgcatagtgagacttgtggaaatacagctgtgacca

SEQ ID NO: 488533 - DNA, 120 bp, Artificial Sequence
  ENSG00000162641_4 (sequence is synthesized)
tacccctgggtaaaattactgaaaatgctgccaacaaaaaagacgagaaagagaaacaatgcactgcagctcttcatattccagcaaatgaaggagacgcttctaagtcaagcatttctg

SEQ ID NO: 488534 - DNA, 120 bp, Artificial Sequence
  ENSG00000162641_5 (sequence is synthesized)
atattttacttcatcatctttccaaagagccattcttaagaggtcaaggcattgattgtgaaaccctcccagagatctcaaatgccgacagttttgaagaggaagctattattaaaagta

SEQ ID NO: 488535 - DNA, 120 bp, Artificial Sequence
  ENSG00000162641_6 (sequence is synthesized)
ttatttcatgttataataagaattcttggccaaaagaacaaaccccagaactcactgaccaactcaacccgaaaagggatggtgaaaacagcaataagcctggttctgccaccacgacag

SEQ ID NO: 488536 - DNA, 120 bp, Artificial Sequence
  ENSG00000162641_7 (sequence is synthesized)
aggaaaatacctctgatttagaagggccagtggctgctggagatagcagccatcaagaaaatgtgaatgttctaactaaaaccaagggtccaggtgataaacaaaaaagttatcaagggc

SEQ ID NO: 488537 - DNA, 120 bp, Artificial Sequence
  ENSG00000162641_8 (sequence is synthesized)
agtcaccccagaaacagcagactgaaaaagcaaattcaggcaacacgttcaaatacggccaaggtcaagttcattaccagctccctgatttctctaagattgctcccaaagtgaaaattc

SEQ ID NO: 488538 - DNA, 120 bp, Artificial Sequence
  ENSG00000162641_9 (sequence is synthesized)
ctaaaaataagataattaataaaccacttgcaatagctaaacaagccagcttttcttccaagtcgagagataaacccactcttgtgcaagatagtctagaaaccacgcctgagtcaaact

SEQ ID NO: 488539 - DNA, 120 bp, Artificial Sequence
  ENSG00000162641_10 (sequence is synthesized)
gtgttgaaaaacaacatcaagagcagaaagggaaaatcactgaaccttcacaacaaatccagatggagcccatagtacatatccaccaagaacttctcacaggaatagaatctgaggcaa

SEQ ID NO: 488540 - DNA, 120 bp, Artificial Sequence
  ENSG00000162641_11 (sequence is synthesized)
gtctctctaagttgtcaccaacctctcagaaaggcacttcctcaagttcttcttacatatttcaaaagatatcccaagggaaacagatgtgtcagaagttgaaagaacagactgatcaac

SEQ ID NO: 488541 - DNA, 120 bp, Artificial Sequence
  ENSG00000162641_12 (sequence is synthesized)
taccatttgcaagacaagaagctggtcctggagaaactgcagggacaccttgaactgctggagcagaactttctggccaccaaggacaagcatctgactttgcagcagcaagtccacaag

SEQ ID NO: 488542 - DNA, 120 bp, Artificial Sequence
  ENSG00000162641_13 (sequence is synthesized)
cacgaatcaacaatcgttggtgactttgatccagaaagaaaagtggaaggtgaaatcttcaaattggagatgctgcttgaagatgttaaagagaaaatggatgaaagcaaatatacttca

SEQ ID NO: 488543 - DNA, 120 bp, Artificial Sequence
  ENSG00000162641_14 (sequence is synthesized)
gctccttcccttcctgtgagttctccagttaccctggatgacttggcctccaccttctcttcactctcaaatgagattcccaaggagcaccccggccacccttctgggcctcgaggctca

SEQ ID NO: 488544 - DNA, 120 bp, Artificial Sequence
  ENSG00000162641_15 (sequence is synthesized)
ggtgggagtgaggtaacagggacaccccaaggagggccgcaggaggcccccaacgaggagctctgtgagctggccccgcagacttacctaaacggtcattatggagatgcagctgcccag

SEQ ID NO: 488545 - DNA, 120 bp, Artificial Sequence
  ENSG00000162641_16 (sequence is synthesized)
aacaagccagaccaagtggccatgaggctgtcttctaactctggggaggatcccaacggcactccaagaaggcaggattgtgcagagatgacggcacccagtccgagctgtgccttctgt

SEQ ID NO: 488546 - DNA, 120 bp, Artificial Sequence
  ENSG00000162641_17 (sequence is synthesized)
cgcaggctccttgaatggaagcaaaacgtggagaaaaagggccacggaaggatcaactgtggaagattttcaattgtccttcatgaaaaggcaccacactcagattcaactcccaattct

SEQ ID NO: 488547 - DNA, 120 bp, Artificial Sequence
  ENSG00000162641_18 (sequence is synthesized)
gatacaggacacagcttctgttctgattctggcactgaaatgcagagtaacaaatgtcaggactgtggcactaagattcctacctcccgaagagcctgcaggaaagaaccaactaaagaa

SEQ ID NO: 488548 - DNA, 120 bp, Artificial Sequence
  ENSG00000162641_19 (sequence is synthesized)
tttcattatagatacaacactccaggacagaattactcaaatcatagcaaaagaggtgcctttgtccagccccattctttagatgaaagtaaaaactcttcaccctcttttttaaaaccc

SEQ ID NO: 488549 - DNA, 120 bp, Artificial Sequence
  ENSG00000162641_20 (sequence is synthesized)
aaacggatctgttctcagagagtgaattcaaaatcctttaaaggtgaacatgagcccacaccaggaaaaaaaaaacttcaggctttcatgacctacagctcagaccctgcaacaccctca

SEQ ID NO: 488550 - DNA, 120 bp, Artificial Sequence
  ENSG00000162641_21 (sequence is synthesized)
ccccatttctactcctgcaggatttctggaagcaaatccttatgtgactttgatagcactgaagaaataaaatctgagattttaaactcggctttggatcatgccctaaggacagcaacc

SEQ ID NO: 488551 - DNA, 120 bp, Artificial Sequence
  ENSG00000162641_22 (sequence is synthesized)
attttgaaagaaactacagatcaaatgattaaaacgattgcagaagaccttgctaaagcacagaggtggaggaatcgactgaaatactagttcaacgctaggctaccaaggattcaaaag

SEQ ID NO: 488552 - DNA, 120 bp, Artificial Sequence
  ENSG00000162641_23 (sequence is synthesized)
aaaaaaatgcaaagaaaacttgatcttcccccaaaatgtattttacttactacacaatttaggaagatgactttctagagaaaacacagaaaccataagaaatgggtaacacaaagtact

SEQ ID NO: 488553 - DNA, 120 bp, Artificial Sequence
  ENSG00000162641_24 (sequence is synthesized)
taaaggaaaaagaaaaaagaaaggacttctgattcttaaaatcaaaagcaaccaacaagtatttattttaaaataaatctatgttcttcttaactcataataaaagaaatcaaaacaaaa

SEQ ID NO: 488554 - DNA, 120 bp, Artificial Sequence
  ENSG00000162641_25 (sequence is synthesized)
ctggaaaatatgaaatcgcagtgaccaaggactttgaaagttattaagggctacaccagtgcaagttggtagcaacccataaatgtttgctgaacaaataaatgacttactggataatca

SEQ ID NO: 488555 - DNA, 120 bp, Artificial Sequence
  ENSG00000162641_26 (sequence is synthesized)
agagcttcagaaaatgctctgctaaagacaattttgtgctcagaactaagctaaagacacacagcctcagcagtcgcaagattttaaactcggctttggatcatgccctaaggacagcaa

SEQ ID NO: 488556 - DNA, 120 bp, Artificial Sequence
  ENSG00000162641_27 (sequence is synthesized)
agaagaagcaggcacgccatgattttgaagctccgtttttgttctgttattcaactgcagtcaacttccaactgttgaaaaaaagatgatttagaattaaagggttgcttgtctgtgtcg

SEQ ID NO: 488557 - DNA, 120 bp, Artificial Sequence
  ENSG00000162641_28 (sequence is synthesized)
gaataaaaaatgtgtttagagtcttgcctctttctgtactagaggaaaaggagatcaattccgggagaaaacacccgcatggtcatggcaacaaccattttctgaagcccagctgcggtc

SEQ ID NO: 488558 - DNA, 120 bp, Artificial Sequence
  ENSG00000162641_29 (sequence is synthesized)
agccacatgggagtatgagagctaggagggcagcgggtgcacgaatccacccacacccaaaccacacagagccattacctaccacagagctgacgtgaacaggagtgtgcttgagggtgg

SEQ ID NO: 488559 - DNA, 120 bp, Artificial Sequence
  ENSG00000162641_30 (sequence is synthesized)
acactggccactgcttccatctgggaagccctggcctctccattttgctgcccaggtcttgtgcactcacctgacacttccaaatccagccctacatctggatggcaagaggctgagctg

SEQ ID NO: 488560 - DNA, 120 bp, Artificial Sequence
  ENSG00000162641_31 (sequence is synthesized)
gaacaattcgatgacgaggcccaggaagcacgctgaaaccctgggcggcggcaagctgtgcgacctcttctgcggccggcctgggcaggtgtcttcctcgagaggcaggcaggggatccc

SEQ ID NO: 488561 - DNA, 120 bp, Artificial Sequence
  ENSG00000162641_32 (sequence is synthesized)
cactctcaaatgaggtaatacagcaatgtacagtctaattttgtgccaggaaaaatggtgtttttgcatttatagactcctaattcatggattcactgaattccatttttaatatctcat

SEQ ID NO: 488562 - DNA, 120 bp, Artificial Sequence
  ENSG00000162641_33 (sequence is synthesized)
gaaaatttaactttccaaagtcccatgaattatattattttaaatggaaccagcttttaaagattagaagctatttcaagtgttaatttttgaaacatctttatagtttaggatgtaaca

SEQ ID NO: 488563 - DNA, 120 bp, Artificial Sequence
  ENSG00000162641_34 (sequence is synthesized)
atgctgtttaaatccattaaaccaccgaagagctatttcttccaaattaataagaaaatttttgtagatcatgcctggaagaaataattttttttcttcatagttttgtactcaccaggc

SEQ ID NO: 488564 - DNA, 90 bp, Artificial Sequence
  ENSG00000162641_35 (sequence is synthesized)
gaaataattttttttcttcatagttttgtactcaccaggctggagtgtggtagcacgatctcagctcactgcaacctttgtctcccgggc

SEQ ID NO: 488565 - DNA, 120 bp, Artificial Sequence
  ENSG00000162641_36 (sequence is synthesized)
cacctgaaaataaagaatagcacactcagtgaaataattatttcccatgaatccacttctgcattttccttctctcaagttaaattcttttggatttctacttatgcaagattgggaatt

SEQ ID NO: 488566 - DNA, 120 bp, Artificial Sequence
  ENSG00000162641_37 (sequence is synthesized)
caaattaaccaccactgtctttctatactttttgcctttgtagcctcaactatcagaacattcagactaaaatcaaaattctgagaaacagaatcatttaaataaataccttaaattgac

SEQ ID NO: 488567 - DNA, 120 bp, Artificial Sequence
  ENSG00000162641_38 (sequence is synthesized)
agctgcttgctgggctgtgcgtgtgcagccgcggcgtgagtcacatcctctatcacatctccatctgtgtgctttgtggcgcaggaggatcccaacggcactccaagaaggcaggattgt

SEQ ID NO: 488568 - DNA, 120 bp, Artificial Sequence
  ENSG00000162642_0 (sequence is synthesized)
ggagtgctgggttgtcgctcgcagccgtcatggcagcggaggagaaggaccctctgagctattttgcggcatacgggagcagcagctcaggctcctcggacgaggaggataacatcgagc

SEQ ID NO: 488569 - DNA, 120 bp, Artificial Sequence
  ENSG00000162642_1 (sequence is synthesized)
cggaggagacgagtcgcagaaccccggatccggcgaagtcggcgggcggctgtaggaacaaggcggagaagcggctcccgggacctgacgagctgtttaggagcgtgactcgcccggcct

SEQ ID NO: 488570 - DNA, 120 bp, Artificial Sequence
  ENSG00000162642_2 (sequence is synthesized)
ttctctacaatccgctcaacaaacagatagactgggagaggcacgtcgtcaaggcgcctgaggagcctccaaaggaattcaaaatatggaagtcaaattatgtaccacctcctgagacct

SEQ ID NO: 488571 - DNA, 120 bp, Artificial Sequence
  ENSG00000162642_3 (sequence is synthesized)
acaccactgagaagaagcctccgcctccagagcttgacatggcaataaaatggtctaacatatatgaggacaatggtgatgatgctccacagaatgctaagaaagctaggcttctaccag

SEQ ID NO: 488572 - DNA, 120 bp, Artificial Sequence
  ENSG00000162642_4 (sequence is synthesized)
aaggggaggagacgttggaatcagatgatgaaaaagatgagcatacttctaaaaagcgcaaagtagagccaggagaaccagcaaagaagaaaaagtagaaacaaatgaccagaatttctg

SEQ ID NO: 488573 - DNA, 120 bp, Artificial Sequence
  ENSG00000162642_5 (sequence is synthesized)
tactgctaaacttgttgaaatgtttctttggacagattaagttgatattgtgggttattatgccacatctccatgaaaatgcatacgttaatgaactaataagtattgcctcaagaactt

SEQ ID NO: 488574 - DNA, 120 bp, Artificial Sequence
  ENSG00000162642_6 (sequence is synthesized)
tccactatagaattctttttttatttaaaacatgtatgtatttaaaactcaactggtgacttgtgattgtgaaattgataacacttggatgcattcttgctctcacagaattggtgacat

SEQ ID NO: 488575 - DNA, 120 bp, Artificial Sequence
  ENSG00000162642_7 (sequence is synthesized)
gctttgagagttttgtcacatgttgacatgccaatgttcttataaaccttttataaaggaatatatttttaaagtaaatatattgtaatgtactgtgaacttgtagggtgcttttcaaca

SEQ ID NO: 488576 - DNA, 120 bp, Artificial Sequence
  ENSG00000162642_8 (sequence is synthesized)
gtctttgtacagtgtaaatagatcatggaaataaaattacttattcaatattactattactgtataacattaacatttgaatgtttgtctgtgacaagtaccctatttgtcgtgtgacat

SEQ ID NO: 488577 - DNA, 120 bp, Artificial Sequence
  ENSG00000162642_9 (sequence is synthesized)
tttaagttgtaataagaagtattaccatttaaagagtgcctcctgtgttccaggtgctttgtgcatatattttctctgatccttaaacaacctagcgcaaggtattattagtattctcat

SEQ ID NO: 488578 - DNA, 120 bp, Artificial Sequence
  ENSG00000162642_10 (sequence is synthesized)
tttataataaagagtgcttgagtagcttgtctgatgttacacagctagtgagtggttcatttggaatttaacttgggacacttgaacctcaaaatcatcacattaaaccacctgtccacc

SEQ ID NO: 488579 - DNA, 120 bp, Artificial Sequence
  ENSG00000162642_11 (sequence is synthesized)
agtcaaaatttagtcatctttcaggaatgacatcaattgtcatctcttccaggtacttttttctgttgtacctggagatccgttagtagagatcttttcctctcctgattggatgactgt

SEQ ID NO: 488580 - DNA, 120 bp, Artificial Sequence
  ENSG00000162642_12 (sequence is synthesized)
acttgtcatctgtgctttatggttattcattaatttctttattaaattgtaagtttacaggacattcagttaaatttgaatttcagataaataatgttttagtatatttaatattcagga

SEQ ID NO: 488581 - DNA, 120 bp, Artificial Sequence
  ENSG00000162642_13 (sequence is synthesized)
gtgtttatctgaaattcaaatttaactgaacatcttttatctggtaaccctacttctacatgttttctctacccagcttctattttaatgctttgcgtatagtaataataaaatgaacaa

SEQ ID NO: 488582 - DNA, 120 bp, Artificial Sequence
  ENSG00000162642_14 (sequence is synthesized)
gaagtagttgggaaggtgtgatcgttgagttccaaaatgcagttatttgtagcattttgaacaataaaaaggttacactctgcatcaatctttccatgaatctgaagcccttaagagata

SEQ ID NO: 488583 - DNA, 87 bp, Artificial Sequence
  ENSG00000162642_15 (sequence is synthesized)
tgcatcaatctttccatgaatctgaagcccttaagagataagaattacagaacagtgcacattcagtgtataagaacaagacagcca

SEQ ID NO: 488584 - DNA, 120 bp, Artificial Sequence
  ENSG00000162642_16 (sequence is synthesized)
tggagaccagcctagacaacatgataagacctcatctttacaaaaaataatttagaaagaaaaagacataatctaagtatttttttttaaatctgtttttccccattgtggaagataaaa

SEQ ID NO: 488585 - DNA, 120 bp, Artificial Sequence
  ENSG00000162642_17 (sequence is synthesized)
tttgaacaattacgcgagatttgtttacctaggcatgtgtatcaagtagattaaaattcataaaagtcattaagagtgattgcatcagccatggtgctttgtggaatgaaggtccataac

SEQ ID NO: 488586 - DNA, 120 bp, Artificial Sequence
  ENSG00000162642_18 (sequence is synthesized)
agcatgatggcttccagtatatcatcgagtttagaaaaaccaattctatagctgcccatcctccaggtttgcaaatatatgaatcccaaaattgaagtaattgctaaagcaagaatatgt

SEQ ID NO: 488587 - DNA, 120 bp, Artificial Sequence
  ENSG00000162642_19 (sequence is synthesized)
ttttttaagattgtagtctttgtaatgaatttggaaatctgtggtatcatatactaaggagtggcatcaagtgacaaagcaagaccatagtatgtacatgacaccaaacacaaccaaatc

SEQ ID NO: 488588 - DNA, 120 bp, Artificial Sequence
  ENSG00000162642_20 (sequence is synthesized)
aagttatatttgtgaagttgtgattcccaagctctggagaaatctaaaatttggatgcatgtgttggtggagcaaatatctcagaagttactgaaatattgcaaggttcttaagttagca

SEQ ID NO: 488589 - DNA, 120 bp, Artificial Sequence
  ENSG00000162642_21 (sequence is synthesized)
tgaaagcaaacttttttctctctttcctgggagatgtgcagagtatgttgtatgaggaggaagacaggacttagggaagaggctaaatattttggagcaagtctgactcagccatttgta

SEQ ID NO: 488590 - DNA, 120 bp, Artificial Sequence
  ENSG00000162642_22 (sequence is synthesized)
tctcctggttggaaaacggactgtcatatcactctacattcatcatcacattagagaatagattattttcccctttagagatgtcctgggaacgtgtttgcacaagtgtccatgtgggta

SEQ ID NO: 488591 - DNA, 120 bp, Artificial Sequence
  ENSG00000162642_23 (sequence is synthesized)
ctgaggtgaagtttggttgagctagtggaaacctagtggggaaaagtcttaaaaatccatatacataagaaaaatcatctgtccaagtatctttcattttagagaatcgagtcacttgat

SEQ ID NO: 488592 - DNA, 120 bp, Artificial Sequence
  ENSG00000162642_24 (sequence is synthesized)
atctttcattttagagaatcgagtcacttgatacttctgattgtttcctgcactttaagttaagcctgggcaacatgttgagatcctgatctggtttggctgtgtccccaaccaaatctc

SEQ ID NO: 488593 - DNA, 120 bp, Artificial Sequence
  ENSG00000162642_25 (sequence is synthesized)
tcatgggtggtgactgaattatgggggtgggtctttccggtgctgttcttatgatagtgaatgagtcttacgagatctgatggttttaaaaaccatcagtgcagggagttgccctgcaca

SEQ ID NO: 488594 - DNA, 90 bp, Artificial Sequence
  ENSG00000162642_26 (sequence is synthesized)
tggttttaaaaaccatcagtgcagggagttgccctgcacaagctctctgcctgctgccctccacataagatgtgtcttgctccttcagcc

SEQ ID NO: 488595 - DNA, 120 bp, Artificial Sequence
  ENSG00000162642_27 (sequence is synthesized)
gctgcctccaagacagtgtctgctgcagcctcctgaaggggtcagccttggcgtagtatctctgagactggattcttctttgcctccaaaggaattcaaaatatggaagtcaaattatgt

SEQ ID NO: 488596 - DNA, 120 bp, Artificial Sequence
  ENSG00000162643_0 (sequence is synthesized)
agatgcgtcctggcaacagtcggcagagttgctgcggtttgtgcccttgcgatttctttttctgagagaggagagtcaaactcccacctccagctctcgaaggagcttttcctgagggca

SEQ ID NO: 488597 - DNA, 120 bp, Artificial Sequence
  ENSG00000162643_1 (sequence is synthesized)
ctgcaaagaggctccttttctttcagatcagcagtatcagcccaagtcagaaccatggctccaaaacaaaagaaaaagacatcacgtggcaaaaaaagactaaaaccagtattagctgct

SEQ ID NO: 488598 - DNA, 120 bp, Artificial Sequence
  ENSG00000162643_2 (sequence is synthesized)
agtgaagacatggaaccagtaaatatggagagcatgggtcatccagaaatttatcctttagtattaaccaccaagacccaagaaatatttaactgccgaatagatgaagatgtcacagat

SEQ ID NO: 488599 - DNA, 120 bp, Artificial Sequence
  ENSG00000162643_3 (sequence is synthesized)
gaacaaccttataagcttatcaataaagaagacatttttgaggacctgcgcaacagagctgcagtatctgatttccacccagtcaaaaaaattgtccaggaatatcctggaaatgagctt

SEQ ID NO: 488600 - DNA, 120 bp, Artificial Sequence
  ENSG00000162643_4 (sequence is synthesized)
ctgcttgtttatgacaaagacttcaaatatggacttaacttttatcttattgcaactgaagagggcaaagaaaactatttaaatcccccagaagtaccagaagaacaagaagaatataaa

SEQ ID NO: 488601 - DNA, 120 bp, Artificial Sequence
  ENSG00000162643_5 (sequence is synthesized)
gaacatattcctgaagatgtgtatatttataaaccacctgtctctaaaccatgggtttctttgggcagtgaaaaagaaattgaggaagaatcagttacggaatctacaaagcagattaca

SEQ ID NO: 488602 - DNA, 120 bp, Artificial Sequence
  ENSG00000162643_6 (sequence is synthesized)
tatatgatttctcgaaaacgaagtgaatttggtgcaccaattaagttcagtgaccagaatgcttccagtgtaaaagatgcctatattgaatgtacagcctacccagataaaaattttacc

SEQ ID NO: 488603 - DNA, 120 bp, Artificial Sequence
  ENSG00000162643_7 (sequence is synthesized)
cttaaacaacttgaaaaagatgttggcatgcaagtaatcccccaaataaaggacataagcactcagacaaaatggacatatcctaaaaatgctactacgcaatattatccaagagaattc

SEQ ID NO: 488604 - DNA, 120 bp, Artificial Sequence
  ENSG00000162643_8 (sequence is synthesized)
tcagaagaggaaaaagagacactcaaacaatcaaagcctttggttgattttcttaacaatgcatccataagtgttgaaatagccctgcagcaaaatgaaatcatgaacacatttattgat

SEQ ID NO: 488605 - DNA, 120 bp, Artificial Sequence
  ENSG00000162643_9 (sequence is synthesized)
gactggaaatacctcgcagaagaagaaggcacctttggggacaagaccgatacccacctgaaagagtaccagtcctttaccgaccttcatagcccaacggagaaaatgattacctgtgtc

SEQ ID NO: 488606 - DNA, 120 bp, Artificial Sequence
  ENSG00000162643_10 (sequence is synthesized)
tcatggcatccaactatctatgggctaatagctgtgtcggtagccgtgcgactttcttttgaagacagagttcacttttctggtaaattattgctgcagccatcactgattcttttctgg

SEQ ID NO: 488607 - DNA, 120 bp, Artificial Sequence
  ENSG00000162643_11 (sequence is synthesized)
agcttctctgatcctatacatcctcagttaatgctggagagcccagatgacatcttctgcttcaagttctgtccgagtgatcctaatatcattgctggaggctgtatcaatgggcagatt

SEQ ID NO: 488608 - DNA, 120 bp, Artificial Sequence
  ENSG00000162643_12 (sequence is synthesized)
taataaagaagcaatgtatatcagacactgtgcagtctcttcaatagaaaatggacataagaaagtaattacagatatacactggttgtctgacacatttgagattaacagaatgggctc

SEQ ID NO: 488609 - DNA, 120 bp, Artificial Sequence
  ENSG00000162643_13 (sequence is synthesized)
cgtctttgagaatcgaagtggaatatgctgtcaacttgtcacatgttcagcagattgcacaatatgtttttgggatattagaccacagaaacctttaaccccccaaacaacagagaaaaa

SEQ ID NO: 488610 - DNA, 120 bp, Artificial Sequence
  ENSG00000162643_14 (sequence is synthesized)
gaaggaggaaagtattgaaattccttttgatgtaccatctacttttttgcatctggatctctcctggaaacctctcactaaggtaaggctgtccaagggtgaaacaagtttagaccactg

SEQ ID NO: 488611 - DNA, 120 bp, Artificial Sequence
  ENSG00000162643_15 (sequence is synthesized)
tccaaccaagataagcctgaatgaagaccatcttctttgcaaaacacaagacaaaatgttagcacagagcaaaacagagaaggcagaagaaatgaacccgtatcataatctggaaagtgg

SEQ ID NO: 488612 - DNA, 120 bp, Artificial Sequence
  ENSG00000162643_16 (sequence is synthesized)
gatggccaatcttctcaagccaatagatgacttctgcacaaagttctttgtgggaacagaggaaggcgaagtgatatacacagattggaaaatggaaaaagaccctgaaactggccgact

SEQ ID NO: 488613 - DNA, 120 bp, Artificial Sequence
  ENSG00000162643_17 (sequence is synthesized)
tatgtcaaagaagccagtgagccaccacaccattcacgacggaactgtccacactattcagagatcacctttctacaacgacattattctcacggttggaggttggaacgtggccatatg

SEQ ID NO: 488614 - DNA, 120 bp, Artificial Sequence
  ENSG00000162643_18 (sequence is synthesized)
gaaagaaggtgttatgactggaccgctccttcagtcatgctgtgcaccaaaaaggtacacctcaggccactggtccctgactcggcccggagttttctacatcggccgagaagatggata

SEQ ID NO: 488615 - DNA, 120 bp, Artificial Sequence
  ENSG00000162643_19 (sequence is synthesized)
cattgatatctgggaccttctggagaaaacccatgaaccagcccagtctcaaaacatttgcataactatgatcacctacatcaaaccctggatcttttcttctaaacagcaatttatagc

SEQ ID NO: 488616 - DNA, 120 bp, Artificial Sequence
  ENSG00000162643_20 (sequence is synthesized)
cacagctgattattatggaacactgcatatattagaaattccttggacattaagtcgcccttccaccaatgagatggcaagtgtcaaccactattttgaaagagaagtcaagcatctgga

SEQ ID NO: 488617 - DNA, 120 bp, Artificial Sequence
  ENSG00000162643_21 (sequence is synthesized)
atacgtagaacagcgcaaaaaaattcgtgagcaagaaaagaaagaaatggaactagaaatggcaaagaaaaaagttaaaacatatcagaagtcaaaagaacaaatgcaggctgaattaaa

SEQ ID NO: 488618 - DNA, 120 bp, Artificial Sequence
  ENSG00000162643_22 (sequence is synthesized)
aatggactatgagagttatctggaactggaaaagactgttcttatcaaccttggcctaatcaaagtcacagagaaggggtcatacatggaggtgatgtaaaaaagcttcctgaaggggtg

SEQ ID NO: 488619 - DNA, 120 bp, Artificial Sequence
  ENSG00000162643_23 (sequence is synthesized)
ttttggggacttcttccctctatttatttttatgtcaggtgaactggcatgctgaacatatatatatataggctcatttatagacttttatttccctgctattaaaacttttgaatttta

SEQ ID NO: 488620 - DNA, 120 bp, Artificial Sequence
  ENSG00000162643_24 (sequence is synthesized)
tggagcccggggtttggggacccctgcagacggagaaatagtttcaaaagggagatctgaggatctcaaacattaatgtgcatatgagtcaccagagtttttattgaagcagactgattc

SEQ ID NO: 488621 - DNA, 120 bp, Artificial Sequence
  ENSG00000162643_25 (sequence is synthesized)
tgtcctcccaacaaccctgtaggatacacacctgtcattatctctgtttcacaacaaaaggacccaagctcaactcagggaagtgactcgcccaggtcacccagatggcataaggcagag

SEQ ID NO: 488622 - DNA, 120 bp, Artificial Sequence
  ENSG00000162643_26 (sequence is synthesized)
tctgggttgggcttgggcctgttgctctcccaaggctaaatttcttcctcctaacactgcctttctgattactagacaagagaggaaatgtgcctcctttaaagagctcagcagccaagg

SEQ ID NO: 488623 - DNA, 120 bp, Artificial Sequence
  ENSG00000162643_27 (sequence is synthesized)
gaggtaggtagggatgtgcaaagatggaaacatggaaagagagaggtatttgtcctctttcttcctcctttcaccctacactggcccttttctcacaaaaaagaaacaaaacaagatttt

SEQ ID NO: 488624 - DNA, 120 bp, Artificial Sequence
  ENSG00000162643_28 (sequence is synthesized)
cttttcttccaaaatcttctgagtcccctgtatattttatactaacagtacatgtcagtttggaccagccagatttcaagtgctaaataagtagcatgtaactagtggcaaccacattag

SEQ ID NO: 488625 - DNA, 120 bp, Artificial Sequence
  ENSG00000162645_0 (sequence is synthesized)
atattagtgcatttctttgcagaggttacctctttttcttgtctctcgtcaggtctctgacattgacagagcctggacgttggaggaagccccaggacgttggaggggtaaagtaaaagt

SEQ ID NO: 488626 - DNA, 120 bp, Artificial Sequence
  ENSG00000162645_1 (sequence is synthesized)
ccacagttaccgtgagagaaaaaagagggagaaagcagtgcagccaaactcggaagaaaagagaggaggaaaaggactcgactttcacattggaacaaccttctttccagtgctaaagga

SEQ ID NO: 488627 - DNA, 120 bp, Artificial Sequence
  ENSG00000162645_2 (sequence is synthesized)
tctctgatctggggaacaacaccctggacatggctccagagatcaacttgccgggcccaatgagcctcattgataacactaaagggcagctggtggtgaatccagaagctctgaagatcc

SEQ ID NO: 488628 - DNA, 120 bp, Artificial Sequence
  ENSG00000162645_3 (sequence is synthesized)
tatctgcaattacgcagcctgtggtggtggtggcgattgtgggcctctatcgcacaggcaaatcctacctgatgaacaagctggctgggaagaaaaacggcttctctctaggctccacag

SEQ ID NO: 488629 - DNA, 120 bp, Artificial Sequence
  ENSG00000162645_4 (sequence is synthesized)
tgaagtctcacaccaagggaatctggatgtggtgtgtgcctcatcccaagaagccagaacacaccctagttctgctcgacactgagggcctgggagatatagagaagggtgacaatgaga

SEQ ID NO: 488630 - DNA, 120 bp, Artificial Sequence
  ENSG00000162645_5 (sequence is synthesized)
atgactcctggatctttgccttggccatcctcctgagcagcaccttcgtgtacaatagcatgggaaccatcaaccagcaggccatggaccaacttcactatgtgacagagctgacagatc

SEQ ID NO: 488631 - DNA, 120 bp, Artificial Sequence
  ENSG00000162645_6 (sequence is synthesized)
gaatcaaggcaaactcctcacctggtaacaattctgtagacgactcagctgactttgtgagcttttttccagcatttgtgtggactctcagagatttcaccctggaactggaagtagatg

SEQ ID NO: 488632 - DNA, 120 bp, Artificial Sequence
  ENSG00000162645_7 (sequence is synthesized)
gagaacccatcactgctgatgactacttggagctttcgctaaagctaagaaaaggtactgataagaaaagtaaaagctttaatgatcctcggttgtgcatccgaaagttcttccccaaga

SEQ ID NO: 488633 - DNA, 120 bp, Artificial Sequence
  ENSG00000162645_8 (sequence is synthesized)
ggaagtgcttcgtcttcgattggcccgctcctaagaagtaccttgctcacctagagcagctaaaggaggaagagctgaaccctgatttcatagaacaagttgcagaattttgttcctaca

SEQ ID NO: 488634 - DNA, 120 bp, Artificial Sequence
  ENSG00000162645_9 (sequence is synthesized)
tcctcagccattccaatgtcaagactctttcaggtggcattccagtcaatgggcctcgtctagagagcctggtgctgacctacgtcaatgccatcagcagtggggatctaccctgcatgg

SEQ ID NO: 488635 - DNA, 120 bp, Artificial Sequence
  ENSG00000162645_10 (sequence is synthesized)
agaacgcagtcctggccttggcccagatagagaactcagccgcagtggaaaaggctattgcccactatgaacagcagatgggccagaaggtgcagctgcccacggaaaccctccaggagc

SEQ ID NO: 488636 - DNA, 120 bp, Artificial Sequence
  ENSG00000162645_11 (sequence is synthesized)
tgctggacctgcacagggacagtgagagagaggccattgaagtcttcatgaagaactctttcaaggatgtggaccaaatgttccagaggaaattaggggcccagttggaagcaaggcgag

SEQ ID NO: 488637 - DNA, 120 bp, Artificial Sequence
  ENSG00000162645_12 (sequence is synthesized)
atgacttttgtaagcagaattccaaagcatcatcagattgttgcatggctttacttcaggatatatttggccctttagaagaagatgtcaagcagggaacattttctaaaccaggaggtt

SEQ ID NO: 488638 - DNA, 120 bp, Artificial Sequence
  ENSG00000162645_13 (sequence is synthesized)
accgtctctttactcagaagctgcaggagctgaagaataagtactaccaggtgccaaggaaggggatacaggccaaagaggtgctgaaaaaatatttggagtccaaggaggatgtggctg

SEQ ID NO: 488639 - DNA, 120 bp, Artificial Sequence
  ENSG00000162645_14 (sequence is synthesized)
atgcacttctacagactgatcagtcactctcagaaaaggaaaaagcgattgaagtggaacgtataaaggctgaatctgcagaagctgcaaagaaaatgttggaggaaatacaaaagaaga

SEQ ID NO: 488640 - DNA, 120 bp, Artificial Sequence
  ENSG00000162645_15 (sequence is synthesized)
atgaggagatgatggaacagaaagagaagagttatcaggaacatgtgaaacaattgactgagaagatggagagggacagggcccagttaatggcagagcaagagaagaccctcgctctta

SEQ ID NO: 488641 - DNA, 120 bp, Artificial Sequence
  ENSG00000162645_16 (sequence is synthesized)
aacttcaggaacaggaacgccttctcaaggagggattcgagaatgagagcaagagacttcaaaaagacatatgggatatccagatgagaagcaaatcattggagccaatatgtaacatac

SEQ ID NO: 488642 - DNA, 120 bp, Artificial Sequence
  ENSG00000162645_17 (sequence is synthesized)
tccaaggagcaaaatttgcctgtccagctccctctccccaagaaacaacatgaatgagcaacttcagagtgtcaaacaactgccattaaacttaactcaaaatcatgatgcatgcatttt

SEQ ID NO: 488643 - DNA, 120 bp, Artificial Sequence
  ENSG00000162645_18 (sequence is synthesized)
tgttgaaccataaagtttgcaaagtaaaggttaagtatgaggtcaatgttttacctacagagcaattcaactcatgcttatttatagtactaacttttaatatgatctttaactaaatcc

SEQ ID NO: 488644 - DNA, 120 bp, Artificial Sequence
  ENSG00000162645_19 (sequence is synthesized)
tatatttgaaatcatacacaaggactcaagagagatattgtgtaactaggatgcattttccaatgagatatcttgcagtttctgttctgggtagatttttttctctcatatgcaccaccc

SEQ ID NO: 488645 - DNA, 120 bp, Artificial Sequence
  ENSG00000162645_20 (sequence is synthesized)
ttactgtatattcagtcctatactcttattcagggatttaactatggtcgtagcatagggctgaagtgttgtgaatatgatgaaaatgtgatgagaccaaacaaaccatggggcacagta

SEQ ID NO: 488646 - DNA, 120 bp, Artificial Sequence
  ENSG00000162645_21 (sequence is synthesized)
gagcatcactcctgccaagtggtctttgtatggcatgctggctgcaaataaaggagatctgggacacttaactaggcttttaaagtacagacagtgcacagttctcatttgggtggaggc

SEQ ID NO: 488647 - DNA, 120 bp, Artificial Sequence
  ENSG00000162645_22 (sequence is synthesized)
tgcatgatctgtgggcactagcagagaaagtggttgcctctgtgcagaatgcatttatgagtagaggctccaccttctctgtccatgtaaaccctctaggtaattactgccccattccca

SEQ ID NO: 488648 - DNA, 120 bp, Artificial Sequence
  ENSG00000162645_23 (sequence is synthesized)
ggccacctagatctctcttctctagtctcccttagtcttttctctttcctgaagtttagaaaataacttctacaatcacagaaaggaaagctttaactcaaactcaaattactttccatt

SEQ ID NO: 488649 - DNA, 120 bp, Artificial Sequence
  ENSG00000162645_24 (sequence is synthesized)
cttctgaggaccaggactataatcctataaagcctaaaacttgactgcatttttctctctgctcctctgctatgacattatatcctcaaagctactcagggtaaatgacttactaaaaaa

SEQ ID NO: 488650 - DNA, 120 bp, Artificial Sequence
  ENSG00000162645_25 (sequence is synthesized)
aaaaaaatgacagattgaaaaatcaagaataattcattaatacaaaacattatcctactacaattgtttcaggatgtgtattattcagagttcttcatggcaaataacaatctgctcagc

SEQ ID NO: 488651 - DNA, 120 bp, Artificial Sequence
  ENSG00000162645_26 (sequence is synthesized)
aatttaagtaaaaagtaatttactttttaataccattaggttgcacaccgatgctccagaattgtgagggagccatactctacagctattccaccgaggataatactaccattgtaaagg

SEQ ID NO: 488652 - DNA, 120 bp, Artificial Sequence
  ENSG00000162645_27 (sequence is synthesized)
catctcacgggaaaacaacacagctaccatgaaccagcaccatgatctctggatgaaatgctggaagcttctgcagtgtcagctatgagtaaatggatgccaccaccttcacattttcag

SEQ ID NO: 488653 - DNA, 120 bp, Artificial Sequence
  ENSG00000162645_28 (sequence is synthesized)
taaacaaatactcccctaccccatgaaaagttgcatctttgagctgctcacatctccagctaagcctcacaaaagtcaatctgcagggaagaatctaaatcatatgcctacccatgggaa

SEQ ID NO: 488654 - DNA, 120 bp, Artificial Sequence
  ENSG00000162645_29 (sequence is synthesized)
agtctgagaattagagtatttttgtcttctacttttggaggaagaaactaataacgtgggaaattttcctgtatgtttagtcaaccagtttttccatgcagatgtatggagataaatctt

SEQ ID NO: 488655 - DNA, 120 bp, Artificial Sequence
  ENSG00000162645_30 (sequence is synthesized)
atagtaggaataacctaagacttgagttagtatttttgtgtacatcagatacaacactcttctcatcttttttgtcattatttttcaatgttgttttaatctttccactgttgtttcatg

SEQ ID NO: 488656 - DNA, 120 bp, Artificial Sequence
  ENSG00000162645_31 (sequence is synthesized)
tcatgcactttgttaatattctttaagttattcttagtttttaacaatgatacttaagaaagacttaataggactatagaataggtactccctattccccaaccctgggaacacaattta

SEQ ID NO: 488657 - DNA, 120 bp, Artificial Sequence
  ENSG00000162645_32 (sequence is synthesized)
acatattagttcatttgtatttaagatctatcttgtttatgcctcagtttagttattgctcttacctttcaaacagttagtattttgtatctagttctgtgaaagcaaaaagcaacttta

SEQ ID NO: 488658 - DNA, 120 bp, Artificial Sequence
  ENSG00000162645_33 (sequence is synthesized)
ttctttcttacaattccccttttacttaatcggaacatttctttcctgtttgttcattagtcactctcagataaatgaatagtctctttttctaaaaaaaaaaataacatttgacctaaa

SEQ ID NO: 488659 - DNA, 120 bp, Artificial Sequence
  ENSG00000162645_34 (sequence is synthesized)
gttgaagaagtacgagaagaccaactggatagtaatttccagatgcaatcagaaaatttctgttcttatatcttcacccatgcaaagaccaagaccctgagagagggaatccttgtcact

SEQ ID NO: 488660 - DNA, 120 bp, Artificial Sequence
  ENSG00000162645_35 (sequence is synthesized)
ggaaaccggctggggatgctggtggagacctacctggatgccatcaacagtggagcgactccttgtctggagaatgcaatggcagttctggcccagtgtgagaactcagcagccgtgcag

SEQ ID NO: 488661 - DNA, 120 bp, Artificial Sequence
  ENSG00000162645_36 (sequence is synthesized)
agggcagccaaccactacagccagcagatggcccagcaagtgagattccccacagacacactccaggagctgctggacgtgcatgcagtttgtgagagggaagccattgcagtcttcatg

SEQ ID NO: 488662 - DNA, 120 bp, Artificial Sequence
  ENSG00000162645_37 (sequence is synthesized)
gagtactccttcaaagataaaagccaggaatttcagaagaagcttgtggacaccatggagaaaaagaaggaagactttgtgctgcagaatgaagaggcatctgccaaatattgtcaggct

SEQ ID NO: 488663 - DNA, 120 bp, Artificial Sequence
  ENSG00000162645_38 (sequence is synthesized)
gagcttaagcggctttcagagctcttgacagaaagtatttcaagaggaactttctttgttccgggggggcacaatatctacttagaagcaaaaaagaagattgaacaggactatacacta

SEQ ID NO: 488664 - DNA, 120 bp, Artificial Sequence
  ENSG00000162645_39 (sequence is synthesized)
tagcatgggaaccatcaaccagcaggccatggaccaacttcagtatccttttttgtggtccagaacagcagtaaacctagaaaataacagcttcattttttcaccaagtacagaggcaga

SEQ ID NO: 488665 - DNA, 120 bp, Artificial Sequence
  ENSG00000162645_40 (sequence is synthesized)
cagacaggtactgaagaattcataagtcctctctttaataaatctcattatgctgaacatctcattctatctcaatctccatctgaacttcaagtcttcccagttacatgtctcgttaga

SEQ ID NO: 488666 - DNA, 120 bp, Artificial Sequence
  ENSG00000162645_41 (sequence is synthesized)
tactcagccacccaagactctgtatatcctctatctgacttaatctcctatgcctgtccaaaccttcaatgtcctctagaactcatgttctcacttctgcaactctctatattcttatca

SEQ ID NO: 488667 - DNA, 120 bp, Artificial Sequence
  ENSG00000162645_42 (sequence is synthesized)
tctgctctaagtgttgccttctaaatgatacctagctatacactatagatactatttctcctacagacctctccagtggtcttatgtgatgactatttttaatcccataccttgcatatc

SEQ ID NO: 488668 - DNA, 120 bp, Artificial Sequence
  ENSG00000162645_43 (sequence is synthesized)
ataagtgtaagagatgagttaggtatcctccttgctccatattagagttctggacactttctcattcctttaccattaaaaagagaatcttctttaatatatatgccctcagactacacc

SEQ ID NO: 488669 - DNA, 120 bp, Artificial Sequence
  ENSG00000162645_44 (sequence is synthesized)
actatttttgttgcaattatctagcaacgttccaataaatacatccttcattcattaaagattttagttcctagtgtctttttagagactagcaaccaatagacaattatttaacaccct

SEQ ID NO: 488670 - DNA, 120 bp, Artificial Sequence
  ENSG00000162645_45 (sequence is synthesized)
ggtgtctcagttccatcaccttattggaactctccacccttattgtcattctccactctcacacattacttaacctagttcattatcaatgacctcaccatttccattagcttagtttca

SEQ ID NO: 488671 - DNA, 120 bp, Artificial Sequence
  ENSG00000162645_46 (sequence is synthesized)
agcattatactgaattagatttcatcaagatcacccccatattcctatatgtaatgcacagttctcacctcatttgatcttccaatcttccataagccttttatttctctaggagcatta

SEQ ID NO: 488672 - DNA, 120 bp, Artificial Sequence
  ENSG00000162645_47 (sequence is synthesized)
cataaatttgatcccttccacctttctgaaatgcctgtttcacttggaattggttcctattagaataccacatttcctaattttccaccttccttattggtagactttttcagattactc

SEQ ID NO: 488673 - DNA, 120 bp, Artificial Sequence
  ENSG00000162645_48 (sequence is synthesized)
tatcctctttctccttttagcctctaaatattataacacttaagttcttgtgcctcttttctttttctgctttcagtccccagatgatcacatccagcttcaaggctttcagtagcacca

SEQ ID NO: 488674 - DNA, 120 bp, Artificial Sequence
  ENSG00000162645_49 (sequence is synthesized)
atatgtttatcaccatcaaatctgtattcccaagcatgagcaaattcaaacttttgtatccagcttctggtgcaacatctccattcagatgtgtaagagacatcttgagcctaaagtgta

SEQ ID NO: 488675 - DNA, 120 bp, Artificial Sequence
  ENSG00000162645_50 (sequence is synthesized)
cagaacaaaacttaattttcctgtccaaaacaactccttcccagtctttctaatcacaataaattcccacatcattcatagaagtgctcagatcaaaaacttaggaatcatcttggatga

SEQ ID NO: 488676 - DNA, 120 bp, Artificial Sequence
  ENSG00000162645_51 (sequence is synthesized)
ttccattccttatgttttggaaattattaatcatcaaactccttcagctccactatcaaagttatttctctagactagccaattctcactacttgctccattgcctctcatcttggttat

SEQ ID NO: 488677 - DNA, 120 bp, Artificial Sequence
  ENSG00000162645_52 (sequence is synthesized)
cttttcaactacctaattgctttttgtattagttttgtttgtttgtttgttttggcatacacacttgactcacagatgcaatgccagccagtatgatttaaaaaacaaaaaacgatacta

SEQ ID NO: 488678 - DNA, 120 bp, Artificial Sequence
  ENSG00000162645_53 (sequence is synthesized)
tatttattttaaggcttctgccctaccacactggatttcttgatatatgttgtacacactcagtaatttcctatctaagggccttgaagggtctgtgatctctgtctgcaatgttcctcc

SEQ ID NO: 488679 - DNA, 120 bp, Artificial Sequence
  ENSG00000162645_54 (sequence is synthesized)
attggatttgtacatgactggtttcttcaattcattcagatcactgctcaactacaatgtcagagataatttacctggaaaactacatgaaccagcaccacatgcagatacacacaatta

SEQ ID NO: 488680 - DNA, 120 bp, Artificial Sequence
  ENSG00000162645_55 (sequence is synthesized)
ttctctgctttccttattggtagatttgggagacaccagagtattagatgaatgtctattggttgctagtttctaaaaatacattaggagctagttgcccagttcgttttccttcaagac

SEQ ID NO: 488681 - DNA, 120 bp, Artificial Sequence
  ENSG00000162645_56 (sequence is synthesized)
aattgttatcaatacctgataatttatttttgtttacctgttcattgtttgtctccatcattagaatgtaagctctatagtggtagcattgtctcattcattacagcgttcttagtccct

SEQ ID NO: 488682 - DNA, 120 bp, Artificial Sequence
  ENSG00000162645_57 (sequence is synthesized)
agggcagtgcttggttcatagtaggtgctcaataaatgtttgtgagtgaatgaattctgtaaataaatgtttgtgaatgaatgaatgagctaataaaaagaaaccaaattattttaggta

SEQ ID NO: 488683 - DNA, 120 bp, Artificial Sequence
  ENSG00000162645_58 (sequence is synthesized)
gtgtagtgtatccgggaactccaggcaggctgcctgactccagtgtttgtgctcagaactattcctgaaatgagagacttggaaagataaaagtttcgtatgaaatagtgcccagttgga

SEQ ID NO: 488684 - DNA, 120 bp, Artificial Sequence
  ENSG00000162650_0 (sequence is synthesized)
gcgtccgcggcggtgatggcggtgcgtgaacgcgcggcggcagcaatggccgctctggagcggcgggtgccgagtctcgatgacttcgcgggacagagctggagctcgtgggtggagcgg

SEQ ID NO: 488685 - DNA, 120 bp, Artificial Sequence
  ENSG00000162650_1 (sequence is synthesized)
gccgacctgcccgcggctgacggggctgagctggaggagagtagcaaaaacacgaagaagttggatgccatgaccctcattaaagaagacatgtccatcttcgggcactgccctgcccat

SEQ ID NO: 488686 - DNA, 120 bp, Artificial Sequence
  ENSG00000162650_2 (sequence is synthesized)
gatgacttctacttggttgtgtgtaaccactgcagccaagtggtgaagcctcaagctttccagaagcactgcgaaagaagacatgggcccctcagcaagctttatggccgggccccaccc

SEQ ID NO: 488687 - DNA, 120 bp, Artificial Sequence
  ENSG00000162650_3 (sequence is synthesized)
ccacctccagcccctgccagctctcagaaatgccatgtagtgaatgggcagggcccagcttgtagggccccaggttccacgaaaacctcctccagggagaagggccaggggtcccggagc

SEQ ID NO: 488688 - DNA, 120 bp, Artificial Sequence
  ENSG00000162650_4 (sequence is synthesized)
cgtggccaccagcctcctgagaagacccagaaggacaacctctgccagccagggggcctcaccaaggactcccctggaaaacctcccatggctcccccttctaaagaacctcctggcaga

SEQ ID NO: 488689 - DNA, 120 bp, Artificial Sequence
  ENSG00000162650_5 (sequence is synthesized)
gagaacatcgagatcatccccagtgaggggtccagtcactgggctgaaggcagccctcctgaaaaggagcccagtgggaccaggctgccccctaaaacccaccggaagatggctcggaag

SEQ ID NO: 488690 - DNA, 120 bp, Artificial Sequence
  ENSG00000162650_6 (sequence is synthesized)
gagtgcgacctcaacaggcagtgtggggtaataaatccagagaccaaaaagatctgtacccgcctgttgacctgcaagatccactcagtacaccagcgccgggaagtccagggccgggcc

SEQ ID NO: 488691 - DNA, 120 bp, Artificial Sequence
  ENSG00000162650_7 (sequence is synthesized)
aaggactttgacgtgctggtggcagagctgaaggccaactcccgcaaaggggagtctcccaaggagaagagcccagggcgcaaggagcaagttctcgagcgcccctcccaggagctcccc

SEQ ID NO: 488692 - DNA, 120 bp, Artificial Sequence
  ENSG00000162650_8 (sequence is synthesized)
tcctcagtccaggttgtagcagcggtggctgctcccagcagcaccttctctgttcgtgccaagcagacctacccatactgtgcactgcccaggtcccgggcctcctccgagagtgaattg

SEQ ID NO: 488693 - DNA, 120 bp, Artificial Sequence
  ENSG00000162650_9 (sequence is synthesized)
cctgttccccttccccatgccccggggtgggacccaggcctccagcgaagagagtgaggaggaggggacatctgacgacctccacccaccccctgactgccattatgcaacccggccccc

SEQ ID NO: 488694 - DNA, 120 bp, Artificial Sequence
  ENSG00000162650_10 (sequence is synthesized)
acggccacaggcgttctgcacctttgggagccggctggtgagcccaggatgctatgtgtttagccgccggctggaccggttctgctcagcactcagctccatgctggaacggcacctcag

SEQ ID NO: 488695 - DNA, 120 bp, Artificial Sequence
  ENSG00000162650_11 (sequence is synthesized)
cacacacatgtggaagaagatcccaccggcagctgaacctccagctcaccttgtcaactccccgttatctgctcccctgagcccatcctctacaggcacctgcccccgccttccaggtcc

SEQ ID NO: 488696 - DNA, 120 bp, Artificial Sequence
  ENSG00000162650_12 (sequence is synthesized)
aaccctgagacctgcctgcccagcctccatgccccccaccaaggacaaccttgtccccagctaccctgcaggctcccccagcgtggcggctgcctgtagccaggcagagtgcatgggcgg

SEQ ID NO: 488697 - DNA, 120 bp, Artificial Sequence
  ENSG00000162650_13 (sequence is synthesized)
gagccaggctatcacctcaccactgcctgccaacacgccatccccgtccttcagcaagctgccgccttccaaggccagcaagtcatccaaaggcaaggacggggtggaggtggaggcccc

SEQ ID NO: 488698 - DNA, 120 bp, Artificial Sequence
  ENSG00000162650_14 (sequence is synthesized)
ttctcgaaagcggaagttatcccctggccctaccactcttaaacggacctgcatcctggagcccactggaaaagggaaaccctctggctgtaggggcctctcggccaaaactaaaacagc

SEQ ID NO: 488699 - DNA, 120 bp, Artificial Sequence
  ENSG00000162650_15 (sequence is synthesized)
cctgagcatggggcttaatgggacaatggggccaagagtgaagcgggcagggcccctggactgtcgtggctcccctcatcagctccccacaccagtcaaggcttctcagctggagaaccg

SEQ ID NO: 488700 - DNA, 120 bp, Artificial Sequence
  ENSG00000162650_16 (sequence is synthesized)
gggagcagctggacacccagccaaggccctgccaaccaactgcctctctgaggaggaggtggccaagaagcggaaaaacctggccacttattgccggccagtgaaggccaagcactgtca

SEQ ID NO: 488701 - DNA, 120 bp, Artificial Sequence
  ENSG00000162650_17 (sequence is synthesized)
ggctggtgcccctgctgatgtggcctgctctgtgcgccgcaagaagccaggcccggccctggcctttgaggagaagtgctctacactgaagtcaaaagcccattaacgagaaagtgcctg

SEQ ID NO: 488702 - DNA, 120 bp, Artificial Sequence
  ENSG00000162650_18 (sequence is synthesized)
cccactgcaacggagccgccagcacctcctcccctccagatccgggccccaggctgctgccgctttttataactttatattatttttttttaagaaaaaaagctctttaaaatacctcaa

SEQ ID NO: 488703 - DNA, 120 bp, Artificial Sequence
  ENSG00000162650_19 (sequence is synthesized)
ctctacactgaaggtactggagctacctctgttccctgaaggaaagggagtttgagtccctgggtcacagcctaacatgccgagcagcaagtcaaaagcccattaacgagaaagtgcctg

SEQ ID NO: 488704 - DNA, 120 bp, Artificial Sequence
  ENSG00000162650_20 (sequence is synthesized)
aacattttcccagctgcctccaacagaccgaaacttgtcactggggagctgaaagggtcacactcctgggcaaggcagccctatgtgtattcactcactggccccttcgcgtgcagaggc

SEQ ID NO: 488705 - DNA, 120 bp, Artificial Sequence
  ENSG00000162650_21 (sequence is synthesized)
tatgccggaccccagggagagcctgacttgctgaaggagacacacatgcatctctgcctgtcacacaaggggcagacacgaaacacaggctcagctcacagacaggctcacaggaatatg

SEQ ID NO: 488706 - DNA, 120 bp, Artificial Sequence
  ENSG00000162650_22 (sequence is synthesized)
tgatgcaagaagggggttgagcgagttgactgggctgaccagagctgggtacagttttaactgtgaagattttctggaggaggcggatctgcagcagattatcccctgaggaggaagggg

SEQ ID NO: 488707 - DNA, 120 bp, Artificial Sequence
  ENSG00000162650_23 (sequence is synthesized)
ggggacctgggagagtatctatttgggatgccacatagtagcagaaaggacccatcgagaaatctcaagaagagactcagggacttatagaaacattggttaaggacggtttccccttta

SEQ ID NO: 488708 - DNA, 120 bp, Artificial Sequence
  ENSG00000162650_24 (sequence is synthesized)
aatggggaagcaggcccagaaaagagatgatacttacccacaatcacccaactagttagcagtggaaccctaaactgcaccttgaagtgaagggtcccataagaaaggtggatggattct

SEQ ID NO: 488709 - DNA, 120 bp, Artificial Sequence
  ENSG00000162650_25 (sequence is synthesized)
tcttagtggggccatcttagtccagatgcagcaggtgaaggaagatgggcatttgagaatggacccactgaaaggttccccaagtggtcctagcaccaggagcttgtcacggagtgtggg

SEQ ID NO: 488710 - DNA, 120 bp, Artificial Sequence
  ENSG00000162650_26 (sequence is synthesized)
cttcatactgttgagctgcaggccctgcttggggcttctggaaaggggacaacctctgggttgtcttctgggaagaacagtctctggtaaggagaggctggagactctctaaaactggcc

SEQ ID NO: 488711 - DNA, 120 bp, Artificial Sequence
  ENSG00000162650_27 (sequence is synthesized)
ctgacccttctgagctgtgtttctcctctaggggctgagctggaggagagtagcaaaaacacgaagaagttggatgccatgaccctcattaaagaaggtgggagtcgacacacattaggg

SEQ ID NO: 488712 - DNA, 120 bp, Artificial Sequence
  ENSG00000162650_28 (sequence is synthesized)
ctgggacccagggcagacaggaccacgctccacttttccaccacactacagaaggaggtggctgcttgaagcagctgtctggggaccctcattttgataggtccgagtcggccggttgtt

SEQ ID NO: 488713 - DNA, 120 bp, Artificial Sequence
  ENSG00000162650_29 (sequence is synthesized)
ctggctcctgtgacctgtcgttggagatcataatcataggtgattgcccactcacctgaaagcgtataccctttgggactgcttagatcgaactctggaagctggaagcattcagcatgg

SEQ ID NO: 488714 - DNA, 120 bp, Artificial Sequence
  ENSG00000162650_30 (sequence is synthesized)
agcttgttatatcagcggggaggtgaagtgccttctgagtgtggggtgggagtgctctccgatcttccagagaaaccctgggatcttcagccccagtgacatgggcttctgtcattgcag

SEQ ID NO: 488715 - DNA, 120 bp, Artificial Sequence
  ENSG00000162650_31 (sequence is synthesized)
ctacctcacctgggggtacttggcccctaagccatcaggggcccctggaaacaggctcagggagtgtcctggaagaggcactccctcagccctgagtgtgggggtattcctggggctcct

SEQ ID NO: 488716 - DNA, 120 bp, Artificial Sequence
  ENSG00000162650_32 (sequence is synthesized)
ccctcctgtccttcccttccctctgtcctcttctgattgccctgcagggtgtctgccctggtgccctgctctttgagctcggcaggttcaaggatgcccctactctgaccccacaacagt

SEQ ID NO: 488717 - DNA, 120 bp, Artificial Sequence
  ENSG00000162650_33 (sequence is synthesized)
tacctgatacagagaagatgctacattggtgtttgtgcagggaaagggaggaaggggaagttgagagagttcctggactgttttctttaggaagaggtaggtcagttcttagcaaagtga

SEQ ID NO: 488718 - DNA, 120 bp, Artificial Sequence
  ENSG00000162650_34 (sequence is synthesized)
ctccagctttttgcctggtgaaccttcccctatccctaaccctttcccttgggctgaggagatgcggcacccctccacccctgcttttgctataatcaaagggctacttctttctgaatt

SEQ ID NO: 488719 - DNA, 120 bp, Artificial Sequence
  ENSG00000162650_35 (sequence is synthesized)
ctattcgatctacaggggagcggagtcgcttcgtggccgccagcccgggaaggggcgccagccagctggcggacgcacggcttagaggggcgtctgggcagagaggtttggggctgggga

SEQ ID NO: 488720 - DNA, 120 bp, Artificial Sequence
  ENSG00000162650_36 (sequence is synthesized)
gagatgcagtgagcttgggagagtggactggtagcacaaataatgtgtgcataagggttagaagaggaggtcctggagctttggtcttctcttttccccctgcaattgtgcatttcggag

SEQ ID NO: 488721 - DNA, 120 bp, Artificial Sequence
  ENSG00000162650_37 (sequence is synthesized)
ggactcttgctgcaagctcggtaggcaatagcatccgctccaagactacacttcccagaaggctgtgagtgggtggggggggggggggcgcggggaacaggcaacctgtgttgcgcttgc

SEQ ID NO: 488722 - DNA, 120 bp, Artificial Sequence
  ENSG00000162650_38 (sequence is synthesized)
cgaaactgaggtacaagggcaacccctgcccaaaggccctctaagaaggggagggacttgcatagctgaccaaggagactttgaagatgctcaaggaccaaagacagcagtttctctgct

SEQ ID NO: 488723 - DNA, 120 bp, Artificial Sequence
  ENSG00000162654_0 (sequence is synthesized)
aatttcggttctcacagactcttacttggatgtctgtaaatccggctggactttcagcttctaagaacagtccgtttctcgaggatccaggcgcaggaggacagagcaatgggtgagaga

SEQ ID NO: 488724 - DNA, 120 bp, Artificial Sequence
  ENSG00000162654_1 (sequence is synthesized)
actcttcacgctgcagtgcccacaccaggttatccagaatctgaatccatcatgatggcccccatttgtctagtggaaaaccaggaagagcagctgacagtgaattcaaaggcattagag

SEQ ID NO: 488725 - DNA, 120 bp, Artificial Sequence
  ENSG00000162654_2 (sequence is synthesized)
attcttgacaagatttctcagcccgtggtggtggtggccattgtagggctataccgcacaggaaaatcctatctcatgaatcgtcttgcaggaaagcgcaatggcttccctctgggctcc

SEQ ID NO: 488726 - DNA, 120 bp, Artificial Sequence
  ENSG00000162654_3 (sequence is synthesized)
acggtgcagtctgaaactaagggcatctggatgtggtgtgtgccccacctctctaagccaaaccacaccctggtccttctggacaccgagggcctgggcgatgtagaaaagagtaaccct

SEQ ID NO: 488727 - DNA, 120 bp, Artificial Sequence
  ENSG00000162654_4 (sequence is synthesized)
aagaatgactcgtggatctttgccctggctgtgcttctaagcagcagctttgtctataacagcgtgagcaccatcaaccaccaggccctggagcagctgcactatgtgactgagctagca

SEQ ID NO: 488728 - DNA, 120 bp, Artificial Sequence
  ENSG00000162654_5 (sequence is synthesized)
gagctaatcagggcaaaatcctgccccagacctgatgaagctgaggactccagcgagtttgcgagtttctttccagactttatttggactgttcgggattttaccctggagctaaagtta

SEQ ID NO: 488729 - DNA, 120 bp, Artificial Sequence
  ENSG00000162654_6 (sequence is synthesized)
gatggaaaccccatcacagaagatgagtacctggagaatgccttgaagctgattccaggcaagaatcccaaaattcaaaattcaaacatgcctagagagtgtatcaggcatttcttccga

SEQ ID NO: 488730 - DNA, 120 bp, Artificial Sequence
  ENSG00000162654_7 (sequence is synthesized)
aaacggaagtgctttgtctttgaccggcctacaaatgacaagcaatatttaaatcatatggacgaagtgccagaagaaaatctggaaaggcatttccttatgcaatcagacaacttctgt

SEQ ID NO: 488731 - DNA, 120 bp, Artificial Sequence
  ENSG00000162654_8 (sequence is synthesized)
tcttatatcttcacccatgcaaagaccaagaccctgagagagggaatcattgtcactggaaagcggctggggactctggtggtgacttatgtagatgccatcaacagtggagcagtacct

SEQ ID NO: 488732 - DNA, 120 bp, Artificial Sequence
  ENSG00000162654_9 (sequence is synthesized)
tgtctggagaatgcagtgacagcactggcccagcttgagaacccagcggctgtgcagagggcagccgaccactatagccagcagatggcccagcaactgaggctccccacagacacgctc

SEQ ID NO: 488733 - DNA, 120 bp, Artificial Sequence
  ENSG00000162654_10 (sequence is synthesized)
caggagctgctggacgtgcatgcagcctgtgagagggaagccattgcagtcttcatggagcactccttcaaggatgaaaaccatgaattccagaagaagcttgtggacaccatagagaaa

SEQ ID NO: 488734 - DNA, 120 bp, Artificial Sequence
  ENSG00000162654_11 (sequence is synthesized)
aagaagggagactttgtgctgcagaatgaagaggcatctgccaaatattgccaggctgagcttaagcggctttcagagcacctgacagaaagcattttgagaggaattttctctgttcct

SEQ ID NO: 488735 - DNA, 120 bp, Artificial Sequence
  ENSG00000162654_12 (sequence is synthesized)
ggaggacacaatctctacttagaagaaaagaaacaggttgagtgggactataagctagtgcccagaaaaggagttaaggcaaacgaggtcctccagaacttcctgcagtcacaggtggtt

SEQ ID NO: 488736 - DNA, 120 bp, Artificial Sequence
  ENSG00000162654_13 (sequence is synthesized)
gtagaggaatccatcctgcagtcagacaaagccctcactgctggagagaaggccatagcagcggagcgggccatgaaggaagcagctgagaaggaacaggagctgctaagagaaaaacag

SEQ ID NO: 488737 - DNA, 120 bp, Artificial Sequence
  ENSG00000162654_14 (sequence is synthesized)
aaggagcagcagcaaatgatggaggctcaagagagaagcttccaggaatacatggcccaaatggagaagaagttggaggaggaaagggaaaaccttctcagagagcatgaaaggctgcta

SEQ ID NO: 488738 - DNA, 120 bp, Artificial Sequence
  ENSG00000162654_15 (sequence is synthesized)
aaacacaagctgaaggtacaagaagaaatgcttaaggaagaatttcaaaagaaatctgagcagttaaataaagagattaatcaactgaaagaaaaaattgaaagcactaaaaatgaacag

SEQ ID NO: 488739 - DNA, 120 bp, Artificial Sequence
  ENSG00000162654_16 (sequence is synthesized)
ttaaggctcttaaagatccttgacatggctagcaacataatgattgtcactctacctggggcttccaagctacttggagtagggacaaaatatcttggctcacgtatttaagagcctgaa

SEQ ID NO: 488740 - DNA, 120 bp, Artificial Sequence
  ENSG00000162654_17 (sequence is synthesized)
tattccaggtaagaaaatataaaatgaggtttattttattttaataacataacactgttgctcattttgtaagtatatgtgttatagcagtttcattcaagaaaagtttaaaattaaaaa

SEQ ID NO: 488741 - DNA, 120 bp, Artificial Sequence
  ENSG00000162654_18 (sequence is synthesized)
gtgattatcaaagaatatcagggcctgacatccacaaaaaacaaacttaattttgattgaactaataatttataaacatgggaaacaagtcagaagtagtgacattattcctagaaaaga

SEQ ID NO: 488742 - DNA, 120 bp, Artificial Sequence
  ENSG00000162654_19 (sequence is synthesized)
tttaaggaaagcaaaaagacaactggtaagattaagaagccattaaccatttgcaatttatattatagtcacagaaataatttcagttatgactagctcttgccgattaatgagaagaga

SEQ ID NO: 488743 - DNA, 120 bp, Artificial Sequence
  ENSG00000162654_20 (sequence is synthesized)
gcagctccacaatttttaatttttttaacttttattttagattcaggggtatatgtgcaggtttgttacataggtaaactgcatgtcatgggggtttggtgtgcagataattttatcaca

SEQ ID NO: 488744 - DNA, 120 bp, Artificial Sequence
  ENSG00000162654_21 (sequence is synthesized)
caattattaatcataatacccaataggtttttttctgatcttctccctcctcccaacctacaccctcaagtagaccccagtgtctcttgttctcctctgagtatccatgtgttctctttg

SEQ ID NO: 488745 - DNA, 120 bp, Artificial Sequence
  ENSG00000162654_22 (sequence is synthesized)
ttataagtgagaacatgtggtatttgggtttctgttcctgtgttagtttgcttatgataatggcttccagctccatccatattgctacagaggacatgatcttgttgttttttatggctg

SEQ ID NO: 488746 - DNA, 120 bp, Artificial Sequence
  ENSG00000162654_23 (sequence is synthesized)
tatggctgcatagtattccatggtgtttgtatataccacattttcattatccagcctattattaatgcacatttaggttgattccttatctttgctattgtgaacagtgctgcaatggac

SEQ ID NO: 488747 - DNA, 120 bp, Artificial Sequence
  ENSG00000162654_24 (sequence is synthesized)
ggacatacacgtgcatgtgcctttatggtacaatgatttatatttccttgggatatgcattcctttgggaataatgggattgctgagttgaatggtaattctgagttctttgaggaatca

SEQ ID NO: 488748 - DNA, 120 bp, Artificial Sequence
  ENSG00000162654_25 (sequence is synthesized)
catttctgtagtgattagtgatgatgagtgatttttatatgctttttaaatgcatatatgtcttcttttgaaatgtgttcatgttctttgcccactttctttttaatggggttgcttgtt

SEQ ID NO: 488749 - DNA, 120 bp, Artificial Sequence
  ENSG00000162654_26 (sequence is synthesized)
tttcgcttgtaaattttttgaagcttcttatagattctggatattagatctttgttggatgcatagttggcaaatattttctaccattctgtaggttgtctgttactttgttaattgttt

SEQ ID NO: 488750 - DNA, 120 bp, Artificial Sequence
  ENSG00000162654_27 (sequence is synthesized)
aattgtttcattttgttttgtttttgttttttgaaacagggtctcactttgacacccaggctggagtgcagtagcacaaacatgggtcattgtagcctcaacctcccaggctcaagcagt

SEQ ID NO: 488751 - DNA, 120 bp, Artificial Sequence
  ENSG00000162654_28 (sequence is synthesized)
ctcaaccccccacatagctgggactacaggtgcttacacccaagaccagttaattttttgtatttgtttgtagagatgtgtttttccatgttgcccaagctggtcttgaactactgagct

SEQ ID NO: 488752 - DNA, 120 bp, Artificial Sequence
  ENSG00000162654_29 (sequence is synthesized)
caagcaatctgcctgcttcagcctcccaaagtactgggatttaggcatgagccaccacatctggccaatagtttcttttgatgtgcagaagctctttaatttaattagatctcctttgtc

SEQ ID NO: 488753 - DNA, 120 bp, Artificial Sequence
  ENSG00000162654_30 (sequence is synthesized)
agtttttgtttttgctgcaattgcttatgttatcttcatcatgaaattttagccaagtcttatgtccagaatggtatttcttaggttatttttcagagtttttatagtttaatgttttat

SEQ ID NO: 488754 - DNA, 120 bp, Artificial Sequence
  ENSG00000162654_31 (sequence is synthesized)
gttatttttcagagtttttatagtttaatgttttatatttaagtctttaatccttcttaagttgatttttgtatgcagagtaagctgggggcccagtttcaatcttctgcatatggctag

SEQ ID NO: 488755 - DNA, 120 bp, Artificial Sequence
  ENSG00000162654_32 (sequence is synthesized)
ccccattgcttgtttttgtcagctttgtccaagatcagatgattgtaggtgtacagcattatttctggactctctgttatgttccatttatctgtgtgtctgtttttctactaataccat

SEQ ID NO: 488756 - DNA, 120 bp, Artificial Sequence
  ENSG00000162654_33 (sequence is synthesized)
ccatgctgttttggttactgtagctctgtagtatggtttgaggtttggtaacttgatgcctccccttttgttctttatgtttaggattgccttggctaggctcttttttggttccatatg

SEQ ID NO: 488757 - DNA, 120 bp, Artificial Sequence
  ENSG00000162654_34 (sequence is synthesized)
gtgaagaatgtcattggtagtttgatagggatagcattgaactatttgctcaactcaacattttaggaatttatttctgctgtctagtgctcaaaacttgcagctagaattgagggaaga

SEQ ID NO: 488758 - DNA, 120 bp, Artificial Sequence
  ENSG00000162654_35 (sequence is synthesized)
ttttaggaatttatttctgctgtctagtgctcaaaacttgcagctagaattgagggaagagagagaccttcttatattgttttatattgtttgatactcagtacctgttttaagaaaaaa

SEQ ID NO: 488759 - DNA, 75 bp, Artificial Sequence
  ENSG00000162654_36 (sequence is synthesized)
gattccagacattgtatagaagaacatttggaaactcactgccgtaccgcctgtttgctcaaatcaatcatgacc

SEQ ID NO: 488760 - DNA, 85 bp, Artificial Sequence
  ENSG00000162654_37 (sequence is synthesized)
aggagcttggattttaaggcagcagcttgctgatgccaccagctgaaaaaagcccttccttctccaactcggtgtctgagaagtt

SEQ ID NO: 488761 - DNA, 120 bp, Artificial Sequence
  ENSG00000162654_38 (sequence is synthesized)
aaaaaagcccttccttctccaactcggtgtctgagaagttttgtctgcagctcatcctgctacagaatgaactccttgtaattctacaagatatgccatgggccttttcacaggggacac

SEQ ID NO: 488762 - DNA, 120 bp, Artificial Sequence
  ENSG00000162654_39 (sequence is synthesized)
tacaagatatgccatgggccttttcacaggggacacaggcttcttaaaacaacccggcttcctcaccctatgtcctttatttacaaagctgtgctcctattcatgagcatggaatgtttt

SEQ ID NO: 488763 - DNA, 120 bp, Artificial Sequence
  ENSG00000162654_40 (sequence is synthesized)
atctcttatttctttcaggggtatcttgtaattctcattatatatatcttttgcttccttggttagctgtatttttaggtattttagtcttcttgtggcaattgtgaatgggattgcatt

SEQ ID NO: 488764 - DNA, 120 bp, Artificial Sequence
  ENSG00000162654_41 (sequence is synthesized)
aatgttattaacgccacattttttaaatagacaaaaatatgagattaaaaatgttgaattttactaacaataaaagttgttcaaaggaaaactataaggttcttgtttcaactctgtcat

SEQ ID NO: 488765 - DNA, 120 bp, Artificial Sequence
  ENSG00000162654_42 (sequence is synthesized)
aggaagaacaggacagtgagctggcacagagttagggaaactgactgtgtctcatattggctagtgagagtgatctgttggaattgtatatcaaaattttaatgtacatacattttgtct

SEQ ID NO: 488766 - DNA, 72 bp, Artificial Sequence
  ENSG00000162654_43 (sequence is synthesized)
tcatcctggctcaaaagctcccccactaagcaacttgtgacacccacaacccaaatcctgtaaaatggtccc

SEQ ID NO: 488767 - DNA, 120 bp, Artificial Sequence
  ENSG00000162654_44 (sequence is synthesized)
cccctttgactgtaattttcctttaccaacccaaatcctgtaaaatggtcccaaccctatctcccttcactgactgtcttttcggactcagccagcctgcacccaggtgattaaaaagct

SEQ ID NO: 488768 - DNA, 120 bp, Artificial Sequence
  ENSG00000162664_0 (sequence is synthesized)
agcctcgctgtggcctgcggctcccgggctggtagcgcgccgctctcggtcgcgcggagtgatcgtgtggaatcgcgggtcgcggacgctcgccgccggccatagctcagcctagcgccg

SEQ ID NO: 488769 - DNA, 120 bp, Artificial Sequence
  ENSG00000162664_1 (sequence is synthesized)
ccaaggccgacggccctcagcctctgccatggacttcgaggacgattacacacactccgcctgcaggaatacttatcagggctttaatggaatggatcgtgattatggccctggatctta

SEQ ID NO: 488770 - DNA, 120 bp, Artificial Sequence
  ENSG00000162664_2 (sequence is synthesized)
tggagggatggatcgtgactatggccatggatcctatgggggtcagagatccatggattcctacctaaaccagtcatatggcatggacaatcacagtggtggtggtgggggtagcaggtt

SEQ ID NO: 488771 - DNA, 120 bp, Artificial Sequence
  ENSG00000162664_3 (sequence is synthesized)
tggaccttatgagtcttacgactccaggtcttctctgggtgggcgagatctgtacagatctggctatggttttaatgaacccgaacaaagccgcttcggaggtagttatggtggtcgatt

SEQ ID NO: 488772 - DNA, 120 bp, Artificial Sequence
  ENSG00000162664_4 (sequence is synthesized)
tgagagctcctaccggaatagccttgactctttcggaggtagaaaccagggcgggtctagctgggaagcaccttactcccgttcaaaattgaggcctgggtttatggaggacagaggaag

SEQ ID NO: 488773 - DNA, 120 bp, Artificial Sequence
  ENSG00000162664_5 (sequence is synthesized)
agagaattactcttcctacagcagtttttcttcaccccatatgaagcctgcacctgtaggctctcgggggagaggaacgcctgcttatcctgaaagtacgtttggaagcagaaactatga

SEQ ID NO: 488774 - DNA, 120 bp, Artificial Sequence
  ENSG00000162664_6 (sequence is synthesized)
tgcttttggaggaccatcaacaggcagaggccgaggccgaggacatatgggtgattttggaagcattcatagacccggaattgttgttgactatcaaaacaaatccaccaatgtgacagt

SEQ ID NO: 488775 - DNA, 120 bp, Artificial Sequence
  ENSG00000162664_7 (sequence is synthesized)
tgctgctgcaagaggaataaagagaaaaatgatgcagccatttaataagcccagtggaacctttatcaagaaacccaaactagcaaaacctatggagaagataagcctcagcaaatcacc

SEQ ID NO: 488776 - DNA, 120 bp, Artificial Sequence
  ENSG00000162664_8 (sequence is synthesized)
cacaaaaactgatcctaaaaatgaagaggaagaaaagcggcgaattgaggctcggcgagagaaacaaaggcgcagaagagaaaaaaacagtgagaaatacggagatggatacagaatggc

SEQ ID NO: 488777 - DNA, 120 bp, Artificial Sequence
  ENSG00000162664_9 (sequence is synthesized)
atttacatgttcattttgtaaatttcgaacatttgaagaaaaagatattgaactgcatctggaaagttcttcacatcaggaaacattagatcatatacagaaacaaactaaatttgataa

SEQ ID NO: 488778 - DNA, 120 bp, Artificial Sequence
  ENSG00000162664_10 (sequence is synthesized)
agtagttatggagtttttgcatgagtgtatggtgaataaattcaagaaaacatctattcgtaagcaacagacaaataatcaaacagaagtagttaaaataattgaaaaagatgttatgga

SEQ ID NO: 488779 - DNA, 120 bp, Artificial Sequence
  ENSG00000162664_11 (sequence is synthesized)
aggtgttactgtagatgatcacatgatgaaggtagagacagttcattgcagcgcttgcagtgtttatatccctgctttacatagttcagttcagcagcacttaaaatctcctgatcatat

SEQ ID NO: 488780 - DNA, 120 bp, Artificial Sequence
  ENSG00000162664_12 (sequence is synthesized)
caaagggaagcaggcttataaggaacaaataaaaagagagagtgtcttgactgctacaagcattttaaataatccaatagtgaaggcgcgatatgaacgttttgttaagggtgagaatcc

SEQ ID NO: 488781 - DNA, 120 bp, Artificial Sequence
  ENSG00000162664_13 (sequence is synthesized)
ttttgaaattcaagaccattctcaggatcagcaaatagaaggagatgaggaggatgaagagaagattgatgaacctattgaagaagaggaggatgaagatgaggaagaagaagcagagga

SEQ ID NO: 488782 - DNA, 120 bp, Artificial Sequence
  ENSG00000162664_14 (sequence is synthesized)
agtgggggaagtagaggaagtggaagaagtagaggaagtgagagaaggaggaatagagggcgagggaaatatacagggagtaggggaaggaggggaagtaggggtagtgggagaagtaga

SEQ ID NO: 488783 - DNA, 120 bp, Artificial Sequence
  ENSG00000162664_15 (sequence is synthesized)
gggagtgggggaagtagaggaagtagaggaattagaggaagagacagcaaaggaagaacctgctgacttccctgttgagcaacctgaagaaaattaaatataaggtattagatttaaaag

SEQ ID NO: 488784 - DNA, 120 bp, Artificial Sequence
  ENSG00000162664_16 (sequence is synthesized)
gagctttacatttcggttctaatgtaaaaaagggtaagaaatttaatagcttaaaatatgaattaacacccatgttgcatgcattccacatattaaaatttgttttatataatttctaaa

SEQ ID NO: 488785 - DNA, 120 bp, Artificial Sequence
  ENSG00000162664_17 (sequence is synthesized)
tgtttaacatttgtttaataaaatgaaggcaaaactattttagtttagtttttatagctaccagacttagatccgataaattgtttgtataatttttaagcttaatttttattactttat

SEQ ID NO: 488786 - DNA, 120 bp, Artificial Sequence
  ENSG00000162664_18 (sequence is synthesized)
tggtgttaaggataacaaatgtgtattgttagtatatctattctaatcattttatcttaaatgctgctcttgggagtgaatattcaagtgtgcatcaattttttgaatacttaccctgga

SEQ ID NO: 488787 - DNA, 120 bp, Artificial Sequence
  ENSG00000162664_19 (sequence is synthesized)
agatataaactgggcaagtattttgtgctctgtgtatttttttactgcattagacattgaatagtaatttgcgttaagatacgcttaaaggctctttgtgaccatgtttccctttgtagc

SEQ ID NO: 488788 - DNA, 120 bp, Artificial Sequence
  ENSG00000162664_20 (sequence is synthesized)
aataaaatgttttttacgaaaactttctccctggattagcagtttaaatgaaacagagttcatcaatgaaatgagtatttaaaataaaaatttgccttaatgtatcagttcagctcacaa

SEQ ID NO: 488789 - DNA, 120 bp, Artificial Sequence
  ENSG00000162664_21 (sequence is synthesized)
acaagtattttaagatgattgagaagacttgaattaaagaaaaaaaaattctcaatcatatttttaaaatataagactaaaattgtttttaaaacacatttcaaatagaagtgagtttga

SEQ ID NO: 488790 - DNA, 120 bp, Artificial Sequence
  ENSG00000162664_22 (sequence is synthesized)
accttatttatactctttttaagtttgttccttttccctgtgcctgtgtcaaatcttcaagtcttgctgaaaatacatttgatacaaagttttctgtagttgtgttagttcttttgtcat

SEQ ID NO: 488791 - DNA, 120 bp, Artificial Sequence
  ENSG00000162664_23 (sequence is synthesized)
gtctgtttttggctgaagaaccaagaagcagacttttcttttaaaagaattatttctctttcaaatatttctatcctttttaaaaaattcctttttatggcttatatacctacatattta

SEQ ID NO: 488792 - DNA, 120 bp, Artificial Sequence
  ENSG00000162664_24 (sequence is synthesized)
aaaagagaacatgagcttgatagaggatctattcttaaataatttattttcaaacaaccgtctatgtcactaaaaagtagtgctcttatttttttcaatctttactgtggcctcttttga

SEQ ID NO: 488793 - DNA, 79 bp, Artificial Sequence
  ENSG00000162664_25 (sequence is synthesized)
tgctcttatttttttcaatctttactgtggcctcttttgagagtagggtccgtagttttttttttttttcttttttgag

SEQ ID NO: 488794 - DNA, 85 bp, Artificial Sequence
  ENSG00000162664_26 (sequence is synthesized)
aacctcctgggctcaagcgatcctccaacttagcctcccaagtagctgggactgttaagttgtagagacagggttttaccatgtt

SEQ ID NO: 488795 - DNA, 120 bp, Artificial Sequence
  ENSG00000162664_27 (sequence is synthesized)
tgcaggtgtgagccaccatgcctggcatagggggctgtatttcagtgaaattagaaaagttttgaggcatcgaatggataaatggatggatatatcaaattgtaaggtattaagtgggtg

SEQ ID NO: 488796 - DNA, 120 bp, Artificial Sequence
  ENSG00000162664_28 (sequence is synthesized)
gatatatcaaattgtaaggtattaagtgggtgaatgtatggacatttgtagaatcccacagataatttatctttttgtgtaaaataaggcttttaaaactagactttctgaaccaataca

SEQ ID NO: 488797 - DNA, 120 bp, Artificial Sequence
  ENSG00000162664_29 (sequence is synthesized)
gttttttttttttgaggtgaactaggtttgcctagctttaagctagcaatatctgatagatacttgcatctaattttagggatttggtgccaaataagagaagggtagttgaagactaga

SEQ ID NO: 488798 - DNA, 120 bp, Artificial Sequence
  ENSG00000162664_30 (sequence is synthesized)
taaatttggatactatctaggagtctgtatttacttagcaggcttttgaaagccgttttgcttaggagttcaaattttaaggataataggacttgttaccctcttatttctcctttattt

SEQ ID NO: 488799 - DNA, 120 bp, Artificial Sequence
  ENSG00000162664_31 (sequence is synthesized)
ttaaaaatatttgtggaagggctaaggtaaaagaataataaattcctctaggttattagtatttggttcttctgatactaagctgagtgattttttttaaaacaatgtctctggtagtct

SEQ ID NO: 488800 - DNA, 120 bp, Artificial Sequence
  ENSG00000162664_32 (sequence is synthesized)
gattgagatatgaaacttttgggaagaaaaccattatgtaacaagaatcctatgtaacaactgggtaaatgttttagaatgagagataggaaagaacatctaaatagtacttttttgtgg

SEQ ID NO: 488801 - DNA, 120 bp, Artificial Sequence
  ENSG00000162664_33 (sequence is synthesized)
gacgcatgagcctttatacagcctagctaatttgcaaggtaatgataaataaaagtgtattttgttactgtgcttaattcagaaattcaaattcatgtatttcctattggataatttgta

SEQ ID NO: 488802 - DNA, 120 bp, Artificial Sequence
  ENSG00000162664_34 (sequence is synthesized)
ggcgggcagtttactttatagtcaggttagtttttgtgatccttagtgtttatatttgcattgcttttgtaataaggatgtatataagatcttaaacgcctttcaacttctgttttcaag

SEQ ID NO: 488803 - DNA, 120 bp, Artificial Sequence
  ENSG00000162664_35 (sequence is synthesized)
tatcacttgttttctctattacaaagtgagatacatagttctaaataaccaaagaaatttatttataacctacacagttgtttcagctccatgcctagggactatcctgtattattcgct

SEQ ID NO: 488804 - DNA, 120 bp, Artificial Sequence
  ENSG00000162664_36 (sequence is synthesized)
ttttatcactttctacctacagtctaccaaaaagtctgtctgttctacttccaaaatttatctgccgactcttctacctccactgcaaccaacccagttcaagtcatgataatttcttgt

SEQ ID NO: 488805 - DNA, 120 bp, Artificial Sequence
  ENSG00000162664_37 (sequence is synthesized)
taactaatcttgattccacccttaccatgatagattcagttttctacacaagtataagcttttaaaaatgtaattcagatgatgttaatctcatgctttttttttttttgtacctataca

SEQ ID NO: 488806 - DNA, 120 bp, Artificial Sequence
  ENSG00000162664_38 (sequence is synthesized)
gttagaactccttatcatgttgatcagactggcctagctttacaactttatatcatataccattcttaccagccataatggccttttgttacttttttgatgagttctttcctacaaaga

SEQ ID NO: 488807 - DNA, 120 bp, Artificial Sequence
  ENSG00000162664_39 (sequence is synthesized)
cctttgcattttcttattctatagcctatacccatcagctttccttggctgattcttcatccttcaggtcaccttaaatgttagaaaaggggagtagttctaaaatgtttgtagaaacga

SEQ ID NO: 488808 - DNA, 84 bp, Artificial Sequence
  ENSG00000162664_40 (sequence is synthesized)
ggttctgtctttgtcatgcaggctggaattcagtggcacgatcatggcttactgcagctttgacctcctgggctcaagcggtcg

SEQ ID NO: 488809 - DNA, 120 bp, Artificial Sequence
  ENSG00000162664_41 (sequence is synthesized)
tggcttactgcagctttgacctcctgggctcaagcggtcgtcccgccttagcctcccaagtagctgggaccacagacgtgcaccatcacactcagctaatattttttttgtagagatggg

SEQ ID NO: 488810 - DNA, 80 bp, Artificial Sequence
  ENSG00000162664_42 (sequence is synthesized)
cagctaatatagtcttgaactcctggacacaagcagtcctcccacctcagcttcccaaagtgctagaattacaggcatga

SEQ ID NO: 488811 - DNA, 120 bp, Artificial Sequence
  ENSG00000162664_43 (sequence is synthesized)
atttttaacaaatatctcacatgattttgaaggtagtggtcagtgattgcactttgaggacattcatagggccctcatacaaatttctggtgcctgtaactcttcccctatcaaggcagg

SEQ ID NO: 488812 - DNA, 120 bp, Artificial Sequence
  ENSG00000162664_44 (sequence is synthesized)
agtttccgcccttttgaatataaacataggtttgggggattcttcataatactttctgaaagcactggaatctataacagacctgtgggagtcagaaaatggggacttttcccccctcat

SEQ ID NO: 488813 - DNA, 120 bp, Artificial Sequence
  ENSG00000162664_45 (sequence is synthesized)
ttaatacttacaactatattggtaagttagtaggagtagtaattttcccatataataagcccactcttgtacatgtagaaacagagaaaagaactacaaaggtaaatgttagtgcatgtt

SEQ ID NO: 488814 - DNA, 120 bp, Artificial Sequence
  ENSG00000162664_46 (sequence is synthesized)
gaaatgtatttaagaactctgtttttgttggcaagattgttcttattgtagaagtggatattatcagattattttagatgttattcaacatttgatttatttaccaaattgtccttactt

SEQ ID NO: 488815 - DNA, 120 bp, Artificial Sequence
  ENSG00000162664_47 (sequence is synthesized)
tgaatataagcaaacttttttattgtggtaaagtatacatagcataaaattaccattctaatcattttttaatgtaccatttagtggcattaattacaagcaaccttttttttttttttt

SEQ ID NO: 488816 - DNA, 85 bp, Artificial Sequence
  ENSG00000162664_48 (sequence is synthesized)
caaccttttttttttttttttgagacatagctatctcagctcactgcaatctctgcttcctgggttcaagcgattcttgtgcctc

SEQ ID NO: 488817 - DNA, 120 bp, Artificial Sequence
  ENSG00000162664_49 (sequence is synthesized)
ctgggattataggcatgagccaccgcgtctggcatacaaacttttgattacagtttgacacctgttgatggacagaaaatggagtaaccgtccaggcaggaatgttctagtctgtgtgac

SEQ ID NO: 488818 - DNA, 120 bp, Artificial Sequence
  ENSG00000162664_50 (sequence is synthesized)
agtctgtgtgacagttacagttcattttataaataaacaattgactttttttggtagttatggtccctaccctcagtgctgtatctctatttggtattcaaacaaatccagggaatctgc

SEQ ID NO: 488819 - DNA, 120 bp, Artificial Sequence
  ENSG00000162664_51 (sequence is synthesized)
aaggctgaagggcagattcttggcaatggtaaattcagtaggtcctgccaccatttgaggcctcctcggagacagccatactagtctaatctcttcttgactttcccttcttctttccca

SEQ ID NO: 488820 - DNA, 120 bp, Artificial Sequence
  ENSG00000162664_52 (sequence is synthesized)
gtcctctaattcccagaggtctgttgtgaattctaatgctttcagaaaatattacggagaatcccacaatgataaaatttcccagtttttgttttaaaacaaagttgaaaaatattatat

SEQ ID NO: 488821 - DNA, 120 bp, Artificial Sequence
  ENSG00000162664_53 (sequence is synthesized)
taggggtcagggtgaggtgctgttgatggtgacagatggcccccttggcgacagggaagtatgaaatagcatggagtgtggaagggtactatgggtagcttatttattagatcagtataa

SEQ ID NO: 488822 - DNA, 120 bp, Artificial Sequence
  ENSG00000162664_54 (sequence is synthesized)
agtatagatttaagagagttagattaaaatggcatgcttgattcaagtcattaaattctaaagttctattaaaattgtagaggagatacaataatacaaatttcagcaataaggatagat

SEQ ID NO: 488823 - DNA, 120 bp, Artificial Sequence
  ENSG00000162664_55 (sequence is synthesized)
ttataatcacactaggaagacaagaagggtgctgtgaaatatttctagaagatacaaaacaaggaattagatcttggtgaaaccaagagagccaaggaactgacagccacatgccgatga

SEQ ID NO: 488824 - DNA, 120 bp, Artificial Sequence
  ENSG00000162664_56 (sequence is synthesized)
taattaaagaattacctccagttgtagagacagctctgagatggggtgtctgtagtgtgctaagccagatttttgaaggactagatagttattctggtctctgactcagagctgctggtc

SEQ ID NO: 488825 - DNA, 120 bp, Artificial Sequence
  ENSG00000162664_57 (sequence is synthesized)
cacagaattcctctaagctaaagctgtaacacaatttgatgtttgccaaataaggtgagactcacagagtatatgtgcagagcatataatgcagagcatacaaataggggccatcgaagt

SEQ ID NO: 488826 - DNA, 120 bp, Artificial Sequence
  ENSG00000162664_58 (sequence is synthesized)
gtggcaatgccctaggtatattgtgattaccacaaggagctttattcctcatacttagaaaacaagcacacaaagaaaaatctgccagctgtctatttcccaattttccttctgactgtt

SEQ ID NO: 488827 - DNA, 120 bp, Artificial Sequence
  ENSG00000162664_59 (sequence is synthesized)
cctttctccttcctcacacaattaaaatgctaggtttcctgtaatcgcaatcttcagggaatttttcactcaagcccagaaaataaactccagataatgatactgagaaatttattggtt

SEQ ID NO: 488828 - DNA, 120 bp, Artificial Sequence
  ENSG00000162664_60 (sequence is synthesized)
ggaaaactgctatctacaggccttccactacctatttcttagtagattttacatttttaaagggttgtagaacaccaaaacaatatatgacagatactgtgtttgggccttaaagcctac

SEQ ID NO: 488829 - DNA, 120 bp, Artificial Sequence
  ENSG00000162664_61 (sequence is synthesized)
cctttatataaaaagtttgttgactcctaggctctcatttgcaagtagacaaatgagaaacagcaaatatttaaggaaaagagcaacatgaaaaatacacagcaaacttaacaagcagaa

SEQ ID NO: 488830 - DNA, 120 bp, Artificial Sequence
  ENSG00000162664_62 (sequence is synthesized)
agaattcctggggaaacaattcagggggaaaaaatgaccaagtataattagtattatatggaataataattactactacttataatagtttcatatgtaatcctcatcatattatatgtc

SEQ ID NO: 488831 - DNA, 120 bp, Artificial Sequence
  ENSG00000162664_63 (sequence is synthesized)
ataatcttcaaatattttagaggttattgtactaattttaaaaatgcaagttgctataaagaagtatcttggaaataaacagttgtgaaaataaactctgttttaggctgattagttgaa

SEQ ID NO: 488832 - DNA, 120 bp, Artificial Sequence
  ENSG00000162664_64 (sequence is synthesized)
taaacatggctgagaatcaaattactgagctagaattttgagctgaagatacttccagagcttacaagaaaagataaaaaagatggaagttacagtaaaagacatagatgtatctcttaa

SEQ ID NO: 488833 - DNA, 120 bp, Artificial Sequence
  ENSG00000162664_65 (sequence is synthesized)
agacatagaaaacccagaacaccatctgtttaaaaattaaacttcatgagattaagagccatatgtatagagaattcaccattgaataccctgcatatatcacagtgccaggtaaatact

SEQ ID NO: 488834 - DNA, 120 bp, Artificial Sequence
  ENSG00000162664_66 (sequence is synthesized)
atgcaataaatatttttgaatgtatgtatgtatgttacagtataaatatatagaggagttccagaaagtgaaaaaagaagtgaagaataggaaaaaaaaaaaaatcttctgatgaaagat

SEQ ID NO: 488835 - DNA, 120 bp, Artificial Sequence
  ENSG00000162664_67 (sequence is synthesized)
tcatattagaagtctccagtgctgagcaaaaacaatgaaaaagtcatgcaggatgaatactgacaaaatatgtgtaatcccaagcttagaaaaatctcaaaatgtctaaagagaaacagt

SEQ ID NO: 488836 - DNA, 120 bp, Artificial Sequence
  ENSG00000162664_68 (sequence is synthesized)
gtacctataaggggaaaagaatcacattggtctcagacttgtcatctgttcgttggagtgctacaacatactgctatttttgaagttctgagggagaactgttttgaatttagacttcta

SEQ ID NO: 488837 - DNA, 120 bp, Artificial Sequence
  ENSG00000162664_69 (sequence is synthesized)
tcttgagtgaaactgtcaagagtaagggcacagcaaggacattctaccaattttagaacatgcaaggatttcagaaattaactcataaaacacaacctgcacggcatggtatcaaattat

SEQ ID NO: 488838 - DNA, 120 bp, Artificial Sequence
  ENSG00000162664_70 (sequence is synthesized)
gtaaagaaaaacttggtaaacaagaaattgtcaaatttataatcatagctacgtatttgaacacagcgcttagaaattgtcagataaagagttcaaaatagaggaaacattttgaattat

SEQ ID NO: 488839 - DNA, 120 bp, Artificial Sequence
  ENSG00000162664_71 (sequence is synthesized)
atagtgcacaaattttaatagctatagaatatttgttttcaaatgccatgaaaaaatgaccatgaagcaaaaaccacaatatttttttgtttgttgataggtaggaattcagggtccatc

SEQ ID NO: 488840 - DNA, 120 bp, Artificial Sequence
  ENSG00000162664_72 (sequence is synthesized)
ctgtcatcacaatgcaatgaaacaaaaaattagcaagtggatagcaataaatcaatttttaaaaatcagacaaaagaaaacactgtccttgtaatgcttgcatttaaaaggaaataaaaa

SEQ ID NO: 488841 - DNA, 120 bp, Artificial Sequence
  ENSG00000162664_73 (sequence is synthesized)
cttatgaaagagaatctttattttatttaagcagttctagattatacaaaatgttgaaacatctcaatttggtctctgaggctagcataatccttattccagaaaattgttcatcaaaga

SEQ ID NO: 488842 - DNA, 120 bp, Artificial Sequence
  ENSG00000162664_74 (sequence is synthesized)
tagctatagaccagtctcacttacgaacaaatgtaatttgttgaaactggtcatgttgaaaaaacatgaccaattaaatatcccaaaataatgtgtcatggtagagtagggtttatctga

SEQ ID NO: 488843 - DNA, 120 bp, Artificial Sequence
  ENSG00000162664_75 (sequence is synthesized)
aaactgcaacatgacgattatgtaactcaatcctttaggaaatttattactttaacttaaaaaaaaataccataagcttgatagatgctcgaaaaacatttcctaagattgaacacattc

SEQ ID NO: 488844 - DNA, 120 bp, Artificial Sequence
  ENSG00000162664_76 (sequence is synthesized)
cagatttaaatttttcaggctgagaatagaataaagcctttgtaacttggctaaggactaggaaggtcttccagaaagcttcatcaaacatctgcattcaagtcaggattaagacaataa

SEQ ID NO: 488845 - DNA, 120 bp, Artificial Sequence
  ENSG00000162664_77 (sequence is synthesized)
tgactgttgcctatgcaacaatcatttaaccctaagaaatagaagtattaggaagagaaaacatagtccttattttgagcagtgtgattgtagagacaaacatccaagagaaacagttga

SEQ ID NO: 488846 - DNA, 120 bp, Artificial Sequence
  ENSG00000162664_78 (sequence is synthesized)
aaaactattagaaatgacaaaaggtagttttgtttaatagttcaccatgaaaatctgtactatatagaaaatctgtatatagaatatagcattggccaattggaaatgtaatttgaaaat

SEQ ID NO: 488847 - DNA, 120 bp, Artificial Sequence
  ENSG00000162664_79 (sequence is synthesized)
cccatttgcagcaaaacttggaactgtatactgtctaagaataaacaatgggaaaaatgcaaaatccttatgaggaaaatgatacattttaatggaggaaataaaatgcctgaataaaca

SEQ ID NO: 488848 - DNA, 120 bp, Artificial Sequence
  ENSG00000162664_80 (sequence is synthesized)
aattagacaactataagattttggatatattattttaagtactctttaggcatgttatgatacttgaacttcactgtttgctattgaatcatcaccttaaatatttaaaggtgttaatta

SEQ ID NO: 488849 - DNA, 120 bp, Artificial Sequence
  ENSG00000162664_81 (sequence is synthesized)
atgggtataaaatttaaatcagtattactggcagacgttattttaggaaaacaccagataactatatcatgtcaatataatagagtaagatacactttttagcagtgaacttttaaaaaa

SEQ ID NO: 488850 - DNA, 120 bp, Artificial Sequence
  ENSG00000162664_82 (sequence is synthesized)
tttacttttaacttcttgtcaatcaaagtatcctgaaaaatgatataaaaatgttattgaaaatattatttatgaagctttttcttaataattaaaaaaaatcttttctaatgtggggtg

SEQ ID NO: 488851 - DNA, 120 bp, Artificial Sequence
  ENSG00000162664_83 (sequence is synthesized)
attctaattttaaaggaagagcatattgcaataataaaaatatttttaaaattatgttcaggttatttattgacaggtactacttacaccaaagcacttgtgctctaggctagaagcatt

SEQ ID NO: 488852 - DNA, 120 bp, Artificial Sequence
  ENSG00000162664_84 (sequence is synthesized)
gtattaaagccatgaatactatacctttgactagtcgagattgtatttatattttcctgttactactgtataaagcttaaacctacttaaacaactacaagctttaaggttgaccatatt

SEQ ID NO: 488853 - DNA, 120 bp, Artificial Sequence
  ENSG00000162664_85 (sequence is synthesized)
tcaggagaaggggtgtctactttttgaggcacaaaggttcctgctgaatataagtaaaactagttagtagacatgtgaaacagtcatccttctgcataaattgaaggatccggattcctt

SEQ ID NO: 488854 - DNA, 120 bp, Artificial Sequence
  ENSG00000162664_86 (sequence is synthesized)
aatgatggactgaatgatgcttactttccttctttctgcttccagtgtaccactatggtttatagtaaagaaaaattaagaaagtgaacagttgcaactattttgcttatgtgatagatg

SEQ ID NO: 488855 - DNA, 120 bp, Artificial Sequence
  ENSG00000162664_87 (sequence is synthesized)
ttttgaaaaatgtagttggaaataggaataatttttatatggttactaggattcagaagtaaatctatttagtgatctgtaaataattgaagtaatgtaacacttaatgttttaatatgt

SEQ ID NO: 488856 - DNA, 120 bp, Artificial Sequence
  ENSG00000162664_88 (sequence is synthesized)
cagttattgcccttttatattgtgaatgtaatgtgcataagctatatccgtagatgttattgttttatctcatgtgtaattgtgggcctttataaaattgtgttgtaagatatcaagcaa

SEQ ID NO: 488857 - DNA, 120 bp, Artificial Sequence
  ENSG00000162669_0 (sequence is synthesized)
aaatcggcgctcgactggcctaggagctgtccgcagggagatttatgacaaagtccagttttcaacaatgctgaaatcaaatgattgcctgttttctttggaaaatttgttttttgaaaa

SEQ ID NO: 488858 - DNA, 120 bp, Artificial Sequence
  ENSG00000162669_1 (sequence is synthesized)
accagatgaagttgaaaaccatccagacaatgaaaagtcattggattggtttctccctcctgctccattgatttcagaaattccagatactcaggagttagaggaagaattagaaagtca

SEQ ID NO: 488859 - DNA, 120 bp, Artificial Sequence
  ENSG00000162669_2 (sequence is synthesized)
taaactgttaggtcaggaaaagaggccaaaaatgttaacatcaaatttaaagataactaatgaagatacaaattatatttcactaacacaaaaattccagtttgcctttccttctgataa

SEQ ID NO: 488860 - DNA, 120 bp, Artificial Sequence
  ENSG00000162669_3 (sequence is synthesized)
atatgaacaggatgatctaaatttagaaggggtaggtaataatgacttatcacatattgctggcaagctgacatatgcttctcagaaatataaaaatcacattggcactgagatagcacc

SEQ ID NO: 488861 - DNA, 120 bp, Artificial Sequence
  ENSG00000162669_4 (sequence is synthesized)
tgagaagagtgttcctgatgatacaaaattagttaattttgcagaagataaaggagagagcacatcagtattccggaaaagattatttaaaatatctgacaatatacatgggagtgctta

SEQ ID NO: 488862 - DNA, 120 bp, Artificial Sequence
  ENSG00000162669_5 (sequence is synthesized)
ttctaatgacaatgaattggactctcacattggctcagtgaaaattgtacaaacagaaatgaacaaagggaaatcaaggaactatagcaatagtaagcaaaaatttcagtattctgcaaa

SEQ ID NO: 488863 - DNA, 120 bp, Artificial Sequence
  ENSG00000162669_6 (sequence is synthesized)
tgtgtttacagcaaataatgctttttctgcttctgaaatcggagaaggcatgttcaaagcaccatctttttcagttgctttccaacctcatgatattcaagaggtaacagaaaatggttt

SEQ ID NO: 488864 - DNA, 120 bp, Artificial Sequence
  ENSG00000162669_7 (sequence is synthesized)
aggttccttgaaggctgtcacagaaattccggcaaaatttagaagtattttcaaagaatttccatatttcaactatatacagtccaaggcctttgatgatcttctttacacagataggaa

SEQ ID NO: 488865 - DNA, 120 bp, Artificial Sequence
  ENSG00000162669_8 (sequence is synthesized)
ttttgtgatttgtgctccaactggttctggaaaaactgtagtgtttgaactagctataacaagattgttaatggaagtaccattgccatggttgaatattaaaattgtttacatggcacc

SEQ ID NO: 488866 - DNA, 120 bp, Artificial Sequence
  ENSG00000162669_9 (sequence is synthesized)
aataaaagccttgtgcagtcagcgttttgatgactggaaagaaaaatttggaccaataggattgaattgtaaagaacttactggagatacagtaatggatgatctatttgagattcagca

SEQ ID NO: 488867 - DNA, 120 bp, Artificial Sequence
  ENSG00000162669_10 (sequence is synthesized)
tgcccatattattatgacaactccagaaaaatgggatagcatgactaggaaatggagagacaactctttggttcagctggttcgactgtttctcattgatgaggtacatattgtaaaaga

SEQ ID NO: 488868 - DNA, 120 bp, Artificial Sequence
  ENSG00000162669_11 (sequence is synthesized)
tgaaaatcgtggtccaactcttgaagttgtagttagcagaatgaaaactgtacagtctgtttctcagactttaaaaaataccagcactgctattccaatgcgatttgtagctgtatctgc

SEQ ID NO: 488869 - DNA, 120 bp, Artificial Sequence
  ENSG00000162669_12 (sequence is synthesized)
aacaattccaaatgctgaggatattgcagaatggctttcagatggtgaaagaccagctgtgtgtctgaaaatggatgagagccatagaccagtgaaacttcagaaagtggtccttggatt

SEQ ID NO: 488870 - DNA, 120 bp, Artificial Sequence
  ENSG00000162669_13 (sequence is synthesized)
tccctgcagtagtaaccaaactgagtttaagtttgatttaaccctcaactacaaaattgccagtgttatacaaatgtactctgatcagaaacccacacttgtgttttgtgcaacaaggaa

SEQ ID NO: 488871 - DNA, 120 bp, Artificial Sequence
  ENSG00000162669_14 (sequence is synthesized)
gggtgtgcaacaggctgcttctgttcttgtgaaagatgctaaatttattatgactgtggaacagaaacagaggttacagaagtatgcatattccgtaagagattcaaaactgagagatat

SEQ ID NO: 488872 - DNA, 120 bp, Artificial Sequence
  ENSG00000162669_15 (sequence is synthesized)
cttaaaagatggtgctgcttatcatcatgctggtatggagctgtcagatagaaaagtagttgagggagcttttactgttggagatttaccagttctttttactaccagtactttagctat

SEQ ID NO: 488873 - DNA, 120 bp, Artificial Sequence
  ENSG00000162669_16 (sequence is synthesized)
gggagtaaatttgcctgctcacctagtagttataaaatctacaatgcattatgctggaggactgtttgaagagtacagtgaaacagatattctacagatgattggtagagctggtcgacc

SEQ ID NO: 488874 - DNA, 120 bp, Artificial Sequence
  ENSG00000162669_17 (sequence is synthesized)
tcaatttgacactacagctactgcagttatcatgactcgattaagcacaagggacaagtacattcagatgttagcttgtagagacactgtagaaagcagtttgcacagacatcttattga

SEQ ID NO: 488875 - DNA, 120 bp, Artificial Sequence
  ENSG00000162669_18 (sequence is synthesized)
acatttaaatgcagagatagtactgcataccatcacggatgtgaatattgctgtggaatggatacgatcaactctgctttatatcagagccttgaaaaatccatctcattatggttttgc

SEQ ID NO: 488876 - DNA, 120 bp, Artificial Sequence
  ENSG00000162669_19 (sequence is synthesized)
atctggattgaacaaagatggaattgaagcaaaattacaagaattatgtttgaagaatctgaatgatttatcatccctggacttaataaagatggatgaaggtgttaatttcaaaccaac

SEQ ID NO: 488877 - DNA, 120 bp, Artificial Sequence
  ENSG00000162669_20 (sequence is synthesized)
attgatagctggctgcaaggaatttctagatatacagttaaggataaatgaaaagaaaacactgaatactttgaacaaagatccaaatcggataactatcagatttccaatggaaggaag

SEQ ID NO: 488878 - DNA, 120 bp, Artificial Sequence
  ENSG00000162669_21 (sequence is synthesized)
aattaaaacaagagaaatgaaagtaaattgtcttattcaggctcaactaggatgcattcccatacaagattttgctttgacacaagataccgcaaagattttcagacatggctcccgaat

SEQ ID NO: 488879 - DNA, 120 bp, Artificial Sequence
  ENSG00000162669_22 (sequence is synthesized)
tacaagatggttgtcagattttgtagctgctcaagaaaagaagtttgctgtactattgaatagtttgattttagctaaatgttttaggtgtaaactttgggaaaactctctgcatgtatc

SEQ ID NO: 488880 - DNA, 120 bp, Artificial Sequence
  ENSG00000162669_23 (sequence is synthesized)
caaacaactggaaaaaattggtataacattgtcaaatgcaatcgtaaatgctggtttgacttcctttaaaaaaatagaagagacagatgcaagggaacttgaattgattttaaacagaca

SEQ ID NO: 488881 - DNA, 120 bp, Artificial Sequence
  ENSG00000162669_24 (sequence is synthesized)
tcccccctttggaacccagataaaagaaactgtgatgtatctaccaaaatatgaacttaaagtggaacagattacaagatatagtgatacgacggcagaaatattagtgactgttatatt

SEQ ID NO: 488882 - DNA, 120 bp, Artificial Sequence
  ENSG00000162669_25 (sequence is synthesized)
aagaaattttgaacagctacaaactaaaagaacagcatcggattctcactatgttaccttaatcataggtgacgcagataatcaagtagtttatctgcacaagattacggattctgtttt

SEQ ID NO: 488883 - DNA, 120 bp, Artificial Sequence
  ENSG00000162669_26 (sequence is synthesized)
gctaaaagctggaagttgggctaaaaagattgctgtgaaaagagctcttaaatctgaagatcttagcataaatctaataagttctgaatttgttgggcttgatattcagcagaaacttac

SEQ ID NO: 488884 - DNA, 120 bp, Artificial Sequence
  ENSG00000162669_27 (sequence is synthesized)
agtcttttacttagaacccaagaggtttggaaatcaaatcactatgcaaagaaaatctgaaacacagatttcccattctaaacattcagacatatctacaatagcaggacctaataaagg

SEQ ID NO: 488885 - DNA, 120 bp, Artificial Sequence
  ENSG00000162669_28 (sequence is synthesized)
aacgactgccagcaaaaaacctgggaaccgagaatgcaatcatctttgtaaaagtaaacatacatgtggacatgactgctgtaaaattggagttgcacagaagtcagaaattaaagagtc

SEQ ID NO: 488886 - DNA, 120 bp, Artificial Sequence
  ENSG00000162669_29 (sequence is synthesized)
aacaatttcttcatatttatctgatttaagaaacaggaatgctgtttcatctgttcctccagttaaacgtctgaagatacagatgaataaatctcaaagtgtggaccttaaagagtttgg

SEQ ID NO: 488887 - DNA, 120 bp, Artificial Sequence
  ENSG00000162669_30 (sequence is synthesized)
ttttactccaaaaccttcccttcctagtatatcaaggtcagaatatttaaacatatctgaattgcctataatggagcagtgggatcagcctgaaatctatggaaaagttagacaagaacc

SEQ ID NO: 488888 - DNA, 120 bp, Artificial Sequence
  ENSG00000162669_31 (sequence is synthesized)
atctgaatatcaagacaaagaagttttgaatgtgaactttgaattgggaaatgaagtttgggatgattttgatgatgaaaacttagaagttactagcttttcaactgatactgagaagac

SEQ ID NO: 488889 - DNA, 120 bp, Artificial Sequence
  ENSG00000162669_32 (sequence is synthesized)
aaaaatatcaggatttggaaacactttgagttcaagtaccaggggaagtaagctaccccttcaagagtcaaagagcaaattccaaagagaaatgtcaaacagttttgtttcatcacatga

SEQ ID NO: 488890 - DNA, 120 bp, Artificial Sequence
  ENSG00000162669_33 (sequence is synthesized)
gatgtcggatatttctttatcaaattctgctatgcccaagttcagtgcatcctccatgacaaaattacctcaacaagccggaaatgcagttattgtccattttcaagaaagaaaaccaca

SEQ ID NO: 488891 - DNA, 120 bp, Artificial Sequence
  ENSG00000162669_34 (sequence is synthesized)
aaatctgtcaccagagattgagaagcaatgctttactttctctgaaaaaaacccaaattcttcaaattataaaaaagtggatttttttattagaaacagtgaatgtaaaaaggaagttga

SEQ ID NO: 488892 - DNA, 120 bp, Artificial Sequence
  ENSG00000162669_35 (sequence is synthesized)
tttcagtatgtatcatcctgatgatgaagctgatgaaatgaagtctttattgggaatatttgatggtattttctaaaacaaacaaatactttttatattgataagagaaagaataaagac

SEQ ID NO: 488893 - DNA, 120 bp, Artificial Sequence
  ENSG00000162669_36 (sequence is synthesized)
acctaatcacaaagcatgctttttatttttaaaaagtagttcataattgttcggatttttttctcctgtatttgattagctttgttcactttttgcaacaaaatgtatgggccgatttat

SEQ ID NO: 488894 - DNA, 120 bp, Artificial Sequence
  ENSG00000162669_37 (sequence is synthesized)
tttcccattatattgtaacttcttgaaaagctcttttacagtggctttgtttcaataagcccttaagttaagggctgattgcacttagaaataagttgcacttagaaataattatttggc

SEQ ID NO: 488895 - DNA, 120 bp, Artificial Sequence
  ENSG00000162669_38 (sequence is synthesized)
tattaattggattttgacaagaaccaatgtaaaatttcatttttatattttcttaacaagaagaaaaatattctatgaaagcaaagtaatgctaacttaatgaatctgcttattgtatgg

SEQ ID NO: 488896 - DNA, 120 bp, Artificial Sequence
  ENSG00000162669_39 (sequence is synthesized)
attaatcactaatattattcccatgtattttgttttactaaagatttttaagaatccagtggctatttgaacctactgttatctaactttgagcaacaataaatgaaacattaatcagta

SEQ ID NO: 488897 - DNA, 120 bp, Artificial Sequence
  ENSG00000162669_40 (sequence is synthesized)
aagtggggacccagccgagccgtccgggcagcggtcgatctctagagccgtctgccgggcaggcagcggacgggcgcggcgagttgttggtcaccaggcgtctccaggccgccggcccgc

SEQ ID NO: 488898 - DNA, 120 bp, Artificial Sequence
  ENSG00000162669_41 (sequence is synthesized)
taggttttttatgacttgtgaaatatttagtcatcttgatcatagagaaaagtgaatttttttgtcctttcctttaataggaaagtatgttgtagaaagttgtggctagatctcataaat

SEQ ID NO: 488899 - DNA, 120 bp, Artificial Sequence
  ENSG00000162669_42 (sequence is synthesized)
ataacagtattaaggccataaaatttggttaatcaggtttaataaaacattttttgtggacatgtggacatctcgtttgctagtatctaacagtcttagtttcctgggtttcaggtgcct

SEQ ID NO: 488900 - DNA, 120 bp, Artificial Sequence
  ENSG00000162669_43 (sequence is synthesized)
cgaaggtgaagcagtccatgtcctcggtagccacaggatagactttgccagccttcaccagggcagcacagctggcctctgcctcgatgggtgcatcaagaagcaggaagattgatggct

SEQ ID NO: 488901 - DNA, 120 bp, Artificial Sequence
  ENSG00000162669_44 (sequence is synthesized)
aataaaaataattgcttagatgattaccacttgctcctcaattctgtatgcttggcattgtggtaagcactaaatatagatgcaaaagtgaaaatatatggactccgtccttgaggagga

SEQ ID NO: 488902 - DNA, 120 bp, Artificial Sequence
  ENSG00000162669_45 (sequence is synthesized)
tctcatggttaatggggtacatggacatgtaaagaaataatcatgtgcactattatactttccataatgaatatatgacttaattttttcttcaatttttaagtaaacgtcttgaaaaat

SEQ ID NO: 488903 - DNA, 120 bp, Artificial Sequence
  ENSG00000162670_0 (sequence is synthesized)
actagttctctctttatctcgttgtcttcaacacatccttttacttctctttgcagatttatctgtattccacctcctgttctctggggttacacagcttctgcctttccccactgtatg

SEQ ID NO: 488904 - DNA, 120 bp, Artificial Sequence
  ENSG00000162670_1 (sequence is synthesized)
gggatgtgcagcctgtaaattttcactttgcttaaggatcaccacgaatcaccccccaccattccccacccccccatataaagcattttcacattctgctttcttgccttgggggttcgt

SEQ ID NO: 488905 - DNA, 120 bp, Artificial Sequence
  ENSG00000162670_2 (sequence is synthesized)
ggctctctgtgtaactggtttttacttggttacatgccaccaggaactgctgattattttaaagtcctactaccctgcagctcactactttaccttgatttggaagatcatggaatatct

SEQ ID NO: 488906 - DNA, 120 bp, Artificial Sequence
  ENSG00000162670_3 (sequence is synthesized)
atttgaatcctggatgtatttttctcacagtcttcttgcttcctgaaatttcctctggtgttgagggaaagctgagagaatgaaggctctaaatccccagtggaagcatgatatggcgaa

SEQ ID NO: 488907 - DNA, 120 bp, Artificial Sequence
  ENSG00000162670_4 (sequence is synthesized)
gcagagctggtgctgaattgttctctctgatggctctatgggagtggatagcactgagtcttcattgctgggttttagcggttgctgctgtttcggatcagcatgccacaagccccttcg

SEQ ID NO: 488908 - DNA, 120 bp, Artificial Sequence
  ENSG00000162670_5 (sequence is synthesized)
actggctcctctctgataagggacccttccatcgctcacaggaatacacagattttgtggacagaagccggcagggatttagcacaagatacaagatatacagggagtttggccgctgga

SEQ ID NO: 488909 - DNA, 120 bp, Artificial Sequence
  ENSG00000162670_6 (sequence is synthesized)
aagtaaataaccttgcagttgagagaagaaatttccttggctctcctctgcctcttgcccctgaattcttccgcaacataagacttttgggacgtcgacctacccttcagcaaatcacag

SEQ ID NO: 488910 - DNA, 120 bp, Artificial Sequence
  ENSG00000162670_7 (sequence is synthesized)
aaaaccttatcaagaaatatgggacacatttcttgctatctgctactctgggaggagaggagtcactcacaatttttgtggacaagcggaagttgagcaaacgagctgaaggaagtgatt

SEQ ID NO: 488911 - DNA, 120 bp, Artificial Sequence
  ENSG00000162670_8 (sequence is synthesized)
ccaccaccaatagctcttcggtcactctggagacgctacatcagctagccgcttcttatttcattgacagggacagcacccttcggagacttcaccacattcaaattgcatccactgcca

SEQ ID NO: 488912 - DNA, 120 bp, Artificial Sequence
  ENSG00000162670_9 (sequence is synthesized)
taaaggtaacagaaacacggactggtcctcttggctgcagtaactatgacaacctagattctgtcagttctgttctggttcagagtcctgagaataagattcagttgcaagggcttcaag

SEQ ID NO: 488913 - DNA, 120 bp, Artificial Sequence
  ENSG00000162670_10 (sequence is synthesized)
tacttctcccagactatcttcaggaacgttttgtacaagcagctttgagctacattgcttgcaattcagagggagagtttatctgcaaggaaaatgactgctggtgtcactgtggtccca

SEQ ID NO: 488914 - DNA, 120 bp, Artificial Sequence
  ENSG00000162670_11 (sequence is synthesized)
aatttccagaatgcaactgcccctccatggacattcaagccatggaagagaatcttcttcgaataactgaaacctggaaagcttacaacagtgactttgaggaatcagatgaattcaagt

SEQ ID NO: 488915 - DNA, 120 bp, Artificial Sequence
  ENSG00000162670_12 (sequence is synthesized)
tatttatgaaaaggctacctatgaattatttcctcaacacatctactataatgcatttgtggacaatggattctaattttcagcgccgttatgaacaactggagaacagcatgaaacaac

SEQ ID NO: 488916 - DNA, 120 bp, Artificial Sequence
  ENSG00000162670_13 (sequence is synthesized)
aaggcgcagaaaattgtacacaagctttttagccttagcaagaggtgtcataaacaacccctcatcagcctgccaagacaaagaacctcaacctactggcttactcgcatccagtctttt

SEQ ID NO: 488917 - DNA, 120 bp, Artificial Sequence
  ENSG00000162670_14 (sequence is synthesized)
ctctactgcaatgagaacggcctcctaggcagcttttcagaagagacgcactcgtgcacgtgtccgaatgaccaggtggtctgcaccgcgttcctgccctgcacagtgggagacgcctct

SEQ ID NO: 488918 - DNA, 120 bp, Artificial Sequence
  ENSG00000162670_15 (sequence is synthesized)
gcctgcctgacatgcgcaccagacaaccgcacccgctgcggcacctgcaacaccggctacatgctcagccaggggctctgcaagcctgaagtcgccgagtccaccgatcactatattggc

SEQ ID NO: 488919 - DNA, 120 bp, Artificial Sequence
  ENSG00000162670_16 (sequence is synthesized)
tttgaaactgacctgcaagatctcgagatgaaatatctgctgcagaaaacggacagacgaatagaagtccatgccatttttatcagcaatgacatgcgcctcaatagctggtttgatccc

SEQ ID NO: 488920 - DNA, 120 bp, Artificial Sequence
  ENSG00000162670_17 (sequence is synthesized)
tcctggcgtaagcggatgctcctcaccttgaagagcaataagtacaagtcaagtctggtccatatgattttgggtctctctttacagatttgcttaactaaaaacagcaccttggagcca

SEQ ID NO: 488921 - DNA, 120 bp, Artificial Sequence
  ENSG00000162670_18 (sequence is synthesized)
gtgttggctgtttatgtcaatcccttcggaggcagccactctgagagctggtttatgcctgtgaatgaaaacagctttccagactgggagcggactaagttggacctacccctgcagtgt

SEQ ID NO: 488922 - DNA, 120 bp, Artificial Sequence
  ENSG00000162670_19 (sequence is synthesized)
tataactggacattaactctggggaacaaatggaagacattttttgagacagtacacatctacctgagaagtcgcatcaagtccaatggtcccaatggtaatgagagcatttactatgaa

SEQ ID NO: 488923 - DNA, 120 bp, Artificial Sequence
  ENSG00000162670_20 (sequence is synthesized)
cctctggagtttattgacccttcccggaacctgggctatatgaaaatcaataacattcaagtgtttggctacagcatgcactttgaccctgaagcaattcgggacctgattttgcagctg

SEQ ID NO: 488924 - DNA, 120 bp, Artificial Sequence
  ENSG00000162670_21 (sequence is synthesized)
gactacccctatactcagggatcccaggattcagcacttttgcaactactagagatcagagaccgtgtaaataaactctccccacctggtcagcgtcgtctagatcttttctcttgcttg

SEQ ID NO: 488925 - DNA, 120 bp, Artificial Sequence
  ENSG00000162670_22 (sequence is synthesized)
cttcgtcatagactcaagctgtctactagtgaggtggtgaggatccaatctgctctgcaggcgtttaatgccaaattgccaaacacaatggattatgacacgaccaaattatgtagttaa

SEQ ID NO: 488926 - DNA, 120 bp, Artificial Sequence
  ENSG00000162670_23 (sequence is synthesized)
ccataaatgtcaagcacaacccaaaatcttgaaggagtttttacagtgcttttgtggaacagtttatgtttggaagagtaaatttaaattgtcttttcaatatctgtcttatatcagtca

SEQ ID NO: 488927 - DNA, 120 bp, Artificial Sequence
  ENSG00000162670_24 (sequence is synthesized)
ataacattggatggcaatttacacacatgaacttgctgacaatgaatatattatacagcagttttggtttatgaatgacataaatactgacaccagtctagaagacattctactttttac

SEQ ID NO: 488928 - DNA, 120 bp, Artificial Sequence
  ENSG00000162670_25 (sequence is synthesized)
aataaatttcatttgtaattttatatgttccgtggcaatgcttttgtgcattacatcctctagagggaacataaaaagataccaataaaattttgtagctgaacagttattaaaaagaaa

SEQ ID NO: 488929 - DNA, 120 bp, Artificial Sequence
  ENSG00000162670_26 (sequence is synthesized)
ccggtcgtcctgcctgacaagccagtgccatcagagtccgtgacttcatttgaagaaaggagggcttcatataattcaattcaaacattctctttggaggactgctgttgttgcgcaagg

SEQ ID NO: 488930 - DNA, 120 bp, Artificial Sequence
  ENSG00000162670_27 (sequence is synthesized)
aaaaaaaaagaaaaagaaaaaaaaaactttcagtacagtcagatccagtaaggaacagacagtcagtatttaggtgttgagggaaagctgagagaatgaaggctctaaatccccagtgga

SEQ ID NO: 488931 - DNA, 120 bp, Artificial Sequence
  ENSG00000162670_28 (sequence is synthesized)
tgaaattcaaatcctgttatactctacatagacaataaaaattggaatggagttttaggttactttcaaaggctgattcaatgtaatgtgaaaaattaaacaaatgcaagtaaataactt

SEQ ID NO: 488932 - DNA, 120 bp, Artificial Sequence
  ENSG00000162670_29 (sequence is synthesized)
aattgtcttgagtcacaggcagcaggaacgccaaagaagtgggacctgggagggctgctgccgccgctgctgcatctaaccacggttccccgtccccttgcctaagcctcaccggcacag

SEQ ID NO: 488933 - DNA, 120 bp, Artificial Sequence
  ENSG00000162670_30 (sequence is synthesized)
cgcccccgaaagcgcctagcgactcggcctcctccgcatcttcagcccttcgatcaccgcccgcaccccccaccccccaccgcctcgtgcaaatcgctgatgatttggtcatcgtaatgt

SEQ ID NO: 488934 - DNA, 120 bp, Artificial Sequence
  ENSG00000162670_31 (sequence is synthesized)
tgcaagtgaaaatgttcaagggaaatactagtgaaatgcactgatggaatactattaatcctaatgataatggtcccaacgcaggaactgctgattattttaaagtcctactaccctgca

SEQ ID NO: 488935 - DNA, 120 bp, Artificial Sequence
  ENSG00000162670_32 (sequence is synthesized)
ctgatggctgttctcctagtccccaagagttgaaccggagaggcttttactttgcaccaggtcgagaacgtgatcagccctttagagaaggaacctccttgtaacaggaattctgctggg

SEQ ID NO: 488936 - DNA, 120 bp, Artificial Sequence
  ENSG00000162670_33 (sequence is synthesized)
aaacgccgtgtaggcactacctccgaagataagatgcatgtttggagctgtgtaaaatgcccactggctgtttgaaagaaggaaaaggtgactagggttgcaaattaaccttagtatcac

SEQ ID NO: 488937 - DNA, 120 bp, Artificial Sequence
  ENSG00000162670_34 (sequence is synthesized)
ccaggatataaaactgccacagcagcttggaagacagatgattcagattttggggactttcttttgcgtgttacatagatttgtttgtcatcatgcagttaagcaggtgttgagggaaag

SEQ ID NO: 488938 - DNA, 120 bp, Artificial Sequence
  ENSG00000162676_0 (sequence is synthesized)
ggcgagctccgcgcagggagggtgcgcccaccggtcccgccgggcgcccgcgggacgcgccgccagggccctctccgccgggggctcggcgctcgcccacctcttccaaatttaaccatt

SEQ ID NO: 488939 - DNA, 120 bp, Artificial Sequence
  ENSG00000162676_1 (sequence is synthesized)
gcgctcgcccacctcttccaaatttaaccattacctaaatccgaagggaaatgagcaaacctctcggattgggtgtcaaggtctcctccgggctggggctgagcaagccctcggagtgac

SEQ ID NO: 488940 - DNA, 120 bp, Artificial Sequence
  ENSG00000162676_2 (sequence is synthesized)
cgtgggtgacagcggctccagggactcttggggcgcagtggggaaagtgccggaccaccatgccgcgctcatttctcgtcaaaagcaagaaggctcacagctaccaccagccgcgctccc

SEQ ID NO: 488941 - DNA, 120 bp, Artificial Sequence
  ENSG00000162676_3 (sequence is synthesized)
caggaccagactattccctccgtttagagaatgtaccggcgcctagccgagcagacagcacttcaaatgcaggcggggcgaaggcggagccccgggaccgtttgtcccccgaatcgcagc

SEQ ID NO: 488942 - DNA, 120 bp, Artificial Sequence
  ENSG00000162676_4 (sequence is synthesized)
tgaccgaagccccagacagagcctccgcatccccagacagctgcgaaggcagcgtctgcgaacggagctcggagtttgaggacttctggaggcccccgtcaccctccgcgtctccagcct

SEQ ID NO: 488943 - DNA, 120 bp, Artificial Sequence
  ENSG00000162676_5 (sequence is synthesized)
cggagaagtcaatgtgcccatcgctggacgaagcccagcccttccccctgcctttcaaaccgtactcatggagcggcctggcgggttctgacctgcggcacctggtgcagagctaccgac

SEQ ID NO: 488944 - DNA, 120 bp, Artificial Sequence
  ENSG00000162676_6 (sequence is synthesized)
gtgcagagctaccgaccgtgtggggccctggagcgtggcgctggcctgggcctcttctgcgaacccgccccggagcctggccacccggccgcgctgtacggcccgaagcgggctgccggc

SEQ ID NO: 488945 - DNA, 120 bp, Artificial Sequence
  ENSG00000162676_7 (sequence is synthesized)
cgccagggagctgcagcgcaggggccggtgccaccgctggccctggcctagggctctacggcgacttcgggtctgcggcagccgggctgtatgagaggcccacggcagcggcgggcttgc

SEQ ID NO: 488946 - DNA, 120 bp, Artificial Sequence
  ENSG00000162676_8 (sequence is synthesized)
tgtaccccgagcgtggccacgggctgcacgcagacaagggcgctggcgtcaaggtggagtcggagctgctgtgcacccgcctgctgctgggcggcggctcctacaagtgcatcaagtgca

SEQ ID NO: 488947 - DNA, 120 bp, Artificial Sequence
  ENSG00000162676_9 (sequence is synthesized)
gcaaggtgttctccacgccgcacgggctcgaggtgcacgtgcgcaggtcccacagcggtaccagaccctttgcctgcgagatgtgcggcaagaccttcgggcacgcggtgagcctggagc

SEQ ID NO: 488948 - DNA, 120 bp, Artificial Sequence
  ENSG00000162676_10 (sequence is synthesized)
agcacaaagccgtgcactcgcaggaacggagctttgactgtaagatctgtgggaagagcttcaagaggtcatccacactgtccacacacctgcttatccactcagacactcggccctacc

SEQ ID NO: 488949 - DNA, 120 bp, Artificial Sequence
  ENSG00000162676_11 (sequence is synthesized)
cctgtcagtactgtggcaagaggttccaccagaagtcagacatgaagaaacacactttcatccacactggtgagaagcctcacaagtgccaggtgtgcggcaaggcattcagccagagct

SEQ ID NO: 488950 - DNA, 120 bp, Artificial Sequence
  ENSG00000162676_12 (sequence is synthesized)
ccaacctcatcacccacagccgcaaacacacaggcttcaagcccttcggctgcgacctctgtgggaagggtttccagaggaaggtggacctccgaaggcaccgggagacgcagcatgggc

SEQ ID NO: 488951 - DNA, 120 bp, Artificial Sequence
  ENSG00000162676_13 (sequence is synthesized)
tcaaatgagcaccctggctggctgcaagcagcagctacacaacactacagagggcagcctccctgcttgccaccactctgctccctgcttgcctccactcccttctgactttccagaccc

SEQ ID NO: 488952 - DNA, 120 bp, Artificial Sequence
  ENSG00000162676_14 (sequence is synthesized)
caggtccagtctgcagatcctaccaggttgctcctccttcgccttacctcctggagctgccagaagaaatgaggtaccttttcaaagtgcagccgagagtgagaaccaagtgactctcta

SEQ ID NO: 488953 - DNA, 120 bp, Artificial Sequence
  ENSG00000162676_15 (sequence is synthesized)
ggcttcggacacaaataggctcctctacacctgaagacaaaggcaaagtcaaatggggaccagaataaatcttagaccccacagtccttcccatttccagccctaatctacagacaggaa

SEQ ID NO: 488954 - DNA, 120 bp, Artificial Sequence
  ENSG00000162676_16 (sequence is synthesized)
tgcccttcaggtttcttccctcccccctcttgacctaccccagatatttgtgtggaagaggaggaatcaccatttacaaggtggacaaatgctaatatttttatctagaaagaagagtga

SEQ ID NO: 488955 - DNA, 120 bp, Artificial Sequence
  ENSG00000162676_17 (sequence is synthesized)
gtgttaacttttatttttttccttctggggggtctgttgactcctttcttttgggtgctgcctataaatcttggaggaatcatttctcctcctcaaaaactgattcagaaactgacttgg

SEQ ID NO: 488956 - DNA, 120 bp, Artificial Sequence
  ENSG00000162676_18 (sequence is synthesized)
tgtgaaaacctcatcactggaggtaaaagcacaagcaatgcctgtggacaagatgtcattcattcactcagcaaatgttcatggatcaccggctaccaaggtaccaggcaccatgctagg

SEQ ID NO: 488957 - DNA, 120 bp, Artificial Sequence
  ENSG00000162676_19 (sequence is synthesized)
tattggggaagagagactgaagtcacaacccctgactgctcctcaaaagctaacggttgcacctccaagtggctgggtctgttcttactcttggagggaattctgagaagacagcacaga

SEQ ID NO: 488958 - DNA, 120 bp, Artificial Sequence
  ENSG00000162676_20 (sequence is synthesized)
attgtaaaccttcccttttgacccttttggattttatcaggtgtaaacaaaaagctgaacagttacttcaaagatatgtgtgtatattcagttttttattgttaagctgatattttaaag

SEQ ID NO: 488959 - DNA, 120 bp, Artificial Sequence
  ENSG00000162676_21 (sequence is synthesized)
atttctgagctagcaggcatgtgggaaggaaggctctgtcttcaactctttgaccctccatgtgtaccatagaggggggaaaggtggtattttcactttgatgaggttggtaaatgtttt

SEQ ID NO: 488960 - DNA, 120 bp, Artificial Sequence
  ENSG00000162676_22 (sequence is synthesized)
tagatcttctggtaagcattatgtttgttaatacatatttattagagtgatgttttaagttaataaagtattaagagtattacagattgcctttcctttaggcagggaatttggggaaga

SEQ ID NO: 488961 - DNA, 120 bp, Artificial Sequence
  ENSG00000162676_23 (sequence is synthesized)
cctttgttttagtctgtagggggaaagctggcactgaaggaaactgcaatggagtataaaagtgaagcacacaagctaatatccagaagagtaaaatccaattgctcgggtttccatata

SEQ ID NO: 488962 - DNA, 120 bp, Artificial Sequence
  ENSG00000162676_24 (sequence is synthesized)
ctttctcctttgctgctacacctcagagatacttctttcatcttctttcataagagaaaaactaggaggtgtacaaaactaagctactaccttgtagagcccctgatggttccacaggca

SEQ ID NO: 488963 - DNA, 120 bp, Artificial Sequence
  ENSG00000162676_25 (sequence is synthesized)
cgtaagtaagctctttcctctgaaaatgtcaacatatttttttaggggcctgaaggctcccagatgaataaagaaatcacaggtcttaggtctaggttttagttttagtcacagctctgt

SEQ ID NO: 488964 - DNA, 120 bp, Artificial Sequence
  ENSG00000162676_26 (sequence is synthesized)
caccaacacatcatgtgacttgtgtaaatcttttgacttccccgatactggtttccttgatcaagtaatacggagacagctctgtcattcctgtccaaccctgaccgctttgattctgtg

SEQ ID NO: 488965 - DNA, 120 bp, Artificial Sequence
  ENSG00000162676_27 (sequence is synthesized)
gagactggaaaggaaaaaaagtgtgagattggttagctgcctcccctaatgcaagtcacaaatctaaaggcccatgaggatctgggttatttctggttctgtcccacctgtgggagtttt

SEQ ID NO: 488966 - DNA, 120 bp, Artificial Sequence
  ENSG00000162676_28 (sequence is synthesized)
ttgcataagtcaatcctttaagagaatgaaaccagaataaaatcctggccaaaatccctactactagtgctttaacacctcccagccagacattcagggtatgcatgccccatggtgaga

SEQ ID NO: 488967 - DNA, 120 bp, Artificial Sequence
  ENSG00000162676_29 (sequence is synthesized)
accagcagattgcccatttccaactcaaattgatttcacacatataattgagcacccagtatgtgctgggcattcttctagggggtggagatatagcagtgaggacaatgtcttacgaag

SEQ ID NO: 488968 - DNA, 120 bp, Artificial Sequence
  ENSG00000162676_30 (sequence is synthesized)
ctttatttattcattgttgaatcctcagttcccagaatagtgcctggcacacagtaggagattaataaatatttactgagatgttaagtgaataaacagaaaataagctcctgcttcatc

SEQ ID NO: 488969 - DNA, 120 bp, Artificial Sequence
  ENSG00000162676_31 (sequence is synthesized)
ctagggcctggctctgctctctacagcacaaagggaagagagattgcttgacagcctgggaaacaaatagaatccacacgactttctctccaggttggcaggaaaggggggcttgaatgc

SEQ ID NO: 488970 - DNA, 120 bp, Artificial Sequence
  ENSG00000162676_32 (sequence is synthesized)
tgcttttctctggtttctccaaatctcagtccttggctgtcctcacctgatttccagcaccatgtctttccatgtcagtttactctcattcagaatttaaattcgtttactctgtaatgg

SEQ ID NO: 488971 - DNA, 120 bp, Artificial Sequence
  ENSG00000162676_33 (sequence is synthesized)
agtttaagatagtttttcagaactgatggatgatgaacagttgcagcgtccaggaaccacttcctagtgtcctgggagacaatcctcccagtgaatgaaaatgacaaaaacatccttccc

SEQ ID NO: 488972 - DNA, 120 bp, Artificial Sequence
  ENSG00000162676_34 (sequence is synthesized)
acagaagtcaccctgtgtactggttggttatttccaacctggtttgaaaagtaaagaagttgcactgaggggtaagtagaactgattgaaatctaggtgcctgtgctgtcctgctcttcc

SEQ ID NO: 488973 - DNA, 120 bp, Artificial Sequence
  ENSG00000162676_35 (sequence is synthesized)
cttatgacgtttagaacatttggtccatttttgttatccctgtttatgctctaagtgaggaattgtaattttgatgttaactgtatgccttttttttttttttttggtaaaaaatgtatc

SEQ ID NO: 488974 - DNA, 120 bp, Artificial Sequence
  ENSG00000162676_36 (sequence is synthesized)
ttgatatccccagttcagaatcaaaacaaattactgtgcctgttaccgtgtgaaatttgaagattgcaaatatctctcttaatgttattacttgactccattaaaaatagattgtgaata

SEQ ID NO: 488975 - DNA, 120 bp, Artificial Sequence
  ENSG00000162676_37 (sequence is synthesized)
agctgagttggggtaacccacccgatgggaactacagctctccagggagtttgattgccggagcgagcttcgctaggaaaggggaggagctggggggcgtgggcagggaggaggaaaggg

SEQ ID NO: 488976 - DNA, 120 bp, Artificial Sequence
  ENSG00000162676_38 (sequence is synthesized)
gcctgagacagggccccgggacaggttttaccgctgagctgtgtcagtggcggcggcggcaacgacggcgggttcgcgccacctgtccaagtgccacctggtctcctccgggctggggct

SEQ ID NO: 488977 - DNA, 120 bp, Artificial Sequence
  ENSG00000162676_39 (sequence is synthesized)
gatttcgacctggtattaggtgaactgattgggggttaatgagagcgacgccccgggcagctagttccctcccgggcccgggcccgacccccgctctctgctaatgcagcctgcgcgctc

SEQ ID NO: 488978 - DNA, 120 bp, Artificial Sequence
  ENSG00000162676_40 (sequence is synthesized)
tggcgtcctgtcttttttgtctgctaaattgtcggtgcactaccgactcgggacacctagcatttcccagtcaacgttcgtggatcgggctccacctccctaggacaagattttttggtc

SEQ ID NO: 488979 - DNA, 120 bp, Artificial Sequence
  ENSG00000162687_0 (sequence is synthesized)
tttttccccgagttcagggaaacacctcccttctttcagaatgtgagaaaaaaatgggattttcctggggctgagagtggggattccctttccagaaacgtgcaattttttcatcccgcc

SEQ ID NO: 488980 - DNA, 120 bp, Artificial Sequence
  ENSG00000162687_1 (sequence is synthesized)
cacctggactgaaggcaatcaaagcgagggagctcgtggcatagtggaacactccaagcaccctggcccccctcctcccagagaagggtctggagccccgcaatccgctaattagctcgc

SEQ ID NO: 488981 - DNA, 120 bp, Artificial Sequence
  ENSG00000162687_2 (sequence is synthesized)
ccccattggttgtccccaaggcacccccgtgccgtcactgtgctatgctaatgagggggagtctcattggctgggcctccagctccatctccacagggagattgcggggagagccgggtt

SEQ ID NO: 488982 - DNA, 120 bp, Artificial Sequence
  ENSG00000162687_3 (sequence is synthesized)
ggccgcgtctggggccgaaacccaccgcccccgattcccgccagctcagggctgtgccggatgcaagcccgcccgagggaacagtagccgggaggctgccctctgggaggatctggcaac

SEQ ID NO: 488983 - DNA, 120 bp, Artificial Sequence
  ENSG00000162687_4 (sequence is synthesized)
tgcctttaaggaaagtgcttcaccatcaagcggcgctcactcccacccctctcccctctttctaggcaccgcgcgtctttttcggcgaagtaactttttatacccgcctccccctagtcc

SEQ ID NO: 488984 - DNA, 120 bp, Artificial Sequence
  ENSG00000162687_5 (sequence is synthesized)
tggggaccagaggcggtgccgagcctgggggcggttccttggcagcgttgattcttgtcagagccagacttttgctcctgggttgggtttgcatcatccccattacaccctcgggaaaga

SEQ ID NO: 488985 - DNA, 120 bp, Artificial Sequence
  ENSG00000162687_6 (sequence is synthesized)
ggagccagccccctttcaagccttagcttccggctccaagcggaccccctccccctccctgtccccttccccttctcccatccctctctcggccacagcgtcttgttagtcctctccctg

SEQ ID NO: 488986 - DNA, 120 bp, Artificial Sequence
  ENSG00000162687_7 (sequence is synthesized)
tactccgcaatattttctttctttctccctcctctcctccatttgttgtttgatgtttcccactctttgaggaaggatggttgatttggagagcgaagtgccccctctgcctcccaggta

SEQ ID NO: 488987 - DNA, 120 bp, Artificial Sequence
  ENSG00000162687_8 (sequence is synthesized)
caggtttcgagatttgctgctaggggaccaaggatggcaaaacgacgacagggtacaagttgaattctatatgaatgaaaatacatttaaagaaagactaaaattatttttcataaaaaa

SEQ ID NO: 488988 - DNA, 120 bp, Artificial Sequence
  ENSG00000162687_9 (sequence is synthesized)
ccagagatcaagtctaaggatacgcctgttcaatttttctctcaaattactaagctgcttattatacataatccgagtactactagaaaacccttcacaaggaaatgaatggtctcatat

SEQ ID NO: 488989 - DNA, 120 bp, Artificial Sequence
  ENSG00000162687_10 (sequence is synthesized)
cttttgggtgaacagaagtctacctttgtggggcttacaggtttcagtggcattgataagtctgtttgaaacaatattacttggttatcttagttataagggaaacatctgggaacagat

SEQ ID NO: 488990 - DNA, 120 bp, Artificial Sequence
  ENSG00000162687_11 (sequence is synthesized)
tttacgaatacccttcatcttggaaataattaatgcagttcccttcattatctcaatattctggccttccttaaggaatctatttgtcccagtctttctgaactgttggcttgccaaaca

SEQ ID NO: 488991 - DNA, 120 bp, Artificial Sequence
  ENSG00000162687_12 (sequence is synthesized)
tgccttggaaaatatgattaatgatctacacagagccattcagcgtacacagtctgcaatgtttaatcaagttttgattttaatatctacattactatgccttatcttcacctgcatttg

SEQ ID NO: 488992 - DNA, 120 bp, Artificial Sequence
  ENSG00000162687_13 (sequence is synthesized)
tgggatccaacatctggaacgaataggaaagaagctgaatctctttgactccctttatttctgcattgtgacgttttctactgtgggcttcggggatgtcactcctgaaacatggtcctc

SEQ ID NO: 488993 - DNA, 120 bp, Artificial Sequence
  ENSG00000162687_14 (sequence is synthesized)
caagctttttgtagttgctatgatttgtgttgctcttgtggttctacccatacagtttgaacagctggcttatttgtggatggagagacaaaagtcaggaggaaactatagtcgacatag

SEQ ID NO: 488994 - DNA, 120 bp, Artificial Sequence
  ENSG00000162687_15 (sequence is synthesized)
agctcaaactgaaaagcatgtcgtcctgtgtgtcagctcactgaagattgatttacttatggattttttaaatgaattctatgctcatcctaggctccaggattattatgtggtgatttt

SEQ ID NO: 488995 - DNA, 120 bp, Artificial Sequence
  ENSG00000162687_16 (sequence is synthesized)
gtgtcctactgaaatggatgtacaggttcgaagggtactgcagattccaatgtggtcccaacgagttatctaccttcaaggttcagcccttaaagatcaagacctattgagagcaaagat

SEQ ID NO: 488996 - DNA, 120 bp, Artificial Sequence
  ENSG00000162687_17 (sequence is synthesized)
ggatgacgctgaggcctgttttattctcagtagccgttgtgaagtggataggacatcatctgatcaccaaacaattttgagagcatgggctgtgaaagattttgctccaaattgtccttt

SEQ ID NO: 488997 - DNA, 120 bp, Artificial Sequence
  ENSG00000162687_18 (sequence is synthesized)
tagctttaaactgtatatgcccagcaacatctacacttattacactactggttcatacctctagagggcaagaaggccagcaatcgccagaacaatggcagaagatgtacggtagatgct

SEQ ID NO: 488998 - DNA, 120 bp, Artificial Sequence
  ENSG00000162687_19 (sequence is synthesized)
ccgggaatgaagtctaccacattgttttggaagaaagtacattttttgctgaatatgaaggaaagagttttacatatgcctctttccatgcacacaaaaagtttggcgtctgcttgattg

SEQ ID NO: 488999 - DNA, 120 bp, Artificial Sequence
  ENSG00000162687_20 (sequence is synthesized)
gtgttaggagggaggataataaaaacattttgctgaatccaggtcctcgatacattatgaattctacagacatatgcttttatattaatattaccaaagaagagaattcagcatttaaaa

SEQ ID NO: 489000 - DNA, 120 bp, Artificial Sequence
  ENSG00000162687_21 (sequence is synthesized)
accaagaccagcagagaaaaagcaatgtgtccaggtcgttttatcatggaccttccagattacctgtacatagcataattgccagcatgggtactgtggctatagacttgcaagatacaa

SEQ ID NO: 489001 - DNA, 120 bp, Artificial Sequence
  ENSG00000162687_22 (sequence is synthesized)
gctgtagatcagcaagtggccctaccctgtctcttcctacagagggaagcaaagaaataagaagacctagcattgctcctgttttagaggttgcagatacatcatcgattcaaacatgtg

SEQ ID NO: 489002 - DNA, 120 bp, Artificial Sequence
  ENSG00000162687_23 (sequence is synthesized)
atcttctaagtgaccaatcagaagatgaaactacaccagatgaagaaatgtcttcaaacttagagtatgctaaaggttacccaccttattctccatatataggaagttcacccacttttt

SEQ ID NO: 489003 - DNA, 120 bp, Artificial Sequence
  ENSG00000162687_24 (sequence is synthesized)
gtcatctccttcatgaaaaagtaccattttgctgcttaagattagacaagagttgccaacataactactatgaggatgcaaaagcctatggattcaaaaataaactaattatagttgcag

SEQ ID NO: 489004 - DNA, 120 bp, Artificial Sequence
  ENSG00000162687_25 (sequence is synthesized)
ctgaaacagctggaaatggattatataactttattgttcctctcagggcatattatagaccaaagaaagaacttaatcccatagtactgctattggataacccgccagatatgcattttc

SEQ ID NO: 489005 - DNA, 120 bp, Artificial Sequence
  ENSG00000162687_26 (sequence is synthesized)
tggatgcaatctgttggtttccaatggtttactacatggtgggctctattgacaacctagatgacttactcaggtgtggagtgacttttgctgctaatatggtggttgtggataaagaga

SEQ ID NO: 489006 - DNA, 120 bp, Artificial Sequence
  ENSG00000162687_27 (sequence is synthesized)
gcaccatgagtgccgaggaagactacatggcagatgccaaaaccattgtgaacgtgcagacactcttcaggttgttttccagtctcagtattatcacagagctaactcaccccgccaaca

SEQ ID NO: 489007 - DNA, 120 bp, Artificial Sequence
  ENSG00000162687_28 (sequence is synthesized)
tgagattcatgcaattcagagccaaagactgttactctcttgctctttcaaaactggaaaagaaagaacgggagagaggctctaacttggcctttatgtttcgactgccttttgctgctg

SEQ ID NO: 489008 - DNA, 120 bp, Artificial Sequence
  ENSG00000162687_29 (sequence is synthesized)
ggagggtgtttagcatcagtatgttggacactctgctgtatcagtcatttgtgaaggattatatgatttctatcacgagacttctgttgggactggacactacaccaggatctgggtttc

SEQ ID NO: 489009 - DNA, 120 bp, Artificial Sequence
  ENSG00000162687_30 (sequence is synthesized)
tttgttctatgaaaatcactgcagatgacttatggatcagaacttatgccagactttatcagaagttgtgttcttctactggagatgttcccattggaatctacaggactgagtctcaga

SEQ ID NO: 489010 - DNA, 120 bp, Artificial Sequence
  ENSG00000162687_31 (sequence is synthesized)
aacttactacatctgagtctcaaatatctatcagtgtagaagagtgggaagacaccaaagactccaaagaacaagggcaccaccgcagcaaccaccgcaactcaacatccagtgatcagt

SEQ ID NO: 489011 - DNA, 120 bp, Artificial Sequence
  ENSG00000162687_32 (sequence is synthesized)
cggaccatcccttgctgcggagaaaaagcatgcagtgggcccgaagactgagcagaaaaggcccaaaacactctggtaaaacagctgaaaaaataacccagcagcgactgaacctctaca

SEQ ID NO: 489012 - DNA, 120 bp, Artificial Sequence
  ENSG00000162687_33 (sequence is synthesized)
ggaggtcagaaagacaagagcttgctgaacttgtgaaaaatagaatgaaacacttgggtctttctacagtgggatatgatgaaatgaatgatcatcaaagtaccctctcctacatcctga

SEQ ID NO: 489013 - DNA, 120 bp, Artificial Sequence
  ENSG00000162687_34 (sequence is synthesized)
ttaacccatctccagataccagaatagagctgaatgatgttgtatacttaattcgaccagatccactggcctaccttccaaacagtgagcccagtcgaagaaacagcatctgcaatgtca

SEQ ID NO: 489014 - DNA, 120 bp, Artificial Sequence
  ENSG00000162687_35 (sequence is synthesized)
ctggtcaagattctcgggaggaaactcaactttgataaaaataaaatgagaaacttttttcctacaaagaccttgcttgaaaccacaaaagttttgctggcacgaaagaaactagatgga

SEQ ID NO: 489015 - DNA, 120 bp, Artificial Sequence
  ENSG00000162687_36 (sequence is synthesized)
ttactggtactctccctattaatatttgaaggacctcaatggaataaatttgaaaagctaaattaaaatacaaaaatttaaatctgacatttaattgttttataataatccaaactctat

SEQ ID NO: 489016 - DNA, 120 bp, Artificial Sequence
  ENSG00000162687_37 (sequence is synthesized)
gaaagcaattttaaaaattattaaggttttatgaagttgacaaaatctaactatatttggtgcatcacaatggacacagaatgctgctgctcctcttaaaaattaaatgtgtcatattat

SEQ ID NO: 489017 - DNA, 120 bp, Artificial Sequence
  ENSG00000162687_38 (sequence is synthesized)
attctttaaacttactgttttacaaaattgagctcatcgtaaatgtctagtcttctcacatagagattaaccaacaaacttgtgtggctgacttttgtgtaagaatcatagtttgcttta

SEQ ID NO: 489018 - DNA, 120 bp, Artificial Sequence
  ENSG00000162687_39 (sequence is synthesized)
gaatacaaatctttaagtcattttaacttttttttctgccttacgatataaaaatatttatcttagaatttgagatgttcatagcatgttttattacattgaagaaactaaaacataaat

SEQ ID NO: 489019 - DNA, 120 bp, Artificial Sequence
  ENSG00000162687_40 (sequence is synthesized)
gaaaagaaacactaggttcctgcactttttggtaactttatgtctagcaaatattttatgccaagaaaagcatactataaagcaaatatctattattctcctaaacgaatgcctagcata

SEQ ID NO: 489020 - DNA, 120 bp, Artificial Sequence
  ENSG00000162687_41 (sequence is synthesized)
gagaaaatacttaatacacatttgttgacttaaatttaattcaaggattgaaaaattaactggatatcttgaaatatacagtaatgattgtccttagactcttgaactttaccatctttc

SEQ ID NO: 489021 - DNA, 120 bp, Artificial Sequence
  ENSG00000162687_42 (sequence is synthesized)
ctattcatatatctatatagtaaatttcactagaaaaattcttttaaaattgacagaagataatttataccttttatggactctgaagacacttcaaaacattaaaagtccttatgtctt

SEQ ID NO: 489022 - DNA, 120 bp, Artificial Sequence
  ENSG00000162687_43 (sequence is synthesized)
tggtaatgaaacaataacactcaatgaaggatgtattaaaatttttgacttaattttgaaatcgtatatatgagctatactttaacattatgagagaaaagcataaaacaaaaataggta

SEQ ID NO: 489023 - DNA, 120 bp, Artificial Sequence
  ENSG00000162687_44 (sequence is synthesized)
gttcttggcttttaacattaatgcaaatcatgcagaatttgagttataaatttaaatataaattgaccattgatgatatccagtttttcattttttacctgtattgcattttccccctag

SEQ ID NO: 489024 - DNA, 120 bp, Artificial Sequence
  ENSG00000162687_45 (sequence is synthesized)
agaaatagatcaaaagagcacaagagtatgcgtacatagtttaccaggtagtagaagtgtgttaaaatgttcctgtaaaagaaacattggtaaatttaaatacatactgttctaattttg

SEQ ID NO: 489025 - DNA, 120 bp, Artificial Sequence
  ENSG00000162687_46 (sequence is synthesized)
tattttttaatttttgaatttgacattgagtttaattcagcaacaacaaaaaatacatataaaactagaaagggactttttttcctttcttttcataatgaagcagatcaacttaaagga

SEQ ID NO: 489026 - DNA, 120 bp, Artificial Sequence
  ENSG00000162687_47 (sequence is synthesized)
taataaaatttttaaagaaaagatattctaatgtactctcaataattctacagaaataaaactgtaaagtgcaatgtgaaatcaaagattatagtcattgtataatttggcttggaggct

SEQ ID NO: 489027 - DNA, 120 bp, Artificial Sequence
  ENSG00000162687_48 (sequence is synthesized)
atgaaatgtctttttttctttttggtattttacattattcacattttagaataacaagaacaccaagaattacccctaaaacagagaccctgtatttaatctactttgatcagagaagta

SEQ ID NO: 489028 - DNA, 120 bp, Artificial Sequence
  ENSG00000162687_49 (sequence is synthesized)
gaatttataacaggttagctaaaattgggagcatgccttaaaacttaaagattgtatgcatatatgtgtatatgttataaacgtgaaatatatttgacacacacattcacatataaattg

SEQ ID NO: 489029 - DNA, 120 bp, Artificial Sequence
  ENSG00000162687_50 (sequence is synthesized)
ttaaaaactgaaggcagaatggaactaatatatgtaacagagaaaaacaataaattttatgaacttgttttatatttgcatatcaagagtcaagtatgatgtttctttaagttgactttt

SEQ ID NO: 489030 - DNA, 120 bp, Artificial Sequence
  ENSG00000162687_51 (sequence is synthesized)
tttacttcattatttttaggaataaatgtaagattttacaaatcttttatttccccacaagatctgaagtttggtatttttgcattatgacagttgttgagactaggattttaagctagg

SEQ ID NO: 489031 - DNA, 120 bp, Artificial Sequence
  ENSG00000162687_52 (sequence is synthesized)
atatttcctatataactaaaaattttgtttcataaattttaaaataattatttttgactatgaacattagtccaaatttaatatttgacacagttcataccagcttgctacaataatgat

SEQ ID NO: 489032 - DNA, 120 bp, Artificial Sequence
  ENSG00000162687_53 (sequence is synthesized)
cagcttgctacaataatgataatttattagtctttctgttatttaaagaataaaaacatgcttataaaagacttttaatgaaatgttgcctttttaaaataattatacttgcacatgaaa

SEQ ID NO: 489033 - DNA, 120 bp, Artificial Sequence
  ENSG00000162687_54 (sequence is synthesized)
gtcaataatagtccttgtagcccaatgggaattgattctgtttattgtctgtaccattttgctaccagttacattgaactgctttaaaataaataataaaattatttctaatgatgaaaa

SEQ ID NO: 489034 - DNA, 120 bp, Artificial Sequence
  ENSG00000162687_55 (sequence is synthesized)
ttttagccataaaatctctgccacagaccattgttcctgattcaagcgaaatattttttctggactactcctggggatcttggactcaaggctttgcctagatgacttactcaggtgtgg

SEQ ID NO: 489035 - DNA, 120 bp, Artificial Sequence
  ENSG00000162687_56 (sequence is synthesized)
ctacagtgggatatggtatgctctttaaaaactactgtatatatggactcgtgatttcttgccattagtagtaatatagttggttctaatttaataaagaattgaatttttgcttcacag

SEQ ID NO: 489036 - DNA, 120 bp, Artificial Sequence
  ENSG00000162688_0 (sequence is synthesized)
ctgtctacggcagctattccagaggcaacaactgcttccctctgttctcatctccccattggtggctggcgacccgaatttgggaatggggagattgcccacctgttatctttgagcaga

SEQ ID NO: 489037 - DNA, 120 bp, Artificial Sequence
  ENSG00000162688_1 (sequence is synthesized)
ctaatctcttgtaagcagaagtgccattcggagtctccagagccctgtggcttggggctgggaatgtccccctgacttcaggctttcctaagtgtattgcttttctctgagaatggtcta

SEQ ID NO: 489038 - DNA, 120 bp, Artificial Sequence
  ENSG00000162688_2 (sequence is synthesized)
ggtttttaattttttaattgtaagaatctgtaatacagcatttttatttcggtcttattcgttgtgctcaaaggcaggaaacaactattaatttgccttctcgaatcttaatagttataa

SEQ ID NO: 489039 - DNA, 120 bp, Artificial Sequence
  ENSG00000162688_3 (sequence is synthesized)
gattcattctctttcattgctctgctaggcataaaacacacttcgaacatgggtaactcattcgactgtggagttcttttaattcttatgaaagatttcaaatcctctagaagccaaaat

SEQ ID NO: 489040 - DNA, 120 bp, Artificial Sequence
  ENSG00000162688_4 (sequence is synthesized)
gggacacagtaaacagattcgaattttacttctgaacgaaatggagaaactggaaaagaccctcttcagacttgaacaagggtatgagctacagttccgattaggcccaactttacaggg

SEQ ID NO: 489041 - DNA, 120 bp, Artificial Sequence
  ENSG00000162688_5 (sequence is synthesized)
aaaagcagttaccgtgtatacaaattacccatttcctggagaaacatttaatagagaaaaattccgttctctggattgggaaaatccaacagaaagagaagatgattctgataaatactg

SEQ ID NO: 489042 - DNA, 120 bp, Artificial Sequence
  ENSG00000162688_6 (sequence is synthesized)
taaacttaatctgcaacaatctggttcatttcagtattatttccttcaaggaaatgagaaaagtggtggaggttacatagttgtggaccccattttacgtgttggtgctgataatcatgt

SEQ ID NO: 489043 - DNA, 120 bp, Artificial Sequence
  ENSG00000162688_7 (sequence is synthesized)
gctacccttggactgtgttactcttcagacatttttagctaagtgtttgggaccttttgatgaatgggaaagcagacttagggttgcaaaagaatcaggctacaacatgattcattttac

SEQ ID NO: 489044 - DNA, 120 bp, Artificial Sequence
  ENSG00000162688_8 (sequence is synthesized)
cccattgcagactcttggactatctaggtcatgctactcccttgccaatcagttagaattaaatcctgacttttcaagacctaatagaaagtatacctggaatgatgttggacagctagt

SEQ ID NO: 489045 - DNA, 120 bp, Artificial Sequence
  ENSG00000162688_9 (sequence is synthesized)
ggaaaaattaaaaaaggaatggaatgttatttgtattactgatgttgtctacaatcatactgctgctaatagtaaatggatccaggaacatccagaatgtgcctataatcttgtgaattc

SEQ ID NO: 489046 - DNA, 120 bp, Artificial Sequence
  ENSG00000162688_10 (sequence is synthesized)
tccacacttaaaacctgcctgggtcttagacagagcactttggcgtttctcctgtgatgttgcagaagggaaatacaaagaaaagggaatacctgctttgattgaaaatgatcaccatat

SEQ ID NO: 489047 - DNA, 120 bp, Artificial Sequence
  ENSG00000162688_11 (sequence is synthesized)
gaattccatccgaaaaataatttgggaggatatttttccaaagcttaaactctgggaatttttccaagtagatgtcaacaaagcggttgagcaatttagaagacttcttacacaagaaaa

SEQ ID NO: 489048 - DNA, 120 bp, Artificial Sequence
  ENSG00000162688_12 (sequence is synthesized)
taggcgagtaaccaagtctgatccaaaccaacaccttacgattattcaagatcctgaatacagacggtttggctgtactgtagatatgaacattgcactaacgactttcataccacatga

SEQ ID NO: 489049 - DNA, 120 bp, Artificial Sequence
  ENSG00000162688_13 (sequence is synthesized)
caaggggccagcagcaattgaagaatgctgtaattggtttcataaaagaatggaggaattaaattcagagaagcatcgactcattaactatcatcaggaacaggcagttaattgcctttt

SEQ ID NO: 489050 - DNA, 120 bp, Artificial Sequence
  ENSG00000162688_14 (sequence is synthesized)
gggaaatgtgttttatgaacgactggctggccatggtccaaaactaggacctgtcactagaaagcatcctttagttaccaggtattttactttcccatttgaagagatagacttctccat

SEQ ID NO: 489051 - DNA, 120 bp, Artificial Sequence
  ENSG00000162688_15 (sequence is synthesized)
ggaagaatctatgattcatctgccaaataaagcttgttttctgatggcacacaatggatgggtaatgggagatgatcctcttcgaaactttgctgaaccgggttcagaagtttacctaag

SEQ ID NO: 489052 - DNA, 120 bp, Artificial Sequence
  ENSG00000162688_16 (sequence is synthesized)
gagagaacttatttgctggggagacagtgttaaattacgctatgggaataaaccagaggactgtccttatctctgggcacacatgaaaaaatacactgaaataactgcaacttatttcca

SEQ ID NO: 489053 - DNA, 120 bp, Artificial Sequence
  ENSG00000162688_17 (sequence is synthesized)
gggagtacgtcttgataactgccactcaacacctcttcacgtagctgagtacatgttggatgctgctaggaatttgcaacccaatttatatgtagtagctgaactgttcacaggaagtga

SEQ ID NO: 489054 - DNA, 120 bp, Artificial Sequence
  ENSG00000162688_18 (sequence is synthesized)
agatctggacaatgtctttgttactagactgggcattagttccttaataagagaggcaatgagtgcatataatagtcatgaagagggcagattagtttaccgatatggaggagaacctgt

SEQ ID NO: 489055 - DNA, 120 bp, Artificial Sequence
  ENSG00000162688_19 (sequence is synthesized)
tggatcctttgttcagccctgtttgaggcctttaatgccagctattgcacatgccctgtttatggatattacgcatgataatgagtgtcctattgtgcatagatcagcgtatgatgctct

SEQ ID NO: 489056 - DNA, 120 bp, Artificial Sequence
  ENSG00000162688_20 (sequence is synthesized)
tccaagtactacaattgtttctatggcatgttgtgctagtggaagtacaagaggctatgatgaattagtgcctcatcagatttcagtggtttctgaagaacggttttacactaagtggaa

SEQ ID NO: 489057 - DNA, 120 bp, Artificial Sequence
  ENSG00000162688_21 (sequence is synthesized)
tcctgaagcattgccttcaaacacaggtgaagttaatttccaaagcggcattattgcagccaggtgtgctatcagtaaacttcatcaggagcttggagccaagggttttattcaggtgta

SEQ ID NO: 489058 - DNA, 120 bp, Artificial Sequence
  ENSG00000162688_22 (sequence is synthesized)
tgtggatcaagttgatgaagacatagtggcagtaacaagacactcacctagcatccatcagtctgttgtggctgtatctagaactgctttcaggaatcccaagacttcattttacagcaa

SEQ ID NO: 489059 - DNA, 120 bp, Artificial Sequence
  ENSG00000162688_23 (sequence is synthesized)
ggaagtgcctcaaatgtgcatccctggcaaaattgaagaagtagttcttgaagctagaactattgagagaaacacgaaaccttataggaaggatgagaattcaatcaatggaacaccaga

SEQ ID NO: 489060 - DNA, 120 bp, Artificial Sequence
  ENSG00000162688_24 (sequence is synthesized)
tatcacagtagaaattagagaacatattcagcttaatgaaagtaaaattgttaaacaagctggagttgccacaaaagggcccaatgaatatattcaagaaatagaatttgaaaacttgtc

SEQ ID NO: 489061 - DNA, 120 bp, Artificial Sequence
  ENSG00000162688_25 (sequence is synthesized)
tccaggaagtgttattatattcagagttagtcttgatccacatgcacaagtcgctgttggaattcttcgaaatcatctgacacaattcagtcctcactttaaatctggcagcctagctgt

SEQ ID NO: 489062 - DNA, 120 bp, Artificial Sequence
  ENSG00000162688_26 (sequence is synthesized)
tgacaatgcagatcctatattaaaaattccttttgcttctcttgcctccagattaactttggctgagctaaatcagatcctttaccgatgtgaatcagaagaaaaggaagatggtggagg

SEQ ID NO: 489063 - DNA, 120 bp, Artificial Sequence
  ENSG00000162688_27 (sequence is synthesized)
gtgctatgacataccaaactggtcagcccttaaatatgcaggtcttcaaggtttaatgtctgtattggcagaaataagaccaaagaatgacttggggcatcctttttgtaataatttgag

SEQ ID NO: 489064 - DNA, 120 bp, Artificial Sequence
  ENSG00000162688_28 (sequence is synthesized)
atctggagattggatgattgactatgtcagtaaccggcttatttcacgatcaggaactattgctgaagttggtaaatggttgcaggctatgttcttctacctgaagcagatcccacgtta

SEQ ID NO: 489065 - DNA, 120 bp, Artificial Sequence
  ENSG00000162688_29 (sequence is synthesized)
ccttatcccatgttactttgatgctatattaattggtgcatataccactcttctggatacagcatggaagcagatgtcaagctttgttcagaatggttcaacctttgtgaaacacctttc

SEQ ID NO: 489066 - DNA, 120 bp, Artificial Sequence
  ENSG00000162688_30 (sequence is synthesized)
attgggttcagttcaactgtgtggagtaggaaaattcccttccctgccaattctttcacctgccctaatggatgtaccttataggttaaatgagatcacaaaagaaaaggagcaatgttg

SEQ ID NO: 489067 - DNA, 120 bp, Artificial Sequence
  ENSG00000162688_31 (sequence is synthesized)
tctagctgcaggcttacctcatttttcttctggtattttccgctgctggggaagggatacttttattgcacttagaggtatactgctgattactggacgctatgtagaagccaggaatat

SEQ ID NO: 489068 - DNA, 120 bp, Artificial Sequence
  ENSG00000162688_32 (sequence is synthesized)
tattttagcatttgcgggtaccctgaggcatggtctcattcctaatctactgggtgaaggaatttatgccagatacaattgtcgggatgctgtgtggtggtggctgcagtgtatccagga

SEQ ID NO: 489069 - DNA, 120 bp, Artificial Sequence
  ENSG00000162688_33 (sequence is synthesized)
ttactgtaaaatggttccaaatggtctagacattctcaagtgcccagtttccagaatgtatcctacagatgattctgctcctttgcctgctggcacactggatcagccattgtttgaagt

SEQ ID NO: 489070 - DNA, 120 bp, Artificial Sequence
  ENSG00000162688_34 (sequence is synthesized)
catacaggaagcaatgcaaaaacacatgcagggcatacagttccgagaaaggaatgctggtccccagatagatcgaaacatgaaggacgaaggttttaatataactgcaggagttgatga

SEQ ID NO: 489071 - DNA, 120 bp, Artificial Sequence
  ENSG00000162688_35 (sequence is synthesized)
agaaacaggatttgtttatggaggaaatcgtttcaattgtggcacatggatggataaaatgggagaaagtgacagagctagaaacagaggaatcccagccacaccaagagatgggtctgc

SEQ ID NO: 489072 - DNA, 120 bp, Artificial Sequence
  ENSG00000162688_36 (sequence is synthesized)
tgtggaaattgtgggcctgagtaaatctgctgttcgctggttgctggaattatccaaaaaaaatattttcccttatcatgaagtcacagtaaaaagacatggaaaggctataaaggtctc

SEQ ID NO: 489073 - DNA, 120 bp, Artificial Sequence
  ENSG00000162688_37 (sequence is synthesized)
atatgatgagtggaacagaaaaatacaagacaactttgaaaagctatttcatgtttccgaagacccttcagatttaaatgaaaagcatccaaatctggttcacaaacgtggcatatacaa

SEQ ID NO: 489074 - DNA, 120 bp, Artificial Sequence
  ENSG00000162688_38 (sequence is synthesized)
agatagttatggagcttcaagtccttggtgtgactatcagctcaggcctaattttaccatagcaatggttgtggcccctgagctctttactacagaaaaagcatggaaagctttggagat

SEQ ID NO: 489075 - DNA, 120 bp, Artificial Sequence
  ENSG00000162688_39 (sequence is synthesized)
tgcagaaaaaaaattgcttggtccccttggcatgaaaactttagatccagatgatatggtttactgtggaatttatgacaatgcattagacaatgacaactacaatcttgctaaaggttt

SEQ ID NO: 489076 - DNA, 120 bp, Artificial Sequence
  ENSG00000162688_40 (sequence is synthesized)
caattatcaccaaggacctgagtggctgtggcctattgggtattttcttcgtgcaaaattatatttttccagattgatgggcccggagactactgcaaagactatagttttggttaaaaa

SEQ ID NO: 489077 - DNA, 120 bp, Artificial Sequence
  ENSG00000162688_41 (sequence is synthesized)
tgttctttcccgacattatgttcatcttgagagatccccttggaaaggacttccagaactgaccaatgagaatgcccagtactgtcctttcagctgtgaaacacaagcctggtcaattgc

SEQ ID NO: 489078 - DNA, 120 bp, Artificial Sequence
  ENSG00000162688_42 (sequence is synthesized)
tactattcttgagacactttatgatttatagtttattacagatattaagtatgcaattacttgtattataggatgcaaggtcatcatatgtaaatgccttatatgcacaggctcaagttg

SEQ ID NO: 489079 - DNA, 120 bp, Artificial Sequence
  ENSG00000162688_43 (sequence is synthesized)
ttttaaaaatctcatttattataatattgatgctcaattaggtaagattgtaaaagcattgattttttttaatgtacagaggtagatttcaatttgaatcagaaagaaatatcattacca

SEQ ID NO: 489080 - DNA, 120 bp, Artificial Sequence
  ENSG00000162688_44 (sequence is synthesized)
atgaaatgtgtttgagttcagtaagaattattcaaatgcctagaaatccatagtttggaaaagaaaaatcatgtcatcttctatttgtacagaaatgaaaataaaatatgaaaataatga

SEQ ID NO: 489081 - DNA, 120 bp, Artificial Sequence
  ENSG00000162688_45 (sequence is synthesized)
aagaaatgaaaagatagcttttaattgtggtatatataatcttcagtaacaatacatactgaatacgctgtggttcattaatattaacaccacgtactatagtattcttaatacagtgct

SEQ ID NO: 489082 - DNA, 120 bp, Artificial Sequence
  ENSG00000162688_46 (sequence is synthesized)
cactgcatttaataaatatttaataaatgatgaatgatagaagtttccatctacaatatatgttcctaaatggagcacagatgttcaaactatgctttcattttttcactgatatattaa

SEQ ID NO: 489083 - DNA, 120 bp, Artificial Sequence
  ENSG00000162688_47 (sequence is synthesized)
tttttgtgtaatgaatgccaacagtatattttatatgatttacttatgtgaggaaacatgcaaagcattaggaaatttatttcctaaaaacagttttgtaaaattagtattgagttctat

SEQ ID NO: 489084 - DNA, 120 bp, Artificial Sequence
  ENSG00000162688_48 (sequence is synthesized)
tgagtattataagatagcttacattttcaaaatggaaattgtcggtcatatttctagaactttaaagaaaaaagaatgttatattagttttctaaaactcaactatctttagtcatgttc

SEQ ID NO: 489085 - DNA, 120 bp, Artificial Sequence
  ENSG00000162688_49 (sequence is synthesized)
aaaaatctattgctagatcatagtagatactggttttctattaactcaaaacctacattgacaagtttaacattgagaagaatcttaacaaaaatatggatatgaattcagtagatatct

SEQ ID NO: 489086 - DNA, 120 bp, Artificial Sequence
  ENSG00000162688_50 (sequence is synthesized)
taaattcaataaaatcactggaagtttttcatgataacttattttaagatgccttaaaaatcttaaagtcacaaaaggaaaaaggtttttaacatttacatgagttaacattttttcata

SEQ ID NO: 489087 - DNA, 120 bp, Artificial Sequence
  ENSG00000162688_51 (sequence is synthesized)
gaacttatttcctagatagaattttttactgttttttactgttttcttaagaaaacagttaaatcattatgcattcagttggaagaaagtagtggcaagaattctttcattgctatataa

SEQ ID NO: 489088 - DNA, 120 bp, Artificial Sequence
  ENSG00000162688_52 (sequence is synthesized)
tattcagtggctcatttatacctaataaaataatggtattttaaaataatgctactttcaaagtagcatttttttagttagtttacaggttacatacccaaaaccttaactatgactaag

SEQ ID NO: 489089 - DNA, 120 bp, Artificial Sequence
  ENSG00000162688_53 (sequence is synthesized)
aaattaaagaagaaaaccagcaaactaaaacttctgggcagcaaaaatatataaatgcttcagatgtcaaatacccatgcttgaaagctcgtgtaatttactttaagattatctgcctgc

SEQ ID NO: 489090 - DNA, 120 bp, Artificial Sequence
  ENSG00000162688_54 (sequence is synthesized)
tcttcttcaaagctgaccttgctttagaaatagttttaactagcttagttttctggtttccaaaactaaaatagattaaatcctacaaatttaaggacagttgtgacagtaatctgacca

SEQ ID NO: 489091 - DNA, 120 bp, Artificial Sequence
  ENSG00000162688_55 (sequence is synthesized)
ctatctataaatacattggacattggtttccaaatctccctttcttcttcagttccttccttgttcaatatatacccttctctaaactgtgcgggtaaaaggaatgactgtccttgagag

SEQ ID NO: 489092 - DNA, 120 bp, Artificial Sequence
  ENSG00000162688_56 (sequence is synthesized)
aaccattagtttatcaaaggtttatgtagttttgttgctgtaccctaactttgatattcagggaggtaggaaaggtaacagaaaaccagcatatttaatcaaagcaagaagtaatcgctg

SEQ ID NO: 489093 - DNA, 120 bp, Artificial Sequence
  ENSG00000162688_57 (sequence is synthesized)
acagttaaatgtgaccaaaaaaattaaaagttcacaatttttttaatgtagccatttggggttatctctagtaaggcagatacccacgttggtaaatttttaggatattgtgttgcacta

SEQ ID NO: 489094 - DNA, 120 bp, Artificial Sequence
  ENSG00000162688_58 (sequence is synthesized)
gaaaactaagtggttcatatttctaatgaggaagattaatgaaagaacattgttatattctgcgtggtatattttaaagtttaagaaggcatgttaaacattatttcctctatggtagtt

SEQ ID NO: 489095 - DNA, 120 bp, Artificial Sequence
  ENSG00000162688_59 (sequence is synthesized)
aaaatacagaattagatttttaacaggtgtcatttgactaaacgtttcggtagaatgcttcatacttgagtgatgctggataaggtattgtatttcaacaatggactatgccttggtttt

SEQ ID NO: 489096 - DNA, 120 bp, Artificial Sequence
  ENSG00000162688_60 (sequence is synthesized)
tcactaatcaaaatcaaaattactctttaacatgataaatgaatttaccagtttagtatgctgtggtattttaataagttttcaaagataattgggaaaacatgagactggtcatattga

SEQ ID NO: 489097 - DNA, 120 bp, Artificial Sequence
  ENSG00000162688_61 (sequence is synthesized)
tgaatattgtaacatgtgaattgtgatccatttctgatatgtcttgaactactgtgtctagtgggcaaatgtcattgttacctctgtgtgttaagaaaataaaaatattttctaaaggtc

SEQ ID NO: 489098 - DNA, 120 bp, Artificial Sequence
  ENSG00000162688_62 (sequence is synthesized)
tgtataagaatttgcacatcccaagttgctatgtgaataggaatgcgtttccaggggaaggagaaagagacattacagagcagacagctctatgatgtttactatacttgctaaaatgtg

SEQ ID NO: 489099 - DNA, 120 bp, Artificial Sequence
  ENSG00000162688_63 (sequence is synthesized)
aaattcagctaaattggaatacaaagtagtgccaaaacagcattaggtttgcggagttattttaaacataattgaaaaatcaaggttttttaatactttaaataaaacatctgtttttca

SEQ ID NO: 489100 - DNA, 120 bp, Artificial Sequence
  ENSG00000162688_64 (sequence is synthesized)
tctcccccacacccctcgtgtgtgtttgcgcgtgcacgcacgtgcacacacgtgcacacagcaggatgagaaggggaggaggtaggaggatacctgtgaaataaatatttgttttatttt

SEQ ID NO: 489101 - DNA, 120 bp, Artificial Sequence
  ENSG00000162688_65 (sequence is synthesized)
tggaaaagaccctcttcagacttgaacaagaaactgggtctcactatgttgcccaggttgatattgaactcctggactcaagcaaccctccctctttggcctctgaaagtactgggatta

SEQ ID NO: 489102 - DNA, 120 bp, Artificial Sequence
  ENSG00000162692_0 (sequence is synthesized)
gcggtatctgcatcgggcctcactggcttcaggagctgaataccctcccaggcacacacaggtgggacacaaataagggttttggaaccactattttctcatcacgacagcaacttaaaa

SEQ ID NO: 489103 - DNA, 120 bp, Artificial Sequence
  ENSG00000162692_1 (sequence is synthesized)
tgcctgggaagatggtcgtgatccttggagcctcaaatatactttggataatgtttgcagcttctcaagcttttaaaatcgagaccaccccagaatctagatatcttgctcagattggtg

SEQ ID NO: 489104 - DNA, 120 bp, Artificial Sequence
  ENSG00000162692_2 (sequence is synthesized)
actccgtctcattgacttgcagcaccacaggctgtgagtccccatttttctcttggagaacccagatagatagtccactgaatgggaaggtgacgaatgaggggaccacatctacgctga

SEQ ID NO: 489105 - DNA, 120 bp, Artificial Sequence
  ENSG00000162692_3 (sequence is synthesized)
caatgaatcctgttagttttgggaacgaacactcttacctgtgcacagcaacttgtgaatctaggaaattggaaaaaggaatccaggtggagatctactcttttcctaaggatccagaga

SEQ ID NO: 489106 - DNA, 120 bp, Artificial Sequence
  ENSG00000162692_4 (sequence is synthesized)
ttcatttgagtggccctctggaggctgggaagccgatcacagtcaagtgttcagttgctgatgtatacccatttgacaggctggagatagacttactgaaaggagatcatctcatgaaga

SEQ ID NO: 489107 - DNA, 120 bp, Artificial Sequence
  ENSG00000162692_5 (sequence is synthesized)
gtcaggaatttctggaggatgcagacaggaagtccctggaaaccaagagtttggaagtaacctttactcctgtcattgaggatattggaaaagttcttgtttgccgagctaaattacaca

SEQ ID NO: 489108 - DNA, 120 bp, Artificial Sequence
  ENSG00000162692_6 (sequence is synthesized)
ttgatgaaatggattctgtgcccacagtaaggcaggctgtaaaagaattgcaagtctacatatcacccaagaatacagttatttctgtgaatccatccacaaagctgcaagaaggtggct

SEQ ID NO: 489109 - DNA, 120 bp, Artificial Sequence
  ENSG00000162692_7 (sequence is synthesized)
ctgtgaccatgacctgttccagcgagggtctaccagctccagagattttctggagtaagaaattagataatgggaatctacagcacctttctggaaatgcaactctcaccttaattgcta

SEQ ID NO: 489110 - DNA, 120 bp, Artificial Sequence
  ENSG00000162692_8 (sequence is synthesized)
tgaggatggaagattctggaatttatgtgtgtgaaggagttaatttgattgggaaaaacagaaaagaggtggaattaattgttcaagagaaaccatttactgttgagatctcccctggac

SEQ ID NO: 489111 - DNA, 120 bp, Artificial Sequence
  ENSG00000162692_9 (sequence is synthesized)
cccggattgctgctcagattggagactcagtcatgttgacatgtagtgtcatgggctgtgaatccccatctttctcctggagaacccagatagacagccctctgagcgggaaggtgagga

SEQ ID NO: 489112 - DNA, 120 bp, Artificial Sequence
  ENSG00000162692_10 (sequence is synthesized)
gtgaggggaccaattccacgctgaccctgagccctgtgagttttgagaacgaacactcttatctgtgcacagtgacttgtggacataagaaactggaaaagggaatccaggtggagctct

SEQ ID NO: 489113 - DNA, 120 bp, Artificial Sequence
  ENSG00000162692_11 (sequence is synthesized)
actcattccctagagatccagaaatcgagatgagtggtggcctcgtgaatgggagctctgtcactgtaagctgcaaggttcctagcgtgtacccccttgaccggctggagattgaattac

SEQ ID NO: 489114 - DNA, 120 bp, Artificial Sequence
  ENSG00000162692_12 (sequence is synthesized)
gaagatactggaaaagctcttgtttgtcaggctaagttacatattgatgacatggaattcgaacccaaacaaaggcagagtacgcaaacactttatgtcaatgttgcccccagagataca

SEQ ID NO: 489115 - DNA, 120 bp, Artificial Sequence
  ENSG00000162692_13 (sequence is synthesized)
accgtcttggtcagcccttcctccatcctggaggaaggcagttctgtgaatatgacatgcttgagccagggctttcctgctccgaaaatcctgtggagcaggcagctccctaacggggag

SEQ ID NO: 489116 - DNA, 120 bp, Artificial Sequence
  ENSG00000162692_14 (sequence is synthesized)
ctacagcctctttctgagaatgcaactctcaccttaatttctacaaaaatggaagattctggggtttatttatgtgaaggaattaaccaggctggaagaagcagaaaggaagtggaatta

SEQ ID NO: 489117 - DNA, 120 bp, Artificial Sequence
  ENSG00000162692_15 (sequence is synthesized)
attatccaagttactccaaaagacataaaacttacagcttttccttctgagagtgtcaaagaaggagacactgtcatcatctcttgtacatgtggaaatgttccagaaacatggataatc

SEQ ID NO: 489118 - DNA, 120 bp, Artificial Sequence
  ENSG00000162692_16 (sequence is synthesized)
ctgaagaaaaaagcggagacaggagacacagtactaaaatctatagatggcgcctataccatccgaaaggcccagttgaaggatgcgggagtatatgaatgtgaatctaaaaacaaagtt

SEQ ID NO: 489119 - DNA, 120 bp, Artificial Sequence
  ENSG00000162692_17 (sequence is synthesized)
ggctcacaattaagaagtttaacacttgatgttcaaggaagagaaaacaacaaagactatttttctcctgagcttctcgtgctctattttgcatcctccttaataatacctgccattgga

SEQ ID NO: 489120 - DNA, 120 bp, Artificial Sequence
  ENSG00000162692_18 (sequence is synthesized)
atgataatttactttgcaagaaaagccaacatgaaggggtcatatagtcttgtagaagcacagaagtcaaaagtgtagctaatgcttgatatgttcaactggagacactatttatctgtg

SEQ ID NO: 489121 - DNA, 120 bp, Artificial Sequence
  ENSG00000162692_19 (sequence is synthesized)
caaatccttgatactgctcatcattccttgagaaaaacaatgagctgagaggcagacttccctgaatgtattgaacttggaaagaaatgcccatctatgtcccttgctgtgagcaagaag

SEQ ID NO: 489122 - DNA, 120 bp, Artificial Sequence
  ENSG00000162692_20 (sequence is synthesized)
tcaaagtaaaacttgctgcctgaagaacagtaactgccatcaagatgagagaactggaggagttccttgatctgtatatacaataacataatttgtacatatgtaaaataaaattatgcc

SEQ ID NO: 489123 - DNA, 120 bp, Artificial Sequence
  ENSG00000162692_21 (sequence is synthesized)
atagcaagattgcttaaaatagcaacactctatatttagattgttaaaataactagtgttgcttggactattataatttaatgcatgttaggaaaatttcacattaatatttgctgacag

SEQ ID NO: 489124 - DNA, 120 bp, Artificial Sequence
  ENSG00000162692_22 (sequence is synthesized)
ctgacctttgtcatctttcttctattttattccctttcacaaaattttattcctatatagtttattgacaataatttcaggttttgtaaagatgccgggttttatatttttatagacaaa

SEQ ID NO: 489125 - DNA, 120 bp, Artificial Sequence
  ENSG00000162692_23 (sequence is synthesized)
taataagcaaagggagcactgggttgactttcaggtactaaatacctcaacctatggtataatggttgactgggtttctctgtatagtactggcatggtacggagatgtttcacgaagtt

SEQ ID NO: 489126 - DNA, 120 bp, Artificial Sequence
  ENSG00000162692_24 (sequence is synthesized)
tgttcatcagactcctgtgcaactttcccaatgtggcctaaaaatgcaacttctttttattttcttttgtaaatgtttaggtttttttgtatagtaaagtgataatttctggaattagaa

SEQ ID NO: 489127 - DNA, 120 bp, Artificial Sequence
  ENSG00000162692_25 (sequence is synthesized)
aactgcaattttctggattgactcttttcaggataataattgggaatagtaaacttgatcctgaacaacataaaaaaatctctcgactatcgaaaagcctcattaaaattccaacccact

SEQ ID NO: 489128 - DNA, 120 bp, Artificial Sequence
  ENSG00000162692_26 (sequence is synthesized)
tgccatcctactctattctggtggacagagaaagagaggagcagtatcctcattggagaaacttcaggggccccttaatctcctaagccctcttgtgaatgcacagtaggtaggatctgc

SEQ ID NO: 489129 - DNA, 120 bp, Artificial Sequence
  ENSG00000162692_27 (sequence is synthesized)
tgatcttattggtgtaaacaaaatacatcagccttggctgatcagtatcacaccccttgcacaccaattagctgctattgtgtaatggaggccatacttggcggtggagtgcaaacagga

SEQ ID NO: 489130 - DNA, 120 bp, Artificial Sequence
  ENSG00000162692_28 (sequence is synthesized)
ctgcaaacaaatgccaagtcttaagaggtctggcacttggctattggagtgagcaatcacttgtcaatgcagagaaaatttgaatctacatcagaaacaggtaaaatttttgttcgtcta

SEQ ID NO: 489131 - DNA, 120 bp, Artificial Sequence
  ENSG00000162692_29 (sequence is synthesized)
cccaaatttctcaaaatggcaagccttaccgtatgtatgttttccatcttcacagtacctcctcaaaacatgagaatagctgtatagctatacatccatctagaaatgttaaagaagggg

SEQ ID NO: 489132 - DNA, 120 bp, Artificial Sequence
  ENSG00000162692_30 (sequence is synthesized)
aaaacatcacgattatatatgaaacttctagtcatccacctgcagtgattatcctgaaaagaattgatctagccaatgaagttactatgtgttcaaagaagggaacatttactttgtatc

SEQ ID NO: 489133 - DNA, 120 bp, Artificial Sequence
  ENSG00000162692_31 (sequence is synthesized)
atgtcactcaaaatgattcaggggtatatgtaatcagtgcttccaatgaggttggggatgattctggacagattgcaatctcagttatgagtaggttgaatttactcatccctattttct

SEQ ID NO: 489134 - DNA, 120 bp, Artificial Sequence
  ENSG00000162692_32 (sequence is synthesized)
ttaatccttaatgcctctgggccacctttaattaagcctagccctgggaaattggtcccctaacatttctgtaattcttttgttaattaattgtgaccttttaaagacacatcaaacctg

SEQ ID NO: 489135 - DNA, 120 bp, Artificial Sequence
  ENSG00000162692_33 (sequence is synthesized)
cttctctactttttgactctgtctcacacacattgctttattttctaattgctttatcaaattagccacttacacagttgctactttttactcattatttaaatgaacaatcaaagaata

SEQ ID NO: 489136 - DNA, 120 bp, Artificial Sequence
  ENSG00000162692_34 (sequence is synthesized)
ttaagcgctcagctagaaactcatgcccccaaactgaatatagtttaaactagctaaattttaatgaagaccaaaaaatggatatttttctgggtattttgaactagatttcttttgcat

SEQ ID NO: 489137 - DNA, 120 bp, Artificial Sequence
  ENSG00000162692_35 (sequence is synthesized)
ttggctggattttttatttgtttcattttgtcttagcttgaacgtattccattaatagaaatcatcaggatttttaaaagatattcagtgtttatatgacaaatagaaaattgtatttga

SEQ ID NO: 489138 - DNA, 120 bp, Artificial Sequence
  ENSG00000162692_36 (sequence is synthesized)
aggttgccctggcaactaccttggcagcaaatttgtatttttctgccaatgcctgtggggaagactgaaaggcaaaagataatgtatattacattgaaaagaaagaaagaaaagaaatag

SEQ ID NO: 489139 - DNA, 120 bp, Artificial Sequence
  ENSG00000162692_37 (sequence is synthesized)
aaatagtatttctgtttctcagcatgtcatcaatattgatgcctatccataatcatgttgatggacatcccattcaaatattacctttatactttgactagctcagctctagcaagggaa

SEQ ID NO: 489140 - DNA, 120 bp, Artificial Sequence
  ENSG00000162692_38 (sequence is synthesized)
agtcaaaaagtgagacaattatcattatgcttagggtgaactgtttttcttcaataatttgaaaaagtgacttcacattatctgatgctcgtgattctttttacttggttgacctccagt

SEQ ID NO: 489141 - DNA, 120 bp, Artificial Sequence
  ENSG00000162692_39 (sequence is synthesized)
gattagaaagctctggaaagaatgtagtaatcaccaaagtcagatctctagtttctgccaggactgagacaatgtatatgccacttagtgaaacttaatacttgtgtggtcacatgatgc

SEQ ID NO: 489142 - DNA, 120 bp, Artificial Sequence
  ENSG00000162692_40 (sequence is synthesized)
tgtgcaaagtataaacaggagtgagtcttcagtaaatgacacactatcttcttcagctgctcttataaagttaagatgttaagcagtatagcagctgtcagatgattttttagcagatta

SEQ ID NO: 489143 - DNA, 120 bp, Artificial Sequence
  ENSG00000162692_41 (sequence is synthesized)
tgtatgctgttacctactgtactccatttacaactaagtggcaaaagcaaaatgtagagagaaaaaaatgttattagtgtttaaaaaatattgtttttggtgccaactaggccaagcagt

SEQ ID NO: 489144 - DNA, 120 bp, Artificial Sequence
  ENSG00000162692_42 (sequence is synthesized)
gagtcaggtgctggctgttcagtgatggactaaaaagaaaatagatatacatgtcttgatgtaatttttagcttaggggaggaaactaaacttaataagtaattacatggataaatgttt

SEQ ID NO: 489145 - DNA, 120 bp, Artificial Sequence
  ENSG00000162692_43 (sequence is synthesized)
aattaaaagctgtaataagggttttgaagggaaaacgagtgggttttgaaaatatattgaggttcttaatttagaatgagggagatatagattagagaatgcctctaagaaacatttaag

SEQ ID NO: 489146 - DNA, 120 bp, Artificial Sequence
  ENSG00000162692_44 (sequence is synthesized)
ctgtaacataacactgtccaaagaactctagtttatcaaaagatgatataaatgctgaagaggaaaaatgtattaatatgccctatttctgacataaaaaacatagaaacttctgtatat

SEQ ID NO: 489147 - DNA, 120 bp, Artificial Sequence
  ENSG00000162692_45 (sequence is synthesized)
ctctgagaaagccattggcaagattttttttttctcttacgatcttatttgtggcatttagctataatggtcacactctgaatattataaggattttcttagagaactggttagtcattt

SEQ ID NO: 489148 - DNA, 120 bp, Artificial Sequence
  ENSG00000162692_46 (sequence is synthesized)
caattcatggtcatcagagtcccagttctttagtagatatttttatttccccaagcaagtgcctctctccaattcctgttcttgcctctctccaattcctgttcttgttaaaaacttgta

SEQ ID NO: 489149 - DNA, 120 bp, Artificial Sequence
  ENSG00000162692_47 (sequence is synthesized)
ccctcccttccattttacaactgaacctgaatctatttgaatccaagtttgtggaagccaacaactatcatctttagatccatcatgaccatagcaaccaccaactgattatttggataa

SEQ ID NO: 489150 - DNA, 120 bp, Artificial Sequence
  ENSG00000162692_48 (sequence is synthesized)
ttcagacaaacatgcatcttgggtcctgatggtccttatcactgctttgattcccttctctttggagaactagttgtactgttataataaacatgtaactgttgttattaaatgctatct

SEQ ID NO: 489151 - DNA, 120 bp, Artificial Sequence
  ENSG00000162694_0 (sequence is synthesized)
cactttgcgggcggcactttttccaggttgttaatccagctaatggagaaggatagatgcacgctacttggtttagaaaaaaaaacaaaaatgagcaaacgagacgccccttccgtttta

SEQ ID NO: 489152 - DNA, 120 bp, Artificial Sequence
  ENSG00000162694_1 (sequence is synthesized)
tgataactaagctgcagggaaataaatcggctggccctactgcaatctactgcactcgagaaacatcacagaaaattctttgatttatcttaatagtgacaagtgagcctgcttctgtca

SEQ ID NO: 489153 - DNA, 120 bp, Artificial Sequence
  ENSG00000162694_2 (sequence is synthesized)
attactgaagctataaggagattttttaaaaattaaacttcaacacaatgaggtgttgccacatctgcaaacttcctgggagagtaatggggattcgagtgcttcgattatctttggtgg

SEQ ID NO: 489154 - DNA, 120 bp, Artificial Sequence
  ENSG00000162694_3 (sequence is synthesized)
tcatcctcgtattattactggtagctggtgctttgactgccttacttcccagtgttaaagaagacaagatgctcatgttgcgtagggaaataaaatcccagggcaagtccaccatggact

SEQ ID NO: 489155 - DNA, 120 bp, Artificial Sequence
  ENSG00000162694_4 (sequence is synthesized)
cctttactctcataatgcagacgtacaacagaacagatctcttattgaaacttttaaatcattatcaggctgtaccaaatctgcacaaagtgattgtggtatggaacaatattggagaga

SEQ ID NO: 489156 - DNA, 120 bp, Artificial Sequence
  ENSG00000162694_5 (sequence is synthesized)
aggcaccagatgaattatggaattctctagggccccaccctatccctgtgatcttcaaacaacagacagcaaacaggatgagaaatcgactccaggtctttcctgaactggaaaccaatg

SEQ ID NO: 489157 - DNA, 120 bp, Artificial Sequence
  ENSG00000162694_6 (sequence is synthesized)
cagtgttgatggtagatgatgacacactcatcagcaccccagaccttgtttttgctttctcagtttggcagcaatttcctgatcaaattgtaggatttgttcctagaaagcacgtctcta

SEQ ID NO: 489158 - DNA, 120 bp, Artificial Sequence
  ENSG00000162694_7 (sequence is synthesized)
cttcatcaggtatctacagttatggaagttttgaaatgcaagcaccagggtctggaaatggtgaccagtactctatggtgctgattggagcctcattcttcaatagcaaatatcttgaat

SEQ ID NO: 489159 - DNA, 120 bp, Artificial Sequence
  ENSG00000162694_8 (sequence is synthesized)
tatttcagaggcaacctgcagctgtccatgctttgatagatgatactcaaaactgtgatgatattgccatgaattttatcattgccaagcatattggcaagacttcagggatatttgtga

SEQ ID NO: 489160 - DNA, 120 bp, Artificial Sequence
  ENSG00000162694_9 (sequence is synthesized)
agcctgtaaacatggacaatttggaaaaagaaaccaacagtggctattctggaatgtggcatcgagctgagcacgctctgcagaggtcttattgtataaataagcttgttaatatctatg

SEQ ID NO: 489161 - DNA, 120 bp, Artificial Sequence
  ENSG00000162694_10 (sequence is synthesized)
atagcatgcccttaagatactccaacattatgatttcccagtttggttttccatatgccaactacaaaagaaaaatataaaagtaaaacaaacaaaaacaaacctgaaaactgcttggca

SEQ ID NO: 489162 - DNA, 120 bp, Artificial Sequence
  ENSG00000162694_11 (sequence is synthesized)
tagaaaaaaaagtgcagtgcttctaggatataaaattcacattacttttgaaagccaagaagttggtcttatccagttaggtcttcttatgaagagttttcatccagggatataactcct

SEQ ID NO: 489163 - DNA, 120 bp, Artificial Sequence
  ENSG00000162694_12 (sequence is synthesized)
tggtcagtgattttattgtttacatcctgagactgttctacagtttctttgactcctggcatttgccttaaggacctatagcaagctgtttctaggatcagaaactcaagagaggcattt

SEQ ID NO: 489164 - DNA, 120 bp, Artificial Sequence
  ENSG00000162694_13 (sequence is synthesized)
ctctgctttttcactaaaggtcagttgttttaatttgaaacctgaaatgcctctttagcaaaagcctgtggtatggggtaaagccatgtaagaagagaatagtctcagtcacatatgaag

SEQ ID NO: 489165 - DNA, 120 bp, Artificial Sequence
  ENSG00000162694_14 (sequence is synthesized)
aggaaaatttgcagctgccagtgctttccttgtggccctgccaaccagctcttccaggacgaactcagtccagcatggttttgatgtaaccatccatgcttttatttttgttaagtcttt

SEQ ID NO: 489166 - DNA, 120 bp, Artificial Sequence
  ENSG00000162694_15 (sequence is synthesized)
tgtgactgggacagttaattttagtagctgaagaacgtctagttgtttgcttgatatttgtgaacatttactgcatggatcacaaaacaatataccctgtatttcttacacgccacttat

SEQ ID NO: 489167 - DNA, 120 bp, Artificial Sequence
  ENSG00000162694_16 (sequence is synthesized)
atgcagcaaggagtaaatgtgttactagattcgggtagtgcattttgtcactgaatctgaccttgagaatgtacattaattcttatattttacataatgtatgtgttgtttaagaaatgt

SEQ ID NO: 489168 - DNA, 120 bp, Artificial Sequence
  ENSG00000162694_17 (sequence is synthesized)
ataaaaaacctgaaaaaaatgagtaagaactggcagaagttaaaaccctttgtatcaaaagatctttattggtagagcactggttatcttctggatactaaaaagttgtattacaaagcc

SEQ ID NO: 489169 - DNA, 120 bp, Artificial Sequence
  ENSG00000162694_18 (sequence is synthesized)
aaacacttgcattcacaactttaaaaaaagatccaaggaactattcataatgatgaaatttcaactacatacaaggaggagaaaataagaacccagtcataacagaggaattctatagga

SEQ ID NO: 489170 - DNA, 120 bp, Artificial Sequence
  ENSG00000162694_19 (sequence is synthesized)
gtctgcatcaattcattcttaaggttgcctactctctgttatgtgaattagcgtctgtgtttcacccattgtctgtgtttagtccttgttcaccactaaggcaaggaattcttaactagg

SEQ ID NO: 489171 - DNA, 120 bp, Artificial Sequence
  ENSG00000162694_20 (sequence is synthesized)
cctctgtttaccaacttctctttctcctcctttccctcttattcctccttctcctcttccttcttatataatgctagtatattctcaaaattgcaaagctgtgagaatattaaaataatc

SEQ ID NO: 489172 - DNA, 120 bp, Artificial Sequence
  ENSG00000162694_21 (sequence is synthesized)
atggctaatgttccaataatgaggtctttgtgcatttagttccgcatatgatggttttttttttacattaaagagtatatgtgtcttaatgcagtcagattgtaaaaaacaaaaacaaag

SEQ ID NO: 489173 - DNA, 120 bp, Artificial Sequence
  ENSG00000162694_22 (sequence is synthesized)
aaactaagaatcttactaaaaatcgataatgtcagttatctgttttgtccaatattggtagtacttttttgcctcttatgattcctctagcagataaataaaagaaacttttgccatcca

SEQ ID NO: 489174 - DNA, 120 bp, Artificial Sequence
  ENSG00000162694_23 (sequence is synthesized)
ggctggccctactgcaatctactgcactcgagtgacaagtgagcctgcttctgtcaattactgaagctataaggagattttttaaaaattaaacttcaacacaatgagaacctggaacag

SEQ ID NO: 489175 - DNA, 120 bp, Artificial Sequence
  ENSG00000162694_24 (sequence is synthesized)
aatcattttggaaggagagcatagaattggtagaaaatgagaaaagctgtatggcatttctaaaacaacaatgaaaagaatgactttcctgaatgtgggtaaaaaccttacatcaaaaac

SEQ ID NO: 489176 - DNA, 120 bp, Artificial Sequence
  ENSG00000162694_25 (sequence is synthesized)
tcttccccgaatcttgtatagcacctggaaaagacttgtgaagaaaaatgacctttcatgtaccatttctggcattttgtattttgcaatgcaataaattctagtttatgctgcttataa

SEQ ID NO: 489177 - DNA, 120 bp, Artificial Sequence
  ENSG00000162694_26 (sequence is synthesized)
ttactgaagctataaggagattttttaaaaattaaacttcaacacaatgagaacctggaacagtggtggcacaaagtaagtgctcaggaactatctgttgaatgagtgttgccacatctg

SEQ ID NO: 489178 - DNA, 120 bp, Artificial Sequence
  ENSG00000162694_27 (sequence is synthesized)
tcttgtcagaacctccaggccagtttcagcaacgtgcaggcagaagctggcccctcggtgggatgcgagggcgtgtggagcgcggggaggagagccccacaggcctttcctgggcacccg

SEQ ID NO: 489179 - DNA, 120 bp, Artificial Sequence
  ENSG00000162694_28 (sequence is synthesized)
cggtggatgggaaggctccttcgggcgcctttcagggaagttgtttggctgagggaaggtggtccgtcacgtgaatgtttaaaagttgttaccttggagaagaaatggaggaaaggattg

SEQ ID NO: 489180 - DNA, 120 bp, Artificial Sequence
  ENSG00000162694_29 (sequence is synthesized)
gctttcggaggtgggctggaaactacaaaaccgagcttcctgggaatgccttttaggccgacaggaagtggagcgtcaccgaaagggaggggcggccactcggggactgtcccttgctcc

SEQ ID NO: 489181 - DNA, 120 bp, Artificial Sequence
  ENSG00000162694_30 (sequence is synthesized)
taacgggttttaagtatatagttcagtagtgttaactgttttcacattgttgtgcggccgatctctggaactttttcatcttgcaaaactgaaactttatacccactgaacaacaactgt

SEQ ID NO: 489182 - DNA, 120 bp, Artificial Sequence
  ENSG00000162694_31 (sequence is synthesized)
ccatttcttcctactcccagcccctggcaactgccattctttctgtttctataaatttgactttcctaggtacctcataataaatggaatcatacagtatttgtctttttgtgactgctt

SEQ ID NO: 489183 - DNA, 120 bp, Artificial Sequence
  ENSG00000162694_32 (sequence is synthesized)
atttcaattaacataatgtcttcaagattcatctatgttgtggcatgtatcagaattccctaatttgtaaaaacagaataataatactcttttgtacctgtgtatcatattttctaaatg

SEQ ID NO: 489184 - DNA, 120 bp, Artificial Sequence
  ENSG00000162695_0 (sequence is synthesized)
ggaagtaagcgaattcccgggtgtgtgtctgtgtctgtctgtgtctcgcagcggcgcgcggccccggacaagcgctggggattcccgtttgaggcgtcactactgtcactgccatcaccc

SEQ ID NO: 489185 - DNA, 120 bp, Artificial Sequence
  ENSG00000162695_1 (sequence is synthesized)
cacggagccacttctagaggggagtagacccggcccttcgccgggcagagaagatgttgcccctgtccatcaaagacgatgaatacaaaccacccaagttcaatttgttcggcaagatct

SEQ ID NO: 489186 - DNA, 120 bp, Artificial Sequence
  ENSG00000162695_2 (sequence is synthesized)
cgggctggtttaggtctatactgtccgacaagacttcccggaacctgtttttcttcctgtgcctgaacctctctttcgcttttgtggaactactctacggcatctggagcaactgcttag

SEQ ID NO: 489187 - DNA, 120 bp, Artificial Sequence
  ENSG00000162695_3 (sequence is synthesized)
gcttgatttccgactcttttcacatgtttttcgatagcactgccattttggctggactggcagcttctgttatttcaaaatggagagataatgatgctttctcctatgggtatgttagag

SEQ ID NO: 489188 - DNA, 120 bp, Artificial Sequence
  ENSG00000162695_4 (sequence is synthesized)
cggaagttctggctggctttgtcaatggcctatttttgatcttcactgctttttttattttctcagaaggagttgagagagcattagcccctccagatgtccaccatgagagactgcttc

SEQ ID NO: 489189 - DNA, 120 bp, Artificial Sequence
  ENSG00000162695_5 (sequence is synthesized)
ttgtttccattcttgggtttgtggtaaacctaataggaatatttgttttcaaacatggaggtcatggacattctcatggctctggccacggacacagtcattccctctttaatggtgctc

SEQ ID NO: 489190 - DNA, 120 bp, Artificial Sequence
  ENSG00000162695_6 (sequence is synthesized)
tagatcaggcacatggccatgtcgatcattgccatagccatgaagtgaaacatggtgctgcacatagccatgatcatgctcatggacatggacactttcattctcatgatggcccgtcct

SEQ ID NO: 489191 - DNA, 120 bp, Artificial Sequence
  ENSG00000162695_7 (sequence is synthesized)
taaaagaaacaacaggacccagcagacagattttacaaggtgtatttttacatatcctagcagatacacttggaagtattggtgtaattgcttctgccatcatgatgcaaaattttggtc

SEQ ID NO: 489192 - DNA, 120 bp, Artificial Sequence
  ENSG00000162695_8 (sequence is synthesized)
tgatgatagcagatcctatctgttcaattcttatagccattcttatagttgtaagtgttattcctcttttaagagaatctgttggaatattaatgcagagaactcctcccctattagaaa

SEQ ID NO: 489193 - DNA, 120 bp, Artificial Sequence
  ENSG00000162695_9 (sequence is synthesized)
atagtctgcctcagtgctatcagagggtacagcagttgcaaggagtttacagtttacaggaacagcacttctggactttatgttctgacgtttatgttgggaccttgaaattaatagtag

SEQ ID NO: 489194 - DNA, 120 bp, Artificial Sequence
  ENSG00000162695_10 (sequence is synthesized)
cacctgatgctgatgctaggtggattttaagccaaacacataatatttttactcaggctggagtgagacagctctacgtacagattgactttgcagccatgtagtgaatggaaagaaatt

SEQ ID NO: 489195 - DNA, 120 bp, Artificial Sequence
  ENSG00000162695_11 (sequence is synthesized)
atgcaccttttatggaccaaatttttctggtactgtacgatccaaaacattgtacccagctttttaaaagagagaaattatcactacaactcccgagcactaagtagacggggtagagtc

SEQ ID NO: 489196 - DNA, 120 bp, Artificial Sequence
  ENSG00000162695_12 (sequence is synthesized)
agccgttcatgctttgtggggagttcacagctaagggatcagatttaagaggatatctcctggacttttggtcttttcttttgtgctctttcctccaaatctttttgacttctgaggttt

SEQ ID NO: 489197 - DNA, 120 bp, Artificial Sequence
  ENSG00000162695_13 (sequence is synthesized)
ttagcttaggatgttaatttgtccttttgtctttctttttttgtttttgttttctgtttgtttgttttcatgttgaatgcccacaccaccatcctctcatcccagccagtaagaatttca

SEQ ID NO: 489198 - DNA, 120 bp, Artificial Sequence
  ENSG00000162695_14 (sequence is synthesized)
gttgtgggcctccagtcttctggaatgtcttcactgcagctgctggaaatcactgctttcattcccacaaaaccagtattacttttttttaaaaaaagaaagaaattggaaatctgtgct

SEQ ID NO: 489199 - DNA, 120 bp, Artificial Sequence
  ENSG00000162695_15 (sequence is synthesized)
atacgtaatgtcataattgttgacgttcttcagtataatcatgtttgttaaattgtttgtaccttgcaaacttatgaaccaaaccatattgggttttcaaagtgcctttgtatccaaaaa

SEQ ID NO: 489200 - DNA, 87 bp, Artificial Sequence
  ENSG00000162695_16 (sequence is synthesized)
aaaccatattgggttttcaaagtgcctttgtatccaaaaatgtatttgccagcatagaaatgtaccatcaagagtcatgtaagatgg

SEQ ID NO: 489201 - DNA, 120 bp, Artificial Sequence
  ENSG00000162695_17 (sequence is synthesized)
ttttttttttttttttttttttaacaatggatattctgtaaaatatcctgtacaaaacaagactattgccagtaatgtatacaaattgtctttttgtgtacttccagcataggtttggat

SEQ ID NO: 489202 - DNA, 120 bp, Artificial Sequence
  ENSG00000162695_18 (sequence is synthesized)
atatgaacatttttcttttattgttttatcttcacagaaaataaaaggtgttaatttgctttttaaaacaaatttaattatcacattttaaattactttgtggactgtgttttcaaaact

SEQ ID NO: 489203 - DNA, 120 bp, Artificial Sequence
  ENSG00000162695_19 (sequence is synthesized)
ttgcaaattcatctgttacacagaaaattttgacttaaaacatctgctgaattccaaatttctgtaatagctactgtatctgtgataaactttcctatatctttccttgccatttctatg

SEQ ID NO: 489204 - DNA, 120 bp, Artificial Sequence
  ENSG00000162695_20 (sequence is synthesized)
gattttataatgaaagaaaaaggcattggagactgaaggcagaaatggttgtgacagtgctgtttggctttttcattcttcaaatgccaagtcatccactttgttttcctgtttaggctt

SEQ ID NO: 489205 - DNA, 120 bp, Artificial Sequence
  ENSG00000162695_21 (sequence is synthesized)
tgcacaaatacaattgctttcaggaatcctaaagcagcattttattgagtttgaattattaaaggtacagaggaaatgtggtgatgtagaacttttcctaacacaggtatctaggaagta

SEQ ID NO: 489206 - DNA, 120 bp, Artificial Sequence
  ENSG00000162695_22 (sequence is synthesized)
agtgctgagttgattttctaggttcttacgtatttgaaaaataaaattgcaattcgagataagtgcttgagcactctacttaagtattctctgtgttttatgaagagaaaatgatctgat

SEQ ID NO: 489207 - DNA, 120 bp, Artificial Sequence
  ENSG00000162695_23 (sequence is synthesized)
tttcccttatacttcattttacaatacatattcccttttaacttaaaaaaattgtaaatgtgggagaaaaaaccctgcaggatggaaacaattattaagaatgtagatcaataagtactt

SEQ ID NO: 489208 - DNA, 120 bp, Artificial Sequence
  ENSG00000162695_24 (sequence is synthesized)
tttagtgatgtggcagaaatccctgttgattctaagttttagagtgtcttttcccctatttctgacctacaactataaactactctctattaggagaactagaccactttcttcattctt

SEQ ID NO: 489209 - DNA, 120 bp, Artificial Sequence
  ENSG00000162695_25 (sequence is synthesized)
ttctaaactgctgcagattgccgtgaactctatcaatagtctcttttccgcaggcaaagtggcattttctaaacatgtttgcttactgccaggtggtttgaaatctatgatttactgcag

SEQ ID NO: 489210 - DNA, 120 bp, Artificial Sequence
  ENSG00000162695_26 (sequence is synthesized)
tagtatgtgcttaaaacaactgttgaggtcttttaagcaggaaagttcaaaaggaagtgtcctgataatggtactggtttttctacaaatataagtagtcattagaagtttgcaaccacc

SEQ ID NO: 489211 - DNA, 120 bp, Artificial Sequence
  ENSG00000162695_27 (sequence is synthesized)
accaagtctgagagaactctgggatattctgtgggttttggcatattagatagagaaaatgacagatctagatgaagggagcttttggatgtgtgcctttaaaaactgattatgtataaa

SEQ ID NO: 489212 - DNA, 120 bp, Artificial Sequence
  ENSG00000162695_28 (sequence is synthesized)
tactgatatttcacatacggagatatttgaagacccaagtctgcctttcacagagccctccattccaagtttagtttttgtcaaaatatgaatcattttatttgactgtactatcagtac

SEQ ID NO: 489213 - DNA, 120 bp, Artificial Sequence
  ENSG00000162695_29 (sequence is synthesized)
acaaatgcatgagtatgtttatacagtgttagactgatgtgaatttgcatttgttacattacattgccagcgcatatcatttagcaagttggcattaacatttatgctttaattaaatgc

SEQ ID NO: 489214 - DNA, 120 bp, Artificial Sequence
  ENSG00000162695_30 (sequence is synthesized)
cagtatacctatgtgtgcagcagtaaaaaattagtgagaaaaagcaactttttgtcactcttaggaaatattttgtcttattagtgttcttggcacatgtatattactaaagtagataat

SEQ ID NO: 489215 - DNA, 120 bp, Artificial Sequence
  ENSG00000162695_31 (sequence is synthesized)
tccaatgagaaatactaccagattattgttataaaattaatttacaatgtccctgatattgagctaactcttaaaaaaaccaaacaaaactcgtatctgagtgtaactttgccaatattt

SEQ ID NO: 489216 - DNA, 120 bp, Artificial Sequence
  ENSG00000162695_32 (sequence is synthesized)
aaaatattctctggacaacaaatttgtattgctcagggacagtttaccttgcctggtaaaccttcccaaacagaaatatagctatactatctttggttttgtttttttgttttttttgtt

SEQ ID NO: 489217 - DNA, 70 bp, Artificial Sequence
  ENSG00000162695_33 (sequence is synthesized)
gtttcaccacgttggccagggtggtcttggactcctgacctcaggtccgtgctcagccactagctttggt

SEQ ID NO: 489218 - DNA, 120 bp, Artificial Sequence
  ENSG00000162695_34 (sequence is synthesized)
gccaccgtgctcagccactagctttggttttttaaacatagattatattcctcaagatgaagggcttaacatatccacagcttcctcagtttgctaactccccatgcatctttgtgaagg

SEQ ID NO: 489219 - DNA, 120 bp, Artificial Sequence
  ENSG00000162695_35 (sequence is synthesized)
acagtatctagtttatctgtaggtcagtgttccttgtgctgtcatttcccttatatctggaatttgtcagcattcctgaaaacctacacgtgtatatcagtaaccaaaatgctatgcctt

SEQ ID NO: 489220 - DNA, 120 bp, Artificial Sequence
  ENSG00000162695_36 (sequence is synthesized)
ttttgcacctttgtacagcagccaaatcatgaactcaaaatgtatttgatcacagttctataatgtttttacctacctattatggaataatcagtttttacagagattattaatatggta

SEQ ID NO: 489221 - DNA, 120 bp, Artificial Sequence
  ENSG00000162695_37 (sequence is synthesized)
gaaccctgttatgtaattccaaaacttaagaaccatatttacattgcttaacacagaattttacatctaagcaaggactggctttagaagcagtgtagttctacctctcattttacagat

SEQ ID NO: 489222 - DNA, 120 bp, Artificial Sequence
  ENSG00000162695_38 (sequence is synthesized)
gagaaaaccgaagcccagaaaaactctcatttgctcaaagtcacagagaaaattagtggcaaagccaaaaagattcagatcttctgactcgaagttgagagttctttatactctattatg

SEQ ID NO: 489223 - DNA, 120 bp, Artificial Sequence
  ENSG00000162695_39 (sequence is synthesized)
ctgcctctccagtgtaatatttgcctttctgtaaatgggattaaatatgatttgtaaataaaggacatctgacctccttttttggtacattaaggcactttataaatggacttttattgt

SEQ ID NO: 489224 - DNA, 120 bp, Artificial Sequence
  ENSG00000162695_40 (sequence is synthesized)
ctcatttttcgtatataattatttccatcatattctttatggaagatgcaattaattttaacttttttactcttataaaaccagttcctgacattttaaaaaacaatatctgtaaaatgg

SEQ ID NO: 489225 - DNA, 120 bp, Artificial Sequence
  ENSG00000162695_41 (sequence is synthesized)
atccttttatgagtgaatttttctgctaattgcccaaggctaaatccaatttaaggattgcttagtttctttattttgtttatggtctctgaactggtatttttttataaaccaggctaa

SEQ ID NO: 489226 - DNA, 120 bp, Artificial Sequence
  ENSG00000162695_42 (sequence is synthesized)
ttcacaggtcataccatttcattcttgtcgtgttggcttccagtcactggaaaagcttttgcattttaaagatttttagagccatgcaaaactgggcattaaatgttgcataaagcaaat

SEQ ID NO: 489227 - DNA, 120 bp, Artificial Sequence
  ENSG00000162695_43 (sequence is synthesized)
cttttaagtaaggtaaaatgttgaagtcttaaccagaattcctacaactaattactaaaactgctatttctaactcttcatgaaagcattacctttggaaagttaaactttttttttcct

SEQ ID NO: 489228 - DNA, 120 bp, Artificial Sequence
  ENSG00000162695_44 (sequence is synthesized)
ttcatcaccgtctttgaaacaaattattttccaattcataagaactttggtaaaaaaaaaaataaaaggaaattatatgtttttctttggacattcattggaaggcttgttgaagacatg

SEQ ID NO: 489229 - DNA, 120 bp, Artificial Sequence
  ENSG00000162695_45 (sequence is synthesized)
gaaggcttgttgaagacatgatcccccagaagccttagtgacccagatctcaaccagagactcaagatagcctcaaatacagtgaaagattatgtatccaaaaaaaaaaaaaaaaaaaaa

SEQ ID NO: 489230 - DNA, 120 bp, Artificial Sequence
  ENSG00000162695_46 (sequence is synthesized)
cagttctagttaaagccaaatggatgtgagtctgacaagggtgtctttgatttatatttcctaactgcaaattacacagaaagtgagaatggggaataacttttattaagtatttatgtg

SEQ ID NO: 489231 - DNA, 120 bp, Artificial Sequence
  ENSG00000162695_47 (sequence is synthesized)
ccaggcggttagtgtggccttcatgttattacatttaatcctcaaatttctacaaaggaataattttgcatgattttatgattgacggagcattttcaaatctcctctaattctcataac

SEQ ID NO: 489232 - DNA, 120 bp, Artificial Sequence
  ENSG00000162695_48 (sequence is synthesized)
atctctgtgaggaaggaatttttatccttattttacagatgaggaagctgtttggagataatttaagtgacttgcctggggaatctagccagtagtagagtactgattaatcaggtgctg

SEQ ID NO: 489233 - DNA, 120 bp, Artificial Sequence
  ENSG00000162695_49 (sequence is synthesized)
acatctgctctgctttgtgtatgtaattcagcagtgcttcaaagatccaagaagctgtagcagatctcaatacactctcctataaaattagtgaataatcaccatgacaaaattggtatg

SEQ ID NO: 489234 - DNA, 120 bp, Artificial Sequence
  ENSG00000162695_50 (sequence is synthesized)
gcggaacagtcattatacattatttagactcattccttcttccagtgcccttatgattatttcctacctttaccattgatcttaaactgtgcaggctaaaaagaggaaccagaactccct

SEQ ID NO: 489235 - DNA, 120 bp, Artificial Sequence
  ENSG00000162695_51 (sequence is synthesized)
taagcacttttaagactatttaaaaaataaagttttgttggcattgaagagtaagctgcttaagggactgaatgaaaagatagtaccctttgtggctgtatgaagagagaaactgaattt

SEQ ID NO: 489236 - DNA, 120 bp, Artificial Sequence
  ENSG00000162695_52 (sequence is synthesized)
ctatccaagagaccttaatttagtttattagggaattatcttccccaaaagtacaagtaattttgcactgcaggagaaggataagtagatttgatttacatcacattttatacacacctt

SEQ ID NO: 489237 - DNA, 120 bp, Artificial Sequence
  ENSG00000162695_53 (sequence is synthesized)
tcaaaaggaagaaatctgtttcataaatagtagtaatctatgcttaaacttaacatttaatgttgacttcttacaacagccttgaaaattatttgtaattttgatcatgatgttggaaag

SEQ ID NO: 489238 - DNA, 120 bp, Artificial Sequence
  ENSG00000162695_54 (sequence is synthesized)
cttgtaataaagaatatctttctcttctgcatccttttatcctcaaacttagcatggattcacatgctgagtaaatgtttggttaactagtgaacattttagatagttgtgtcaaaaata

SEQ ID NO: 489239 - DNA, 120 bp, Artificial Sequence
  ENSG00000162695_55 (sequence is synthesized)
agggttagggataggtaaaaccagtaatttactgttttttacagaagacatctcagcatttctttggcatttttgcacaaataaatgactatatattcaccttggccattttttttttta

SEQ ID NO: 489240 - DNA, 120 bp, Artificial Sequence
  ENSG00000162695_56 (sequence is synthesized)
agtagccctatgagctgctcattctttttcatatacagtggaagtatacagatgttatccattttacaaattgttggatcggaatttgacagaattgggactgtggaacctgggtcactt

SEQ ID NO: 489241 - DNA, 120 bp, Artificial Sequence
  ENSG00000162695_57 (sequence is synthesized)
gaattttctatattttgtatggccaaatcaggaaccagacagtctccatagtctcctttgtttttatggaaaattgccatattcacatatttcatttatcctaatgtattgtcatccaaa

SEQ ID NO: 489242 - DNA, 120 bp, Artificial Sequence
  ENSG00000162695_58 (sequence is synthesized)
atgaaagaggtctttcttgaaggtgctttaaagacatcactacatgtattcaattactgatttaaatattcccagaattattttttacctttctctttttcctctcaaacacaaaatttt

SEQ ID NO: 489243 - DNA, 120 bp, Artificial Sequence
  ENSG00000162695_59 (sequence is synthesized)
agtagtacctccctctatttcttcactgatttttcatctgttttcattgttatttccactatagaacttctactttatactagcggggaaaatttttttatttagaattttaatatttga

SEQ ID NO: 489244 - DNA, 120 bp, Artificial Sequence
  ENSG00000162695_60 (sequence is synthesized)
attttgtttatgtatcacatactgtgctacagttagcctcaatgaagattctattttgaactagacatcctgtcaatagtttgtcaagtaacttcattgcttcctttgatagcaattcag

SEQ ID NO: 489245 - DNA, 120 bp, Artificial Sequence
  ENSG00000162695_61 (sequence is synthesized)
tgaaattttttcccaagtgatattttcccccaacttttgtgagtttgataaataggatgagtcttttatattggaaatactgtgaatggaaaattgccaaatcccttcttagtatatttt

SEQ ID NO: 489246 - DNA, 120 bp, Artificial Sequence
  ENSG00000162695_62 (sequence is synthesized)
aagcaccctacaacactttacctccctgcctttagtggtatttaaacatatggccaagttagtatttgggtttgattcctttggtgaagattaaggcatcaaaacatttcttaaaatgtt

SEQ ID NO: 489247 - DNA, 120 bp, Artificial Sequence
  ENSG00000162695_63 (sequence is synthesized)
tgagtacaaggctaagttataatgtcaactttcaaagactatgttgtgattcggtttgaatatgctgaagtgagcaattatgatttgcccaagtgcaatacaacaaatctataatgtata

SEQ ID NO: 489248 - DNA, 120 bp, Artificial Sequence
  ENSG00000162695_64 (sequence is synthesized)
gtgcaatacaacaaatctataatgtatatttcacattttctacttgaacacattcatgtatatattttgttaaacttcatatgtatttaaaaagaatcatgaactgtatcaaaattcttt

SEQ ID NO: 489249 - DNA, 120 bp, Artificial Sequence
  ENSG00000162695_65 (sequence is synthesized)
aatctgtaaaacttgaagctgtcctcatcgggccagatggataaagcaaaatgacttttttttcttttttttttctgttagactgagcttttgtggaaagctgtaagccctcaggggaag

SEQ ID NO: 489250 - DNA, 120 bp, Artificial Sequence
  ENSG00000162695_66 (sequence is synthesized)
gatatcagcttgagtaattaactcatgattatgcaaagaaaatttacctagcctctttgtttttcctttctttgttattgccttgggctacttcattttttattaccatcttctctgttt

SEQ ID NO: 489251 - DNA, 120 bp, Artificial Sequence
  ENSG00000162695_67 (sequence is synthesized)
agggctaggagtaaggaaaatgacagagacaataaaaagagcccaagttttgcccattttgctttcactaacaatgttgttgaaaaataaaagaaattaagacaatttatttgaacaata

SEQ ID NO: 489252 - DNA, 120 bp, Artificial Sequence
  ENSG00000162702_0 (sequence is synthesized)
acactgcgccgcggctgcgcagtacacgggaggcttttaattccattgtggagaggacggcgttatttttattaactggaggcgacggcggctgcggcggcggcgggacccgcctcctcc

SEQ ID NO: 489253 - DNA, 120 bp, Artificial Sequence
  ENSG00000162702_1 (sequence is synthesized)
ggggtatgaaaatcggcagtgggttcctgagtggcggcggaggtaccggcagtagcggtggtagcggctccggcggcggtggtagtggcggcggcggcggcggcggcagcagcggcagga

SEQ ID NO: 489254 - DNA, 120 bp, Artificial Sequence
  ENSG00000162702_2 (sequence is synthesized)
gggcagagatggaacccacctttccccagggtatggttatgttcaaccaccgtcttcccccggtcaccagcttcacccggccggcggggtcggccgcccctcccccgcaatgcgtgttat

SEQ ID NO: 489255 - DNA, 120 bp, Artificial Sequence
  ENSG00000162702_3 (sequence is synthesized)
cctcctctacctccgcagccccggccgctgagcccccccctccgccagccccggacatgactttcaagaaggagccggcggcgtcagccgcggccttcccctcgcagaggacctcctggg

SEQ ID NO: 489256 - DNA, 120 bp, Artificial Sequence
  ENSG00000162702_4 (sequence is synthesized)
ggttcttgcagtctttggttagcatcaaacaggagaaacccgcggatcctgaggagcagcagtcccaccaccaccatcaccaccaccactatggggggctgttcgctggagctgaagaga

SEQ ID NO: 489257 - DNA, 120 bp, Artificial Sequence
  ENSG00000162702_5 (sequence is synthesized)
ggtctccaggcctaggaggcggtgaaggggggagtcacggcgtcatccaggacctcagtattctccaccagcatgtccagcagcaaccagcccagcaccaccgtgacgtattactcagca

SEQ ID NO: 489258 - DNA, 120 bp, Artificial Sequence
  ENSG00000162702_6 (sequence is synthesized)
gcagtagcaggactgatgaccaccatggcactgaggagccaaagcaggacactaatgtcaaaaaggcaaaaaggccaaagccagaatctcagggaatcaaagccaagaggaagccaagtg

SEQ ID NO: 489259 - DNA, 120 bp, Artificial Sequence
  ENSG00000162702_7 (sequence is synthesized)
catcttccaaaccttctttggttggagatggagaaggtgccatcctctccccaagtcagaaacctcatatctgtgatcactgtagtgctgctttccgaagctcctatcacctgcggagac

SEQ ID NO: 489260 - DNA, 120 bp, Artificial Sequence
  ENSG00000162702_8 (sequence is synthesized)
atgtcctcattcatacaggagaaagacctttccagtgcagccagtgtagtatgggtttcattcagaaatacctactacagagacatgagaaaattcatagtagagagaagccatttggat

SEQ ID NO: 489261 - DNA, 120 bp, Artificial Sequence
  ENSG00000162702_9 (sequence is synthesized)
gtgatcagtgcagcatgaagtttattcagaagtaccatatggagagacacaagaggacacatagtggagaaaagccatataagtgtgacacttgccaacagtatttttcaaggactgata

SEQ ID NO: 489262 - DNA, 120 bp, Artificial Sequence
  ENSG00000162702_10 (sequence is synthesized)
gattgttgaagcacaggcgcacatgtggtgaagtcatagttaaaggagccactagtgcagaacctgggtcatcaaaccataccaatatgggtaatctggctgtgttgtctcagggaaata

SEQ ID NO: 489263 - DNA, 120 bp, Artificial Sequence
  ENSG00000162702_11 (sequence is synthesized)
caagttcttcaaggagaaaaacaaagtcaaaaagcatagctattgaaaataaggaacagaagaccggtaaaacaaatgaatcgcaaatttcaaataatataaacatgcagagttactcag

SEQ ID NO: 489264 - DNA, 120 bp, Artificial Sequence
  ENSG00000162702_12 (sequence is synthesized)
tagaaatgcctaccgtgtcttccagtggaggcataattggcactggaatagatgaactgcagaagagggtgccaaaattgatctttaagaaaggaagcagaaagaatacagataaaaact

SEQ ID NO: 489265 - DNA, 120 bp, Artificial Sequence
  ENSG00000162702_13 (sequence is synthesized)
accttaactttgtgtcaccattaccagacatagtaggacagaaatccttgtctggaaaaccaagtggctcacttggcatagtatcaaataatagtgtggagaccattggtcttctccaaa

SEQ ID NO: 489266 - DNA, 120 bp, Artificial Sequence
  ENSG00000162702_14 (sequence is synthesized)
gtacaagtggcaaacaaggtcagataagtagtaattatgatgatgccatgcagttttcaaagaaaagaagatatttaccaactgccagcagcaacagtgccttttctataaacgtaggac

SEQ ID NO: 489267 - DNA, 120 bp, Artificial Sequence
  ENSG00000162702_15 (sequence is synthesized)
acatggtctcccaacagtctgtcattcagtctgcaggtgtcagtgttttggacaatgaggcaccattgtcacttattgactcctcagctctaaatgctgaaattaaatcttgtcatgaca

SEQ ID NO: 489268 - DNA, 120 bp, Artificial Sequence
  ENSG00000162702_16 (sequence is synthesized)
agtctggaattcctgatgaggttttacaaagtattttggatcaatactccaacaaatcagaaagccagaaagaggatcctttcaatattgcagaaccacgagtggatttacacacctcag

SEQ ID NO: 489269 - DNA, 120 bp, Artificial Sequence
  ENSG00000162702_17 (sequence is synthesized)
gagaacactcagaattggttcaagaagaaaatttgagcccaggcacccaaacaccttcaaatgataaagcaagtatgttgcaagaatactccaaatacctccaacaggcttttgaaaaat

SEQ ID NO: 489270 - DNA, 120 bp, Artificial Sequence
  ENSG00000162702_18 (sequence is synthesized)
ccactaatgcaagttttactcttggacacggtttccaatttgtcagtttgtcttcacctctccacaaccacactttgtttccagaaaaacaaatatacactacgtctcctttggagtgtg

SEQ ID NO: 489271 - DNA, 120 bp, Artificial Sequence
  ENSG00000162702_19 (sequence is synthesized)
gtttcggccaatctgttacctcagtgttgccatcttcattgccaaagcctccttttgggatgttgtttggatctcagccaggtctttatttgtctgctttggatgctacacatcagcagt

SEQ ID NO: 489272 - DNA, 120 bp, Artificial Sequence
  ENSG00000162702_20 (sequence is synthesized)
tagccagaaggaacagaaaaacttagagtcttcaacaggctttcagattccatctcaggagttagctagccagatagatcctcagaaagacatagagcctagaacaacgtatcagattga

SEQ ID NO: 489273 - DNA, 120 bp, Artificial Sequence
  ENSG00000162702_21 (sequence is synthesized)
gaactttgcacaagcgtttggttctcagtttaagtcgggcagcagggtgccaatgacctttatcactaactctaatggagaagtggaccatagagtaaggacttcagtgtcagatttctc

SEQ ID NO: 489274 - DNA, 120 bp, Artificial Sequence
  ENSG00000162702_22 (sequence is synthesized)
agggtatacaaatatgatgtctgatgtaagtgagccatgtagtacaagagtaaagacacccaccagccagagttacaggtaaggtcccaaaagtggccaggctggaggtcttctaatgta

SEQ ID NO: 489275 - DNA, 120 bp, Artificial Sequence
  ENSG00000162702_23 (sequence is synthesized)
attttgttttattttgagaacactgccattggaatgtttctacacgatcctattaagaataatgtgatgccctttcaatgcaacttttcatatttagtttattttgttagcgtgatttta

SEQ ID NO: 489276 - DNA, 120 bp, Artificial Sequence
  ENSG00000162702_24 (sequence is synthesized)
gctctgtttgtattatgatttttaatcaaaatcaatagattaaaaatagtttgacattcaaagtgacaatgtttagcaatcaaatttacatgtatagatcgtcagggaatagcccaaatg

SEQ ID NO: 489277 - DNA, 120 bp, Artificial Sequence
  ENSG00000162702_25 (sequence is synthesized)
acaaaaaaaaaccaaaaaaaaaaaacctacaaaaaaaactttgttgctaggattaaggttattctaattgctttactctcaggaaagtgtaataacgcatgggaattctgtacgttatca

SEQ ID NO: 489278 - DNA, 120 bp, Artificial Sequence
  ENSG00000162702_26 (sequence is synthesized)
gggaattctgtacgttatcactgtaatggaatatccaatttacagatagtatgatatacatttcatcatttaagtaagggatcgaaaacatttcaaattgctctatctgggctgatagac

SEQ ID NO: 489279 - DNA, 120 bp, Artificial Sequence
  ENSG00000162702_27 (sequence is synthesized)
atttcgtcatttaagtaagggatcgaagacatttcaaattgctatctccatctgggctgatccaaaattctgagattgttggctacctatattttgttgcagcttttaaatgtactctga

SEQ ID NO: 489280 - DNA, 120 bp, Artificial Sequence
  ENSG00000162702_28 (sequence is synthesized)
acttccaaaccacattcattccagcctggtagaacaaatattcttggatctttgatcaaagcctggaatgatagctttaataaaagaaggaaaaaaaaaaagcaccctctcttgatctca

SEQ ID NO: 489281 - DNA, 120 bp, Artificial Sequence
  ENSG00000162702_29 (sequence is synthesized)
actgtaacaaggctgtaattccatcaagcgattctactgacatctagtacagtgttgaagcccaagtggttggctggttccagtattagaactcaagttgaaattatatgattaactgaa

SEQ ID NO: 489282 - DNA, 120 bp, Artificial Sequence
  ENSG00000162702_30 (sequence is synthesized)
atttggggcatgcattatttattatacatggcctacaacggttctgtctgcgctgttacgtattacctacacttctgggtttttttgttcttgttctcagcctctctttaagagttcttg

SEQ ID NO: 489283 - DNA, 120 bp, Artificial Sequence
  ENSG00000162702_31 (sequence is synthesized)
ggccttccttttccctctttctattttaacagttttaattttagaaccatttacattccagtaggtaattcactatgcgctttatatgccttagggcatccaaataaaaaacaatagggt

SEQ ID NO: 489284 - DNA, 120 bp, Artificial Sequence
  ENSG00000162702_32 (sequence is synthesized)
aaacatccccaaaacccacctttaaaaaaaaaaaaacccatacagatttccatatgtaataaaaccccgtgttcttggatagatattaataaggttgtaattccaactggtgacataact

SEQ ID NO: 489285 - DNA, 120 bp, Artificial Sequence
  ENSG00000162702_33 (sequence is synthesized)
cctgtgagggataagaatgtgtctgcttatagtaataacatcagaacctctttgtgaaattgcggcctttaatgtacattttaatgaaagggtgcattagtattgtacaggggtcttgta

SEQ ID NO: 489286 - DNA, 120 bp, Artificial Sequence
  ENSG00000162702_34 (sequence is synthesized)
aagtcatcaaaacttgctatgaactctaattgccatttgaagctactgattggcagtggctctactctaaaactgctttttagcaattgtatttttttcctgattatattttttaatgta

SEQ ID NO: 489287 - DNA, 120 bp, Artificial Sequence
  ENSG00000162702_35 (sequence is synthesized)
ctttgatgtttatgctgatgagttttttatgtacttttggtgatgtttcagtcttatgtactcttctgacgtcagaaaagtaccactggttgtttgcagtcttattgtgtaatcagccta

SEQ ID NO: 489288 - DNA, 120 bp, Artificial Sequence
  ENSG00000162702_36 (sequence is synthesized)
ccgcaggcttccatgtataataaagtaattaatattgtgcaagtgtaaaacacttctgttataaaagcagtgtttggaaaataagaaatattaaaaatggttacaaagtattagttaatt

SEQ ID NO: 489289 - DNA, 120 bp, Artificial Sequence
  ENSG00000162702_37 (sequence is synthesized)
tccttttcccactttcctccctttagctttagcagctaaagggtcaccaacttgtcattgcaagattcttagaaaatgtacttaatcttaaatacgctgagtactaaaaagtgtttattt

SEQ ID NO: 489290 - DNA, 120 bp, Artificial Sequence
  ENSG00000162702_38 (sequence is synthesized)
cttatttcagtaagtgcggtaagttctattgagtacagagtacaagctgtaatcaaaggatggagaggacctttaccactgtatctcttaagctgtatgatttttctccagtttgtttta

SEQ ID NO: 489291 - DNA, 120 bp, Artificial Sequence
  ENSG00000162702_39 (sequence is synthesized)
tacaggttttgaatttctttaacttttattgtgtgtactgaatactgcatatgtattattctgattgtttgctctagtttactaccaataaaagtcctgttaatcacaagattgaagaaa

SEQ ID NO: 489292 - DNA, 120 bp, Artificial Sequence
  ENSG00000162704_0 (sequence is synthesized)
agtcggcgacgcctcagagcggaagagggaagtgaatcaggcgccgggtagtgggttgctgggctgggcttgctgaggtagaggcagcgccaagaagaggcctttgccgctggtcgggat

SEQ ID NO: 489293 - DNA, 120 bp, Artificial Sequence
  ENSG00000162704_1 (sequence is synthesized)
tgggatgtcgaagaacacagtgtcgtcggcccgcttccggaaggtggacgtggatgaatatgacgagaacaagttcgtggacgaagaagatgggggcgacggccaggccgggcccgacga

SEQ ID NO: 489294 - DNA, 120 bp, Artificial Sequence
  ENSG00000162704_2 (sequence is synthesized)
gggcgaggtggactcctgcctgcggcaaggaaacatgacagctgccctacaggcagctctgaagaacccccctatcaacaccaagagtcaggcagtgaaggaccgggcaggcagcattgt

SEQ ID NO: 489295 - DNA, 120 bp, Artificial Sequence
  ENSG00000162704_3 (sequence is synthesized)
cttgaaggtgctcatctcttttaaagctaatgatatagaaaaggcagttcaatctctggacaagaatggtgtggatctcctaatgaagtatatttataaaggatttgagagcccgtctga

SEQ ID NO: 489296 - DNA, 120 bp, Artificial Sequence
  ENSG00000162704_4 (sequence is synthesized)
caatagcagtgctatgttactgcaatggcatgaaaaggcacttgctgctggaggagtagggtccattgttcgtgtcttgactgcaagaaaaactgtgtagtctggcaggaagtggattat

SEQ ID NO: 489297 - DNA, 120 bp, Artificial Sequence
  ENSG00000162704_5 (sequence is synthesized)
ctgcctcgggagtgggaattgctggtacaaagaccaaaacaaccaaatgccaccgctgccctgtgggtagcatctgtttctctcagctttgccttcttgctttttcatatctgtaaagaa

SEQ ID NO: 489298 - DNA, 120 bp, Artificial Sequence
  ENSG00000162704_6 (sequence is synthesized)
aaaaattacatatcagttgtcctttaatgaaaattgggataatatagaagaaattgtgttaaaatagaagtgtttcatcctttcaaaaccatttcagtgatgtttataccaatctgtata

SEQ ID NO: 489299 - DNA, 120 bp, Artificial Sequence
  ENSG00000162704_7 (sequence is synthesized)
tagtataatttacattcaagtttaattgtgcaacttttaacccctgttggctggttttttgttctgttttgttttgtattatttttaactaatactgagagatttggtcagaatttgagg

SEQ ID NO: 489300 - DNA, 120 bp, Artificial Sequence
  ENSG00000162704_8 (sequence is synthesized)
ccagtttcctagctcattgctagtcaggaaatgatatttataaaaaatatgagagactggcagctattaacattgcaaaactggaccatatttcccttatttaataagcaaaatatgttt

SEQ ID NO: 489301 - DNA, 120 bp, Artificial Sequence
  ENSG00000162704_9 (sequence is synthesized)
ttggaataagtggtgggtgaataccactgctaagttatagctttgtttttgcttgcctcctgattatctgtactgtgggtttaagtatgctactttctctcagcatccaataatcatggc

SEQ ID NO: 489302 - DNA, 120 bp, Artificial Sequence
  ENSG00000162704_10 (sequence is synthesized)
ccctcaatttatttgtggtcacccagggttcagagcaagaagtcttgctttatacaaatgtatccataaaatatcagagcttgttgggcatgaacatcaaacttttgttccactaatatg

SEQ ID NO: 489303 - DNA, 120 bp, Artificial Sequence
  ENSG00000162704_11 (sequence is synthesized)
gctctgtttggaaaaaactgcaaatcagaaagaatgatttgcagaaagaaagaaaaactatggtgtaatttaaactctgggcagcctctgaatgaaatgctactttctttagaaatataa

SEQ ID NO: 489304 - DNA, 120 bp, Artificial Sequence
  ENSG00000162704_12 (sequence is synthesized)
tagctgccttagacattatgaggtatacaactagtatttaagataccatttaatatgccccgtaaatgtcttcagtgttcttcagggtagttgggatctcaaaagatttggttcagatcc

SEQ ID NO: 489305 - DNA, 120 bp, Artificial Sequence
  ENSG00000162704_13 (sequence is synthesized)
aaacaaatacacattctgtgttttagctcagtgttttctaaaaaaagaaactgccacacagcaaaaaattgtttactttgttggacaaaccaaatcagttctcaaaaaatgaccggtgct

SEQ ID NO: 489306 - DNA, 120 bp, Artificial Sequence
  ENSG00000162704_14 (sequence is synthesized)
tataaaaagttataaatatcgagtagctctaaaacaaaccacctgaccaagagggaagtgagcttgtgcttagtatttacattggatgccagttttgtaatcactgacttatgtgcaaac

SEQ ID NO: 489307 - DNA, 120 bp, Artificial Sequence
  ENSG00000162704_15 (sequence is synthesized)
tggtgcagaaattctataaactctttgctgtttttgatacctgctttttgtttcattttgttttgttttgtaaaaatgataaaacttcagaaaataaaatgtcagtgttgaataatttat

SEQ ID NO: 489308 - DNA, 120 bp, Artificial Sequence
  ENSG00000162704_16 (sequence is synthesized)
ttttctctgactttaacaattatgaatgtatggttaattaagaggaaaggttttctgcttctaccaccaagtactgtactcttaacaagaacagtttggtagggtttttataagactata

SEQ ID NO: 489309 - DNA, 120 bp, Artificial Sequence
  ENSG00000162704_17 (sequence is synthesized)
tagatataagatgatagagaagagagtcatgaatgatgtcagagcactactgaagcctttggagtgattccatagccttctggatggcagctgaatacctatatgtagtatcactgccca

SEQ ID NO: 489310 - DNA, 120 bp, Artificial Sequence
  ENSG00000162704_18 (sequence is synthesized)
aagacctagactagaaagtgcaaagtagcttagcagctgcagtcattcactcccagcctccaaaattctctttctttcacctcaaatctatttcttgtacttacctactcacagcgactt

SEQ ID NO: 489311 - DNA, 120 bp, Artificial Sequence
  ENSG00000162704_19 (sequence is synthesized)
ctgtttgctttcgatcttcacctgactagattcccactttaaaacacttccaggcaattcagggtcctatgggtgaagataagctaagcaataggtattattcttaaatattacttagag

SEQ ID NO: 489312 - DNA, 120 bp, Artificial Sequence
  ENSG00000162704_20 (sequence is synthesized)
atggggacttgctatgctgcccaggctggagtgcagtggctgttcacaggtgtgatcatagtgcactgaggcctcaaactcctggcttcaagcagtcctgcctcagcctcccgaaaaggt

SEQ ID NO: 489313 - DNA, 120 bp, Artificial Sequence
  ENSG00000162704_21 (sequence is synthesized)
ggaactacaggcacatgccactgtgccttagccaataggtattagaggtagtcaagtaggtatagcataaccaattacaaactttaaaatcaaatgatactgaatgctttttcataaaat

SEQ ID NO: 489314 - DNA, 120 bp, Artificial Sequence
  ENSG00000162704_22 (sequence is synthesized)
ccttcttaacatcactttcataactgaagcgtttggaaaaattctggagttcatatttgttcacaagaatgggtgggtgtatttagaatctgccagtctatcagctttactgaggggaga

SEQ ID NO: 489315 - DNA, 120 bp, Artificial Sequence
  ENSG00000162704_23 (sequence is synthesized)
tactaaaaatatttaacaagtagtataatatagagaccgagtcaaaatggatactagctggaaacaactggttcaactgttgcctcctgactaaatgtcagcccagggtatagtaaccat

SEQ ID NO: 489316 - DNA, 120 bp, Artificial Sequence
  ENSG00000162704_24 (sequence is synthesized)
gacacagtactatccttggtgaagagttgggaataggattaattgcggaaaaaatatatataaatgccataggacacttttagcacaaaagtagttgtttacctcccattctcctccttt

SEQ ID NO: 489317 - DNA, 120 bp, Artificial Sequence
  ENSG00000162704_25 (sequence is synthesized)
aatctcagtgcttttactatttggtttcttttttggcattttacaaaagggaagaaatggaaaacataccccttcttggtcattgggtaacagcaccatttcggtaacagtcatacttga

SEQ ID NO: 489318 - DNA, 120 bp, Artificial Sequence
  ENSG00000162704_26 (sequence is synthesized)
tgacaagtatgatgatattttaaggacatgaacatgggtgaaatcaatgtgtagatggtacaaattaaccgaattctttttaaagcatttcctgtggatcccaggatcatgaggacataa

SEQ ID NO: 489319 - DNA, 120 bp, Artificial Sequence
  ENSG00000162704_27 (sequence is synthesized)
cagaagaataaggtctgaatcttgttcaccagtttgctctcagcctaattgggaagtaaggttaagcacctgaaaattatgtcatacaaaaaaaaagagaattaacgtcatacaatttag

SEQ ID NO: 489320 - DNA, 120 bp, Artificial Sequence
  ENSG00000162704_28 (sequence is synthesized)
catttgactgtaaatgcagttagtcaatgttgggagaacaacaaaatcagggtggatcagagtatttaaagtgagacattaatttgaactaatcctttggaggggcagaaaggacaaacg

SEQ ID NO: 489321 - DNA, 120 bp, Artificial Sequence
  ENSG00000162704_29 (sequence is synthesized)
aggggcagaaaggacaaacggtccaagtgaaatgaacagagtagaaagagaaagttaaaagtgggtttaatagtcactgttcttgcagttttaatgttttttgttttgttttgttttgtt

SEQ ID NO: 489322 - DNA, 62 bp, Artificial Sequence
  ENSG00000162704_30 (sequence is synthesized)
ctgcagttttaatgtttttaacataagaattctagatggtgcaaattattaacaggatcaga

SEQ ID NO: 489323 - DNA, 120 bp, Artificial Sequence
  ENSG00000162704_31 (sequence is synthesized)
ataagaattctagatggtgcaaattattaacaggatcagaaactatctccgtgatagattcaagaaagtaaaattataggaaatcataatgttttattagctgaaatagacattgatgat

SEQ ID NO: 489324 - DNA, 89 bp, Artificial Sequence
  ENSG00000162704_32 (sequence is synthesized)
ggtgatccaccctcctccccaccgcgcccagccagattgattaatttttagatacacaatttttcctttagatttacaactaacatccc

SEQ ID NO: 489325 - DNA, 120 bp, Artificial Sequence
  ENSG00000162704_33 (sequence is synthesized)
agatacacaatttttcctttagatttacaactaacatccccttacagacaaaatatgttaaaagcaccaaaataattgaaaaacacacccaattaaggaacagaccaacggcctctgtag

SEQ ID NO: 489326 - DNA, 120 bp, Artificial Sequence
  ENSG00000162704_34 (sequence is synthesized)
aaccaagtgcccttaaacaaggctgcttctgtccatattcctgccgcgggacctctgccccactccctctccccctcaccccaatgtcactagtacaatatgtgaaaaccccaatgtgaa

SEQ ID NO: 489327 - DNA, 120 bp, Artificial Sequence
  ENSG00000162704_35 (sequence is synthesized)
aacgttctgtgcaggtgcctcttgtatgattccagatatggaggaggcccgggaagcccacagaggtacagcatgtcatctgcctcaaggtggtgctacttcaccacattgatgatccaa

SEQ ID NO: 489328 - DNA, 120 bp, Artificial Sequence
  ENSG00000162704_36 (sequence is synthesized)
ccacaagcaacatgggacacagcattcactttaacatttctattttcctttatcatttctgttacttgagtgtgtaagagtaatcaacataaataatctatgtttacatctcttatttct

SEQ ID NO: 489329 - DNA, 120 bp, Artificial Sequence
  ENSG00000162704_37 (sequence is synthesized)
ctctgaaacagttccctagaatccacaccacatgaaacacaaattgagtagtgtatgacccacctgaattccaaagcattctaaaactcccgtattttccagcctagcagttagctcctg

SEQ ID NO: 489330 - DNA, 120 bp, Artificial Sequence
  ENSG00000162704_38 (sequence is synthesized)
ctctgcaagacacaccctcttgaccttgctgctagactgtatgggccccctgaagtcatagtagctggctcttactcatccccacattcacttggcatagttgatgttcaacaaatatct

SEQ ID NO: 489331 - DNA, 120 bp, Artificial Sequence
  ENSG00000162704_39 (sequence is synthesized)
cttggttgcataacattgaacgagccaagtcacctaagaaatccttaatttatacacaggttcttagggtacctgaatagggcaacacatcagaagtacaaattgagaactatacaaaga

SEQ ID NO: 489332 - DNA, 120 bp, Artificial Sequence
  ENSG00000162704_40 (sequence is synthesized)
gtaaaataattcttgggttcaaataccctagagccaatcaagtttagtcacaaagaatttcaattcacttcaatgtggacagttaagaagggaatttatcagccttaggtggaaatcaga

SEQ ID NO: 489333 - DNA, 120 bp, Artificial Sequence
  ENSG00000162704_41 (sequence is synthesized)
gccaccatgagtaccacgtgcagcccctatagtgtttagctttgccagaagtcaccagagaaagtggctgaggaacagaattccagctcatatctggctaacagtggcactatgggagtt

SEQ ID NO: 489334 - DNA, 120 bp, Artificial Sequence
  ENSG00000162704_42 (sequence is synthesized)
tatatgatctgttcattattctgtggcatcaccttctaagagcagagatgtgacccaataccccttgttttccttaaagataaccattaaattatatccatgaatttatatcaccgtcct

SEQ ID NO: 489335 - DNA, 120 bp, Artificial Sequence
  ENSG00000162704_43 (sequence is synthesized)
tgactttatacgtagatttttctaattctgtcaacccttagggtaatgaataacttaaatggccaatgcctctgaataacatcatacttccttttgtttctccaaaaattgaatcaagat

SEQ ID NO: 489336 - DNA, 120 bp, Artificial Sequence
  ENSG00000162704_44 (sequence is synthesized)
gccagggcaactaagattttcttcaatttgctaagttaaaggtcagtgtattcattagccaatggttctgtattttattcattttagtttttattcgttttcaaataatttgttcatatt

SEQ ID NO: 489337 - DNA, 120 bp, Artificial Sequence
  ENSG00000162704_45 (sequence is synthesized)
gttcaatattcaaaaggtaagaaatatgtactgtggtaattttccattccaccctagttcctcttttgacaaccaactattgtcacttaattcttaggcatccttccagatacagtgtat

SEQ ID NO: 489338 - DNA, 120 bp, Artificial Sequence
  ENSG00000162704_46 (sequence is synthesized)
gcatttacaggcaaatacctatataagattttacccctttgtgtacataaatactaacatactatatatagtgttctgttccttgcttttttcattaacagtatattttggtggtaattt

SEQ ID NO: 489339 - DNA, 120 bp, Artificial Sequence
  ENSG00000162704_47 (sequence is synthesized)
gtatattttggtggtaatttcctatcaatacataaagaacttccttattcccttcagaggcatttgaaccagagcaattccttcttgaatagaagctgggtaaaataaggctgagaccta

SEQ ID NO: 489340 - DNA, 89 bp, Artificial Sequence
  ENSG00000162704_48 (sequence is synthesized)
agtaaagaagctggccaaaacccaccaaatccaagatggcaatgaaagtgacctctgcctctggccatcctcaccgctacgctcccacc

SEQ ID NO: 489341 - DNA, 120 bp, Artificial Sequence
  ENSG00000162704_49 (sequence is synthesized)
gaattctttcttgtgtgagatccaagaacgctcacttggggtctggattgggaccactttccgataacaattttatttttatgactgcataataattctattatataaataaatgtacca

SEQ ID NO: 489342 - DNA, 120 bp, Artificial Sequence
  ENSG00000162704_50 (sequence is synthesized)
ctgcataataattctattatataaataaatgtaccataatttacttaaccatttccctattgatttaggtggtttctgatcttttgcagttacaaacagtgctacagtgaatagcattat

SEQ ID NO: 489343 - DNA, 120 bp, Artificial Sequence
  ENSG00000162704_51 (sequence is synthesized)
acacaagtcattttacatatgttcaagcctatttgtagatcaattcctaaaagtgaaagttaaggtcagttggagggcatttaagggagatattgctaaattgcctttcttaaaggtttt

SEQ ID NO: 489344 - DNA, 120 bp, Artificial Sequence
  ENSG00000162704_52 (sequence is synthesized)
atcaattatactttctccagccgtgtagaagaatgcatgttttcccacccctttacctattctatgtgtttgtcataaaacattttttaatcttttcaaatctgatgttttaaaaatggt

SEQ ID NO: 489345 - DNA, 120 bp, Artificial Sequence
  ENSG00000162704_53 (sequence is synthesized)
atcatatatttgcatttctcttaatgtaaatgagattgcacatcttttcacatgcctaatagccagttgtattttcttttctatatttttgtatttctatattttctttgcccttttgat

SEQ ID NO: 489346 - DNA, 120 bp, Artificial Sequence
  ENSG00000162704_54 (sequence is synthesized)
ggtctttttcttactgatttgtaggagctcttttcaacaggaatgtcaaatatttcttgcattttgagtttcgctttataatagcttttactataaataaaaaggttatttttattttta

SEQ ID NO: 489347 - DNA, 120 bp, Artificial Sequence
  ENSG00000162704_55 (sequence is synthesized)
attaacatcctggaaaccaacacattgaatttccagtattgaacatagtgaccaaagtaattttctttttatatgtaaatcaagtcataagaaccagtggttataatgctttcctggggg

SEQ ID NO: 489348 - DNA, 120 bp, Artificial Sequence
  ENSG00000162704_56 (sequence is synthesized)
ctacaacacagtgatctctgctgatatcttattcttagtaaaatcctctgcagttgcaaaaaaaaatcaatattttaactgtttgctatctttgacatagaagagtttataatgtagttt

SEQ ID NO: 489349 - DNA, 120 bp, Artificial Sequence
  ENSG00000162704_57 (sequence is synthesized)
gataggtaaaaatttcacgtgaaaaaatagccctataatgtagttatgataatgctgcatggtaagatacagtaagttcaaacgatagtgaaatcatttgtgtgtgtttttagaggagac

SEQ ID NO: 489350 - DNA, 120 bp, Artificial Sequence
  ENSG00000162704_58 (sequence is synthesized)
cactcaggctgaatttgagcaaaggtttgaaaaataagttaaacctttacaaaaataaacagattgtaattgctttttaaagattttttaaaaccatacaaatactaaatacttattata

SEQ ID NO: 489351 - DNA, 120 bp, Artificial Sequence
  ENSG00000162704_59 (sequence is synthesized)
gaaagctcagacatatgagaaggttaaaaagatagtggtttgtggtcccagcacccagagataacagttactactttggggccttgctgtattgttacagagttcccttttgttttttta

SEQ ID NO: 489352 - DNA, 120 bp, Artificial Sequence
  ENSG00000162704_60 (sequence is synthesized)
agaatgaaattttataacgtgctttttcagctatatgcaatgtacatgagctttccttcgcaataagtttatagcatttttaacacttgtatatggataagctgcagtgtatacataact

SEQ ID NO: 489353 - DNA, 120 bp, Artificial Sequence
  ENSG00000162704_61 (sequence is synthesized)
aatcttttgttatatatttagactgactttttttttcctattgtaaaccactgaaatcaatattttttggtaaatttttaattgttctctttgagtaaattgctagcagtgaattactgg

SEQ ID NO: 489354 - DNA, 120 bp, Artificial Sequence
  ENSG00000162704_62 (sequence is synthesized)
atcaaagaatgcacttttttttaaggcttttggtatgcagtattgccaaattgcccttcagaacagttgtgcaacttacattctctgcagtcttttactaattcttaacctatttacgta

SEQ ID NO: 489355 - DNA, 120 bp, Artificial Sequence
  ENSG00000162704_63 (sequence is synthesized)
tttatttaaaatgatgcccatagcatcaaccccgttgtccatagctattcatacatcctaggagcttcaagaatctcaattgaatagtagtaagtaataacttaggtaaatgcataataa

SEQ ID NO: 489356 - DNA, 120 bp, Artificial Sequence
  ENSG00000162704_64 (sequence is synthesized)
ttatctaggtaacataattttttattggggaaaatttctttggtttttacaagttgtaaagattgtcgttgaaatttcatttttaccgtggatgcaaagatatttttctaaatctggtaa

SEQ ID NO: 489357 - DNA, 120 bp, Artificial Sequence
  ENSG00000162704_65 (sequence is synthesized)
ttgcagtctttaaaccaaagataacagtaggtggtagaaacattctgtgaaatcctgaccagtaggaatgctggaggtatcactttgtgttgaatggaaggagaaacgaattgttgaaaa

SEQ ID NO: 489358 - DNA, 120 bp, Artificial Sequence
  ENSG00000162704_66 (sequence is synthesized)
atctacagtcaattcatataaattacagtcaattttcttttaagacagcttggtttattaaaatttttaaataaaaaagtttttaagaaaaaattacttctgaaggataattcaaggtga

SEQ ID NO: 489359 - DNA, 74 bp, Artificial Sequence
  ENSG00000162704_67 (sequence is synthesized)
aaaaaagtttttaagaaaaaattacttctgaaggataattcaaggtgaaactgcaaatctgcctccttgttttg

SEQ ID NO: 489360 - DNA, 67 bp, Artificial Sequence
  ENSG00000162704_68 (sequence is synthesized)
gcagtggtgcaatctcaactcactgcaccctccgcctcccgggtttaagctgcctggataatttctg

SEQ ID NO: 489361 - DNA, 70 bp, Artificial Sequence
  ENSG00000162704_69 (sequence is synthesized)
ggccaccacacccggccgttttgttgggattttttttttttaagatcaagacataaatttaaatgttgtt

SEQ ID NO: 489362 - DNA, 120 bp, Artificial Sequence
  ENSG00000162704_70 (sequence is synthesized)
tttttttttttaagatcaagacataaatttaaatgttgttttaataaattgttaaattatcacattgatctgttagcaaatcctctcagctctgccttcaattatgttaatagtctgtct

SEQ ID NO: 489363 - DNA, 120 bp, Artificial Sequence
  ENSG00000162704_71 (sequence is synthesized)
agtttcttaccacctccactgctactatgcttaccacatccagcctgtattattgcaattgcctcctaattgctctccctgcttctaccttatcccctactcccacagcttattttctgt

SEQ ID NO: 489364 - DNA, 120 bp, Artificial Sequence
  ENSG00000162704_72 (sequence is synthesized)
aacatagatgccaaagcaatcctgttaaaatgtgagtcagattatggcactgctcttaaaaccttccaatgtcttctcatttctctcagtaaaagccaaactccttacaatgcctgtagg

SEQ ID NO: 489365 - DNA, 120 bp, Artificial Sequence
  ENSG00000162704_73 (sequence is synthesized)
ccttacacgatctgtcctcccataacctctgacttactcacgtgcttttctcccaccaatccactccaaccacattgggtttttttctgttcctggaacacactgaacacacactaatag

SEQ ID NO: 489366 - DNA, 120 bp, Artificial Sequence
  ENSG00000162704_74 (sequence is synthesized)
cactgttctttcctctgtctgaaacactttcctcagttatcccaagccttctttcacgtccttcaggtccttactcaaatgtcacattcatagtgtagactttctgaaattctaaaccct

SEQ ID NO: 489367 - DNA, 120 bp, Artificial Sequence
  ENSG00000162704_75 (sequence is synthesized)
aaatctatatgactggttcttttacaatagggaatgacaatgacaacctctctcacctaaataaccattttgatttgttgtacatttttgttattacaaataaaatgcatgaaaaggata

SEQ ID NO: 489368 - DNA, 120 bp, Artificial Sequence
  ENSG00000162704_76 (sequence is synthesized)
gaaagacagccctagtggtggggtactagagttggaggaacaagtgaactctgtggttttccttttaggggaatgtttgtacattctgacagtctgattggccttctgtttctcatgctt

SEQ ID NO: 489369 - DNA, 120 bp, Artificial Sequence
  ENSG00000162704_77 (sequence is synthesized)
gctaactcactagtgctttcaaagagagcctgaatttaataggtatggtctaacacagtttgaataacctttgtgaaatatgagagaaaatatctaaagcaaaaaattaagctgccacct

SEQ ID NO: 489370 - DNA, 120 bp, Artificial Sequence
  ENSG00000162704_78 (sequence is synthesized)
aagggacatatgaattattacatcttctgtgatgcctcttttcatcaatattgagagattgctaatgtgtatcattcagattgctaatctgccagcatgttctaccagcatttcagataa

SEQ ID NO: 489371 - DNA, 120 bp, Artificial Sequence
  ENSG00000162704_79 (sequence is synthesized)
tacagaatatggttctagcaaaagtttggtctttattttttcaattagaatcacaggaaaagacatattttggttgataataggttatttcatttgggggactaataattctgatatata

SEQ ID NO: 489372 - DNA, 120 bp, Artificial Sequence
  ENSG00000162704_80 (sequence is synthesized)
ttttaggatttctttaacaccactctaggtaatgtttgcatatgtatctcactgggaaatgaaagactatcaaggtgttcacttgatagttagaaccaagggtgaaacagtctttgcttt

SEQ ID NO: 489373 - DNA, 120 bp, Artificial Sequence
  ENSG00000162706_0 (sequence is synthesized)
agcgccggctccctcccggtccccacctcggccccgggctccgaagcggctcgggggcgccctttcggtcaacatcgtagtccaccccctccccatccccagcccccggggattcaggct

SEQ ID NO: 489374 - DNA, 120 bp, Artificial Sequence
  ENSG00000162706_1 (sequence is synthesized)
cccagccagggagccggccgggaagcgcgatgggggccccagccgcctcgctcctgctcctgctcctgctgttcgcctgctgctgggcgcccggcggggccaacctctcccaggacggct

SEQ ID NO: 489375 - DNA, 120 bp, Artificial Sequence
  ENSG00000162706_2 (sequence is synthesized)
ggacggctactggcaggagcaggatttggagctgggaactctggctccactcgacgaggccatcagctccacagtctggagcagccctgacatgctggccagtcaagacagccagccctg

SEQ ID NO: 489376 - DNA, 120 bp, Artificial Sequence
  ENSG00000162706_3 (sequence is synthesized)
gacatctgatgaaacagtggtggctggtggcaccgtggtgctcaagtgccaagtgaaagatcacgaggactcatccctgcaatggtctaaccctgctcagcagactctctactttgggga

SEQ ID NO: 489377 - DNA, 120 bp, Artificial Sequence
  ENSG00000162706_4 (sequence is synthesized)
gaagagagcccttcgagataatcgaattcagctggttacctctacgccccacgagctcagcatcagcatcagcaatgtggccctggcagacgagggcgagtacacctgctcaatcttcac

SEQ ID NO: 489378 - DNA, 120 bp, Artificial Sequence
  ENSG00000162706_5 (sequence is synthesized)
tatgcctgtgcgaactgccaagtccctcgtcactgtgctaggaattccacagaagcccatcatcactggttataaatcttcattacgggaaaaagacacagccaccctaaactgtcagtc

SEQ ID NO: 489379 - DNA, 120 bp, Artificial Sequence
  ENSG00000162706_6 (sequence is synthesized)
ttctgggagcaagcctgcagcccggctcacctggagaaagggtgaccaagaactccacggagaaccaacccgcatacaggaagatcccaatggtaaaaccttcactgtcagcagctcggt

SEQ ID NO: 489380 - DNA, 120 bp, Artificial Sequence
  ENSG00000162706_7 (sequence is synthesized)
gacattccaggttacccgggaggatgatggggcgagcatcgtgtgctctgtgaaccatgaatctctaaagggagctgacagatccacctctcaacgcattgaagttttatacacaccaac

SEQ ID NO: 489381 - DNA, 120 bp, Artificial Sequence
  ENSG00000162706_8 (sequence is synthesized)
tgcgatgattaggccagaccctccccatcctcgtgagggccagaagctgttgctacactgtgagggtcgcggcaatccagtcccccagcagtacctatgggagaaggagggcagtgtgcc

SEQ ID NO: 489382 - DNA, 120 bp, Artificial Sequence
  ENSG00000162706_9 (sequence is synthesized)
acccctgaagatgacccaggagagtgccctgatcttccctttcctcaacaagagtgacagtggcacctacggctgcacagccaccagcaacatgggcagctacaaggcctactacaccct

SEQ ID NO: 489383 - DNA, 120 bp, Artificial Sequence
  ENSG00000162706_10 (sequence is synthesized)
cctcctcctccagcacctaccacgccatcatcggtgggatcgtggctttcattgtcttcctgctgctcatcatgctcatcttccttggccactacttgatccggcacaaaggaacctacc

SEQ ID NO: 489384 - DNA, 120 bp, Artificial Sequence
  ENSG00000162706_11 (sequence is synthesized)
tgacacatgaggcaaaaggctccgacgatgctccagacgcggacacggccatcatcaatgcagaaggcgggcagtcaggaggggacgacaagaaggaatatttcatctagaggcgcctgc

SEQ ID NO: 489385 - DNA, 120 bp, Artificial Sequence
  ENSG00000162706_12 (sequence is synthesized)
ccacttcctgcgccccccaggggccctgtggggactgctggggccgtcaccaacccggacttgtacagagcaaccgcagggccgcccctcccgcttgctccccagcccacccacccccct

SEQ ID NO: 489386 - DNA, 120 bp, Artificial Sequence
  ENSG00000162706_13 (sequence is synthesized)
gtacagaatgtctgctttgggtgcggttttgtactcggtttggaatggggagggaggagggcggggggaggggagggttgccctcagccctttccgtggcttctctgcatttgggttatt

SEQ ID NO: 489387 - DNA, 120 bp, Artificial Sequence
  ENSG00000162706_14 (sequence is synthesized)
attatttttgtaacaatcccaaatcaaatctgtctccaggctggagaggcaggagccctggggtgagaaaagcaaaaaacaaacaaaaaacaaaaccctggagtgttaggaggagagtga

SEQ ID NO: 489388 - DNA, 120 bp, Artificial Sequence
  ENSG00000162706_15 (sequence is synthesized)
aggtagaggggtgaggaagggtaaggggcagggctggtttcagctgggggctctcaccagccctcctttcagcctctacaacagagcagcttcccagacttctccaggaacccagaaacg

SEQ ID NO: 489389 - DNA, 120 bp, Artificial Sequence
  ENSG00000162706_16 (sequence is synthesized)
ggatggttgtcggcaaaggttgggagtggcttttcctctggtagccacacacctgagcactacggacagggaggcaggtgccaccttgacacctctcttccatagcaatgggaaagtgat

SEQ ID NO: 489390 - DNA, 120 bp, Artificial Sequence
  ENSG00000162706_17 (sequence is synthesized)
gagtgcgggagtcctgaggagatgtggcctgcagacaacatgcagccatgcagggacccaggactgtaacctggggaggacgcgggtccctgcaaggaagagtagatttggagaggaagg

SEQ ID NO: 489391 - DNA, 120 bp, Artificial Sequence
  ENSG00000162706_18 (sequence is synthesized)
atggaggtggactctcaccccattccccccggaaatgaacaaagccgggccctttccataggaactgcccttggagatagcagagtgtggctgcccctccttgctccagcagcagtggga

SEQ ID NO: 489392 - DNA, 120 bp, Artificial Sequence
  ENSG00000162706_19 (sequence is synthesized)
gaggcactgctctggggcctgaactgcctctgcttccccccctgaggggcccctcactcttacccaagactctggattgttgcacggcaaccactcctcccatggcattgctcagcaact

SEQ ID NO: 489393 - DNA, 120 bp, Artificial Sequence
  ENSG00000162706_20 (sequence is synthesized)
acttctcccttcccggccaccctgtgcccccttcctggtcccaacgccagcccttcatccttcctccctcagcagccaggcagacataacaacaaaactactaaaaggagcttcactgca

SEQ ID NO: 489394 - DNA, 120 bp, Artificial Sequence
  ENSG00000162706_21 (sequence is synthesized)
tgagtgagtgagaggcagagcgaggaactgaggaggagggctaagagccaggggtcctgggcaagtggacagggctgtgggacatgttggggaggctttgggaatggggtattcctagtc

SEQ ID NO: 489395 - DNA, 120 bp, Artificial Sequence
  ENSG00000162706_22 (sequence is synthesized)
agggttcacacctcacctgggatgttgttccatgctggtatttcctctgccacccccaatgcccatcggtcttggagaaaggagtccccgggtgtgtgtttgcccagctgtccattctat

SEQ ID NO: 489396 - DNA, 120 bp, Artificial Sequence
  ENSG00000162706_23 (sequence is synthesized)
ctctcccttaaacacagagcattcagcccttccctggatttccctcctctgagccatggagtcagtgccacagcctttgctatgcacctctcaggcctctccttggcgttgaccctggaa

SEQ ID NO: 489397 - DNA, 120 bp, Artificial Sequence
  ENSG00000162706_24 (sequence is synthesized)
agacctaccaccacctattttttcccatagtctgtacccagtgagttgaaggctgggtccccacccttccttttgatttcctgtcttccttctcgtggccccagctggttgctgtggaga

SEQ ID NO: 489398 - DNA, 120 bp, Artificial Sequence
  ENSG00000162706_25 (sequence is synthesized)
tgaggttcctggtcctccctgtcctggctggactgccccgcctcagatccaggatgcccttggcatcgctcccaccctcccccagcttttcctccctggtctgacaatgggcatgcaaaa

SEQ ID NO: 489399 - DNA, 120 bp, Artificial Sequence
  ENSG00000162706_26 (sequence is synthesized)
aggggcagctgcaatctagcaggcctgcccacccccttcagttcaggtaatacagttgtgaatcttccagccgctggttagggccttgggcaccacaggcagcccctcacctaagccggg

SEQ ID NO: 489400 - DNA, 120 bp, Artificial Sequence
  ENSG00000162706_27 (sequence is synthesized)
gcctactcctcttacaacagcaagagagccctggggccccaggcctgttgagcttcttgtctcccagcacccgcttttgggaaaatgacttttcctcttcaagctgaaccactctgtcca

SEQ ID NO: 489401 - DNA, 120 bp, Artificial Sequence
  ENSG00000162706_28 (sequence is synthesized)
tattacacagaagccatatttgtacgggggggtgggagggagaggggctgttgtgctgtgtgtgtctgtccaggggtgggggggtgggggaagggagcagggaggggaccgtgtatcttt

SEQ ID NO: 489402 - DNA, 120 bp, Artificial Sequence
  ENSG00000162706_29 (sequence is synthesized)
ataatctttctaactctcctgtgctaatctcagaggggtcaccctcaatatatctggattatccgtgtcattcagctgcctcctttctggtcctcttgctgctgctgggatgtgtgtatg

SEQ ID NO: 489403 - DNA, 120 bp, Artificial Sequence
  ENSG00000162706_30 (sequence is synthesized)
tgagggtcttcttcccataccccttgcacctggtgcctggtgcctcaaaaggtggtgtgtcccttgccaggccactctcaagaatatctatgtacagcaacaatataactctacaaggga

SEQ ID NO: 489404 - DNA, 120 bp, Artificial Sequence
  ENSG00000162711_0 (sequence is synthesized)
gtagatgaggaaactgaagttgaggaatagtgaagagtttgtccaatgtcatagccccgtaatcaacgggacaaaaattttcttgctgatgggtcaagatggcatcgtgaagtggttgtt

SEQ ID NO: 489405 - DNA, 120 bp, Artificial Sequence
  ENSG00000162711_1 (sequence is synthesized)
caccgtaaactgtaatacaatcctgtttatggatttgtttgcatatttttccctccatagggaaacctttcttccatggctcaggacacactcctggatcgagccaacaggagaactttc

SEQ ID NO: 489406 - DNA, 66 bp, Artificial Sequence
  ENSG00000162711_2 (sequence is synthesized)
tcttgctttcccgggttcaatcaattctcctacctcaacttcctgagtagctgggattacaggcgc

SEQ ID NO: 489407 - DNA, 83 bp, Artificial Sequence
  ENSG00000162711_3 (sequence is synthesized)
acaggcgcccgccaccacacccggctcatttttgtacttttagtagagacaccagctcaggtgatctgcctgccttggcctct

SEQ ID NO: 489408 - DNA, 84 bp, Artificial Sequence
  ENSG00000162711_4 (sequence is synthesized)
gctaacttttcaaaattaaagattttgacttgttacagtcatgtgacatttttttctttctgtttgctgagtttttgataattt

SEQ ID NO: 489409 - DNA, 120 bp, Artificial Sequence
  ENSG00000162711_5 (sequence is synthesized)
gacatttttttctttctgtttgctgagtttttgataatttatatctctcaaagtggagactttaaaaaagactcatccgtgtgccgtgttcactgcctggtatcttagtgtggaccgaag

SEQ ID NO: 489410 - DNA, 120 bp, Artificial Sequence
  ENSG00000162711_6 (sequence is synthesized)
cctaaggaccctgaaaacagctgcagatgaagatggcaagcacccgctgcaagctggccaggtacctggaggacctggaggatgtggacttgaagaaatttaagatgcacttagaggact

SEQ ID NO: 489411 - DNA, 120 bp, Artificial Sequence
  ENSG00000162711_7 (sequence is synthesized)
atcctccccagaagggctgcatccccctcccgaggggtcagacagagaaggcagaccatgtggatctagccacgctaatgatcgacttcaatggggaggagaaggcgtgggccatggccg

SEQ ID NO: 489412 - DNA, 120 bp, Artificial Sequence
  ENSG00000162711_8 (sequence is synthesized)
tgtggatcttcgctgcgatcaacaggagagacctttatgagaaagcaaaaagagatgagccgaagtggggttcagataatgcacgtgtttcgaatcccactgtgatatgccaggaagaca

SEQ ID NO: 489413 - DNA, 120 bp, Artificial Sequence
  ENSG00000162711_9 (sequence is synthesized)
gcattgaagaggagtggatgggtttactggagtacctttcgagaatctctatttgtaaaatgaagaaagattaccgtaagaagtacagaaagtacgtgagaagcagattccagtgcattg

SEQ ID NO: 489414 - DNA, 120 bp, Artificial Sequence
  ENSG00000162711_10 (sequence is synthesized)
aagacaggaatgcccgtctgggtgagagtgtgagcctcaacaaacgctacacacgactgcgtctcatcaaggagcaccggagccagcaggagagggagcaggagcttctggccatcggca

SEQ ID NO: 489415 - DNA, 120 bp, Artificial Sequence
  ENSG00000162711_11 (sequence is synthesized)
agaccaagacgtgtgagagccccgtgagtcccattaagatggagttgctgtttgaccccgatgatgagcattctgagcctgtgcacaccgtggtgttccagggggcggcagggattggga

SEQ ID NO: 489416 - DNA, 120 bp, Artificial Sequence
  ENSG00000162711_12 (sequence is synthesized)
aaacaatcctggccaggaagatgatgttggactgggcgtcggggacactctaccaagacaggtttgactatctgttctatatccactgtcgagaggtgagccttgtgacacagaggagcc

SEQ ID NO: 489417 - DNA, 120 bp, Artificial Sequence
  ENSG00000162711_13 (sequence is synthesized)
tgggggacctgatcatgagctgctgccccgacccaaacccacccatccacaagatcgtgagaaaaccctccagaatcctcttcctcatggacggcttcgatgagctgcaaggtgcctttg

SEQ ID NO: 489418 - DNA, 120 bp, Artificial Sequence
  ENSG00000162711_14 (sequence is synthesized)
acgagcacataggaccgctctgcactgactggcagaaggccgagcggggagacattctcctgagcagcctcatcagaaagaagctgcttcccgaggcctctctgctcatcaccacgagac

SEQ ID NO: 489419 - DNA, 120 bp, Artificial Sequence
  ENSG00000162711_15 (sequence is synthesized)
ctgtggccctggagaaactgcagcacttgctggaccatcctcggcatgtggagatcctgggtttctccgaggccaaaaggaaagagtacttcttcaagtacttctctgatgaggcccaag

SEQ ID NO: 489420 - DNA, 120 bp, Artificial Sequence
  ENSG00000162711_16 (sequence is synthesized)
ccagggcagccttcagtctgattcaggagaacgaggtcctcttcaccatgtgcttcatccccctggtctgctggatcgtgtgcactggactgaaacagcagatggagagtggcaagagcc

SEQ ID NO: 489421 - DNA, 120 bp, Artificial Sequence
  ENSG00000162711_17 (sequence is synthesized)
tctgcgcccacctctgggggctctgctctttggctgcagatggaatctggaaccagaaaatcctgtttgaggagtccgacctcaggaatcatggactgcagaaggcggatgtgtctgctt

SEQ ID NO: 489422 - DNA, 120 bp, Artificial Sequence
  ENSG00000162711_18 (sequence is synthesized)
tcctgaggatgaacctgttccaaaaggaagtggactgcgagaagttctacagcttcatccacatgactttccaggagttctttgccgccatgtactacctgctggaagaggaaaaggaag

SEQ ID NO: 489423 - DNA, 120 bp, Artificial Sequence
  ENSG00000162711_19 (sequence is synthesized)
gaaggacgaacgttccagggagtcgtttgaagcttcccagccgagacgtgacagtccttctggaaaactatggcaaattcgaaaaggggtatttgatttttgttgtacgtttcctctttg

SEQ ID NO: 489424 - DNA, 120 bp, Artificial Sequence
  ENSG00000162711_20 (sequence is synthesized)
gcctggtaaaccaggagaggacctcctacttggagaagaaattaagttgcaagatctctcagcaaatcaggctggagctgctgaaatggattgaagtgaaagccaaagctaaaaagctgc

SEQ ID NO: 489425 - DNA, 120 bp, Artificial Sequence
  ENSG00000162711_21 (sequence is synthesized)
agatccagcccagccagctggaattgttctactgtttgtacgagatgcaggaggaggacttcgtgcaaagggccatggactatttccccaagattgagatcaatctctccaccagaatgg

SEQ ID NO: 489426 - DNA, 120 bp, Artificial Sequence
  ENSG00000162711_22 (sequence is synthesized)
accacatggtttcttccttttgcattgagaactgtcatcgggtggagtcactgtccctggggtttctccataacatgcccaaggaggaagaggaggaggaaaaggaaggccgacaccttg

SEQ ID NO: 489427 - DNA, 120 bp, Artificial Sequence
  ENSG00000162711_23 (sequence is synthesized)
atatggtgcagtgtgtcctcccaagctcctctcatgctgcctgttctcatggattggtgaacagccacctcacttccagtttttgccggggcctcttttcagttctgagcaccagccaga

SEQ ID NO: 489428 - DNA, 120 bp, Artificial Sequence
  ENSG00000162711_24 (sequence is synthesized)
gtctaactgaattggacctcagtgacaattctctgggggacccagggatgagagtgttgtgtgaaacgctccagcatcctggctgtaacattcggagattgtggttggggcgctgtggcc

SEQ ID NO: 489429 - DNA, 120 bp, Artificial Sequence
  ENSG00000162711_25 (sequence is synthesized)
tctcgcatgagtgctgcttcgacatctccttggtcctcagcagcaaccagaagctggtggagctggacctgagtgacaacgccctcggtgacttcggaatcagacttctgtgtgtgggac

SEQ ID NO: 489430 - DNA, 120 bp, Artificial Sequence
  ENSG00000162711_26 (sequence is synthesized)
tgaagcacctgttgtgcaatctgaagaagctctggttggtcagctgctgcctcacatcagcatgttgtcaggatcttgcatcagtattgagcaccagccattccctgaccagactctatg

SEQ ID NO: 489431 - DNA, 120 bp, Artificial Sequence
  ENSG00000162711_27 (sequence is synthesized)
tgggggagaatgccttgggagactcaggagtcgcaattttatgtgaaaaagccaagaatccacagtgtaacctgcagaaactggggttggtgaattctggccttacgtcagtctgttgtt

SEQ ID NO: 489432 - DNA, 120 bp, Artificial Sequence
  ENSG00000162711_28 (sequence is synthesized)
cagctttgtcctcggtactcagcactaatcagaatctcacgcacctttacctgcgaggcaacactctcggagacaaggggatcaaactactctgtgagggactcttgcaccccgactgca

SEQ ID NO: 489433 - DNA, 120 bp, Artificial Sequence
  ENSG00000162711_29 (sequence is synthesized)
agcttcaggtgttggaattagacaactgcaacctcacgtcacactgctgctgggatctttccacacttctgacctccagccagagcctgcgaaagctgagcctgggcaacaatgacctgg

SEQ ID NO: 489434 - DNA, 120 bp, Artificial Sequence
  ENSG00000162711_30 (sequence is synthesized)
gcgacctgggggtcatgatgttctgtgaagtgctgaaacagcagagctgcctcctgcagaacctggggttgtctgaaatgtatttcaattatgagacaaaaagtgcgttagaaacacttc

SEQ ID NO: 489435 - DNA, 120 bp, Artificial Sequence
  ENSG00000162711_31 (sequence is synthesized)
aagaagaaaagcctgagctgaccgtcgtctttgagccttcttggtaggagtggaaacggggctgccagacgccagtgttctccggtccctccagctgggggccctcaggtggagagagct

SEQ ID NO: 489436 - DNA, 120 bp, Artificial Sequence
  ENSG00000162711_32 (sequence is synthesized)
gcgatccatccaggccaagaccacagctctgtgatccttccggtggagtgtcggagaagagagcttgccgacgatgccttcctgtgcagagcttgggcatctcctttacgccagggtgag

SEQ ID NO: 489437 - DNA, 120 bp, Artificial Sequence
  ENSG00000162711_33 (sequence is synthesized)
gaagacaccaggacaatgacagcatcgggtgttgttgtcatcacagcgcctcagttagaggatgttcctcttggtgacctcatgtaattagctcattcaataaagcactttctttatttt

SEQ ID NO: 489438 - DNA, 120 bp, Artificial Sequence
  ENSG00000162711_34 (sequence is synthesized)
tttacttttgctcatatcatcattcccgctatctttctattaactgaccataacacagaactagttgactatatattatgttgaaattttatggcagctatttatttatttaaatttttt

SEQ ID NO: 489439 - DNA, 120 bp, Artificial Sequence
  ENSG00000162711_35 (sequence is synthesized)
gtaacagttttgttttctaataagaaaaatccatgctttttgtagctggttgaaaattcaggaatatgtaaaactttttggtatttaattaaattgattccttttcttaattttaaaaaa

SEQ ID NO: 489440 - DNA, 120 bp, Artificial Sequence
  ENSG00000162711_36 (sequence is synthesized)
gtgcagtgtgtcctcccaagctcctctcatgctgcctgttctcatgggtaaggaaactcggcttccaggtgcttcctcctgcttcctcgccagcttcttcttggcgcttgcctcctctca

SEQ ID NO: 489441 - DNA, 120 bp, Artificial Sequence
  ENSG00000162711_37 (sequence is synthesized)
tctcttttcaactatcttccaaatactgttgccacagctacatcataatgccaccactgtctgtttgagactccttcatgagcaaagattgatgtatggtaggtggataaatgggatgag

SEQ ID NO: 489442 - DNA, 120 bp, Artificial Sequence
  ENSG00000162714_0 (sequence is synthesized)
ggcccgcgcccggcctccgcggcgccgcctcccagcccagagcccagcgctcaggaaggtgcgggcgggggagaaagcaacaccattgtttttcaggcgcctccatttgcccccgagccg

SEQ ID NO: 489443 - DNA, 120 bp, Artificial Sequence
  ENSG00000162714_1 (sequence is synthesized)
agccgtggctttccggatgatcgggagacgcggtctggacgggccgggaaaggagccgggcgcctgcggagaccccgcctcagcgagtacgcccggccgggcgggctgggaggatgagga

SEQ ID NO: 489444 - DNA, 120 bp, Artificial Sequence
  ENSG00000162714_2 (sequence is synthesized)
cggctgccctggacttccgccgccacaggagggttttcggccggacgccgggagggagctccaggctgtgagctccatttgtaaaggtcttaataacaagaacagtgacttcggctccgg

SEQ ID NO: 489445 - DNA, 120 bp, Artificial Sequence
  ENSG00000162714_3 (sequence is synthesized)
agcttcaagatagtggcctgcttggcctgcccatctcggatctctccaggaggacccagccacccaagggtcgtcttctgctgctgacccccatcaaatcccatcatgcccacagccctg

SEQ ID NO: 489446 - DNA, 120 bp, Artificial Sequence
  ENSG00000162714_4 (sequence is synthesized)
tgcccccgagtcttggctccgaaggaaagtgaggagcccaggaaaatgaggagcccacctggagagaaccctagcccccagggggagcttcccagccccgagtcctctcggcgtctcttc

SEQ ID NO: 489447 - DNA, 120 bp, Artificial Sequence
  ENSG00000162714_5 (sequence is synthesized)
cgccgtttccgctaccaggaggcggcgggcccccgggaggccctgcagcgcctctgggacctgtgcgggggctggctgcggcctgagaggcacaccaaggagcagattctggagctgctg

SEQ ID NO: 489448 - DNA, 120 bp, Artificial Sequence
  ENSG00000162714_6 (sequence is synthesized)
gtgctggagcagttcctggccatcctgccccgggagatccagagctgggtgcgggcgcaggagcctgagagcggagagcaggctgtggccgcggtggaggcactggaacgggagcccggg

SEQ ID NO: 489449 - DNA, 120 bp, Artificial Sequence
  ENSG00000162714_7 (sequence is synthesized)
agaccctggcagtggctcaagcactgtgaagaccctgtggtgattgatgatggggacagccctctggaccaggagcaggagcagctgccggtagagccccacagcgaccttgcaaagaac

SEQ ID NO: 489450 - DNA, 120 bp, Artificial Sequence
  ENSG00000162714_8 (sequence is synthesized)
caggatgcccagcccataaccctggcacagtgcctggggctcccaagcagaccaccaagccagctcagcggggacccagttctgcaagatgctttccttcttcaggaagagaatgtgcgg

SEQ ID NO: 489451 - DNA, 120 bp, Artificial Sequence
  ENSG00000162714_9 (sequence is synthesized)
gacacacagcaggtgaccaccctccagctacccccgagtcgggtttctccattcaaggacatgattttatgcttctctgaagaggattggtcccttctagatcctgcccagactggcttc

SEQ ID NO: 489452 - DNA, 120 bp, Artificial Sequence
  ENSG00000162714_10 (sequence is synthesized)
tatggagagttcatcattggggaggattacggggtctcaatgcctccaaacgacctagctgcccagccagatctctcccagggagaggagaatgagccacgcgttccagagttgcaggat

SEQ ID NO: 489453 - DNA, 120 bp, Artificial Sequence
  ENSG00000162714_11 (sequence is synthesized)
ctccagggcaaagaagtgccccaggtctcctacttggactctccaagtctccagccattccaggtagaagaaagaaggaaacgtgaggagctgcaggtgccagagttccaggcctgccca

SEQ ID NO: 489454 - DNA, 120 bp, Artificial Sequence
  ENSG00000162714_12 (sequence is synthesized)
cagacggtggtgcctcaaaacacctacccagctggcggcaacccgcgatctctagagaacagcctggatgaagaagtgaccatcgagatcgttctctccagctctggggacgaggactcc

SEQ ID NO: 489455 - DNA, 120 bp, Artificial Sequence
  ENSG00000162714_13 (sequence is synthesized)
cagcatggcccgtactgcacagaagagctggggagccccacagagaagcagcgcagcctccccgcctcccaccggagcagcaccgaggccggaggcgaggtgcagacctccaagaagtcc

SEQ ID NO: 489456 - DNA, 120 bp, Artificial Sequence
  ENSG00000162714_14 (sequence is synthesized)
tacgtgtgtccgaactgtgggaaaatcttccgctggagggtcaacttcatccggcatctgcggagccgcagggagcaggagaagccgcacgagtgctcggtgtgcggggagctgttcagc

SEQ ID NO: 489457 - DNA, 120 bp, Artificial Sequence
  ENSG00000162714_15 (sequence is synthesized)
gacagcgaggacctggatgggcacctagagagccacgaggcccagaagccttaccggtgtggtgcctgcgggaagagcttccgcctgaactcccacctgctctcccaccggcggatacac

SEQ ID NO: 489458 - DNA, 120 bp, Artificial Sequence
  ENSG00000162714_16 (sequence is synthesized)
ctgcagccggacagactccagccggtggagaagagagagcaggcggcatccgaggacgcggacaagggtcccaaagagccgctggaaaacggcaaggccaaactgagcttccagtgctgt

SEQ ID NO: 489459 - DNA, 120 bp, Artificial Sequence
  ENSG00000162714_17 (sequence is synthesized)
gagtgtgggaaggccttccagcggcacgaccacctggctcggcaccgcagccactttcacctgaaggacaaagcccggcccttccagtgccggtactgcgtcaagagcttcacgcagaac

SEQ ID NO: 489460 - DNA, 120 bp, Artificial Sequence
  ENSG00000162714_18 (sequence is synthesized)
tatgacctcctccgccacgagcgcctgcacatgaagcgccgttccaagcaggctctgaactcctactgagcctctccgcctggggcggcctcaccctggctggtgctgccccctcacctt

SEQ ID NO: 489461 - DNA, 120 bp, Artificial Sequence
  ENSG00000162714_19 (sequence is synthesized)
ggtactgatcagcgcccccacccaggacataccttccccaggatagagagcacacctccctcctgtccttgctctcaggtagtgagcgttcgggtggtgccatgggagcactctccctcc

SEQ ID NO: 489462 - DNA, 120 bp, Artificial Sequence
  ENSG00000162714_20 (sequence is synthesized)
cccaggtaatgaaagagtggccaagtgagtgttctgtttctgctgtgccaaaaaacgggggggatgtgccatcaccaggttggacatgccaggtgttctgcgtcttagagacccttggcc

SEQ ID NO: 489463 - DNA, 120 bp, Artificial Sequence
  ENSG00000162714_21 (sequence is synthesized)
catgctccccaagctcggggagtaaaactgggctatcccccgtcagggcggcaccctggtcaccagccaaacctcagtatactccctcccctccttccctgtctgaacgctaggatctgc

SEQ ID NO: 489464 - DNA, 120 bp, Artificial Sequence
  ENSG00000162714_22 (sequence is synthesized)
ctagaggaaagaagaaggcagggtgggactgatgggctcagtggggagcagggccaggcacactgagccagacatgtcatgtctgagccccagattcgtggccatcaggtaggcaggagc

SEQ ID NO: 489465 - DNA, 120 bp, Artificial Sequence
  ENSG00000162714_23 (sequence is synthesized)
accccgcagatccaagatgatcaggcagcccttttgggctggcctctgtggcaggggtctgcagagctccttcttgaggtttggaaacagtcgtcatacctgttgattttcctgggggcc

SEQ ID NO: 489466 - DNA, 120 bp, Artificial Sequence
  ENSG00000162714_24 (sequence is synthesized)
aatcactagggatctggagctcaccaaaaacaaagcttacattttaatttgtgttgcacacctaccccataatgtctttataccccaaagatccttggtaaatgcttgtgggttggaagc

SEQ ID NO: 489467 - DNA, 120 bp, Artificial Sequence
  ENSG00000162714_25 (sequence is synthesized)
ggagttgtcatcgtttaaaaggcacttaagtcccttcttccaatctgtcctgtctaggaatgtggagctctgcccccagtgaggggttctcctgtctgggtgagccaagctccagaacag

SEQ ID NO: 489468 - DNA, 120 bp, Artificial Sequence
  ENSG00000162714_26 (sequence is synthesized)
aaccttgcctgacaacacacttgatagatacattagcttggagtgctggtgtgtccaaacactggctggcttagaacaacaggagtgtattccctgacagttctgggaggtgcacgtcca

SEQ ID NO: 489469 - DNA, 120 bp, Artificial Sequence
  ENSG00000162714_27 (sequence is synthesized)
agatcagggtgtcctcagagttggtgccttccgagagctgtgagggagaagcggcttcatgcctttgctggcagttgccattccttggtgtgtggaagcgtcacccagtctctgccttca

SEQ ID NO: 489470 - DNA, 120 bp, Artificial Sequence
  ENSG00000162714_28 (sequence is synthesized)
tctccacatggcactcttgctgtgtgcgtgtctgtctccaaacctccctttgtttaaggacaccagtcatatcggattagagcccatcccaccgactccagtataacctcatctgtatcc

SEQ ID NO: 489471 - DNA, 120 bp, Artificial Sequence
  ENSG00000162714_29 (sequence is synthesized)
gcagcaaccgtttaccaataaggtcacattctgaggtactagaggttgggacttcaacatcggaatttgaaagggacagcattcagcccatgactccagataaacgtgaggtatgctata

SEQ ID NO: 489472 - DNA, 120 bp, Artificial Sequence
  ENSG00000162714_30 (sequence is synthesized)
tcattcctaatttacagatgagtcaatacaaacttgagtgagcttgctcacaattccatcaaaggcagggttcagacccaagtttcagcatttagggcaggtgtcctctgcatggaagaa

SEQ ID NO: 489473 - DNA, 120 bp, Artificial Sequence
  ENSG00000162714_31 (sequence is synthesized)
tcatactcaatagccgtaaacgctgacaaattccccttcctccctgccttctgatgggggctgggcaggccagctggagctgtgtctcctgctgggattccggactgagagtgacagcag

SEQ ID NO: 489474 - DNA, 120 bp, Artificial Sequence
  ENSG00000162714_32 (sequence is synthesized)
gtagtgaaacctcaagcaatttaaaacatggtattgttcctggaagactggttatgttggctagggtcagcaagagagggcatcaaggctgtagtctagcagtgatttaatctgcaagtc

SEQ ID NO: 489475 - DNA, 120 bp, Artificial Sequence
  ENSG00000162714_33 (sequence is synthesized)
aaaccagacgggtattttgtattattcatatgtcacatcctaccaacagacagtaagtcaggcaaggctcctggtgctccttgtcactcacgtaattttcacatcaggaaaactctgggc

SEQ ID NO: 489476 - DNA, 120 bp, Artificial Sequence
  ENSG00000162714_34 (sequence is synthesized)
cacctgtaatcctagcactttgggaaaccaaggtgggtggattgcctagctcagtgacaccagcctgggccacatggcaaaaccccgtctgtaccaaaaatgcaaaaaattagctgggtg

SEQ ID NO: 489477 - DNA, 73 bp, Artificial Sequence
  ENSG00000162714_35 (sequence is synthesized)
aaaatgcaaaaaattagctgggtgtggtgttgacgtttggggaggcagaagttgcagtaagccgagatcatgc

SEQ ID NO: 489478 - DNA, 120 bp, Artificial Sequence
  ENSG00000162714_36 (sequence is synthesized)
aagctaggtgacagaatgagactctgtctcaaaaataattaaaaagcctctgccccaaactcgttaaaagattttataaccacaactgctgtttctgtgtagatgcatctgcatgcccag

SEQ ID NO: 489479 - DNA, 120 bp, Artificial Sequence
  ENSG00000162714_37 (sequence is synthesized)
gagcagtaaatgcaataaaatcatttggttatactttgaacacaaaataaacggttgaggcttttactttctaaatagtttgtctcttgtatcaacatagctggaaaagggagaaatccg

SEQ ID NO: 489480 - DNA, 120 bp, Artificial Sequence
  ENSG00000162714_38 (sequence is synthesized)
atttttaaggccaagggaggggaaaattccaagtagaagccaggctctctgtacacgtttaccccacctacctgtgtgctcctacctgtgctgaggattctctctgtagctctaaggtct

SEQ ID NO: 489481 - DNA, 120 bp, Artificial Sequence
  ENSG00000162714_39 (sequence is synthesized)
tgggaaggttattcaccttcctgcttcagacgtctgactcaagagaagaacactgttctacttaccagagtgtttttctgtgtaaaaccacatcatgaaggagaaagcgacaaagggaat

SEQ ID NO: 489482 - DNA, 120 bp, Artificial Sequence
  ENSG00000162714_40 (sequence is synthesized)
gtgaggggctggaagccacagggaggctgtctcttgagtccccaccactgatccagagccaaccaaggcacctcaggaaatggaaggccacattgcctctggatttggaaatcctcctgg

SEQ ID NO: 489483 - DNA, 120 bp, Artificial Sequence
  ENSG00000162714_41 (sequence is synthesized)
gtaatgtaactgaaacccaggttgatgccatgcagcaggagcagcagggggaacgtgctctcaggagaggtcggccaaccctccagcccaacacccttcaccacagtggtggaggaggct

SEQ ID NO: 489484 - DNA, 120 bp, Artificial Sequence
  ENSG00000162714_42 (sequence is synthesized)
gcacccaggagatctttgtctcccttttggccactgatacctttggccttatctgacaacagctacccctcgatccttccctcccaccccaggggctgggcagctggctggagctttgtg

SEQ ID NO: 489485 - DNA, 120 bp, Artificial Sequence
  ENSG00000162714_43 (sequence is synthesized)
tccaccttgctctggaggttgagacccccatctgagcaacatcctctctctttgttcctctgatcccttggcatcgtcacaaacccacaggtgcataataaaaacttgctgagtcaatat

SEQ ID NO: 489486 - DNA, 120 bp, Artificial Sequence
  ENSG00000162714_44 (sequence is synthesized)
agaattccttctcagtacagagaggccgtcattctttctgtgcgtgtaggatcatcccttgtgaggtttctgtagcttacttaatccgctgtcttcttgatgtgtgtcaaggttttcagt

SEQ ID NO: 489487 - DNA, 120 bp, Artificial Sequence
  ENSG00000162714_45 (sequence is synthesized)
atttattagatcaatgcttcagtgaagcagcttttgtagactacgttgcacatgtgcaacataaacttgagaaatccctgcacggaagggtgggcatgttggtaacgtgcaacaacataa

SEQ ID NO: 489488 - DNA, 120 bp, Artificial Sequence
  ENSG00000162714_46 (sequence is synthesized)
actttaggaatctctgcattgaggggcgagcacgctggtgacctctggacattgcccagcagcgcaccataggagtggtggatgtgcagcctccccagcactgaggaggaagacctgttt

SEQ ID NO: 489489 - DNA, 120 bp, Artificial Sequence
  ENSG00000162714_47 (sequence is synthesized)
ctccacatccttggccacccagccaggtagctgccatgtggattttgccaaacaagatagggatgaggtggatccaagagcagaaataacaaagcagtgtgtccactggcgcctggacct

SEQ ID NO: 489490 - DNA, 120 bp, Artificial Sequence
  ENSG00000162714_48 (sequence is synthesized)
ggggtagtcggtctcctttctgtctcttctatctgcatgtgttgctttgggctcttccctcagccccagcttccacaccacccccctcccctagtgctatggtctgaatgtttttgtgtt

SEQ ID NO: 489491 - DNA, 120 bp, Artificial Sequence
  ENSG00000162714_49 (sequence is synthesized)
cccctccccacagctttgacatgttgaaatgctagcccccaagctgctggcattaagaggtggggcactggggagatgatcaggttataagggcaaatccatcataaatggattagtgcc

SEQ ID NO: 489492 - DNA, 120 bp, Artificial Sequence
  ENSG00000162714_50 (sequence is synthesized)
cttctaaaagaggcctcagagagcagccttgccccttccaccatgtgagaacacaatgaaatgatgaccatctatggagcaaggaactgggccctcaccagaacccaactatgctggtat

SEQ ID NO: 489493 - DNA, 120 bp, Artificial Sequence
  ENSG00000162714_51 (sequence is synthesized)
cagctggggacttcctagcctccagaactgtaagacatacatttatgttgtttatgagtccccagtctgcggtattttgttagagcagcccaaatggattaagacagaaaattggcaccg

SEQ ID NO: 489494 - DNA, 120 bp, Artificial Sequence
  ENSG00000162714_52 (sequence is synthesized)
aacattttgggtgctactctaacaaatacaacgtggaagaagcttgggaaccgggtaatgggtagaggctagaagagttttgaagtgcaggctagaaaaagcctgtgttgccatgaacag

SEQ ID NO: 489495 - DNA, 120 bp, Artificial Sequence
  ENSG00000162714_53 (sequence is synthesized)
attacaagtgtgagccaccgtgcccagcccatgaacagactattacgggtgatttctagtgaggctccaaaagaaaagaggagatttgaaatcctcaaccagaatgttggtaaaaatgtg

SEQ ID NO: 489496 - DNA, 120 bp, Artificial Sequence
  ENSG00000162714_54 (sequence is synthesized)
aaccagaatgttggtaaaaatgtgaacagtaaagctattcttatgaggtcccagatggaaatgagaaacgtgtggtgggcaatggaggaaaggccatccttcttatagtggcaaatcact

SEQ ID NO: 489497 - DNA, 120 bp, Artificial Sequence
  ENSG00000162714_55 (sequence is synthesized)
tggctgaactgtgcttatgtattagtgttttgtggaaggtagaacttacgggccactgcaattggatatttggctgcagaaatatctaagcaaggttttgaaggtgcagcttgtgaaatg

SEQ ID NO: 489498 - DNA, 120 bp, Artificial Sequence
  ENSG00000162714_56 (sequence is synthesized)
tgaaaagagagaagtgatttaaagatgggattgttacttaaaagggaagcagaacttaaagatcgggaatatttgtcagcctatgttggtaagagtgagccagcctgtttaggagagaag

SEQ ID NO: 489499 - DNA, 120 bp, Artificial Sequence
  ENSG00000162714_57 (sequence is synthesized)
ataaaggttttgccattgaaactgaggctaggagctagtccaagaaaatggaaaaatgaccccaaaggcaattcagaaatcatcagggctcttctgcccatcacaggcccagagcgcaag

SEQ ID NO: 489500 - DNA, 120 bp, Artificial Sequence
  ENSG00000162714_58 (sequence is synthesized)
acccgcagcaagcaggggaccacagcagagagccccgcttcagtcacccctgaagccctagatggtggggccatcagcgaagttccagcccaagagagccttgggcttctgaaagagaca

SEQ ID NO: 489501 - DNA, 120 bp, Artificial Sequence
  ENSG00000162714_59 (sequence is synthesized)
gagctgccacagaggtggggccactgcagagaaccacctcaagggcaggccctcaccaggggctgccatggggcgggaccacccagggccttggggactcaactcctgcccagtgaagct

SEQ ID NO: 489502 - DNA, 120 bp, Artificial Sequence
  ENSG00000162714_60 (sequence is synthesized)
gccacctgtgggtttggaaggcggggtcacctcccaacacagtgggcctggggagcacagcatcaagacaaaaaggattattctgcagattattctcaagccgtaaaccataatgtgctg

SEQ ID NO: 489503 - DNA, 120 bp, Artificial Sequence
  ENSG00000162714_61 (sequence is synthesized)
tgacccataggttcaggacttgctggggacctgttactccttttctttttttctgtttcccttttttggaactggaatgtttatcctgtgcccgtctcaccactatatatgtgtgtgtgt

SEQ ID NO: 489504 - DNA, 73 bp, Artificial Sequence
  ENSG00000162714_62 (sequence is synthesized)
gtgtgtgtgtgtgtctctgtgtgtgtgttttgtttttttttttttaagactgagtctcaccactccgcctgcc

SEQ ID NO: 489505 - DNA, 77 bp, Artificial Sequence
  ENSG00000162714_63 (sequence is synthesized)
caccaccacgcctggctgctttttgtatttttggtagagatgaggtttaaccgtattggccaggctggtctcaaact

SEQ ID NO: 489506 - DNA, 68 bp, Artificial Sequence
  ENSG00000162714_64 (sequence is synthesized)
cctcaccactatttggaaggcacataacttgtttcatttcacaggttcacagctggagagaattttgt

SEQ ID NO: 489507 - DNA, 120 bp, Artificial Sequence
  ENSG00000162714_65 (sequence is synthesized)
ttgtttcatttcacaggttcacagctggagagaattttgtgtcaggtagaattgtgccttgagtttcaaccgtaactgatttagatgatatttaaatgagatgttggactccggactttt

SEQ ID NO: 489508 - DNA, 120 bp, Artificial Sequence
  ENSG00000162714_66 (sequence is synthesized)
gagttgatgctggaatgaattaagactttgagggttattgggatagaatgaatttgtttggcatgtgaaaaggatatgaatttgggggaaccaggggcagaatgctatggtttcagtgtt

SEQ ID NO: 489509 - DNA, 120 bp, Artificial Sequence
  ENSG00000162714_67 (sequence is synthesized)
tatatctccccaaaatttgtgttgaaattgtaatccccaagatgatggtattaggaagtggagacttttggggagatgatctggtaacaagggcaaagtcctcatgagtgggattagtcc

SEQ ID NO: 489510 - DNA, 120 bp, Artificial Sequence
  ENSG00000162714_68 (sequence is synthesized)
ctcctaaaagaggccccagagaactcccttgccctctccatcatgtaaggacacagaagacacctgtcttttgaccaagaagtgggccctcaccaggcacccagcctgctggcaccttga

SEQ ID NO: 489511 - DNA, 120 bp, Artificial Sequence
  ENSG00000162714_69 (sequence is synthesized)
tcttggacgtccagcctccagaactgtgaggaacagatttctgttgtatagaaactgcccgtcctacagcgttgtgttgtcacagcctcagtggactaagactgagacacctagctcgtc

SEQ ID NO: 489512 - DNA, 120 bp, Artificial Sequence
  ENSG00000162714_70 (sequence is synthesized)
tatggagagttcatcattggggaggattacggggtctcaatgcctccaagtaagacttaacttccccccacacctcaagaccagggaactgggcaggggagttctcacttggagtaagag

SEQ ID NO: 489513 - DNA, 120 bp, Artificial Sequence
  ENSG00000162714_71 (sequence is synthesized)
tcaacttcgtcccataggatcagggaagcggggcctgcatcagatctctctgttcacccccaacctggacaggaggtcatttgcacacagcggccctacaggcagtgtgtccgattgacc

SEQ ID NO: 489514 - DNA, 120 bp, Artificial Sequence
  ENSG00000162714_72 (sequence is synthesized)
atcacctgctgtctcgccacatcaggcttatcagaaccaaatagaacatgtgctgtatgtccatttctcttccatcgttcttaccgttttgtccctttatgtctgctttacacccgaaag

SEQ ID NO: 489515 - DNA, 120 bp, Artificial Sequence
  ENSG00000162714_73 (sequence is synthesized)
cctcagagagacccccaagcccatagctctccctgcgtgtgctgcccccactgcccctgcactgccagctctggccttttcacttctcgcccctgatggtgccatgcccgctgggcatcc

SEQ ID NO: 489516 - DNA, 120 bp, Artificial Sequence
  ENSG00000162714_74 (sequence is synthesized)
ctccgccttctctcttctggaccagccctggttgctgcaggatcagattactaataaacatgtaccctgcctttttctttgaacagacgacctagctgcccagccagatctctcccaggg

SEQ ID NO: 489517 - DNA, 120 bp, Artificial Sequence
  ENSG00000162714_75 (sequence is synthesized)
agaggagaatgagccacgcgttccagagttgcaggatctccagggcaaagaagtgccccaggtctcctacttgggtgagtaatgattccagaactgagtggacagagtagggggaagggt

SEQ ID NO: 489518 - DNA, 120 bp, Artificial Sequence
  ENSG00000162714_76 (sequence is synthesized)
tgctggcagccggaggtgagcccactctctggcttctctctgcggcccctaattgccttcttcatttccccagactctatgtgggtcttgcatgtcttgccttgtccctgacttttcata

SEQ ID NO: 489519 - DNA, 120 bp, Artificial Sequence
  ENSG00000162714_77 (sequence is synthesized)
gaaagaatggaggatcttaattttgccaggcattggaattgtactcccttggccaaggactgggaaataataggaatgtctttctcctctgcctgtaagtaacatctggtttgtgctgac

SEQ ID NO: 489520 - DNA, 120 bp, Artificial Sequence
  ENSG00000162714_78 (sequence is synthesized)
aatgcagcagcccctccaggagtgaagtcagatactcatgacaagcctagttgcagagggagtgtctcctaactgggcaccgagcgcagccctttgaggtgcctcacctgtctagtcttc

SEQ ID NO: 489521 - DNA, 120 bp, Artificial Sequence
  ENSG00000162714_79 (sequence is synthesized)
tctgcctggtacaggggtgctgtgaggacactggggtgtggggaggtgctggggctcagcagcagcagtttccagccctccttcaggctgtgtcgccagcacttgcacccatgatctcca

SEQ ID NO: 489522 - DNA, 120 bp, Artificial Sequence
  ENSG00000162714_80 (sequence is synthesized)
tgccatggtgcttcgaagcatctgctccttcaggaggaaatagctttgtacagaatcatcagcagctccacaccttcttcccctttgggacctagagctggcatgaagcagacaaggttt

SEQ ID NO: 489523 - DNA, 120 bp, Artificial Sequence
  ENSG00000162714_81 (sequence is synthesized)
tgacacaccatccccacctggaacaagcgttcagagacttggtgtggtgcagtagctcctgtaccatctctaccctgtaggctctgcacaagctgtttgtgcaggatgtgcggagtgtgc

SEQ ID NO: 489524 - DNA, 120 bp, Artificial Sequence
  ENSG00000162714_82 (sequence is synthesized)
aggagcctgtggtgatgactatagaaaacccaccacagaaagtgggaataaatatggggctgggggaagtgcttgtctctggccatagagtgggtggagtagaacccggatctacgtcga

SEQ ID NO: 489525 - DNA, 120 bp, Artificial Sequence
  ENSG00000162714_83 (sequence is synthesized)
ttctgtctagcgtcagagctcatgtttgtggagttggcccattttgccttcaggttcattcactcagcagacacttattgagtggccaccccctgccagtccccaggacggagcccaggg

SEQ ID NO: 489526 - DNA, 120 bp, Artificial Sequence
  ENSG00000162714_84 (sequence is synthesized)
ccgcccccagatcgtagcctggcatctattcggatagcaccctcccaggtagtgctgtaggtgcaaaacaaatcaatttttccatttcctcctctggaaagactctccaagtctccagcc

SEQ ID NO: 489527 - DNA, 120 bp, Artificial Sequence
  ENSG00000162722_0 (sequence is synthesized)
ggccgggagcgcagccctccgggaggcgggtcatggcctgggcgccgcccggggagcggctgcgcgaggatgcgcggtgcccggtgtgcctggatttcctgcaggagccggtcagcgtgg

SEQ ID NO: 489528 - DNA, 120 bp, Artificial Sequence
  ENSG00000162722_1 (sequence is synthesized)
gatttcctgcaggagccggtcagcgtggactgcggccacagcttctgcctcaggtgcatctccgagttctgcgagaagtcggacggcgcgcagggcggcgtctacgcctgtccgcagtgc

SEQ ID NO: 489529 - DNA, 80 bp, Artificial Sequence
  ENSG00000162722_2 (sequence is synthesized)
cggggccccttccggccctcgggctttcgccccaaccggcagctggcgggcctggtggagagcgtgcggcggctggggtt

SEQ ID NO: 489530 - DNA, 120 bp, Artificial Sequence
  ENSG00000162722_3 (sequence is synthesized)
gaggacctgagccgcttctgcgaggaggacgaggcggcgctgtgctgggtgtgcgacgccggccccgagcacaggacgcaccgcacggcgccgctgcaggaggccgccggcagctaccag

SEQ ID NO: 489531 - DNA, 120 bp, Artificial Sequence
  ENSG00000162722_4 (sequence is synthesized)
gtaaagctccagatggctctggaacttatgaggaaagagttggaggacgccttgactcaggaggccaacgtggggaaaaagactgtcatttggaaggagaaagtggaaatgcagaggcag

SEQ ID NO: 489532 - DNA, 120 bp, Artificial Sequence
  ENSG00000162722_5 (sequence is synthesized)
cgcttcagattggagtttgagaagcatcgtggctttctggcccaggaggagcaacggcagctgaggcggctggaggcggaggagcgagcgacgctgcagagactgcgggagagcaagagc

SEQ ID NO: 489533 - DNA, 120 bp, Artificial Sequence
  ENSG00000162722_6 (sequence is synthesized)
cggctggtccagcagagcaaggccctgaaggagctggcggatgagctgcaggagaggtgccagcgcccggccctgggtctgctggagggtgtgagaggagtcctgagcagaagtaaggct

SEQ ID NO: 489534 - DNA, 120 bp, Artificial Sequence
  ENSG00000162722_7 (sequence is synthesized)
gtcacaaggctggaagcagagaacatccccatggaactgaagacagcatgctgcatccctgggaggagggagctcttaaggaagttccaagtggatgtaaagctggatcccgccacggcg

SEQ ID NO: 489535 - DNA, 120 bp, Artificial Sequence
  ENSG00000162722_8 (sequence is synthesized)
cacccgagtctgctcttgaccgccgacctgcgcagtgtgcaggatggagaaccatggagggatgtccccaacaaccctgagcgatttgacacatggccctgcatcctgggtttgcagagc

SEQ ID NO: 489536 - DNA, 120 bp, Artificial Sequence
  ENSG00000162722_9 (sequence is synthesized)
ttctcatcagggaggcattactgggaggttctggtgggagaaggagcagagtggggtttaggggtctgtcaagacacactgccaagaaagggggaaaccacgccatctcctgagaatggg

SEQ ID NO: 489537 - DNA, 120 bp, Artificial Sequence
  ENSG00000162722_10 (sequence is synthesized)
gtctgggccctgtggctgctgaaagggaatgagtacatggtccttgcctccccatcagtgcctcttctccaactggaaagtcctcgctgcattgggattttcttggactatgaagccggt

SEQ ID NO: 489538 - DNA, 120 bp, Artificial Sequence
  ENSG00000162722_11 (sequence is synthesized)
gaaatttcattctacaatgtcacagatggatcttatatctacacattcaaccaactcttctctggtcttcttcggccttactttttcatctgtgatgcaactcctcttatcttgccaccc

SEQ ID NO: 489539 - DNA, 120 bp, Artificial Sequence
  ENSG00000162722_12 (sequence is synthesized)
acaacaatagcagggtcaggaaattgggcatccagggatcatttagatcctgcttctgatgtaagagatgatcatctctaaaattctgttcccaagatgcagtcctagcgtagcgaacgt

SEQ ID NO: 489540 - DNA, 120 bp, Artificial Sequence
  ENSG00000162722_13 (sequence is synthesized)
tcctggagtggggtgaaggatatcaatatactaagttttaacagataccccatttaggtcagcacttgattcgttgttgctgtgaaatatgtccatgggacaaaagagggaatatgaaat

SEQ ID NO: 489541 - DNA, 120 bp, Artificial Sequence
  ENSG00000162722_14 (sequence is synthesized)
atttgcatatgggaagattatagagcataataattttgtaaatggagcaatctcaacctctatttctagatcacattttcttgatgtcttccttcaaattaatgaccttggattacataa

SEQ ID NO: 489542 - DNA, 120 bp, Artificial Sequence
  ENSG00000162722_15 (sequence is synthesized)
ggatttctatgcattcattataatttgttattcctttcaatatccttgtatttcaaatcttccatataagaattagacatggcaattcttaaattgattcagaatggtctgatactattc

SEQ ID NO: 489543 - DNA, 120 bp, Artificial Sequence
  ENSG00000162722_16 (sequence is synthesized)
cagtatcacctccttaattctgtttctcctcgttttcctgattttccttctcattctctccttccccgctctgtctctctctccctgtcactctctctctcttgttccttattttttgtt

SEQ ID NO: 489544 - DNA, 120 bp, Artificial Sequence
  ENSG00000162722_17 (sequence is synthesized)
tcttacctcttactgtttaacctgttgcttccttctggattaatacatttagagccattcctttatatggtcacatttcctatgactttactcaattacttttaaaatcctttctattct

SEQ ID NO: 489545 - DNA, 120 bp, Artificial Sequence
  ENSG00000162722_18 (sequence is synthesized)
gagactaatttttaagaattacaaagctcattcttctgaatctaatatcactaactcctagactttttccgttttctttggatacactttaagtaggaatttatcagaattttcattcaa

SEQ ID NO: 489546 - DNA, 120 bp, Artificial Sequence
  ENSG00000162722_19 (sequence is synthesized)
tggaggcggaggttgcagtgagccaatatctcaccactgtactccagcccagtgcgagactccatctcaaaaaagaaaaaagacctcaaacaacacttctctctctcttttagctgcttg

SEQ ID NO: 489547 - DNA, 120 bp, Artificial Sequence
  ENSG00000162722_20 (sequence is synthesized)
gctgcttgttatggttcctatacatggaacaattatactggcctcactgtgttatggtaaatatttaaggtcatatttgatattgctggtttgaattcagcttttccatttaaatacatt

SEQ ID NO: 489548 - DNA, 120 bp, Artificial Sequence
  ENSG00000162722_21 (sequence is synthesized)
ataatgatgatgatgaaatcatgataatatttaacttatttttaaagtatattctgtacctttccaacaaaaaggttaaaagtcattgaaggctaaccttactgccttctttgtatcact

SEQ ID NO: 489549 - DNA, 61 bp, Artificial Sequence
  ENSG00000162722_22 (sequence is synthesized)
agtcattgaaggctaaccttactgccttctttgtatcactgtcttctaaataattattatg

SEQ ID NO: 489550 - DNA, 120 bp, Artificial Sequence
  ENSG00000162722_23 (sequence is synthesized)
tgctaaaatgtttaaatggtaaatgcttcaatgctaaccaaatattaattaatggcaaattatttaacattatctgataataatctgcagaaggtttaattttcctcctcaatttgaagt

SEQ ID NO: 489551 - DNA, 120 bp, Artificial Sequence
  ENSG00000162722_24 (sequence is synthesized)
tcaagatgtttttctcttccagggagattttttcgactgacatctttaacttaccttccaatcatattactaacgtagccttcttcctagattttttaattgtttgatcatgagcgaaca

SEQ ID NO: 489552 - DNA, 120 bp, Artificial Sequence
  ENSG00000162722_25 (sequence is synthesized)
cttctactctctgtgatagatttgcaaacagaggaaataacgcatcctcgtgtccctcttcttggtgttccacaggccatgtgtgccctagccctcgttcatgcaaggtctgtgtaggga

SEQ ID NO: 489553 - DNA, 120 bp, Artificial Sequence
  ENSG00000162722_26 (sequence is synthesized)
aggtggacttcagctcagcaacagcatcccttcccacagggatcaggtgggtggcttgagataccccttccatggggcaccacccattcagtgagacggggaagccctgggtgggaggga

SEQ ID NO: 489554 - DNA, 120 bp, Artificial Sequence
  ENSG00000162722_27 (sequence is synthesized)
gaacacctccacatgtcttctactctctccataggatggaatgagtgtcccagtcccaggagtatccatttcccactgtgtagcccagtactctggtctcactgtctctgctgaatcctg

SEQ ID NO: 489555 - DNA, 120 bp, Artificial Sequence
  ENSG00000162722_28 (sequence is synthesized)
tctcactgtgcatattattgtggtttatatcagtcagtaaaccaatgtgagtcttcatctcttgcattcttaggttcatagttttgtgtgtctcctgtaatgactcttctctttcccttt

SEQ ID NO: 489556 - DNA, 120 bp, Artificial Sequence
  ENSG00000162722_29 (sequence is synthesized)
ccaactcctgaaagattgccactatttcctctggaactttgtttcgttaccagcaaaatcctcgacatccatacccgtttcctggctttccctctcctttcctctgaatggtagtctttt

SEQ ID NO: 489557 - DNA, 120 bp, Artificial Sequence
  ENSG00000162722_30 (sequence is synthesized)
atattcagctgtccacttgacatcaaaatagacattttgaactcaatttgcctaaaacttacccacaaatttctccccaagtctctccctaactgcaacaacaaaaaccacaggcttctc

SEQ ID NO: 489558 - DNA, 120 bp, Artificial Sequence
  ENSG00000162722_31 (sequence is synthesized)
cctgtcactggatggcaactccattcttttgattgcttaagccaggcatccgattgagtactttcttgatttctccagcccacatccagtccatcggcaagccctgttggtcctaccttc

SEQ ID NO: 489559 - DNA, 120 bp, Artificial Sequence
  ENSG00000162722_32 (sequence is synthesized)
agaatatgtccggggttcagttgtcctggccaccctgctgctgtaaccatggtcagaactccatcctgcccctctggattatgactttcgtttcctcacagtggtcctgcttgggctcta

SEQ ID NO: 489560 - DNA, 120 bp, Artificial Sequence
  ENSG00000162722_33 (sequence is synthesized)
ggcccttccactcccattctctctacagcagctgggctgattcctttagcacccaaggatatgttggcatcacagtgacttagataccatcacaaagacctcccattcaacttagagtga

SEQ ID NO: 489561 - DNA, 120 bp, Artificial Sequence
  ENSG00000162722_34 (sequence is synthesized)
aagtcagaatcctcacagtgaatccccaggccctagaggatgtgaacccccaggccctagaggatctgaacccccatccctcctctgattatctctcccacccccacttccctttgcatt

SEQ ID NO: 489562 - DNA, 120 bp, Artificial Sequence
  ENSG00000162722_35 (sequence is synthesized)
ctgctccagctgccctggcctcatggctgggtttccaccaaagcaggcacttcccatcacagggccatttccccgcctgtggcttctgcttgacattcccttttccctgatatccccttg

SEQ ID NO: 489563 - DNA, 120 bp, Artificial Sequence
  ENSG00000162722_36 (sequence is synthesized)
actcattattccctttcttccttaactcttctgagatccagcttctcagtgataccacacagccctactccccccagagcccatctagagctcacctttccagtcgcccttgccaggctc

SEQ ID NO: 489564 - DNA, 120 bp, Artificial Sequence
  ENSG00000162722_37 (sequence is synthesized)
agtggaggctctttgttccccatacagtacgtgtcgtcgtactatattgttaggcttatttaatttatgtatgttttgcctttttgtgctaaatgtaaacaccacaaggggaggtatctt

SEQ ID NO: 489565 - DNA, 120 bp, Artificial Sequence
  ENSG00000162722_38 (sequence is synthesized)
tgtctgttgacaatgatacattcaatgtttctcaagcacccccaatgctggtttgtatgtggttatcattcaatctgtatttgttgaatgaataaatgattgactatgtggagagcaaaa

SEQ ID NO: 489566 - DNA, 120 bp, Artificial Sequence
  ENSG00000162723_0 (sequence is synthesized)
agtcaggctctttgtgtctaggagcctcctaatgcagtcttctgcacagtcctggggactgactgactgaatcacacctctggggctgggggctgctgacatgtgtgcctttccttggct

SEQ ID NO: 489567 - DNA, 120 bp, Artificial Sequence
  ENSG00000162723_1 (sequence is synthesized)
gcttcttctcctgctgctccaggagggcagccaaaggagactctggagatggtgtggatccgaggaagtggttgcggtccttcaggagtccatcagcctccccctggaaataccaccaga

SEQ ID NO: 489568 - DNA, 120 bp, Artificial Sequence
  ENSG00000162723_2 (sequence is synthesized)
tgaagaggttgagaacatcatctggtcctctcacaaaagtcttgccactgtggtgccagggaaagagggacatccagctaccatcatggtgaccaatccacactaccagggccaagtgag

SEQ ID NO: 489569 - DNA, 120 bp, Artificial Sequence
  ENSG00000162723_3 (sequence is synthesized)
cttcctggaccccagctattccctgcatatcagcaatctgagctgggaggattcagggctttaccaagctcaagtcaacctgagaacatcccagatctctaccatgcagcagtacaatat

SEQ ID NO: 489570 - DNA, 120 bp, Artificial Sequence
  ENSG00000162723_4 (sequence is synthesized)
aaggtgcctgcagtatgtccctggtgtgctctgtggagaaggcaggcatggatatgacctacagctggctctcccggggggatagcacttatacattccatgaaggccctgtcctcagca

SEQ ID NO: 489571 - DNA, 120 bp, Artificial Sequence
  ENSG00000162723_5 (sequence is synthesized)
catcctggaggccgggggacagtgccctctcctacacctgcagagccaacaaccccatcagcaacgtcagttcttgccccatccctgatgggcccttctatgcagatcctaactatgctt

SEQ ID NO: 489572 - DNA, 120 bp, Artificial Sequence
  ENSG00000162723_6 (sequence is synthesized)
ctgagaagccttcaacagccttctgcctcctggccaagggattgctcatcttcttgctcttggtaattctggccatgggactctgggtcatccgagtccagaaaagacacaaaatgccaa

SEQ ID NO: 489573 - DNA, 120 bp, Artificial Sequence
  ENSG00000162723_7 (sequence is synthesized)
ggatgaagaaactcatgagaaacagaatgaaattgaggaaggaggcaaagcctggctccagccctgcctgactgctccttgggaaccccagtcctgagcttggtttcttcccagcaccca

SEQ ID NO: 489574 - DNA, 120 bp, Artificial Sequence
  ENSG00000162723_8 (sequence is synthesized)
gagaatccttcctcagctctcttctttccaggggaaggaggtgctcaggggtgggtatccagagagccatacttctgagggaagactggctggcaataaagtcaaattaagtgaccacaa

SEQ ID NO: 489575 - DNA, 120 bp, Artificial Sequence
  ENSG00000162727_0 (sequence is synthesized)
atggcatgggagaatcagaccttcaactctgacttcatcctcctgggaatcttcaatcacagccccacccacaccttcctcttctttctggtcctggccatcttttcagtggccttcatg

SEQ ID NO: 489576 - DNA, 120 bp, Artificial Sequence
  ENSG00000162727_1 (sequence is synthesized)
ggaaactctgtcatggttctcctcatctacctggacacccagctccacacccccatgtacttcctcctcagtcaactgttcctcatggacctcatgctcatctgctctaccgtacccaag

SEQ ID NO: 489577 - DNA, 120 bp, Artificial Sequence
  ENSG00000162727_2 (sequence is synthesized)
atggccttcaactacttgtctggcagcaagtccatttctatggctggttgtgccacacaaattttcttctatgtatcactgcttggctccgaatgctttctgttggctgttatgtcttat

SEQ ID NO: 489578 - DNA, 120 bp, Artificial Sequence
  ENSG00000162727_3 (sequence is synthesized)
atggatgcaatcattgatgctgtagcgacattttccttctcctactgtgggtctcgggaaatagcccacttcttctgtgacttcccttccctactaatcctctcatgcaatgacacatca

SEQ ID NO: 489579 - DNA, 120 bp, Artificial Sequence
  ENSG00000162727_4 (sequence is synthesized)
atatttgaaaaggttcttttcatctgctgtatagtaatgattgtttttcctgttgcaatcatcatcgcttcctatgctcgagttattctggctgtcattcacatgggatctggagagggt

SEQ ID NO: 489580 - DNA, 120 bp, Artificial Sequence
  ENSG00000162727_5 (sequence is synthesized)
cgtcgcaaagcttttactacctgttcctctcacctcatggtggtgggaatgtactatggagcaggtttgttcatgtacatacggcccacatctgatcgctcccctatgcaggacaagctg

SEQ ID NO: 489581 - DNA, 120 bp, Artificial Sequence
  ENSG00000162727_6 (sequence is synthesized)
gtgtctgtattctacaccatcctcactcccatgctgaatcccctcatctacagcctccgcaacaaggaggtgaccagagcactcaggaaagtgttaggaaagggcaagtgtggagagtga

SEQ ID NO: 489582 - DNA, 120 bp, Artificial Sequence
  ENSG00000162728_0 (sequence is synthesized)
acagatagcaagtcctagtcagagctgccgctacatttaggagaaacagcggtgtctgcggctcccacccttcggggggcccgtggggggggcggtgtcaggggcatggacgccaccccc

SEQ ID NO: 489583 - DNA, 120 bp, Artificial Sequence
  ENSG00000162728_1 (sequence is synthesized)
caggggtctctgctgccggctactctcctctccacgtgctcccctccaggacccccgacgccgcctaggcgcccagcgacgcgcggcaggtggcagcagctcgggcccccgccgcactcc

SEQ ID NO: 489584 - DNA, 120 bp, Artificial Sequence
  ENSG00000162728_2 (sequence is synthesized)
cgctcgccctgacgcggccgccatggcgcaggagaacgcggccttctcgcccgggcaggaggagccgccgcggcgccgcggccgccagcgctacgtggagaaggatggccggtgcaacgt

SEQ ID NO: 489585 - DNA, 120 bp, Artificial Sequence
  ENSG00000162728_3 (sequence is synthesized)
ccggtgcaacgtgcagcagggcaacgtgcgcgagacataccgctacctgacggacctgttcaccacgctggtggacctgcagtggcgcctcagcctgttgttcttcgtcctggcctacgc

SEQ ID NO: 489586 - DNA, 120 bp, Artificial Sequence
  ENSG00000162728_4 (sequence is synthesized)
gctcacctggctcttcttcggcgccatctggtggctgatcgcctacggccgcggcgacctggagcacctggaggacaccgcgtggacgccgtgcgtcaacaacctcaacggcttcgtggc

SEQ ID NO: 489587 - DNA, 120 bp, Artificial Sequence
  ENSG00000162728_5 (sequence is synthesized)
cgccttcctcttctccatcgagaccgagaccaccatcggctacgggcaccgcgtcatcaccgaccagtgccccgagggcatcgtgctgctgctgctgcaggccatcctgggctccatggt

SEQ ID NO: 489588 - DNA, 120 bp, Artificial Sequence
  ENSG00000162728_6 (sequence is synthesized)
gaacgccttcatggtgggctgcatgttcgtcaagatctcgcagcccaacaagcgcgcagccacgctcgtcttctcctcgcacgccgtggtgtcgctgcgcgacgggcgcctctgcctcat

SEQ ID NO: 489589 - DNA, 120 bp, Artificial Sequence
  ENSG00000162728_7 (sequence is synthesized)
gttccgcgtgggcgacttgcgctcctcacacatagtggaggcctccatccgcgccaagctcatccgctcgcgccagacgctggagggcgagttcatcccgctgcaccagaccgacctcag

SEQ ID NO: 489590 - DNA, 120 bp, Artificial Sequence
  ENSG00000162728_8 (sequence is synthesized)
cgtgggcttcgacacgggagacgaccgcctcttcctcgtctcgccgctggttatcagccacgagatcgacgccgccagccccttctgggaggcgtcgcgccgtgccctcgagagggacga

SEQ ID NO: 489591 - DNA, 120 bp, Artificial Sequence
  ENSG00000162728_9 (sequence is synthesized)
cttcgagatcgtcgttatcctcgagggcatggtggaagccacgggaatgacatgccaagctcggagctcctacctggtagacgaggtgctgtggggccaccgcttcacgtcagtgctgac

SEQ ID NO: 489592 - DNA, 120 bp, Artificial Sequence
  ENSG00000162728_10 (sequence is synthesized)
tctggaggacggcttctacgaagtggactatgccagctttcacgagacttttgaggtgcccacaccttcgtgcagtgctcgagagctggcagaggctgccgcccgccttgatgcccatct

SEQ ID NO: 489593 - DNA, 120 bp, Artificial Sequence
  ENSG00000162728_11 (sequence is synthesized)
ctactggtccatccccagccggctggatgagaaggtggaggaggagggggcgggggagggggcgggtggggaagctggggctgacaaggagcagaatggctgcctgccacccccagagag

SEQ ID NO: 489594 - DNA, 120 bp, Artificial Sequence
  ENSG00000162728_12 (sequence is synthesized)
tgagtccaaggtgtgaccagcttcctccagacccctgtggcagaccgggggccagacacagatacatggggaactgcatatcggaggtggtggaggaggaggaggaggaggaaggcaaag

SEQ ID NO: 489595 - DNA, 120 bp, Artificial Sequence
  ENSG00000162728_13 (sequence is synthesized)
cccctggaaatgtgctaaagttggaaagtccccgtcccccagaacctcaagtctagaaaccagtatggaagggaggggtcctgatttcagggaaatggagggtggggccgggtgaaaatg

SEQ ID NO: 489596 - DNA, 120 bp, Artificial Sequence
  ENSG00000162728_14 (sequence is synthesized)
ccagtctgtgtttgaccttcacatttgttcatgagtggatggatggacagaatgatggacttttgggggttggatgggaagatggtagcagataaagacagctgacagatacatagatgg

SEQ ID NO: 489597 - DNA, 120 bp, Artificial Sequence
  ENSG00000162728_15 (sequence is synthesized)
accagtagacaactggtccactcagggctgccactaacctgtagaacacccctgtgcaaattttaaaaaggaacccttttcctccagacagatacagccccaaaccagggtgcatggctt

SEQ ID NO: 489598 - DNA, 120 bp, Artificial Sequence
  ENSG00000162728_16 (sequence is synthesized)
ggggagcagagtataggatggattgcagtccccagtcacctcttctgccagcctccccacatatggcacaactgtctaatgacacggtaggccaagctgaagtgaaggagaaaggagccg

SEQ ID NO: 489599 - DNA, 120 bp, Artificial Sequence
  ENSG00000162728_17 (sequence is synthesized)
ccaagatgggcacatgaggagggtgccctcctagctccaccctcaccaggatgaaggcgtgcaaggggctcagcaaggtgtgaatgaccttagtccgcaagttcagggaagcaggcagag

SEQ ID NO: 489600 - DNA, 120 bp, Artificial Sequence
  ENSG00000162728_18 (sequence is synthesized)
cggggaggtgcctgagctggggcctggagaggggcctgggaaaggaaaaccagggatagctattttcttacagtggagtgagatcttacaggtatcaggcacaggcaggaagagagagag

SEQ ID NO: 489601 - DNA, 120 bp, Artificial Sequence
  ENSG00000162728_19 (sequence is synthesized)
agaggttctggggaggaagggccaggagagagatctagaaagtgggttcactagagctgggaaacagggagcccctaggaaagcagtgtgtccttggggcacagtcattcacatcactga

SEQ ID NO: 489602 - DNA, 120 bp, Artificial Sequence
  ENSG00000162728_20 (sequence is synthesized)
ttgggtgccatgtggagtggacattcaaaaacctggttcctgtcctcaaaataaggggcacctgggaaaacagaggaatctacctgtggtgactgaacgagggataattcaaactgacaa

SEQ ID NO: 489603 - DNA, 120 bp, Artificial Sequence
  ENSG00000162728_21 (sequence is synthesized)
cctgtgcagtcccgtggagggtaggggagtgtgggtgatcagaaggctggggccagtgtaaggcatagggaatatgtaagtcaggagttagaaatctccagtgtgcgttggaatcacctg

SEQ ID NO: 489604 - DNA, 120 bp, Artificial Sequence
  ENSG00000162728_22 (sequence is synthesized)
gagggcttggtaaaacacagatttttgggctccactccaagggtttctgacccaagaggtggggaccaaaaccatgcattcctaagaagtccccaggtcatgctgctgttgctggactga

SEQ ID NO: 489605 - DNA, 120 bp, Artificial Sequence
  ENSG00000162728_23 (sequence is synthesized)
ggaccacactttgagaacctgtgctctaagtgaatacttggaagtcgtttcaggacatggggcatagaaactgaggagtagctgagaggaagatgaagagaagctgagaagaagctgagg

SEQ ID NO: 489606 - DNA, 120 bp, Artificial Sequence
  ENSG00000162728_24 (sequence is synthesized)
atcctcacaggagcagacagagaaatgtgaagggtggggttttatgtgtgggaaagggacccgaagcccaggctgaagagtttaactttgggcccagaaactcaaccatcaatggaaaca

SEQ ID NO: 489607 - DNA, 120 bp, Artificial Sequence
  ENSG00000162728_25 (sequence is synthesized)
gggcagtgacaagtggagggggtgtctggaagctgagcaggcccgacagagagatgaagccatcagaaggacttgagggggctcctggggaggtcggggggaggtggagcaggaagagtt

SEQ ID NO: 489608 - DNA, 120 bp, Artificial Sequence
  ENSG00000162728_26 (sequence is synthesized)
ttaggggcaaaggacagaaccccttgtaggactggaggcaagattgaatgtgggagaaaatcggagagaagcgataggagttagaacatctggatgtgtctgcagcctgctgtcagccca

SEQ ID NO: 489609 - DNA, 120 bp, Artificial Sequence
  ENSG00000162728_27 (sequence is synthesized)
attgggccagggggtcccaaagacgcatattctcaccccacctccacctgcttcctgatcacatcccagtcaccagcggcagcttcctggatagtgagggagaacaactgcaagttgaga

SEQ ID NO: 489610 - DNA, 120 bp, Artificial Sequence
  ENSG00000162728_28 (sequence is synthesized)
gaggcagaggggtggaagggacctgaagctggcctggagaaaagcataggcccaggagagcctgccctgggacagcgcctgtctcccacacagcagcactggcccagcaaggacctcctc

SEQ ID NO: 489611 - DNA, 120 bp, Artificial Sequence
  ENSG00000162728_29 (sequence is synthesized)
ccttggccctggccacatcccactcctgccctttcataagccccctggggaaagcactccagtcttctctgttccaggctgggcagatagggtcctatggggcacagccagggtcctatg

SEQ ID NO: 489612 - DNA, 120 bp, Artificial Sequence
  ENSG00000162728_30 (sequence is synthesized)
ggcatagccagggccctatgggtcctctggaagcaagaaagggggccatggaagcagcccagacagctggggttcactcagagaggacccaagtcccagtcccttcctttcagtcaaaac

SEQ ID NO: 489613 - DNA, 120 bp, Artificial Sequence
  ENSG00000162728_31 (sequence is synthesized)
acggatatctttgcctcaggtcacagggccactggggccctgtcatcaaagatgagattcctgaagcctggcattgactggtcccctaagaacagatgttgggatggagaatggggattc

SEQ ID NO: 489614 - DNA, 120 bp, Artificial Sequence
  ENSG00000162728_32 (sequence is synthesized)
atttgggtttcagtaaaacaggggggtctggacaagagcgggtgggctacttggtatccacacacacgcactcacacaggagccaacccattgcagctgaacaagcagagaaactcagtc

SEQ ID NO: 489615 - DNA, 120 bp, Artificial Sequence
  ENSG00000162728_33 (sequence is synthesized)
tggaaaggcccctcctgcctgctgaagtcactgagaccctgccacacctctcctcgccactgtcaccactcagggcaccactgtacagtgcaacaagtcaggagacctaggtcctactcc

SEQ ID NO: 489616 - DNA, 120 bp, Artificial Sequence
  ENSG00000162728_34 (sequence is synthesized)
tgacacttgctaattagctctatgactctgggcaaatcgcatatctgggcctcagtttcctcatctgtaaaaatgacagcaaactcgtaatgctcaataaatgtttaaataacaactgaa

SEQ ID NO: 489617 - DNA, 120 bp, Artificial Sequence
  ENSG00000162729_0 (sequence is synthesized)
attcggcagctccagttcagctcgctcggcgcacccacgcctcgctgccccgcttcctgccctcaacctgggcatgcgccccccacccttccggccccccagaacccgcgccatcccccg

SEQ ID NO: 489618 - DNA, 120 bp, Artificial Sequence
  ENSG00000162729_1 (sequence is synthesized)
gagcctccccagagctggccgcgcaggatgggcgccctcaggcccacgctgctgccgccttcgctgccgctgctgctgctgctaatgctaggaatgggatgctgggcccgggaggtgctg

SEQ ID NO: 489619 - DNA, 120 bp, Artificial Sequence
  ENSG00000162729_2 (sequence is synthesized)
gtccccgaggggcccttgtaccgcgtggctggcacagctgtctccatctcctgcaatgtgaccggctatgagggccctgcccagcagaacttcgagtggttcctgtataggcccgaggcc

SEQ ID NO: 489620 - DNA, 120 bp, Artificial Sequence
  ENSG00000162729_3 (sequence is synthesized)
ccagatactgcactgggcattgtcagtaccaaggatacccagttctcctatgctgtcttcaagtcccgagtggtggcgggtgaggtgcaggtgcagcgcctacaaggtgatgccgtggtg

SEQ ID NO: 489621 - DNA, 120 bp, Artificial Sequence
  ENSG00000162729_4 (sequence is synthesized)
ctcaagattgcccgcctgcaggcccaggatgccggcatttatgagtgccacaccccctccactgatacccgctacctgggcagctacagcggcaaggtggagctgagagttcttccagat

SEQ ID NO: 489622 - DNA, 120 bp, Artificial Sequence
  ENSG00000162729_5 (sequence is synthesized)
gtcctccaggtgtctgctgcccccccagggccccgaggccgccaggccccaacctcacccccacgcatgacggtgcatgaggggcaggagctggcactgggctgcctggcgaggacaagc

SEQ ID NO: 489623 - DNA, 120 bp, Artificial Sequence
  ENSG00000162729_6 (sequence is synthesized)
acacagaagcacacacacctggcagtgtcctttgggcgatctgtgcccgaggcaccagttgggcggtcaactctgcaggaagtggtgggaatccggtcagacttggccgtggaggctgga

SEQ ID NO: 489624 - DNA, 120 bp, Artificial Sequence
  ENSG00000162729_7 (sequence is synthesized)
gctccctatgctgagcgattggctgcaggggagcttcgtctgggcaaggaagggaccgatcggtaccgcatggtagtagggggtgcccaggcaggggacgcaggcacctaccactgcact

SEQ ID NO: 489625 - DNA, 120 bp, Artificial Sequence
  ENSG00000162729_8 (sequence is synthesized)
gccgctgagtggattcaggatcctgatggcagctgggcccagattgcagagaaaagggccgtcctggcccacgtggatgtgcagacgctgtccagccagctggcagtgacagtggggcct

SEQ ID NO: 489626 - DNA, 120 bp, Artificial Sequence
  ENSG00000162729_9 (sequence is synthesized)
acctgcgggggcacctgggcccggccgcctggtagcccagctggacacagagggtgtgggcagcctgggccctggctatgagggccgacacattgccatggagaaggtggcatccagaac

SEQ ID NO: 489627 - DNA, 120 bp, Artificial Sequence
  ENSG00000162729_10 (sequence is synthesized)
ataccggctacggctagaggctgccaggcctggtgatgcgggcacctaccgctgcctcgccaaagcctatgttcgagggtctgggacccggcttcgtgaagcagccagtgcccgttcccg

SEQ ID NO: 489628 - DNA, 120 bp, Artificial Sequence
  ENSG00000162729_11 (sequence is synthesized)
gcctctccctgtacatgtgcgggaggaaggtgtggtgctggaggctgtggcatggctagcaggaggcacagtgtaccgcggggagactgcctccctgctgtgcaacatctctgtgcgggg

SEQ ID NO: 489629 - DNA, 120 bp, Artificial Sequence
  ENSG00000162729_12 (sequence is synthesized)
tggccccccaggactgcggctggccgccagctggtgggtggagcgaccagaggacggagagctcagctctgtccctgcccagctggtgggtggcgtaggccaggatggtgtggcagagct

SEQ ID NO: 489630 - DNA, 120 bp, Artificial Sequence
  ENSG00000162729_13 (sequence is synthesized)
gggagtccggcctggaggaggccctgtcagcgtagagctggtggggccccgaagccatcggctgagactacacagcttggggcccgaggatgaaggcgtgtaccactgtgcccccagcgc

SEQ ID NO: 489631 - DNA, 120 bp, Artificial Sequence
  ENSG00000162729_14 (sequence is synthesized)
ctgggtgcagcatgccgactacagctggtaccaggcgggcagtgcccgctcagggcctgttacagtctacccctacatgcatgccctggacaccctatttgtgcctctgctggtgggtac

SEQ ID NO: 489632 - DNA, 120 bp, Artificial Sequence
  ENSG00000162729_15 (sequence is synthesized)
aggggtggccctagtcactggtgccactgtccttggtaccatcacttgctgcttcatgaagaggcttcgaaaacggtgatcccttactccccaggtcttgcaggtgtcgactgtcttccg

SEQ ID NO: 489633 - DNA, 120 bp, Artificial Sequence
  ENSG00000162729_16 (sequence is synthesized)
gcccagctccaagccctcctctggttgcctggacaccctctccctctgtccactcttcctttaatttatttgacctcccactacccagaatgggagacgtgcctccccttccccactcct

SEQ ID NO: 489634 - DNA, 120 bp, Artificial Sequence
  ENSG00000162729_17 (sequence is synthesized)
tccctcccaagcccctccctctggccttctgttcttgatctcttagggatcctatagggaggccatttcctgtcctggaattagtttttctaaaatgtgaataaacttgttttataaaaa

SEQ ID NO: 489635 - DNA, 120 bp, Artificial Sequence
  ENSG00000162729_18 (sequence is synthesized)
ggggcggatccagggctggagtcttggcggggcggggcggggaggggcggggccggggcggggctgggactcgatgcgactcaaagaacccgcgccatcccccggagcctccccagagct

SEQ ID NO: 489636 - DNA, 120 bp, Artificial Sequence
  ENSG00000162733_0 (sequence is synthesized)
caaaggcatcttgcatcagcctgtggatgtatgcctaccaccgggctccttcaccagcaaagtggaaaaagaagcgtttcacaacaaattcttctttttgggttggggaaacgcagtgga

SEQ ID NO: 489637 - DNA, 120 bp, Artificial Sequence
  ENSG00000162733_1 (sequence is synthesized)
ttatagctctgttttcttctttccaaaactgtgcacccctggatgaaacctccatcaagggagacctgcaagttgcctggggttcagtgctctagaaagttccaaggtttgtggcttgaa

SEQ ID NO: 489638 - DNA, 120 bp, Artificial Sequence
  ENSG00000162733_2 (sequence is synthesized)
ttattctaaagaagctgaaataattgaagagaagcagaggccagctgtttttgaggatcctgctccacagagaatgctctgcacccgttgatactccagttccaacaccatcttctgaga

SEQ ID NO: 489639 - DNA, 120 bp, Artificial Sequence
  ENSG00000162733_3 (sequence is synthesized)
tgatcctgattcccagaatgctcttggtgctgttcctgctgctgcctatcttgagttctgcaaaagctcaggttaatccagctatatgccgctatcctctgggcatgtcaggaggccaga

SEQ ID NO: 489640 - DNA, 120 bp, Artificial Sequence
  ENSG00000162733_4 (sequence is synthesized)
ttccagatgaggacatcacagcttccagtcagtggtcagagtccacagctgccaaatatggaaggctggactcagaagaaggggatggagcctggtgccctgagattccagtggaacctg

SEQ ID NO: 489641 - DNA, 120 bp, Artificial Sequence
  ENSG00000162733_5 (sequence is synthesized)
atgacctgaaggagtttctgcagattgacttgcacaccctccattttatcactctggtggggacccaggggcgccatgcaggaggtcatggcatcgagtttgcccccatgtacaagatca

SEQ ID NO: 489642 - DNA, 120 bp, Artificial Sequence
  ENSG00000162733_6 (sequence is synthesized)
attacagtcgggatggcactcgctggatctcttggcggaaccgtcatgggaaacaggtgctggatggaaatagtaacccctatgacattttcctaaaggacttggagccgcccattgtag

SEQ ID NO: 489643 - DNA, 120 bp, Artificial Sequence
  ENSG00000162733_7 (sequence is synthesized)
ccagatttgtccggttcattccagtcaccgaccactccatgaatgtgtgtatgagagtggagctttacggctgtgtctggctagatggcttggtgtcttacaatgctccagctgggcagc

SEQ ID NO: 489644 - DNA, 120 bp, Artificial Sequence
  ENSG00000162733_8 (sequence is synthesized)
agtttgtactccctggaggttccatcatttatctgaatgattctgtctatgatggagctgttggatacagcatgacagaagggctaggccaattgaccgatggtgtgtctggcctggacg

SEQ ID NO: 489645 - DNA, 120 bp, Artificial Sequence
  ENSG00000162733_9 (sequence is synthesized)
atttcacccagacccatgaataccacgtgtggcccggctatgactatgtgggctggcggaacgagagtgccaccaatggctacattgagatcatgtttgaatttgaccgcatcaggaatt

SEQ ID NO: 489646 - DNA, 120 bp, Artificial Sequence
  ENSG00000162733_10 (sequence is synthesized)
tcactaccatgaaggtccactgcaacaacatgtttgctaaaggtgtgaagatctttaaggaggtacagtgctacttccgctctgaagccagtgagtgggaacctaatgccatttccttcc

SEQ ID NO: 489647 - DNA, 120 bp, Artificial Sequence
  ENSG00000162733_11 (sequence is synthesized)
cccttgtcctggatgacgtcaaccccagtgctcggtttgtcacggtgcctctccaccaccgaatggccagtgccatcaagtgtcaataccattttgcagatacctggatgatgttcagtg

SEQ ID NO: 489648 - DNA, 120 bp, Artificial Sequence
  ENSG00000162733_12 (sequence is synthesized)
agatcaccttccaatcagatgctgcaatgtacaacaactctgaagccctgcccacctctcctatggcacccacaacctatgatccaatgcttaaagttgatgacagcaacactcggatcc

SEQ ID NO: 489649 - DNA, 120 bp, Artificial Sequence
  ENSG00000162733_13 (sequence is synthesized)
tgattggctgcttggtggccatcatctttatcctcctggccatcattgtcatcatcctctggaggcagttctggcagaaaatgctggagaaggcttctcggaggatgctggatgatgaaa

SEQ ID NO: 489650 - DNA, 120 bp, Artificial Sequence
  ENSG00000162733_14 (sequence is synthesized)
tgacagtcagcctttccctgccaagtgattctagcatgttcaacaataaccgctcctcatcacctagtgaacaagggtccaactcgacttacgatcgcatctttccccttcgccctgact

SEQ ID NO: 489651 - DNA, 120 bp, Artificial Sequence
  ENSG00000162733_15 (sequence is synthesized)
accaggagccatccaggctgatacgaaaactcccagaatttgctccaggggaggaggagtcaggctgcagcggtgttgtgaagccagtccagcccagtggccctgagggggtgccccact

SEQ ID NO: 489652 - DNA, 120 bp, Artificial Sequence
  ENSG00000162733_16 (sequence is synthesized)
atgcagaggctgacatagtgaacctccaaggagtgacaggaggcaacacatactcagtgcctgccgtcaccatggacctgctctcaggaaaagatgtggctgtggaggagttccccagga

SEQ ID NO: 489653 - DNA, 120 bp, Artificial Sequence
  ENSG00000162733_17 (sequence is synthesized)
aactcctaactttcaaagagaagctgggagaaggacagtttggggaggttcatctctgtgaagtggagggaatggaaaaattcaaagacaaagattttgccctagatgtcagtgccaacc

SEQ ID NO: 489654 - DNA, 120 bp, Artificial Sequence
  ENSG00000162733_18 (sequence is synthesized)
agcctgtcctggtggctgtgaaaatgctccgagcagatgccaacaagaatgccaggaatgattttcttaaggagataaagatcatgtctcggctcaaggacccaaacatcatccatctat

SEQ ID NO: 489655 - DNA, 120 bp, Artificial Sequence
  ENSG00000162733_19 (sequence is synthesized)
tagctgtgtgtatcactgatgaccctctctgtatgatcactgaatacatggagaatggagatctcaatcagtttctttcccgccacgagccccctaattcttcctccagcgatgtacgca

SEQ ID NO: 489656 - DNA, 120 bp, Artificial Sequence
  ENSG00000162733_20 (sequence is synthesized)
ctgtcagttacaccaatctgaagtttatggctacccaaattgcctctggcatgaagtacctttcctctcttaattttgttcaccgagatctggccacacgaaactgtttagtgggtaaga

SEQ ID NO: 489657 - DNA, 120 bp, Artificial Sequence
  ENSG00000162733_21 (sequence is synthesized)
actacacaatcaagatagctgactttggaatgagcaggaacctgtacagtggtgactattaccggatccagggccgggcagtgctccctatccgctggatgtcttgggagagtatcttgc

SEQ ID NO: 489658 - DNA, 120 bp, Artificial Sequence
  ENSG00000162733_22 (sequence is synthesized)
tgggcaagttcactacagcaagtgatgtgtgggcctttggggttactttgtgggagactttcaccttttgtcaagaacagccctattcccagctgtcagatgaacaggttattgagaata

SEQ ID NO: 489659 - DNA, 120 bp, Artificial Sequence
  ENSG00000162733_23 (sequence is synthesized)
ctggagagttcttccgagaccaagggaggcagacttacctccctcaaccagccatttgtcctgactctgtgtataagctgatgctcagctgctggagaagagatacgaagaaccgtccct

SEQ ID NO: 489660 - DNA, 120 bp, Artificial Sequence
  ENSG00000162733_24 (sequence is synthesized)
cattccaagaaatccaccttctgctccttcaacaaggcgacgagtgatgctgtcagtgcctggccatgttcctacggctcaggtcctccctacaagacctaccactcacccatgcctatg

SEQ ID NO: 489661 - DNA, 120 bp, Artificial Sequence
  ENSG00000162733_25 (sequence is synthesized)
ccactccatctggacatttaatgaaactgagagacagaggcttgtttgctttgccctcttttcctggtcacccccactccctacccctgactcatatacacttttttttttttttacatt

SEQ ID NO: 489662 - DNA, 120 bp, Artificial Sequence
  ENSG00000162733_26 (sequence is synthesized)
aaagaactaaaaaaggaaaaaaaaaagcctagggcagatacaatctagtaaaagaaaatctttgatataccaaagtgttggataacaaaggctagaaaattcagataatttataaaggtt

SEQ ID NO: 489663 - DNA, 120 bp, Artificial Sequence
  ENSG00000162733_27 (sequence is synthesized)
aactatacttgtgcttataaatgtgcagattctacaatatttttccatgtcattctaaaagaatcttcagaaagaaaaacttgaagaatactaatgtcttgggaaacatgagattaagtt

SEQ ID NO: 489664 - DNA, 120 bp, Artificial Sequence
  ENSG00000162733_28 (sequence is synthesized)
tagggaaaacacttgatagatgtggagaatctgaggactcagaattcagcaactaatcacaggtggttttctaatttggcctctggacatgtctcactgtttgtatttctctctcctgtc

SEQ ID NO: 489665 - DNA, 120 bp, Artificial Sequence
  ENSG00000162733_29 (sequence is synthesized)
aaagtgaatgatatattcttgaaaacccccaatttcttgaaatgggtgttctgttcattcatgggcaggggtcaggattgaagttcatatatgaaacaactggggatgtagataggaaag

SEQ ID NO: 489666 - DNA, 120 bp, Artificial Sequence
  ENSG00000162733_30 (sequence is synthesized)
aatgtctgctgcaagagtgtatgaagggggattgtcatttacaaaaaaaaagtacctcatggatggaaggattcatgaatagataatggacataggaaaggaggtcaatggaggacacat

SEQ ID NO: 489667 - DNA, 120 bp, Artificial Sequence
  ENSG00000162733_31 (sequence is synthesized)
aacagacatgctatccaccatttatttgtgattttgtaagagggttctcttctttgtcttgttcagatattttcatgtgtgtgttttagtgagaatctgagtttttaatcagtaaagtct

SEQ ID NO: 489668 - DNA, 120 bp, Artificial Sequence
  ENSG00000162733_32 (sequence is synthesized)
gatgttttgatatcttgatgttttgatggtagactcttgagttcatcttgtccaaatcttctagcattttcaaggatgaagcctctgtgggatctttgggcttggggctgaatttctcag

SEQ ID NO: 489669 - DNA, 120 bp, Artificial Sequence
  ENSG00000162733_33 (sequence is synthesized)
gcataaatacctaatggccttgtctaagagggaatagatctgttctgagtgtccccaaaaaagttgtcctaggaactgatgtggagaagttacagggagactgatttccattccttattg

SEQ ID NO: 489670 - DNA, 120 bp, Artificial Sequence
  ENSG00000162733_34 (sequence is synthesized)
gggaaaacgaagcactcagaacatacaaggataaatgggctgccaccagaggtgaggagtctcttgtcactggagaggttaagatagaggctcaagaacaatgcaaggaaaatggaggtt

SEQ ID NO: 489671 - DNA, 120 bp, Artificial Sequence
  ENSG00000162733_35 (sequence is synthesized)
ttcaaacacaaagtggatggtggtatgagacaatgtttaatgtccttctaactccgagagtccttgattctggagaggcacaggatgaacatctgttgctactgctgagtatacacactc

SEQ ID NO: 489672 - DNA, 120 bp, Artificial Sequence
  ENSG00000162733_36 (sequence is synthesized)
ttgcctctgagatggcgtgaccagcagaaaagaaagctcagggctgtggcttcagaattcatggaaacagagccactgtcaagaaggaatctgctcagagcagattctgagttttcacac

SEQ ID NO: 489673 - DNA, 120 bp, Artificial Sequence
  ENSG00000162733_37 (sequence is synthesized)
tccacaaatcctcagatttagtgggaagctggaaaaaggaactcttaattccaattgaggagaaacaagaaaacattacaaatcagtttcccaagctgagaaggattagccttgacccct

SEQ ID NO: 489674 - DNA, 120 bp, Artificial Sequence
  ENSG00000162733_38 (sequence is synthesized)
tgggtctgcctctgttgccctcaccagtttaccttctacaacagtttctcaggaacatgtgtatttccccattcagctttcagcattgctccacgccacagcataagcatagatcccaag

SEQ ID NO: 489675 - DNA, 120 bp, Artificial Sequence
  ENSG00000162733_39 (sequence is synthesized)
tccacaggctccattttgcaggtcatcttctgatcctagcaaatgtcctttccccatagttgtcctatgcctttgggctttagtctatcccaggactaactgtggagaaatcattggttt

SEQ ID NO: 489676 - DNA, 120 bp, Artificial Sequence
  ENSG00000162733_40 (sequence is synthesized)
gagagtcaagagagcattggtttgggagctttaatcctctttctgcttcacactaagtgtgtcatcttggctaaatcacttggtctttctgcattttgttttcttatttataggatgagg

SEQ ID NO: 489677 - DNA, 120 bp, Artificial Sequence
  ENSG00000162733_41 (sequence is synthesized)
aaattagattaaatggttttgaggtcctttcttgttctgatatgtccagtactcactggaaaattggatctataactgatgggtttagtaatctggtcatttcttgctctgaaaattgta

SEQ ID NO: 489678 - DNA, 120 bp, Artificial Sequence
  ENSG00000162733_42 (sequence is synthesized)
aaaagagatcatggaagaaatcactgtaatggtagtaatagtaacacatgccatttgtattgtgccttaggtttaccaggtgtttccaaatacattagcatatttgatatgtgcaggact

SEQ ID NO: 489679 - DNA, 120 bp, Artificial Sequence
  ENSG00000162733_43 (sequence is synthesized)
agataccttgggacctgccacactccactttcaagatatgtattagcttcattagaattaaagggacttgaactcaggacctgcagcctattcttctttatccacatgtctctggtaggg

SEQ ID NO: 489680 - DNA, 120 bp, Artificial Sequence
  ENSG00000162733_44 (sequence is synthesized)
ctacatccagatcacaccatgacttcttatagagcaagagaaaataatattattatatcttcctttgcctaaaatctctccacttattcttttttatgattctgcaccagttcactgggt

SEQ ID NO: 489681 - DNA, 120 bp, Artificial Sequence
  ENSG00000162733_45 (sequence is synthesized)
tattctatgattccatattttttttaaaaaaaatcatatttaaaatgaacttacaatgtctgaattttcctggccttgagtcacagaagtaatatgtttcagatggctgcccaatatgta

SEQ ID NO: 489682 - DNA, 120 bp, Artificial Sequence
  ENSG00000162733_46 (sequence is synthesized)
ttatcatgtaatacatatctgtgtccttttctgggatgaggaaggcttcaacttctggcactgagaactttgtattacagacacaggtttagtttctagcttagtcatgcctttagagtt

SEQ ID NO: 489683 - DNA, 120 bp, Artificial Sequence
  ENSG00000162733_47 (sequence is synthesized)
tagtagcacaaatccatgcaacccaacagaatacatggtgagggcctagtatgtagaatttgaaagtagttcaaatttgaattagaagaatgaagctaggacttatttggaaaaggagat

SEQ ID NO: 489684 - DNA, 120 bp, Artificial Sequence
  ENSG00000162733_48 (sequence is synthesized)
agaaaaaaaatgatcagaaactgtggggccttattacctttgcagtaagttatcttcttcatgatatatgtgaattattttatgtgcagattgtgttttgggattgtcagatctaaactt

SEQ ID NO: 489685 - DNA, 120 bp, Artificial Sequence
  ENSG00000162733_49 (sequence is synthesized)
atattcttgctggctaatgtgctgatagccaggtctgaaacttgatgtgctatccagacacatatgatcagaaaagatctagagtgcaaagaggtgcctgaggagcaaaatgtggtttta

SEQ ID NO: 489686 - DNA, 120 bp, Artificial Sequence
  ENSG00000162733_50 (sequence is synthesized)
atgttgtggaaagatcacttgcaagtatataagactgtataaagaagaggactgtgtgcaagtggggtgaaaaaaaaggatacgtgaatgtgcatatgactgaatagggaggaaggtcag

SEQ ID NO: 489687 - DNA, 120 bp, Artificial Sequence
  ENSG00000162733_51 (sequence is synthesized)
ggctagaaaggaggctacataaaaaggggcaatggagaatgcacaggaaagacacaggggaaggtcaagtcgagcaaggtagaaacaggagtagctagagccattgggaatccattttga

SEQ ID NO: 489688 - DNA, 120 bp, Artificial Sequence
  ENSG00000162733_52 (sequence is synthesized)
aacaagaaggagttttgaaagggaataggaaagtaagtgtcttgaagtaaaagataaatatggatggagaaagaagaaattctggatgatagagatgataaaaatatttattaagaaatg

SEQ ID NO: 489689 - DNA, 120 bp, Artificial Sequence
  ENSG00000162733_53 (sequence is synthesized)
aagtcaggttcagtgtatgaaatggaaaggaatttttcagaattttaagaaaggggaagttcctcttggaaaagatatagcaaccatcggggaatgaccttttcatttcagaagtggatg

SEQ ID NO: 489690 - DNA, 120 bp, Artificial Sequence
  ENSG00000162733_54 (sequence is synthesized)
aggaaggtggtgtgagcatcaggtatattctggaccatttcaagtgctggtgagaagaaaggaactctttgcctgaactgggcttggttttccaagtgctgctttggaaatgaagaccca

SEQ ID NO: 489691 - DNA, 120 bp, Artificial Sequence
  ENSG00000162733_55 (sequence is synthesized)
gagatgcagagcttatggtagttcataaatcttcatgttctattatctttcatctgccaataaagttcattttcaataatgtccaccattgctgtgcccagaataaccacaggcaaacat

SEQ ID NO: 489692 - DNA, 120 bp, Artificial Sequence
  ENSG00000162733_56 (sequence is synthesized)
caaaacaatacgcataagttagacaagattaaatcttgtctgatatctgcacaaacagatatgcaccatgttggaaacatgtgttttcctagtcccatccaggcttcccacaagaaagcc

SEQ ID NO: 489693 - DNA, 120 bp, Artificial Sequence
  ENSG00000162733_57 (sequence is synthesized)
atgatgtgggtctaaaccatatgttttgagtaaaggagaatagaagaaggggagtgtccgcaaaatggaaagagatgaagatgttccaaggaagtatgctgaaacagaacagtgaatgtt

SEQ ID NO: 489694 - DNA, 120 bp, Artificial Sequence
  ENSG00000162733_58 (sequence is synthesized)
ttgcccaaaactacaaaaataaaagaaaaaaagaaaattgcaatacatggctactaagtctttgatcataagtcgaatttatagacctggaatttgccatcctagtctttcctttttagt

SEQ ID NO: 489695 - DNA, 120 bp, Artificial Sequence
  ENSG00000162733_59 (sequence is synthesized)
aagacttctgtcctctggcagtgcatatggtaggtctctaatgtttcttcatctccaggaagatgcagatccttatttttgctgggaaatccttctaaatagaaatgtaacatttttata

SEQ ID NO: 489696 - DNA, 120 bp, Artificial Sequence
  ENSG00000162733_60 (sequence is synthesized)
aaaacagattaatgtgtttttcacttagtaaatgttttcaagagctgaattgagaaggaaagagactggagtggttaatggtgatttgatttctggcattctgagttttctgctacaatt

SEQ ID NO: 489697 - DNA, 120 bp, Artificial Sequence
  ENSG00000162733_61 (sequence is synthesized)
agctgcattacttggtgccaaagagcagtggggaattgttgagttgctgtatcctttaaaaaaaaacaaaaaacttgttattttgaaagaacttaaggctcacaagatgttacaaaaata

SEQ ID NO: 489698 - DNA, 120 bp, Artificial Sequence
  ENSG00000162733_62 (sequence is synthesized)
gtagagtggccttaccctagatccagttttccccatttataacatttcacttagtccattttcggaaccagaaaattaacattggcataatgctattaactaaactacagaccttttttc

SEQ ID NO: 489699 - DNA, 120 bp, Artificial Sequence
  ENSG00000162733_63 (sequence is synthesized)
aatttcgccagtttttccacacatattcatttagttgctggatacttttaattcttgctgatttgtaaactggccttgcttggatacaacaggaaagatactatctggataaagttctac

SEQ ID NO: 489700 - DNA, 120 bp, Artificial Sequence
  ENSG00000162733_64 (sequence is synthesized)
agttttagagagactattaacacattaatgtgttcctttgtcatgagcaataccctgcctacactgcttctaaattttctgatttgtttggctgtttggcatctgaaacaatccaagaca

SEQ ID NO: 489701 - DNA, 120 bp, Artificial Sequence
  ENSG00000162733_65 (sequence is synthesized)
aacttagaaagattaggcaacacaaaacacagtaagacctgttcatagcttgttgtctagaaaaccaggtagcaggatattctagatgcttcctgctgcttctacgtgagtaggattagc

SEQ ID NO: 489702 - DNA, 120 bp, Artificial Sequence
  ENSG00000162733_66 (sequence is synthesized)
actggggacaaaataaggagtttagagtaaaccagtatttcagtcaagagttagttggcacttagttaatggcactggaaatagcttgtggagagaatagaatacaatggtatagactcc

SEQ ID NO: 489703 - DNA, 120 bp, Artificial Sequence
  ENSG00000162733_67 (sequence is synthesized)
taatgtttgataaaatactattttcagagtggtagagaggttttatttgcctaaatagccgttattaaatggaataacaaccacattagaccaaattaattgcaaacacagcggcaacct

SEQ ID NO: 489704 - DNA, 120 bp, Artificial Sequence
  ENSG00000162733_68 (sequence is synthesized)
ggggagaagttgaaactccagttttgtggattacagttttgagttttatgattgacatttttaagtcccctatttaaggggtcaagattataacaatgtgtgtcttactaagtttctagg

SEQ ID NO: 489705 - DNA, 120 bp, Artificial Sequence
  ENSG00000162733_69 (sequence is synthesized)
tcattgtgagcacttgataaatatttgctgaatgttgtttttttgaatgaacataagatagaaacaaaaacttctcatccagttaactagagtgaatgtagggagaattgttttgcttgt

SEQ ID NO: 489706 - DNA, 120 bp, Artificial Sequence
  ENSG00000162733_70 (sequence is synthesized)
aacatggagagtttattttcaagtgaggaaagagaaaaaaattactcagacttgttcctggtgaagtgcattctctgtttgtatactttttgatggagaaattgatctatagaactgctt

SEQ ID NO: 489707 - DNA, 120 bp, Artificial Sequence
  ENSG00000162733_71 (sequence is synthesized)
aattttttgaggcatttagacagcaatgaaaggtagttctccacaggacaccgaatcaaaaggagagaccagactctggcctcatacccagcctatttgaaacaagctatctagtttctc

SEQ ID NO: 489708 - DNA, 120 bp, Artificial Sequence
  ENSG00000162733_72 (sequence is synthesized)
ctgcagacaccttgtcaacaacatgcaacagtgtcaggtgccttgcaggaaaataatctgagtcccaagctagcctgtgctcatccacaatcacaatgaacatgtcaaggaagaatttgc

SEQ ID NO: 489709 - DNA, 120 bp, Artificial Sequence
  ENSG00000162733_73 (sequence is synthesized)
agagactcaagggaagcacaatgggataaggtaatcactttcagtgaaaaactgttttcttgaaaacaggcttggacacaattgaaagctggcttcctgcaaacacaccaagagtctgta

SEQ ID NO: 489710 - DNA, 120 bp, Artificial Sequence
  ENSG00000162733_74 (sequence is synthesized)
atctagcctatccattatatgtcctttattattcatgatatcctattcttctaccttgttgcctggtaactttttctgaggactgagtttctgcagcgatgtggtgcactcttcctgtga

SEQ ID NO: 489711 - DNA, 120 bp, Artificial Sequence
  ENSG00000162733_75 (sequence is synthesized)
tgaggaaacatctgggcccccttctgcaggctttggaagatgatgtgtcttgtcaaggggtaaagggcaaatggatttaatttctgcttaaaactatcatagacgttccaaatagaatat

SEQ ID NO: 489712 - DNA, 120 bp, Artificial Sequence
  ENSG00000162733_76 (sequence is synthesized)
gtaaaatttctctgtattagaaaaagaaacgtgataccaattgtatattttcttttctttatttattctctgtaagtctgtcagatgataaattgtaaataacaatgattaaagagtcat

SEQ ID NO: 489713 - DNA, 120 bp, Artificial Sequence
  ENSG00000162733_77 (sequence is synthesized)
gctactgatggatctccctttctgtataaacagtgccagttctgggctttgtaacctttgctctttatagtctttcattcctggggaagtgatggggcatgggcccagagctggggtgta

SEQ ID NO: 489714 - DNA, 120 bp, Artificial Sequence
  ENSG00000162733_78 (sequence is synthesized)
tgtggtatggacacctgtttgtggggctttccagcaaaggattatttaaatagacctctaacatatgagttgactgtttattgggaagaaagcatcttggtctctgacatatccaaacat

SEQ ID NO: 489715 - DNA, 120 bp, Artificial Sequence
  ENSG00000162733_79 (sequence is synthesized)
acgagacactgggattttacgtcctcacattaattagtccagttctggggaatccagtctagaattaactggtgatcccttatcgttatggttacagacttgtcttgtttgatacacaga

SEQ ID NO: 489716 - DNA, 120 bp, Artificial Sequence
  ENSG00000162733_80 (sequence is synthesized)
aatcctttttaaatccaaatatagtctgtctcagactacctgcacatgcacaaaccaaaaaaaactatgaaaaccagaatttagactcagtcattatactagagattagaatgaaacgac

SEQ ID NO: 489717 - DNA, 120 bp, Artificial Sequence
  ENSG00000162733_81 (sequence is synthesized)
cccaaacaacccatttcttacctggtctctgagaataagtttatacttttagttttctgagaatatttctcagaatatgtgagttttctgagcacatttttcagcatggggtatggtaga

SEQ ID NO: 489718 - DNA, 120 bp, Artificial Sequence
  ENSG00000162733_82 (sequence is synthesized)
taaatcacagggccaaggtttggcagggatagatgggatcattgtgtaccctattgttcttctgatttccaggagaacagaatgagcccatgcaaaacataaacttatgatgattaaaaa

SEQ ID NO: 489719 - DNA, 120 bp, Artificial Sequence
  ENSG00000162733_83 (sequence is synthesized)
aaacacacctatccattcactcatcaataaaaacatattatgatggttatcaagctgtgtcctatgagtgataaaatatttgtaaaatataaaattaaatggcatctattttgaactcta

SEQ ID NO: 489720 - DNA, 120 bp, Artificial Sequence
  ENSG00000162733_84 (sequence is synthesized)
aaacagagaagagctggtgatagctccagagctcagagaaaggaggtctctttacaagaagtctggctctcaaagcctccatcaagggagacctgcaagttgcctggggttcagtgctct

SEQ ID NO: 489721 - DNA, 120 bp, Artificial Sequence
  ENSG00000162733_85 (sequence is synthesized)
attaaatcaaatctttcgggggagagctcagctctaggctttcatggtcaaaatactaaaggtcagctccgcgtgtgtgccccaactgtcctggaagcttcaattggaaaactccaaact

SEQ ID NO: 489722 - DNA, 120 bp, Artificial Sequence
  ENSG00000162733_86 (sequence is synthesized)
ggggaggaggagtcaggtgaggatgatgtggtgggcagggtgtcaagggagaaacctcagcaagcatcaggtaggtatgacacgcctgctcccagttcattgcatctatttttagtctct

SEQ ID NO: 489723 - DNA, 120 bp, Artificial Sequence
  ENSG00000162733_87 (sequence is synthesized)
gctaacctcctgagaagtccacattctctttctagatttggtctgccgctgctcctggcctaatttgagcaactctcctttgctactgaatataagatgtgtggagggacccacatacca

SEQ ID NO: 489724 - DNA, 120 bp, Artificial Sequence
  ENSG00000162733_88 (sequence is synthesized)
tggtctgccgctgctcctggcctaatttgagcaactctcctttgctactgaatataagatgtgtggagggacccacataccagaaaagaaagaaaaaaataataaaacatgtgaattagg

SEQ ID NO: 489725 - DNA, 120 bp, Artificial Sequence
  ENSG00000162733_89 (sequence is synthesized)
tgttgacaccagaagaacctaaacagtccaaccagtctaacctcattttacatgtcgggaaagtgagaaagtccagatagagtactcacccaacaccaaatttcatgagtgggtaaaggc

SEQ ID NO: 489726 - DNA, 120 bp, Artificial Sequence
  ENSG00000162733_90 (sequence is synthesized)
agagtcccttccagaggtggattcacaacagaatgtctcttccatttgtctctccttgcattgtcctctggatttcagtattgggtcaacctaatctttgtcaaatagctgtggagttcc

SEQ ID NO: 489727 - DNA, 120 bp, Artificial Sequence
  ENSG00000162733_91 (sequence is synthesized)
gaatgctctgcacccgttgatggtccgggcaggatgcttcctaccccagggggccacttccaaatgctgctctgtcacttggtggaaaacttcaaatttactgagggtttactgtggaag

SEQ ID NO: 489728 - DNA, 120 bp, Artificial Sequence
  ENSG00000162733_92 (sequence is synthesized)
acttagtcaagaggatgcctcccaggacccagagggagactgtagcctcatttctgtggagacctttggctggactctcctggctctcccagagactccagttccaacaccatcttctga

SEQ ID NO: 489729 - DNA, 120 bp, Artificial Sequence
  ENSG00000162734_0 (sequence is synthesized)
gagtgagcggcgctgggctcgggctccggctccgcgggcggaagaggcggcggcggcggcagaagcggcggcggcggcggcgggagccgaggaggaggttccggacgctgcttaggaacc

SEQ ID NO: 489730 - DNA, 120 bp, Artificial Sequence
  ENSG00000162734_1 (sequence is synthesized)
ccggacgctgcttaggaaccggggactcaggagtgcccgcgccctgagcgctcagctccagaggcgtcatggctgagtacgggaccctcctgcaagacctgaccaacaacatcacccttg

SEQ ID NO: 489731 - DNA, 120 bp, Artificial Sequence
  ENSG00000162734_2 (sequence is synthesized)
aagatctagaacagctcaagtcggcctgcaaggaagacatccccagcgaaaagagtgaggagatcactactggcagtgcctggtttagcttcctggagagccacaacaagctggacaaag

SEQ ID NO: 489732 - DNA, 120 bp, Artificial Sequence
  ENSG00000162734_3 (sequence is synthesized)
acaacctctcctacattgagcacatctttgagatctcccgccgtcctgacctactcactatggtggttgactacagaacccgtgtgctgaagatctctgaggaggatgagctggacacca

SEQ ID NO: 489733 - DNA, 120 bp, Artificial Sequence
  ENSG00000162734_4 (sequence is synthesized)
agctaacccgtatccccagtgccaagaagtacaaagacattatccggcagccctctgaggaagagatcatcaaattggctcccccaccgaagaaggcctgagcaagggggaggaagagga

SEQ ID NO: 489734 - DNA, 120 bp, Artificial Sequence
  ENSG00000162734_5 (sequence is synthesized)
ggaaggttggaccttcatcagaccactcccttcccccatcctccaggagagggggcaagggcaacccaccatctacccacttactaacctggtcctaacccccttactgtgcgcgtgtgt

SEQ ID NO: 489735 - DNA, 120 bp, Artificial Sequence
  ENSG00000162734_6 (sequence is synthesized)
gtgcgtgtgcgcacgctctggctgtttgtctatatgtctagctcatctagttcctcttcttaaggggatgggggtcaggggctaggggagggggctgagtttccccactttaggaggagg

SEQ ID NO: 489736 - DNA, 120 bp, Artificial Sequence
  ENSG00000162734_7 (sequence is synthesized)
tgggggctatttctatgcaaatagaaatcagcacattcctcctacttccctttcctccactccccccatatctttaaagtgtggaagcagaaaggacctgcattttcctacattgaggag

SEQ ID NO: 489737 - DNA, 120 bp, Artificial Sequence
  ENSG00000162734_8 (sequence is synthesized)
ctgacataggggtaaggtatgggagaggtaggtggatccagggaaaagcagtggggacggaaggcaaagagaccactcaacccccacctggaaggggcaaagaaaagccagagttccatg

SEQ ID NO: 489738 - DNA, 120 bp, Artificial Sequence
  ENSG00000162734_9 (sequence is synthesized)
tttgtactcctgtgctggactgtttcctgagtaccagcaggtccctttttgtctctcatgggcctagcataggtatgagccagggatcctttcctggtccctaagatcaaaccccatgga

SEQ ID NO: 489739 - DNA, 120 bp, Artificial Sequence
  ENSG00000162734_10 (sequence is synthesized)
ctgagatggggatgagggcagagagaggggagccccctcttccactcagttgttcctactcagactgttgcactctaaacctagggaggttgaagaatgagacccttaggttttaacacg

SEQ ID NO: 489740 - DNA, 120 bp, Artificial Sequence
  ENSG00000162734_11 (sequence is synthesized)
aatcctgacaccaccatctatagggtcccaacttggttattgtaggcaaccttccctctctccttggtgaagaacatcccaagccagaaagaagttaactacagtgttttcctttgcacc

SEQ ID NO: 489741 - DNA, 120 bp, Artificial Sequence
  ENSG00000162734_12 (sequence is synthesized)
gatccccaccccaattcaatcccggaagggacttacttaggaaacccttctttactagatatcctggccccctgggcttgtgaacacctcctagccacatcactacagtacagtgagtga

SEQ ID NO: 489742 - DNA, 120 bp, Artificial Sequence
  ENSG00000162734_13 (sequence is synthesized)
ccccagcctcctgcctaccccaagatgcccctccccaccctgaccgtgctaactgtgtgtacatatatattctacatatatgtatattaaaactgcactgccatgtctgcccttttttgt

SEQ ID NO: 489743 - DNA, 120 bp, Artificial Sequence
  ENSG00000162734_14 (sequence is synthesized)
ggtgtctagcattaacttattgtctaggccagagcgggggtgggaggggaatgccacagtgaagggagtggcagaatcaaattgctacatagtccaaacaaaaaagaaggctttttcaaa

SEQ ID NO: 489744 - DNA, 120 bp, Artificial Sequence
  ENSG00000162734_15 (sequence is synthesized)
aaacattaaattcacatgcagtctcagagactatttagacaaagttcaagttaggagcttttaggatgtgggagtaaaactttaatgggaggggagggctggctgctggaagaaggaaga

SEQ ID NO: 489745 - DNA, 120 bp, Artificial Sequence
  ENSG00000162734_16 (sequence is synthesized)
agccagactggttagacagtactcttaactcctagcccagcctagcgtgccctgcccctctggccactgctgcagacacctgccttaacacacacacctctaggactccacagttttgcc

SEQ ID NO: 489746 - DNA, 120 bp, Artificial Sequence
  ENSG00000162734_17 (sequence is synthesized)
ttaaaggaccttcccaagtctccctttccctgtctggcttctcccttaagaagagagagatacttgtagaattgggtggggggaatgagcatgaactgtccttccatttgggatatgtta

SEQ ID NO: 489747 - DNA, 120 bp, Artificial Sequence
  ENSG00000162734_18 (sequence is synthesized)
cattagagtgagagagagaataaggagcctttcttatggaagaaatgggagaagagagacagggttcttttcagcagagtctagtagtttctctgtaaggcaaaataatctaaaaagact

SEQ ID NO: 489748 - DNA, 120 bp, Artificial Sequence
  ENSG00000162734_19 (sequence is synthesized)
aacctgcccacccactccttatattgctgtgagattgcccctatcttgtgctcttctgtctgcagtgtgcacggccttgttctaacccggaataaaggtgattgattgtattgcaactaa

SEQ ID NO: 489749 - DNA, 120 bp, Artificial Sequence
  ENSG00000162734_20 (sequence is synthesized)
gcggcggcggcggcggcgggagccgaggaggaggttccggacgctgcttaggaaccggggactcaggagtgcccgcgccctgagcgctcagctccagaggcgggatgctcaccccttcct

SEQ ID NO: 489750 - DNA, 120 bp, Artificial Sequence
  ENSG00000162734_21 (sequence is synthesized)
aattgcagctccgaatattcagatggggacagtgaagcacagatctcaggagtcctaagtattcatggctaccactaagttggatagaatggcctccgcccagactgcctggtgatccct

SEQ ID NO: 489751 - DNA, 120 bp, Artificial Sequence
  ENSG00000162734_22 (sequence is synthesized)
gagcagctctctgcactgctccagaaatcaggaggatttttcagagcccagagagcagatttctccacgagccctaaggaaatctgaatctctggtgaggaaagtgacatggaggatgaa

SEQ ID NO: 489752 - DNA, 120 bp, Artificial Sequence
  ENSG00000162735_0 (sequence is synthesized)
acggcaagtcggaggtagcaagatggccgccgctgaggaaggctgtagtgtcggggccgaagcggacagggaattggaggagcttctggaaagtgctcttgatgatttcgataaagccaa

SEQ ID NO: 489753 - DNA, 120 bp, Artificial Sequence
  ENSG00000162735_1 (sequence is synthesized)
accctccccagcacccccttctaccaccacggcccctgatgcttcggggccccagaagagatcgccaggagacactgccaaagatgccctcttcgcttcccaagagaagtttttccagga

SEQ ID NO: 489754 - DNA, 120 bp, Artificial Sequence
  ENSG00000162735_2 (sequence is synthesized)
actattcgacagtgaactggcttcccaagccactgcggagttcgagaaggcaatgaaggagttggctgaggaagaaccccacctggtggagcagttccaaaagctctcagaggctgcagg

SEQ ID NO: 489755 - DNA, 120 bp, Artificial Sequence
  ENSG00000162735_3 (sequence is synthesized)
gagagtgggcagtgatatgacctcccaacaagaattcacttcttgcctaaaggaaacactaagtggattagccaaaaatgccactgaccttcagaactccagcatgtcggaagaagagct

SEQ ID NO: 489756 - DNA, 120 bp, Artificial Sequence
  ENSG00000162735_4 (sequence is synthesized)
gaccaaggccatggaggggctaggcatggacgaaggggatggggaagggaacatcctccccatcatgcagagtattatgcagaacctactctccaaggatgtgctgtacccatcactgaa

SEQ ID NO: 489757 - DNA, 120 bp, Artificial Sequence
  ENSG00000162735_5 (sequence is synthesized)
ggagatcacagaaaagtatccagaatggttgcagagtcatcgggaatctctacctccagagcagtttgaaaaatatcaggagcagcacagcgtcatgtgcaaaatatgtgagcagtttga

SEQ ID NO: 489758 - DNA, 120 bp, Artificial Sequence
  ENSG00000162735_6 (sequence is synthesized)
ggcagagacccccacagacagtgaaaccactcaaaaggctcgttttgagatggtgctggatcttatgcagcagctacaagatttaggccatcctccaaaagagctggctggagagatgcc

SEQ ID NO: 489759 - DNA, 120 bp, Artificial Sequence
  ENSG00000162735_7 (sequence is synthesized)
tcctggcctcaactttgacctggatgccctcaatctttcgggcccaccaggtgccagtggtgaacagtgtctgatcatgtgaaacacaacacgttttcctctctgagtcccagctatggg

SEQ ID NO: 489760 - DNA, 120 bp, Artificial Sequence
  ENSG00000162735_8 (sequence is synthesized)
gaacatctggagtcagcagaaccattgggacctgaggcaggagtgtcacctgcgggagaagtctgcccgctgccctctgtcatcccattcaagattgtgccataccagctgaggtttttc

SEQ ID NO: 489761 - DNA, 120 bp, Artificial Sequence
  ENSG00000162735_9 (sequence is synthesized)
ctctgtctctctaggaatagggtctgtttcacaggccatttctgtgaaccctactccattgtggtttctgccactatcaaagttccagctacctgcaaggtgaaggaaggcatccctttt

SEQ ID NO: 489762 - DNA, 120 bp, Artificial Sequence
  ENSG00000162735_10 (sequence is synthesized)
ggggcatgcactttctttcctttctcaaaataatgttatatgtggccacactgatgttcacctttacgtccagggtctttgtgccttgtctctactccctctcttggatctggggaggag

SEQ ID NO: 489763 - DNA, 120 bp, Artificial Sequence
  ENSG00000162735_11 (sequence is synthesized)
gggcagagacctgggactctgtatttctatagttctcctggcagagcctttgagaatggggagaaacagcctgggctggggctacaggtctgtcactatgctctcttgccttcagacaga

SEQ ID NO: 489764 - DNA, 120 bp, Artificial Sequence
  ENSG00000162735_12 (sequence is synthesized)
ccattctgaattctctaaagggaaagggcttttgcatctaatcacaatagagttgaaagagaggccttaggattctcctctctctaggtgctgagccctcacctccctgttccaggctga

SEQ ID NO: 489765 - DNA, 120 bp, Artificial Sequence
  ENSG00000162735_13 (sequence is synthesized)
gaactcaaatggttaccctgcttcttcctacaatgctgtgtgatatgggtgaacccagcccctgaccttcctctatcccctgcccatcctcccttttacctcctctcttttttaaacacc

SEQ ID NO: 489766 - DNA, 120 bp, Artificial Sequence
  ENSG00000162735_14 (sequence is synthesized)
tgtttatcccaacctttttgagctcaagctgtgataaagaagggcccatcctatttcccctcatctagtccatttacgattctcactgactccccgtcttcctggcagacacaaataaac

SEQ ID NO: 489767 - DNA, 120 bp, Artificial Sequence
  ENSG00000162735_15 (sequence is synthesized)
gatacatgattctcttagaatcctgtcccttggttcaggaaagtagcttggaaaaggagtaggggtatagcttgggtcccttttcctgcaaggccccatggggcagaatataataaatat

SEQ ID NO: 489768 - DNA, 120 bp, Artificial Sequence
  ENSG00000162735_16 (sequence is synthesized)
tctgagtgaggagtgtggtctttttctgatcttcctcagcttccgtaagttgcagagtgaggtatattaggagactagttctacacaatattgtaatgctgggttccatcaacacccacc

SEQ ID NO: 489769 - DNA, 120 bp, Artificial Sequence
  ENSG00000162735_17 (sequence is synthesized)
ttccacaactcagtctgcacctcagttggcaaaggagactggatggccatctttcctcatgttcccttgagtatttcaatgtagaaagcccttcaagtggtattatattttaacctttta

SEQ ID NO: 489770 - DNA, 120 bp, Artificial Sequence
  ENSG00000162735_18 (sequence is synthesized)
cattattgttattaatgttagtaatatattgttatgttttctaaattatttttctttaagctgacgtggctttttttctgtggctcccagtgggtctacggaccttggctgacatatgtt

SEQ ID NO: 489771 - DNA, 120 bp, Artificial Sequence
  ENSG00000162735_19 (sequence is synthesized)
ggtaggtactctggtcagctcagctggctgtcctggttcactcagaagataagtctctccaaagcaaattcacatgcattatgagtcgctttgagcttctgacatgtcacttgccccgag

SEQ ID NO: 489772 - DNA, 120 bp, Artificial Sequence
  ENSG00000162735_20 (sequence is synthesized)
gttaaaacttttcaccccttgaagaccttacatgttttatggtattggtgaggaaggaaatgttctcaaggtctcaggctatttgggaaattccaactcctataccttaccagagcatgg

SEQ ID NO: 489773 - DNA, 120 bp, Artificial Sequence
  ENSG00000162735_21 (sequence is synthesized)
aagagcccagatctgaatgtaaaacgtctctgttctgccagagatggaaaaaatacaggtatacttgtgatatagtcatggggcttcagtgtcactattttctccttaaagctccagcca

SEQ ID NO: 489774 - DNA, 120 bp, Artificial Sequence
  ENSG00000162735_22 (sequence is synthesized)
aaaactggacaaggatagagaggaggagggaagaacaaaagagcccttctctatgaaccttgtgccttctgtcctaccagttttcttttacagattctcacttctgctagcctagccagg

SEQ ID NO: 489775 - DNA, 120 bp, Artificial Sequence
  ENSG00000162735_23 (sequence is synthesized)
gcttactccaggaatctaaatagatgccctagtccactttatctttgttcccaaggcactcatttttattttgattttgattgaatgtgagcaggttgacctcaggtcacactttgttcc

SEQ ID NO: 489776 - DNA, 120 bp, Artificial Sequence
  ENSG00000162735_24 (sequence is synthesized)
aaaaacttttggaattattccaggacttgtggtggagttatggtactctagggcagtctttctcaaactatgtatggtaaaggaccaggttttttgttttccagtccttcacttatcaat

SEQ ID NO: 489777 - DNA, 120 bp, Artificial Sequence
  ENSG00000162735_25 (sequence is synthesized)
atgcattcctattgcccatgacaggtatggagttcacactgtgtgctgccgacccggcaagtttgacagcacccaaactggccagactgttctgtaggttaagtccattgatcatgtact

SEQ ID NO: 489778 - DNA, 120 bp, Artificial Sequence
  ENSG00000162735_26 (sequence is synthesized)
tggatatcacagcaacattgaaatgctaaaaagtttttaaacactctcaatttctaattcaccatgtcacagactggtgaaaaaaaaaaaaaggtgttcactgaccagcacaagtctgca

SEQ ID NO: 489779 - DNA, 120 bp, Artificial Sequence
  ENSG00000162735_27 (sequence is synthesized)
gatcatctttgagtagcactgttttggggccctcggtctctctgaagaccctagcagaactgatacctacctgtatctcttgttctctcctatttgagtttcacttccagagaacttgtt

SEQ ID NO: 489780 - DNA, 120 bp, Artificial Sequence
  ENSG00000162735_28 (sequence is synthesized)
cttcagcaagaatgtgtcactagtaaggacatctctagcatttctctagccttccttttctgctgctcaaaaataatcgttacaaagcttaggtttaagctgtatatgaaatatttatgc

SEQ ID NO: 489781 - DNA, 120 bp, Artificial Sequence
  ENSG00000162735_29 (sequence is synthesized)
gactctcaaactttaaaggagttgctcctttgttccaaaattaaatgtgttagataaatttgtgattgtatgggtggcttcatgaattaagaattgaattaatacagactttttgataat

SEQ ID NO: 489782 - DNA, 120 bp, Artificial Sequence
  ENSG00000162735_30 (sequence is synthesized)
ggggcccacaaggggtccactcccagacatttctccagcagagtctcaaaagacagatgctttgagtatcatcccaagtctgttgctgtcttattgtttgttacaggcaagtttagatag

SEQ ID NO: 489783 - DNA, 120 bp, Artificial Sequence
  ENSG00000162735_31 (sequence is synthesized)
cagtgggtctacggaccttggctgacatatgttggtatggagttcacactgtgtgctgccgacccggcaagtttgacagcacccaaactggccagactgttctgtaggttaagtccattg

SEQ ID NO: 489784 - DNA, 120 bp, Artificial Sequence
  ENSG00000162735_32 (sequence is synthesized)
agagatcaggccaaagggagctctagaaggttgttggggagcactaaactggagaataagagaagatagtttaatgccgtaccatggagtctggtgctcttgatgatttcgataaagcca

SEQ ID NO: 489785 - DNA, 120 bp, Artificial Sequence
  ENSG00000162735_33 (sequence is synthesized)
cgcctcctacggcaagtcggaggtagcaagatggccgccgctgaggaaggctgtagtgtcggggccgaagcggacagggaattggaggagcttctggaaagatgccctcttcgcttccca

SEQ ID NO: 489786 - DNA, 120 bp, Artificial Sequence
  ENSG00000162735_34 (sequence is synthesized)
ccagaattctttaacctctcaggattccacctaaggtgaaaattgtggctactggggatggatcttcacgtctgtcctaaaaaatgagcaactatctgagtcccttcatctcttccccag

SEQ ID NO: 489787 - DNA, 120 bp, Artificial Sequence
  ENSG00000162736_0 (sequence is synthesized)
agcagagaggcaagatggctacggcagggggtggctctggggctgacccgggaagtcggggtctccttcgccttctgtctttctgcgtcctactagcaggtttgtgcaggggaaactcag

SEQ ID NO: 489788 - DNA, 120 bp, Artificial Sequence
  ENSG00000162736_1 (sequence is synthesized)
tggagaggaagatatatatccccttaaataaaacagctccctgtgttcgcctgctcaacgccactcatcagattggctgccagtcttcaattagtggagacacaggggttatccacgtag

SEQ ID NO: 489789 - DNA, 120 bp, Artificial Sequence
  ENSG00000162736_2 (sequence is synthesized)
tagagaaagaggaggacctacagtgggtattgactgatggccccaaccccccttacatggttctgctggagagcaagcattttaccagggatttaatggagaagctgaaagggagaacca

SEQ ID NO: 489790 - DNA, 120 bp, Artificial Sequence
  ENSG00000162736_3 (sequence is synthesized)
gccgaattgctggtcttgcagtgtccttgaccaagcccagtcctgcctcaggcttctctcctagtgtacagtgcccaaatgatgggtttggtgtttactccaattcctatgggccagagt

SEQ ID NO: 489791 - DNA, 120 bp, Artificial Sequence
  ENSG00000162736_4 (sequence is synthesized)
ttgctcactgcagagaaatacagtggaattcgctgggcaatggtttggcttatgaagactttagtttccccatctttcttcttgaagatgaaaatgaaaccaaagtcatcaagcagtgct

SEQ ID NO: 489792 - DNA, 120 bp, Artificial Sequence
  ENSG00000162736_5 (sequence is synthesized)
atcaagatcacaacctgagtcagaatggctcagcaccaaccttcccactatgtgccatgcagctcttttcacacatgcatgctgtcatcagcactgccacctgcatgcggcgcagctcca

SEQ ID NO: 489793 - DNA, 120 bp, Artificial Sequence
  ENSG00000162736_6 (sequence is synthesized)
tccaaagcaccttcagcatcaacccagaaatcgtctgtgaccccctgtctgattacaatgtgtggagcatgctaaagcctataaatacaactgggacattaaagcctgacgacagggttg

SEQ ID NO: 489794 - DNA, 120 bp, Artificial Sequence
  ENSG00000162736_7 (sequence is synthesized)
tggttgctgccacccggctggatagtcgttcctttttctggaatgtggccccaggggctgaaagcgcagtggcttcctttgtcacccagctggctgctgctgaagctttgcaaaaggcac

SEQ ID NO: 489795 - DNA, 120 bp, Artificial Sequence
  ENSG00000162736_8 (sequence is synthesized)
ctgatgtgaccaccctgccccgcaatgtcatgtttgtcttctttcaaggggaaacttttgactacattggcagctcgaggatggtctacgatatggagaagggcaagtttcccgtgcagt

SEQ ID NO: 489796 - DNA, 120 bp, Artificial Sequence
  ENSG00000162736_9 (sequence is synthesized)
tagagaatgttgactcatttgtggagctgggacaggtggccttaagaacttcattagagctttggatgcacacagatcctgtttctcagaaaaatgagtctgtacggaaccaggtggagg

SEQ ID NO: 489797 - DNA, 120 bp, Artificial Sequence
  ENSG00000162736_10 (sequence is synthesized)
atctcctggccacattggagaagagtggtgctggtgtccctgctgtcatcctcaggaggccaaatcagtcccagcctctcccaccatcttccctgcagcgatttcttcgagctcgaaaca

SEQ ID NO: 489798 - DNA, 120 bp, Artificial Sequence
  ENSG00000162736_11 (sequence is synthesized)
tacgacactgctgagaacattaatgtgagctatcccgaatggctgagccctgaagaggacctgaactttgtaacagacactgccaaggccctggcagatgtggccacggtgctgggacgt

SEQ ID NO: 489799 - DNA, 120 bp, Artificial Sequence
  ENSG00000162736_12 (sequence is synthesized)
gctctgtatgagcttgcaggaggaaccaacttcagcgacacagttcaggctgatccccaaacggttacccgcctgctctatgggttcctgattaaagccaacaactcatggttccagtct

SEQ ID NO: 489800 - DNA, 120 bp, Artificial Sequence
  ENSG00000162736_13 (sequence is synthesized)
atcctcaggcaggacctaaggtcctacttgggtgacgggcctcttcaacattacatcgctgtctccagccccaccaacaccacttatgttgtacagtatgccttggcaaatttgactggc

SEQ ID NO: 489801 - DNA, 120 bp, Artificial Sequence
  ENSG00000162736_14 (sequence is synthesized)
acagtggtcaacctcacccgagagcagtgccaggatccaagtaaagtcccaagtgaaaacaaggatctgtatgagtactcatgggtccagggccctttgcattctaatgagacggaccga

SEQ ID NO: 489802 - DNA, 120 bp, Artificial Sequence
  ENSG00000162736_15 (sequence is synthesized)
ctcccccggtgtgtgcgttctactgcacgattagccagggccttgtctcctgcctttgaactgagtcagtggagctctactgaatactctacatggactgagagccgctggaaagatatc

SEQ ID NO: 489803 - DNA, 120 bp, Artificial Sequence
  ENSG00000162736_16 (sequence is synthesized)
cgtgcccggatatttctcatcgccagcaaagagcttgagttgatcaccctgacagtgggcttcggcatcctcatcttctccctcatcgtcacctactgcatcaatgccaaagctgatgtc

SEQ ID NO: 489804 - DNA, 120 bp, Artificial Sequence
  ENSG00000162736_17 (sequence is synthesized)
cttttcattgctccccgggagccaggagctgtgtcatactgaggaggaccccagcttttcttgccagctcagcagttcacttcctagagcatctgtcccactgggacacaaccactaatt

SEQ ID NO: 489805 - DNA, 120 bp, Artificial Sequence
  ENSG00000162736_18 (sequence is synthesized)
tgtcactggaacctccctgggcctgtctcagattgggattaacataaaagagtggaactatccaaaagagacagggagaaataaataaattgcctcccttcctccgctcccctttcccat

SEQ ID NO: 489806 - DNA, 120 bp, Artificial Sequence
  ENSG00000162736_19 (sequence is synthesized)
caccccttccccatttcctcttccttctctactcatgccagattttgggattacaaatagaagcttcttgctcctgtttaactccctagttacccaccctaatttgcccttcaggaccct

SEQ ID NO: 489807 - DNA, 120 bp, Artificial Sequence
  ENSG00000162736_20 (sequence is synthesized)
tctactttttccttcctgccctgtacctctctctgctcctcacccccacccctgtacccagccaccttcctgactgggaaggacataaaaggtttaatgtcagggtcaaactacattgag

SEQ ID NO: 489808 - DNA, 120 bp, Artificial Sequence
  ENSG00000162736_21 (sequence is synthesized)
cccctgaggacaggggcatctctgggctgagcctactgtctccttcccactgtcctttctccaggccctcagatggcacattagggtgggcgtgctgcgggtgggtatcccacctccagc

SEQ ID NO: 489809 - DNA, 120 bp, Artificial Sequence
  ENSG00000162736_22 (sequence is synthesized)
ccacagtgctcagttgtactttttattaagctgtaatatctatttttgtttttgtctttttcctttattctttttgtaaatatatatataatgagtttcattaaaatagattatcccaca

SEQ ID NO: 489810 - DNA, 120 bp, Artificial Sequence
  ENSG00000162736_23 (sequence is synthesized)
ggttctgctggagagcaagcattttaccaggcagaatgtcaggctgtctgataccttcctgtgttccttcatggaattcctttcctattccagggatttaatggagaagctgaaagggag

SEQ ID NO: 489811 - DNA, 120 bp, Artificial Sequence
  ENSG00000162736_24 (sequence is synthesized)
tgggtgaaaatggaccatctgaagggtaaagggacagcagccagttagctcaattggttagagcatggcactgatagagggtagagggaacgagtgagaagaggatcaccctagccgtgt

SEQ ID NO: 489812 - DNA, 120 bp, Artificial Sequence
  ENSG00000162736_25 (sequence is synthesized)
caagatggctacggcagggggtggctctggggctgacccgggaagtcggggtctccttcgccttctgtctttctgcgtcctactagcaggcctcttcctggacttcgagcctgaccctct

SEQ ID NO: 489813 - DNA, 120 bp, Artificial Sequence
  ENSG00000162736_26 (sequence is synthesized)
cccactttgtccagatgtctcgtttttcccacaaccccagccacccaccccacagtcgaaaggaacaggtgtgaaagttagctttcttcctcgcgtttagactttttgagacgaaagcaa

SEQ ID NO: 489814 - DNA, 120 bp, Artificial Sequence
  ENSG00000162736_27 (sequence is synthesized)
ttcttctagacctagttagacccaggggattgggatggagaggtggagagatgcagtcctcagcaattgggtgttgaaaagcctgggtgaaaatggaccatctgaagggtaaagggacag

SEQ ID NO: 489815 - DNA, 120 bp, Artificial Sequence
  ENSG00000162736_28 (sequence is synthesized)
tgtatgtaggcagttacagataaccgtctgtcaagctaggcaagataattaataagaactaacatttagtaaatgctgcataccaagctttttacatgtgcatctcatacaaccccaacc

SEQ ID NO: 489816 - DNA, 120 bp, Artificial Sequence
  ENSG00000162736_29 (sequence is synthesized)
acaaccccacaaaataggtcttactgttattgtcactttataaatgatgaaactaaaacttaaagaagttgagtaactttcccaagatcatactggtaataagtgatgatgccaggatct

SEQ ID NO: 489817 - DNA, 120 bp, Artificial Sequence
  ENSG00000162736_30 (sequence is synthesized)
gttggccaaaggatgaacaccacagctgttgttgctgctgggaagaatcaggaactcagtgacattccattggttccctggactgggtagttctctgatcatttgttgcctagcagacta

SEQ ID NO: 489818 - DNA, 120 bp, Artificial Sequence
  ENSG00000162738_0 (sequence is synthesized)
ctgcgccgccggctcccgatctgattcctgatccttgattccttgatccttggtcccgccatgggagcctgagcgccccctattcccccctggcccccagcccccggggccttgaggggg

SEQ ID NO: 489819 - DNA, 120 bp, Artificial Sequence
  ENSG00000162738_1 (sequence is synthesized)
aagaggcagcggtctgggacggagcagggggtgaccagactcaagaacccccccctcaacatcccccatcgcgcgcgctgcctgtccaggagcgccgagttcggagcgacccggagcgct

SEQ ID NO: 489820 - DNA, 120 bp, Artificial Sequence
  ENSG00000162738_2 (sequence is synthesized)
gcggatacaaaggcgacgggccgagcggggcgcccgcggagcccacccggcagttcgcagcggcgggagcgtcgctggattttctctgagacaagcccacccgtccagcaaaatagagtc

SEQ ID NO: 489821 - DNA, 120 bp, Artificial Sequence
  ENSG00000162738_3 (sequence is synthesized)
cctcagggtgacagttgacttcctgaaggtgcctcttggcctaaagaagccggtgctgaaggaggtggctgtggggccccccaagaggccccagcctgcggccctggagcgctacaaggc

SEQ ID NO: 489822 - DNA, 120 bp, Artificial Sequence
  ENSG00000162738_4 (sequence is synthesized)
gcggcgttcagacgccatggacaccgagtcccagtactcgggctattcctacaagtcgggccactcccgcagctcccgcaagcacagggaccgccgggaccgacaccgctctaagagtcg

SEQ ID NO: 489823 - DNA, 120 bp, Artificial Sequence
  ENSG00000162738_5 (sequence is synthesized)
agatgggggccgaggggacaagtcggtgacaatccaggctcccggggagcccctgctggacaatgagtccacacgaggggatgagcgggatgacaactggggggaaacgacgacagtagt

SEQ ID NO: 489824 - DNA, 120 bp, Artificial Sequence
  ENSG00000162738_6 (sequence is synthesized)
aacgggcacctcagagcacagcatctcccatgatgacctcacacgcatcgccaaggacatggaggacagtgtccctctggactgctcccgtcacctgggtgtggcagcgggggccaccct

SEQ ID NO: 489825 - DNA, 120 bp, Artificial Sequence
  ENSG00000162738_7 (sequence is synthesized)
ggcactgctgtctttcctcacgcctctggccttcctgctgctgcccccactgctgtggcgggaggagctggagccttgcgggacggcctgcgagggcctcttcatctctgtcgccttcaa

SEQ ID NO: 489826 - DNA, 120 bp, Artificial Sequence
  ENSG00000162738_8 (sequence is synthesized)
gctgctcatcctgctactgggcagctgggctctgttcttccgccggcccaaggcctcgctgccccgcgtctttgtgctgcgtgccctgcttatggtgctggttttcctgctcgtggtctc

SEQ ID NO: 489827 - DNA, 120 bp, Artificial Sequence
  ENSG00000162738_9 (sequence is synthesized)
ctactggctcttctatggtgtgcgcatcctggatgctcgggagcgcagctaccagggcgtggtgcagttcgccgtgtcgctggtggacgcccttcttttcgtgcactacctggccgtggt

SEQ ID NO: 489828 - DNA, 120 bp, Artificial Sequence
  ENSG00000162738_10 (sequence is synthesized)
cctgctggagctgcgccagctccagcctcagttcacgctcaaggtcgtgcgctccaccgacggcgccagccgcttctacaacgttggccatctcagcatccagcgcgtggcagtgtggat

SEQ ID NO: 489829 - DNA, 120 bp, Artificial Sequence
  ENSG00000162738_11 (sequence is synthesized)
cctggagaagtattaccatgacttccctgtctacaaccctgccctcctcaacctgcccaagtccgtcctggccaagaaagtgtctggcttcaaggtgtattccctcggagaggaaaacag

SEQ ID NO: 489830 - DNA, 120 bp, Artificial Sequence
  ENSG00000162738_12 (sequence is synthesized)
caccaacaactccactggccagtctcgggctgtgattgcagcggcagctcggaggcgggacaacagtcacaatgagtactactatgaggaggctgagcatgagcgaagggtgcgcaagag

SEQ ID NO: 489831 - DNA, 120 bp, Artificial Sequence
  ENSG00000162738_13 (sequence is synthesized)
gagggccaggcttgtagtggcggtggaggaggccttcactcacattaagcggctgcaggaagaggagcagaaaaaccccagggaggtgatggacccccgggaggcagcccaagccatctt

SEQ ID NO: 489832 - DNA, 120 bp, Artificial Sequence
  ENSG00000162738_14 (sequence is synthesized)
tgcatccatggcccgtgccatgcagaagtaccttcggaccaccaagcagcagccctaccacaccatggagagcatcctgcagcaccttgaattctgcatcacgcatgacatgacgcccaa

SEQ ID NO: 489833 - DNA, 120 bp, Artificial Sequence
  ENSG00000162738_15 (sequence is synthesized)
ggccttcttggagcgatacttggcggctggacctaccatccagtaccacaaggaacgctggctggccaaacagtggacattggtgagcgaggagccggtgaccaacggcctcaaggatgg

SEQ ID NO: 489834 - DNA, 120 bp, Artificial Sequence
  ENSG00000162738_16 (sequence is synthesized)
catcgttttcctcttaaaacgccaggacttcagcctggtggtcagcaccaagaaggtcccattcttcaaactctccgaggaatttgtggatcccaagtcacacaagtttgtcatgaggct

SEQ ID NO: 489835 - DNA, 120 bp, Artificial Sequence
  ENSG00000162738_17 (sequence is synthesized)
gcagtctgagacctcagtgtgactgtgcaacagcagggggagtgggaaactctggggggtcctgagggggtgggagggggcttggttctcaggcccagccacattcctgccacccttctt

SEQ ID NO: 489836 - DNA, 120 bp, Artificial Sequence
  ENSG00000162738_18 (sequence is synthesized)
cttcttgctcttttttttttacttgaattaacgcacccccaccttctctcctcgcttcttccttattttaccccatgtgaacctggagagaccatcctgctgtcaacagtacctgggaag

SEQ ID NO: 489837 - DNA, 120 bp, Artificial Sequence
  ENSG00000162738_19 (sequence is synthesized)
gactcccacctcaccaacaacttttgtattactctaggccctgcaggaatcagtgcctctctccctcttctttccctagtcttttcccagattacagtctctcctgaaagggcacagggc

SEQ ID NO: 489838 - DNA, 120 bp, Artificial Sequence
  ENSG00000162738_20 (sequence is synthesized)
cctgctgattgtactttcccctcctgagccccgactcacaaatccaagttcttaaaacatttctcttcagtggcccaacagggtttctctggggcacatggacatgactccagagagcca

SEQ ID NO: 489839 - DNA, 120 bp, Artificial Sequence
  ENSG00000162738_21 (sequence is synthesized)
cagtgccaaactcctccagggcagcaactggccctcctgtccctcaccccagccacaacaaaccctgggttctagggcagggatactcctgccacacagcccgagttagaaatctccttg

SEQ ID NO: 489840 - DNA, 120 bp, Artificial Sequence
  ENSG00000162738_22 (sequence is synthesized)
gtttttggtttgtatggtcacgtgaccataggcaaccacgtggaaaccctctgtgaccacttttccagggacttaggggaaggtacctttcttccaatgtgtcttcctaggcagcccctg

SEQ ID NO: 489841 - DNA, 120 bp, Artificial Sequence
  ENSG00000162738_23 (sequence is synthesized)
aggaggagggctgaatagatccctgaggttttggagagacccccatcactgactcctgctccctaaccctaccctcactttcgtccccgctcttcccagtgaaggatggtatgtagactc

SEQ ID NO: 489842 - DNA, 120 bp, Artificial Sequence
  ENSG00000162738_24 (sequence is synthesized)
ctgtacagacatagtggcttgcagaccctgacccagcccctgtggtcttagacaaatgtttttatttttgtcaccagccacccctgtcctgccgccttctctcgactccagagacctgtt

SEQ ID NO: 489843 - DNA, 120 bp, Artificial Sequence
  ENSG00000162738_25 (sequence is synthesized)
gcctcatctcttttggggaagagccggcagctcctcctcatcccctgccttaagtccagttctttgcctcaggggtctcgtttccttggccttccagggtccccaccccttttctccctg

SEQ ID NO: 489844 - DNA, 120 bp, Artificial Sequence
  ENSG00000162738_26 (sequence is synthesized)
cctgattctctgagctctgggctccgtctgtattgggttgaggggcaaggattactgccttttgtaggtacttcacccctcaccccattttagcttccatagtctttgcaccaaatccaa

SEQ ID NO: 489845 - DNA, 120 bp, Artificial Sequence
  ENSG00000162738_27 (sequence is synthesized)
attcttgataatttagatctcattttgagcaaaatttgctggccctctaataaatattttcaatataaatctgagcctttgactcagacatttttgccaaggagagtagaattaggaagt

SEQ ID NO: 489846 - DNA, 120 bp, Artificial Sequence
  ENSG00000162738_28 (sequence is synthesized)
acccatatacatccagccaggatccacatggaggacctttctgatggctgcaatgactaggccattcctctgagtaactcacagtgtccttttgtaggcccttcttttccctgaaagact

SEQ ID NO: 489847 - DNA, 120 bp, Artificial Sequence
  ENSG00000162738_29 (sequence is synthesized)
ggttggtacttaccttgcagagcacatcctgggataagatccccagtgtctcccctgggaggctccccctctgtgtagcaccagccctgggaatgatggagcctagtgatcggggtttct

SEQ ID NO: 489848 - DNA, 120 bp, Artificial Sequence
  ENSG00000162738_30 (sequence is synthesized)
cctgctgtcctttctgcaaaagttcacttgtttacccaccgcatgctagagaggagctcattggccaatgcttaccttgtccccaaaggggtgggttgtggagctcacttaggcagggcc

SEQ ID NO: 489849 - DNA, 120 bp, Artificial Sequence
  ENSG00000162738_31 (sequence is synthesized)
tctggctggggccagggttatgagataggcctgtatgaaatatgtcctgttctgggggtctgtctcttttcttctcttcaaaaactttgtgtcagagagtcccttctgagtcacataaat

SEQ ID NO: 489850 - DNA, 120 bp, Artificial Sequence
  ENSG00000162738_32 (sequence is synthesized)
acctcactatcctggaaaacagggcctggatggtgactggggtcattgcctttgtggacaggatggagtgtggtgtggtctgaggagcaggttggggtgggggagagggaaaggatttgg

SEQ ID NO: 489851 - DNA, 120 bp, Artificial Sequence
  ENSG00000162738_33 (sequence is synthesized)
gatcttagttgctgccctaggttaggggctggggagtgtttattttaagatcctgccatgtttttaatcactgtgatttttttttcattcccctttcctaaaaaaaattttttgcctcca

SEQ ID NO: 489852 - DNA, 120 bp, Artificial Sequence
  ENSG00000162738_34 (sequence is synthesized)
tttttgcctccaactctctaagcactaagggctgtgcctgagaatggtagcattttggtcttttgcttcagaactgtggtatctttgtcttttttcattattattattattattattatt

SEQ ID NO: 489853 - DNA, 120 bp, Artificial Sequence
  ENSG00000162738_35 (sequence is synthesized)
gttttttaaaatgtcaggatgaattgtcagacatatggccatgtgtttgtcctctgcttctcccctgtgggaagttgtctccatgctgtgaactgctgtggggtgtgcagctgactcagt

SEQ ID NO: 489854 - DNA, 120 bp, Artificial Sequence
  ENSG00000162738_36 (sequence is synthesized)
ccctctgagcagtttccccactgtgtctgtcccatcatgcgctggatctgctcattctcctgctgtgggggtatgcccacctcttacccccttgacaccatagggctgctgtggctgggc

SEQ ID NO: 489855 - DNA, 120 bp, Artificial Sequence
  ENSG00000162738_37 (sequence is synthesized)
ctcaccagcactgtcttttgtgtgactcatggcatcctcgttcatccccaccgtgcctagcaggccttccttttcaccacctcggaacgcttgcctttcctccctccacaacaggacgct

SEQ ID NO: 489856 - DNA, 120 bp, Artificial Sequence
  ENSG00000162738_38 (sequence is synthesized)
gtgcctcagtccttcacctacctcgccactctgccactgtccccattggtcctttctcctaaactggtctttgtgctctctttgttttttcttatttccctcttgtctctcattttttct

SEQ ID NO: 489857 - DNA, 120 bp, Artificial Sequence
  ENSG00000162738_39 (sequence is synthesized)
tcccattcccctcccatttcagcccttaacttttctctttcccatctccactcagtattccaatggcaaaccctgatgatgtaacacctgcgatgagacatcggactctccggaactttc

SEQ ID NO: 489858 - DNA, 120 bp, Artificial Sequence
  ENSG00000162738_40 (sequence is synthesized)
tcatctgacacgtctttttcccagggttcgtacttctcctccattggtcccaggctaactcccctgttcctctgtggtgtctgtcagtccgtctgtcttctctttcctctgcccttccca

SEQ ID NO: 489859 - DNA, 120 bp, Artificial Sequence
  ENSG00000162738_41 (sequence is synthesized)
cagggcagtatctgctgatggattcagtcctggtgtgtgattgttgtgatttgttcttccgtgcgcaaaaggaagagggctttttgagtcccttccaagtgagattgtaaatgtagaatt

SEQ ID NO: 489860 - DNA, 120 bp, Artificial Sequence
  ENSG00000162738_42 (sequence is synthesized)
ttccactgttggatctagattttttttccttttttttgggggggtggggttacagagctgagaccttgtgcatgcatgtagaaaattgtaaaatgtaaattttttttaatatataaaaag

SEQ ID NO: 489861 - DNA, 120 bp, Artificial Sequence
  ENSG00000162738_43 (sequence is synthesized)
cttgtttctacagtttgcagtggatctaaacattacggcaattttaggatttttttcttaaacataggaactaaaactgtacaaattttttttatataaaataaagacatttgacttttg

SEQ ID NO: 489862 - DNA, 120 bp, Artificial Sequence
  ENSG00000162738_44 (sequence is synthesized)
cgtgcactacctggccgtggtcctgctggagctgcgccagctccagcctcagttcacgctcaaggtcgtgcgctccaccgacggcgccagccgcttctacaacgttggccatctcagaaa

SEQ ID NO: 489863 - DNA, 120 bp, Artificial Sequence
  ENSG00000162739_0 (sequence is synthesized)
agtttatgacagaagggcaaaaacattgactgcctcaaggtctcaagcaccagtcttcaccgcggaaagcatgttgtggctgttccaatcgctcctgtttgtcttctgctttggcccagg

SEQ ID NO: 489864 - DNA, 120 bp, Artificial Sequence
  ENSG00000162739_1 (sequence is synthesized)
gaatgtagtttcacaaagcagcttaaccccattgatggtgaacgggattctgggggagtcagtaactcttcccctggagtttcctgcaggagagaaggtcaacttcatcacttggctttt

SEQ ID NO: 489865 - DNA, 120 bp, Artificial Sequence
  ENSG00000162739_2 (sequence is synthesized)
caatgaaacatctcttgccttcatagtaccccatgaaaccaaaagtccagaaatccacgtgactaatccgaaacagggaaagcgactgaacttcacccagtcctactccctgcaactcag

SEQ ID NO: 489866 - DNA, 120 bp, Artificial Sequence
  ENSG00000162739_3 (sequence is synthesized)
caacctgaagatggaagacacaggctcttacagagcccagatatccacaaagacctctgcaaagctgtccagttacactctgaggatattaagacaactgaggaacatacaagttaccaa

SEQ ID NO: 489867 - DNA, 120 bp, Artificial Sequence
  ENSG00000162739_4 (sequence is synthesized)
tcacagtcagctatttcagaatatgacctgtgagctccatctgacttgctctgtggaggatgcagatgacaatgtctcattcagatgggaggccttgggaaacacactttcaagtcagcc

SEQ ID NO: 489868 - DNA, 120 bp, Artificial Sequence
  ENSG00000162739_5 (sequence is synthesized)
aaacctcactgtctcctgggaccccaggatttccagtgaacaggactacacctgcatagcagagaatgctgtcagtaatttatccttctctgtctctgcccagaagctttgcgaagatgt

SEQ ID NO: 489869 - DNA, 120 bp, Artificial Sequence
  ENSG00000162739_6 (sequence is synthesized)
taaaattcaatatacagataccaaaatgattctgtttatggtttctgggatatgcatagtcttcggtttcatcatactgctgttacttgttttgaggaaaagaagagattccctatcttt

SEQ ID NO: 489870 - DNA, 120 bp, Artificial Sequence
  ENSG00000162739_7 (sequence is synthesized)
gtctactcagcgaacacagggccccgagtccgcaaggaacctagagtatgtttcagtgtctccaacgaacaacactgtgtatgcttcagtcactcattcaaacagggaaacagaaatctg

SEQ ID NO: 489871 - DNA, 120 bp, Artificial Sequence
  ENSG00000162739_8 (sequence is synthesized)
gacacctagagaaaatgatactatcacaatttactccacaattaatcattccaaagagagtaaacccactttttccagggcaactgcccttgacaatgtcgtgtaagttgctgaaaggcc

SEQ ID NO: 489872 - DNA, 120 bp, Artificial Sequence
  ENSG00000162739_9 (sequence is synthesized)
tcagaggaattcgggaatgacacgtcttctgatcccatgagacagaacaaagaacaggaagcttggttcctgttgttcctggcaacagaatttgaatatctaggataggatgatcacctc

SEQ ID NO: 489873 - DNA, 120 bp, Artificial Sequence
  ENSG00000162739_10 (sequence is synthesized)
cagtccttcggacttaaacctgcctacctgagtcaaacacctaaggataacatcatttccagcatgtggttcaaataatattttccaatccacttcaggccaaaacatgctaaagataac

SEQ ID NO: 489874 - DNA, 120 bp, Artificial Sequence
  ENSG00000162739_11 (sequence is synthesized)
agcaggattgacttattgagaaataatgcagtgtgttggttacatgtgtagtctctggagttggatgggcccatcctgatacaagttgagcatcccttgtctgaaatgcttgggattaga

SEQ ID NO: 489875 - DNA, 120 bp, Artificial Sequence
  ENSG00000162739_12 (sequence is synthesized)
aatgtttcagatttcaattttttttcagattttggaatatttgcattatatttagcggttgagtatccaaatccaaaaatccaaaattcaaaatgctccaataagcatttcccttgagtt

SEQ ID NO: 489876 - DNA, 120 bp, Artificial Sequence
  ENSG00000162739_13 (sequence is synthesized)
tcattgatgtcgatgcagtgctcaaaatctcagattttggagcattttggatattggatttttggatttgggatgctcaacttgtacaatgtttattagacacatctcctgggacatact

SEQ ID NO: 489877 - DNA, 120 bp, Artificial Sequence
  ENSG00000162739_14 (sequence is synthesized)
gcctaaccttttggagccttagtctcccagactgaaaaaggaagaggatggtattacatcagctccattgtttgagccaagaatctaagtcatccctgactccagtgtctttgtcaccag

SEQ ID NO: 489878 - DNA, 120 bp, Artificial Sequence
  ENSG00000162739_15 (sequence is synthesized)
gccctttggactctacctcagaaatatttcttggaccttccacttctcctccaactccttgaccaccatcctgtatccaaccatcaccacctctaacctgaatcctaccttaagatcaga

SEQ ID NO: 489879 - DNA, 120 bp, Artificial Sequence
  ENSG00000162739_16 (sequence is synthesized)
acagttgtcctcacttttgttcttgtccctctccaacccactctccacaagatggccagagtaatgtttttaatataaattggatccttcagtttcctgcttaaaaccctgcaggtttcc

SEQ ID NO: 489880 - DNA, 120 bp, Artificial Sequence
  ENSG00000162739_17 (sequence is synthesized)
caatgcactcagaaagaaatccagtttccatggccctggatggtctggcccacctccagcctcagctagcattacccttctgacactctctatgtagcctccctgatcttctttcagctc

SEQ ID NO: 489881 - DNA, 120 bp, Artificial Sequence
  ENSG00000162739_18 (sequence is synthesized)
ctctattaaaggaaaagttctttatgttaattatttacatcttcctgcaggcccttcctctgcctgctggggtcctcctattctttaggtttaattttaaatatgtcacctcctaagaga

SEQ ID NO: 489882 - DNA, 86 bp, Artificial Sequence
  ENSG00000162739_19 (sequence is synthesized)
ttctttaggtttaattttaaatatgtcacctcctaagagaaaccttcccagaccactctttctaaaatgaatcttctgtactttgg

SEQ ID NO: 489883 - DNA, 120 bp, Artificial Sequence
  ENSG00000162739_20 (sequence is synthesized)
aaacattgactgcctcaaggtctcaagcaccagtcttcaccgcggaaagcatgttgtggctgttccaatcgctcctgtttgtcttctgctttggcccaggacaactgaggaacatacaag

SEQ ID NO: 489884 - DNA, 120 bp, Artificial Sequence
  ENSG00000162745_0 (sequence is synthesized)
cgccaccgcctcttccctccccgtgtccggtccccgtgcgtcccgaggctccccgccgcccgtcccggcgcgcaccgcgggcgtctgtccgaacgccttccagccacctgagccctcctg

SEQ ID NO: 489885 - DNA, 120 bp, Artificial Sequence
  ENSG00000162745_1 (sequence is synthesized)
ccctcctgcgggcgactcgctcagctagcccgtgcccgcctccaccttctccgtcatcccctcttccttgcgtccggctctccactggggctgcacagtcgagggctgctcgcgtcggga

SEQ ID NO: 489886 - DNA, 120 bp, Artificial Sequence
  ENSG00000162745_2 (sequence is synthesized)
aggagatgcccagagtctctggggcgcaccctcccgtcccgctcagccgcacccagctttagaaggtgctctcagcagccactttcgggctctagcgaggacaccctctcgcagaagtcc

SEQ ID NO: 489887 - DNA, 120 bp, Artificial Sequence
  ENSG00000162745_3 (sequence is synthesized)
ttgccgagaccccccgccccagccattctctgaaggggctgaggacactcttatcgcgcccctcatggccaagcctcggctgctagttctctacttcgctctgattgtggttccggcctg

SEQ ID NO: 489888 - DNA, 120 bp, Artificial Sequence
  ENSG00000162745_4 (sequence is synthesized)
ggtgtccagcattgtcctcacagggacaagcgagcccccagatgcgcagacagtggcgcctgcggaggacgagactctgcaaaacgaggcggacaaccaggagaacgttttatctcagtt

SEQ ID NO: 489889 - DNA, 120 bp, Artificial Sequence
  ENSG00000162745_5 (sequence is synthesized)
gctgggggactatgacaaggtcaaggctatgtctgagggctcggactgtcagtgcaagtgtgtggtgagacccctgggccgggatgcctgccagaggatcaatgcgggggcctccaggaa

SEQ ID NO: 489890 - DNA, 120 bp, Artificial Sequence
  ENSG00000162745_6 (sequence is synthesized)
ggaagacttctataccgtggaaaccatcacctcaggctcgtcgtgcaagtgtgcctgtgtagcacccccatcggccctcaatccctgcgagggagacttcaggctccagaagctgcggga

SEQ ID NO: 489891 - DNA, 120 bp, Artificial Sequence
  ENSG00000162745_7 (sequence is synthesized)
ggcagacagccaggacttgaagctctccacaatcatagacatgttggaaggagcgttctatggcctggatctcctgaagctacattcagtcaccaccaaactggtggggcgagtggataa

SEQ ID NO: 489892 - DNA, 120 bp, Artificial Sequence
  ENSG00000162745_8 (sequence is synthesized)
actggaggaggaagtgtctaaaaacctcaccaaggaaaatgaacaaatcaaagaggacatggaagaaattcgaaccgagatgaataagcgaggcaaagaaaattgctctgaaaacatcct

SEQ ID NO: 489893 - DNA, 120 bp, Artificial Sequence
  ENSG00000162745_9 (sequence is synthesized)
agatagcatgccagacatccgctcagccctgcagagggatgcagcagcagcctacgcccacccagagtatgaagagcggtttctgcaggaagaaaccgtgtcccagcagatcaactccat

SEQ ID NO: 489894 - DNA, 120 bp, Artificial Sequence
  ENSG00000162745_10 (sequence is synthesized)
cgaacttctgcagacgcgacccctggctctgcctgaggtggtgaagtcacagcggcccctgcagaggcaggtccacctgagaggccggccggcctcccagcccactgtcatccggggcat

SEQ ID NO: 489895 - DNA, 120 bp, Artificial Sequence
  ENSG00000162745_11 (sequence is synthesized)
cacctactataaagccaaggtctctgaagaagagaatgacattgaagagcagcaagatgagtttttcagcggtgacaatggagtggatttgctgattgaagatcagctcctgagacacaa

SEQ ID NO: 489896 - DNA, 120 bp, Artificial Sequence
  ENSG00000162745_12 (sequence is synthesized)
cggcctgatgaccagtgtcacccggaggcctgcagccacccgtcagggacacagcactgctgtgacaagcgacctgaacgctcggaccgcaccctggtcctcagcactgccacagccctc

SEQ ID NO: 489897 - DNA, 120 bp, Artificial Sequence
  ENSG00000162745_13 (sequence is synthesized)
ccaacactccaaacaacctcggtgtctccagatcccacaagggagtcagtcctgcagccttctcctcaggtaccagccaccactgtggcccacacagccacccagcaaccagcagcccca

SEQ ID NO: 489898 - DNA, 120 bp, Artificial Sequence
  ENSG00000162745_14 (sequence is synthesized)
gctcctccggcagtgtctcccagggaggcattgatggaagctatgcacacagtcccagtgcctcccaccacagtcagaacagactcgctggggaaagatgctcctgctgggtggggaaca

SEQ ID NO: 489899 - DNA, 120 bp, Artificial Sequence
  ENSG00000162745_15 (sequence is synthesized)
acccctgccagccccacgctgagccccgaagaagaagatgacatccggaatgtcataggaaggtgcaaggacactctctccacaatcacggggccgaccacccagaacacatatgggcgg

SEQ ID NO: 489900 - DNA, 120 bp, Artificial Sequence
  ENSG00000162745_16 (sequence is synthesized)
aatgaaggggcctggatgaaggaccccctggccaaggatgagcggatttacgtaaccaactattactacggcaacaccctggtagagttccggaacctggagaacttcaaacaaggtcgc

SEQ ID NO: 489901 - DNA, 120 bp, Artificial Sequence
  ENSG00000162745_17 (sequence is synthesized)
tggagcaattcctacaagctcccgtacagctggatcggcacaggccacgtggtatacaatggcgccttctactacaatcgcgccttcacccgcaacatcatcaagtacgacctgaagcag

SEQ ID NO: 489902 - DNA, 120 bp, Artificial Sequence
  ENSG00000162745_18 (sequence is synthesized)
cgctacgtggctgcctgggccatgctgcatgacgtggcctacgaggaggccaccccctggcgatggcagggccactcagacgtggactttgctgtggacgagaatggcctatggctcatc

SEQ ID NO: 489903 - DNA, 120 bp, Artificial Sequence
  ENSG00000162745_19 (sequence is synthesized)
tacccggccctggacgatgagggcttcagccaggaggtcattgtcctgagcaagctcaatgccgcggacctgagcacacagaaggagaccacatggcgcacggggctccggaggaatttc

SEQ ID NO: 489904 - DNA, 120 bp, Artificial Sequence
  ENSG00000162745_20 (sequence is synthesized)
tacggcaactgcttcgtcatctgtggggtgctgtatgccgtggatagctacaaccagcggaatgccaacatctcctacgctttcgacacccacaccaacacacagatcgtccccaggctg

SEQ ID NO: 489905 - DNA, 120 bp, Artificial Sequence
  ENSG00000162745_21 (sequence is synthesized)
ctgttcgagaatgagtattcctatacgacccagatagactacaaccccaaggaccgcctgctctatgcctgggacaatggccaccaggtcacttaccatgtcatctttgcctactgacac

SEQ ID NO: 489906 - DNA, 120 bp, Artificial Sequence
  ENSG00000162745_22 (sequence is synthesized)
ccttgtccccacaagcagaagcacagaggggtcactagcaccttgtgtgtatgtgtgtgcgcgcacgtgtgtgtaggtgggtatgtgttgtttaaaaatatatattattttgtataatat

SEQ ID NO: 489907 - DNA, 120 bp, Artificial Sequence
  ENSG00000162745_23 (sequence is synthesized)
tgcaaatgtaaaatgacaatttgggtctatttttttatatggattgtagatcaatccatacgtgtatgtgctggtctcatcctccccagtttatatttttgtgcaaatgaacttctcctt

SEQ ID NO: 489908 - DNA, 120 bp, Artificial Sequence
  ENSG00000162745_24 (sequence is synthesized)
ttgaccagtaaccaccttccttcaagccttcagcccctccagctccaagtctcagatctcgaccattgaaaaggtttcttcatctgggtcttgcaggaggcaggcaacaccaggagcaga

SEQ ID NO: 489909 - DNA, 120 bp, Artificial Sequence
  ENSG00000162745_25 (sequence is synthesized)
aatgaaagaggcaagaaagaagtgctatgtggcgagaaaaaaagttttaatgtattggagaagttttaaaaaacccagaaaaacgctttttttttttaataaagaagaaatttaaaatca

SEQ ID NO: 489910 - DNA, 120 bp, Artificial Sequence
  ENSG00000162745_26 (sequence is synthesized)
agaacaggagcaaagcatagtggtgtgaaagttgccaaagatgggcatggtggaggctcaagtgtagggtcaagtgtagggtggatcaggggagtagcaggagatggtgtggaaaaatgt

SEQ ID NO: 489911 - DNA, 120 bp, Artificial Sequence
  ENSG00000162745_27 (sequence is synthesized)
ttggggtcaggttatacagggctgttaaagcctgccgaggagtccagactctaaatggatgaacagcaaaggtttaaggggtgaggcatcactagatcagcccaaaacctccatccacct

SEQ ID NO: 489912 - DNA, 120 bp, Artificial Sequence
  ENSG00000162746_0 (sequence is synthesized)
aagatactatcttcctgggagttgacagtacctgataattgatctccttcccatcagatttccaagggatcaaggtgccccggttctaaacaaccacaggtacggtcacatggctcagaa

SEQ ID NO: 489913 - DNA, 120 bp, Artificial Sequence
  ENSG00000162746_1 (sequence is synthesized)
agcacaagaagtagagccccgaggtcagatctgagaggcttctgaggggccgatgcagtgacttctctgctgcagctgctgcagtcagatccatcatgtggccactgacagcccttctgc

SEQ ID NO: 489914 - DNA, 120 bp, Artificial Sequence
  ENSG00000162746_2 (sequence is synthesized)
tcctggttccaagcagtgggcaagctgctactctggagaagcccatattgtctctacatccaccttggaccaccatcttcaaaggggagcgggtaactttgaagtgtgatggataccacc

SEQ ID NO: 489915 - DNA, 120 bp, Artificial Sequence
  ENSG00000162746_3 (sequence is synthesized)
cactgctcctggagctccagcccatcagcactctctggtatttgggccacctacttctgccctctcacaagaagagcattgaggtgcagacaccaggggtgtatcgatgccagacacggg

SEQ ID NO: 489916 - DNA, 120 bp, Artificial Sequence
  ENSG00000162746_4 (sequence is synthesized)
gagcacccgtcagtgaccccatccacctctctgtatccaatgattggctgattctgcaagtgccctatgcgccagtgttcgagggtgagccgctagtcctgcgctgccgcggctggtacg

SEQ ID NO: 489917 - DNA, 120 bp, Artificial Sequence
  ENSG00000162746_5 (sequence is synthesized)
acaaggtggtctacaagcttcactactaccacgacggccaggccgtgcgctacttccactccagcgccaactacactgtgttacaggcgcgtgccagcgacagcgggcgctaccagtgct

SEQ ID NO: 489918 - DNA, 120 bp, Artificial Sequence
  ENSG00000162746_6 (sequence is synthesized)
cgggcaccatgcgcatcccggtggagagcgcgcccatgttctccgctaaggtggctgtgacagtgcaagagctgttccgggcgccggtgctgagggtgatgggtccgcgggaggcccgcg

SEQ ID NO: 489919 - DNA, 120 bp, Artificial Sequence
  ENSG00000162746_7 (sequence is synthesized)
gcgcggcgctgggtggggtggtgctgcgctgcgacacgcgcctgcacccgcagaagcgcgacacgccgctgcagttcgcgttttacaagtacagccgcgcggtgcgccgcttcgactggg

SEQ ID NO: 489920 - DNA, 120 bp, Artificial Sequence
  ENSG00000162746_8 (sequence is synthesized)
aggcggctaccgccacccgcagtgtccggaaacgcagtccgtggctgcagctcccggggccgggttctcccctggacccggcctccaccaccgccccagctccatgggccgcagccttgg

SEQ ID NO: 489921 - DNA, 120 bp, Artificial Sequence
  ENSG00000162746_9 (sequence is synthesized)
ctcctggtaataggccgctttccttcagaaagcccccggtgtccagatcggtcccgttggtcacctccgtccggaacaccacctccaccgggctgcagttcccggcgagcggcgccccga

SEQ ID NO: 489922 - DNA, 120 bp, Artificial Sequence
  ENSG00000162746_10 (sequence is synthesized)
ctgcggggccacccgcctgcgctccgccgacgcccttggaacaatcggctggagccctgaaacccgacgtggaccttctgctccgagaaatgcagctgctcaaaggccttctgagccggg

SEQ ID NO: 489923 - DNA, 120 bp, Artificial Sequence
  ENSG00000162746_11 (sequence is synthesized)
tggtcctggaattaaaggagccacaggccctccgggagctcaggggaacgcccgagacccccacctctcactttgctgtgagcccgggaaccccagagaccactcctgtggagagctgag

SEQ ID NO: 489924 - DNA, 120 bp, Artificial Sequence
  ENSG00000162746_12 (sequence is synthesized)
ggggcggctaccgtcccctctgcaggctcattcctccttggtctcctgcttcccctcacgcgaatttctttcaaagccatctgtttgcatccttgtgttttgctgtggtttttaaaggag

SEQ ID NO: 489925 - DNA, 120 bp, Artificial Sequence
  ENSG00000162746_13 (sequence is synthesized)
cgcccacgaagtgtagtggctgacgatttcaacctcacacagcagtttgtaaccgcaagcattctctttgaattctcacagaattcagcaagaagtagaaacctgttatttactacattg

SEQ ID NO: 489926 - DNA, 120 bp, Artificial Sequence
  ENSG00000162746_14 (sequence is synthesized)
tgatttaactttggatgtgaatttagtcacccttagcccttcagataagcctagccagtacatatttcagcacaggcagtttttttggtatttaagtacattgaggtaactgagcacttg

SEQ ID NO: 489927 - DNA, 120 bp, Artificial Sequence
  ENSG00000162746_15 (sequence is synthesized)
agaatattttagggtcaaagtgtaattattcataatgaatttactctgttgatattaaaaagacgttcagtcctattactgatgagtttacatcttcaaataaatcctgggttctattta

SEQ ID NO: 489928 - DNA, 120 bp, Artificial Sequence
  ENSG00000162746_16 (sequence is synthesized)
gggacaggagctcggcgagaaaagaaggggcggaagttcaaatagctgccacttggagggtttctcttagactatggacgctgtctcctctcctttgccgtgaagcagcgcttgatccgc

SEQ ID NO: 489929 - DNA, 120 bp, Artificial Sequence
  ENSG00000162746_17 (sequence is synthesized)
cgcctgcttggaggctggtccctttccccgacgcacatcctggcttctcactctggctggggactcccacagagagggcagctctggcaggggcaggggccactgtgggactgggacgaa

SEQ ID NO: 489930 - DNA, 120 bp, Artificial Sequence
  ENSG00000162746_18 (sequence is synthesized)
ggagcgactccctagcgtcctgcaaggcaggcgcagcgtctcctattctaggctgcagaacccgagctgagtgtcagtcgggatgtgacatgaagcgtctggcctggtccctcttccttt

SEQ ID NO: 489931 - DNA, 120 bp, Artificial Sequence
  ENSG00000162746_19 (sequence is synthesized)
caagctttccccgtccctcgtggactcggtccccctgccccacatttcagaaggctccccttccccctccacgtggacacacggcctcctcccctccccccttggtctgtgggtctgcaa

SEQ ID NO: 489932 - DNA, 120 bp, Artificial Sequence
  ENSG00000162746_20 (sequence is synthesized)
ggagccctcgcgggaagcaggaaggagcggggtcgcggagcggtggacaagccggcgccgttgctccccgccctctccgtagagctgttccgggcgccggtgctgagggtgatgggtccg

SEQ ID NO: 489933 - DNA, 120 bp, Artificial Sequence
  ENSG00000162747_0 (sequence is synthesized)
aggctgacagaccagcccagatccagtggcccggaggggcctgagctaaatccgcaggacctgggtaacacgaggaagggctccggatatctttggtgacttgtccactccagtgtggca

SEQ ID NO: 489934 - DNA, 120 bp, Artificial Sequence
  ENSG00000162747_1 (sequence is synthesized)
tcatgtggcagctgctcctcccaactgctctgctacttctagtttcagctggcatgcggactgaagatctcccaaaggctgtggtgttcctggagcctcaatggtacagcgtgcttgaga

SEQ ID NO: 489935 - DNA, 120 bp, Artificial Sequence
  ENSG00000162747_2 (sequence is synthesized)
aggacagtgtgactctgaagtgccagggagcctactcccctgaggacaattccacacagtggtttcacaatgagaacctcatctcaagccaggcctcgagctacttcattgacgctgcca

SEQ ID NO: 489936 - DNA, 120 bp, Artificial Sequence
  ENSG00000162747_3 (sequence is synthesized)
cagtcaacgacagtggagagtacaggtgccagacaaacctctccaccctcagtgacccggtgcagctagaagtccatatcggctggctgttgctccaggcccctcggtgggtgttcaagg

SEQ ID NO: 489937 - DNA, 120 bp, Artificial Sequence
  ENSG00000162747_4 (sequence is synthesized)
aggaagaccctattcacctgaggtgtcacagctggaagaacactgctctgcataaggtcacatatttacagaatggcaaagacaggaagtattttcatcataattctgacttccacattc

SEQ ID NO: 489938 - DNA, 120 bp, Artificial Sequence
  ENSG00000162747_5 (sequence is synthesized)
caaaagccacactcaaagatagcggctcctacttctgcagggggcttgttgggagtaaaaatgtgtcttcagagactgtgaacatcaccatcactcaaggtttggcagtgtcaaccatct

SEQ ID NO: 489939 - DNA, 120 bp, Artificial Sequence
  ENSG00000162747_6 (sequence is synthesized)
catcattctctccacctgggtaccaagtctctttctgcttggtgatggtactcctttttgcagtggacacaggactatatttctctgtgaagacaaacatttgaagctcaacaagagact

SEQ ID NO: 489940 - DNA, 120 bp, Artificial Sequence
  ENSG00000162747_7 (sequence is synthesized)
ggaaggaccataaacttaaatggagaaaggaccctcaagacacatgacccccatcccatgggggtaataagagcagtggcagcagcatctctgaacatttctctggatttgcaaccccat

SEQ ID NO: 489941 - DNA, 120 bp, Artificial Sequence
  ENSG00000162747_8 (sequence is synthesized)
catgatcttcaagcagggaagccccagtgagtagctgcattcctagaaattgaagtttcagagctacacaaacactttttctgtcccaaccattccctcacagcaaagcaacaatacagg

SEQ ID NO: 489942 - DNA, 120 bp, Artificial Sequence
  ENSG00000162747_9 (sequence is synthesized)
ctagggatggtaatcctttaaacatacaaaaattgctcgtattataaattacccagtttagagggaaaaaaagaaaataattattcctaaacaaatggataagtagaattaatggttgag

SEQ ID NO: 489943 - DNA, 120 bp, Artificial Sequence
  ENSG00000162747_10 (sequence is synthesized)
gcaggaccctacagagtgtgggaactgctggggatctagagaattcagtgggaccaatgaaagcatggctgagaaatagcagggtagtccaggatagtctaagggaggtgttcccatctg

SEQ ID NO: 489944 - DNA, 120 bp, Artificial Sequence
  ENSG00000162747_11 (sequence is synthesized)
agcccagagataagggtgtcttcctagaacattagccgtagtggaattaacaggaaatcatgagggtgacgtagaattgagtcttccaggggactctatcagaactggaccatttccaag

SEQ ID NO: 489945 - DNA, 120 bp, Artificial Sequence
  ENSG00000162747_12 (sequence is synthesized)
tatataacgatgagtcctctaatgctaggagtagaaaatggtcctaggaaggggactgaggattggggtgggggtggggtggaaaagaaagtacagaacaaaccctgtgtcactgtctca

SEQ ID NO: 489946 - DNA, 120 bp, Artificial Sequence
  ENSG00000162747_13 (sequence is synthesized)
agttaagctaagtgaacagaactatctcagcatcagaatgagaaagcctgagaagaaagaaccaaccagaagcacacaggaaggaaagcgcaggaggtgaaaatgctttcttggccgggg

SEQ ID NO: 489947 - DNA, 120 bp, Artificial Sequence
  ENSG00000162747_14 (sequence is synthesized)
tagtaagaattagaggttaatgcagggactgtaaaaccaccttttctgcttcaatgtctagttcctgtatagctttgttcattgcatttattaaacaaatgttgtataaccaatactaaa

SEQ ID NO: 489948 - DNA, 120 bp, Artificial Sequence
  ENSG00000162747_15 (sequence is synthesized)
tgtactactgagcttcactgagttacgctgtgaaactttcaaatccttcttcatgtcagttccaatgaggtggggatggagaagacaattgttgcttatgaaagaaagctttagctgtct

SEQ ID NO: 489949 - DNA, 120 bp, Artificial Sequence
  ENSG00000162747_16 (sequence is synthesized)
ctgttttgtaagctttcagtgcaacatttcttggttccaataaagcattttacaagatcttgcatgctactcttagatagaagatggcaaaaccatggtaataaaatatgaatgataaaa

SEQ ID NO: 489950 - DNA, 120 bp, Artificial Sequence
  ENSG00000162747_17 (sequence is synthesized)
aggatctccctggttgagggagaagtttgagatgccttgggttcatcagacaccccttttcaggctacgaatgagactcccacaaagggatgggacccctcaccacatctatagctgtgg

SEQ ID NO: 489951 - DNA, 120 bp, Artificial Sequence
  ENSG00000162747_18 (sequence is synthesized)
attgagctaccaggacaagccaagatggggctagaaatgaggagaatgctggttccaattgggtcatagtcatgagtgaggccagtcacttcacccctctgggtcccagaatcactatgt

SEQ ID NO: 489952 - DNA, 120 bp, Artificial Sequence
  ENSG00000162747_19 (sequence is synthesized)
ctttggtgacttgtccactccagtgtggcatcatgtggcagctgctcctcccaactgctctgctacttctagtttcagctggcatgcggactggtgagtcagcttcatggtcttggattg

SEQ ID NO: 489953 - DNA, 120 bp, Artificial Sequence
  ENSG00000162747_20 (sequence is synthesized)
acccagtggggcacatatggggacaatggccataagatattgggaaatgcttgttgaatgggaaaatgctgatgtggggttagcagggatagttcctccaacacagcagaacttggccct

SEQ ID NO: 489954 - DNA, 120 bp, Artificial Sequence
  ENSG00000162747_21 (sequence is synthesized)
aatgagctcattctggctttgaggctccctgggaatggcagtgtagagcctgctcctctccctgtcctcaccccacattatcttggctcctcagaagatctcccaaaggctgtggtgttc

SEQ ID NO: 489955 - DNA, 120 bp, Artificial Sequence
  ENSG00000162753_0 (sequence is synthesized)
agttggtagtactgtccctggcaaacagacgcataactgtgcattgttctttgggattttgagagccttcatctcaatttcaactttaaagcagcttaatctttaaggaacatatctctg

SEQ ID NO: 489956 - DNA, 120 bp, Artificial Sequence
  ENSG00000162753_1 (sequence is synthesized)
atctgggtaatttgtagaacttaatttgagggtcattacatgtgaggatagcaggagttgaagatgccaaggacctgaagggctactggagggacaggtgaagtgatttgaagatgtagc

SEQ ID NO: 489957 - DNA, 120 bp, Artificial Sequence
  ENSG00000162753_2 (sequence is synthesized)
attttgaatctctttctggcccatcctctgcttcacaccagaatcattgtgacctgtagacctgcaaaacaaaggaccaaaggttagcatgcagaagtgaaagtgtcaataataaccaaa

SEQ ID NO: 489958 - DNA, 120 bp, Artificial Sequence
  ENSG00000162753_3 (sequence is synthesized)
ccactccatcaagttaggtctggggaaaagcagcagcaaaaatgagttcttacttctgggcacaaaatgaaagtaacagacctgatttactctgcgggcagccagctgactaccttgttg

SEQ ID NO: 489959 - DNA, 120 bp, Artificial Sequence
  ENSG00000162753_4 (sequence is synthesized)
aagagaaacatttcacaacgcttgtatgcttcattgttgttttgggagggcttttgaagatgtgtttaaagaattgtgaagtcattgttttgacgattctttctctatcaggattcgtga

SEQ ID NO: 489960 - DNA, 120 bp, Artificial Sequence
  ENSG00000162753_5 (sequence is synthesized)
taggacacatggcctacaattctgttgaggtgcaccaaattgtctaccctcttctaagaacatcaagtttttcactttattcttacttttcacctttaattatatttatggttgctttgg

SEQ ID NO: 489961 - DNA, 120 bp, Artificial Sequence
  ENSG00000162753_6 (sequence is synthesized)
atgtagaattttatacactcaagaaaatgttttggcaggtcttgttaactggattaattagcttttctacagcaagcatcataattggatatgtcgttataaaattcaataaagattcat

SEQ ID NO: 489962 - DNA, 120 bp, Artificial Sequence
  ENSG00000162753_7 (sequence is synthesized)
gggatttgcaatcttgcctactctttagcatcacccttggcattatagatcctcttcgttctgtgaattcactaaaaactattggcatttctaaaatatacattgatctcattagaggag

SEQ ID NO: 489963 - DNA, 120 bp, Artificial Sequence
  ENSG00000162753_8 (sequence is synthesized)
aatcattgatcatttgtagcatcgcatcaattttttttggaaattttcggggcaacagaatccacttttctatttttagagatttacatgtaggcattgaactcagctatgacattttgg

SEQ ID NO: 489964 - DNA, 120 bp, Artificial Sequence
  ENSG00000162753_9 (sequence is synthesized)
gaagcataatatttggatattggtgtgcaaaaatcattcagtgtatattggctgacgtttttagcaatatgctgactaatatcattctctgcttttcaatggtgtacatgactttctata

SEQ ID NO: 489965 - DNA, 120 bp, Artificial Sequence
  ENSG00000162753_10 (sequence is synthesized)
ttgtggaatttttaggaatgtcaggcactcttgccttagccgctgtaggactgaatttagattctttaacttttaaaccgaagatcgaacttgtaattactaagttcttaagaatttttt

SEQ ID NO: 489966 - DNA, 120 bp, Artificial Sequence
  ENSG00000162753_11 (sequence is synthesized)
catctgtatatgaacatttaatatatgctttctttggcattgtgattggatgtggagaactcagccactatgaatttcacactatacctttcatattcattttatttacaacagtgaatt

SEQ ID NO: 489967 - DNA, 120 bp, Artificial Sequence
  ENSG00000162753_12 (sequence is synthesized)
tggtaaggttgcttactattttgttagtgagccctattttgatgcattcaaattatgaatataattggcgatggggagttgtaatcacgtggtctggaattaaaggagtttttaatttac

SEQ ID NO: 489968 - DNA, 120 bp, Artificial Sequence
  ENSG00000162753_13 (sequence is synthesized)
tctgggctcctgatgtttataatctcgctgaacgaaaagtggaagtaccacaaatgtttatactctatgtacaagtaatatcattattgacaatgggaataaattcatacgtgatgactc

SEQ ID NO: 489969 - DNA, 120 bp, Artificial Sequence
  ENSG00000162753_14 (sequence is synthesized)
agtcagccaggaagttagatttgtgtgttctttccctcccaagacaaatgatcttgcaaaatgccactcagcacatacaggagatagtacagaacacaataactttatttaaaacagaaa

SEQ ID NO: 489970 - DNA, 120 bp, Artificial Sequence
  ENSG00000162753_15 (sequence is synthesized)
aaattttgacaaatgttaactggaccttagtagaagataaaacgaggatcgaatacattcctttttcccacgtttcacataatgatatgaagacagaatccacaacagatgaagctttaa

SEQ ID NO: 489971 - DNA, 120 bp, Artificial Sequence
  ENSG00000162753_16 (sequence is synthesized)
tggaggaagccagattgcatgtagctgcaatacaaatgagtagctttgaaaaacagcgtaacaatggaattcttgaaatagaggcagcccggatattaattggtgcagcaaaatgctatt

SEQ ID NO: 489972 - DNA, 120 bp, Artificial Sequence
  ENSG00000162753_17 (sequence is synthesized)
actccatccaaggaaaattcatgagtatttatgatgtttcaacttatatgagaactagaagttggcttataaagtttaaaaatgttttaactttcttggaatattgtatagaaaagatac

SEQ ID NO: 489973 - DNA, 120 bp, Artificial Sequence
  ENSG00000162753_18 (sequence is synthesized)
atttgatatatatttatcctatgataatacatctgtggccaatggcaagaggtttaaatgtatcagcactgatatcaataaactactattttatgtttttatatgtattagaatcaacat

SEQ ID NO: 489974 - DNA, 120 bp, Artificial Sequence
  ENSG00000162753_19 (sequence is synthesized)
tgaagataataattttgaaaaggaaatattttcaacaatgttggaatactttggaattttttatcctggttattggaatcattgatatcttttgtgtatactttgtgaaattgagaccag

SEQ ID NO: 489975 - DNA, 120 bp, Artificial Sequence
  ENSG00000162753_20 (sequence is synthesized)
acaacttggctcttatacagcttacagtaataatgggatatttaagaataattaggtttcttcctctcttcaagataatagtaccaatactgataagaattgcagatgtgcagatcaaaa

SEQ ID NO: 489976 - DNA, 120 bp, Artificial Sequence
  ENSG00000162753_21 (sequence is synthesized)
agcgcctcagcttgatgtatagtattacaaaaggctatatcaaaagtcaagaagatgccaaacttctaataaaacaaatagctgtctgtgaatcaatatatcagaaactatgtgaaattt

SEQ ID NO: 489977 - DNA, 120 bp, Artificial Sequence
  ENSG00000162753_22 (sequence is synthesized)
tggaaaccaacaaacaggatgctgtcaaagaattagtactcatggagcatgagggtcgtgatgttgtcattgctttgaagactaaacaggcaatccggaatgtgattgctaaagctctaa

SEQ ID NO: 489978 - DNA, 120 bp, Artificial Sequence
  ENSG00000162753_23 (sequence is synthesized)
aaaatctcaccttcctttgttcaagaggcattattgataagcatgaagtcattgagataaataaggtacttcttaaaaaattaaaagcactaaataactttccaaaggcaatcccacccc

SEQ ID NO: 489979 - DNA, 120 bp, Artificial Sequence
  ENSG00000162753_24 (sequence is synthesized)
caactcctgacatataccttcacaacatcatttggctggaaggtaaagatgttctcattgacttcttcaaggaaagagccaaacttgcctgttttgactctggagataccatttgtaaag

SEQ ID NO: 489980 - DNA, 120 bp, Artificial Sequence
  ENSG00000162753_25 (sequence is synthesized)
gaggtgaaatgccacaaggaatctacttaattatttcaggaatggcaattttgcatagtttatctcctacctttggaatagagagtaatcaaaggtgtgatagagggtccagagacatgt

SEQ ID NO: 489981 - DNA, 120 bp, Artificial Sequence
  ENSG00000162753_26 (sequence is synthesized)
ttacagagttctgtactactggggacataattggagagctaagctgtctgcttaagcgtgaaattgaatataccgtcatctgtgaaactagtttacaggcctgctttatctccctggagg

SEQ ID NO: 489982 - DNA, 120 bp, Artificial Sequence
  ENSG00000162753_27 (sequence is synthesized)
atttatatgaaggctttgatgccttctggccatctctggaatataaaatatggctaaagcttgctctcagtactgcctatcagtattttgaatcaagtcttattgatgaggacttaaggt

SEQ ID NO: 489983 - DNA, 120 bp, Artificial Sequence
  ENSG00000162753_28 (sequence is synthesized)
ttcagaactgtgtgatgttcaatcaagcatatgtggaaactttatcaagctatagtgacatgattattgataatatgaccatgaaatttgttatcattgtgtatggcagtgtaattgata

SEQ ID NO: 489984 - DNA, 120 bp, Artificial Sequence
  ENSG00000162753_29 (sequence is synthesized)
ctaagacagaggaaccatattttgcaccttgcattatacctacaacctgtgagcaggttcagggaacttctgatttaagcaagctgctgataatccaagcatctgagcttacccaaagaa

SEQ ID NO: 489985 - DNA, 120 bp, Artificial Sequence
  ENSG00000162753_30 (sequence is synthesized)
atagtaacaccaatgtcatggcctcagtcaacacggtctttgaacaaccaggaaagaatataaatggaagacaaaagatgagttgaaaactggataccattttagaaaagggtattaatg

SEQ ID NO: 489986 - DNA, 120 bp, Artificial Sequence
  ENSG00000162753_31 (sequence is synthesized)
atacaaatatgatgtgtggagtcaggttaaagaccaaactactttcctcgctcaaatactaaaggattatctgcaaggagtttacttagaagctactgaaacaggttactgctgcattta

SEQ ID NO: 489987 - DNA, 120 bp, Artificial Sequence
  ENSG00000162753_32 (sequence is synthesized)
gtttataagcaatggatggacttctgtaaaacttcttaattttaagtagttgcattatatttgggatgttaaaaaagtcttcaggataatataaaatacactgaaacatatgtcctacca

SEQ ID NO: 489988 - DNA, 120 bp, Artificial Sequence
  ENSG00000162753_33 (sequence is synthesized)
aatgaaaccctgtttccagctaagagcaaattttaacatagtgcattataaaaagtgttgtataactgatatgttactctctaaagcatagaacctgtaattttcatttgtgaaattgtt

SEQ ID NO: 489989 - DNA, 120 bp, Artificial Sequence
  ENSG00000162753_34 (sequence is synthesized)
ataattagtgcctccctaatattttcccgagtatagctattctccccttcccagtttggtaaatattgaaaaacagaattatattccacaatcttagtaactttcagtaagtaagtaact

SEQ ID NO: 489990 - DNA, 120 bp, Artificial Sequence
  ENSG00000162753_35 (sequence is synthesized)
tttgctttcagtgaaatttaggagaaattaatattctcatattgcatagtactgtttgatgtcacctttcattttatttttaaaaatcaaataaagttgagttttatggttgtctattta

SEQ ID NO: 489991 - DNA, 120 bp, Artificial Sequence
  ENSG00000162753_36 (sequence is synthesized)
agaagctgctagaaatcttcaggatcagcctctcattacctcctaatcagatgaaccccagatctgtttctgggagggggaaaaccgcttgaatgatatgagctcaagagcactgactca

SEQ ID NO: 489992 - DNA, 120 bp, Artificial Sequence
  ENSG00000162753_37 (sequence is synthesized)
aggaatctacttaattatttcaggaatggcaattgtaagggactattgatttttttttttttttttacttaaaatgtattttgaaacatgtaattgtagaataagaataaatttagatac

SEQ ID NO: 489993 - DNA, 120 bp, Artificial Sequence
  ENSG00000162753_38 (sequence is synthesized)
taggacacctcagtggacaaaatactctgaaaacatgaaaatttctgccatcatggagtttacaatgtaattggggttttcagaaaaaaaaccaaaatcatgttaaatgaagaatataat

SEQ ID NO: 489994 - DNA, 120 bp, Artificial Sequence
  ENSG00000162753_39 (sequence is synthesized)
ttaaaaactagtttagtccattagtatttattgtaattaaaaatagatttagaagagaaaagatttgaacagatttgggacaccaaggaagatatatggatggaataaaagcacttggaa

SEQ ID NO: 489995 - DNA, 120 bp, Artificial Sequence
  ENSG00000162753_40 (sequence is synthesized)
agacgctcaacatcctaagtcattagagaaatacacactaaaaccacaatgagataccactgtgtacctattggaatagcaacaacaaacctgttaatgccaagtgctggtgaagatatg

SEQ ID NO: 489996 - DNA, 120 bp, Artificial Sequence
  ENSG00000162755_0 (sequence is synthesized)
gcagtggttgctgggcgaccacggagagaaagccgggacttgaggtgggaaccccggctggcgtccggtagggggaggttcccggggaagcccgcggaaggcgaggtgcctggcctgcca

SEQ ID NO: 489997 - DNA, 120 bp, Artificial Sequence
  ENSG00000162755_1 (sequence is synthesized)
gccatgtaggggctcgttccaagccgcagaccccaccgccctccctctccccggggcccatggcggtggccgtgcccccgggtcgggccgcaggctcaggctgggcctggaggccagtgg

SEQ ID NO: 489998 - DNA, 120 bp, Artificial Sequence
  ENSG00000162755_2 (sequence is synthesized)
ggacgcgcttttggctagagctttccattcatgcaccgaactgcggggacggttctatctcgtaggtggtctcctagcaggaggagcgagagagcccagcagcgatacggtggttttcga

SEQ ID NO: 489999 - DNA, 120 bp, Artificial Sequence
  ENSG00000162755_3 (sequence is synthesized)
cccagctaggggccaggccgtacgattgggagcccggggcagccccccgcgcagtcaccacgacgcggcacccgtggacgggcgttggctctgcgtggtgggcggctgggacgggtctcg

SEQ ID NO: 490000 - DNA, 120 bp, Artificial Sequence
  ENSG00000162755_4 (sequence is synthesized)
ccgcttggccacagtgaccgcactggacacagagcgcggtgtgtgggaggcgtggacagggacccctggtgactgcccccccgccggcctcagtagtcacacctgcacccgaatctctga

SEQ ID NO: 490001 - DNA, 120 bp, Artificial Sequence
  ENSG00000162755_5 (sequence is synthesized)
gggcggtatccacactcagcgacgctatggaagcatctacacattaaggctggaccccagcgcccgcacctattgctacaagcaagaaggctgccacacagcctcacgctcaggtcactg

SEQ ID NO: 490002 - DNA, 120 bp, Artificial Sequence
  ENSG00000162755_6 (sequence is synthesized)
tgcggccctgctccaaactcctggaccccatccaggtcatcagctattgctctttggaggttgcaacttagctgaaccagaagtagctgggcattggagtcatgggaaaattaaggagga

SEQ ID NO: 490003 - DNA, 120 bp, Artificial Sequence
  ENSG00000162755_7 (sequence is synthesized)
accacctgttgctcctcatttgatggaacagcttgcaaggcttgtgagcagtgggcaggggtcccagaaggggccccatggactacggcatcactcatgttctgtggtcgggccctttgc

SEQ ID NO: 490004 - DNA, 120 bp, Artificial Sequence
  ENSG00000162755_8 (sequence is synthesized)
tgtgctgtttggtggagaaactctgaccagagctagagacaccatctgcaatgatctctacatctatgatactcgcacatctcctcctttgtggttccacttcccctgtgcagatcgtgg

SEQ ID NO: 490005 - DNA, 120 bp, Artificial Sequence
  ENSG00000162755_9 (sequence is synthesized)
gatgaaacgcatgggccatcgcacctgcctttggaatgatcagctttacctggttgggggttttggtgaggatggcaggacagccagtccacaggtttgcatcctggactttatctaaat

SEQ ID NO: 490006 - DNA, 120 bp, Artificial Sequence
  ENSG00000162755_10 (sequence is synthesized)
agtgccaagacacatcactaagcctcgttttgttttgctttgttgcaaacctataaagcgttatcaccagagctatctgcttcacttcaaatgcttattaaatttcaatctgagactcaa

SEQ ID NO: 490007 - DNA, 120 bp, Artificial Sequence
  ENSG00000162755_11 (sequence is synthesized)
attggtatggcaccctccgcccaaaacctttcactctcatccacactctcgaaaaacaaaagcctaagcagatttctcaggcaatttatccacctcctcactctagcaccctccttccag

SEQ ID NO: 490008 - DNA, 120 bp, Artificial Sequence
  ENSG00000162755_12 (sequence is synthesized)
gggaacctaccatgtttaagctagctgagctctctacagtattaccctccctcttatcccacctaccgcactgccccatgcctcttctccatccatccttggcaagggcggtggcactta

SEQ ID NO: 490009 - DNA, 120 bp, Artificial Sequence
  ENSG00000162755_13 (sequence is synthesized)
cattttccagaaaacccactcagccctgaatttctgcatgtccacagctacaagcaagaaggctgccacacagcctcacgctcaggtcactgtgcggccctgctccaaactcctggaccc

SEQ ID NO: 490010 - DNA, 120 bp, Artificial Sequence
  ENSG00000162757_0 (sequence is synthesized)
atgcgcaagaaggtgcctgcgggactggagcagagcgggctgcgagggtcttcccagcgcaggcgggttttccagtgttacttgcggctgggcgtgggggactagctgcctttctggcag

SEQ ID NO: 490011 - DNA, 120 bp, Artificial Sequence
  ENSG00000162757_1 (sequence is synthesized)
caggcaggaagccgcaaaaagtttctgagcccccgaacctgtagcggacgtggaaaaagaacgcccctcctcaagtgtctggctgaaagatgccacccagggaagggaactcgggctagc

SEQ ID NO: 490012 - DNA, 120 bp, Artificial Sequence
  ENSG00000162757_2 (sequence is synthesized)
taaggaggccattcttgatgttgcttctagatctcatgtcatcaccgagccctcagctgctggtggcagctgctcagcagacccttggcatgggaaagagacggagtccaccccaagcca

SEQ ID NO: 490013 - DNA, 120 bp, Artificial Sequence
  ENSG00000162757_3 (sequence is synthesized)
tctgccttcacttagctggagaggtgctggctgtggcccggggactgaagccagctgtgctctatgattgcaactgtgcaggggcatcagagctccagagctatctggaggagctgaagg

SEQ ID NO: 490014 - DNA, 120 bp, Artificial Sequence
  ENSG00000162757_4 (sequence is synthesized)
ggcttggcttcctgacttttggacttcacatccttgagattggagaaaacagcctgattgtcagtcctgagcatgtatgtcagcacttggagcaggtgctgcttggtaccatagcctttg

SEQ ID NO: 490015 - DNA, 120 bp, Artificial Sequence
  ENSG00000162757_5 (sequence is synthesized)
tggatgtttccagctgccagcgtcacccttctgtctgctccctggaccagcttcaggacttgaaggccctcgtggctgagatcatcacacatttgcaggggctgcagagggacttatctc

SEQ ID NO: 490016 - DNA, 120 bp, Artificial Sequence
  ENSG00000162757_6 (sequence is synthesized)
tagcagtctcctacagcaggctccattcctcagactggaatctgtgtactgtatttgggatcctcctgggctatcctgttccctatacctttcacctgaaccagggagatgacaactgct

SEQ ID NO: 490017 - DNA, 120 bp, Artificial Sequence
  ENSG00000162757_7 (sequence is synthesized)
tagctctgactccactacgagtattcactgcccggatctcatggttgctaggtcaacccccaatcctgctctattcttttagtgtcccagagagtttgttcccaggcctgagggacattc

SEQ ID NO: 490018 - DNA, 120 bp, Artificial Sequence
  ENSG00000162757_8 (sequence is synthesized)
taaacacctgggagaaggacctcagaacccgatttaggactcagaatgactttgctgatctcagcatctcctctgagatagtcacactgccggctgtggccctctgactttaactctcct

SEQ ID NO: 490019 - DNA, 120 bp, Artificial Sequence
  ENSG00000162757_9 (sequence is synthesized)
cccatatagaaggtactcagtaaatgatcatctctaggttggggatggcaaataatcatctcaactgccaattccaagtgtcttgaatacactaaggcacaatgctgtagatcagttggc

SEQ ID NO: 490020 - DNA, 120 bp, Artificial Sequence
  ENSG00000162757_10 (sequence is synthesized)
cacaaatgcaaagggcatgtaaataggtaatggtggtgctagtagcaaattggtagatagtacatacttgccatttctatactaggaagtcctcttagtggagatgttttcattttcact

SEQ ID NO: 490021 - DNA, 120 bp, Artificial Sequence
  ENSG00000162757_11 (sequence is synthesized)
ggataaaagatagaaggaaggagatgatagaggaaaagcagggtgatggaagacaagccaaacactcttgcatggtaaccttgtaaatatacctgctctatgtgggtgctgcatgctagg

SEQ ID NO: 490022 - DNA, 120 bp, Artificial Sequence
  ENSG00000162757_12 (sequence is synthesized)
aaagtagggctgggggcttttctgcatgtttatatgcctccaactgaatttgaggagagtagaccaccagtatgcttaaatatgtgatacttgttaatgtaatacaccattcaggaataa

SEQ ID NO: 490023 - DNA, 120 bp, Artificial Sequence
  ENSG00000162757_13 (sequence is synthesized)
actgagagttctgaggaacaatctggtcaggtgaagtttatttacagtaggttaagaaattaataaaaagtcagaaatcctaagtcagttggaaaacccaagctgtaatgtacccaaacc

SEQ ID NO: 490024 - DNA, 120 bp, Artificial Sequence
  ENSG00000162757_14 (sequence is synthesized)
ttctgagtttttcgctgagttgcttgcttctgattttcacccaaggcagttgtcacaaattattcagatcatcaggttgtctttattggccaggaacactgccagtgctgcagcaatcac

SEQ ID NO: 490025 - DNA, 120 bp, Artificial Sequence
  ENSG00000162757_15 (sequence is synthesized)
caccatcagcactgggagccatcgcccacattgcctctgtagggggacagggagacagaagaaagtggccatgagtggattggaaaagatataggcaaaaatctttcttcttcctactct

SEQ ID NO: 490026 - DNA, 120 bp, Artificial Sequence
  ENSG00000162757_16 (sequence is synthesized)
agcccagtggaaaacgctgggttggtggtggagaaaaagctttttactctgtctcccattttgtcacctgtcttgggataaaaccacttaaccaatgttctctggcccagggagccgtat

SEQ ID NO: 490027 - DNA, 120 bp, Artificial Sequence
  ENSG00000162757_17 (sequence is synthesized)
ccatcagggaccagatatataaatactgatatgaataatgaagggtggaaaataacccagcaaaattatattctttctttgtattccccagtacttttgtgtccttctgttcttgccacc

SEQ ID NO: 490028 - DNA, 120 bp, Artificial Sequence
  ENSG00000162757_18 (sequence is synthesized)
atgcttatcatcggctaaaagaacaccctttcatactttagctaagagtaagtctttccttctggcattgagagttctgtgaaagttgggctttgatggacgagccagtgtttttttcaa

SEQ ID NO: 490029 - DNA, 120 bp, Artificial Sequence
  ENSG00000162757_19 (sequence is synthesized)
tgccataatgtcagtatagtataaaccaagcacagtgggacaggatggccagttgttggcgtgggctgatatattttatgtgcaaaacttggttaaagaaggaatcgtcccatcatccag

SEQ ID NO: 490030 - DNA, 120 bp, Artificial Sequence
  ENSG00000162757_20 (sequence is synthesized)
ggctttatgggaaggagagaccctcttactctgggaggcagctgctggctctggttcagctcttctcgacagtgctgcagcttacgcaggcaggagagatactcgtcactgaggttgtct

SEQ ID NO: 490031 - DNA, 120 bp, Artificial Sequence
  ENSG00000162757_21 (sequence is synthesized)
aattctgaatgcagttctctgcactggggagaacatcaccaaagtcatcactgtcacttctgtctaggacagagcccaggcaggggagactgccctttgtaagtttcactcatttggaat

SEQ ID NO: 490032 - DNA, 120 bp, Artificial Sequence
  ENSG00000162757_22 (sequence is synthesized)
ttttaccaccatcttcccttcccagccattctcagggatttgagtttgtcttttgactgtcttacattgtctggaatgtgttcatttaaatgattgacagtaatgcatattatagtatta

SEQ ID NO: 490033 - DNA, 120 bp, Artificial Sequence
  ENSG00000162757_23 (sequence is synthesized)
cattttatacatttaagttcttttatatgactttacgtgcaagtgctttgcaaatgagagacaccgaaaaatgaagttcttatagaacaaacgacctagaagtgaccttagtacaagttt

SEQ ID NO: 490034 - DNA, 120 bp, Artificial Sequence
  ENSG00000162757_24 (sequence is synthesized)
ctttcccaggagctagttgcatatcaatacttctggggatgtgtatgtttgtgagtatgtacaaaggaagagttttactctttaagagacatataaagacttaagatactcaatgtggga

SEQ ID NO: 490035 - DNA, 120 bp, Artificial Sequence
  ENSG00000162757_25 (sequence is synthesized)
cgacatattgagaagttaatatttttattaaatgtgtttgagttttggtcgactttctaaaaggtaatcatttaataaaaccttgaataggagttggtataaataaggaagggaaaagat

SEQ ID NO: 490036 - DNA, 120 bp, Artificial Sequence
  ENSG00000162757_26 (sequence is synthesized)
tgacaagtcagcccaaaagcacagacactttatgtaggcaaatgaatgtctgtggttatccactcacaacttaaactttgaaatccctgctttttgactgcctcccaggtttctctgcta

SEQ ID NO: 490037 - DNA, 120 bp, Artificial Sequence
  ENSG00000162757_27 (sequence is synthesized)
tttcgcaaatgagccctcactatctcaggtcaccctctcacctccttttccttggcctggagctgcaaagtcttcttttgcagctggtctctgagatcccagtctttctccttccctgta

SEQ ID NO: 490038 - DNA, 120 bp, Artificial Sequence
  ENSG00000162757_28 (sequence is synthesized)
ccctcaggctccacttcgttagggaaggactttggactccacacgggcaaagcctgatctaaaaaagcagccagattcttggtgacagtgaggcccacacctctgaggaagggccctgag

SEQ ID NO: 490039 - DNA, 120 bp, Artificial Sequence
  ENSG00000162757_29 (sequence is synthesized)
ggtgaaaccactaggagtggggagaggggagggaacttgggagggcgtgctcttggctagactgatggcattctctgacataaaggttaacttccagtaggcccctgctaagcttggaca

SEQ ID NO: 490040 - DNA, 120 bp, Artificial Sequence
  ENSG00000162757_30 (sequence is synthesized)
gacagctggaatctgagctccttgagggcaagattgggatcttttctttgtatccccagtcttatctagtgctagatagttttagtgaatacttcttaattgaatttcattggttgtatg

SEQ ID NO: 490041 - DNA, 120 bp, Artificial Sequence
  ENSG00000162757_31 (sequence is synthesized)
tcacattcttcctagtttgtcaaataagtttggtaaatgctttaatacaatcccttttccctgatgtcctcatttgaaagttgtgaagatggcagtcatatcctaaaatttatcttcata

SEQ ID NO: 490042 - DNA, 120 bp, Artificial Sequence
  ENSG00000162757_32 (sequence is synthesized)
tggttaaagatggttttttagccaccctgcagtcttagtcttggtgaaaagagcatggactaggagtcagaagttttggattgttgttatagctgtgttgttagtttgtgtcaccataga

SEQ ID NO: 490043 - DNA, 120 bp, Artificial Sequence
  ENSG00000162757_33 (sequence is synthesized)
ctttcatgttcttatccatactctgtgagcataaaaatttctgccttatctattatattatgcccaatgattgtgaagagaaaacaaaaggtcgtgtgtagtggacaggtgaggagctat

SEQ ID NO: 490044 - DNA, 120 bp, Artificial Sequence
  ENSG00000162757_34 (sequence is synthesized)
tgcccctctgtatacacagtgaattctcaggaaacatggacagtagactctctagggctaacagtgagttgactctggactgctatgtggtttggggctggggagttggatgtgatttgg

SEQ ID NO: 490045 - DNA, 120 bp, Artificial Sequence
  ENSG00000162757_35 (sequence is synthesized)
aaaatcaagtgtgtaaaaattgacatgaaatcctgagttcaaaataaatttattgaaatgttcaacacagacatgtgctttcagagagaatagaaaccctttttcacagtttatatacct

SEQ ID NO: 490046 - DNA, 120 bp, Artificial Sequence
  ENSG00000162757_36 (sequence is synthesized)
caagatagaaggctaactagttgaagtgtcctcagagccaatgatcagtccttaaaaagctcccacacatcccggacttaacagactcccagaactggctgggactccaggaggtcatgt

SEQ ID NO: 490047 - DNA, 120 bp, Artificial Sequence
  ENSG00000162757_37 (sequence is synthesized)
agtccatcccgctgcctctaggcaggtaagagaagagcaatatcttagaatttgtggtaataaatttgctgacctttctttgttaagagtttctcctgttcttgaagctgtaaggattga

SEQ ID NO: 490048 - DNA, 120 bp, Artificial Sequence
  ENSG00000162757_38 (sequence is synthesized)
ttttgaagcaaacctgttggaaaacacaaggaacttgtctatgctagcatatttactacaaaaagttttcttttcagaactttgcttagaaccttggttattaaatatgttcccatctgc

SEQ ID NO: 490049 - DNA, 120 bp, Artificial Sequence
  ENSG00000162761_0 (sequence is synthesized)
ctcttttgcttctgcagacattcccggcactggccgactggcgggaggacctccccgcgcgccccgcacaccggctcctgcgcgcaccccaacagagcgcagcgccaggagtccagaagc

SEQ ID NO: 490050 - DNA, 120 bp, Artificial Sequence
  ENSG00000162761_1 (sequence is synthesized)
gggcgggacgccctccgggtcccttacagtgccccttctcgacctggggcaggtcctcccggcccggcccgaacatgctggacggcctaaagatggaggagaacttccaaagcgcgatcg

SEQ ID NO: 490051 - DNA, 120 bp, Artificial Sequence
  ENSG00000162761_2 (sequence is synthesized)
acacctcggcctccttctcctcgctgctgggcagagcggtgagccccaagtctgtctgcgagggctgtcagcgggtcatcttggacaggtttctgctgcggctcaacgacagcttctggc

SEQ ID NO: 490052 - DNA, 120 bp, Artificial Sequence
  ENSG00000162761_3 (sequence is synthesized)
atgagcagtgcgtgcagtgcgcctcctgcaaagagcccctggagaccacctgcttctaccgggacaagaagctgtactgcaagtatgactacgagaagctgtttgctgttaaatgtgggg

SEQ ID NO: 490053 - DNA, 120 bp, Artificial Sequence
  ENSG00000162761_4 (sequence is synthesized)
gctgcttcgaggccatcgctcccaatgagtttgttatgcgggcccagaagagtgtataccacctgagctgcttctgctgctgtgtctgcgagcgacagcttcagaagggtgatgagtttg

SEQ ID NO: 490054 - DNA, 120 bp, Artificial Sequence
  ENSG00000162761_5 (sequence is synthesized)
tcctgaaggaggggcagctgctctgcaaaggggactatgagaaggagcgggagctgctcagcctggtgagcccagcagcctcagactcaggtaaaagtgatgatgaagaaagtctctgca

SEQ ID NO: 490055 - DNA, 120 bp, Artificial Sequence
  ENSG00000162761_6 (sequence is synthesized)
agtcagcccatggggcagggaaaggaactgctgaggaaggcaaggaccataagcgccccaaacgtccgagaaccatcttgacaactcaacagaggcgagcattcaaggcctcatttgaag

SEQ ID NO: 490056 - DNA, 120 bp, Artificial Sequence
  ENSG00000162761_7 (sequence is synthesized)
tatcctccaagccctgcaggaaggtgagagagactctggctgcagagacagggctgagtgtccgtgtcgtccaggtgtggttccaaaaccagagagcgaagatgaagaagctggccaggc

SEQ ID NO: 490057 - DNA, 120 bp, Artificial Sequence
  ENSG00000162761_8 (sequence is synthesized)
gacagcagcagcagcagcaagatcagcagaacacccagaggctgagctctgctcagacaaacggtggtgggagtgctgggatggaaggaatcatgaacccctacacggctctgcccaccc

SEQ ID NO: 490058 - DNA, 120 bp, Artificial Sequence
  ENSG00000162761_9 (sequence is synthesized)
cacagcagctcctggccatcgagcagagtgtctacagctcagatcccttccgacagggtctcaccccaccccagatgcctggagaccacatgcacccttatggtgccgagccccttttcc

SEQ ID NO: 490059 - DNA, 120 bp, Artificial Sequence
  ENSG00000162761_10 (sequence is synthesized)
atgacctggatagcgacgacacctccctcagtaacctgggtgattgtttcctagcaacctcagaagctgggcctctgcagtccagagtgggaaaccccattgaccatctgtactccatgc

SEQ ID NO: 490060 - DNA, 120 bp, Artificial Sequence
  ENSG00000162761_11 (sequence is synthesized)
agaattcttacttcacatcttgagtcttcccctagagttctgtgactaggctcccatatggaacaaccatattctttgaggggtcactggctttaggacagggaggccagggaagaggtg

SEQ ID NO: 490061 - DNA, 120 bp, Artificial Sequence
  ENSG00000162761_12 (sequence is synthesized)
ggttggggagggagttttgttggggatgctgttgtataatgatatggtgtagctcagcatttccaaagactgaatacattatggattgcatagtttaatgtttctaataagagtcttagc

SEQ ID NO: 490062 - DNA, 120 bp, Artificial Sequence
  ENSG00000162761_13 (sequence is synthesized)
gctcttgtcaagaggtgcatatgtctatccatctacacaccaatagacagaaggacagatagatagatgtgtgtgtgtgagtgtgtaacctttcgtattttaccctcaaagtttattcct

SEQ ID NO: 490063 - DNA, 120 bp, Artificial Sequence
  ENSG00000162761_14 (sequence is synthesized)
aattataacagacaccaactgtacagcaaaagtaactttattttcagtgtgaactatatttaaggaaatgcttgatgcacttaagttataaaatgagataatttacttttataaacttta

SEQ ID NO: 490064 - DNA, 120 bp, Artificial Sequence
  ENSG00000162761_15 (sequence is synthesized)
tttttagcttgacaagacttgtcagcagggcagagagggctgctccacctagccccatagctttgagtgctggggttcattctgttttcagagtgtctttcagatctggaaagaaattct

SEQ ID NO: 490065 - DNA, 120 bp, Artificial Sequence
  ENSG00000162761_16 (sequence is synthesized)
gtgtggctgatggtgttctctcttgcattcttgctctctttggggttgaatcactgggcaggggtgggacagaataatctctgatcatgttctgagaaaatgtaaagcccagactcctgg

SEQ ID NO: 490066 - DNA, 120 bp, Artificial Sequence
  ENSG00000162761_17 (sequence is synthesized)
gctttcttttaaattctgacaagtggttgttgggcagtgctaggatgattggttcagctcttgagcttcagcatctgcaaatgtggatgaggctaatagtatgtacctacctcactggga

SEQ ID NO: 490067 - DNA, 120 bp, Artificial Sequence
  ENSG00000162761_18 (sequence is synthesized)
aacaccaaggcttaattcattcccaggacacatgagcagggctgagactaatatctgatatttgtttaagatacaaccaggccactcacttggcaaaggagggtacatagggttgcagag

SEQ ID NO: 490068 - DNA, 120 bp, Artificial Sequence
  ENSG00000162761_19 (sequence is synthesized)
caggagggctcctgaactccagagggcagttctgcctgctgaagtccctctgcaaagcctgtgctgaaggagacaccagctcagagcagttcagagggatcccagagtcccagagtgggg

SEQ ID NO: 490069 - DNA, 120 bp, Artificial Sequence
  ENSG00000162761_20 (sequence is synthesized)
aggaggtgaaggctgaggggatagaggagggcctggtggtgttctagagcagggttgggcaaactcctgcttgcgggcctgctttctatggcttgccagcaaagaatggtttttactttt

SEQ ID NO: 490070 - DNA, 120 bp, Artificial Sequence
  ENSG00000162761_21 (sequence is synthesized)
tttttgaggtcattaaaaaaaaggagaagaagaatatataacaggctgtctgtggcctggaaagcctgaaatatttgctatctgtattgtctggcccttacagaaaaagtttggggcccc

SEQ ID NO: 490071 - DNA, 120 bp, Artificial Sequence
  ENSG00000162761_22 (sequence is synthesized)
ttgttttagagggtctgtttctaaagaacctcatggcgctcatagaggcagaaggttccagtggaaacccttggctcttccttccaactcactcctctgatcctcggcacagaagaccca

SEQ ID NO: 490072 - DNA, 120 bp, Artificial Sequence
  ENSG00000162761_23 (sequence is synthesized)
gcagccattgtacatggggacagttccacaccctggtctccagttgcggtgctaggatggtattgttctgtgctaggaagtctcctgggaacccagaatgagttggtggggaagacagcg

SEQ ID NO: 490073 - DNA, 120 bp, Artificial Sequence
  ENSG00000162761_24 (sequence is synthesized)
ggtcactgtggacccatccaggaggggccaggataggcttggcctcatttctggggacatcattggagacttgaacacagagacacgtccctatcactctggcaaggccagagggaacat

SEQ ID NO: 490074 - DNA, 120 bp, Artificial Sequence
  ENSG00000162761_25 (sequence is synthesized)
gtccccttatggtagagtctatgttgtgtgatttttgtgctcttgtttataatttatgcaaaccaccaagaaacccaaaccagtctgatgagtgaaaattatgcagatgctgtatggccc

SEQ ID NO: 490075 - DNA, 120 bp, Artificial Sequence
  ENSG00000162761_26 (sequence is synthesized)
cacaggtttctgtggtaaagaccagttggagaatgtaggagatactatgtgagtgaaaatgaatagagatccttattccactccttaatggcataccaagatgaaattaaaatctcttac

SEQ ID NO: 490076 - DNA, 120 bp, Artificial Sequence
  ENSG00000162761_27 (sequence is synthesized)
agaagctgcaggatccgccccggcgaagcagggccgactcgcacccaggaccctgggcctctgccttccctcctagccttggagaagcaactggccctctcctcccgctgaggagcgacg

SEQ ID NO: 490077 - DNA, 120 bp, Artificial Sequence
  ENSG00000162761_28 (sequence is synthesized)
ctggtaggacgtcccgggaaggccggcagctcgcgaccacgtcccggcccagcctgggcgcgccgaggagcagagccagcggccggcgttcgctccggctccctccccggcgctccgaag

SEQ ID NO: 490078 - DNA, 120 bp, Artificial Sequence
  ENSG00000162761_29 (sequence is synthesized)
gaagccgagggcggctcctccggctgcagtctcgggggcgacgccttcccgggcagaagcttccagcagcgctccgcaacttctctctgctccagtcactgggagagagctcgcctacca

SEQ ID NO: 490079 - DNA, 120 bp, Artificial Sequence
  ENSG00000162761_30 (sequence is synthesized)
ctgatctctcctcccaccctacattctcttggctggaccctatcctcctggctgattctggtcgccctggacactccctcagttctttcccaggagtgcggtggctgctggcgccgagtc

SEQ ID NO: 490080 - DNA, 120 bp, Artificial Sequence
  ENSG00000162761_31 (sequence is synthesized)
gagtctggctttttccacttggtgtggtggtttggggattcattcattcctatttcagcattccactgtatagtccagaggtgagcaaggcaaggctggtgggtggctctgttatccatc

SEQ ID NO: 490081 - DNA, 120 bp, Artificial Sequence
  ENSG00000162761_32 (sequence is synthesized)
attcctggaggcgagtggagaagttgttattatccctatgtcacagatgagcaaacaaaggctctgcaagattgaatgtggccctagatcgctcagacaaacggtggtgggagtgctggg

SEQ ID NO: 490082 - DNA, 120 bp, Artificial Sequence
  ENSG00000162763_0 (sequence is synthesized)
acttgcaaacgcagggaaagggtgagacctttcaaagctgccaagtgggcaagcttccagcagcagtctgggagcgagcgacagagccaccaagctgggcggcagggcattgagcctcgc

SEQ ID NO: 490083 - DNA, 120 bp, Artificial Sequence
  ENSG00000162763_1 (sequence is synthesized)
gtttcaatttctgttcagttctcctgtaatggaaaattgctttgcacaaagctaaagtgttacagttctttccagagcccctcccccgccccacccccccaccggcagccttcggatcag

SEQ ID NO: 490084 - DNA, 120 bp, Artificial Sequence
  ENSG00000162763_2 (sequence is synthesized)
aggacagagcccgcaggaaggtgaaaggagggtggttgtggcttcttactatgtcccttgcttcaggccctggccctgggtggttactcttttcctttggaatggggctggtatcagggt

SEQ ID NO: 490085 - DNA, 120 bp, Artificial Sequence
  ENSG00000162763_3 (sequence is synthesized)
caaagtgtccaaataattgtctgtgtcaagcccaagaagtaatctgcacagggaagcagttaaccgaatacccccttgacatacccctgaacacccggaggctgttcctgaacgagaaca

SEQ ID NO: 490086 - DNA, 120 bp, Artificial Sequence
  ENSG00000162763_4 (sequence is synthesized)
gaatcactagtttgccagcaatgcatctaggactcctcagtgaccttgtttatttggactgtcagaacaaccggattcgagaggtgatggattataccttcatcggggtcttcaaactca

SEQ ID NO: 490087 - DNA, 120 bp, Artificial Sequence
  ENSG00000162763_5 (sequence is synthesized)
tttctcggtgctcagcaacctggtgcagctgaacattgccaacaaccctcacctgttatcgcttcacaagttcacctttgccaacaccacctctttgaggtacctggacctcagaaatac

SEQ ID NO: 490088 - DNA, 120 bp, Artificial Sequence
  ENSG00000162763_6 (sequence is synthesized)
cggcttgcagaccctggacagtgctgccttataccacctcactactctggagaccctgtttctgagtggaaacccctggaagtgcaactgctctttcctggacttcgccatcttcttaat

SEQ ID NO: 490089 - DNA, 120 bp, Artificial Sequence
  ENSG00000162763_7 (sequence is synthesized)
agtgttccatatggacccctcagatgatctaaatgccacatgtgtggagcccacagagctgacagggtggcccatcacccgggtggggaacccactccgatacatgtgcatcacgcacct

SEQ ID NO: 490090 - DNA, 120 bp, Artificial Sequence
  ENSG00000162763_8 (sequence is synthesized)
ggaccacaaagactacatcttcctgctgctcatcggcttctgcatcttcgccgcgggaactgtggctgcctggctcacaggtgtgtgtgctgtgctctaccagaacacccgccacaagtc

SEQ ID NO: 490091 - DNA, 120 bp, Artificial Sequence
  ENSG00000162763_9 (sequence is synthesized)
gagtgaagaagatgaggacgaggccgggactagggtggaagtcagccggcggatttttcaaacccagacgagctcggtccaggagttccctcagcttatttagttgccagagaccactat

SEQ ID NO: 490092 - DNA, 120 bp, Artificial Sequence
  ENSG00000162763_10 (sequence is synthesized)
cttatgtgcctcccccaggctccctgctttctctcttgccctccccatcccaccaccttggagctgtcatagagattgaaaccttctagtaaaataaataaaatctctgatggccatttc

SEQ ID NO: 490093 - DNA, 120 bp, Artificial Sequence
  ENSG00000162769_0 (sequence is synthesized)
agaccttcatctgttcacgcggtagcgcggattgcggttcgcggcgcgcgccaccggggaaggagcggtgggccgaggggttggaggtggggccccaggaggacctcgggctgtgggccg

SEQ ID NO: 490094 - DNA, 120 bp, Artificial Sequence
  ENSG00000162769_1 (sequence is synthesized)
ggagagcggagtcggggagtggggcgggggagcgaggtggcgccggggagcctgggatatggcgcggccagacgatgaggagggggcggcggtggcgcccggacacccgctcgcgaaagg

SEQ ID NO: 490095 - DNA, 120 bp, Artificial Sequence
  ENSG00000162769_2 (sequence is synthesized)
atacctcccgttgccgaggggcgcgcccgttgggaaggagagcgtggagctgcagaacgggcccaaagcgggcaccttcccggtgaatggggccccccgggacagcctcgctgccgcctc

SEQ ID NO: 490096 - DNA, 120 bp, Artificial Sequence
  ENSG00000162769_3 (sequence is synthesized)
gggagttctgggcgggcctcagactccactggccccagaagaggagacccaggcccggctgctgcctgcgggcgcgggagctgagaccccgggggccgagagcagcccgctgccccttac

SEQ ID NO: 490097 - DNA, 120 bp, Artificial Sequence
  ENSG00000162769_4 (sequence is synthesized)
ggcgctctccccgcggcgcttcgtggtgctcctgatcttcagcctgtactcgctggtcaacgcctttcagtggatccagtacagcatcattagcaacgtcttcgagggcttctacggtgt

SEQ ID NO: 490098 - DNA, 120 bp, Artificial Sequence
  ENSG00000162769_5 (sequence is synthesized)
caccttgctgcacatcgactggctgtccatggtgtacatgctggcctacgtgcccctcatcttcccggccacctggctgctggacaccagaggcctgcggctcaccgccctgctgggctc

SEQ ID NO: 490099 - DNA, 120 bp, Artificial Sequence
  ENSG00000162769_6 (sequence is synthesized)
cggcctcaactgcctgggtgcctggatcaagtgcggcagtgtgcagcagcatctcttctgggtcaccatgttgggccagtgcttgtgctcggtggcccaggtgttcatcctgggcttgcc

SEQ ID NO: 490100 - DNA, 120 bp, Artificial Sequence
  ENSG00000162769_7 (sequence is synthesized)
ctcccgcatcgcctcagtgtggtttgggcccaaagaggtgtccacagcttgtgccaccgccgtgctgggcaatcagcttggaactgcagttggctttttgctaccaccagttttagtacc

SEQ ID NO: 490101 - DNA, 120 bp, Artificial Sequence
  ENSG00000162769_8 (sequence is synthesized)
caacacacagaatgacacaaatctcctggcttgtaatatcagcaccatgttttatggaacatcagctgttgccacacttttatttattttaacagcaattgccttcaaagaaaaacctcg

SEQ ID NO: 490102 - DNA, 120 bp, Artificial Sequence
  ENSG00000162769_9 (sequence is synthesized)
gtatccaccaagtcaggctcaagcagctcttcaagacagtccccctgaagagtactcctataagaaatcaataagaaacctgtttaaaaacattccttttgtccttctgttgatcactta

SEQ ID NO: 490103 - DNA, 120 bp, Artificial Sequence
  ENSG00000162769_10 (sequence is synthesized)
tggtatcatgactggtgccttttattcagtctcaacgttattaaatcaaatgatattgacatattatgagggagaagaagtcaatgctggaaggattgggctaacgctagtagtagctgg

SEQ ID NO: 490104 - DNA, 120 bp, Artificial Sequence
  ENSG00000162769_11 (sequence is synthesized)
aatggtgggctctattctttgtggcttatggctggattatactaaaacatacaaacagactactctgatagtttatattttgtcttttattggaatggttatctttactttcacattgga

SEQ ID NO: 490105 - DNA, 120 bp, Artificial Sequence
  ENSG00000162769_12 (sequence is synthesized)
ccttagatatattatcatcgtgtttgttactggaggggtgcttggcttcttcatgactggttacctccctttgggttttgaatttgctgttgaaatcacttaccctgaatctgaaggtac

SEQ ID NO: 490106 - DNA, 120 bp, Artificial Sequence
  ENSG00000162769_13 (sequence is synthesized)
ttcatctggtcttcttaatgcttctgcacagatatttggaattttgttcacattggctcaaggaaagctcacatcagactatggtcctaaggcagggaacatttttctctgtgtctggat

SEQ ID NO: 490107 - DNA, 120 bp, Artificial Sequence
  ENSG00000162769_14 (sequence is synthesized)
gtttataggcatcatattaacagcattaatcaagtctgatctgcgaagacacaacataaatataggaattacaaatgttgatgttaaagctataccagctgacagtcccacagaccaaga

SEQ ID NO: 490108 - DNA, 120 bp, Artificial Sequence
  ENSG00000162769_15 (sequence is synthesized)
accaaaaacggttatgttgtccaagcagtcagaatcagcaatttgaagagaaaggcaaagttactgtcctgtagtaattggggacaatgtgatcatccttggagagagatgtgagcacca

SEQ ID NO: 490109 - DNA, 120 bp, Artificial Sequence
  ENSG00000162769_16 (sequence is synthesized)
aggctgggtttgtatgtggtgggggaataaacacacttacttgaaaattaccatatgaactctaaatgcataattattattttgcttaattgttaaattaagggaaattttcttaaaatt

SEQ ID NO: 490110 - DNA, 120 bp, Artificial Sequence
  ENSG00000162769_17 (sequence is synthesized)
cttctgtttacatcatgttaacactactgtttatctaattagtatccggtttttagtctcatattgtatctgaaagtaagcttcttgacgtttactttttaaaagtcgatgtttttcttt

SEQ ID NO: 490111 - DNA, 120 bp, Artificial Sequence
  ENSG00000162769_18 (sequence is synthesized)
tttgtagaaaatggaagcttagaatactttttaaagtgataatatggggtgttcagtccccataagatataatagttcatgcagtttatatattaaagtatccagtggaactaaatgtac

SEQ ID NO: 490112 - DNA, 120 bp, Artificial Sequence
  ENSG00000162769_19 (sequence is synthesized)
aatatattcctaattggctgcctttttcactgtgctgaccagctgttcaagccacttcagtttgagtacaacataccaacatgacactactcacccacaaaggacagcattgggatcagg

SEQ ID NO: 490113 - DNA, 120 bp, Artificial Sequence
  ENSG00000162769_20 (sequence is synthesized)
ctttcagatgacctctaagatttttcccatttattgtactcttgttacaaagtactttttaacacatgcagtcaatggctataaaaactattctgtgtacagattctacccagactttgg

SEQ ID NO: 490114 - DNA, 120 bp, Artificial Sequence
  ENSG00000162769_21 (sequence is synthesized)
tcttagaattatgttctaattaaggagcctggttacaggttcattctgtcttgagttcttttctgtgctgcctttctatcatggataaatgctaacgctgtattttttcactccaacttg

SEQ ID NO: 490115 - DNA, 120 bp, Artificial Sequence
  ENSG00000162769_22 (sequence is synthesized)
agatagagtagttttgtacccattgccttttttttcttttaaactctctttttttttttttcctgatgtgtaactttctagtaagataatttcatcatgtatgttactggctatttcatg

SEQ ID NO: 490116 - DNA, 120 bp, Artificial Sequence
  ENSG00000162769_23 (sequence is synthesized)
atttcatgtatcacatcgtatattttgccttgaagattcctgaaataaggaaatctataataacttcagatagcctacatgtccccatttagtggagacctcttgaatgctatttgaatt

SEQ ID NO: 490117 - DNA, 120 bp, Artificial Sequence
  ENSG00000162769_24 (sequence is synthesized)
actatgcccaggtacatgctctatcagtgtgccgggagagtggattcttttcttcactgcagagtcatcacactgttagaatagtctgctcttttacatgctcaggtagggaaaatagga

SEQ ID NO: 490118 - DNA, 120 bp, Artificial Sequence
  ENSG00000162769_25 (sequence is synthesized)
ccaaatatatttccacagtgcctaccactgtgtcatgtttacagtgagagtttaaatattgttgatgtcctgactctgtgagctcatagggagtatcttcatagtaatgacatttgatca

SEQ ID NO: 490119 - DNA, 120 bp, Artificial Sequence
  ENSG00000162769_26 (sequence is synthesized)
gccataaaatttacattatgttcatatgcacccaaaaaagctagtcaggtaatgaatacccttgaagtgaatagcaattttgatttaggcagtgtgttaggccatccttgcattgctata

SEQ ID NO: 490120 - DNA, 61 bp, Artificial Sequence
  ENSG00000162769_27 (sequence is synthesized)
tgatttaggcagtgtgttaggccatccttgcattgctataaagaaattgtggatcacctga

SEQ ID NO: 490121 - DNA, 90 bp, Artificial Sequence
  ENSG00000162769_28 (sequence is synthesized)
gaatggcagaggttgcagtgagcgaaaatcacactactgcactccagcctgggagataaagtgagactgtctcaaataaataaataaata

SEQ ID NO: 490122 - DNA, 78 bp, Artificial Sequence
  ENSG00000162769_29 (sequence is synthesized)
acacatcttgggaagctgaggcatgagaattgcctgaacctggaaggcggaggctacagtgagctgagattgcgccac

SEQ ID NO: 490123 - DNA, 120 bp, Artificial Sequence
  ENSG00000162769_30 (sequence is synthesized)
aataaaagaggtttaagtggctcacagttctgcaggctgtgtaagcatggcaccagtgtctgctcggcttctggggagccctcagggagctttactcatggtgaaaggctaagtgggagc

SEQ ID NO: 490124 - DNA, 120 bp, Artificial Sequence
  ENSG00000162769_31 (sequence is synthesized)
agagatgtcacatggcgaagcaggagcaagagagcagggaggtgccacacaccttcaaacaaccagattttgtgaaaactcactcattactgcaaggacagcaccaagccatgagggatc

SEQ ID NO: 490125 - DNA, 120 bp, Artificial Sequence
  ENSG00000162769_32 (sequence is synthesized)
cacccgcaggacccaaacaccttctattagggccaaccttcaacattggggattacatttcaatgtgagattggagggacaagtatcccaactatatcaggcagaatatatgcattgata

SEQ ID NO: 490126 - DNA, 120 bp, Artificial Sequence
  ENSG00000162769_33 (sequence is synthesized)
tatattgaaattataacattctctataatcaagtgactgtaaattatgtcgaatctgaccctggggaatgtgttatctaaagaatttgactaagaatcaggaactctgtgtccatgtcct

SEQ ID NO: 490127 - DNA, 120 bp, Artificial Sequence
  ENSG00000162769_34 (sequence is synthesized)
ggatgtatttctgtatgttcctataactctggacaaatcattaaacctctctgggcagcgttttcctcatccatgaaatgaatgtgttcaatttgatctcaaagatctttccaaaatatt

SEQ ID NO: 490128 - DNA, 120 bp, Artificial Sequence
  ENSG00000162769_35 (sequence is synthesized)
aaatgccattaatcatggaatagaccaaattattgtatcacaggaacttgaatccagccagagaaaaattccctggacaattggataaacaaatgtgattgctaccttatggatacaacg

SEQ ID NO: 490129 - DNA, 120 bp, Artificial Sequence
  ENSG00000162769_36 (sequence is synthesized)
gacttttacatttctttttagcctttttagtcagttgagggtaactcaagcagagtatgtccaatcattagcttcctttgatatttacattacaggtaaaaacggccaaaaatatatttt

SEQ ID NO: 490130 - DNA, 120 bp, Artificial Sequence
  ENSG00000162769_37 (sequence is synthesized)
aaggtctctccccaaatgtttttatttttaaactatcaatgttgtttaaaataatcatgtacttgttgagttcctgaggtttggaacaaattacacataaaatttagaatactttatttc

SEQ ID NO: 490131 - DNA, 120 bp, Artificial Sequence
  ENSG00000162769_38 (sequence is synthesized)
tgaaaagcatatacatatatgttatgtttatttttccttgttgattagaaaggtgatggaatatgtgacaatgcaaaatgaattgataatttttctgtattttgagtgaaagttgtctgt

SEQ ID NO: 490132 - DNA, 120 bp, Artificial Sequence
  ENSG00000162769_39 (sequence is synthesized)
aatatgtcaagcaagaatgttataattctacagtaatgtgtgacttcatgacagagctacattctgagaaatttgtcattaggtgatttcatcattgtgtgaacatcatgaagtgtactt

SEQ ID NO: 490133 - DNA, 120 bp, Artificial Sequence
  ENSG00000162769_40 (sequence is synthesized)
acacaaacctaggtggtagagcctactgcacacctgggctagatggcaaagtctgtcgcttctgggctacagacctgtacagcatggtactgtattgaatactgtaggcaactgtaacac

SEQ ID NO: 490134 - DNA, 120 bp, Artificial Sequence
  ENSG00000162769_41 (sequence is synthesized)
aatggtatctgtgtaatctaaacatagaacagataatacattgtgctacaatgtaacaatggctgtggcatcactaggtgataggaatttttcagttccattataatcttataggatctc

SEQ ID NO: 490135 - DNA, 120 bp, Artificial Sequence
  ENSG00000162769_42 (sequence is synthesized)
tgtcatatgtggtcaattgttgatcgaaacatgactgtatgtcgtattttcagaaaatggaataggtaatcatcacttgtgtgaattttaatcaaatgacttaggaaagaaactggatgt

SEQ ID NO: 490136 - DNA, 120 bp, Artificial Sequence
  ENSG00000162769_43 (sequence is synthesized)
ttcaaaagctgttgcatttattacaaatgtcacaaatacagctcttgccttttgagaatgttggagagatgtctttaaaaaatatgtttgtgtgtaaaaatgtgtctgtatgcaatagct

SEQ ID NO: 490137 - DNA, 120 bp, Artificial Sequence
  ENSG00000162769_44 (sequence is synthesized)
agaaaaatgcctgtgtcttaagtcattactcatgttctaatttttgttctttgtactatttatctgtatgcttgttcttcagtatttcagactcaaaataaatttatttttttatgttaa

SEQ ID NO: 490138 - DNA, 120 bp, Artificial Sequence
  ENSG00000162769_45 (sequence is synthesized)
aaacactagctgtcctctttatgttctgttaattgccagcatttacttttttctctaatgataatagctgttaacaggactatgtgtttttcagcttggaactgcagttggctttttgct

SEQ ID NO: 490139 - DNA, 120 bp, Artificial Sequence
  ENSG00000162769_46 (sequence is synthesized)
gccactccagcaaagcacggctgccaccactcgtcactgagtcctctcgtctgagcctgtctcttgaagcagtcagtcaaaatcaactgcaagcagccatcatcagtttggaagaagctt

SEQ ID NO: 490140 - DNA, 120 bp, Artificial Sequence
  ENSG00000162769_47 (sequence is synthesized)
tgggaaggatacaaagagactcaggaaaagacaacagacatcctaacagtacaagatcagatagaatgaaaggaagaggaggatttgcaacttaaaccttttatgtgtaccagccttcca

SEQ ID NO: 490141 - DNA, 120 bp, Artificial Sequence
  ENSG00000162769_48 (sequence is synthesized)
gctgccaccactcgtcactgagtcctctcgtctgagcctgtctcttgaagcagtcagtcaaaatcaactgcaagcagccatcatcagtttggaagaagctttgggaagccttcaaagaaa

SEQ ID NO: 490142 - DNA, 120 bp, Artificial Sequence
  ENSG00000162769_49 (sequence is synthesized)
tttaaaggacaatttgctttttatttcaagaaatttaaaacatgttattacttaaagatacggattctaaacactagtaggttctcttcacttaacaagtgtttcttttttttttttttt

SEQ ID NO: 490143 - DNA, 120 bp, Artificial Sequence
  ENSG00000162771_0 (sequence is synthesized)
agagagggtcgtcacttcctgtcactaggactacagtttgtagtctctctcagggagagagactacaaactgtaattaaaaaaatcagaggtggaggtcagggggttaggtccagaagaa

SEQ ID NO: 490144 - DNA, 120 bp, Artificial Sequence
  ENSG00000162771_1 (sequence is synthesized)
aacctctctggagcccaccctgcatctctacgtcttggaagagtctggagtccaggcaccctacagcaccccccacagcaatcatccgtgctcccacccccaccccggcctctgggaggc

SEQ ID NO: 490145 - DNA, 120 bp, Artificial Sequence
  ENSG00000162771_2 (sequence is synthesized)
tctgaggcaacagtgggggcctgtggggtggggtgggattgagagaccagctgcagagacatctttgtgacccaggagcaccactggtccctcatctgccaccgaggccaaggaagaccc

SEQ ID NO: 490146 - DNA, 120 bp, Artificial Sequence
  ENSG00000162771_3 (sequence is synthesized)
agagacctgcctcaccagtgctgccgttgtgctgaaagacaaccatgaatgctgattttctgctgccgtattatacggcccagagtggctccagcatgagcatgttcaacaccaccatgg

SEQ ID NO: 490147 - DNA, 120 bp, Artificial Sequence
  ENSG00000162771_4 (sequence is synthesized)
ggaaactgcagcgacaactgtacaagggggagtacgatatattcaagtatgcaccgatatttgagagcgactttatccagatcaccaaaaggggagaagtgattgatgtgcacaaccgtg

SEQ ID NO: 490148 - DNA, 120 bp, Artificial Sequence
  ENSG00000162771_5 (sequence is synthesized)
tccgtatggtgaccatgggcattgcacgtaccagccccatcctcccactcccagatgtcatgctactggcacgaccggccaccggctgcgaagagtatgctggacatggccaggccacca

SEQ ID NO: 490149 - DNA, 120 bp, Artificial Sequence
  ENSG00000162771_6 (sequence is synthesized)
agagaaaaaaacgcaaggcagcaaagaacttagagctcaccaggcttctgcccctgaggtttgtacggatctctgttcaagaccatgagaaacaacagctgcgcctgaagttcgccactg

SEQ ID NO: 490150 - DNA, 120 bp, Artificial Sequence
  ENSG00000162771_7 (sequence is synthesized)
gcagatcttgctatctgcaattgtgtcccgctcttgacacacgggatgacctctttgcctattgggaaaaactaatttacctcttgcggccacccatggagagtaacagcagtacctgtg

SEQ ID NO: 490151 - DNA, 120 bp, Artificial Sequence
  ENSG00000162771_8 (sequence is synthesized)
gcattccagctgaagacatgatgtggatgcctgtgtttcaggaagacaggaggagcctgggagccgtgaaccttcaaggaaagggggatcaggaccaggtcagcatccaaagcctccaca

SEQ ID NO: 490152 - DNA, 120 bp, Artificial Sequence
  ENSG00000162771_9 (sequence is synthesized)
cacctctgctgcttatgctggaggggagggactccaaaatgactttaacaaacccactaatgtgctcaatgcatccatccccaaaacatctacagaacttgctgaggagccagcaacagg

SEQ ID NO: 490153 - DNA, 120 bp, Artificial Sequence
  ENSG00000162771_10 (sequence is synthesized)
ggggattaaagaggcagcagcagcaggggcagctgcaggggcagcaacaggcaccgtagcaggtgccttgagtgtggcagcagccaattctgcccctggacaggtgagcgcagccatagc

SEQ ID NO: 490154 - DNA, 120 bp, Artificial Sequence
  ENSG00000162771_11 (sequence is synthesized)
tggggcggccaccatcggtgcaggaggaaacaaaggcaacatggcccttgcaggcactgccagcatggctccaaacagcacgaaggtggctgtggcaggggctgcaggcaagtcctcaga

SEQ ID NO: 490155 - DNA, 120 bp, Artificial Sequence
  ENSG00000162771_12 (sequence is synthesized)
gcatgtttccagcgcatccatgagcctttcccgagagggcagtgtgagcctggccattgcaggagtagtactgaccagcaggacagctgcagaagcagacatggatgcagcagcgggacc

SEQ ID NO: 490156 - DNA, 120 bp, Artificial Sequence
  ENSG00000162771_13 (sequence is synthesized)
tcccgtctccacccggcagagcaagagcagcctgagtggacagcatggaagggagcgaacccaggccagcgctgaaggctgcaaggaggggagggaaagaagggaaaaggacagggctct

SEQ ID NO: 490157 - DNA, 120 bp, Artificial Sequence
  ENSG00000162771_14 (sequence is synthesized)
cggaaggagttcccatcgccgcaggacaggtgaaagccgccacaaaacaaggggagacaagattgcccaaaagtcctccagcaggtcctcattcagccacagagccaatagagatgacaa

SEQ ID NO: 490158 - DNA, 120 bp, Artificial Sequence
  ENSG00000162771_15 (sequence is synthesized)
aaaggagaaaggctgtggcaacccggggagcagcaggcacagggactcgcataaaggtgtcagccacacgcccatctcaaaggagtccaggacctctcacaaatctgggaggagcttatg

SEQ ID NO: 490159 - DNA, 120 bp, Artificial Sequence
  ENSG00000162771_16 (sequence is synthesized)
gaccaccagttccggttccagcaagggacttggcagggtcagctctttcctgaggaacgtcagagccaaccttactacaaaagtagtgggcacaccacatggcagagatgtgaacgtcat

SEQ ID NO: 490160 - DNA, 120 bp, Artificial Sequence
  ENSG00000162771_17 (sequence is synthesized)
ggctaagatggcggagaggagcaccaacgtggccatcgccgagacagcagagggtggccaggggctggagacggttggttctatgacaccggacatcatggagacagtgacctttgaagc

SEQ ID NO: 490161 - DNA, 120 bp, Artificial Sequence
  ENSG00000162771_18 (sequence is synthesized)
ccattaaataagacccagagctggaagctgcaaaggagcccagagctcatgggagtgtccctggaaagcctattccagcgttctttactgccgtttaaataaagaatcatacatctgaaa

SEQ ID NO: 490162 - DNA, 120 bp, Artificial Sequence
  ENSG00000162772_0 (sequence is synthesized)
acagtcgcacgcagccaggcgcgcactgcacagctctcttctctcgccgccgcccgagcgcacccttcagcccgcgcgccggccgtgagtcctcggtgctcgcccgccggccagacaaac

SEQ ID NO: 490163 - DNA, 120 bp, Artificial Sequence
  ENSG00000162772_1 (sequence is synthesized)
agcccgcccgaccccgtcccgaccctggccgccccgagcggagcctggagcaaaatgatgcttcaacacccaggccaggtctctgcctcggaagtgagtgcttctgccatcgtcccctgc

SEQ ID NO: 490164 - DNA, 120 bp, Artificial Sequence
  ENSG00000162772_2 (sequence is synthesized)
ctgtcccctcctgggtcactggtgtttgaggattttgctaacctgacgccctttgtcaaggaagagctgaggtttgccatccagaacaagcacctctgccaccggatgtcctctgcgctg

SEQ ID NO: 490165 - DNA, 120 bp, Artificial Sequence
  ENSG00000162772_3 (sequence is synthesized)
gaatcagtcactgtcagcgacagacccctcggggtgtccatcacaaaagccgaggtagcccctgaagaagatgaaaggaaaaagaggcgacgagaaagaaataagattgcagctgcaaag

SEQ ID NO: 490166 - DNA, 120 bp, Artificial Sequence
  ENSG00000162772_4 (sequence is synthesized)
tgccgaaacaagaagaaggagaagacggagtgcctgcagaaagagtcggagaagctggaaagtgtgaatgctgaactgaaggctcagattgaggagctcaagaacgagaagcagcatttg

SEQ ID NO: 490167 - DNA, 120 bp, Artificial Sequence
  ENSG00000162772_5 (sequence is synthesized)
atatacatgctcaaccttcatcggcccacgtgtattgtccgggctcagaatgggaggactccagaagatgagagaaacctctttatccaacagataaaagaaggaacattgcagagctaa

SEQ ID NO: 490168 - DNA, 120 bp, Artificial Sequence
  ENSG00000162772_6 (sequence is synthesized)
gcagtcgtggtatgggggcgactggggagtcctcattgaatcctcattttatacccaaaaccctgaagccattggagagctgtcttcctgtgtacctctagaatcccagcagcagagaac

SEQ ID NO: 490169 - DNA, 120 bp, Artificial Sequence
  ENSG00000162772_7 (sequence is synthesized)
catcaaggcgggagggcctgcagtgattcagcaggcccttcccattctgccccagagtgggtcttggaccagggcaagtgcatctttgcctcaactccaggatttaggccttaacacact

SEQ ID NO: 490170 - DNA, 120 bp, Artificial Sequence
  ENSG00000162772_8 (sequence is synthesized)
tggcccccagctggtgtcctgcccgcctttcatctggattctacaaaaaaccaggatgcccaccgttaggattcaggcagcagtgtctgtacctcgggtgggagggatggggccatctcc

SEQ ID NO: 490171 - DNA, 120 bp, Artificial Sequence
  ENSG00000162772_9 (sequence is synthesized)
ttcaccgtggctaccattgtcactcgtaggggatgtggagtgagaacagcatttagtgaagttgtgcaacggccagggttgtgctttctagcaaatatgctgttatgtccagaaattgtg

SEQ ID NO: 490172 - DNA, 120 bp, Artificial Sequence
  ENSG00000162772_10 (sequence is synthesized)
tgtgcaagaaaactaggcaatgtactcttccgatgtttgtgtcacacaacactgatgtgacttttatatgctttttctcagatctggtttctaagagttttggggggcggggctgtcacc

SEQ ID NO: 490173 - DNA, 120 bp, Artificial Sequence
  ENSG00000162772_11 (sequence is synthesized)
acgtgcagtatctcaagatattcaggtggccagaagagcttgtcagcaagaggaggacagaattctcccagcgttaacacaaaatccatgggcagtatgatggcaggtcctctgttgcaa

SEQ ID NO: 490174 - DNA, 120 bp, Artificial Sequence
  ENSG00000162772_12 (sequence is synthesized)
actcagttccaaagtcacaggaagaaagcagaaagttcaacttccaaagggttaggactctccactcaatgtcttaggtcaggagttgtgtctaggctggaagagccaaagaatattcca

SEQ ID NO: 490175 - DNA, 120 bp, Artificial Sequence
  ENSG00000162772_13 (sequence is synthesized)
ttttcctttccttgtggttgaaaaccacagtcagtggagagatgtttggaaaccacagtcagtggagcctgggtggtacccaggctttagcattattggatgtcaatagcattgtttttg

SEQ ID NO: 490176 - DNA, 120 bp, Artificial Sequence
  ENSG00000162772_14 (sequence is synthesized)
tcatgtagctgttttaagaaatctggcccagggtgtttgcagctgtgagaagtcactcacactggccacaaggacgctggctactgtctattaaaattctgatgtttctgtgaaattctc

SEQ ID NO: 490177 - DNA, 120 bp, Artificial Sequence
  ENSG00000162772_15 (sequence is synthesized)
agagtgtttaattgtactcaatggtatcattacaattttctgtaagagaaaatattacttatttatcctagtattcctaacctgtcagaataataaatattggaaccaagacatggtaaa

SEQ ID NO: 490178 - DNA, 120 bp, Artificial Sequence
  ENSG00000162772_16 (sequence is synthesized)
ggcggaggtggggttagcttcagttgaccaaccatgccttgaggataaattggatgggatcagatgggaagatgtgacaagaagagaaatcctcctctatataggatgctctgctgtttc

SEQ ID NO: 490179 - DNA, 120 bp, Artificial Sequence
  ENSG00000162772_17 (sequence is synthesized)
tgcatatgggctgttgactcatgcaaatgaggtatctgaactgcagcttcagtattagcagagccacaggccgcctctgtggcatcaccagggtttctctgaagaagagggtctgcattt

SEQ ID NO: 490180 - DNA, 120 bp, Artificial Sequence
  ENSG00000162772_18 (sequence is synthesized)
tcctaaacccagtgctgctctcccatctcccatcttcctctcgcagcttgatgagccccggtgtgtcccaggtacacccctgcatccaggcagcagcccaggccaccccctcctcactgg

SEQ ID NO: 490181 - DNA, 120 bp, Artificial Sequence
  ENSG00000162772_19 (sequence is synthesized)
gtgcctgcagaaagtgagtgccttctagccttacccttcctctcgctcacgcctgtcttcaccagcttcatgtggctatcagaagaagagttagaaaaccccctacttggttatagtttc

SEQ ID NO: 490182 - DNA, 120 bp, Artificial Sequence
  ENSG00000162772_20 (sequence is synthesized)
aacacaatggatgtgacggtggatgtataaaaacaggtgtgtgaattcgtctgatgcctgactcccagcagcctcggccggttcatacatgtccatcagcttccaggctgcaggacatgc

SEQ ID NO: 490183 - DNA, 120 bp, Artificial Sequence
  ENSG00000162772_21 (sequence is synthesized)
cagcccagttaaagaggcttcacttgactgttttcctgagaaaaggaagctgccagctctcatttggctcactatgaaaagcctttaattaatctcttcaaacaagttatttccttaatc

SEQ ID NO: 490184 - DNA, 120 bp, Artificial Sequence
  ENSG00000162772_22 (sequence is synthesized)
cacaagcagtggttacacttgctttgcattcttgtctggttcctaactctagagcccttctccctggcttagccagtaagctgagcccctggctgcgttcagccggcccgcctgagagac

SEQ ID NO: 490185 - DNA, 120 bp, Artificial Sequence
  ENSG00000162772_23 (sequence is synthesized)
actaggggaaatagcttttgtgggcaagcagggtggccggtggtgctcagcagtctttccagtggctgtgtccctcctccaaatgtggacaggccatgacagagtcttagcccaagtccc

SEQ ID NO: 490186 - DNA, 120 bp, Artificial Sequence
  ENSG00000162772_24 (sequence is synthesized)
acagatccccaaaagttctgttgattgcttcaggggatcagtgaaaattagggaattttgtgtgttgctatatacattttttctggggagatgagcttctcattgagatctgtgactcag

SEQ ID NO: 490187 - DNA, 120 bp, Artificial Sequence
  ENSG00000162772_25 (sequence is synthesized)
ttaattccaaatcctgatgctgccccatattaattctgtgaattcgggcaaatgacttagtttgtctaaacctcaattatctcatctataaaaggcagctagatcttaactcactgggtt

SEQ ID NO: 490188 - DNA, 120 bp, Artificial Sequence
  ENSG00000162772_26 (sequence is synthesized)
ctcgtgaggattaaatgagatagtgcccctaaggtttctggtatgaaggaggcactccttaaatgttcgagacttgccagagggcttcttctctgtctggactgtgctaatgaccacaga

SEQ ID NO: 490189 - DNA, 120 bp, Artificial Sequence
  ENSG00000162772_27 (sequence is synthesized)
tccccggttgagaggaatgcccagaccacactcatcctacactcatccctatactcattgtcccttgggaaccaactgcagggaggaggggaaatggccaccactggagggagtacacag

SEQ ID NO: 490190 - DNA, 120 bp, Artificial Sequence
  ENSG00000162772_28 (sequence is synthesized)
caggccaagacttatgggggactcttccaaattggggccatggaactgtcactatttctactctttattttccttttgtcatccttttgggttcaccgagctatagaataacagagggag

SEQ ID NO: 490191 - DNA, 120 bp, Artificial Sequence
  ENSG00000162772_29 (sequence is synthesized)
atgaatttagcaaatacatcactgaagcttctccctcggaagttgggcccaagcaatgggaatgagaaaggtaaccttggaccgtgggggccatttgatttgatgaccccatccccactt

SEQ ID NO: 490192 - DNA, 120 bp, Artificial Sequence
  ENSG00000162772_30 (sequence is synthesized)
catttatcagttggccaatgaggcatggcgagtcaggcattgggccaggctctgggtaaagcaatggtggagactcaatgcttgcattggagaagctggaaagtgtgaatgctgaactga

SEQ ID NO: 490193 - DNA, 120 bp, Artificial Sequence
  ENSG00000162772_31 (sequence is synthesized)
tccgctccgttcggccggttctcccgggaagctattaatagcattacgtcagcctgggactggcaacacggagtaaacgaccgcgccgccagcctgagggctataaaaggggtgatgcaa

SEQ ID NO: 490194 - DNA, 120 bp, Artificial Sequence
  ENSG00000162775_0 (sequence is synthesized)
gcgcgcggggggcggggctccccccggctgttcactcagctaccacagcgacgtaaaatggtgtccgctaggcgtcccaggacggcttcctgagggactggagggccccgacagccggaa

SEQ ID NO: 490195 - DNA, 120 bp, Artificial Sequence
  ENSG00000162775_1 (sequence is synthesized)
agcctgccccgccccttggccggcacaggtacgacggcggggagctcagaagtttcgaactccaagggccgaagcacagccaaacaccccacggaacttaacaaatgtttgtggggagaa

SEQ ID NO: 490196 - DNA, 120 bp, Artificial Sequence
  ENSG00000162775_2 (sequence is synthesized)
cgccgaaaacgcggggaggcggggctggcgcacagtcaccctctcgcgacatctaagtgacgtcgcacagcaagcacgtgttctagtctttcaccttcagtcagcctcctccgttataca

SEQ ID NO: 490197 - DNA, 120 bp, Artificial Sequence
  ENSG00000162775_3 (sequence is synthesized)
ggcctacccctttaagcgagtgatggacagttatttcagcctatcaacttccttgccgacatccaatcagatttaaacttcttttagccgccggaggagttggaaaaagggggtcgaaag

SEQ ID NO: 490198 - DNA, 120 bp, Artificial Sequence
  ENSG00000162775_4 (sequence is synthesized)
agggagcttaccgtctctcgcgatatcgctgtgagcctgcctctctggaaaaaacgccgaaactgatggcccgacctcccaaatagtggtttaaaggacgggtttataagccaatgaaag

SEQ ID NO: 490199 - DNA, 120 bp, Artificial Sequence
  ENSG00000162775_5 (sequence is synthesized)
ggataaggaggtgggttgctgctgtcactgagcaagaagtaccgttacagggcagactttttgtccaatcaacacctcaacactttgggtcacgtgaccgcagagtgcgaggggcggagc

SEQ ID NO: 490200 - DNA, 120 bp, Artificial Sequence
  ENSG00000162775_6 (sequence is synthesized)
tacagtctggcgcgaggaaccgttaagatagacaacaaatgtaaccaatgaggtactccgactagggggttgggaacccaataacagtggttgggcgggcgccttcctggagcgcgggga

SEQ ID NO: 490201 - DNA, 120 bp, Artificial Sequence
  ENSG00000162775_7 (sequence is synthesized)
gatgtaaagatagacaaataattttcccaatgagactgtagaagagagagcaattggccaatgaggactgcggggcgggaccctgtgccgcggcggagtccaagatggcggcgtgcggtt

SEQ ID NO: 490202 - DNA, 120 bp, Artificial Sequence
  ENSG00000162775_8 (sequence is synthesized)
ccgctgtgtgaaacgagcgcggggcggcgggttactcagctccgcggagacgacctccgacgacccgcaacaatgaagggaaaagagcgctcgccagtgaaggccaaacgctcccgtggt

SEQ ID NO: 490203 - DNA, 120 bp, Artificial Sequence
  ENSG00000162775_9 (sequence is synthesized)
ggtgaggactcgacttcccgcggtgagcggagcaagaagttagggggctctggtggcagcaatgggagcagcagcggaaagaccgatagcggcggtgggtcgcggcggagtctccacctg

SEQ ID NO: 490204 - DNA, 120 bp, Artificial Sequence
  ENSG00000162775_10 (sequence is synthesized)
gacaagtccagcagtcgaggtggcagccgcgagtatgataccggtgggggcagctccagtagccgcttgcatagttatagctccccgagcaccaaaaattcttcgggcgggggcgaatcg

SEQ ID NO: 490205 - DNA, 120 bp, Artificial Sequence
  ENSG00000162775_11 (sequence is synthesized)
cgcagcagctcccggggtggaggcggggagtcacgttcctctggggccgcctcctcagctcccggcggcggggacggcgcggaatacaagactctgaagataagcgagttggggtcccag

SEQ ID NO: 490206 - DNA, 120 bp, Artificial Sequence
  ENSG00000162775_12 (sequence is synthesized)
cttagtgacgaagcggtggaggacggcctgtttcatgagttcaaacgcttcggtgatgtaagtgtgaaaatcagtcatctgtcgggttctggcagcggggatgagcgggtagcctttgtg

SEQ ID NO: 490207 - DNA, 120 bp, Artificial Sequence
  ENSG00000162775_13 (sequence is synthesized)
aacttccggcggccagaggacgcgcgggcggccaagcatgccagaggccgcctggtgctctatgaccggcctctgaagatagaagctgtgtatgtgagccggcgccgcagccgctcccct

SEQ ID NO: 490208 - DNA, 120 bp, Artificial Sequence
  ENSG00000162775_14 (sequence is synthesized)
ttagacaaagatacttatcctccatcagccagtgtggtcggggcctctgtaggtggtcaccggcacccccctggaggtggtggaggccagagatcactttcccctggtggcgctgctttg

SEQ ID NO: 490209 - DNA, 120 bp, Artificial Sequence
  ENSG00000162775_15 (sequence is synthesized)
ggatacagagactaccggctgcagcagttggctcttggccgcctgccccctccacctccgccaccattgcctcgagacctggagagagaaagagactacccgttctatgagagagtgcgc

SEQ ID NO: 490210 - DNA, 120 bp, Artificial Sequence
  ENSG00000162775_16 (sequence is synthesized)
cctgcatacagtcttgagccaagggtgggagctggagcaggtgctgctcctttcagagaagtggatgagatttcacccgaggatgatcagcgagctaaccggacgctcttcttgggcaac

SEQ ID NO: 490211 - DNA, 120 bp, Artificial Sequence
  ENSG00000162775_17 (sequence is synthesized)
tttggagtcatcacagaagtagatatcaagaggccttctcgcggccagactagtacttacggctttctcaaatttgagaacttagatatgtctcaccgggccaaattagcaatgtctggc

SEQ ID NO: 490212 - DNA, 120 bp, Artificial Sequence
  ENSG00000162775_18 (sequence is synthesized)
aaaattataattcggaatcctatcaaaattggttatggtaaagctacacccaccacccgcctctgggtgggaggcctgggaccttgggttcctcttgctgccctggcacgagaatttgat

SEQ ID NO: 490213 - DNA, 120 bp, Artificial Sequence
  ENSG00000162775_19 (sequence is synthesized)
cgatttggcaccatacgcaccatagactaccgaaaaggtgatagttgggcatatatccagtatgaaagcctggatgcagcgcatgctgcctggacccatatgcggggcttcccacttggt

SEQ ID NO: 490214 - DNA, 120 bp, Artificial Sequence
  ENSG00000162775_20 (sequence is synthesized)
ggcccagatcgacgccttagagtagactttgccgacaccgaacatcgttaccagcagcagtatctgcagcctctgcccttgactcattatgagctggtgacagatgcttttggacatcgg

SEQ ID NO: 490215 - DNA, 120 bp, Artificial Sequence
  ENSG00000162775_21 (sequence is synthesized)
gcaccagaccctttgaggggtgctcgggataggacaccacccttactatacagagatcgtgatagggacctttatcctgactctgattgggtgccacccccacccccagtccgagaacgc

SEQ ID NO: 490216 - DNA, 120 bp, Artificial Sequence
  ENSG00000162775_22 (sequence is synthesized)
agcactcggactgcagctacttctgtgcctgcttacgagccactggatagcctagatcgcaggcgggatggttggtccttggaccgggacagaggtgatcgagatctgcccagcagcaga

SEQ ID NO: 490217 - DNA, 120 bp, Artificial Sequence
  ENSG00000162775_23 (sequence is synthesized)
gaccagcctaggaagcgaaggctgcctgaggagagtggaggacgtcatctggataggtctcctgagagtgaccgcccacgaaaacgtcactgcgctccttctcctgaccgcagtccagaa

SEQ ID NO: 490218 - DNA, 120 bp, Artificial Sequence
  ENSG00000162775_24 (sequence is synthesized)
ttgagcagtagccgggatcgttacaacagcgacaatgatcgatcttcccgtcttctcttggaaaggccctctccaatcagagacagacgaggtagtttggagaagagccagggtgacaag

SEQ ID NO: 490219 - DNA, 120 bp, Artificial Sequence
  ENSG00000162775_25 (sequence is synthesized)
cgagaccgtaaaaactctgcatcagctgaacgagataggaagcaccggacaactgctcccactgagggaaaaagccctctgaaaaaagaagaccgctctgatgggagtgcacctagcacc

SEQ ID NO: 490220 - DNA, 120 bp, Artificial Sequence
  ENSG00000162775_26 (sequence is synthesized)
agcactgcttcctccaagctgaagtccccgtcccagaaacaggatggggggacagcccctgtggcatcagcctctcccaaactctgtttggcctggcagggcatgcttctactgaagaac

SEQ ID NO: 490221 - DNA, 120 bp, Artificial Sequence
  ENSG00000162775_27 (sequence is synthesized)
agcaactttccttccaacatgcatctgttgcagggtgacctccaagtggctagtagtcttcttgtggagggttcaactggaggcaaagtggcccagctcaagatcactcagcgtctccgt

SEQ ID NO: 490222 - DNA, 120 bp, Artificial Sequence
  ENSG00000162775_28 (sequence is synthesized)
ttggaccagcccaagttggatgaagtaactcgacgcatcaaagtagcagggcccaatggttatgccattcttttggctgtgcctggaagttctgacagccggtcctcctcttcctcagct

SEQ ID NO: 490223 - DNA, 120 bp, Artificial Sequence
  ENSG00000162775_29 (sequence is synthesized)
gcatcagacactgccacttctactcagaggccacttaggaaccttgtgtcctatttaaagcaaaagcaggcagccggggtgatcagcctccctgtggggggcaacaaagacaaggaaaac

SEQ ID NO: 490224 - DNA, 120 bp, Artificial Sequence
  ENSG00000162775_30 (sequence is synthesized)
accggggtccttcatgccttcccaccttgtgagttctcccagcagttcctggattcccctgccaaggcactggccaaatctgaagaagattacctggtcatgatcattgtccgtgggttt

SEQ ID NO: 490225 - DNA, 120 bp, Artificial Sequence
  ENSG00000162775_31 (sequence is synthesized)
ggttttcagataggagttaggtatgagaacaagaagagagaaaacttggcgctgaccctgttatagtggttatagtggtgtccctaaagggaggaaatgatttcagcaaaactggttgaa

SEQ ID NO: 490226 - DNA, 120 bp, Artificial Sequence
  ENSG00000162775_32 (sequence is synthesized)
cagcggatgaagatatggaattcaaagctctaatggacctttttgaagagaagttgtggcttatgtggagtttacatgggcctctgatggaagaaagctaatctgtttagtatttgtgca

SEQ ID NO: 490227 - DNA, 120 bp, Artificial Sequence
  ENSG00000162775_33 (sequence is synthesized)
ttttactaaaatggcagcttaaagttgtgtatctgctattgtgatgccaatgccggtgttttaagtggaaaaaaaatgacctctttgatttgtgctgtgtacacaagatttctggaaaag

SEQ ID NO: 490228 - DNA, 120 bp, Artificial Sequence
  ENSG00000162775_34 (sequence is synthesized)
taaagaaaaaccctttttatggctcacacagcttaagagtagctgtctctcaaacgtgcgctcacagttgagctgcttttgttttattctaaataaattgtttcttttgaggaaaatgtt

SEQ ID NO: 490229 - DNA, 120 bp, Artificial Sequence
  ENSG00000162775_35 (sequence is synthesized)
tgtgtaatgggatacagcatcagatgcaattttctttttagttgttagttgtagcattttcttttttatatttttataaacgtctttaaaatagaaatcaggacagtttagctatttttt

SEQ ID NO: 490230 - DNA, 120 bp, Artificial Sequence
  ENSG00000162775_36 (sequence is synthesized)
tgtttgtttagctattattttaagtgaaagggatgccctaaaggtagcaggcaggcagacagatttgctttaattaggagttcccacccttatgagtaattttttttctctattcagttg

SEQ ID NO: 490231 - DNA, 120 bp, Artificial Sequence
  ENSG00000162775_37 (sequence is synthesized)
ttttttttttaatcttgagcttaaaaaatcctcagagttacaaaaccaaaattttgaaaagtcagaatttggagaaaggagtccactgaccatataaagagagtaatagccacctaaaaa

SEQ ID NO: 490232 - DNA, 120 bp, Artificial Sequence
  ENSG00000162777_0 (sequence is synthesized)
ataggggggcggggccagcgcggagctgggagcgggagccgggcactccaggggccatggatgggctcggccgccgccttcgagccagcctgagactgaagcgcggccatgggggaccac

SEQ ID NO: 490233 - DNA, 120 bp, Artificial Sequence
  ENSG00000162777_1 (sequence is synthesized)
cccaggacaattcaggggaagctttaaaggaaccagaaagggcccaggagcactctttgcccaactttgctggggggcagcacttctttgaataccttcttgtggtttctctcaaaaaga

SEQ ID NO: 490234 - DNA, 120 bp, Artificial Sequence
  ENSG00000162777_2 (sequence is synthesized)
agcgttcagaggatgattacgagcctataatcacctaccaatttcccaagcgggagaacctgcttcggggtcagcaggaggaggaggagcggctgctcaaagctatccccttgttctgct

SEQ ID NO: 490235 - DNA, 120 bp, Artificial Sequence
  ENSG00000162777_3 (sequence is synthesized)
tcccagatgggaatgagtgggcatcactcaccgagtatcccagggagaccttctccttcgttctgaccaatgtggatgggagcagaaagattggatactgcaggcgcctcttgcctgccg

SEQ ID NO: 490236 - DNA, 120 bp, Artificial Sequence
  ENSG00000162777_4 (sequence is synthesized)
gccctggccctcgccttcccaaagtgtactgcatcatcagctgcatcggctgcttcggcttgttctccaagatcctggatgaagtggagaagagacatcagatctccatggctgtcatct

SEQ ID NO: 490237 - DNA, 120 bp, Artificial Sequence
  ENSG00000162777_5 (sequence is synthesized)
acccgttcatgcagggcctccgagaggcagccttccctgctcctgggaagactgtcactctcaagagcttcatccccgactcaggcactgagttcatttcactgacacggcccctggact

SEQ ID NO: 490238 - DNA, 120 bp, Artificial Sequence
  ENSG00000162777_6 (sequence is synthesized)
cccacctagaacatgtggattttagttctctattgcactgtctcagttttgaacagatacttcagatctttgcctctgccgtgctggagagaaaaatcatcttcctggcggaaggtctca

SEQ ID NO: 490239 - DNA, 120 bp, Artificial Sequence
  ENSG00000162777_7 (sequence is synthesized)
ggccaccgtctgctgccccacccccttcatggttggagtacaaatgcgcttccagcaggaggtcatggacagccctatggaagaggtcctgctggtcaatctttgtgaaggaaccttctt

SEQ ID NO: 490240 - DNA, 120 bp, Artificial Sequence
  ENSG00000162777_8 (sequence is synthesized)
aatgtcggttggtgatgaaaaagacatcctgccaccgaagcttcaggatgacatcttagactctcttggtcaggggatcaatgagttaaagactgcagaacaaatcaacgagcatgtttc

SEQ ID NO: 490241 - DNA, 120 bp, Artificial Sequence
  ENSG00000162777_9 (sequence is synthesized)
aggcccctttgtgcagttctttgtcaagattgtgggccattatgcttcctatatcaagcgggaggcaaatgggcaaggccacttccaagaaagatccttctgtaaggctctgacctccaa

SEQ ID NO: 490242 - DNA, 120 bp, Artificial Sequence
  ENSG00000162777_10 (sequence is synthesized)
gaccaaccgccgatttgtgaagaagtttgtgaagacacagctcttctcacttttcatccaggaagccgagaagagcaagaatcctcctgcaggctatttccaacagaaaatacttgaata

SEQ ID NO: 490243 - DNA, 120 bp, Artificial Sequence
  ENSG00000162777_11 (sequence is synthesized)
tgaggaacagaagaaacagaagaaaccaagggaaaaaactgtgaaataagagctgtggtgaataagaatgactagagctacacaccatttctggacttcagcccctgccagtgtggcagg

SEQ ID NO: 490244 - DNA, 120 bp, Artificial Sequence
  ENSG00000162777_12 (sequence is synthesized)
atcagcaaaactgtcagctcccaaaatccatatcctcactctgagtcttggtatccaggtattgcttcaaactggtgtctgagatttggatccctggtattgatttctcaggactttgga

SEQ ID NO: 490245 - DNA, 120 bp, Artificial Sequence
  ENSG00000162777_13 (sequence is synthesized)
gggctctgacaccatgctcacagaactgggctcagagctccattttttgcagaggtgacacaggtaggaaacagtagtacatgtgttgtagacacttggttagaagctgctgcaactgcc

SEQ ID NO: 490246 - DNA, 120 bp, Artificial Sequence
  ENSG00000162777_14 (sequence is synthesized)
ctctcccatcattataacatcttcaacacagaacacactttgtggtcgaaaggctcagcctctctacatgaagtctgtggacatgtaaggacgagagtaaagaggaaaatcttattttta

SEQ ID NO: 490247 - DNA, 120 bp, Artificial Sequence
  ENSG00000162777_15 (sequence is synthesized)
gcgggcccgcccaggtgcgcccgggggttgggccggagtccggaaggtgcgccgcgccgccccgaacctgtcccctaggcctccccccgcgtgaaagtgaaagtgtcggacccgcggagg

SEQ ID NO: 490248 - DNA, 120 bp, Artificial Sequence
  ENSG00000162777_16 (sequence is synthesized)
tcaaggataggggggcggggccagcgcggagctgggagcgggagccgggcactccaggggccatggatgggctcggccgccgccttcgagccagcctgagactgaagcgcggccatgggg

SEQ ID NO: 490249 - DNA, 120 bp, Artificial Sequence
  ENSG00000162777_17 (sequence is synthesized)
gagagcgcggggggacggcgtgggcaccggggagccggggctagggctggcggctggggcccggtggagggcggcacggggcgtcgagatccgggagcagttggaaggggactcaggagg

SEQ ID NO: 490250 - DNA, 120 bp, Artificial Sequence
  ENSG00000162777_18 (sequence is synthesized)
cagaagcacccgacaggttaggcagtctctgtggtaccctggggccttggcctccatgtggcctctccagcacatttccgtggcttctgtgtcagtggtttctttcctctgcttggctcc

SEQ ID NO: 490251 - DNA, 120 bp, Artificial Sequence
  ENSG00000162777_19 (sequence is synthesized)
ccatggtttcaagtctaccagggcaggtgtggaaactgcccatttggccctgatcctgagtgactggtggttctggccagtatccaggtatctcagcattggcaaggcggccttgaggtg

SEQ ID NO: 490252 - DNA, 120 bp, Artificial Sequence
  ENSG00000162777_20 (sequence is synthesized)
ccgaagcagcccctttctcaggcttactgtcaccagtctgtctgtgttaggggagaggggagtccgctctgtcctgaaggcccagagatggaaggacaagtggtaggccgggtgttcagg

SEQ ID NO: 490253 - DNA, 120 bp, Artificial Sequence
  ENSG00000162777_21 (sequence is synthesized)
gggcttattggcagcactggttgtagaaaaagcacagcccaggacctgctgccatgctagtgctccctctgcagccccacaagcacgaggacctgatgccccttctcccgctgctggtca

SEQ ID NO: 490254 - DNA, 120 bp, Artificial Sequence
  ENSG00000162777_22 (sequence is synthesized)
ggctctggtctgtgctctctctggctttcaatacaactaactcctctccctgcctgctctatccaggcctgcttaccttggcccctggagcctcccagagcagaggctgggacttggaca

SEQ ID NO: 490255 - DNA, 120 bp, Artificial Sequence
  ENSG00000162777_23 (sequence is synthesized)
attagtttcaaatcttaggtctcaggaggattccccaagtcacctttacagtgctttcctccttagccatttcttcatctctaaggcacacttgctacccctctttgctgaccccagatt

SEQ ID NO: 490256 - DNA, 120 bp, Artificial Sequence
  ENSG00000162777_24 (sequence is synthesized)
gtgctggcactgaaggtggcagcgcttgcccaccaactcacccagtaccctcaaggatttcttcttttgatgctggtggccattctgacctccctgctgcacccaccattccccataaat

SEQ ID NO: 490257 - DNA, 120 bp, Artificial Sequence
  ENSG00000162777_25 (sequence is synthesized)
ccccctccccagccctcagccttgtgctccttcatacccagttgggagaagcccttggggaggctgcagcactgaaggagcctctctgtccctccccagcctgccggccctggccctcgc

SEQ ID NO: 490258 - DNA, 120 bp, Artificial Sequence
  ENSG00000162777_26 (sequence is synthesized)
cttcccaaagtgtactgcatcatcagctgcatcggctgcttcggcttgttctccaaggtagggataggattcctcagggcctgcccatattccaggctgtctctggctgccaaccctgcc

SEQ ID NO: 490259 - DNA, 120 bp, Artificial Sequence
  ENSG00000162777_27 (sequence is synthesized)
tgtgcaactaagctcttagtggagctcttctcccatagccagagtcagcattaaagcacacttgggaaaactgaggcaaaggggcatgcacttgacttaagggaaaagtggaaattgaat

SEQ ID NO: 490260 - DNA, 120 bp, Artificial Sequence
  ENSG00000162777_28 (sequence is synthesized)
ctaggggactggacctcttgcagagacagctactgttcccactctagccaagtaagaaagtagttgaagtaggacaagcagaagaaacttctgccctgagtttcaatttcctcatccgtc

SEQ ID NO: 490261 - DNA, 120 bp, Artificial Sequence
  ENSG00000162777_29 (sequence is synthesized)
gcagagcactaaacaaatatgaaggagttataagacccattctgactccttcaagggtagaagaacagttgaggtccccaggacttctcttggagctaatttgagtgccagtgcatctga

SEQ ID NO: 490262 - DNA, 120 bp, Artificial Sequence
  ENSG00000162777_30 (sequence is synthesized)
gacagaatttgagcagaatccatgggggccatgccatccactggtgaccagaaaggacttcattatgctctgaccccagcaggacctttggaggaggaggggaggaaactctgtcagctt

SEQ ID NO: 490263 - DNA, 120 bp, Artificial Sequence
  ENSG00000162777_31 (sequence is synthesized)
ttgcttgggcagagcattcctttgtgcagtgctcctagggatggaggcagtctctgacctcgggaatctacagtgggagttggaggacagagtggtaccaagaggcttagccttctagcc

SEQ ID NO: 490264 - DNA, 120 bp, Artificial Sequence
  ENSG00000162777_32 (sequence is synthesized)
tcctgctccaaccagcatgagtggacatggtaccatcatgggtgatgagtttactccgggatgacttcccagggaggtgcttttatgttggtgttaggagaggggaagaatatggatgtg

SEQ ID NO: 490265 - DNA, 120 bp, Artificial Sequence
  ENSG00000162777_33 (sequence is synthesized)
tagagagataataaaaaggaagctggaagaaggcaggtcttatgtgggagataaactgcagattatttagcatgagcccagcctctgccagggagggagaggaccagttcgtggagggcc

SEQ ID NO: 490266 - DNA, 120 bp, Artificial Sequence
  ENSG00000162777_34 (sequence is synthesized)
ctagaagatacatgaggatcagctgaaccagtatgagaacattatgacgctcaggggcaagtagagtctcttccacctgcctggtagtgtccctttgagccgtgcctcccgtggttcttt

SEQ ID NO: 490267 - DNA, 120 bp, Artificial Sequence
  ENSG00000162777_35 (sequence is synthesized)
taacttgatacccacaagcacctagttactgctcaagccaccaagacttttatttataataaataaaccatgtaagttgaggcttctggtgctataaaggacttttccctcagccctcag

SEQ ID NO: 490268 - DNA, 120 bp, Artificial Sequence
  ENSG00000162777_36 (sequence is synthesized)
actgccacttgccgctaccccccttccactctcctttgtttgtcctgtctctaccttacagcgtccatctgtccatttcttatcatccatccccacctccgagtctccacccatgcacag

SEQ ID NO: 490269 - DNA, 120 bp, Artificial Sequence
  ENSG00000162777_37 (sequence is synthesized)
gggaatgctatcgttttaaggcaccaagcacactgaggcagcaggtagaacactgttctaagaattccagtcctgtcctctggaactctgaatagtctgtgtgcccctttgaaccttggc

SEQ ID NO: 490270 - DNA, 120 bp, Artificial Sequence
  ENSG00000162777_38 (sequence is synthesized)
ttccccacaggaaaataaggggagaggctagaaattttcactttctcaaaaaataagtgcttaatgcttgctgtgtgccaagctatactattttctgggaatacagtggtgaccaaaatg

SEQ ID NO: 490271 - DNA, 120 bp, Artificial Sequence
  ENSG00000162777_39 (sequence is synthesized)
aatgtggtccctgaccttttggagctgtaagtccagtggggagaacagatgttaaataaacacaccagtgcatgttgaattagaaattatgtaactgtgatgaaagaaaaaaaaacaaaa

SEQ ID NO: 490272 - DNA, 120 bp, Artificial Sequence
  ENSG00000162777_40 (sequence is synthesized)
gtctttggcttttactatgggtaaaagtattttcctcgtggaaaataaggcaatgaatatgacaatcaagtggactacaagtggaagacctggccatggggatatgtttggagtgataga

SEQ ID NO: 490273 - DNA, 120 bp, Artificial Sequence
  ENSG00000162777_41 (sequence is synthesized)
atcatggggggcagcagctctacttcttctaaccggaagggtaagagatactggtaaaagcagcagcagcactggacacagggcatctaagtccttggtttggagtcaggtgtgctttcc

SEQ ID NO: 490274 - DNA, 120 bp, Artificial Sequence
  ENSG00000162777_42 (sequence is synthesized)
agaatcctgggaggagaggctgctcactgaagggaagcagcttcagtctagagtaatttgaggataggaatttcagtcaacagcagcctgtgaagaacactacatggcttccatacgtag

SEQ ID NO: 490275 - DNA, 120 bp, Artificial Sequence
  ENSG00000162777_43 (sequence is synthesized)
gtctgtttccccatcactttcagtttgcactagtcctttaccttcagtcttggacatcctacctccaactgatctttattttgagcagcacagtccaattctttaactaaaggtgaaggg

SEQ ID NO: 490276 - DNA, 120 bp, Artificial Sequence
  ENSG00000162777_44 (sequence is synthesized)
atcgctgcactgacgttcttcccctttgagaaaagaatcgtaattttaagagtctgaaggagtttagtggtcacctagtctctcctcccttgatacctctactgatactttctactcaag

SEQ ID NO: 490277 - DNA, 120 bp, Artificial Sequence
  ENSG00000162777_45 (sequence is synthesized)
cattgggaagcttttttagaagaatcttatcttcaaaaattctaccttttttaatgtgtgtatttgtggccctcagaagttcctaaattctatacaaagaacacaaaagtttctggaggg

SEQ ID NO: 490278 - DNA, 120 bp, Artificial Sequence
  ENSG00000162777_46 (sequence is synthesized)
tggaaccgggcatactgaagttcaagccaatgtaatttgcttttgggagtgcagagacctactgcaggtggcagatgtcccactgtccacacaccgtgcttagctacactactattcttc

SEQ ID NO: 490279 - DNA, 120 bp, Artificial Sequence
  ENSG00000162777_47 (sequence is synthesized)
acagcttctaggaattacatttttttttggtagtttatggcagtggtgcctaaatatagttgtacctccaaaggtttcagaacaggaactggaatcctgagaatcttgtgaaaatatcct

SEQ ID NO: 490280 - DNA, 120 bp, Artificial Sequence
  ENSG00000162777_48 (sequence is synthesized)
cttatgcctcatcacaaatacaccaaatcatctctagtgataggacctggaaatctgtactttcttaaaaggttcttcaggtaaggtttgctgaggtttattacaaatgtacccttgatt

SEQ ID NO: 490281 - DNA, 120 bp, Artificial Sequence
  ENSG00000162777_49 (sequence is synthesized)
tgatgctaatgctgtatttagggctgaaggaagcacacactaaatatctgagtgcttttcagattccatctatgctgaaaaagaatctaggagaataaacacatttcaattagcccttaa

SEQ ID NO: 490282 - DNA, 120 bp, Artificial Sequence
  ENSG00000162777_50 (sequence is synthesized)
ggtttttaagagctggtcatgccctctctggggctagtgtggtcacagtcacatgccctttgagcctgttcttattcacttagtatgaactaaactctcaggccatattgttccaggact

SEQ ID NO: 490283 - DNA, 120 bp, Artificial Sequence
  ENSG00000162779_0 (sequence is synthesized)
caaaggaggaagtgagcggatgctgggcgggactatgtggcagcctgcaagtcccagtgcggcgctgatttgtgtctaaattagctttccggaggactatttcaaattactaaagagata

SEQ ID NO: 490284 - DNA, 120 bp, Artificial Sequence
  ENSG00000162779_1 (sequence is synthesized)
ggaggcattgtttattatgtctctcccgaaaacgccctccaccccgctaaactctacatcaacatctgagagcaaaaagttaaaagtgtctgtagccaaggaagggacaagaggacttcc

SEQ ID NO: 490285 - DNA, 120 bp, Artificial Sequence
  ENSG00000162779_2 (sequence is synthesized)
tgagctaaaggagaaaaaaaatatggtggatcgttcaaaactccttcctacttcccttcagaatgagttcattcccaaagaagttcttctttctctgacctatgcggccaatgctggtcc

SEQ ID NO: 490286 - DNA, 120 bp, Artificial Sequence
  ENSG00000162779_3 (sequence is synthesized)
ttgtcctgaaaacttactacctcctaagaaaattaaaaccccaaagggcactcttccacgccttgtagaccatgtctggcatcaccctgttcgaaggaataaattcaaatacctgattga

SEQ ID NO: 490287 - DNA, 120 bp, Artificial Sequence
  ENSG00000162779_4 (sequence is synthesized)
ccatcccgtctccctcacaggagctggaagggatatttcttttctgtacgatgtaacatatgccaaaggacagactagggagaaggcagtttgtcccccacatttggcccgttcattaca

SEQ ID NO: 490288 - DNA, 120 bp, Artificial Sequence
  ENSG00000162779_5 (sequence is synthesized)
gtcacatgatggtgtcattgtgccccataagccaaagacactaacagatactttgattcctgaagaatttcatattgtgtcaagtacaggagtttcaggtttggagtgttatgatgacaa

SEQ ID NO: 490289 - DNA, 120 bp, Artificial Sequence
  ENSG00000162779_6 (sequence is synthesized)
atacactactctcctcacagatagtgaaaacaggctattgctcttcccatccatgaaacctaataaaagagtagaagtggcccagctgaatgatgtgatggatactatgctagagagggc

SEQ ID NO: 490290 - DNA, 120 bp, Artificial Sequence
  ENSG00000162779_7 (sequence is synthesized)
tggtgtggaaaatcaggaatatacaggaccaacgaagatgcacaaactactacatatattgaagaaggaacagaccatttacaacatgatatttcatgaacttattcgacaagtcagtgt

SEQ ID NO: 490291 - DNA, 120 bp, Artificial Sequence
  ENSG00000162779_8 (sequence is synthesized)
ggactgtgcagacagaggagaacttctgtctaaagtcagagagaggtatgtgcaaatgcttgaccagattgctcggcagatgattgatttctacaaagacttggtaactcagcgagtgat

SEQ ID NO: 490292 - DNA, 120 bp, Artificial Sequence
  ENSG00000162779_9 (sequence is synthesized)
ggaccagcgcattttagaagaattgtataatttcaagcatgttattgaagaactgaccagggaactgtgtctagttcgggcacatgatgtgaaattaacaaaggaaacagaaaaagccca

SEQ ID NO: 490293 - DNA, 120 bp, Artificial Sequence
  ENSG00000162779_10 (sequence is synthesized)
caaggatttggcacaagctcttttaaatgcggaaaagaatgccaaaatagtagaagaatatcatgacttatatacattacaaagagaaaggatggagaatgatatgaaaaagttagtggc

SEQ ID NO: 490294 - DNA, 120 bp, Artificial Sequence
  ENSG00000162779_11 (sequence is synthesized)
agaaagagatatctggagctcagccacatatgaattggccctgaaggtgattgaaagaaatagagtcatattggctagaagactttaccttaatgaaaaaggctggaataaatacactaa

SEQ ID NO: 490295 - DNA, 120 bp, Artificial Sequence
  ENSG00000162779_12 (sequence is synthesized)
gcatttcatcatactgctatcaaacaaggacactgaagaccttgcactgttgcagaagttgacacaaaaatggagaaacttagtgaataaacttaaacaagaggtagaacaaatggaaga

SEQ ID NO: 490296 - DNA, 120 bp, Artificial Sequence
  ENSG00000162779_13 (sequence is synthesized)
gtctacaagcgagacactgaaaattgttaaggatgggcttatcaaatggcaggagttcttcaatgaaaaagacattttatcccctaataagggaaatatatttaattcagttcttttaga

SEQ ID NO: 490297 - DNA, 120 bp, Artificial Sequence
  ENSG00000162779_14 (sequence is synthesized)
aaaaaagaagagtttactggggatgttctactgtcaaaatacgatactctcaagattattaaacatttacaggaaaactgggcagatattgggcttgggatatttaatcggcataaaagt

SEQ ID NO: 490298 - DNA, 120 bp, Artificial Sequence
  ENSG00000162779_15 (sequence is synthesized)
ttggagggggagatgccatcagagcgacagtacatggaggaaattatcaaaaacatacaaaaactctacaaagaatatgaaataagaataaatggggacaatggttactccaaaattctt

SEQ ID NO: 490299 - DNA, 120 bp, Artificial Sequence
  ENSG00000162779_16 (sequence is synthesized)
ccaagtttgattagttctcttgacttctgttctttcaagttggaaaacctggagtttcctgatacgcctcttgaagaatggcaggaaatagatgaaaaaattaatgaaatgaaatcacac

SEQ ID NO: 490300 - DNA, 120 bp, Artificial Sequence
  ENSG00000162779_17 (sequence is synthesized)
ttggatatattgttaaaccttactggtattgttccacagcacatagatgtggattctgtttcggtactccaagcgtatatatttaacatgattcaacaatggcttttgaagataggcaat

SEQ ID NO: 490301 - DNA, 120 bp, Artificial Sequence
  ENSG00000162779_18 (sequence is synthesized)
gaaattaacaacggtaacattgaacttcagcaccacatggatgagttacatatatctatgatccagtggatggtaaacttgctgattttaatgatacccaactttactgaccaagactgt

SEQ ID NO: 490302 - DNA, 120 bp, Artificial Sequence
  ENSG00000162779_19 (sequence is synthesized)
ctcctaaagttggaggaggaaagtgctgagaaacatgatataggagttgcgcgattggagctagatgcgattgaactgacaaggaagttgtaccaatactccagctatttgagcagttgt

SEQ ID NO: 490303 - DNA, 120 bp, Artificial Sequence
  ENSG00000162779_20 (sequence is synthesized)
tgcaaagggatggtaacagcaatggctctgagtaaatccactaactcacacaaaaatgctactgaagacctttatgaggtggataagttgaagaaagaatgttatgaatggatcaacaca

SEQ ID NO: 490304 - DNA, 120 bp, Artificial Sequence
  ENSG00000162779_21 (sequence is synthesized)
tgctcttgcctcctttctaatatcaaaggcagaaaaattacattattgacatatgaagaaatagagcggctacttgaagaggaggctgtaaaagaattcattgagcctgaaatagacgag

SEQ ID NO: 490305 - DNA, 120 bp, Artificial Sequence
  ENSG00000162779_22 (sequence is synthesized)
tcttttaaagaagatgaagaagaaagtaaggaggataggaaacttcaggaggaaaataaagagagagcagaagaacaaccttcaacatctacagagaaggaaaaactcattcgattcatt

SEQ ID NO: 490306 - DNA, 120 bp, Artificial Sequence
  ENSG00000162779_23 (sequence is synthesized)
ggagaagatgaaaatgttcattccaaacctctatttgaaacagatgtgttgtcttcctggagagagtcagctaagcaaggtacattggcccaaaaatatcttgaagcaatggctgtaatt

SEQ ID NO: 490307 - DNA, 120 bp, Artificial Sequence
  ENSG00000162779_24 (sequence is synthesized)
gaacatatgcaggagaagttactggaggttgaaaatagagccagacaggcagaggagaagtttgaagatgcatatgagaaacttcatcatacccttataaaaaataaagatctagaggaa

SEQ ID NO: 490308 - DNA, 120 bp, Artificial Sequence
  ENSG00000162779_25 (sequence is synthesized)
ttagtcatgacatcaagaaaggagtctaaagaagagaaagaaaatcaagatgaaagagaagtaaaagaagaagaagaacaacaagaagaagaagaagtcaggtcagcagaaaattcctca

SEQ ID NO: 490309 - DNA, 120 bp, Artificial Sequence
  ENSG00000162779_26 (sequence is synthesized)
aaatctccaaagaaaggtcactgaatccaaggcaacctgtggaaagaagaattcagatgtcagtgggagcctccaggtgggaggagagcatgcctaaaccctggtggccattgttctgta

SEQ ID NO: 490310 - DNA, 120 bp, Artificial Sequence
  ENSG00000162779_27 (sequence is synthesized)
ctaaggaacaacattccctttgaaaggacattatttgcctgttgtatttaacttcacagtgccttgcaaagagttgtttaacttgcatggtgccacccaataaatatctgtgcaattgaa

SEQ ID NO: 490311 - DNA, 120 bp, Artificial Sequence
  ENSG00000162779_28 (sequence is synthesized)
actggcctggcccgcggcaggaagccccggcgtgagacactttcggattccgtgacaacggcgggattaaacgtttttcttctcctttgctactgaacctatgctgtgacttagaacata

SEQ ID NO: 490312 - DNA, 120 bp, Artificial Sequence
  ENSG00000162779_29 (sequence is synthesized)
agaaactccaagagggtgtagggattgtcttagctgtctccctcctccgccggcaccgctgaaggcagcccctatggagggcgctaaacctcggggccctgggtttctatgacgacaaac

SEQ ID NO: 490313 - DNA, 120 bp, Artificial Sequence
  ENSG00000162779_30 (sequence is synthesized)
ttactaagaagtgataaatatattcttaaatagcagcatgatttctactctgacattagcattcagagtcgctcctgggcccccagttctcagttaatcattgatgctgttgcttccctt

SEQ ID NO: 490314 - DNA, 120 bp, Artificial Sequence
  ENSG00000162779_31 (sequence is synthesized)
atttctacccttcagacacattcatctaatctcactgcctttttagaaaatgagtttcgaaatcaaaaatactttttcaaccctttctattttgttgtgtcttctcttccatatcaggga

SEQ ID NO: 490315 - DNA, 120 bp, Artificial Sequence
  ENSG00000162779_32 (sequence is synthesized)
aaaggaggaagtgagcggatgctgggcgggtacgcaatgtgtgggtaggatcgcgggtgtccctttcccgtcattttaaaccaagaagcagtgcgaggcctgcccaactcgcgagtttgt

SEQ ID NO: 490316 - DNA, 120 bp, Artificial Sequence
  ENSG00000162779_33 (sequence is synthesized)
atatggcaaccaaaggaagggcagggaatgaggacagagtgtctccctcaggcatgtgacttttctatggcaggcccctttacagtcacattatgccccatccttcctataacatgggag

SEQ ID NO: 490317 - DNA, 120 bp, Artificial Sequence
  ENSG00000162779_34 (sequence is synthesized)
agtctttctttttaggatttagtggctcaacaggtttggaaggacttgggaaggggaggcttccctgagttctgttgctgggagaagacaggcaattcagtaggtcaaatggcaaaggta

SEQ ID NO: 490318 - DNA, 120 bp, Artificial Sequence
  ENSG00000162779_35 (sequence is synthesized)
aaaccacagtggaaggcttctctgtggacagagactgaagggtgtggaggtatcgaagctgaacggcagcaggggtgcctgacagaatctcagctgccatcctcagggactcagaagcag

SEQ ID NO: 490319 - DNA, 120 bp, Artificial Sequence
  ENSG00000162779_36 (sequence is synthesized)
ccttttccgcttctgcagcaatcatctagaaaacatgtgacgaaagcaaagtgattgttcttcattccctgaaggcttcaccactatgcagtatgactcagcagacaagcactgagcatc

SEQ ID NO: 490320 - DNA, 120 bp, Artificial Sequence
  ENSG00000162779_37 (sequence is synthesized)
tactatgtggcaagcacggttaagcatagaacatgtttattcttctttctgaagggtcttgagctggggagacagattaaactgttaatcacaatttaaggtggaatgcgttaggagcca

SEQ ID NO: 490321 - DNA, 120 bp, Artificial Sequence
  ENSG00000162779_38 (sequence is synthesized)
tcacaagtataaatgaagtattaggggagttattagcatctggtgggccttgaaagattaggattttgccaacatagagaaaagattagccagcattccatgcaaaggcatgacgttatg

SEQ ID NO: 490322 - DNA, 120 bp, Artificial Sequence
  ENSG00000162779_39 (sequence is synthesized)
aaagggtgacccccaactcagggaaagtgaatgggtaaacatttctgaagtgaaagtgctgagctcactacacaaatgctacctgaaagtgggtgaagaggacttcactcagagatctag

SEQ ID NO: 490323 - DNA, 120 bp, Artificial Sequence
  ENSG00000162779_40 (sequence is synthesized)
gatccacaggcaatgatcctcttactggttcaggtttttatcttcacctgctctctgttctttcagagaaatctgcctcccttcattcttcactttcctcttcccaaggccccctcaccc

SEQ ID NO: 490324 - DNA, 120 bp, Artificial Sequence
  ENSG00000162779_41 (sequence is synthesized)
acacctcagttaccagaagctgctagctgccacatctttgcctcttgctgtcatgcctgagtggagccgagtagcacagccttctcttggctctagcattgagggaactgggccctgatc

SEQ ID NO: 490325 - DNA, 120 bp, Artificial Sequence
  ENSG00000162779_42 (sequence is synthesized)
gtggttgtccctctaaaacttgtgccaagcttgggatacagttctaggggatacctagaagttagaagttagggtgactacgattacccaggaaaagatgccagcactagagaagaggga

SEQ ID NO: 490326 - DNA, 120 bp, Artificial Sequence
  ENSG00000162779_43 (sequence is synthesized)
ttgatgtgtgtggaggagatgcctttaaggagagagagggaaggtgagactcaagcagtgagtggtcactattatcagtagcttcagagagggagaggagttgcattagtcaggggacta

SEQ ID NO: 490327 - DNA, 120 bp, Artificial Sequence
  ENSG00000162779_44 (sequence is synthesized)
ttaacacactttaagagagcaattttaatagagttgtaagggcccaagacagcttctgcccagtgcctaatgaatggacagtaaggaagcaaaggggaaatgttctccacgagcaggcct

SEQ ID NO: 490328 - DNA, 120 bp, Artificial Sequence
  ENSG00000162779_45 (sequence is synthesized)
tcctaaagggcagtctgggtgggaggatggagtgctcacccgcactttggcttgtctttgcgcttcagcctccacagccagtgagtgctgaagcccagctggcaacctcacatctttact

SEQ ID NO: 490329 - DNA, 120 bp, Artificial Sequence
  ENSG00000162779_46 (sequence is synthesized)
gatagcactgccggttccaggatttggtcctccaaaaggactatgactgaagatggtggtagtaggaatcttactctcaagatgttttagcagaaagaatgttatgaatggatcaacaca

SEQ ID NO: 490330 - DNA, 120 bp, Artificial Sequence
  ENSG00000162779_47 (sequence is synthesized)
cttactggtattgttccacagcacatagatgtggattctgtttcgtaagttcccataggtttcttttgttctgagataattttcctaaaggtttgttgcaatacacttcatatataattc

SEQ ID NO: 490331 - DNA, 120 bp, Artificial Sequence
  ENSG00000162782_0 (sequence is synthesized)
aatctctactcggcccgcaccagcagcgctggcgtcagggcgcggtgggggcaagacgggtgactggcagcagggcggtgccgggccgagaagggcgcctcacctggcgcctcctgcctt

SEQ ID NO: 490332 - DNA, 120 bp, Artificial Sequence
  ENSG00000162782_1 (sequence is synthesized)
cctttccacctcaggttgcagagagccgccagggcaggtggaagggccacgccccgctcccgtgagggtcaccgagagacgttgggggtggggcagggaccccaaccctagaccagtcct

SEQ ID NO: 490333 - DNA, 120 bp, Artificial Sequence
  ENSG00000162782_2 (sequence is synthesized)
gtagggcacaatgtctgaacaagagcgtatacaggaatgtctgcggaaggaaataaggtcacttctcatttccaccaaagatggtttgagcccacaggagttggagaaggagtacctttt

SEQ ID NO: 490334 - DNA, 120 bp, Artificial Sequence
  ENSG00000162782_3 (sequence is synthesized)
gatggttggcaaccatctaccactccgaatccttgggtatcggtccactatggagctggtattggacatgcctgatgttgttcgtgtctgccccggtgcaggtggtactgtaatactgaa

SEQ ID NO: 490335 - DNA, 120 bp, Artificial Sequence
  ENSG00000162782_4 (sequence is synthesized)
agccattccagatgaatctaccaaaggaatagcaagcttagttgcaaaacagaggagcagccataagcttcgaaactcaatgcataagggaagacctagtatttattctggaccgagatc

SEQ ID NO: 490336 - DNA, 120 bp, Artificial Sequence
  ENSG00000162782_5 (sequence is synthesized)
tcatcggcgagtaccttaccgaggaagggttgcccctattcttccagctgttgtgaagagtgagttgaaggacctgttggcgttatctcctgttcttctttctgattttgaaaaggcatt

SEQ ID NO: 490337 - DNA, 120 bp, Artificial Sequence
  ENSG00000162782_6 (sequence is synthesized)
tgccaaaagatttggacgatcattccaatacatgcaatatggatttctctctatgtttgaagtgcttaatgcggcttcagatgtcatttctgtagagcagaccagagcaggttctttgtt

SEQ ID NO: 490338 - DNA, 120 bp, Artificial Sequence
  ENSG00000162782_7 (sequence is synthesized)
gatgctaaagaagagtgtaacagaggaaaagccgagaggatgtccagcaggtaaaatttttacccagccatttagaatgaaacaagggtcatactccacaggctttccggtagcaaagcc

SEQ ID NO: 490339 - DNA, 120 bp, Artificial Sequence
  ENSG00000162782_8 (sequence is synthesized)
atgcttttcacaacccacttcaaacatggaaccaccgaagcaaataatgagcatggaaaagacttccaagttaaatgtagtggagacttcaagactgaatcacactgaaaaattaaacca

SEQ ID NO: 490340 - DNA, 120 bp, Artificial Sequence
  ENSG00000162782_9 (sequence is synthesized)
gctggagaacacattcaaatcagttattgcacagattggacctggaggaactatcagttcagaactaaaacataagataaaatttgttgtatctaagttcccagagggtttgtttatttc

SEQ ID NO: 490341 - DNA, 120 bp, Artificial Sequence
  ENSG00000162782_10 (sequence is synthesized)
taaactgcttggagagtatgaggtaatttttaaagagcaactatcaccaaaaaaattaggcttcttaaatgtgacagaacttgttggagctcttagtgacattctccatgttgagttcag

SEQ ID NO: 490342 - DNA, 120 bp, Artificial Sequence
  ENSG00000162782_11 (sequence is synthesized)
gaaaggacaccaagacttactagtgtttgatgcggataagaagcctctaccacctgttcagtcagataagaaaatagaagccaaagcttgtgtctccagtccacctagaaattcattgtc

SEQ ID NO: 490343 - DNA, 120 bp, Artificial Sequence
  ENSG00000162782_12 (sequence is synthesized)
tactgctgctgtcaaagagactgtatggaattgcccttcaaaaaaacaaaaagagccacaacagaagatttgcaagaagcctaatctggtggtaaagcctttacagctgcaagtagaaac

SEQ ID NO: 490344 - DNA, 120 bp, Artificial Sequence
  ENSG00000162782_13 (sequence is synthesized)
aaacaaatcagagctcaacttggcaatggcaaatcatgacatcccgccagacgctgtgccgaacaagaaattatgcagactcccaccattagacaccagttccctcataggggtctttgt

SEQ ID NO: 490345 - DNA, 120 bp, Artificial Sequence
  ENSG00000162782_14 (sequence is synthesized)
cagggattcgtcagagttactcgaagacatgatgattgaaatgcggcgctgttattctaatcagctggtttctgatcgatatgtcatgccagaatgttttattcagccgggacatctctg

SEQ ID NO: 490346 - DNA, 120 bp, Artificial Sequence
  ENSG00000162782_15 (sequence is synthesized)
ttgtgtaaggatttctgaggataagtggtggtatcgggtcattatccatcgagtccttgagaaacaggaagttgaagtgttctacccagactttggaaatattggaattgttcagaagtc

SEQ ID NO: 490347 - DNA, 120 bp, Artificial Sequence
  ENSG00000162782_16 (sequence is synthesized)
ctccctgaggttcctcaagtgctgctacacaaagcttccagctcaggctatcccttgttctttggcttgggtgagaccagtagaggaacactggacatcgaaagctattttgcagttcca

SEQ ID NO: 490348 - DNA, 120 bp, Artificial Sequence
  ENSG00000162782_17 (sequence is synthesized)
gaagttgtgcggtttgaagccattagtgggggtagtggatgaatatgtagatggaatccttaacatttttttgtgtgacacatcctcaaacgaagatgtctatttccatcatgtcttgag

SEQ ID NO: 490349 - DNA, 120 bp, Artificial Sequence
  ENSG00000162782_18 (sequence is synthesized)
aacagagggccatgctattgtatgccgagaaaatatctcttctaagggtttcagtgagctcaaccctttagctttatacacgacatccagtggagggccagaggacattgtcttgacaga

SEQ ID NO: 490350 - DNA, 120 bp, Artificial Sequence
  ENSG00000162782_19 (sequence is synthesized)
actgggttatccttcccagcagcactattttaatgaagaccgaaagataagtccacagtcaaaagagagtgagttacgtatcttggatgagatccccactggaatgccatgcctggagtc

SEQ ID NO: 490351 - DNA, 120 bp, Artificial Sequence
  ENSG00000162782_20 (sequence is synthesized)
agtgaccataggtgatgatatttgggatgagaactggttacctctacaggctaagatgggaaaaggaggtgatgctgcctcccatctatttactgcaagccttggtggaaagaatcagta

SEQ ID NO: 490352 - DNA, 120 bp, Artificial Sequence
  ENSG00000162782_21 (sequence is synthesized)
ttcatcatgtaaagaaatgccacagaaggactggtgtttttctacccctaaagatacatgggatgattcttggcagccttcaggccttgtaaatggaacgaaagtagaagttcataagcc

SEQ ID NO: 490353 - DNA, 120 bp, Artificial Sequence
  ENSG00000162782_22 (sequence is synthesized)
agaagtactgggtgctcaggaaaaaaatactggcacaaacaggactcaaaagcaactagacataaatggttcttcagattcttccacactgcccaaattggaagaattctgtacctctct

SEQ ID NO: 490354 - DNA, 120 bp, Artificial Sequence
  ENSG00000162782_23 (sequence is synthesized)
tacccagtcagagcagtcagcagacgggagccagtctgaacccaacaacagtcagactcagccaaagcaaattcagctttccacagcagcaccctgttcaacaactgcagtggatgattc

SEQ ID NO: 490355 - DNA, 120 bp, Artificial Sequence
  ENSG00000162782_24 (sequence is synthesized)
cgcagaaaagccctctggttctgtggaaagctcaccagagatcctaaagaatgaagatttttctagcagccgtgctattacattgtacaaagacaagcgtcaagaatctgtagaccagct

SEQ ID NO: 490356 - DNA, 120 bp, Artificial Sequence
  ENSG00000162782_25 (sequence is synthesized)
gtctttgattttgtcttatgagtgccagatttctcagaagctctacattcctcgaagtacagccactgctgccttaggtgctgccgcacggttagctacatccaggagcctcctacactg

SEQ ID NO: 490357 - DNA, 120 bp, Artificial Sequence
  ENSG00000162782_26 (sequence is synthesized)
gtaccccagtgtgaaaaggatggaagcatgagggagggagggaggagggagaaaaacagaatccagccgcttaggctttgatgaactcccaggccaaaatgaggagttattgaagcaaaa

SEQ ID NO: 490358 - DNA, 120 bp, Artificial Sequence
  ENSG00000162782_27 (sequence is synthesized)
tagtatcttgatcattgatacttttgtctttctgtgactatatgttagctttattatgctaacagtctactttgatgtgtaagtaagtattgatatttactgttaatcttgatttttctt

SEQ ID NO: 490359 - DNA, 120 bp, Artificial Sequence
  ENSG00000162782_28 (sequence is synthesized)
gattttattctgtgtcattttgttcacctttgtttttaatgtagtttaaaggaatttgtttttttgtgtttgtttttcttgtacattatcatgactgataaatgaaaattgaaaaactaa

SEQ ID NO: 490360 - DNA, 120 bp, Artificial Sequence
  ENSG00000162782_29 (sequence is synthesized)
acctcgcgtcttcccaccgcgtcggaggacgtaggcgcctgggatcctggaaggcttcggatgggaagtttgcgttggagtccaacacccgacaggaaccccagttaacgcctccgcatg

SEQ ID NO: 490361 - DNA, 120 bp, Artificial Sequence
  ENSG00000162782_30 (sequence is synthesized)
gccaggggcagagttcttgacacctgtagcttaatcaacgcaggtggagattcagggcttgaatcgcccggccacgcgcaagccgcagggcaccctcatactactacttctgccttatta

SEQ ID NO: 490362 - DNA, 120 bp, Artificial Sequence
  ENSG00000162782_31 (sequence is synthesized)
gtctttgaaaacctgtaataagagctttgaagaagatccaaagtggtccaacccagaaccaaacgatctgaaggaagaaaatgaggatgagatccccactggaatgccatgcctggagtc

SEQ ID NO: 490363 - DNA, 120 bp, Artificial Sequence
  ENSG00000162783_0 (sequence is synthesized)
gtttagcgaccggacccgaaacggggaagttgtcttgtttggagaggttagtagagcagcgcgcgcgtcaccagagtcgtttctcttcggagtcttaggtgatcgagggtgtgcccaggg

SEQ ID NO: 490364 - DNA, 120 bp, Artificial Sequence
  ENSG00000162783_1 (sequence is synthesized)
ggcggacttgtttgcgcctcccgttccctcccaatttccaaacgtgtcaccccggcgccgacggccctgtgcaggggaagcagatggagttcaagctggaggctcatcgcatcgtcagca

SEQ ID NO: 490365 - DNA, 120 bp, Artificial Sequence
  ENSG00000162783_2 (sequence is synthesized)
tctctctgggcaagatctacaactcgcgggtccagcgcggcggcatcaagctgcataagaacctcctggtctcgctggtgctgcgcagcgcccgccaagtctacctgagcgacccgtgcc

SEQ ID NO: 490366 - DNA, 80 bp, Artificial Sequence
  ENSG00000162783_3 (sequence is synthesized)
ctgagcgacccgtgccccggcctctacctggccggtcccgctgggaccccggcgccgccaccgcagcagcagcccgggga

SEQ ID NO: 490367 - DNA, 120 bp, Artificial Sequence
  ENSG00000162783_4 (sequence is synthesized)
cctcttggccggagaccgagccgcagccggagcgctcctccgtctcagacgcgccgcgggtaggggacgaggtgccggtggccacggtgactggagtcggggacgtttttcagggcggag

SEQ ID NO: 490368 - DNA, 120 bp, Artificial Sequence
  ENSG00000162783_5 (sequence is synthesized)
aggcggacgcgacggaagctgcctggagccgcgtggaggggccgcgccaggcggcggccagagaagccgagggtaccgccggaggctggggcgtcttccccgaggtatctcgtgccgcgc

SEQ ID NO: 490369 - DNA, 80 bp, Artificial Sequence
  ENSG00000162783_6 (sequence is synthesized)
gacccgccgggtacaccggccgcgaccccccgcgctgcctgctgctgcgcgccgcaaccagcggaggacgagccccccgc

SEQ ID NO: 490370 - DNA, 120 bp, Artificial Sequence
  ENSG00000162783_7 (sequence is synthesized)
cccaggaagcgctgcgcggcgggggtgggcggcggcccagcgggctgcccggcgcccggctcgaccccgctcaagaagccccgccggaacttagagcagccgccgagtggaggagaggac

SEQ ID NO: 490371 - DNA, 120 bp, Artificial Sequence
  ENSG00000162783_8 (sequence is synthesized)
gagaggacgacgacgcggaggagatggagaccgggaacgtggctaacctcatcagcatcttcggttccagtttctcgggactcctacggaaaagccccgggggcggcagagaggaagagg

SEQ ID NO: 490372 - DNA, 120 bp, Artificial Sequence
  ENSG00000162783_9 (sequence is synthesized)
agggagaggagagcggtccggaagccgccgagcccgggcagatctgctgcgataagccggtgctgagagacatgaacccctggagcacagccatcgtggccttctgagcccttggccccc

SEQ ID NO: 490373 - DNA, 120 bp, Artificial Sequence
  ENSG00000162783_10 (sequence is synthesized)
ctgcggggaggaggtggagcagcgggcgtccccgaagtgagggccaggcccttcccggctgcgaggacgcccagagaccgcgggcgctgagcgcgttgggcagactggttgcctctgggc

SEQ ID NO: 490374 - DNA, 120 bp, Artificial Sequence
  ENSG00000162783_11 (sequence is synthesized)
atcgcaaactgcccccgggcgcatctggcttatctggagacctgggagcttgaggctcattggaagaggacgatcgttaacttttgtgtttgtgtatgtctgtgtatgtaagtttgtctt

SEQ ID NO: 490375 - DNA, 120 bp, Artificial Sequence
  ENSG00000162783_12 (sequence is synthesized)
gtggcattaagactattttgctcttctggaatgcaccactccttccccagggtttaagagattgggggcagacagggactttcctctgccggctgcgtggagaaggaagcggctaaaagg

SEQ ID NO: 490376 - DNA, 120 bp, Artificial Sequence
  ENSG00000162783_13 (sequence is synthesized)
tttgggccggggagttccccattcgttctccggggagggagggactttacacctacccctcaccggaaagctagacccgcttcagggccaggagtggcgtttccgcacaggatttcctaa

SEQ ID NO: 490377 - DNA, 120 bp, Artificial Sequence
  ENSG00000162783_14 (sequence is synthesized)
gacgagagggatttagccaagagcacagacttggattccttctgtccctccccacctttctctcccaatgaagaaacgtttatatcctgtgattactctaggaaaggggcgtattaacgg

SEQ ID NO: 490378 - DNA, 120 bp, Artificial Sequence
  ENSG00000162783_15 (sequence is synthesized)
tcctttgcttccccgcaggggagaaaaagcttgacgaacttcacagaagagttcaagcttggaaataatggagtttatagagaaaagatatatttttaaaagctctaggtcagaagtact

SEQ ID NO: 490379 - DNA, 120 bp, Artificial Sequence
  ENSG00000162783_16 (sequence is synthesized)
acacagtgcttttaaaaagtgtttaatgagagtttacagacagaagcccgaagtggaaagaccttatggttttgtagatatggtgactccagtctttgttgtataaaggttgggggagct

SEQ ID NO: 490380 - DNA, 120 bp, Artificial Sequence
  ENSG00000162783_17 (sequence is synthesized)
ataaggtttttgtacagtattttctccttcgttgtattgatttttgtataaaaatgtaacttctacgtgtctaacacgtattaaatattttgaagcaacgtaactgcctgcttgtctgta

SEQ ID NO: 490381 - DNA, 120 bp, Artificial Sequence
  ENSG00000162783_18 (sequence is synthesized)
ataacctgcctgggttgggagggaagtgggaggagggaaaccagggcctgagctagaaaattgaaggtgtggttcttagtatcagtcattcgcagactgaggacattgtttactgactcc

SEQ ID NO: 490382 - DNA, 120 bp, Artificial Sequence
  ENSG00000162783_19 (sequence is synthesized)
actaagtatcaagagagacacgtttaatttttcctcctagatcagaggactgctattagatactaatatcggcgacctgtcaggttctagaaacctgccactacaactgccttttctaag

SEQ ID NO: 490383 - DNA, 120 bp, Artificial Sequence
  ENSG00000162783_20 (sequence is synthesized)
gtcagtttagaccaatttgtcacccaatatgtgggtgtctaatactaagtaatttaaccaacttttgaagccccgcttatccacaaaaatgtttttcagcaaaactttgtttcctgttaa

SEQ ID NO: 490384 - DNA, 120 bp, Artificial Sequence
  ENSG00000162783_21 (sequence is synthesized)
gctattaatacgggtcatcttttagctttgtaattgaaaaaaaaaaagtttagatagtagtttaccttaaaagcccattcgaactgacataggaagatgaaagagactgacttgtccaaa

SEQ ID NO: 490385 - DNA, 120 bp, Artificial Sequence
  ENSG00000162783_22 (sequence is synthesized)
ttgtcaggtccacctctgcatcacagtggatgtcaggatgtaaattttcagtttttctcttacatctagaaagtaaatatattgctgagagggaaattgtttgcatcaaaccagataagg

SEQ ID NO: 490386 - DNA, 120 bp, Artificial Sequence
  ENSG00000162783_23 (sequence is synthesized)
aaggagggctaggcaaatttagttctcatttagcaaaacttcctgatttgttttgttacttaaatggtgacatcagtgtttggtcatggtagacacttaggtgatgatagccaaaacatc

SEQ ID NO: 490387 - DNA, 120 bp, Artificial Sequence
  ENSG00000162783_24 (sequence is synthesized)
catcgattttactaaaatcactgccattaagagagttttttgtctcttcatgttcaatgtttgaaaggtattcagtaatctatttcagaagcaaatcaattagggaatggtgtttattaa

SEQ ID NO: 490388 - DNA, 120 bp, Artificial Sequence
  ENSG00000162783_25 (sequence is synthesized)
aatacggtacagttgccaggactttaaaagatggtactggtttctaacaacttacgagtatatagggtatttaaaagatgggagagattgaagaaagacaaaggtttaaaggtcatagcc

SEQ ID NO: 490389 - DNA, 120 bp, Artificial Sequence
  ENSG00000162783_26 (sequence is synthesized)
ttcgagcataagaggcatatgaatggtgtcttggccttaactcccaattatacgaacttctgttttagctgaataggccagtgcctcgtgccttgatatttcggcaaatctattagtggt

SEQ ID NO: 490390 - DNA, 120 bp, Artificial Sequence
  ENSG00000162783_27 (sequence is synthesized)
tccttaagcatagggaactttgtactttatgctctgtcgccataataatgtatttatagaattaaacattctcaaattagggtcttgttaaactgactttttctttcagaaagtagctac

SEQ ID NO: 490391 - DNA, 120 bp, Artificial Sequence
  ENSG00000162783_28 (sequence is synthesized)
ttaaattctgttacagctacaaaagatccatcaagtgctgactgcttaaactgaagaaggtgtccagggccttaattctgcaaacatttcctgttgttagaaagtatgatgcttgaacag

SEQ ID NO: 490392 - DNA, 120 bp, Artificial Sequence
  ENSG00000162783_29 (sequence is synthesized)
cgatctcagtgtattttatgttttaaagggggtaacgtttggtgtgtttaagagagctgatgtgttttggatgagactaaagttgatccttggttttacattaagatgaacctgggtcca

SEQ ID NO: 490393 - DNA, 120 bp, Artificial Sequence
  ENSG00000162783_30 (sequence is synthesized)
tgtgtctgcttaaagaatgtaaattggcatacttgataggaggataaagctttgtaggaattagaaaagatcattctcttttttgttgcagaagcagtatagtatagtagttagagcatg

SEQ ID NO: 490394 - DNA, 120 bp, Artificial Sequence
  ENSG00000162783_31 (sequence is synthesized)
ggccctggagccaggctgcttggtgtcttcctttatttatttatttatttaattataaaaagtaaatataaagtgagctatgttgaccaggttcgtcttgaactcctggcctcaagcaat

SEQ ID NO: 490395 - DNA, 120 bp, Artificial Sequence
  ENSG00000162783_32 (sequence is synthesized)
ggattacaggcatgagccaccacaacctggcctgcttgggtttttctatcttggctctgccacctagctgtgggtccttggacaagttacttcatctctctgtgcctcaggtttttcaaa

SEQ ID NO: 490396 - DNA, 120 bp, Artificial Sequence
  ENSG00000162783_33 (sequence is synthesized)
catctctctgtgcctcaggtttttcaaatgtaaaattgggataattggatctgtctcatagggttgtgaaaattaatgagttaatgctcttagaagagtacctcatatgtaataagcacg

SEQ ID NO: 490397 - DNA, 120 bp, Artificial Sequence
  ENSG00000162783_34 (sequence is synthesized)
caactgttaattattgttaatgtagaagttaattctgtgtataaatcagatacactgtggtcaaagatttgtgtgtatttgtaagaaaagaggagaatggagaatctatttttaagtggt

SEQ ID NO: 490398 - DNA, 80 bp, Artificial Sequence
  ENSG00000162804_0 (sequence is synthesized)
ggccccgaacgcggtcccgcccggcgctttcctctgcggagctgcggcgagagcgcggcccggccgaacgggcgcgggac

SEQ ID NO: 490399 - DNA, 80 bp, Artificial Sequence
  ENSG00000162804_1 (sequence is synthesized)
cagcctagtcccccagcgccctgctccgccagcgccccgtcccgcccgcacacctccgcgatgcggcacggcgtcgcctg

SEQ ID NO: 490400 - DNA, 120 bp, Artificial Sequence
  ENSG00000162804_2 (sequence is synthesized)
ggggtgcgcggcgcggtggcccttgccgacttctacccgttcggcgccgagcgcggcgacgccgtcacccccaagcaggacgacggcggctcggggctgcggccgctctcggtgcccttc

SEQ ID NO: 490401 - DNA, 120 bp, Artificial Sequence
  ENSG00000162804_3 (sequence is synthesized)
cgacggcggctcggggctgcggccgctctcggtgcccttcccgttcttcggtgccgagcactccggactctacgtgaacaacaacgggatcatctccttcctgaaggaggtttctcagtt

SEQ ID NO: 490402 - DNA, 120 bp, Artificial Sequence
  ENSG00000162804_4 (sequence is synthesized)
caccccagtggccttccccattgccaaggaccgctgcgtggtggcagccttctgggcagatgtggacaaccggcgtgcaggcgacgtgtactaccgggaggccaccgacccagccatgct

SEQ ID NO: 490403 - DNA, 120 bp, Artificial Sequence
  ENSG00000162804_5 (sequence is synthesized)
gcgccgagccacggaggacgtcaggcactacttccccgagctcctggacttcaatgccacctgggtttttgttgccacctggtaccgagtgaccttctttggaggcagttcctcatcccc

SEQ ID NO: 490404 - DNA, 120 bp, Artificial Sequence
  ENSG00000162804_6 (sequence is synthesized)
tgtcaacacattccagactgtgctcatcacagacggcaagctctccttcaccatcttcaactatgagtccatcgtgtggaccacaggcacacacgccagcagcgggggcaacgccactgg

SEQ ID NO: 490405 - DNA, 120 bp, Artificial Sequence
  ENSG00000162804_7 (sequence is synthesized)
cctcgggggcatcgcagcccaggctggcttcaacgcaggcgatgggcagcgttacttcagtatccccggctcgcgcacagcagacatggccgaggtggagaccaccaccaacgtgggtgt

SEQ ID NO: 490406 - DNA, 120 bp, Artificial Sequence
  ENSG00000162804_8 (sequence is synthesized)
gcccgggcgctgggcgttcagaatcgatgatgcccaggtgcgcgtggggggctgcggccatacaacgtccgtgtgcctggccctgcgcccctgcctcaacggcggcaagtgcatcgacga

SEQ ID NO: 490407 - DNA, 120 bp, Artificial Sequence
  ENSG00000162804_9 (sequence is synthesized)
ctgcgtcacgggcaacccctcctacacctgctcctgcctctcgggcttcacggggcggaggtgccacctggacgtgaacgaatgtgcctcccagccctgtcagaatggtgggacctgtac

SEQ ID NO: 490408 - DNA, 120 bp, Artificial Sequence
  ENSG00000162804_10 (sequence is synthesized)
tcacggcatcaacagtttccgctgccagtgcccggctggctttgggggacccacctgtgagacagcccaatccccctgtgacaccaaagagtgtcaacatggtggccagtgccaggtgga

SEQ ID NO: 490409 - DNA, 120 bp, Artificial Sequence
  ENSG00000162804_11 (sequence is synthesized)
gaatggctctgcggtgtgtgtgtgccaggccggatacaccggagcagcctgcgagatggatgtggacgactgcagccctgacccctgcctgaatggaggctcttgtgttgacctagtggg

SEQ ID NO: 490410 - DNA, 120 bp, Artificial Sequence
  ENSG00000162804_12 (sequence is synthesized)
gaattacacctgcttgtgtgccgagcccttcaagggacttcgctgtgagacaggagaccatccagtgccagacgcctgcctctcggccccttgccacaatgggggcacctgtgtggatgc

SEQ ID NO: 490411 - DNA, 120 bp, Artificial Sequence
  ENSG00000162804_13 (sequence is synthesized)
ggaccagggctacgtgtgcgagtgccccgaaggcttcatgggcctggactgcagggagagagtccccgatgactgtgagtgccgcaacggaggcagatgcctgggcgccaacaccaccct

SEQ ID NO: 490412 - DNA, 120 bp, Artificial Sequence
  ENSG00000162804_14 (sequence is synthesized)
ctgccagtgccccctgggattctttgggcttctctgtgaatttgaaatcacagccatgccctgcaacatgaacacacagtgcccagatgggggctactgcatggagcacggcgggagcta

SEQ ID NO: 490413 - DNA, 120 bp, Artificial Sequence
  ENSG00000162804_15 (sequence is synthesized)
cctctgcgtctgccacaccgaccacaatgccagccactccctgccatcaccctgcgactcggacccctgcttcaacggaggctcctgcgatgcccatgacgactcctacacctgcgagtg

SEQ ID NO: 490414 - DNA, 120 bp, Artificial Sequence
  ENSG00000162804_16 (sequence is synthesized)
cccgcgcgggttccacggcaagcactgcgagaaagcccggccacacctgtgcagctcagggccctgccggaacgggggcacgtgcaaggaggcgggcggcgagtaccactgcagctgccc

SEQ ID NO: 490415 - DNA, 120 bp, Artificial Sequence
  ENSG00000162804_17 (sequence is synthesized)
ctaccgcttcactgggaggcactgtgagatcgggaagccagactcgtgtgcctctggcccctgtcacaacggcggcacctgcttccactacattggcaaatacaagtgtgactgtccccc

SEQ ID NO: 490416 - DNA, 120 bp, Artificial Sequence
  ENSG00000162804_18 (sequence is synthesized)
aggcttctccgggcggcactgcgagatagccccctccccctgcttccggagcccgtgtgtgaatgggggcacctgcgaggaccgggacacggatttcttctgccactgccaagcagggta

SEQ ID NO: 490417 - DNA, 120 bp, Artificial Sequence
  ENSG00000162804_19 (sequence is synthesized)
catgggacgccggtgccaggcagaggtggactgcggccccccggaggaggtgaagcacgccacactgcgcttcaacggcacgcggctgggcgcggtggccctgtatgcatgtgaccgtgg

SEQ ID NO: 490418 - DNA, 120 bp, Artificial Sequence
  ENSG00000162804_20 (sequence is synthesized)
ctacagcctgagcgcccccagccgcatccgggtctgccagccacacggtgtctggagtgagcctccccagtgccttgaaatcgatgagtgccggtctcagccgtgcctgcatgggggctc

SEQ ID NO: 490419 - DNA, 120 bp, Artificial Sequence
  ENSG00000162804_21 (sequence is synthesized)
ttgtcaggaccgcgttgctgggtacctgtgcctctgcagcacaggctatgagggcgcccactgtgagctggagagggatgagtgccgagctcacccgtgcagaaatggagggtcctgcag

SEQ ID NO: 490420 - DNA, 120 bp, Artificial Sequence
  ENSG00000162804_22 (sequence is synthesized)
gaacctcccaggggcctatgtctgccggtgccctgcaggcttcgttggagtccactgtgagacagaggtggacgcctgcgactccagcccctgccagcatggaggccggtgtgagagcgg

SEQ ID NO: 490421 - DNA, 120 bp, Artificial Sequence
  ENSG00000162804_23 (sequence is synthesized)
cggcggggcctacctgtgcgtctgcccagagagcttcttcggctaccactgcgagacagtgagtgacccctgcttctccagcccctgtgggggccgtggctattgcctggccagcaacgg

SEQ ID NO: 490422 - DNA, 120 bp, Artificial Sequence
  ENSG00000162804_24 (sequence is synthesized)
ctcccacagctgcacctgcaaagtgggctacacgggcgaggactgcgccaaagagctcttcccaccgacggccctcaagatggagagagtggaggagagtggggtctctatctcctggaa

SEQ ID NO: 490423 - DNA, 120 bp, Artificial Sequence
  ENSG00000162804_25 (sequence is synthesized)
cccgcccaatggtccagccgccaggcagatgcttgatggctacgcggtcacctacgtctcctccgacggctcctaccgccgcacagactttgtggacaggacccgctcctcgcaccagct

SEQ ID NO: 490424 - DNA, 120 bp, Artificial Sequence
  ENSG00000162804_26 (sequence is synthesized)
ccaggccctggcggccggcagggcctacaacatctccgtcttctcagtgaagcgaaacagtaacaacaagaatgacatcagcaggcctgccgtgctgctggcccgcacgcgaccccgccc

SEQ ID NO: 490425 - DNA, 120 bp, Artificial Sequence
  ENSG00000162804_27 (sequence is synthesized)
tgtggaaggcttcgaggtcaccaatgtgacggctagcaccatctcagtgcagtgggccctgcacaggatccgccatgccaccgtcagtggggtccgtgtgtccatccgccaccctgaggc

SEQ ID NO: 490426 - DNA, 120 bp, Artificial Sequence
  ENSG00000162804_28 (sequence is synthesized)
cctcagggaccaggccaccgatgtggacaggagtgtggacaggttcacctttagggccctgctgcctgggaagaggtacaccatccagctgaccaccctcagtgggctcaggggagagga

SEQ ID NO: 490427 - DNA, 120 bp, Artificial Sequence
  ENSG00000162804_29 (sequence is synthesized)
gcaccccacagagagcctggccaccgcgccgacgcacgtgtggacccggcccctgcctccagcaaacctgaccgccgcccgagtcactgccacctctgcccacgtggtctgggatgcccc

SEQ ID NO: 490428 - DNA, 120 bp, Artificial Sequence
  ENSG00000162804_30 (sequence is synthesized)
gactccaggcagcttgctggaggcttatgtcatcaatgtgaccaccagccagagcaccaagagccgctatgtccccaacgggaagctggcgtcctacacggtgcgcgacctgctgccggg

SEQ ID NO: 490429 - DNA, 120 bp, Artificial Sequence
  ENSG00000162804_31 (sequence is synthesized)
acggcggtaccagctctctgtgatagcagtgcagagcacggagctcgggccgcagcacagcgagcccgcccacctctacatcatcacctcccccagggatggcgctgacagacgctggca

SEQ ID NO: 490430 - DNA, 120 bp, Artificial Sequence
  ENSG00000162804_32 (sequence is synthesized)
ccagggaggacaccaccctcgggtgctcaagaacagaccgcccccggcgcgcctgccggagctgcgcctgctcaatgaccacagcgcccccgagacccccacccagccccccaggttctc

SEQ ID NO: 490431 - DNA, 120 bp, Artificial Sequence
  ENSG00000162804_33 (sequence is synthesized)
ggagcttgtggacggcagaggaagagtgagcgccaggttcggtggctcacccagcaaagcagccaccgtgagatcacaacccacagcctcggcgcagctcgagaacatggaggaagcccc

SEQ ID NO: 490432 - DNA, 120 bp, Artificial Sequence
  ENSG00000162804_34 (sequence is synthesized)
cgcagacgcccacagctgtgactgcgggccagggttcaaaggcagacgctgcgagctcgcctgtataaaggtgtcccgcccctgcacaaggctgttctccgagacaaaggcctttccagt

SEQ ID NO: 490433 - DNA, 120 bp, Artificial Sequence
  ENSG00000162804_35 (sequence is synthesized)
ctgggagggaggcgtctgtcaccacgtgtataaaagagtctaccgagttcaccaagacatctgcttcaaagagagctgtgaaagcacaagcctcaagaagaccccaaacaggaaacaaag

SEQ ID NO: 490434 - DNA, 120 bp, Artificial Sequence
  ENSG00000162804_36 (sequence is synthesized)
taagagtcagacactggagaaatcttaaggatttaagacgttcttgttacactccaccaacctcacgagtttctaacacccaggaagatgaggtctaaaaactggatgaaaaaggacacc

SEQ ID NO: 490435 - DNA, 120 bp, Artificial Sequence
  ENSG00000162804_37 (sequence is synthesized)
ctgagaaaaggtcctagctggagtcagtcccctctgtgacctctctcctcaggcctctagaggacagatggccaggcctgtgcacacaccagcccaccctgagagacccctctgggacca

SEQ ID NO: 490436 - DNA, 120 bp, Artificial Sequence
  ENSG00000162804_38 (sequence is synthesized)
accacctgtgagtcctgcgatgcgtttaagcagcctgtgccctcacccaagctgcagttcctgaaggtgtagtctgtgtctctgcggatgagatgacagctcgccattccccggaatcag

SEQ ID NO: 490437 - DNA, 120 bp, Artificial Sequence
  ENSG00000162804_39 (sequence is synthesized)
tgaggctgtcagtcagccacgcttctgcagtatgcagaaacctgttcttagactccaaagccagagaaagaattctcccttcgaggcccaacaaattgagaaggaactgtgatggaccac

SEQ ID NO: 490438 - DNA, 120 bp, Artificial Sequence
  ENSG00000162804_40 (sequence is synthesized)
ttccaaaacagagacgggggcaggggctgaagggcagagaccaggtgatgtcagaaggaaagccgggttgcagacacagccgcccctgctctggtcctccagcgtgtttatgacgctcgt

SEQ ID NO: 490439 - DNA, 120 bp, Artificial Sequence
  ENSG00000162804_41 (sequence is synthesized)
gcaggtcgacgagccatcctatggactagttaacactaaggtggagttcagacttttttagacaacggcgcgactggcagcctttctctatcaagggtcagacggtaaacgttttcagct

SEQ ID NO: 490440 - DNA, 120 bp, Artificial Sequence
  ENSG00000162804_42 (sequence is synthesized)
ttgcagaccagaggtccctgtggctacagtagcgcagacacagccacaggcatgtcattgaatggctgcggctatgttccaataaaaacttatttacaataacaggtggtggccaaattg

SEQ ID NO: 490441 - DNA, 120 bp, Artificial Sequence
  ENSG00000162804_43 (sequence is synthesized)
gcccatgggccttatttggtgaaccctgttctatgagatcacctaggcttcagccttaaacagtggaagccatcccctgaatgacaagtcacaagggtatcaaagaaagacccctgaatt

SEQ ID NO: 490442 - DNA, 120 bp, Artificial Sequence
  ENSG00000162804_44 (sequence is synthesized)
ttcatggaaaaagctattcagacccctgcttggaaagctaaggcacactgccacgaagcagcaaggacgccttacaagtctcagtgcaacagagatggacacctgggctgggctggacaa

SEQ ID NO: 490443 - DNA, 120 bp, Artificial Sequence
  ENSG00000162804_45 (sequence is synthesized)
tgtttaaggttccttttagtccatgactcaagtgatactgttttaggctatcaggtagtaaacacgatcttagacatccccatctttgtaagcagaacagtacggcacttcaccacatct

SEQ ID NO: 490444 - DNA, 120 bp, Artificial Sequence
  ENSG00000162804_46 (sequence is synthesized)
gcttcccaccatgcttctaagcagctgtcttccccctgctaatgttacaaccaaagcagccaccccacctcctctcgtgttgagcctcacgaccgctgacccagctggaaagccagcgcc

SEQ ID NO: 490445 - DNA, 120 bp, Artificial Sequence
  ENSG00000162804_47 (sequence is synthesized)
ctgccgcgtcaccctgactctgctcagagccagcattccagccacaaagagggcctccttcctttcctctttcataaaaatgttttttgaagagttagagtatattttaggctttttatc

SEQ ID NO: 490446 - DNA, 120 bp, Artificial Sequence
  ENSG00000162804_48 (sequence is synthesized)
tttattaaaatttcatgtgcatgtgtctgtgtattctgcaatttgtcattttcagaaagaaggaacaggcaattcgcgaagtttcacctgtactcccgagctgttccccaggctccagac

SEQ ID NO: 490447 - DNA, 120 bp, Artificial Sequence
  ENSG00000162804_49 (sequence is synthesized)
ccacttgagagcagaaggtggagctcaatgaagggtctcgagctcagcgaagggtcactgggtgaactgagagaaaccacgttcacaaacgcgtactgcggacttcctgccgccctggga

SEQ ID NO: 490448 - DNA, 120 bp, Artificial Sequence
  ENSG00000162804_50 (sequence is synthesized)
cctgtcactgtttgtccatgtaagctacagcattactagcagatgctaagatcgagtgatatcactggaaaagtaggtgaatcctactaggaaactttctactccctactaggacctcaa

SEQ ID NO: 490449 - DNA, 120 bp, Artificial Sequence
  ENSG00000162804_51 (sequence is synthesized)
gcccctcagccacacagcaaatgctaatatgctccagtgttagcttagaagccttgtgtcaacaagaactggctcctgagtcccaagcttggtgccacacagcaaatgctaatatgctcc

SEQ ID NO: 490450 - DNA, 120 bp, Artificial Sequence
  ENSG00000162804_52 (sequence is synthesized)
agtgttagcttagaagccttgtgtcaacaagaactggctcctgagtcccaagcttggtgccacacagcaaatgctaatatgctccagtgttagcttagaagccttgtgtcaacaagaact

SEQ ID NO: 490451 - DNA, 120 bp, Artificial Sequence
  ENSG00000162804_53 (sequence is synthesized)
ggctcctgagtcccaagtgctgtcacaggacttgcccattgggatgttttccacattaaatatcaagtaaaaagacttcctggtgctcaggaattacagttcgttcttgaaacattccaa

SEQ ID NO: 490452 - DNA, 120 bp, Artificial Sequence
  ENSG00000162804_54 (sequence is synthesized)
agaggccaccacagcttttcccatgtggcttcttttaaaaactcaaatggcttccttgaaaatactcaaagtccacccaaggaaattagtaataatagaatcagaaaactgtcaggagca

SEQ ID NO: 490453 - DNA, 120 bp, Artificial Sequence
  ENSG00000162804_55 (sequence is synthesized)
taaagatttctgtatcaaaatgaaagaagcaatcctgagttgctgaattacccatctgctaatgaaaccgggatggactgatcatctaaccaagtgcagactgaggattctacttagtcc

SEQ ID NO: 490454 - DNA, 120 bp, Artificial Sequence
  ENSG00000162804_56 (sequence is synthesized)
tccgactgggtacaacaacagcctaggttctagggagggtggcagtgaccgggatgccacaatggaagagaaaatgaaaacactggcacagtgaaatgtctcatttccaaacagttttgc

SEQ ID NO: 490455 - DNA, 120 bp, Artificial Sequence
  ENSG00000162804_57 (sequence is synthesized)
ctatggccaagcaaggcaataaagacaaactctcccttttccccattgcgtgtgggctgccaggtacaagtaagggaatctttgctgtgcccactgtcctccagtagagaacccaacagg

SEQ ID NO: 490456 - DNA, 120 bp, Artificial Sequence
  ENSG00000162804_58 (sequence is synthesized)
caagggccccactcaggtatcagctcacctcctgcacctccccttagcaggaactccttccactggcaaaggactgccactgccatctgactcaactgtggcgatgtggacggagtcacc

SEQ ID NO: 490457 - DNA, 120 bp, Artificial Sequence
  ENSG00000162804_59 (sequence is synthesized)
gagctgcttttcttttgcaaaacaaaagtctttttctttgcagtcacgctgtaagacgaggctgctggagaaaacaaaagcacctagatttcagtgctgaatccccacaattgcatgcag

SEQ ID NO: 490458 - DNA, 120 bp, Artificial Sequence
  ENSG00000162804_60 (sequence is synthesized)
ctcacacctaccaggggtattccagtgcataggggaaaggaacccggctgaaaaaccagctccttatttttcttttaaataaaataatacgatcctaagtccatttaccatctgaagttg

SEQ ID NO: 490459 - DNA, 120 bp, Artificial Sequence
  ENSG00000162804_61 (sequence is synthesized)
tcacgagtgaacagtcacattactgttgtggaccaggccttagatgagtttctcaggctcagcactgacattctgggccggatcatcctctcttgtgggaccatcctgtgcactgcagga

SEQ ID NO: 490460 - DNA, 120 bp, Artificial Sequence
  ENSG00000162804_62 (sequence is synthesized)
tgtttcacagcacccctggcctctacccactagaatcctacaatctaccagatcctaggatctagttgatcctagaatgctaccaaggagacttgaattttggtcccatcatcaaaaatg

SEQ ID NO: 490461 - DNA, 120 bp, Artificial Sequence
  ENSG00000162804_63 (sequence is synthesized)
ccttctgcatcaatcctatgccagtttcccctaaaagagggctaactggaatgttctaggatgtaccaatcctccaggaccctcttagagctcatgccatcagagacaggcctctatctc

SEQ ID NO: 490462 - DNA, 120 bp, Artificial Sequence
  ENSG00000162804_64 (sequence is synthesized)
agggatcaccccggctgacatcaaattcctcttctcttttcccaacatttcaaattgttcttcggactcattgagttccctaaggtgacacgcccccccccccccccacacccaccttgg

SEQ ID NO: 490463 - DNA, 120 bp, Artificial Sequence
  ENSG00000162804_65 (sequence is synthesized)
ggggtcacggattgctccctgtggccctggcttcagcccacctgctccatgaccctatgctcttctcctctggttctcgaagctgtctgtaaccagggcaggggagataactgtatggga

SEQ ID NO: 490464 - DNA, 120 bp, Artificial Sequence
  ENSG00000162804_66 (sequence is synthesized)
ccattccctggcctccacctgccccagcactctccaggccagcacagtctggcactacagactacagggccggagacaccaggcttggaagtgaccactggccaagagctgacataaaag

SEQ ID NO: 490465 - DNA, 120 bp, Artificial Sequence
  ENSG00000162804_67 (sequence is synthesized)
ccaacttccccaaacaggaagggcctgttcttcacaaagataaagaaaactgccagcattttgctggccttaagaagccatgcaaaattaaccagtacatcatgaattaacttcttttac

SEQ ID NO: 490466 - DNA, 120 bp, Artificial Sequence
  ENSG00000162804_68 (sequence is synthesized)
tctgctgtgcactgaataccattatgaagcaatatacttttggattaaaaataagcatttttgtggaaaatctgctacatgttttcataaaataaagtgctatgatgtactaaaacctca

SEQ ID NO: 490467 - DNA, 120 bp, Artificial Sequence
  ENSG00000162804_69 (sequence is synthesized)
gactttgggactgactgactgctctcaggggccttagaggctgcaggcaggagggaccacccacggtgaggaatcaggaggcacagagcctacctgaggggaggctgagcaccaggcacc

SEQ ID NO: 490468 - DNA, 120 bp, Artificial Sequence
  ENSG00000162804_70 (sequence is synthesized)
ccggtgtgggaagatggggtgaagctacaccacccaagcagtgggaccccacagacgggaacaggccagggggcaggacccacccaaaccacccagagtctgagctagagagactggctt

SEQ ID NO: 490469 - DNA, 120 bp, Artificial Sequence
  ENSG00000162804_71 (sequence is synthesized)
tgatgctgcctcccctcccctctcctccttcgcctccacatgcagcagagcccaccccagcccctgcctctgggcccctcacccctcacttctccaaagaggagcaggcggagtcaggat

SEQ ID NO: 490470 - DNA, 120 bp, Artificial Sequence
  ENSG00000162804_72 (sequence is synthesized)
gggagaagcagagggagcagccactgggcgagccccagcttgaggactagctgggccctgtggacactcaggttatgcaggacctgaactgtctcctagtccggggctctgcctcgtgag

SEQ ID NO: 490471 - DNA, 120 bp, Artificial Sequence
  ENSG00000162804_73 (sequence is synthesized)
gatcgaggccagcacgtccctgcagggcaccaagcatctgctgagcacctgcagtaagagttcccagacgctcacgaggcagttccccttcgggcagcaccaatacatgtgtgttcctca

SEQ ID NO: 490472 - DNA, 120 bp, Artificial Sequence
  ENSG00000162804_74 (sequence is synthesized)
gtggggctttgccagcaggcagtggaggtggcacgcctcccgaggaggggtgggtttggggctgatggaagaaaaagcacatgtcctgagtagttgctcccagctgggaaaggggtaact

SEQ ID NO: 490473 - DNA, 120 bp, Artificial Sequence
  ENSG00000162804_75 (sequence is synthesized)
gaagccccaggaaatgcacggaatcctgggggcatgtgggcgcctcagacttgagccagcaacacccttgacaccccttctctgtgcagagagggatgagtgccgagctcacccgtgcag

SEQ ID NO: 490474 - DNA, 120 bp, Artificial Sequence
  ENSG00000162804_76 (sequence is synthesized)
actgcgagaaaggtatggcgggcaggggcgtccgggccggcgtcagcaccctggagagcgcccgcggtccgccgtcctgcttctctgctgtctctctccttgtttcgcgaattgctgacc

SEQ ID NO: 490475 - DNA, 120 bp, Artificial Sequence
  ENSG00000162804_77 (sequence is synthesized)
agggcatctggggaagccacaagcaccttggatgaccacggcccacgcacatgccccccttcccttctccaagcacggctgagtgtgaggggcaccacccatgccacaggggcagggaca

SEQ ID NO: 490476 - DNA, 120 bp, Artificial Sequence
  ENSG00000162804_78 (sequence is synthesized)
cggtggctcacccagcaaagcagccaccgtgagatcacgtgagtgccagggcctccccacccaccttggtggcccaccctcgtcctcactgccactctcaccaggtcctgtcccctacat

SEQ ID NO: 490477 - DNA, 120 bp, Artificial Sequence
  ENSG00000162804_79 (sequence is synthesized)
gatgagcccacccccaccgccagcgcagtctccagccagtgacccccaccccgactgtgcacaaggcgcggggctcgtgggccgccggcagcatgcacctccatggcaggaggggcagct

SEQ ID NO: 490478 - DNA, 120 bp, Artificial Sequence
  ENSG00000162804_80 (sequence is synthesized)
cgtgagggcctcacgtcagtgtgtgggctggaggcgcaggctgctggtagggcacgcaagagaagataaacattttagaagcaggtctgagacattacagcagctttatttgccaaagta

SEQ ID NO: 490479 - DNA, 120 bp, Artificial Sequence
  ENSG00000162804_81 (sequence is synthesized)
gggctctgagctttgttttagtaaaccatgggcaggaggccatgagggtctaacccgccactccgagtgtggtccggcaaatcctccgccactgtcctggcaagatcttcccggtggcag

SEQ ID NO: 490480 - DNA, 120 bp, Artificial Sequence
  ENSG00000162804_82 (sequence is synthesized)
caaggctgatgggcccaggtgccttgggcccttcccaccgggtttactgggtgagtgccgctctgggaatctgcctgtgattctgacacagaagccctgagacatgttggcaggagtgag

SEQ ID NO: 490481 - DNA, 120 bp, Artificial Sequence
  ENSG00000162804_83 (sequence is synthesized)
gcaggcgcgaccctgccccagaggggacctctctggcccttgcctctcacctggaaggccaggtggtcatcctcatggaactccccaacagagcctagtcaccagtttaatgaacacgct

SEQ ID NO: 490482 - DNA, 120 bp, Artificial Sequence
  ENSG00000162804_84 (sequence is synthesized)
ctgagcaaaaactcctcaggcagaggagggagggaaatgcagcaaggagagtggcaagcagggaccagagccctggggtccctgccgcacggtgagcaggggagagagcccccagcaagg

SEQ ID NO: 490483 - DNA, 120 bp, Artificial Sequence
  ENSG00000162804_85 (sequence is synthesized)
tgtctgaggagagggcaggcagctgcccgggatgcccagtggtgggcaggtgagatctggagtacagaggggggcccgttgtacttgcagctatggaagcggatatgaagtgcccgaggg

SEQ ID NO: 490484 - DNA, 120 bp, Artificial Sequence
  ENSG00000162804_86 (sequence is synthesized)
tgcggttgagatccctgcataagaagtgatgcagttgggggcgagggcatgaggaaggtcagtacagactgagggcagctcagaaagagcagggggtgccacagcctccaagaagcaggg

SEQ ID NO: 490485 - DNA, 120 bp, Artificial Sequence
  ENSG00000162804_87 (sequence is synthesized)
gtggaaggagaggaatgcagaatttgaccctaagaagaaagcaaccgcatcagccgtgaggatggggcctctcagcatgatcagtggtggctgtccctgaagcagctctgagggggccct

SEQ ID NO: 490486 - DNA, 120 bp, Artificial Sequence
  ENSG00000162804_88 (sequence is synthesized)
gcaaggggaaggccgagcccctccagagggtcagcaggagggtgaggccagcccttcaggggaggcagctctggggccgacaggtgctggggccacgcagggagcctggtccccaccagg

SEQ ID NO: 490487 - DNA, 120 bp, Artificial Sequence
  ENSG00000162804_89 (sequence is synthesized)
gacatccgtgctccctgagatatagaagcactcaaaagggtggccccaggaccatcccgggtgcaaagcagctgcgccgtgtggtcaccgcctggcttctcctagaacccacagcctcgg

SEQ ID NO: 490488 - DNA, 120 bp, Artificial Sequence
  ENSG00000162804_90 (sequence is synthesized)
gacagctctcctagcacccggtgacctgttctcccctgagtcataccatagactcagattgggatcacccctcaacccaaccccaaagaagtcctagtacttggtaaaggtgtgagctgc

SEQ ID NO: 490489 - DNA, 120 bp, Artificial Sequence
  ENSG00000162804_91 (sequence is synthesized)
tgagcgtggtctcacccgcaaggccttgcccccagcttctcaaggacatgtgtacacatcaagggcacctgcggtggggtgtgtttgcaagtggcggtttcgctgaaccctaagttcacc

SEQ ID NO: 490490 - DNA, 120 bp, Artificial Sequence
  ENSG00000162804_92 (sequence is synthesized)
atcccccccccgccctcaccatacaaggtctggacttgctgctagcccctgtgagcaccaggaggactggtttgtgcatccgacgcagagagtgaaggattctcttaattcaggtgtggc

SEQ ID NO: 490491 - DNA, 120 bp, Artificial Sequence
  ENSG00000162804_93 (sequence is synthesized)
ccattcagagtgaagactctcgtgttgatctttaagtgaactaaaacaaacatttcatcagatgatttgcattatgtcagcccctttaaataccaggtgttcatttcctagaactcagag

SEQ ID NO: 490492 - DNA, 120 bp, Artificial Sequence
  ENSG00000162804_94 (sequence is synthesized)
attggaggggcgtgtgttaccctcctgggtctcttcagcaggagagattcaagatgacccccgggctggccctgaggtcaccacggtcatgtggtgtttgccagcacgagatgctcatgc

SEQ ID NO: 490493 - DNA, 120 bp, Artificial Sequence
  ENSG00000162804_95 (sequence is synthesized)
cctggtgggtgcaaaatgattttaagtgataacatgaaaagtagactctttaatggcccctcgatgcgcaaagccagtcatgatctttggttcatgttgcactctcacgctagctacctt

SEQ ID NO: 490494 - DNA, 120 bp, Artificial Sequence
  ENSG00000162804_96 (sequence is synthesized)
ttatttagttattagcctttgaataatgactaaatcaagaacccaacctataaacttggatgtgaacgataccttctatcttgccatcatactccctgttctctcccctcagttaaccat

SEQ ID NO: 490495 - DNA, 120 bp, Artificial Sequence
  ENSG00000162804_97 (sequence is synthesized)
gatcctgaactttgtgcctagaattcctttgttttttcagagtggaaggtgcggggagtgattctatggtacatatatgtatggcagaacaataagtgagttttctttgcaagataatta

SEQ ID NO: 490496 - DNA, 120 bp, Artificial Sequence
  ENSG00000162804_98 (sequence is synthesized)
tcttgccatgtgtgatcgttagacctgtgttttcactccgcattctcggactgaggttggcccatgcggtctgggcggctgcggcttattcacacctactattgagcacagagtccactg

SEQ ID NO: 490497 - DNA, 120 bp, Artificial Sequence
  ENSG00000162804_99 (sequence is synthesized)
agtgaactgaccggctcttctcccctctctgtgcagagaacatgtaggttgtgtttggtatgagcagtgctgcagtggatgttcctgtacaggttttccagtacgtgtgcgggagtggaa

SEQ ID NO: 490498 - DNA, 120 bp, Artificial Sequence
  ENSG00000162804_100 (sequence is synthesized)
aagctggatctaggatgaggatgtgtgaatgcccaaattacatgagaactaagtcattttctaagaggcgatagcagtctgcgctccctccagcagtgatgaagacatgcagtgaatcca

SEQ ID NO: 490499 - DNA, 120 bp, Artificial Sequence
  ENSG00000162804_101 (sequence is synthesized)
gtctctctagaactaggttttgccgggtttgcagatcctacaggcagaacgggtgggatgcacacccctgggatctgggtttgcatctcctgggcactgatgtgactgcgcctctcctca

SEQ ID NO: 490500 - DNA, 120 bp, Artificial Sequence
  ENSG00000162804_102 (sequence is synthesized)
tgggcatccaccaaaggtgtttgcttctgtgaaatgcctgatcacgccttttgactttatgttgggttatttgtactctttttattcatttgtcaaaattcttatatgttttgatactga

SEQ ID NO: 490501 - DNA, 120 bp, Artificial Sequence
  ENSG00000162804_103 (sequence is synthesized)
gaactgttaggacccagggaaaatgtggcaatgccaatgcaggtacagaacacacagaaatccagattgactgctggggaccctgatgtcacggcagatgagactcagctgcttcctgtc

SEQ ID NO: 490502 - DNA, 120 bp, Artificial Sequence
  ENSG00000162804_104 (sequence is synthesized)
agatggggaatgcccgtgtgcaggagggagggagtgctgcgcccgctgcagtgttggggccggttctccacaggaagggcccagccattgccagagcctgggcagaaaagaggacaggca

SEQ ID NO: 490503 - DNA, 120 bp, Artificial Sequence
  ENSG00000162804_105 (sequence is synthesized)
agcaaagggcccacctgtgactgagttggggtctccagcctgtgagccccaccccagcccccaccatgtgtgcggacctgcttggcccctgctgcagccaggccccagggcttcgtcgag

SEQ ID NO: 490504 - DNA, 120 bp, Artificial Sequence
  ENSG00000162804_106 (sequence is synthesized)
taggtaaggtgggtgggaggccaggccagggcggccaggggtgaaccctctctgcagatgtgaaaacaggcccatgggcagggctggtccaggccctggaggcgcaggaggtggagctgg

SEQ ID NO: 490505 - DNA, 120 bp, Artificial Sequence
  ENSG00000162804_107 (sequence is synthesized)
gtgcaggaggcaggatgccccacacagtcccgagccttcagggaagacacagtggccaggaccttcctgcattctggcagccccctccccctgcttccggagcccgtgtgtgaatggggg

SEQ ID NO: 490506 - DNA, 120 bp, Artificial Sequence
  ENSG00000162804_108 (sequence is synthesized)
aagccctgccaagcctggggccgcagtgaggctcgcaccgggacctgccccagactcgcctcccagccgcgagcatctaggctacgagaggggagaggggccgcatctccgcaacactga

SEQ ID NO: 490507 - DNA, 120 bp, Artificial Sequence
  ENSG00000162804_109 (sequence is synthesized)
ctgtggacgcaccaggtgctgcttctctccagggagatgctaaagacaaactattcaggttatttttagtttaaaaaattcaggaggaaattctgttttacccgtaagacacagagggtc

SEQ ID NO: 490508 - DNA, 120 bp, Artificial Sequence
  ENSG00000162804_110 (sequence is synthesized)
atgggccctccatcagtctttgccgagtgcatgggaggccagggtgtgtcctgaggggagggtggggcaggagcgggaggaggcagcctcacctatttggctgctttaaagtcactgttc

SEQ ID NO: 490509 - DNA, 120 bp, Artificial Sequence
  ENSG00000162804_111 (sequence is synthesized)
cgtgtcacagctcactttgcccagattgttatctaaatatcaatgtatttcactaaattcatgtcaggaaacggataagtggtttcaaaaattttttgcaaataaaccgtgttttctaca

SEQ ID NO: 490510 - DNA, 120 bp, Artificial Sequence
  ENSG00000162813_0 (sequence is synthesized)
attgacagtgccaaagctcggtactggacacaacgagggacctgggtctacgataacgcgcttttgctcctcctgaagtgtctttggtccaacgttgttccagagtgtaccatggcttcc

SEQ ID NO: 490511 - DNA, 120 bp, Artificial Sequence
  ENSG00000162813_1 (sequence is synthesized)
agtaacactgtgttgatgcggttggtagcctccgcatattctattgctcaaaaggcaggaatgatagtcagacgtgttattgctgaaggagacctgggtattgtggagaagacctgtgca

SEQ ID NO: 490512 - DNA, 120 bp, Artificial Sequence
  ENSG00000162813_2 (sequence is synthesized)
acagacctgcagaccaaagctgaccgattggcacagatgagcatatgttcttcattggcccggaaattccccaaactcacaattataggggaagaggatctgccttctgaggaagtggat

SEQ ID NO: 490513 - DNA, 120 bp, Artificial Sequence
  ENSG00000162813_3 (sequence is synthesized)
caagagctgattgaagacagtcagtgggaagaaatactgaagcaaccatgcccatcgcagtacagtgctattaaagaagaagatctcgtggtctgggttgatcctctggatggaaccaag

SEQ ID NO: 490514 - DNA, 120 bp, Artificial Sequence
  ENSG00000162813_4 (sequence is synthesized)
gaatataccgaaggtcttcttgacaatgtaacagttcttattggaattgcttatgaaggaaaagccatagcaggagttattaaccagccatattacaactatgaggcaggaccagatgct

SEQ ID NO: 490515 - DNA, 120 bp, Artificial Sequence
  ENSG00000162813_5 (sequence is synthesized)
gtgttggggaggacaatctggggagttttaggtttaggcgcctttgggtttcagctgaaagaagtccctgctgggaaacacattatcacaactactcgatcccatagcaacaagttggtt

SEQ ID NO: 490516 - DNA, 120 bp, Artificial Sequence
  ENSG00000162813_6 (sequence is synthesized)
actgactgtgttgctgctatgaaccccgatgctgtgctgcgagtaggaggagcaggaaataagattattcagctgattgaaggcaaagcctctgcttatgtatttgcaagtcctggttgt

SEQ ID NO: 490517 - DNA, 120 bp, Artificial Sequence
  ENSG00000162813_7 (sequence is synthesized)
aagaagtgggatacttgtgctccagaagttattttacatgctgtgggaggcaagttaaccgatatccatgggaatgttcttcagtaccacaaggatgtgaagcatatgaactctgcagga

SEQ ID NO: 490518 - DNA, 120 bp, Artificial Sequence
  ENSG00000162813_8 (sequence is synthesized)
aggagtcctggccacactgaggaattatgactactatgcaagccgagttccagaatctattaaaaatgcacttgttccttaaaggaaagtttcatttggccgggcgcggtggctcatgcc

SEQ ID NO: 490519 - DNA, 87 bp, Artificial Sequence
  ENSG00000162813_9 (sequence is synthesized)
cgtgagaccccatctctacaaaaatacaaattaactgggcatcctgtcatgcgcctgtcatcccagctacttgagaggctgaagcag

SEQ ID NO: 490520 - DNA, 120 bp, Artificial Sequence
  ENSG00000162813_10 (sequence is synthesized)
ccccatctctacaaaaatacaaattaactgggcatcctgtcatgcgcctgtcatcccagctacttgagaggctgaagcagaagaatctcttgagcccggaaggcagaggttgcagtgagc

SEQ ID NO: 490521 - DNA, 120 bp, Artificial Sequence
  ENSG00000162813_11 (sequence is synthesized)
taagccctgtctcagaaaaaaaaaaaacaaaaacccaaaaagtacttaaagtttcatttacttagctaggagaaagacttggttctcaaaataatacattttaagattaattgggtagaa

SEQ ID NO: 490522 - DNA, 120 bp, Artificial Sequence
  ENSG00000162813_12 (sequence is synthesized)
ttagagttccacctttattcattgttgagcagtgatttatatttagttattatatttaggaatagaaaatagaattaaataatttaacttgattaatcaaccagaccaattttgacgtct

SEQ ID NO: 490523 - DNA, 120 bp, Artificial Sequence
  ENSG00000162813_13 (sequence is synthesized)
ggagaacttataaactcaatatgttatatttgttttcctgtatttaggtggagaaatgagaaaaagctttagttccaattgacagttcaggtcaatgttcaatgaacattcctatcttct

SEQ ID NO: 490524 - DNA, 120 bp, Artificial Sequence
  ENSG00000162813_14 (sequence is synthesized)
aggtcaatgttcaatgaacattcctatcttctaaaccagatttctctttttttttcctgagacggagtctcgctctgtagcctaggctagaatgtagtggcgtgatctcggctcactgca

SEQ ID NO: 490525 - DNA, 90 bp, Artificial Sequence
  ENSG00000162813_15 (sequence is synthesized)
ccagatttctttagggcacaattttttctggaatctcactcttgtttttcacagtaattttaaaaacgtttctactccaattaagaatat

SEQ ID NO: 490526 - DNA, 120 bp, Artificial Sequence
  ENSG00000162813_16 (sequence is synthesized)
aaaacgtttctactccaattaagaatatatatgatgttattatatatgcttatgaaacagatttatgagaaaagttttttttaaataaattatttaatcctagctctttgttattcacca

SEQ ID NO: 490527 - DNA, 120 bp, Artificial Sequence
  ENSG00000162813_17 (sequence is synthesized)
tgttattcaccagctttttaaaaaagtgtttgaaaattatacattctcgactttggggattagtttattcttgtggcatcattataaggcttaattgtggaaagctaagtacttgcttct

SEQ ID NO: 490528 - DNA, 120 bp, Artificial Sequence
  ENSG00000162813_18 (sequence is synthesized)
attccttccaatgagagattataacataaactattaaaattattctgctaatatacctagatttttatttttaggtctctgtccattgcttttaattaaaattatctgttttcaaatcaa

SEQ ID NO: 490529 - DNA, 120 bp, Artificial Sequence
  ENSG00000162813_19 (sequence is synthesized)
attagctgggtgtggtggcgcgcacctccaccagtagtcccagctacacggaaggctgaggcgggaggatggcttgagcctagaagtgggaaggcagcagtgagccgtaatcgactctgg

SEQ ID NO: 490530 - DNA, 120 bp, Artificial Sequence
  ENSG00000162813_20 (sequence is synthesized)
aaaaaaaaaaaaaaaaaaaaaaaggtgacttgcacctacggagagcttggagaaaacacggacaagtggaattttcccgcggatcaggagtctaaagaggcagtgtgaaatcgctgttgt

SEQ ID NO: 490531 - DNA, 120 bp, Artificial Sequence
  ENSG00000162813_21 (sequence is synthesized)
ataaataattatagtgttatctgattctttatgttacctaagcaagtggtttttagcttggttgcatatgcaatcatctggggaacttttcattttttaaattttatttatttatttatt

SEQ ID NO: 490532 - DNA, 120 bp, Artificial Sequence
  ENSG00000162813_22 (sequence is synthesized)
tttttttagctatgctattaactgatgagaaacctttaaaaatacggattcccaggccataccccagacctactgaatcaaaatcgctgggggcattggtactgggtatgtatatatatg

SEQ ID NO: 490533 - DNA, 120 bp, Artificial Sequence
  ENSG00000162814_0 (sequence is synthesized)
agtaacaccagttgtaaacccaaggccaagagaccatggccacgttagcccggctgcaagctaggtcgtcgactgtaggaaatcagtactactttaggaacagtgttgtagatccattta

SEQ ID NO: 490534 - DNA, 120 bp, Artificial Sequence
  ENSG00000162814_1 (sequence is synthesized)
gaaaaaaggagaatgatgcagcagttaaaatccaaagctggtttcgaggatgtcaagttcgggcatatatcaggcatttaaacaggattgtaacaattattcaaaaatggtggagaagtt

SEQ ID NO: 490535 - DNA, 120 bp, Artificial Sequence
  ENSG00000162814_2 (sequence is synthesized)
tcttaggcagaaagcaatatcaactaactgtgcaggtagcatattatactatgatgatgaatctctacaatgcaatggctgtcaggattcagagacgatggcgaggctatagggttcgga

SEQ ID NO: 490536 - DNA, 120 bp, Artificial Sequence
  ENSG00000162814_3 (sequence is synthesized)
agtacctctttaattattattatttgaaagagtacctgaaagtcgtttcagagaccaatgatgcaattaggaaggcactggaggagtttgcagaaatgaaagaaagagaagagaagaagg

SEQ ID NO: 490537 - DNA, 120 bp, Artificial Sequence
  ENSG00000162814_4 (sequence is synthesized)
ctaacctcgaaagggaagagaagaaaagagattaccaagcccgaaagatgcattacctcctcagcacaaagcagattccaggaatatacaattcacccttcagaaaagagcctgatccat

SEQ ID NO: 490538 - DNA, 120 bp, Artificial Sequence
  ENSG00000162814_5 (sequence is synthesized)
gggagctgcaattacagaaggcaaagcctttaacacaccgaagacctaaagttaagcagaaggactccaccagccttactgattggctagcttgtacaagcgcccgttcttttcctcggt

SEQ ID NO: 490539 - DNA, 120 bp, Artificial Sequence
  ENSG00000162814_6 (sequence is synthesized)
ctgaaattctaccacctattaatagaaagcaatgtcaggggcccttccgagatatcaccgaagtattagaacaacgctacaggcctttggagccaacgttgcgggtggcagaaccaatcg

SEQ ID NO: 490540 - DNA, 120 bp, Artificial Sequence
  ENSG00000162814_7 (sequence is synthesized)
atgagttaaagttggccagagaggagctcagaagagaggaatggctgcaaaatgtaaatgacaatatgtttttgccattttcttcataccataaaaatgaaaagtacatcccatcaatgc

SEQ ID NO: 490541 - DNA, 120 bp, Artificial Sequence
  ENSG00000162814_8 (sequence is synthesized)
atttatcaagcaagtatggtcctatttcttacaaagaacaattccgaagtgaaaatcctaagaaatggatctgtgacaaggatttccagactgtattaccatcatttgagctcttctcaa

SEQ ID NO: 490542 - DNA, 120 bp, Artificial Sequence
  ENSG00000162814_9 (sequence is synthesized)
agtatggaaaattatattcaaaagctggacagattgtataaaggcgtcagaagaagaaactgaagccatctgcattttaaaacttaacagttctgaaaggaaaacacagatgaagatcct

SEQ ID NO: 490543 - DNA, 120 bp, Artificial Sequence
  ENSG00000162814_10 (sequence is synthesized)
gtaggaaatatacttgctatgattcaataaactataaaattttgtagctctagtcatgaattaattattgtgtgtatgtatttgaaatctcttagacatatcttttcaaacaaatactta

SEQ ID NO: 490544 - DNA, 120 bp, Artificial Sequence
  ENSG00000162814_11 (sequence is synthesized)
aacttgagtctgttacctctgagaatgtctgtcacaatcacagcccctggtgaccaacagtgccataaatggttcccctgaaatacccatattctgaccccatcacccgggtcacaaatg

SEQ ID NO: 490545 - DNA, 120 bp, Artificial Sequence
  ENSG00000162814_12 (sequence is synthesized)
atgacaccagtgctgggtacccaaattaagggcgactaacatgtaagtaggatgatgaatggtttgaagtgtaaattgtgtgaaatagttcagcatgaaagctctgccctgagaaataat

SEQ ID NO: 490546 - DNA, 120 bp, Artificial Sequence
  ENSG00000162814_13 (sequence is synthesized)
gactgattataccagttagaaacccttcagactgttgaacttgagacacacagacacaacagacacagactagtgggtgtgggagcagaagcataggcactctcaaatagagaagacatt

SEQ ID NO: 490547 - DNA, 120 bp, Artificial Sequence
  ENSG00000162814_14 (sequence is synthesized)
tgcaagtctctgctgccaagggagcaaagagataatctcgatgccagggctgtgtcagatcctgcatggctctgaactacagttggtttccaaaaagctgggcttttgtgaggtttctgt

SEQ ID NO: 490548 - DNA, 120 bp, Artificial Sequence
  ENSG00000162814_15 (sequence is synthesized)
tttttatgcgatgcttagattttcctggaatccttggaagttaactcaacatttgaggttcctatatcctttaatcccatcccatgtgtatctttacaataaaacttcctgctagaggta

SEQ ID NO: 490549 - DNA, 120 bp, Artificial Sequence
  ENSG00000162814_16 (sequence is synthesized)
tcctgagggaatctttgtttcttgcatctgaagagaataacactaaacttattgcatatgatttgggggttggatccaatgatagcacagagggacaggaaatgtgatttattgaccata

SEQ ID NO: 490550 - DNA, 120 bp, Artificial Sequence
  ENSG00000162814_17 (sequence is synthesized)
aaagctttaatttaaaattgctggccagcgaaatccagactctgggaaatgttataggccaaatgatctgtttcttcaacaaataaattacaaaactgaggggaaaaaaaggaacctatt

SEQ ID NO: 490551 - DNA, 120 bp, Artificial Sequence
  ENSG00000162814_18 (sequence is synthesized)
aaaaagacattatctatcaatcactgtgtgtgtacagttttgagctcctgatttaaataaacaaattgtaaaataaaagatcttttgaaacaattggaagtttgaacactgattggatat

SEQ ID NO: 490552 - DNA, 120 bp, Artificial Sequence
  ENSG00000162814_19 (sequence is synthesized)
tggtggtataaaagaattattggttttttttaggtgtcatggtattgttttggtttacaaagttatagatataaatgttgaaatatttacagatgcagtgatatgttggctgggatttaa

SEQ ID NO: 490553 - DNA, 120 bp, Artificial Sequence
  ENSG00000162814_20 (sequence is synthesized)
tttgaaagtcaaagaagtgagttaaaatacatatactcctcctcttataatcggttatgtgccaataaatccattgtaaattgaaaatatcctaagttgaaaatattgtaagttaaaaat

SEQ ID NO: 490554 - DNA, 120 bp, Artificial Sequence
  ENSG00000162814_21 (sequence is synthesized)
taagttaaaaatgcatttaatacagctaacttaccagacagcttagcttagcctcacctaccttaaatatgctcagaacacatacgttagcctatagttgggcaaaatcatctaacacaa

SEQ ID NO: 490555 - DNA, 120 bp, Artificial Sequence
  ENSG00000162814_22 (sequence is synthesized)
aatattgaacagcccatgtaatttattgaatattgtactaaaagtgaaaaactgaatagttgtatgcatactcaaagtatggtttctactgaatgcattgtaaaccagaaagtatctgag

SEQ ID NO: 490556 - DNA, 120 bp, Artificial Sequence
  ENSG00000162814_23 (sequence is synthesized)
gggaccacaggcatgggccaacaagcctggctaaatattttgtacttttggtagacacgggtttttaccatgttgtgcaggctggtcttgaacgcctgagctcaagtgatctgcctgcct

SEQ ID NO: 490557 - DNA, 120 bp, Artificial Sequence
  ENSG00000162814_24 (sequence is synthesized)
caaagtactgggattacaggcatgagtcactgaacccagccctgagacatgtctcaattagtttagaagtttatttggccaaggttaaggacatgcccttgacactgcacctgtcagtac

SEQ ID NO: 490558 - DNA, 120 bp, Artificial Sequence
  ENSG00000162814_25 (sequence is synthesized)
gtacaggtcctgacaacatgtgtccaaggtggtcaagctatacaacttggttttatacattttaaggagacataagacatcaataaatacatggaagatgtacattggttcagtctggaa

SEQ ID NO: 490559 - DNA, 120 bp, Artificial Sequence
  ENSG00000162814_26 (sequence is synthesized)
aggcaggatgcctcaaacttgaaacaagagaatggggggtgggaggatgtgggagatgcttccaggtcatagttggagtcaaagactttccaattggcaattggttcaaagaatttatct

SEQ ID NO: 490560 - DNA, 120 bp, Artificial Sequence
  ENSG00000162814_27 (sequence is synthesized)
aaagacctggaatccatagaaggctttacctggattaaaataaggggaccaaggttctcatgcagatgaagcctccaggtggcagacttcagagagcatagattgtaaatgtttcttatc

SEQ ID NO: 490561 - DNA, 120 bp, Artificial Sequence
  ENSG00000162814_28 (sequence is synthesized)
tgacttaaaaaggtgtcagactcttagtaaattatctcctggatcagtgaaaagatgtgaaaaaaggttctctacagaatgtagattttccccataagagatagcttcgcagggccattg

SEQ ID NO: 490562 - DNA, 120 bp, Artificial Sequence
  ENSG00000162814_29 (sequence is synthesized)
caaaatatgtcaaaaatatatattttagggtaaaatgcctcaatttatttcaaggcctgatatttgtcatgtgatgctatactacagtcaggctgaaacttggcatcttattgctatgaa

SEQ ID NO: 490563 - DNA, 120 bp, Artificial Sequence
  ENSG00000162814_30 (sequence is synthesized)
aaatcttaagatctctattttaatgttaatgctggtcactggtgcctgaattccaaagggaggagggtataatgaagcatgtccaattccccatgccccacccccacccccacatcctat

SEQ ID NO: 490564 - DNA, 120 bp, Artificial Sequence
  ENSG00000162814_31 (sequence is synthesized)
aatggcctgaactagtttttcaggttaactttggaatacccttggccaagaagaggggtccatgcagatgtttggaggggggggtcttaaagctttatttttagattacagcatattgct

SEQ ID NO: 490565 - DNA, 120 bp, Artificial Sequence
  ENSG00000162814_32 (sequence is synthesized)
tttgcactatcataaagtaaaaacatcataagtcaagccaccataaatagcggaccatctgtatatctgaaagaagatgaaccaagacttggttattgttaaagctgatgattggctgta

SEQ ID NO: 490566 - DNA, 120 bp, Artificial Sequence
  ENSG00000162814_33 (sequence is synthesized)
tgaagatttactatacaattttgtgtacttttgtaagttcttggttgtttctaaacttataacaaaataaataattggccatcttcattggattgtgaagccatttcctcccacatgttc

SEQ ID NO: 490567 - DNA, 120 bp, Artificial Sequence
  ENSG00000162814_34 (sequence is synthesized)
gtaaaaatggtagccatggcccctgactgaacccaggtatgaatggccttcattgattttgtagaccctgaccttctctgttcttccagagaaggtggtactcagataaaaactttgaag

SEQ ID NO: 490568 - DNA, 120 bp, Artificial Sequence
  ENSG00000162814_35 (sequence is synthesized)
cattttattgttcagaatatgactttgatcttctcataagactcaagtttttgaatgcttaaggctctttatcgctagtgtatgtaagtaatatcattgtccttaaccaccatctgcctc

SEQ ID NO: 490569 - DNA, 120 bp, Artificial Sequence
  ENSG00000162814_36 (sequence is synthesized)
tccccccagacacacataagtttatgataactacagaggtgtccagatgagtaaaaactgcctttgcattaaggtgagagaagaccgagatgaaatcttattagaaaatataactgggga

SEQ ID NO: 490570 - DNA, 120 bp, Artificial Sequence
  ENSG00000162814_37 (sequence is synthesized)
aagcagtttgtctgtttctcctggaaaactactagactacatcaacttatatactacttcttttctatattctcaatatgagccacttaagaaaattaatgagactttatgtttgaccaa

SEQ ID NO: 490571 - DNA, 120 bp, Artificial Sequence
  ENSG00000162814_38 (sequence is synthesized)
agctggtaattccttgatcttattctccaaacttgattctgaatgactactgaccactaaaaacactaagagtaccactgtggatgtttaaaaacatacaccctaagagccttcagaatt

SEQ ID NO: 490572 - DNA, 120 bp, Artificial Sequence
  ENSG00000162814_39 (sequence is synthesized)
agacgcttcaattcttctgaaatcaaaagtcacaccagctttgctgtagttaatcaggtaatacctttcttctccactactctctaatttccttgagggcaaatattgtctttcttgata

SEQ ID NO: 490573 - DNA, 120 bp, Artificial Sequence
  ENSG00000162814_40 (sequence is synthesized)
aatgccctggacccaacatctaacagaatacctggcataaagtgaaatccatcgaatgtgctaatgataaataaagaagttcaaaaaaatcttttaatagaagctataaaatagcagata

SEQ ID NO: 490574 - DNA, 120 bp, Artificial Sequence
  ENSG00000162814_41 (sequence is synthesized)
agctaagtcattctcataaaacaccatttgtcatttgaatgcgtgcattgtggcctgttacttttaactagtctcactaatttatagttatatatgatgtagatctagattgtgatgtac

SEQ ID NO: 490575 - DNA, 120 bp, Artificial Sequence
  ENSG00000162814_42 (sequence is synthesized)
actaagtgggttgatcctgagatcaagctatgattgctgcttgcgtaaagtgttccttttgggaaataaataatctttcatatctgtaaactttggtataattggttatttatgcaatgt

SEQ ID NO: 490576 - DNA, 120 bp, Artificial Sequence
  ENSG00000162814_43 (sequence is synthesized)
attgttgtggttgtcaactcaagattgtattctcatctggggacattatgaatcttgttattttatccccttttttgctctgttttttcacatttatggcctacctgttacagctgcacg

SEQ ID NO: 490577 - DNA, 120 bp, Artificial Sequence
  ENSG00000162814_44 (sequence is synthesized)
gtatccattttctgtgctaaattcatctttaatttattattttttttcaacctcagcttttaactttgccctgattttctcttccattttattttcacttccattttaagctggctcaaa

SEQ ID NO: 490578 - DNA, 120 bp, Artificial Sequence
  ENSG00000162814_45 (sequence is synthesized)
gccttttaggaacaataagttactgaattatatgaacctatttgaggtaatgatgatgcctgggaaggagcagtattgctggatcagaattcactttttccaagttacagattttaataa

SEQ ID NO: 490579 - DNA, 120 bp, Artificial Sequence
  ENSG00000162814_46 (sequence is synthesized)
accactgtgcaaagcattaggataaatttttattgaaaattgagtgaatgactgaacaaatcgctgggtaatgctgtttaggttgttctattttccacggattaaattaaattctatgta

SEQ ID NO: 490580 - DNA, 120 bp, Artificial Sequence
  ENSG00000162814_47 (sequence is synthesized)
aactattgaaagtctatgatcttaaaaattcaaaaaaggagttgataaaagcaatactttacaaaattaatctagaagaactgttccaaatggattaaacagaagattaagcaggtagca

SEQ ID NO: 490581 - DNA, 120 bp, Artificial Sequence
  ENSG00000162814_48 (sequence is synthesized)
acaggatttttttttgaggatagaaatgagaaaatacatctgaaatgtaaaatcagaaaaacaacctatctaaatgtcttggaagtactgcattgaaaaaatctccagattaaaaatata

SEQ ID NO: 490582 - DNA, 120 bp, Artificial Sequence
  ENSG00000162814_49 (sequence is synthesized)
tgagattaaggtgtgaagtgagtgtgaatagaagaccccacactgcctggagtcctggattcttccacgtctgatgagtgaccttggatctcttaatctctctagttttctctctcttag

SEQ ID NO: 490583 - DNA, 120 bp, Artificial Sequence
  ENSG00000162814_50 (sequence is synthesized)
atttccagactgtattaccatcatttgagctcttctcaaagtatggaaaattatattcaaaagctggacagattgtataaagagagacagggtctcactctgttgcccagggtggaatgc

SEQ ID NO: 490584 - DNA, 120 bp, Artificial Sequence
  ENSG00000162814_51 (sequence is synthesized)
gattacaggcgtcagaagaagaaactgaagccatctgcattttaaaacttaacagttctgaaaggaaaacacagatgaagatcctgtaggaaatatacttgctatgattcaataaactat

SEQ ID NO: 490585 - DNA, 120 bp, Artificial Sequence
  ENSG00000162817_0 (sequence is synthesized)
gtctttgcgctcggaccttcgccagaggggccgggacatcatgacggtgggagccaggctccgaagcaaggcggagagcagcctcctgcgccgcgggccccgagggcgagggcgaaccga

SEQ ID NO: 490586 - DNA, 120 bp, Artificial Sequence
  ENSG00000162817_1 (sequence is synthesized)
cgaaccgagggggacgaggaggcggccgccatcctggagcacctggagtacgcggacgaggcggaggcggcggccgagagcgggacgagcgcggcggacgagcggggcccggggacccgg

SEQ ID NO: 490587 - DNA, 120 bp, Artificial Sequence
  ENSG00000162817_2 (sequence is synthesized)
gagggtgcacttcgccctcctgcccgagcgctacgagccactggaggagccggcgccgagcgagcagcccaggaagaggtaccggaggaagctgaagaagtacggcaagaatgtcgggaa

SEQ ID NO: 490588 - DNA, 120 bp, Artificial Sequence
  ENSG00000162817_3 (sequence is synthesized)
ggtcatcatcaaaggatgccgctacgtggtcatcggcctgcaaggcttcgctgcagcctactccgccccgtttgcggtagccaccagcgtggtatccttcgtgcgctaatgggagctgct

SEQ ID NO: 490589 - DNA, 120 bp, Artificial Sequence
  ENSG00000162817_4 (sequence is synthesized)
gtggcaggtgcccccagagtgaacgggagcccctgctgtgggaactttgtgaatcctggagcatctcagacttgaacacacagcatatttggaagagaaaacatgcctttctttgttgaa

SEQ ID NO: 490590 - DNA, 120 bp, Artificial Sequence
  ENSG00000162817_5 (sequence is synthesized)
tcacattagtatgatgagtgagtcatccctgcccatctgctgagcttctcacatctctcagtcacacgtggacccagtggtcaatcctgcagagaattcggcggaggttaggtttgggag

SEQ ID NO: 490591 - DNA, 120 bp, Artificial Sequence
  ENSG00000162817_6 (sequence is synthesized)
tggagctagcgtgctaaagccagagccttcacgtgaaggtggcaggcactggggcggaagccaacactcaacagatgcaagcagtgtgggtgtgcagcagaacagtgatcttgggggagg

SEQ ID NO: 490592 - DNA, 120 bp, Artificial Sequence
  ENSG00000162817_7 (sequence is synthesized)
aagaggatgttactagagtcagatgatttgctgtattctcctgaaaggtcgtaggctgacaggcgctcacattccttggctgcctcggttctgagggcagctaaggagctgtttattcct

SEQ ID NO: 490593 - DNA, 120 bp, Artificial Sequence
  ENSG00000162817_8 (sequence is synthesized)
caagtcatgctccccgatctccttcctctaccactctgtcaccaggagtttaattacaggcttgaggagaagaaaggaagaaaagatatcttgatgctttgaaaactgtgttggcagtgt

SEQ ID NO: 490594 - DNA, 120 bp, Artificial Sequence
  ENSG00000162817_9 (sequence is synthesized)
ggcatgactgtttaaagtagataaaaccttgtcattttaccccatccctgcatgactgtgaagctggcgaggaaggaggaagaagggcaagttcagatgcaggctgggtggctgggacag

SEQ ID NO: 490595 - DNA, 120 bp, Artificial Sequence
  ENSG00000162817_10 (sequence is synthesized)
gttggctaagggactactctggagggctcttctgcctggcattgcccacttcggcccagccacgtgtttgcagcgaccagagtccctgcaaaggtgtggctggctgtggtcagggtgcta

SEQ ID NO: 490596 - DNA, 120 bp, Artificial Sequence
  ENSG00000162817_11 (sequence is synthesized)
ctagcaccatcagcgcactcccgccattggctcagctcctctctgccagtccaactaagagtgctttgtcctgggtgggacataggggctgagagagatggggggagacataacacccag

SEQ ID NO: 490597 - DNA, 120 bp, Artificial Sequence
  ENSG00000162817_12 (sequence is synthesized)
cagatttagagaaggaaccagtaagtaggagacagatgtgaaggaaatggaaatgaggcaagaggacattggaagagagaagtttgctgtccaggagccaggtctggagcatcagtgtga

SEQ ID NO: 490598 - DNA, 120 bp, Artificial Sequence
  ENSG00000162817_13 (sequence is synthesized)
gggagttcaggtaggctgggcctgtgcctctaggtagggacaagggaggctgggtagccagggctggtgcttaaaacccctgaggccatgagctcattggctgcctttgtagcatcctgt

SEQ ID NO: 490599 - DNA, 120 bp, Artificial Sequence
  ENSG00000162817_14 (sequence is synthesized)
cttcttctgtgctgcctggtttgatctcatctcacctggattcaaagggtaaggtgggcatgggtcttgggcctgacacccaccaaggatgacctgtggactgccatcggatgctgaaca

SEQ ID NO: 490600 - DNA, 120 bp, Artificial Sequence
  ENSG00000162817_15 (sequence is synthesized)
gggagatgaaaggaggtcctcttaccatacccctctgccaaccccccagtaggccactgttctgactttgtttccagaatatccagaaatccaaaggggctgttgctgaacagtctgcag

SEQ ID NO: 490601 - DNA, 120 bp, Artificial Sequence
  ENSG00000162817_16 (sequence is synthesized)
gaccagtgacagcacctacctgttgtcccaaggcatacaaaggaggcctcaacgctcatgcttctctaatcaagccctaccaagacagacagaaagacagacagaaaaaaggaaggggta

SEQ ID NO: 490602 - DNA, 120 bp, Artificial Sequence
  ENSG00000162817_17 (sequence is synthesized)
gaggagaaggttgaagctgtggagctagactctgcttcacttcctgaagcttcaacttcatgtcgaagattcactgggacccaattcctgcattgttaatatttgtgaggaaaagtgaaa

SEQ ID NO: 490603 - DNA, 120 bp, Artificial Sequence
  ENSG00000162817_18 (sequence is synthesized)
caagtgatctggttttagcccagatgatgaaagtggatatggcacattttcacacacgtgagataattacagcttgccccacaacactgggtgttggagaaagggagagatagtcataag

SEQ ID NO: 490604 - DNA, 120 bp, Artificial Sequence
  ENSG00000162817_19 (sequence is synthesized)
tggaagaaaaagccaagcatagtgagtgggaaagagagtgagagcctgtgcaggctgctgacgagccccaggcagcccacaagtttctcgtggggagatggaggcagagcccagggtagg

SEQ ID NO: 490605 - DNA, 120 bp, Artificial Sequence
  ENSG00000162817_20 (sequence is synthesized)
ggacagagctgctggggcctttccttgcctgggaatctgtcccaggaagagcttccccactcccatcccccaaattggaaaaaccgtacattcaagcctgtttggccctgaaattcttaa

SEQ ID NO: 490606 - DNA, 120 bp, Artificial Sequence
  ENSG00000162817_21 (sequence is synthesized)
gaatctggttaagaattaactcactaatgtcaaaagtcaaaacctcctaggggttgtcctgggagtcaggttcacgggtacagaagatgaatctcagatgtcactcaacctgagccgtca

SEQ ID NO: 490607 - DNA, 120 bp, Artificial Sequence
  ENSG00000162817_22 (sequence is synthesized)
ttctctgtggcagggctgccctgggtttctcttactcaatccctggagtgtaagcatttggattgtgtcacagattacctttttaccttttctttctttttttttctttttttcaatatc

SEQ ID NO: 490608 - DNA, 120 bp, Artificial Sequence
  ENSG00000162817_23 (sequence is synthesized)
agtgcccacaccttactgagtattgagttttagagctttcgcttgatgtgcttgaccaagagacttcttttgtatccttttcttgtcctatgatgtaaataaaagcctcgatttatgtaa

SEQ ID NO: 490609 - DNA, 120 bp, Artificial Sequence
  ENSG00000162819_0 (sequence is synthesized)
actgcgccgagggccgccatcgctattgcggcattctccctcggctccggaggtaggggcaactcttctcttcctgtctgggaaaaagaccatagctcaaaaggaaggccgagggagaag

SEQ ID NO: 490610 - DNA, 120 bp, Artificial Sequence
  ENSG00000162819_1 (sequence is synthesized)
ttagaaagggatgatgaacgaagcgttttgaggggactgcaacgccgcggcaatacccgcccctgagctgcgcgcactaccgcctcggtagctatcatggccgccgggtcacgtgactcc

SEQ ID NO: 490611 - DNA, 120 bp, Artificial Sequence
  ENSG00000162819_2 (sequence is synthesized)
ggcttggcgccgtcctggttttccgtcaccctggttctgtagtctcggttctccgactccctctttttctcgcttgtggactccgatatattgcccttcttcccttagaagaactgctga

SEQ ID NO: 490612 - DNA, 120 bp, Artificial Sequence
  ENSG00000162819_3 (sequence is synthesized)
accgactctgagaaatttgaaaacatctggagaaaatgacccattggtttcataggaacccattaaaagccacagctcctgtgtcttttaattactatggtgtagtcactggcccttctg

SEQ ID NO: 490613 - DNA, 120 bp, Artificial Sequence
  ENSG00000162819_4 (sequence is synthesized)
cttcaaaaatatgcaatgacttgaggtcatccagggcacgactccttgaactgttcactgatttgagctgtaatccagaaatgatgaagaatgcagcagattcatatttctcacttttac

SEQ ID NO: 490614 - DNA, 120 bp, Artificial Sequence
  ENSG00000162819_5 (sequence is synthesized)
aaggtttcataaattctttggatgaatctacccaagaaagcaagttacgatatattcaaaatttcaagtggactgatacattgcaaggacaggttccaagtgcccagcaggatgctgttt

SEQ ID NO: 490615 - DNA, 120 bp, Artificial Sequence
  ENSG00000162819_6 (sequence is synthesized)
ttgaattaatttccatgggatttaatgtagctttatggtataccaaatatgcttcaagactggctggaaaagaaaatataacagaagatgaagcaaaagaagttcatcgaagcctaaaga

SEQ ID NO: 490616 - DNA, 120 bp, Artificial Sequence
  ENSG00000162819_7 (sequence is synthesized)
ttgcagctgggatttttaaacatttaaaggaaagtcatctcccaaaactcattacacctgcggaaaaaggaagagatttagagtcacgactcatagaagcatacgttattcaatgtcagg

SEQ ID NO: 490617 - DNA, 120 bp, Artificial Sequence
  ENSG00000162819_8 (sequence is synthesized)
ctgaagctcaagaagtaacaattgctcgagcaattgaactaaaacatgctcctggactaattgctgcactggcgtatgaaacagccaatttctatcaaaaagctgatcatactttatcca

SEQ ID NO: 490618 - DNA, 120 bp, Artificial Sequence
  ENSG00000162819_9 (sequence is synthesized)
gtttggagcctgcatattctgccaaatggagaaaatatcttcacttgaagatgtgtttctacacagcttatgcttactgttaccatggtgagactttattggctagtgataaatgcggtg

SEQ ID NO: 490619 - DNA, 120 bp, Artificial Sequence
  ENSG00000162819_10 (sequence is synthesized)
aagcaatcaggtctctccaagaagcagaaaaattgtatgcaaaggcagaagcactgtgtaaagaatatggagaaaccaaaggacctggaccaacagtcaaaccttcaggacatctgttct

SEQ ID NO: 490620 - DNA, 120 bp, Artificial Sequence
  ENSG00000162819_11 (sequence is synthesized)
ttaggaaacttggaaaccttgtgaagaacaccctagaaaaatgtcagagagaaaatggatttatttactttcaaaaaattccaacagaagccccacagctggaactcaaagcaaattatg

SEQ ID NO: 490621 - DNA, 120 bp, Artificial Sequence
  ENSG00000162819_12 (sequence is synthesized)
gtctcgtagagcctatacctttcgaatttcctcctacaagtgttcagtggacaccagaaacattggctgcatttgatctcaccaaaagacccaaggatgacagtactaaacccaaaccag

SEQ ID NO: 490622 - DNA, 120 bp, Artificial Sequence
  ENSG00000162819_13 (sequence is synthesized)
aagaagaagtgaaacctgtgaaagaaccagacatcaaacctcaaaaggacactgggtgctacatctcctaaaatacaacttgcacttagaatttctctagcagtaaataagataaaccac

SEQ ID NO: 490623 - DNA, 120 bp, Artificial Sequence
  ENSG00000162819_14 (sequence is synthesized)
agaatttcagttcttatttctcaaaatgatttctctgaagcttgtagaataactattatattcagagggttatctgccttcagcttacttgttcttaatttttaatacagcggagatgtt

SEQ ID NO: 490624 - DNA, 120 bp, Artificial Sequence
  ENSG00000162819_15 (sequence is synthesized)
tcttgctttgttttcagactctcctttttaatcaggacaacatttgaaagattttattgtgcctctaaagggtatatttgggggttgggtctttttgttaaactctggatagtaataagt

SEQ ID NO: 490625 - DNA, 77 bp, Artificial Sequence
  ENSG00000162819_16 (sequence is synthesized)
ggggttgggtctttttgttaaactctggatagtaataagtttcaggtcagtataggcccgaatcatgtggtttcagg

SEQ ID NO: 490626 - DNA, 120 bp, Artificial Sequence
  ENSG00000162819_17 (sequence is synthesized)
tgtttttctatctacacacaaaaagtttattttccttcctcttatttgatatcagaagaatgacaggaatcagtttttaacagagatagtttttccgtttctccattgtgttaatcagag

SEQ ID NO: 490627 - DNA, 120 bp, Artificial Sequence
  ENSG00000162819_18 (sequence is synthesized)
cgcagacttacattctcagtcatttatcttttctggtggagaataaaaagtcacttatagttaaagatcagaaaattatcacaccaaatccattacatatgttagaatcaataatttact

SEQ ID NO: 490628 - DNA, 120 bp, Artificial Sequence
  ENSG00000162819_19 (sequence is synthesized)
caaaaatcagcttttataggtatgttggcaccttatccaagaacttatccctgttccagtacccctgtgcttcattcagtatcagtaaccctgcaatgatttttacaaatatctttttct

SEQ ID NO: 490629 - DNA, 120 bp, Artificial Sequence
  ENSG00000162819_20 (sequence is synthesized)
agtgggttttttacttagaggaaagaactttgtaatagctcttaatgtttatatataagagaagacagaatggaaaatgttttttgaagtcaaatattgcatgatgtaaagaaaaaactt

SEQ ID NO: 490630 - DNA, 120 bp, Artificial Sequence
  ENSG00000162819_21 (sequence is synthesized)
taaacttaaatgagtaggttgtcctgaattacactggtaactctctacttctttattaaagaagttatagtaagatgcctttgttacctgatttcagtgtacattgtttttatgtggttt

SEQ ID NO: 490631 - DNA, 120 bp, Artificial Sequence
  ENSG00000162819_22 (sequence is synthesized)
tctgataatgtcctgtcagaattgtattggtttaggccaaaggccatagcaaaaacatagagaacaaatatgatcttaaaaatagattgtaacattttaaacaattagtttagtaatttg

SEQ ID NO: 490632 - DNA, 120 bp, Artificial Sequence
  ENSG00000162819_23 (sequence is synthesized)
ggaaatagtggatgcataatactttaacagaagtcacacatctgtaggtttatcttttgattattctcctgaggcattagatagtttttctattataagtgacagattgactcacttaat

SEQ ID NO: 490633 - DNA, 120 bp, Artificial Sequence
  ENSG00000162819_24 (sequence is synthesized)
ataaataagtagcatacactaaaagcttactatgtgccagatactgtgctggacacttacatagataagccattgaatccacacagcagccctgtaagaaataagtaaaatctgcataaa

SEQ ID NO: 490634 - DNA, 120 bp, Artificial Sequence
  ENSG00000162819_25 (sequence is synthesized)
gtgttgaaataggaatatacatttcattatgaaaaatgaatagattatgcctatctgaatcaatattgcattcaaataagtgattacttaaatcatatatcatagtttacactccttaaa

SEQ ID NO: 490635 - DNA, 120 bp, Artificial Sequence
  ENSG00000162819_26 (sequence is synthesized)
aaaaggtacataaattcagtgaggtttttttcttaacatacagaagtactaaatactgcttgcagtataatattgatattggaagctgcagtttccagaataagtggagtaataactaaa

SEQ ID NO: 490636 - DNA, 120 bp, Artificial Sequence
  ENSG00000162819_27 (sequence is synthesized)
cagacatttaattttatttcaatatctatggaaaaaacacttattaaatctccctgtattttatgttgtctttattacagaatcacttgtctgtttgttgtgtgccacttactgacaaaa

SEQ ID NO: 490637 - DNA, 120 bp, Artificial Sequence
  ENSG00000162819_28 (sequence is synthesized)
ctttaaacagtacttgatgccagctctctactctgtggctgtgggacctgtttcttttaggtacttgtgcttattaatctacttactaaattttcacattgacatttttggggatgatac

SEQ ID NO: 490638 - DNA, 120 bp, Artificial Sequence
  ENSG00000162819_29 (sequence is synthesized)
taccatatacgaaatggaaaatgtaatatgctcagtgcttctgtaaaatgcagcaatactggtattactttacatcagtaggcatctttgacatgagcatataaatattttgttgactca

SEQ ID NO: 490639 - DNA, 120 bp, Artificial Sequence
  ENSG00000162819_30 (sequence is synthesized)
gcaaaggtgacactttgtgactaaagtatcccattatatataatgttttttgaaatgttggaaattttggggaattatcaaatgtatagaagttgcatgaaggttatagagaggtgtaac

SEQ ID NO: 490640 - DNA, 120 bp, Artificial Sequence
  ENSG00000162819_31 (sequence is synthesized)
tgtttgttaactattacatggatttcatactaggcagtgacaactaacatgttacttcaactaaaagtgtataatgggttgtctttttatttatgaaaataaaagtaattttacttacaa

SEQ ID NO: 490641 - DNA, 120 bp, Artificial Sequence
  ENSG00000162819_32 (sequence is synthesized)
cgggggcggcgctcagttgtccaaccaaaatctagtactttgctattcaaaagtgtctggggaccagcagcatcagcatctcaggtcctgccccaggctattgaattagagcctgcattg

SEQ ID NO: 490642 - DNA, 120 bp, Artificial Sequence
  ENSG00000162819_33 (sequence is synthesized)
ggagaagatggggcaggggcagaaaccctcttctttcctgaagtaaagattcgcaaaacttcagacattttcatccaggaagtaggaggccgcattaaaagaagtatttgtggaagattt

SEQ ID NO: 490643 - DNA, 120 bp, Artificial Sequence
  ENSG00000162819_34 (sequence is synthesized)
cgcagcctcaagtgctgagtgtgatattatttgtaggcacatagatgctgtattaggctatcggaatttatatggaagatgtgtagaagatgatattttctgaaataactcgttaaatgt

SEQ ID NO: 490644 - DNA, 120 bp, Artificial Sequence
  ENSG00000162819_35 (sequence is synthesized)
tttgagtcctaaataaacctgctcagtttttcgttgggtacacactgtattctctattcattaagtatgtggtgctcctcaaaaccagctttgtcatgaataaatagcataaaggaagca

SEQ ID NO: 490645 - DNA, 120 bp, Artificial Sequence
  ENSG00000162819_36 (sequence is synthesized)
tcttggtgcttaccatttaaatttagtctttctttaatggtttacacatatttcaagggtctttggtcatacccatgtattgtaatttcggaagcctcactaagctaattgccttctgga

SEQ ID NO: 490646 - DNA, 85 bp, Artificial Sequence
  ENSG00000162825_0 (sequence is synthesized)
gagaaattgcgcccccagttggcagagaacaaacagcagttcggaaacctcaaagagagatgttttgtaactcaactggccggct

SEQ ID NO: 490647 - DNA, 89 bp, Artificial Sequence
  ENSG00000162825_1 (sequence is synthesized)
tcaaagagagatgttttagcagaagaaatacaaatatgaagagtgcaaagacctcataaaatctatgctgaggaatgagcgacagttca

SEQ ID NO: 490648 - DNA, 67 bp, Artificial Sequence
  ENSG00000162825_2 (sequence is synthesized)
gatgacgatgaagatgttcaagttgagttggctgagaaagtgcagaaatcgtctggaggaatgtgcc

SEQ ID NO: 490649 - DNA, 74 bp, Artificial Sequence
  ENSG00000162825_3 (sequence is synthesized)
agaaaaggaagtccctgaggactcacaggaggaatgtgccatcacttattcaaatagccatggcccttatgact

SEQ ID NO: 490650 - DNA, 120 bp, Artificial Sequence
  ENSG00000162825_4 (sequence is synthesized)
atcaaaacccaccatgccccaggctcaacggcgtgctgatggaagtggaagagcctgaagtcttacaggactcactggatggatgttattctactccgtcaatgtactttgaactacctg

SEQ ID NO: 490651 - DNA, 87 bp, Artificial Sequence
  ENSG00000162825_5 (sequence is synthesized)
agcacatcagcttcgccctttacgtggacaataggttttttactttgacggtgacaagtctccacctggtgttccagatgggagtca

SEQ ID NO: 490652 - DNA, 120 bp, Artificial Sequence
  ENSG00000162825_6 (sequence is synthesized)
acggtgacaagtctccacctggtgttccagatgggagtcatattcccacaataaacagcccttactaagccgagagatgtcattcctgcaggcaggacctataggcacgtgaagatttga

SEQ ID NO: 490653 - DNA, 90 bp, Artificial Sequence
  ENSG00000162825_7 (sequence is synthesized)
tattcctattctcaaaccatgccagtggcaacctgtgctcagtctgaagacaatggacccacgttaggtgtgacacgttcacataactgt

SEQ ID NO: 490654 - DNA, 120 bp, Artificial Sequence
  ENSG00000162825_8 (sequence is synthesized)
gcagcacatgccgggagtgatcagtcagacattttaatttgaaccacgtatctctgggtagctacaaaattcctcagggatttcattttgcaggcatgtctctgagcttctatacctgct

SEQ ID NO: 490655 - DNA, 76 bp, Artificial Sequence
  ENSG00000162825_9 (sequence is synthesized)
tctgggtagctacaaaattcctcagggatttcattttgcaggcatgtctctgagcttctatacctgctcaaggtca

SEQ ID NO: 490656 - DNA, 81 bp, Artificial Sequence
  ENSG00000162825_10 (sequence is synthesized)
tgctgttgcaaaaagaagaagttttaatctatacaattaaaaccttttgcctatcactctggacttctggattgtttttta

SEQ ID NO: 490657 - DNA, 120 bp, Artificial Sequence
  ENSG00000162825_11 (sequence is synthesized)
ttaattttaatctatacaattaaaaccttttgcctatcactctggacttctggattgttttttacattcagtgttataatatttgattatgctgattggttttggtgggtactgatgcga

SEQ ID NO: 490658 - DNA, 81 bp, Artificial Sequence
  ENSG00000162825_12 (sequence is synthesized)
tggcacgctggccacaatctacctcactcttatcagagtctgagctactggcagtgctttcagctctgagttgaggcacct

SEQ ID NO: 490659 - DNA, 120 bp, Artificial Sequence
  ENSG00000162836_0 (sequence is synthesized)
cacttgggacgggtccctgagtaggtgaggaggtgggtaggagcttgcttatagaaaagtggaatcgagtagtccttgctggtggagccgctgccgccagggaactcagggccggctcct

SEQ ID NO: 490660 - DNA, 120 bp, Artificial Sequence
  ENSG00000162836_1 (sequence is synthesized)
gttccttcaagagtgctggaggccaaacttgaaatacaagtttaatgttcctcgtcgggcaaaagataaggatccgatctcccccggcccggtgtgcagcaggagcgaccaaccccgacc

SEQ ID NO: 490661 - DNA, 120 bp, Artificial Sequence
  ENSG00000162836_2 (sequence is synthesized)
cgggttaaaactcccagggactcttcgctgctgccacctcttgttctctcccccgttcccactcggggtctccctcagggccgggaggcacagcggtccctgcttgctgaagggctggat

SEQ ID NO: 490662 - DNA, 120 bp, Artificial Sequence
  ENSG00000162836_3 (sequence is synthesized)
gtacgcatccgcaggttcccgcggacttgggggcgcccgctgagccccggcgcccgcagaagacttgtgtttgcctcctgcagcctcaacccggagggcagcgagggcctaccaccatga

SEQ ID NO: 490663 - DNA, 120 bp, Artificial Sequence
  ENSG00000162836_4 (sequence is synthesized)
tcactggtgtgttcagcatgcgcttgtggaccccagtgggcgtcctgacctcgctggcgtactgcctgcaccagcggcgggtggccctggccgagctgcaggaggccgatggccagtgtc

SEQ ID NO: 490664 - DNA, 120 bp, Artificial Sequence
  ENSG00000162836_5 (sequence is synthesized)
cggtcgaccgcagcctgctgaagttgaaaatggtgcaggtcgtgtttcgacacggggctcggagtcctctcaagccgctcccgctggaggagcaggtagagtggaacccccagctattag

SEQ ID NO: 490665 - DNA, 120 bp, Artificial Sequence
  ENSG00000162836_6 (sequence is synthesized)
aggtcccaccccaaactcagtttgattacacagtcaccaatctagctggtggtccgaaaccatattctccttacgactctcaataccatgagaccaccctgaaggggggcatgtttgctg

SEQ ID NO: 490666 - DNA, 120 bp, Artificial Sequence
  ENSG00000162836_7 (sequence is synthesized)
ggcagctgaccaaggtgggcatgcagcaaatgtttgccttgggagagagactgaggaagaactatgtggaagacattccctttctttcaccaaccttcaacccacaggaggtctttattc

SEQ ID NO: 490667 - DNA, 120 bp, Artificial Sequence
  ENSG00000162836_8 (sequence is synthesized)
gttccactaacatttttcggaatctggagtccacccgttgtttgctggctgggcttttccagtgtcagaaagaaggacccatcatcatccacactgatgaagcagattcagaagtcttgt

SEQ ID NO: 490668 - DNA, 120 bp, Artificial Sequence
  ENSG00000162836_9 (sequence is synthesized)
atcccaactaccaaagctgctggagcctgaggcagagaaccagaggccggaggcagactgcctctttacagccaggaatctcagaggatttgaaaaaggtgaaggacaggatgggcattg

SEQ ID NO: 490669 - DNA, 120 bp, Artificial Sequence
  ENSG00000162836_10 (sequence is synthesized)
acagtagtgataaagtggacttcttcatcctcctggacaacgtggctgccgagcaggcacacaacctcccaagctgccccatgctgaagagatttgcaaggatgatcgaacagagagctg

SEQ ID NO: 490670 - DNA, 120 bp, Artificial Sequence
  ENSG00000162836_11 (sequence is synthesized)
tggacacatccttgtacatactgcccaaggaagacagggaaagtcttcagatggcagtaggcccattcctccacatcctagagagcaacctgctgaaagccatggactctgccactgccc

SEQ ID NO: 490671 - DNA, 120 bp, Artificial Sequence
  ENSG00000162836_12 (sequence is synthesized)
ccgacaagatcagaaagctgtatctctatgcggctcatgatgtgaccttcataccgctcttaatgaccctggggatttttgaccacaaatggccaccgtttgctgttgacctgaccatgg

SEQ ID NO: 490672 - DNA, 120 bp, Artificial Sequence
  ENSG00000162836_13 (sequence is synthesized)
aactttaccagcacctggaatctaaggagtggtttgtgcagctctattaccacgggaaggagcaggtgccgagaggttgccctgatgggctctgcccgctggacatgttcttgaatgcca

SEQ ID NO: 490673 - DNA, 120 bp, Artificial Sequence
  ENSG00000162836_14 (sequence is synthesized)
tgtcagtttataccttaagcccagaaaaataccacgcactctgctctcaaactcaggtgatggaagttggaaatgaagagtaactgatttataaaagcaggatgtgttgattttaaaata

SEQ ID NO: 490674 - DNA, 120 bp, Artificial Sequence
  ENSG00000162836_15 (sequence is synthesized)
aagtgcctttatacaatgcctcctgctttgtgtgtttgggaagaggagagagcaaggggtaatgtactttaatataatgtaaggatatttcctttctgtgggtttactaagatttcttcc

SEQ ID NO: 490675 - DNA, 120 bp, Artificial Sequence
  ENSG00000162836_16 (sequence is synthesized)
tgaacggaaaaggggtataatattgagaccaaaaggatatttctctattttgtgagttggtttctaaggttagaagcatctttgtgtgacacgggctggggacatcatgaccctgtagaa

SEQ ID NO: 490676 - DNA, 120 bp, Artificial Sequence
  ENSG00000162836_17 (sequence is synthesized)
ttgtgtcggttttggactttagttcttttctcctatattaatttcacatgtattgagctacctactaagtagtgatcattataaaggtgaaaacactctgccctcaagttgttgcagtcc

SEQ ID NO: 490677 - DNA, 120 bp, Artificial Sequence
  ENSG00000162836_18 (sequence is synthesized)
agtgggagaggcagccgagtaaatcagtgatacagtgctgtatgttttatgctgtaataggtatttgaggggctatttgggtatagagaagaaacttcctgctcacatggcaggggatgt

SEQ ID NO: 490678 - DNA, 120 bp, Artificial Sequence
  ENSG00000162836_19 (sequence is synthesized)
ggggaacagtcaaggaaggcttctgaaaaagtcctggcctgatctgagtagagaaaggtgggtaggagttaaccaggaaagcaaggatgaaagcgtgttgcgtttagataaaggataggc

SEQ ID NO: 490679 - DNA, 120 bp, Artificial Sequence
  ENSG00000162836_20 (sequence is synthesized)
ttcaaggtcagggaacgttgctgggtggtgagatggaaccctgatgtggaggctcagcaggaagaagcaggaaggacactgggcccctggtggttttagttccagaaacaaatgtgggcc

SEQ ID NO: 490680 - DNA, 120 bp, Artificial Sequence
  ENSG00000162836_21 (sequence is synthesized)
ccagggctctgcaatggtaaggctggaactactcaacataagagctccacctttaactgtgccccctaagagtacctgatgatccccctatctccttgtcaatgttgctgttcttctcca

SEQ ID NO: 490681 - DNA, 120 bp, Artificial Sequence
  ENSG00000162836_22 (sequence is synthesized)
gaatctatttcaacccttctctgatttcaaaccaccagtccctttacctctcagagaaaacagcaaccacaaaagcctctccacttcctactatcttaatattgacaacttccagatcag

SEQ ID NO: 490682 - DNA, 120 bp, Artificial Sequence
  ENSG00000162836_23 (sequence is synthesized)
ggagctgagatatctcaagctcaggtttctcttctgagcttcagacacttttatccacttggatttcactggcacaaaactttccatgttagaatcaaacccccctcctcccagacctgc

SEQ ID NO: 490683 - DNA, 120 bp, Artificial Sequence
  ENSG00000162836_24 (sequence is synthesized)
ttctcccacacacttccctatctgaatgaaagacacctccactctccacccagttgccaaatcagaaatctgtctttgttttctttgtctcacattttcctatgtctaatcagttaagtt

SEQ ID NO: 490684 - DNA, 120 bp, Artificial Sequence
  ENSG00000162836_25 (sequence is synthesized)
ttatcaatactacctgtttatttctttaatctattcacatatctttatcctcaatcttcagcatccccttcccatcctcagtctgctggttactgtatttcctattttactaagaatcta

SEQ ID NO: 490685 - DNA, 120 bp, Artificial Sequence
  ENSG00000162836_26 (sequence is synthesized)
aaagagatcagaagaaaacttccacatcccccaacacccaaccaccaaatctgctaacccagttgcattggtgcttttatagccttccttcctccctcttactaagaatgaaccaacact

SEQ ID NO: 490686 - DNA, 120 bp, Artificial Sequence
  ENSG00000162836_27 (sequence is synthesized)
attcctatcaaagcccaaccctctagctttacattgactcctagtgtcttttttctggattgtcaatttttttcctgaccaattattctattagcaatacaaatatgctgtaaaatctct

SEQ ID NO: 490687 - DNA, 120 bp, Artificial Sequence
  ENSG00000162836_28 (sequence is synthesized)
cagctacaattaagtattcacccccaccactccatggaaactgctcttgtcaaaatcatcaatagcctttgtgtggtgaatccaatagccagttttcattcttcttactaagcttctcat

SEQ ID NO: 490688 - DNA, 120 bp, Artificial Sequence
  ENSG00000162836_29 (sequence is synthesized)
cagtattcctagactatttccttcactggcttcgacaaatgctttcttggttttcctccaatttctcgactttgttcctgctgaatctacctttttctaatccgtaagtgttggggtgtc

SEQ ID NO: 490689 - DNA, 120 bp, Artificial Sequence
  ENSG00000162836_30 (sequence is synthesized)
tccgtaagtgttggggtgtcccagggcttactccttggaccttttttccaccttttcccctacactcacccactaggtgatctcaagaatttccagtttgaggccgggcgcggtggctca

SEQ ID NO: 490690 - DNA, 120 bp, Artificial Sequence
  ENSG00000162836_31 (sequence is synthesized)
ttataaaattattataattttataaaattattatatttatggagtacaatgtgatgtaatcccagctactcggaaggctgtatgtgtctatttatggagtacaatgtgcctgtaatccca

SEQ ID NO: 490691 - DNA, 71 bp, Artificial Sequence
  ENSG00000162836_32 (sequence is synthesized)
ggaggcagaggttgtgctaacatctcaaaaaaaaaaaaagaatttccagttttaaatatttacacaatgtc

SEQ ID NO: 490692 - DNA, 120 bp, Artificial Sequence
  ENSG00000162836_33 (sequence is synthesized)
aaaaaaaagaatttccagttttaaatatttacacaatgtctcctaaatttataccttcaacctagacctttccctgtgaatcccagtctcatttccaacagtctaatcaatgtctctatt

SEQ ID NO: 490693 - DNA, 120 bp, Artificial Sequence
  ENSG00000162836_34 (sequence is synthesized)
tggatgtttaagatatacaataggtatcaaacttcccattgtccacaataaactctcaatttccgtgccttttcaaacttactccttccacaggctttcccatctaggtaaatgacacca

SEQ ID NO: 490694 - DNA, 120 bp, Artificial Sequence
  ENSG00000162836_35 (sequence is synthesized)
ccattcaccctgttgctttggccaagaactttagaactgcccttgactcccctctttttctcatatcctacctctactacatcagtaactcctgttgtatctctcttcaaactatatcca

SEQ ID NO: 490695 - DNA, 120 bp, Artificial Sequence
  ENSG00000162836_36 (sequence is synthesized)
gaattgaccatgtcccaatacttccattgctactgtcttagtcccagtgtcatcttttacctggattattgtaaaggcctcgtaactagtcttcctgtttctgcccttcccttctctgcc

SEQ ID NO: 490696 - DNA, 120 bp, Artificial Sequence
  ENSG00000162836_37 (sequence is synthesized)
catctattctcaacacagtgttgcttttaaaacaaagtaagatcgtgccactcttctgctctaaattccccattggtttctcatctcaaactaagggccagtcataatgccctcacggtc

SEQ ID NO: 490697 - DNA, 120 bp, Artificial Sequence
  ENSG00000162836_38 (sequence is synthesized)
ctatgacatctcactgcaccccagccatactcgccatcttaccattcttcttcttttttgtaataaaaactttttactttctttttagttgacagataataattgcgtatatttatggag

SEQ ID NO: 490698 - DNA, 120 bp, Artificial Sequence
  ENSG00000162836_39 (sequence is synthesized)
tacaatgtgatgttttgatatatgtatgcatgagggaatgattaaatcaagctaattaacatattcatcacttcatctactcatcactttcttgtggtgaaaatgtttcagatatactct

SEQ ID NO: 490699 - DNA, 120 bp, Artificial Sequence
  ENSG00000162836_40 (sequence is synthesized)
ttagtagttttcaggtgtacagtcgctgtggtttgagtgcttttgtcttctctaaatttgatgttgacacttagtgcccagtacaatgttactgggaggtggagcctaatggggatgttt

SEQ ID NO: 490700 - DNA, 120 bp, Artificial Sequence
  ENSG00000162836_41 (sequence is synthesized)
aatggattaatgccattataaaaagggcttgcaggaatgggttccttctcttttgcttttctgccatatgatgacaaagtgttcctcctctctggaggatgcagcaacaggcaccatctt

SEQ ID NO: 490701 - DNA, 120 bp, Artificial Sequence
  ENSG00000162836_42 (sequence is synthesized)
tgaagcagagagaccaggccctaaccttctggtgccttgatcttggacttctcagcttccagaactgtgagataataaatttctgttcattacaaattaccccatctgtggtattctgtt

SEQ ID NO: 490702 - DNA, 120 bp, Artificial Sequence
  ENSG00000162836_43 (sequence is synthesized)
atagcaacacaaaatggactaagacaacagtatactgttatgaactatggtcaccatgctgtgcactagatcacaaaaacttatttctactgtttaactgaaactttgtacattttgact

SEQ ID NO: 490703 - DNA, 120 bp, Artificial Sequence
  ENSG00000162836_44 (sequence is synthesized)
aacatctccctttttcccatcatcccatcccattcttactatcgttgaagatggagtatgccaagtagtcctgagccatgtcctcacctcggggtgagcacctgttgttcctgtgcctgg

SEQ ID NO: 490704 - DNA, 120 bp, Artificial Sequence
  ENSG00000162836_45 (sequence is synthesized)
aatgctctcctagacatttgcgtggctagctccctcttttcattcagatctcagctcattgtcatctcagagaggccctccttgccctccttctacctcctgccttaggtatactctgcc

SEQ ID NO: 490705 - DNA, 120 bp, Artificial Sequence
  ENSG00000162836_46 (sequence is synthesized)
accttctgtcatgggctgaattgtgtcccccctaaatccatatgttgacatcttaacccctagtacagtaagtcctcacttgatgctatcaataggctcttggaaatgtcggctttcagt

SEQ ID NO: 490706 - DNA, 120 bp, Artificial Sequence
  ENSG00000162836_47 (sequence is synthesized)
gaaaggacatatagcaggtccttgaataacattgtgttttgttcaacatcgttgccttgtaacactgatgagcaaaacagttggttctctaatatgttgttttacttaaagctacagttt

SEQ ID NO: 490707 - DNA, 120 bp, Artificial Sequence
  ENSG00000162836_48 (sequence is synthesized)
ccaagaacctatcaatgatgttgaggactgaatgtacctcaggtgtaatgtatttggagatagggccttttaagaggtaaagtaaatgaggtcatatgggtaggctgtaatccaatatga

SEQ ID NO: 490708 - DNA, 120 bp, Artificial Sequence
  ENSG00000162836_49 (sequence is synthesized)
ctggaatccttataagaagaggaaatgaggacacagacacagagggaagatgactatctgcaagtcaaggagagaggcctcagaagaaaccaatgctgctgacaccacgatcttggactt

SEQ ID NO: 490709 - DNA, 120 bp, Artificial Sequence
  ENSG00000162836_50 (sequence is synthesized)
ctagcctctagcactgtgaggaaataaatttctgttgtttaagccacctagtctgtgatactttgctacggcaggccctagcaaatgaatacacttgtcttgtctttcccccgccctgtg

SEQ ID NO: 490710 - DNA, 120 bp, Artificial Sequence
  ENSG00000162836_51 (sequence is synthesized)
atatttatcagtgccggatattacatatttgtgtatctatatgcttatttccctgactaaaatggaagctccatgaaggcagatttcctcttgttcactgatgtgtccccagcacctgga

SEQ ID NO: 490711 - DNA, 120 bp, Artificial Sequence
  ENSG00000162836_52 (sequence is synthesized)
atagtgcctagtgcatgccagtgctcagacacttggacatttgaatgacatatcccctctgtcacttctctccggggcccaaggccaccctcctaggttaccacagtggcttcctaatgg

SEQ ID NO: 490712 - DNA, 120 bp, Artificial Sequence
  ENSG00000162836_53 (sequence is synthesized)
gccataccctcacttgctttccatcaccccctgagacctggcccctgcatacctctccagcttcacccctcacatatctccctagccagacctatagtatgtttaaaaaaaaaggaaatc

SEQ ID NO: 490713 - DNA, 120 bp, Artificial Sequence
  ENSG00000162836_54 (sequence is synthesized)
gcactcctctggcctctttaccttggcacacatttttccatcacctgacccctgacccacactcccttttcctgtgtaatccaattatctctaggcctcccgtgtttctgtttgtccttc

SEQ ID NO: 490714 - DNA, 120 bp, Artificial Sequence
  ENSG00000162836_55 (sequence is synthesized)
aatagaaggttgtttgtcttgtcttttattgtatttctagaaccaagtgcagagactgtacaaagtggacctcagcaaagatttaccgaatgaataaatgagttcagaacgctgacttaa

SEQ ID NO: 490715 - DNA, 120 bp, Artificial Sequence
  ENSG00000162836_56 (sequence is synthesized)
catgaggatacctgtcctgactccccaagatggttcccactgtcacccaaggtagtttgggggacaacttgtcatgctgcatacccttatgtcacaggatctggtgaacaggtcgttcct

SEQ ID NO: 490716 - DNA, 120 bp, Artificial Sequence
  ENSG00000162836_57 (sequence is synthesized)
ggaggtcgcattcattgcacttcgagtctctcaggggctgacatcccacagaaaagtgaagcattcttcctagttccatagctctccttatgtactcttgaaagacccctggagcgtatg

SEQ ID NO: 490717 - DNA, 120 bp, Artificial Sequence
  ENSG00000162836_58 (sequence is synthesized)
taaagtggacttcttcatcctcctggacaacgtggctgccgagcaggagaagatgggctcctgcaggttccatggaagctgatcagctgccagaatcagtaggtaagaagcatttttttc

SEQ ID NO: 490718 - DNA, 120 bp, Artificial Sequence
  ENSG00000162836_59 (sequence is synthesized)
taaaactacatgtggccctttcaggcacacaacctcccaagctgccccatgctgaagagatttgcaaggatgatcgaacagagagctgtggacacatccttgtacatactgcccaaggaa

SEQ ID NO: 490719 - DNA, 120 bp, Artificial Sequence
  ENSG00000162836_60 (sequence is synthesized)
gacaggtgaggggctctcactgctggcatgaagtcacgcttggtcagacatccaagtgtatggggaagaggagttcatcaggcccactcacacctgacagctgatgtctcctcgtgtaag

SEQ ID NO: 490720 - DNA, 120 bp, Artificial Sequence
  ENSG00000162836_61 (sequence is synthesized)
gaggctgaaccccattctgcccacctaccagtaggccctaggtcctcgcacttctacagctgggactggtggcctagtgcttctgttccctgttatgcagaaccaggagccaccaccctc

SEQ ID NO: 490721 - DNA, 120 bp, Artificial Sequence
  ENSG00000162836_62 (sequence is synthesized)
atgactttatcacttgccttttccttttgctttaaggtttaaaggatttgggtggggggagctgaagaaagaatattcatttctgtctttagtcatcatgttacaatttgcaaaccattt

SEQ ID NO: 490722 - DNA, 120 bp, Artificial Sequence
  ENSG00000162836_63 (sequence is synthesized)
tcacattctcactgtgaggtgagagagatacctttctccctggctttatagataaagaaactgaggctgggagatattgcctacctggtctaggcccagctagcaagtgatggagccaga

SEQ ID NO: 490723 - DNA, 120 bp, Artificial Sequence
  ENSG00000162836_64 (sequence is synthesized)
aacaggaatgaagaaaattctagggcttttccagcctcattgacaaggaaaaagcaaactactcttcattgcagtgttgacatttcaaaactggcatttaattatttacatactttcata

SEQ ID NO: 490724 - DNA, 120 bp, Artificial Sequence
  ENSG00000162836_65 (sequence is synthesized)
tattaaggtacatatacatgtgtataagtaaatctgtatgtgtatatgtgtgtataaaagttttcaatagctcgactactcacagctatcctagagaattttaccaaagcccaggagatc

SEQ ID NO: 490725 - DNA, 120 bp, Artificial Sequence
  ENSG00000162836_66 (sequence is synthesized)
ttctgcagtttggagaacaaaataaatcacagtaatccaccatcccctgtaatcaaatacattttgactgaacccaataacaatgactcagtttctagcaaggtgccagacgcagccctt

SEQ ID NO: 490726 - DNA, 120 bp, Artificial Sequence
  ENSG00000162836_67 (sequence is synthesized)
ggccttagatcacagattgattcatggggatgggcaggagtctccagggaaaacagctcatggggtagctgttgagcttctatgtgggaagtgaggaaaatgaaagctcctggaagcttg

SEQ ID NO: 490727 - DNA, 120 bp, Artificial Sequence
  ENSG00000162836_68 (sequence is synthesized)
gtaaagatgagaaacaaacatgagctcctggggtctttaataaagagaacttcggctgtagaaaacaaaaagattattgaaaactaaattcaccctcaacactaattaattggacactgg

SEQ ID NO: 490728 - DNA, 120 bp, Artificial Sequence
  ENSG00000162836_69 (sequence is synthesized)
atataactgagatttgtaagctgtttctgcccttgaccctggctccagcctctggagaatggaagagtgtggctagcacagagctgcgggtcagcccctcatgagagggagttgctggtc

SEQ ID NO: 490729 - DNA, 120 bp, Artificial Sequence
  ENSG00000162836_70 (sequence is synthesized)
taggtgcaggtgctgaggtatgagaaacccagccgcccagagccacacagcaacacgcccagctggccccggtgaagacatgcagtttcctagggctgggtctctttaacctgttctttg

SEQ ID NO: 490730 - DNA, 120 bp, Artificial Sequence
  ENSG00000162836_71 (sequence is synthesized)
gaaccccagggtacccacataattgttcgtggacactaagcaggtattttgcaagagaaatctggtttctttcgtgtttggtgaaataactgaattttcccatgctttaactatgtgtga

SEQ ID NO: 490731 - DNA, 120 bp, Artificial Sequence
  ENSG00000162836_72 (sequence is synthesized)
ggaaataatttctggttcttctgtttattttctctttctatggtcatacatacactcaccgtcttcctctgacagtattgattaccaagcacaattaagcactgagacagaaagttaaca

SEQ ID NO: 490732 - DNA, 120 bp, Artificial Sequence
  ENSG00000162836_73 (sequence is synthesized)
gctgaagtggggtcacctataggcagaaaatagattcgtgtctgtttaacagtaacccaaataagaagccatgttaaatagagacaacttttattacaatccttatagcataccttcctt

SEQ ID NO: 490733 - DNA, 120 bp, Artificial Sequence
  ENSG00000162836_74 (sequence is synthesized)
ttaacattatttttatgatttagctccctccaataggaaatgtttggccacccactggttttgtgctttatatacttattgctttaaatgtgttattaaaatcttaccaccaaattagga

SEQ ID NO: 490734 - DNA, 120 bp, Artificial Sequence
  ENSG00000162836_75 (sequence is synthesized)
aaggaaggctggcacataggaaacaaaattaaggatgttcttgttccttctgattatttttctaagggccttctagaattcctggaaattattaccccttcttcttcccagcttgtcagc

SEQ ID NO: 490735 - DNA, 120 bp, Artificial Sequence
  ENSG00000162836_76 (sequence is synthesized)
tttgttctttgattccccaaggcctagttggtcacggcttatccaggttaccactctcctgctccctcagcccctcccatctcagttgtgttcacaacaggtctgtgtgctggtgcctgt

SEQ ID NO: 490736 - DNA, 120 bp, Artificial Sequence
  ENSG00000162836_77 (sequence is synthesized)
gttgttgggagtcttcattcacagaggaccccaagaccggactcggtgccatttctctccttctggcccgttgctggcccttatgcattacttgcctttttctcagctctgtctggactc

SEQ ID NO: 490737 - DNA, 120 bp, Artificial Sequence
  ENSG00000162836_78 (sequence is synthesized)
ccatggactctgccactgcccccgacaagatcaggtacctggcacagcaactctgctttgtgcagctaagggccgtgggaacttctggctgtagggagggaacccaaatcttagtgaggc

SEQ ID NO: 490738 - DNA, 120 bp, Artificial Sequence
  ENSG00000162836_79 (sequence is synthesized)
aagaaccaggctgtcagtgaccgaaggtagatgtttaacaggcctcaagtgtcaaagaggttcacaatcttttaacctttcttcctgctgcacccctcctaccatgttttgaaaatttta

SEQ ID NO: 490739 - DNA, 120 bp, Artificial Sequence
  ENSG00000162836_80 (sequence is synthesized)
tttttgctttctctctctcttttttttattaattgaagatatgtcaaacagtagccaattatgatgtcacactgatttgatatgataatagtccaaaacaaagataaattgcttaatgga

SEQ ID NO: 490740 - DNA, 120 bp, Artificial Sequence
  ENSG00000162836_81 (sequence is synthesized)
agaagacacctttttttctgatttgttgagagcattcaacttgcactaaaaataggtgacttgatagaggaggggaggtaggaagtagccctgggaaagatgagtaggggggaaaggcat

SEQ ID NO: 490741 - DNA, 120 bp, Artificial Sequence
  ENSG00000162836_82 (sequence is synthesized)
ctaacagttcaagaatttgcacggttgggtgcccaaggataagagcccctgactgcattccttccactcagggtcagtgtgtccacttctgtgcaagcctagggcatctagaaggttcct

SEQ ID NO: 490742 - DNA, 120 bp, Artificial Sequence
  ENSG00000162836_83 (sequence is synthesized)
gccaagccacacagcttgctgccactccctgggacttgccagcttcccttttctgcttgtgaaggggtgccaccatacctaaattgttacttacttccctctcctttatcaacacacaca

SEQ ID NO: 490743 - DNA, 120 bp, Artificial Sequence
  ENSG00000162836_84 (sequence is synthesized)
cacatatttagtaaatattttaagctgtcaggatcatgcaatttctgttacaactactcatctctgcccttgtaacatgaagcaaccaaagacaatatgcaaacaaatagacatggctgt

SEQ ID NO: 490744 - DNA, 120 bp, Artificial Sequence
  ENSG00000162836_85 (sequence is synthesized)
cagtaaaatttgtttaccaaaactggtcagatttggcctatggtatagtttgctttattctggtgtaaatcattttaaacaggaccttgtctattccattccaattagccctggttttgt

SEQ ID NO: 490745 - DNA, 120 bp, Artificial Sequence
  ENSG00000162836_86 (sequence is synthesized)
aaaactaacatttcttcaaggacaaatggttacaacctcacaaggccatccaacttggctttgcctgtatacattcttctgaaaagtatgtgttgcatacagtgttggttgcctgctctt

SEQ ID NO: 490746 - DNA, 120 bp, Artificial Sequence
  ENSG00000162836_87 (sequence is synthesized)
catccattgctgcaacattccttgacttataaagatggtcatttacccaatcaccacaaataaggatttgtctaagccaatcatggcaaccttgttttcatttgtcagtggctgggttct

SEQ ID NO: 490747 - DNA, 120 bp, Artificial Sequence
  ENSG00000162836_88 (sequence is synthesized)
gggaattctaggaggggtgtttttttctctttgataaaaagtgagaagcacaaaaacaaggagaagaccagtctctgaagtctccatggaagctgatcagctgctaggatgagtagatga

SEQ ID NO: 490748 - DNA, 120 bp, Artificial Sequence
  ENSG00000162836_89 (sequence is synthesized)
gaaacatttctttcttctatagtaagtggactttgttcactactgtgagtgaacatgctttaagctgcagtagtcacctgtggccatgatgtgacaggcctgagaatgaaagtggtggag

SEQ ID NO: 490749 - DNA, 120 bp, Artificial Sequence
  ENSG00000162836_90 (sequence is synthesized)
ccctcctgcaaaacccacctacctgagttagcaccaagtctccctcctcaggcccagtggagtctctcttggcacagtcagctctctgaatcctatagggcaactcctggctatggccca

SEQ ID NO: 490750 - DNA, 120 bp, Artificial Sequence
  ENSG00000162836_91 (sequence is synthesized)
ggggtcaggcagaacttgacagatggtggcaggatggggcttgagccttatcccagttctgttacagactcctaggaacagggtccccctcctcttctcctgagcgtccctgtcaggatg

SEQ ID NO: 490751 - DNA, 120 bp, Artificial Sequence
  ENSG00000162836_92 (sequence is synthesized)
tcgcctcctggctgtgagacctgttttggagattgttggtggtatctttgggaggtgatgtgtgctgctgttagcacccgtggtgttggctgcttcatcagggctggggtccagggcaga

SEQ ID NO: 490752 - DNA, 120 bp, Artificial Sequence
  ENSG00000162836_93 (sequence is synthesized)
ggccagagcacgccccagggatgagcctgttggttctcccagctcggggatgtaactcgactctttcttcccagtcaattcaacactttttgagtgacttttacaagcagagcatagtgc

SEQ ID NO: 490753 - DNA, 120 bp, Artificial Sequence
  ENSG00000162836_94 (sequence is synthesized)
ttttattctggaagctcaccgggtagtggggccttcctgtctgtaatatgtatgcacatgtataccacatggatcagagcctctcagatctctgggcttagctggaaatagcagaaggac

SEQ ID NO: 490754 - DNA, 120 bp, Artificial Sequence
  ENSG00000162843_0 (sequence is synthesized)
atcagacctaaatcagctttcctccctgctaacatcctagtggcaactcttactcctacccgcactatgggattttaagatcaaaggaattagacctagggcaaaaactgagacagcagg

SEQ ID NO: 490755 - DNA, 120 bp, Artificial Sequence
  ENSG00000162843_1 (sequence is synthesized)
gaggcactgtaacaactggaaagttttccaaattggtaaacttgcagtattctttctgtacagaagtaaaagatcccctatgtccctatggatatcaggaaggaaaagcgtctcaacatg

SEQ ID NO: 490756 - DNA, 120 bp, Artificial Sequence
  ENSG00000162843_2 (sequence is synthesized)
gcacttcagatgagcaatttcaaaaaggctttgaacaggtttgaaaaattggttgaacaaacagcagcccagaaaagagatgaaagagcaggcttatttatccataaagaagatgcaatt

SEQ ID NO: 490757 - DNA, 120 bp, Artificial Sequence
  ENSG00000162843_3 (sequence is synthesized)
ggttatgacaagttttatgcatcggtacagaagctctttggtccagatgtgaagaatcaagatgtgaaacgcttttacaggaaactgtgcaacaacacggatgcatctgcagactggtgt

SEQ ID NO: 490758 - DNA, 120 bp, Artificial Sequence
  ENSG00000162843_4 (sequence is synthesized)
gagatctttggatacttctcctctgaagaagatcctattgcttcccagttggatgaagaaaatttggttttctttgtgtctagaaaaaggcgaattttaatttcaggtagtagaagacga

SEQ ID NO: 490759 - DNA, 120 bp, Artificial Sequence
  ENSG00000162843_5 (sequence is synthesized)
gatgtgattaagagcattgtcaagatacctcacctggatttactaataacagctactcagaaaggattaataacagtttttaataaccaggacacctcctggattacagggtgtgattac

SEQ ID NO: 490760 - DNA, 120 bp, Artificial Sequence
  ENSG00000162843_6 (sequence is synthesized)
ctcttgcagctgaaacgaatcgtagccacaaccgaaaggaccattattgtctgggattataaagctcaagggagcagccaggaaaattattttgtcataaaaccaatggatcactgcctc

SEQ ID NO: 490761 - DNA, 120 bp, Artificial Sequence
  ENSG00000162843_7 (sequence is synthesized)
ctgtgtgtgtgtgtggtgcctttgcctgaccatctctgccgagatgacatcctcttgggggatgatgggggttttgtgaacagattcacagtcaacagtgatgactttggaataaagcag

SEQ ID NO: 490762 - DNA, 120 bp, Artificial Sequence
  ENSG00000162843_8 (sequence is synthesized)
gcaaaatccaaaagaaaattacaaaatcaggtcttagactcaaagaactttaaaagtgttaaaaggaagctacataatgactgggttatgaaaattagatatatttcagccctaaattgt

SEQ ID NO: 490763 - DNA, 120 bp, Artificial Sequence
  ENSG00000162843_9 (sequence is synthesized)
tttggatcctgctccttagacagtaatcattcattagttttggaatccttgaagagactcgaggataatttgcctgtcagagagttttccatgccaagaggagccaacactttttgctac

SEQ ID NO: 490764 - DNA, 120 bp, Artificial Sequence
  ENSG00000162843_10 (sequence is synthesized)
tgtgttaaggcaaatgtgattgtcactggaggagatgataaggtcatccggttgtggcaccccaatatcagcaccaagccagtagggaaacttgtaggacacatgttcagtatcgccgag

SEQ ID NO: 490765 - DNA, 120 bp, Artificial Sequence
  ENSG00000162843_11 (sequence is synthesized)
atcgtaaccaatgaaaaagatcaacatgtcgtcagcctttcctctgcaaaggttttccgggtgtgggatatacaaactctttcactattacaagtcttccatgacagccagggaggacca

SEQ ID NO: 490766 - DNA, 120 bp, Artificial Sequence
  ENSG00000162843_12 (sequence is synthesized)
ggagacatgcagatttactctatgatatatgatgccaatcatggcatgcttattacgggatctagtgttatggacatgtatcctttgactaggatgatacaagatacaaaacaggttcct

SEQ ID NO: 490767 - DNA, 120 bp, Artificial Sequence
  ENSG00000162843_13 (sequence is synthesized)
cacactcatgaacgagaaatcaatgtcatgctttacaacaaatattttcatcaagtactcactatctgctctgaatccataattagggtatgggaactcgagactgggctccaagtatac

SEQ ID NO: 490768 - DNA, 120 bp, Artificial Sequence
  ENSG00000162843_14 (sequence is synthesized)
cagattttagaacctcatggtttcaatactgaagtgacttctgcagctgtcgatgaaagtggatttctttttgccacaggagcgtataatggaacagtcagaatctgggactttggcagt

SEQ ID NO: 490769 - DNA, 120 bp, Artificial Sequence
  ENSG00000162843_15 (sequence is synthesized)
gggcaggagatgaaggtgttgccggaggggaaagactggaaggaggacgagcactgcctacgacgcctcattttcctcaaagcccaagaaaaacaccagcagctggtcctggccttggag

SEQ ID NO: 490770 - DNA, 120 bp, Artificial Sequence
  ENSG00000162843_16 (sequence is synthesized)
cgcaacgggactatcaaaatgatccagggtaaggaagatgatatctacctcatggtgatctgggagctgcctgatgttgtgcctttcctacaagatgggaaacatgctgtgcatctgaga

SEQ ID NO: 490771 - DNA, 120 bp, Artificial Sequence
  ENSG00000162843_17 (sequence is synthesized)
atgtctactagagacaggaacatggctattcctttcccagatgtcgagttgatagttgagaggaacttttctcaacctactgataatcccaccatggatttattacgagtgaactgcatt

SEQ ID NO: 490772 - DNA, 120 bp, Artificial Sequence
  ENSG00000162843_18 (sequence is synthesized)
ggtgtgatcatcttatggaattttgtgacgtctactgtcaaaaaagtgtaccgacctgaagattgcttcactgtaaaccctgacttgcatcccaagcactttaaaattaatgacatactg

SEQ ID NO: 490773 - DNA, 120 bp, Artificial Sequence
  ENSG00000162843_19 (sequence is synthesized)
ttcctctttcgtacccctgaatgtgcaaggagatcaagtcaggattccatatgttcttcatcccagtgtgaatccagcaaaggtccacagagcagtaagggaagcaagcaaagcatacat

SEQ ID NO: 490774 - DNA, 120 bp, Artificial Sequence
  ENSG00000162843_20 (sequence is synthesized)
gacagtgaggttaaaggtgaacaaacagatgtaatggtgggaaagcaacagccaatggacaaaaaacaccctggaattgccaatttaccagaagcccagccacctatccttgtcactgct

SEQ ID NO: 490775 - DNA, 120 bp, Artificial Sequence
  ENSG00000162843_21 (sequence is synthesized)
catgaggatggacacctccgcttgtggactctggagggaagactactgaaagatatgctacctttcacaaaacattctgccatttctctgacatcgctgtatactgattcatgtacgagg

SEQ ID NO: 490776 - DNA, 120 bp, Artificial Sequence
  ENSG00000162843_22 (sequence is synthesized)
atactactggctggaaatgtggaaggacatgttatcctttgcaatattagctctttcctggatccacctcatgatgaaaagaaattcaagcagctgctttcctggcgtgctcattctttg

SEQ ID NO: 490777 - DNA, 120 bp, Artificial Sequence
  ENSG00000162843_23 (sequence is synthesized)
gaaattattcaagtaatctatgtagaagaaaaacaagtggtacttactgcctccatcgatggctcagtaaggctctggcatgccctcaatggacattattgtggatattttggacagcga

SEQ ID NO: 490778 - DNA, 120 bp, Artificial Sequence
  ENSG00000162843_24 (sequence is synthesized)
aggctctttgaattatcacagacaagagatttcattttgccttgtgatgttactgaatatcccatagaaataaaagaagaaagcaagttcacagagaagcaaaaatatgaatatcctctg

SEQ ID NO: 490779 - DNA, 120 bp, Artificial Sequence
  ENSG00000162843_25 (sequence is synthesized)
atatttgaccgggaaaaatggagaaaaatgagctcagtgtctctacttttcaaacgcacacctcccaaggcctttgaagtggaacaggatttcaagtttttcaagtctctttcttctcct

SEQ ID NO: 490780 - DNA, 120 bp, Artificial Sequence
  ENSG00000162843_26 (sequence is synthesized)
aagattcgaagatatcccttggaaggtttcgtgactgaaaacagagaggcagggattgttttcggctctctgcctatatacagtatatcaagccccactagtctaagatttcttccactg

SEQ ID NO: 490781 - DNA, 120 bp, Artificial Sequence
  ENSG00000162843_27 (sequence is synthesized)
attggcgtagaagcccaaaaggactcttcagatggcattacaggaaagaagaagggaggtcatgttcaacgtgaaaaagcaccacgaagaagaagtttgaaaaaaaatttagtcccacaa

SEQ ID NO: 490782 - DNA, 120 bp, Artificial Sequence
  ENSG00000162843_28 (sequence is synthesized)
ataaatctggcttcttccttcttcccagctatacccaagtaaggagaaaaaatcagaaatggctgctgcacataaaatggcaacgtttggatgatacctgctctttatttcaggatgaga

SEQ ID NO: 490783 - DNA, 120 bp, Artificial Sequence
  ENSG00000162843_29 (sequence is synthesized)
gggagaaaccaccagacactatcagtcatctctggtgtcaggccatcctattgatgggaaagattgcttagggagttctggtgaccttaactctgaataccaagcaagcagcaagcagcc

SEQ ID NO: 490784 - DNA, 120 bp, Artificial Sequence
  ENSG00000162843_30 (sequence is synthesized)
agaagtttaggcggtgtttcttatttactgtcagcaaactgacacataagaaaacaaatgaaatcaacagcattagtaggtctaaaataatatggttatcaatgtttagctttccacttc

SEQ ID NO: 490785 - DNA, 120 bp, Artificial Sequence
  ENSG00000162843_31 (sequence is synthesized)
ctcccattggtcaccttactccacagcaagaatgactgtcagaacatgtgcagtaaaaggcactttcaagtcatgctatgtgttgtacaaaaagaattattaaaaagaaaaatgtaccag

SEQ ID NO: 490786 - DNA, 120 bp, Artificial Sequence
  ENSG00000162843_32 (sequence is synthesized)
tcagatctctagatgtttgtcttcttcatttagagaaatattatctggaagaaaatgtcctaagtttctcaaagtcagaaattatttctatgtagtccagacctgactccagataaatat

SEQ ID NO: 490787 - DNA, 120 bp, Artificial Sequence
  ENSG00000162843_33 (sequence is synthesized)
aaaagacggcaaagaaaggaagaaaaatgggtcatagaaatagaaaaagcatagtaacatggtagatttaaccttaaatatatcaataattatgaaacctttaataggttaaagtatgca

SEQ ID NO: 490788 - DNA, 120 bp, Artificial Sequence
  ENSG00000162843_34 (sequence is synthesized)
agtttaaaaggttgtcagaatggattaaaaaaacaaaatccaactatatgttgtttacaagaaacacatctaacatacaaggacaccaaactcttaaagataaaagaatgaaaaaagatg

SEQ ID NO: 490789 - DNA, 120 bp, Artificial Sequence
  ENSG00000162843_35 (sequence is synthesized)
accaaactcttaaagataaaagaatgaaaaaagatgtatgatgcaaaaactaacctaaagaaaatcaatatagccatattaatattaaaatacactttaagaaaataaacaagaatcttt

SEQ ID NO: 490790 - DNA, 120 bp, Artificial Sequence
  ENSG00000162843_36 (sequence is synthesized)
aacatttattacacagaatataaggcatgatttgtttcctgagtggctcagtatccacagatgatgaaagaagcaatcagctgaaattaaagcagagaagcacaccctttgagtatggta

SEQ ID NO: 490791 - DNA, 120 bp, Artificial Sequence
  ENSG00000162843_37 (sequence is synthesized)
cctggaggtggtgcagtgagggatgcagagtgtgggcgtggagtctgggctccagcctcgcactaacacttacagctgtgcgtgttatttaatatctgcatgccctggttcctcatcccg

SEQ ID NO: 490792 - DNA, 120 bp, Artificial Sequence
  ENSG00000162843_38 (sequence is synthesized)
aatcatagaccttctttcttgctgtttaagtgagttaatactcatgaagtgcttagcatcattagagttcctcagcaaatattggccattgctataataaacaaataatgtgaaaacaaa

SEQ ID NO: 490793 - DNA, 120 bp, Artificial Sequence
  ENSG00000162849_0 (sequence is synthesized)
agttaccaagctcggtgaaggagacaagttcccacagctgactcggctcggctctcccaccttcccggcagcggccgcgagccctgattgtatccctcgctttcctcgtgggggagcacg

SEQ ID NO: 490794 - DNA, 120 bp, Artificial Sequence
  ENSG00000162849_1 (sequence is synthesized)
gactgacttggctgaagaaaatgccagttctgtggatgtggccgtgacaagaggacgtgcggctggaagaggcagaaggggacgaggaaaagcatgctttgaagagaagaataaaccagc

SEQ ID NO: 490795 - DNA, 120 bp, Artificial Sequence
  ENSG00000162849_2 (sequence is synthesized)
gaccccaaccctttctgcaaattggtgctattacttgtgggatccatttgctttcattccctcccaccccaccgctgaagaaaccttgccctgagggctgagagccagccccctgcagcc

SEQ ID NO: 490796 - DNA, 120 bp, Artificial Sequence
  ENSG00000162849_3 (sequence is synthesized)
gggggacgcttctgggttggaggaccttctggatgtagcgtcggtggaacctttagatactctcctctggaaaagccaccatgaattcggtagctgggaataaagagaggcttgcggtct

SEQ ID NO: 490797 - DNA, 120 bp, Artificial Sequence
  ENSG00000162849_4 (sequence is synthesized)
ccaccaggggcaagaaatacggggtgaatgaagtctgctcgcccaccaagcccgcagcgcccttctccccggaaagctggtaccggaaagcatacgaggagtcgcgcgccggcagccggc

SEQ ID NO: 490798 - DNA, 120 bp, Artificial Sequence
  ENSG00000162849_5 (sequence is synthesized)
ccactcctgagggcgcgggctcagcgctcggctcctcggggaccccgtctcccggctcgggcacctcgtccccgagctcgttcaccggctccccgggacccgcctcccccggcatcggca

SEQ ID NO: 490799 - DNA, 120 bp, Artificial Sequence
  ENSG00000162849_6 (sequence is synthesized)
ctagttcgccgggctccttgggcggctctccgggcttcggcacaggctccccgggctccggcagcggcggcggctcctcccccggctcggaccgcggcgtctggtgcgagaactgcaacg

SEQ ID NO: 490800 - DNA, 120 bp, Artificial Sequence
  ENSG00000162849_7 (sequence is synthesized)
cccgcctggtggagctcaagaggcaggccctgaggttgctcctcccggggcccttcccgggcaaggaccctgctttctcggctgtgattcacgacaaactccaggtccccaacaccatcc

SEQ ID NO: 490801 - DNA, 120 bp, Artificial Sequence
  ENSG00000162849_8 (sequence is synthesized)
ggaaggcatggaacgaccgggacaaccgctgtgacatttgcgccactcacctgaaccagttgaagcaggaggccatccagatggtgctgacgttggagcaggcagccggcagtgagcact

SEQ ID NO: 490802 - DNA, 120 bp, Artificial Sequence
  ENSG00000162849_9 (sequence is synthesized)
acgacgcctcgccctgctccccgccaccgctctccaacatccccaccctggtggggtcccggcacgtgggtgggctccagcagcccagagactgggcctttgtgcccgccccctgtgcca

SEQ ID NO: 490803 - DNA, 120 bp, Artificial Sequence
  ENSG00000162849_10 (sequence is synthesized)
cctccaactacacaggcttcgccaacaagcacggcagcaaacccagcagccttggggtcagcaatggggcggaaaagaagagcgggtccccaacccaccaggccaaggtcagcctccaga

SEQ ID NO: 490804 - DNA, 120 bp, Artificial Sequence
  ENSG00000162849_11 (sequence is synthesized)
tggccaccagtccaagcaatgggaacatcctcaattcggtggccatccaggctcaccagtacctggatggcacctggtccctgtcgagaaccaacggggtcaccctgtacccataccaga

SEQ ID NO: 490805 - DNA, 120 bp, Artificial Sequence
  ENSG00000162849_12 (sequence is synthesized)
tctcccagctgatgacagagagtagccgggagggactaacagaagcagtgctgaaccgctacaatgcagacaagccttccgcctgcagtgtcccagcctcgcagggctcctgcgtggcca

SEQ ID NO: 490806 - DNA, 120 bp, Artificial Sequence
  ENSG00000162849_13 (sequence is synthesized)
gcgagacttccacaggcacatcggtggccgcctccttctttgcacgagctgcccagaagttaaatctgtcttctaaaaagaagaaacatcggccttccacttcttccgctgccgaaccac

SEQ ID NO: 490807 - DNA, 120 bp, Artificial Sequence
  ENSG00000162849_14 (sequence is synthesized)
cgctctttgcaaccagcttcagtgggattctgcagacctcccctcccccagccccaccctgcctgctgagggctgtcaacaaggtgaaggacaccccggggctgggcaaggtgaaagtca

SEQ ID NO: 490808 - DNA, 120 bp, Artificial Sequence
  ENSG00000162849_15 (sequence is synthesized)
tgcttcgcatctgttccaccttggctcgagatacttcagaatccagctctttcttaaaggtggacccacggaagaagcagatcaccttgtacgatcccctgacttgtggaggtcaaaatg

SEQ ID NO: 490809 - DNA, 120 bp, Artificial Sequence
  ENSG00000162849_16 (sequence is synthesized)
ccttccaaaagagaggcaaccaggttcctccaaagatgtttgccttcgatgcagtttttccacaagacgcttctcaggctgaagtgtgtgcaggcaccgtggcagaggtgatccagtctg

SEQ ID NO: 490810 - DNA, 120 bp, Artificial Sequence
  ENSG00000162849_17 (sequence is synthesized)
tggtcaacggggcagatggctgcgtgttctgtttcggccacgccaaactgggaaaatcctacaccatgatcggaaaggatgattccatgcagaacctgggcatcattccctgtgccatct

SEQ ID NO: 490811 - DNA, 120 bp, Artificial Sequence
  ENSG00000162849_18 (sequence is synthesized)
cttggctcttcaagctcataaacgaacgcaaggaaaagaccggcgcccgtttctcagtccgggtttccgccgtggaagtgtgggggaaggaggagaacctgcgggacctgctgtcggagg

SEQ ID NO: 490812 - DNA, 120 bp, Artificial Sequence
  ENSG00000162849_19 (sequence is synthesized)
tggccacgggcagcctgcaggacggccagtccccgggcgtgtacctctgtgaggaccccatctgcggcacgcagctgcagaaccagagcgagctgcgggcccccaccgcagagaaggctg

SEQ ID NO: 490813 - DNA, 120 bp, Artificial Sequence
  ENSG00000162849_20 (sequence is synthesized)
cctttttcctggatgccgccattgcctcccgcaggagccaccaacaggactgtgatgaggacgaccaccgcaactcacacgtgttcttcacactgcacatctaccagtaccggatggaga

SEQ ID NO: 490814 - DNA, 120 bp, Artificial Sequence
  ENSG00000162849_21 (sequence is synthesized)
agagcgggaaagggggaatgtctggaggtcgcagccgcctgcatctcattgatctcggcagctgtgtgaaagctcttagcaaaaatcgagaaggaggctcagggctgtgtctctcgctgt

SEQ ID NO: 490815 - DNA, 120 bp, Artificial Sequence
  ENSG00000162849_22 (sequence is synthesized)
ctgctctgggcaatgtcatcctggctctcgtcaatggcagcaaacacattccatacaaagagagcaagctcgccatgttgctgcgggagtctctggggaacatgaactgccgtaccacca

SEQ ID NO: 490816 - DNA, 120 bp, Artificial Sequence
  ENSG00000162849_23 (sequence is synthesized)
tgatcgcgcacatctcggccgcggtcgggagctacgcggagaccctgtccaccatccagattgcatcgagagtcttgaggatgaagaaaaagaagacgaagtacacatccagctcgtccg

SEQ ID NO: 490817 - DNA, 120 bp, Artificial Sequence
  ENSG00000162849_24 (sequence is synthesized)
gcggggagagctcctgcgaagaaggccgcatgcgcaggcccacccagctgagacccttccacaccagggccacggtggaccctgacttccccatcgctcacctgtccagcgaccccgact

SEQ ID NO: 490818 - DNA, 120 bp, Artificial Sequence
  ENSG00000162849_25 (sequence is synthesized)
actcctccagcagcgagcagtcctgcgacaccgtcatctacatcgggcccaacggcacggccctctctgacaaggagctcaccgacaacgagggccccccagactttgtccctatcgtgc

SEQ ID NO: 490819 - DNA, 120 bp, Artificial Sequence
  ENSG00000162849_26 (sequence is synthesized)
cagccctgcagaagacccggggcgacagccggcccgcagaggcaggagaggctgcagccggcaagtcagaaagggactgcctgaagtgcaacacgtttgccgagctgcaggagaggctgg

SEQ ID NO: 490820 - DNA, 120 bp, Artificial Sequence
  ENSG00000162849_27 (sequence is synthesized)
actgcatcgacggcagcgaggagcccagcagctttcctttcgaagaactgcctgctcagtttgggccagagcaggcaagcagaggcccccggttaagccaagcagcgggggcaagcccac

SEQ ID NO: 490821 - DNA, 120 bp, Artificial Sequence
  ENSG00000162849_28 (sequence is synthesized)
tctctgagtctgataaggaagataatgggtccgaaggtcagctgaccaacagagaaggccctgaactcccagcctccaagatgcagaggagtcactcacctgtgcccgccgcggcacccg

SEQ ID NO: 490822 - DNA, 120 bp, Artificial Sequence
  ENSG00000162849_29 (sequence is synthesized)
cccacagccccagcccggcctcacccaggagcgtcccgggcagcagtagccagcacagcgcctccccactcgtgcagagccccagcctccagagcagccgggagagcctcaactcctgcg

SEQ ID NO: 490823 - DNA, 120 bp, Artificial Sequence
  ENSG00000162849_30 (sequence is synthesized)
gcttcgtggaaggcaagcccaggcccatgggctccccccggctgggcatcgccagcctgtccaagacctcggagtacaagccacccagctctccttcccagagatgcaaagtctacaccc

SEQ ID NO: 490824 - DNA, 120 bp, Artificial Sequence
  ENSG00000162849_31 (sequence is synthesized)
agaagggggtcctgccgtctcccgccccactgcctccctcgagcaaggattccggcgtggcgtctagggagtccttgctgcagcccgaggtgcgtacgcccccggttggaatgagccccc

SEQ ID NO: 490825 - DNA, 120 bp, Artificial Sequence
  ENSG00000162849_32 (sequence is synthesized)
aggttttgaaaaaatccatgtctgctgggagcgaagggttcccggaaactcctgtcgatgatgagcagcaggcagctactccttcagagtccaagaaggagatcctgagcaccacgatgg

SEQ ID NO: 490826 - DNA, 120 bp, Artificial Sequence
  ENSG00000162849_33 (sequence is synthesized)
tgacggtgcagcagccactggagctgaacggtgaggacgagctggtgttcacgctggtggaggagctgaccatcagcggggtcctggacagcggccgccccaccagcatcatcagcttca

SEQ ID NO: 490827 - DNA, 120 bp, Artificial Sequence
  ENSG00000162849_34 (sequence is synthesized)
acagcgactgctctgcacgggccctggcctcgggctcgcggcccgtcagcatcatcagcagcatcagcgaggacctggagtgctactccagcacggcccccgtctccgaggtcagcatca

SEQ ID NO: 490828 - DNA, 120 bp, Artificial Sequence
  ENSG00000162849_35 (sequence is synthesized)
cacagttcttgcccctcccgaagatgagcctggatgagaaggcccaggacgcagggagcagacgctcttccatcagctcctggctgagcgagatgagcgcgggcagtgagggtgagcagt

SEQ ID NO: 490829 - DNA, 120 bp, Artificial Sequence
  ENSG00000162849_36 (sequence is synthesized)
cgtgccacagtttcatagcccagacgtgttttgggcacggggaggcaatggcagaacctgtggcctcggagtttgtcagcagcctccagaacaccgctgtggtgtgcagagagaagccca

SEQ ID NO: 490830 - DNA, 120 bp, Artificial Sequence
  ENSG00000162849_37 (sequence is synthesized)
aggccagccccgacaacttgctcatcctgtctgagatgggagatgactctttcaacaaagcagcccccatcaaaggctgcaaaatatccacagtgagcaaggccatggtcaccatctcca

SEQ ID NO: 490831 - DNA, 120 bp, Artificial Sequence
  ENSG00000162849_38 (sequence is synthesized)
acacggccaatctgagcagctgcgaggggtacatccccatgaagaccaatatcacagtttacccctgcattgccatgagcccccggaacatccaagagccggaggcccccaccgccaccc

SEQ ID NO: 490832 - DNA, 120 bp, Artificial Sequence
  ENSG00000162849_39 (sequence is synthesized)
ccaaagcaggccccacattagcccagtcccgggagagtaaggaaaacagtgcaaagaaagagatgaaatttgaggacccgtggctgaaacgagaagaggaagtgaaaaaagagacggctc

SEQ ID NO: 490833 - DNA, 120 bp, Artificial Sequence
  ENSG00000162849_40 (sequence is synthesized)
atcccaatgaagaagggatgatgaggtgtgagactgccacgggcccctcgaatgctgagaccagagcagagcaggagcaggacggaaagcccagtccgggagacaggctcagcagcagca

SEQ ID NO: 490834 - DNA, 120 bp, Artificial Sequence
  ENSG00000162849_41 (sequence is synthesized)
gcggagaggtgtcggcctccccggtcactgacaacttcaggagggtcgtggatgggtgtgagatggccctgcccggtttggccacccagagccccgtgcatcccaacaaaagcgtcaagt

SEQ ID NO: 490835 - DNA, 120 bp, Artificial Sequence
  ENSG00000162849_42 (sequence is synthesized)
ccagcagccttcccagggcctttcagaaggccagccggcaggaggagccggacagcctctcctattactgcgctgctgagaccaacggggtgggtgcagcctcgggcaccccgccctcca

SEQ ID NO: 490836 - DNA, 120 bp, Artificial Sequence
  ENSG00000162849_43 (sequence is synthesized)
aggctaccctggaggggaaggtggcttcccccaagcactgtgttctggctcggcccaaagggactccccctctgccccctgtccgaaagtccagcctggaccagaagaaccgggccagcc

SEQ ID NO: 490837 - DNA, 120 bp, Artificial Sequence
  ENSG00000162849_44 (sequence is synthesized)
ctcagcacagtgccagcggcagcggcaccagcagccccctgaaccaaccagccgccttcccggcgggcctcccagacgagcctagcggcaagacgaaggacgccagcagcagcagcaagc

SEQ ID NO: 490838 - DNA, 120 bp, Artificial Sequence
  ENSG00000162849_45 (sequence is synthesized)
tcttcagtgccaagctggagcagctggccagcagaagcaactcgctgggcagggcgacagtcagccactacgaatgcctctccctggagcgggccgagagcctgtcctccgtgagctccc

SEQ ID NO: 490839 - DNA, 120 bp, Artificial Sequence
  ENSG00000162849_46 (sequence is synthesized)
gcaaggacggcaccatgccccgcgcggggaggagcctgggccgcagcgccgggacctcgccccccagctccggggcctcgcccaaggccggccagtccaagatctccgccgtgagcagac

SEQ ID NO: 490840 - DNA, 120 bp, Artificial Sequence
  ENSG00000162849_47 (sequence is synthesized)
ccgtgagcagactcctcctggccagccccagagcgcgcggcccgtccgcctccaccaccaaaaccctcagcttctccaccaagtccctgccgcaggcggtgggccagggctccagctcgc

SEQ ID NO: 490841 - DNA, 120 bp, Artificial Sequence
  ENSG00000162849_48 (sequence is synthesized)
cccccggtgggaagcacacgccctggtccacgcagtccctcagcaggaacaggagctcgggcctggcctccaagcttcccctgcgggccgtcagcgggcgcatctcggagctgctgcagg

SEQ ID NO: 490842 - DNA, 80 bp, Artificial Sequence
  ENSG00000162849_49 (sequence is synthesized)
cgaggcggaggcgcgcgggggggccctggccgaggacgagcccgcggccgcgcacctgctcccgtcgccctacagcaaga

SEQ ID NO: 490843 - DNA, 120 bp, Artificial Sequence
  ENSG00000162849_50 (sequence is synthesized)
tcacgcccccgcggaggccccaccgctgcagcagcggccacggcagcgacaacagcagcgtgctgagcggggagctcccgccggccatggggaagacggccctgttctaccacagcggcg

SEQ ID NO: 490844 - DNA, 120 bp, Artificial Sequence
  ENSG00000162849_51 (sequence is synthesized)
gcagcagcggctacgagagcgtgatgcgggacagcgaggccaccggcagcgcgtcctcggcgcaggactccacgagcgagaacagcagctccgtgggcggcaggtgccggagcctcaaga

SEQ ID NO: 490845 - DNA, 120 bp, Artificial Sequence
  ENSG00000162849_52 (sequence is synthesized)
ccccgaagaaacgctccaatccaggttctcagagacggaggcttatcccagcactatccctggacacctcttcccctgtgagaaaaccccccaacagcacaggcgtccgctgggtggatg

SEQ ID NO: 490846 - DNA, 120 bp, Artificial Sequence
  ENSG00000162849_53 (sequence is synthesized)
gccccttgcggagcagcccgaggggccttggggaaccctttgagattaaagtctatgaaatcgatgacgtggagcgcctgcagcggcgacgagggggtgccagcaaggaggccatgtgct

SEQ ID NO: 490847 - DNA, 120 bp, Artificial Sequence
  ENSG00000162849_54 (sequence is synthesized)
tcaatgcaaagctgaagattctggaacaccgccagcagaggatcgccgaggtccgcgcgaagtacgagtggctgatgaaggagctggaggcgaccaaacagtatctgatgctggatccca

SEQ ID NO: 490848 - DNA, 120 bp, Artificial Sequence
  ENSG00000162849_55 (sequence is synthesized)
acaagtggctcagtgaatttgacttggagcaggtttgggagctggattccctggagtacctggaggcactggagtgtgtgacggagcgcctggagagccgtgtcaacttctgcaaggccc

SEQ ID NO: 490849 - DNA, 120 bp, Artificial Sequence
  ENSG00000162849_56 (sequence is synthesized)
ccaggcgccggtagatgagccagacccttgtcctagtggtcccccgctccccaggacttcagagatgttgcacgcccctaggccctctgtgctggggcatcaaagacaatgaatgaggat

SEQ ID NO: 490850 - DNA, 120 bp, Artificial Sequence
  ENSG00000162849_57 (sequence is synthesized)
gaaggttggtggcaagtctggagcgggcgttgagcggaaggcgagttttcttttgttttctgtaggaaaggtgcaaacgtcaaacaccgtggaaggagaaaaggatgggaagcccgaggg

SEQ ID NO: 490851 - DNA, 120 bp, Artificial Sequence
  ENSG00000162849_58 (sequence is synthesized)
gtgtccaagccctgtgagactgaaaaagcactttgaggaaccttaaagaccttgtttgtacataagaactgctagcaaaagagacctcactcttctcttgctttcgtgagaaaggagggg

SEQ ID NO: 490852 - DNA, 120 bp, Artificial Sequence
  ENSG00000162849_59 (sequence is synthesized)
cgtggatgtaggattgctgtggaaagcgaacacaaaacaacccagaatgactgattaagtgccttgcaaatctttattattatccaaacatttatgttcatactttcttgtgtacagatg

SEQ ID NO: 490853 - DNA, 120 bp, Artificial Sequence
  ENSG00000162849_60 (sequence is synthesized)
gtgctagtcaagatgaaaacaacaaaacaaacaagaaaaacattttggaaatgtattcacagctctttttctcttggtgttttatcctatttctgacttgctgtttctaagtaagttgtg

SEQ ID NO: 490854 - DNA, 120 bp, Artificial Sequence
  ENSG00000162849_61 (sequence is synthesized)
tttgtagagctatttcttaatcagtattgcttatgaataaatattacctgtcttttatggttattctggtgaggccactcaaacagagagacttccctcggcacgagccagtgtgtgtgt

SEQ ID NO: 490855 - DNA, 120 bp, Artificial Sequence
  ENSG00000162849_62 (sequence is synthesized)
ttccaaagtaggtttggagcagcaggtgacctcgatgccacatcccaacaagcagcgtggtcaggtagacccagaaggttgattgtggggcaggtgctttagagaacaggtgaggagacg

SEQ ID NO: 490856 - DNA, 120 bp, Artificial Sequence
  ENSG00000162849_63 (sequence is synthesized)
gcacctgcagcacaggggaggaggagtcctttgcgacctgggccctccctgctcctgggaggtgggccgtatgttctgtagaccgtttgcccccctcaagtcctccacacatgtggttcc

SEQ ID NO: 490857 - DNA, 120 bp, Artificial Sequence
  ENSG00000162849_64 (sequence is synthesized)
ttgacccacaaatccacagtttgcgtggccctcaaaattcatattcatttttattccaaaaagtcttgaacgaaagctggaaccaattcaccagagccatatttctttctttagtatttt

SEQ ID NO: 490858 - DNA, 120 bp, Artificial Sequence
  ENSG00000162849_65 (sequence is synthesized)
ctagtgttgtgttgtagattgattaaagtgggtttttccccagctgagagaccttctcaggcttgttcagagacttcaactgtattggattagaagaaggattcttgagactgtacatct

SEQ ID NO: 490859 - DNA, 120 bp, Artificial Sequence
  ENSG00000162849_66 (sequence is synthesized)
tgtctgttgtccagagtacaaggatttcagctctcctgtgtcccaaagcctctatgccaagaagggacaggcttgtcctctcagtctttgctcctgcccaaaggcagagagagcttcccc

SEQ ID NO: 490860 - DNA, 120 bp, Artificial Sequence
  ENSG00000162849_67 (sequence is synthesized)
tccataactcacacgaccctggataggcagaacatagctgaagactatggatgtccaggtcttggctcccaacaactcaggacctcaaattcagatgttcctccctataacaattccctt

SEQ ID NO: 490861 - DNA, 120 bp, Artificial Sequence
  ENSG00000162849_68 (sequence is synthesized)
aggaattatgatacccattttagtgattgatagaaacctggggtacagagtggtcaagggatttccctgataaaagctgtggtgctgatgatagtgcagcccagaatctaagagtccctg

SEQ ID NO: 490862 - DNA, 120 bp, Artificial Sequence
  ENSG00000162849_69 (sequence is synthesized)
cagccttcgcatcgaggatggtacttaggcgtgtgcagagcacgcttcccttttgccctcaaatgcagcatatcttcatgagcctatttatttccaagctaggctgtctttattaaccaa

SEQ ID NO: 490863 - DNA, 120 bp, Artificial Sequence
  ENSG00000162849_70 (sequence is synthesized)
caactcagccccagccactccccaagcggggaaaaaaacactacgtttcttggtcagtgtacctctggacactgcagcccacacagctggctgaactcggtaaatgggaaccgaagtctt

SEQ ID NO: 490864 - DNA, 120 bp, Artificial Sequence
  ENSG00000162849_71 (sequence is synthesized)
gtgagcttcacatgacctgatcctttgttatcagaacagggttcaggtggccctgttggctcatgtgctttggaagccagctccctgggtcacgagtctggctttgcactttccataaga

SEQ ID NO: 490865 - DNA, 120 bp, Artificial Sequence
  ENSG00000162849_72 (sequence is synthesized)
gtctgcttctatgcaaaggtgcaaacaggagacatgcccaaatctgctggctgaacaggctaaactacagtgagaggctgctctggcatggctcgttcttccttctgtgtatctcccaag

SEQ ID NO: 490866 - DNA, 120 bp, Artificial Sequence
  ENSG00000162849_73 (sequence is synthesized)
tctgacaagtgtgttgccctgggaagcaggacctccctgagctccttaaccttgaccccattctgcaggacagtcgcatgctctgggctcgcctctggcctcaaagcacttgtgtaagtg

SEQ ID NO: 490867 - DNA, 120 bp, Artificial Sequence
  ENSG00000162849_74 (sequence is synthesized)
ggcttgcttaacagtaatatccttggaggcttctggacccaaagggaagccaatccttcgagtttgccattgggctgctggttgctggtttcaaacatatagttcatgaaaagtctttaa

SEQ ID NO: 490868 - DNA, 120 bp, Artificial Sequence
  ENSG00000162849_75 (sequence is synthesized)
ttggagattttcaaaggtgaatattctgtttttgttggaaagaaactcatctgatgagtcatcgatgagtttggctttcgcccctgccacatcctcccctgaggttccttccatgctgca

SEQ ID NO: 490869 - DNA, 120 bp, Artificial Sequence
  ENSG00000162849_76 (sequence is synthesized)
ctgccttcctttagccagtgacagagcctggtgcccttcctggactgaaaccgatggaatccttccgaggggagtggcattcggcttgcctcctgcctaaatctgcttttatccatttgt

SEQ ID NO: 490870 - DNA, 120 bp, Artificial Sequence
  ENSG00000162849_77 (sequence is synthesized)
agcaactttatgctgtaacaaaaggcggaaggaaaccaagagttctcttagcaagtcagactccttcccaagatggcaatcacagaacacctcgcaggatctcgcaggccacggtgaagg

SEQ ID NO: 490871 - DNA, 120 bp, Artificial Sequence
  ENSG00000162849_78 (sequence is synthesized)
agaatgctttatgttgatgttgtccattctctctctcttctctttgcttttttttgacctaaataagctgcaaacatgttaatttaccaatattgataaaccacatgaagaaatcaggca

SEQ ID NO: 490872 - DNA, 120 bp, Artificial Sequence
  ENSG00000162849_79 (sequence is synthesized)
ttttacgttatgatgtgcttgttcctgtctctgcctataaattgactgtattgatgatgaaggaaggagttccggctgaccattctgaagcagtcccagtcacgggaggatgccttaccc

SEQ ID NO: 490873 - DNA, 120 bp, Artificial Sequence
  ENSG00000162849_80 (sequence is synthesized)
agtggccagacatgatagttccaggtctccccttggttttggtgatagagaacccaaggaggcaagggggaatatcaacgaacccatttctatttcattacccacaagcgaaaggactag

SEQ ID NO: 490874 - DNA, 120 bp, Artificial Sequence
  ENSG00000162849_81 (sequence is synthesized)
aaaaaaatatttgaaattaacatttagatgcataggtctaactccttgtgtgaacctgtcctcctcaccccctgctccaaatatgtgaggtggaagcattagcagcggagcaaaactaag

SEQ ID NO: 490875 - DNA, 120 bp, Artificial Sequence
  ENSG00000162849_82 (sequence is synthesized)
atctaagaacgggcggtggtgctattgtgtccctgggagtcactccacgtcgcattgcacggtggtgctgaggagcgagagtttgctttatcatgggctttcagttcccacctgcgagct

SEQ ID NO: 490876 - DNA, 120 bp, Artificial Sequence
  ENSG00000162849_83 (sequence is synthesized)
gcaaactttgatcttgttgtccttgaattcccctctacatcacgaggaagctgtctctttcatctcttccggatttggaatcagaacactctgcccgttgtttattcgccagttgccatt

SEQ ID NO: 490877 - DNA, 120 bp, Artificial Sequence
  ENSG00000162849_84 (sequence is synthesized)
cttaacatgggggagcattaagatgcaaatgcagagatgtgtcctgtcttgacaaaggtgggaacccctgagctggagaaggggctcctctcatgagaagctggggtaaacagccaggca

SEQ ID NO: 490878 - DNA, 120 bp, Artificial Sequence
  ENSG00000162849_85 (sequence is synthesized)
tcgcagcgtggggaattagacaggcaggaatctggcctggtttgtcataaattagccttcaacttgaagtctattatgttcttataaggcggtagtgacttcagtccagccgcatctacc

SEQ ID NO: 490879 - DNA, 120 bp, Artificial Sequence
  ENSG00000162849_86 (sequence is synthesized)
atccagggtggaggttcaaaaagtcttatacgcacctacaagtctcacgcttgctgctcagactttctgataaaatctcagagttctgtttgtattgaccaaaaatgcagttgtgcccac

SEQ ID NO: 490880 - DNA, 120 bp, Artificial Sequence
  ENSG00000162849_87 (sequence is synthesized)
ttgggtgtgtatctcatgtccttgtaaaccagccaccttctttggatagaaggcaaggctgacaaatctgcagatttgttcaatgcaaacacagccgtctatatcattggccactgctga

SEQ ID NO: 490881 - DNA, 120 bp, Artificial Sequence
  ENSG00000162849_88 (sequence is synthesized)
ttatattgagtgtttttaggttttttaggtttcttattccaaaaaggattttagactgtaaaatgactaaagatgagttaatttccaaactaaaaaaggaaggagtcctgcctgtactca

SEQ ID NO: 490882 - DNA, 120 bp, Artificial Sequence
  ENSG00000162849_89 (sequence is synthesized)
ttgttctttcctgctggactagtaacccattcttggagcacacacagagtccctcgcttctaaagacaatacgtcttaaaccctgaaaacttgccagtgagaaagaggttgaaagtcctg

SEQ ID NO: 490883 - DNA, 120 bp, Artificial Sequence
  ENSG00000162849_90 (sequence is synthesized)
tttgctattagttgaggctaagccgtctgctgccactgtccctggggcctccatgctgccgccggggtatgtggcccagctgtccccccatgaaggacactcttcaatgccaccacacgg

SEQ ID NO: 490884 - DNA, 120 bp, Artificial Sequence
  ENSG00000162849_91 (sequence is synthesized)
gagtctgggcagggaggaaaggcacacagcccacttttctctgcaccaaatgaaacaaagctgggtgttcagtgtcactgatgcaagtaaatgggtctcaaattttggtgggggcagtgt

SEQ ID NO: 490885 - DNA, 120 bp, Artificial Sequence
  ENSG00000162849_92 (sequence is synthesized)
ttctttggattctgatacctctttttccacctccagaaagtatctgtcaacattggtgggtaacagcttataaagtgcatcacttagtaatcttcctgacaaaatgacacattttaaaat

SEQ ID NO: 490886 - DNA, 120 bp, Artificial Sequence
  ENSG00000162849_93 (sequence is synthesized)
tacaacctgttcattatttccatcataatgcaagcgtaattctaatccgggagaagatactgtcatttaagctcatcttctcaaaaaaattttttctgaaaattcctggaaactaattta

SEQ ID NO: 490887 - DNA, 120 bp, Artificial Sequence
  ENSG00000162849_94 (sequence is synthesized)
tccctccctaaacaaacacattctgcttttgggtggccctacccagaacctgcagcaatgtcataacactggacacagtgcggcttggggcagtatcaagccttcattgcatacaaacct

SEQ ID NO: 490888 - DNA, 120 bp, Artificial Sequence
  ENSG00000162849_95 (sequence is synthesized)
taatctctaagcatagttgttcccaaggtccacacgtgtggaggcgagtactgaaataccacactcacacatctattccatgcgtacctagaaattaccttcaacactaaaaaaggttcc

SEQ ID NO: 490889 - DNA, 120 bp, Artificial Sequence
  ENSG00000162849_96 (sequence is synthesized)
ttctttcattccctatcctgctaacagcccacattgtaatatttgatttatgaagaagttctaatttatttgtgaactcaggatgttgctttacagcattgctcgtgttctctcatttac

SEQ ID NO: 490890 - DNA, 120 bp, Artificial Sequence
  ENSG00000162849_97 (sequence is synthesized)
ttattatgcatcacggttggaaatgctatccacgtgccgtgcatcgaggtggagatttgctggatctgtctgtggctatttttttccatgtttttctcactcaagcaaagtctgttagtg

SEQ ID NO: 490891 - DNA, 120 bp, Artificial Sequence
  ENSG00000162849_98 (sequence is synthesized)
gaaacatgggctgggggatggggagaggacagataaagcaagagaatagggattagggtccaatcctcaatgcacagggcttagttcaaaatctaagctgtttctgtagtaagcagccaa

SEQ ID NO: 490892 - DNA, 120 bp, Artificial Sequence
  ENSG00000162849_99 (sequence is synthesized)
atgggaaagatcccttcgttttgaatttgatgagaatgggcttggaaatccacgcccaccggcttgcacggaagaggactcagcctcttcctaatggttcaacattcaattcctgaggaa

SEQ ID NO: 490893 - DNA, 120 bp, Artificial Sequence
  ENSG00000162849_100 (sequence is synthesized)
agtgctgatagtattagttccctacatttccctaagactcccatccaacccctagtgctactgaagagggtttgggaaagcaattggagttccttagcttggatatatatagtacctgtt

SEQ ID NO: 490894 - DNA, 120 bp, Artificial Sequence
  ENSG00000162849_101 (sequence is synthesized)
tttttcctctggaaaaaccaaagtactttagtgagtcttacaatcttaaggcattttgtcccctcactgggtcccgagaggcagggaggggctaggccttgagctaggagcaaggacatg

SEQ ID NO: 490895 - DNA, 120 bp, Artificial Sequence
  ENSG00000162849_102 (sequence is synthesized)
ggccgccaggcctggttgttactagctgtgcaaccttgggcgagcctcttcgctttgctgggcctcaggttcccgagtggaagactgggggtcagaacagctgcccttctgggagagcat

SEQ ID NO: 490896 - DNA, 120 bp, Artificial Sequence
  ENSG00000162849_103 (sequence is synthesized)
caagagaaagtggtataagtgatgggaagtgctttgaagaaattaaaggtctgtctaggagctgggggtaatcatttacagatgaagaaactgaagtctagtcattgactggcccgagtt

SEQ ID NO: 490897 - DNA, 120 bp, Artificial Sequence
  ENSG00000162849_104 (sequence is synthesized)
cacagagtggttttatagcaaaacagggacttgagtccagcttattggattcttcccatcagatcatattgcaccaggtatgtgtagacatgaacacataccattcctctaaggtgtgtg

SEQ ID NO: 490898 - DNA, 120 bp, Artificial Sequence
  ENSG00000162849_105 (sequence is synthesized)
tacatacacggatgtgtgtgtacaggaggtacctgacatggtgaaaggccataggacagaaaacctgagttctaattccagctttgccagtcgtcccgtccgtgatatattccataggac

SEQ ID NO: 490899 - DNA, 120 bp, Artificial Sequence
  ENSG00000162849_106 (sequence is synthesized)
agaaaacctgagttctaattccagctttgccagtcatcctgtccgtgatatattccataggacagaaaacctgagttctaattccagctttgccagtcgtcccgtccgtgatatattacc

SEQ ID NO: 490900 - DNA, 120 bp, Artificial Sequence
  ENSG00000162849_107 (sequence is synthesized)
taactcctccagaactcagttttctaacctataaaatgaagacattgtgctagatgatctttgtggttccttcaagctctggatctctaattccatgattagtaatgtatgtatgtgtat

SEQ ID NO: 490901 - DNA, 120 bp, Artificial Sequence
  ENSG00000162849_108 (sequence is synthesized)
ataaatatgcttatctgtagaaatgggcccatttgaaaagtggagacaaggtctgcccaggtgcatttattgtgccagaaacagtgaattcctaaataagttcataaaatcttgttttac

SEQ ID NO: 490902 - DNA, 120 bp, Artificial Sequence
  ENSG00000162849_109 (sequence is synthesized)
aattcaatggtagtgcttaatgttactgtctgaaatccactgtttaaccagatggaagactggggccattcaaaacattattagttcacaagtgtttgctgttaaaatgcttcaataaaa

SEQ ID NO: 490903 - DNA, 120 bp, Artificial Sequence
  ENSG00000162849_110 (sequence is synthesized)
ctcatttgttaaagtcagaaattcaactcttctgtacttgggcaggtcccagcagccccttggcaggctagttttgtgcatgggcctttgcaagctatataaacgttaggtgttggcttg

SEQ ID NO: 490904 - DNA, 120 bp, Artificial Sequence
  ENSG00000162849_111 (sequence is synthesized)
attatgataaatatgagcaggctccctggagaacagtccagaaaaaaagagttatagttctcacaaactggtgacatgaatccattaagctgtgtggcattttccagtgtaaagacattg

SEQ ID NO: 490905 - DNA, 120 bp, Artificial Sequence
  ENSG00000162849_112 (sequence is synthesized)
tttgctggctacgatctctgactttttgtggcatatgaggtgtaaaatgttgtcaaaaaagaatctggtgtttaaaaaaaaatcaaactatggtggcattaaatgttcacttttattcta

SEQ ID NO: 490906 - DNA, 120 bp, Artificial Sequence
  ENSG00000162849_113 (sequence is synthesized)
tcctgagatggccccagatctgcaagagacatttgagagaagctatttattagcagacgtgaagaaatggattctgcacttgattatttagccatgacttatcaatgatgatggattgga

SEQ ID NO: 490907 - DNA, 120 bp, Artificial Sequence
  ENSG00000162849_114 (sequence is synthesized)
cctggagaaatgcttcctgctcctcccgccctccccaccaccatcctgctgtatttaaagctgctttggtgatgctttgctcatctcagtgaattttcagttcagaccttttcactaagg

SEQ ID NO: 490908 - DNA, 120 bp, Artificial Sequence
  ENSG00000162849_115 (sequence is synthesized)
atcattatggaagaaagaggggtaagaagtgtggctgagtagcctaggattaattcatcagtccccaaataagcaaacacgatgtctcaggatggacggtgaaattctggacctcacagg

SEQ ID NO: 490909 - DNA, 120 bp, Artificial Sequence
  ENSG00000162849_116 (sequence is synthesized)
gccagcgctgatgagcgaggacagaggagcatgaaactggtgctttcctgtaaaatattcaaaagcagatggcctctggatcagtgccagagccattccccgggcagagaagcatctaga

SEQ ID NO: 490910 - DNA, 120 bp, Artificial Sequence
  ENSG00000162849_117 (sequence is synthesized)
ccttgtcactaccaagggtgcggctccacacccgcgggacccgagcctctagaaatgagggagaagacgactctgcctttctgcaatttagacgtcgcaaggatgaaaacgatgcggaca

SEQ ID NO: 490911 - DNA, 120 bp, Artificial Sequence
  ENSG00000162849_118 (sequence is synthesized)
ggctttccagcagtgagcctggggaaatctgcgtcacatgggcgacagaaggtccctcgaatccctcaatccccgtggcccgcaccactgtgtaataatctccaaaggttgcagtaggaa

SEQ ID NO: 490912 - DNA, 120 bp, Artificial Sequence
  ENSG00000162851_0 (sequence is synthesized)
agtgtttacttccgcttgacctggcccggacgccagaaaatgttccacgtgggataccctgcgtggggttcactgtagtagctgcactaggtgattcttggagcgggcctgagagacaag

SEQ ID NO: 490913 - DNA, 120 bp, Artificial Sequence
  ENSG00000162851_1 (sequence is synthesized)
gacatgtggatcccagtggtcgggcttcctcggcggctgaggctctccgccttggcgggcgctggtcgcttttgcattttagggtctgaagcggcgacgcgaaagcatttgccggcgagg

SEQ ID NO: 490914 - DNA, 120 bp, Artificial Sequence
  ENSG00000162851_2 (sequence is synthesized)
aaccactgtgggctctctgactcctctccgcagctgtggcccgaaccggatttcaggaatccgccaaggaaggcgtctaaggccagcttagactttaagcgttacgtaaccgatcggaga

SEQ ID NO: 490915 - DNA, 120 bp, Artificial Sequence
  ENSG00000162851_3 (sequence is synthesized)
ttggctgagaccctggcgcaaatctatttgggaaaaccaagtagacctccacacctactgctggagtgcaatccaggtcctggaatcctgactcaggcattacttgaagctggtgccaaa

SEQ ID NO: 490916 - DNA, 120 bp, Artificial Sequence
  ENSG00000162851_4 (sequence is synthesized)
gtggttgcgctcgaaagtgacaaaacttttattccacatttggagtccttaggaaaaaatctggatggaaaactacgagtgattcactgtgacttctttaaactagatcctagaagtggt

SEQ ID NO: 490917 - DNA, 120 bp, Artificial Sequence
  ENSG00000162851_5 (sequence is synthesized)
ggagtaataaaaccacctgctatgtcttctcgagggctctttaagaatttgggaatagaagcagttccttggacagcagacatccctttaaaagtagttggaatgttcccaagtagaggt

SEQ ID NO: 490918 - DNA, 120 bp, Artificial Sequence
  ENSG00000162851_6 (sequence is synthesized)
gagaaaagggcactttggaaactcgcatatgacttgtattcctgtacttctatatataaatttggacgaatagaagtaaatatgtttattggtgaaaaagaattccagaaactaatggca

SEQ ID NO: 490919 - DNA, 120 bp, Artificial Sequence
  ENSG00000162851_7 (sequence is synthesized)
cacccggaaagggccgctggaaaacccaaagcgtagggaattattagaccaattacaacaaaagctgtatcttattcaaatgattcctcgtcaaaatttatttaccaagaacttaacacc

SEQ ID NO: 490920 - DNA, 120 bp, Artificial Sequence
  ENSG00000162851_8 (sequence is synthesized)
tatgaactataatatattttttcacttgttaaagcactgttttgggaggcgcagcgccactgtaatagaccacttacgttcattgactccacttgatgcgagagatatattgatgcaaat

SEQ ID NO: 490921 - DNA, 120 bp, Artificial Sequence
  ENSG00000162851_9 (sequence is synthesized)
aggaaaacaggaggatgagaaagtagttaacatgcaccctcaagacttcaaaacactttttgaaactatagagcgttccaaagattgtgcttataaatggctgtatgatgaaaccctgga

SEQ ID NO: 490922 - DNA, 120 bp, Artificial Sequence
  ENSG00000162851_10 (sequence is synthesized)
agataggtagcaactagactgtcgtttttggtggagcggttcatttatttggaaactatgacatgaaaaccaaatttgaaaactcacatcctttcagcagaaggtaactgttcttgtctt

SEQ ID NO: 490923 - DNA, 120 bp, Artificial Sequence
  ENSG00000162851_11 (sequence is synthesized)
gcacaagccaggcagatcatttctcctaagctgatatcattggcttattggatgaaacagtgtctgctattttattcacaattgaataaaatgaaaacttcaattaattgtggatttgat

SEQ ID NO: 490924 - DNA, 120 bp, Artificial Sequence
  ENSG00000162851_12 (sequence is synthesized)
cagattgaattcgttttgtttcagattcctatttaaatatttcacttgtactgttgctgatttttgcatcttcttgaagagcaagagtctgtacattattaagcttagaaagtaagcaaa

SEQ ID NO: 490925 - DNA, 120 bp, Artificial Sequence
  ENSG00000162851_13 (sequence is synthesized)
actgatttactggtttgcctttcagtttgttgaaatgtattgtcaagtactgtacaatgaaattgtttaaattttaatatgatttaagctttttagaaattaaaatattttaaataagaa

SEQ ID NO: 490926 - DNA, 120 bp, Artificial Sequence
  ENSG00000162852_0 (sequence is synthesized)
gcggtcgcgggccgccagcctccagccggccagccgcgaggggtgcgcagagggaggcggggcggaaaggcgagaggtgtctcctccaccggagccaggggagacccgagcaagctccgt

SEQ ID NO: 490927 - DNA, 120 bp, Artificial Sequence
  ENSG00000162852_1 (sequence is synthesized)
gacagcacgtcggccgccatgtcgccgagtggggctggaaacagacccggcgcccagcggtagccctccttgcgcctccgattcccagacatggaaggtctttaatgtaactttaaatgg

SEQ ID NO: 490928 - DNA, 120 bp, Artificial Sequence
  ENSG00000162852_2 (sequence is synthesized)
ttcaccaaaggatgctctaatggatgacagcgatactcctacatattatctgcaaatagaaccacaagatggatgtcatcctggtgacagcgtggaaaggagtgtgacctgtctgccttc

SEQ ID NO: 490929 - DNA, 120 bp, Artificial Sequence
  ENSG00000162852_3 (sequence is synthesized)
tgcatcagatgaaaatgaaaatcagcttgacggggacgggcatgagcatctgaccagcagtgacagtgcgatgggaaagccccaagtgtctgagcaggacagtctcaataataatgaaag

SEQ ID NO: 490930 - DNA, 120 bp, Artificial Sequence
  ENSG00000162852_4 (sequence is synthesized)
ctgcacattgagctgcgaggtggctgcaggtgagaacttgcaaaacaccctttgtgaagcctccagagatgaacaggccttcttgggaaaggacaaaaaaattcctggaaaaagaagtcc

SEQ ID NO: 490931 - DNA, 120 bp, Artificial Sequence
  ENSG00000162852_5 (sequence is synthesized)
aagaagcaaaaaagggactgctaagaagataccaccaggacttttttcaggagatattgcacctttaatgcaagaaaaagtactaagcgcagtcacatatgctgttgatgatgaagaagc

SEQ ID NO: 490932 - DNA, 120 bp, Artificial Sequence
  ENSG00000162852_6 (sequence is synthesized)
tgctgaagtaaatgctaatgagcagccagaggcgccaaagcttgttctgcagtctctgttttcacttatacgaggtgaagttgagcagttggattcaagagcacttcccctttgccttca

SEQ ID NO: 490933 - DNA, 120 bp, Artificial Sequence
  ENSG00000162852_7 (sequence is synthesized)
tcagatagcagaatcctatttccaggaggaggactatgagaaagcaatgaaattcattcagctagaacgattgtatcatgagcaattgctcgcaaatctttctgccattcaagaacagtg

SEQ ID NO: 490934 - DNA, 120 bp, Artificial Sequence
  ENSG00000162852_8 (sequence is synthesized)
ggaaacaaaatggaaaactgtgcaaccacatacagttacggctctaaggaattcagaaaagggatttaatggtgaagattttgaacggcttacgaaaatttgtgcaacacatcaagatcc

SEQ ID NO: 490935 - DNA, 120 bp, Artificial Sequence
  ENSG00000162852_9 (sequence is synthesized)
tcttttatccaaacataagatagcagctgtggagaagtcccaggaaaggaaatgctccacgcagttactagtgtctgaagatccaaaggaaggaggagctaccaccaaagagtcagagag

SEQ ID NO: 490936 - DNA, 120 bp, Artificial Sequence
  ENSG00000162852_10 (sequence is synthesized)
taaaacttgtctcggcacagagtcaagtaaagaaagccaacatacagtggagcccctggggagcagtccctgctgtcatcagatggacgtgcaaacagattccccaagcctttcggtaac

SEQ ID NO: 490937 - DNA, 120 bp, Artificial Sequence
  ENSG00000162852_11 (sequence is synthesized)
tgcaggaaaggaccacatggaggagctgctctgcagcgctgaagccacgttagcgctccacacccagtcctccgagacagcagggagcccgtctgggccagactcttctgaggatgcttg

SEQ ID NO: 490938 - DNA, 120 bp, Artificial Sequence
  ENSG00000162852_12 (sequence is synthesized)
tgaggatgacagtcgcttgcagctggctcaaacagaggcctgccaggatgtggccagaatagagggcattgctgaagaccctaaggtgtttctttccagcaagtcaaagacagagccgtt

SEQ ID NO: 490939 - DNA, 120 bp, Artificial Sequence
  ENSG00000162852_13 (sequence is synthesized)
gatttcaccaggctgtgaccgtatacctcctgcattgatttctgagggtaaatattcacaggctcagaggaaagaactccgtttgccacttcgggatgcttctgaggcgttgcccacaga

SEQ ID NO: 490940 - DNA, 120 bp, Artificial Sequence
  ENSG00000162852_14 (sequence is synthesized)
ccaacttgagaacaatgaattaaatgagctgcagcagcctgatcttacagacagtgatggaaaatcaccacaggcgcaggctgactcagacggttctgagaatgtgctctgtggaaataa

SEQ ID NO: 490941 - DNA, 120 bp, Artificial Sequence
  ENSG00000162852_15 (sequence is synthesized)
tcaaatatctgacttaggcatactgcttccagaggtgtgtatggccccagaggaaaagggagataaagacgaccaactcaacaaagaaacagaagactatttgaacagccttttagaagg

SEQ ID NO: 490942 - DNA, 120 bp, Artificial Sequence
  ENSG00000162852_16 (sequence is synthesized)
atgtttaaaagatactgaagattccctttcctatgaagataaccaagacgacgactccgatctccttcaagatctctctcctgaagaagcatcctatagtctccaggagaatctgccttc

SEQ ID NO: 490943 - DNA, 120 bp, Artificial Sequence
  ENSG00000162852_17 (sequence is synthesized)
tgatgagagctgtctttctcttgatgatcttgccaaaaggatagagattgcagaggttgttcctactgaaggattggtctccatattaaagaagaggaatgatactgtaggagatcatcc

SEQ ID NO: 490944 - DNA, 120 bp, Artificial Sequence
  ENSG00000162852_18 (sequence is synthesized)
tgcccaaatgcaacacaaaccatctaagcgaagagtgagattccaagaaatagacgatagcttggatcaagatgaagttggaggtggctcctgtattttgctggtcttgctgtgcatagc

SEQ ID NO: 490945 - DNA, 120 bp, Artificial Sequence
  ENSG00000162852_19 (sequence is synthesized)
aacggttttcctcagtgttggaggaactgcattatactgcactttcggtgacatggagtcacctgtttgtactgactttgcagacaacatggacttctattacactaagttacttcaggg

SEQ ID NO: 490946 - DNA, 120 bp, Artificial Sequence
  ENSG00000162852_20 (sequence is synthesized)
agtggcagaactgaagcactggatctacctctcctagcagcattccagacacagacatgctggcagtgagagtgaaaggcgggagactttctaaacagtttttctttcaggaattctgta

SEQ ID NO: 490947 - DNA, 120 bp, Artificial Sequence
  ENSG00000162852_21 (sequence is synthesized)
cacacagtgaggcaaatatcaatctaagcattgtggatggaaggaatggtctttggagagagcatatccatctcctcctcactgcctcctaatgtcatgaggtacactgagcagaattaa

SEQ ID NO: 490948 - DNA, 120 bp, Artificial Sequence
  ENSG00000162852_22 (sequence is synthesized)
acagggtagtcttaaccacactatttttagctaccttgtcaagctaatggttaaagaacacttttggtttacacttgttgggtcatagaagttgctttccgccatcacgcaataagtttg

SEQ ID NO: 490949 - DNA, 120 bp, Artificial Sequence
  ENSG00000162852_23 (sequence is synthesized)
tgtgtaatcagaaggagttaccttatggtttcagtgtcattctttagttaacttgggagctgtgtaatttaggctttgcgtattatttcacttctgttctccacttatgaagtgattgtg

SEQ ID NO: 490950 - DNA, 120 bp, Artificial Sequence
  ENSG00000162852_24 (sequence is synthesized)
tgtttgcgtgtgtgtgcgtgcgcatgtgcttccggcagttaacataagcaaatacccaacatcacaaagatgatctttcttcttttaacttgatgatgatgtgcaggcacaaatctttgg

SEQ ID NO: 490951 - DNA, 120 bp, Artificial Sequence
  ENSG00000162852_25 (sequence is synthesized)
agaaggcttaactgtggaatagatgaattctagaactcttgaccctgcaatgagaaactgtgacagatctgtgtcaattaacttgattagccagaaattaatcacaggcctagagaccaa

SEQ ID NO: 490952 - DNA, 120 bp, Artificial Sequence
  ENSG00000162852_26 (sequence is synthesized)
agaaaaagctcccctgagtctcaggcaacagttttgtcacggatgcaaagcttcctgaaatcatgaatgctggactcagtttggcaaacgcttacacctattatgttctgagattctgag

SEQ ID NO: 490953 - DNA, 120 bp, Artificial Sequence
  ENSG00000162852_27 (sequence is synthesized)
aaccagaatgcaaacttaagtaagatacagttcccactgtaggtgttttaatcctggtcttatatagaataaaccagtactttgctgagtgaaatcaccatatagaattcagtattaaca

SEQ ID NO: 490954 - DNA, 120 bp, Artificial Sequence
  ENSG00000162852_28 (sequence is synthesized)
gatcatgcattcagatgcttgaatgtgcattcttgttgtgggcttgatttagatcctattgcggggtcattacgcaaaaattcaatcataccttccatagacaaatgtctgatttttgtt

SEQ ID NO: 490955 - DNA, 120 bp, Artificial Sequence
  ENSG00000162852_29 (sequence is synthesized)
taaatctgtccgttaggtggcctttccttatctgaggtgtagtggtctaacatttaggaagccttgctttgactttatcgggcagcattaaaaaaaaaacaacaaagaaaaaccaaacat

SEQ ID NO: 490956 - DNA, 120 bp, Artificial Sequence
  ENSG00000162852_30 (sequence is synthesized)
gaattatagtttttaacaagtgatctttatttcctgtcttctgttaggatcatttgaaagaaaaagggagaacttactttctagttgttactggctggcacagtacctccctttgtgttt

SEQ ID NO: 490957 - DNA, 120 bp, Artificial Sequence
  ENSG00000162852_31 (sequence is synthesized)
ctgcttatttatttagattatgtgaatcttaaagggctttttatatcagttgaaagtgtgttactgcgcatgcatttggtgattccagtgctagatatttaattactgtgtatttagtgt

SEQ ID NO: 490958 - DNA, 120 bp, Artificial Sequence
  ENSG00000162852_32 (sequence is synthesized)
tttgattttctataatttcagttccgcgtgtttttacacttgttcattttaaattgatgtttcattttcacttataatactgtttgacttgtctctatcatgtcaccataaactgtaata

SEQ ID NO: 490959 - DNA, 120 bp, Artificial Sequence
  ENSG00000162852_33 (sequence is synthesized)
tgtcaccataaactgtaatattttcaagggttatagatcaaagatatttatttagaaatgtacaagataatgaaatttagattccttatacttaaggctgattttattagaagattattt

SEQ ID NO: 490960 - DNA, 120 bp, Artificial Sequence
  ENSG00000162852_34 (sequence is synthesized)
taagaatttgtattcaaattgtatgtaaaatatgtaaaatgttgacggtactatattaagtggttctataaaagctattcacaagttctactgtgatggacatcctcatcatagacaaac

SEQ ID NO: 490961 - DNA, 120 bp, Artificial Sequence
  ENSG00000162852_35 (sequence is synthesized)
ctcctctgttttatcctcaatttctagttacagaaatttggtgatgcttatttttgccaattttatgtcaaaataagttaaaacttccctcctgttcacctcttgggtctctatcctgtg

SEQ ID NO: 490962 - DNA, 120 bp, Artificial Sequence
  ENSG00000162852_36 (sequence is synthesized)
taacctctggtgtagtatttgcccataggcaaccagagccacttcctctgaacccaacatctcctggggaccttcgcagcaagaggaaagcactgagacaatagcttgctaagcaggggc

SEQ ID NO: 490963 - DNA, 120 bp, Artificial Sequence
  ENSG00000162852_37 (sequence is synthesized)
ccagtggtgtctcagagaaaccatgggtgtcctcgccacttcccagggagggtgaggtgagctcgggaacataacgatgttttgacttacaataggcatgaaatcgcaactagaaaaatt

SEQ ID NO: 490964 - DNA, 120 bp, Artificial Sequence
  ENSG00000162852_38 (sequence is synthesized)
agggcagtttttaaaaatgtcatagttatctattgcatgaactggagtaattccacctggtggtgaaaggattgttatttcacacatgaaaaattcatccagttttactaaaatgtaatt

SEQ ID NO: 490965 - DNA, 120 bp, Artificial Sequence
  ENSG00000162852_39 (sequence is synthesized)
ttttctgtcatttgaaagtactgacaactatttgtaactaatcttccttaagaactgtatttgagggtatcaaatcaagcttgtaatttaaaatctgtaccaacaaagtgtctcagagag

SEQ ID NO: 490966 - DNA, 120 bp, Artificial Sequence
  ENSG00000162852_40 (sequence is synthesized)
tttatttgaaccattgggtgctgagaaaaaactgctttaaagtgaaactttgatttcagaagttgatctggccctacaagtagacagtcatctactttgggaagactaataggtccttag

SEQ ID NO: 490967 - DNA, 120 bp, Artificial Sequence
  ENSG00000162852_41 (sequence is synthesized)
gtaacggctcttctgctttaaaatacctcccccatctgctgacagtagctgaagattattctaaacattcattcttttagatttaaaaataaaaatcttctggaggatttaagatttgaa

SEQ ID NO: 490968 - DNA, 120 bp, Artificial Sequence
  ENSG00000162852_42 (sequence is synthesized)
tccataaacaagttaatgttgcaaagaaagtagcatttttaccacaagtctattatattgtgagaagacttttttctttgtattttgctcttcatatcaatgccaagaaaagaatacttg

SEQ ID NO: 490969 - DNA, 120 bp, Artificial Sequence
  ENSG00000162852_43 (sequence is synthesized)
caactatttgcatttttcctaatcacatttcatgccctactggctaatttagtctctaggatgatatttacttatattgaaaagtaataagttagttatttctaactgttgggttgtttg

SEQ ID NO: 490970 - DNA, 120 bp, Artificial Sequence
  ENSG00000162852_44 (sequence is synthesized)
ctttctcttgatgatcttgccaaaaggatagagattgcagaggtaaatcagagatgaagtacaattaaaagtaaaatggcatttaaaaaacatatatatgtattaaatattgccttgttt

SEQ ID NO: 490971 - DNA, 120 bp, Artificial Sequence
  ENSG00000162852_45 (sequence is synthesized)
ttgtaagttttcccttgtctcaaacatgagggaaaattctagttaacgtaagcttttaattattagtagtttttacatttgtatgtattgaataaaatgacttttaatcattgcaatgtt

SEQ ID NO: 490972 - DNA, 120 bp, Artificial Sequence
  ENSG00000162852_46 (sequence is synthesized)
gctcgcggccgggatggaaagcctttcggaagcctctcgctcctccccctgcgctgtcctcctccagccgcgcagcctctgccctccggacatggaaggtctttaatgtaactttaaatg

SEQ ID NO: 490973 - DNA, 120 bp, Artificial Sequence
  ENSG00000162869_0 (sequence is synthesized)
actccaccttcctcccaccccgggaacccggaagtggaggaggaggcgcggcggcggcggcggcggcggctgcggtggccaagcaggcagatactgcctgacccgttcccgggagcgtgt

SEQ ID NO: 490974 - DNA, 120 bp, Artificial Sequence
  ENSG00000162869_1 (sequence is synthesized)
ctgggtttgggggcgggagacaggctgagccgcctgggcggcctggcctgtacggggcgggggaggccatggcctcggctgagttgcaggggaagtaccagaagctggctcaggagtact

SEQ ID NO: 490975 - DNA, 120 bp, Artificial Sequence
  ENSG00000162869_2 (sequence is synthesized)
cgaagcttcgggctcagaatcaggttctgaaaaaaggtgttgtggatgaacaagcaaattctgcagctttaaaggagcaactgaaaatgaaggatcagtcattgagaaaactacaacagg

SEQ ID NO: 490976 - DNA, 120 bp, Artificial Sequence
  ENSG00000162869_3 (sequence is synthesized)
aaatggacagtttgacatttcgaaatctgcagcttgccaagagggtagaactacttcaagatgaactagctctaagtgaaccacgaggcaagaaaaacaagaaaagtggagaatcttctt

SEQ ID NO: 490977 - DNA, 120 bp, Artificial Sequence
  ENSG00000162869_4 (sequence is synthesized)
ctcagttgagtcaagagcagaagagtgtctttgatgaagatctgcaaaagaagatagaagagaatgaacggttgcatatacaattttttgaagctgatgagcagcacaagcatgtggaag

SEQ ID NO: 490978 - DNA, 120 bp, Artificial Sequence
  ENSG00000162869_5 (sequence is synthesized)
cagagctgaggagtcgactggccactctggagacagaagcagcccagcaccaagctgtggttgacggtctcacccggaagtacatggaaaccattgagaagctgcagaacgacaaggcta

SEQ ID NO: 490979 - DNA, 120 bp, Artificial Sequence
  ENSG00000162869_6 (sequence is synthesized)
aactagaagtgaaatctcagactctagaaaaggaagccaaggaatgtcgacttcgaacggaagaatgtcaattacagttaaagactcttcatgaagatttgtcaggtagattagaggaat

SEQ ID NO: 490980 - DNA, 120 bp, Artificial Sequence
  ENSG00000162869_7 (sequence is synthesized)
ccttatcaatcatcaatgaaaaagtaccttttaatgatacaaaatatagtcagtacaacgctctgaacgttccactccacaataggagacaccagctgaagatgcgagatattgctgggc

SEQ ID NO: 490981 - DNA, 120 bp, Artificial Sequence
  ENSG00000162869_8 (sequence is synthesized)
aggccctggcttttgttcaggatcttgtgacggctcttctaaactttcatacctacacagaacagaggattcaaatttttcctgttgattctgccattgacactatatctccattgaatc

SEQ ID NO: 490982 - DNA, 120 bp, Artificial Sequence
  ENSG00000162869_9 (sequence is synthesized)
agaagttctcacaataccttcatgaaaatgcgtcctatgtccgccctcttgaggaaggaatgcttcatttatttgaaagtatcactgaggatactgtgactgtcttggagacaactgtga

SEQ ID NO: 490983 - DNA, 120 bp, Artificial Sequence
  ENSG00000162869_10 (sequence is synthesized)
aattgaaaactttttcagaacacttaacctcctacatatgttttcttaggaagattcttccctatcagttaaaaagtttagaagaagaatgtgaatcctctctttgcacatctgcgttaa

SEQ ID NO: 490984 - DNA, 120 bp, Artificial Sequence
  ENSG00000162869_11 (sequence is synthesized)
gagccaggaatctagagctgtcccaggacatgaaaaaaatgacagctgtgtttgagaagctgcagacttacatagctcttcttgccttgccaagtacagagccagatggactccttcgga

SEQ ID NO: 490985 - DNA, 120 bp, Artificial Sequence
  ENSG00000162869_12 (sequence is synthesized)
caaactacagttctgtgttaacaaatgttggtgctgctctgcatggatttcatgacgttatgaaagatatttccaaacattatagtcaaaaagctgcaatagagcatgaacttccaacag

SEQ ID NO: 490986 - DNA, 120 bp, Artificial Sequence
  ENSG00000162869_13 (sequence is synthesized)
ttaacaaatggagcaggaaagattgcatccttcttcagcaacaatttggactacttcattgcttcactgagctatggacctaaggcagcgagtggattcattagtcctctttcagctgaa

SEQ ID NO: 490987 - DNA, 120 bp, Artificial Sequence
  ENSG00000162869_14 (sequence is synthesized)
tgcatgctacagtataagaaaaaagctgctgcctatatgaagtctttgagaaagcccctcttggagtctgtgccttatgaagaagcactggcaaaccgccgcatccttctcagctctact

SEQ ID NO: 490988 - DNA, 120 bp, Artificial Sequence
  ENSG00000162869_15 (sequence is synthesized)
gaaagtcgagaaggccttgcacagcaagttcaacagagtttggaaaagatttctaaactggagcaggaaaaagaacattggatgttggaagcacaattagccaaaatcaagctagagaaa

SEQ ID NO: 490989 - DNA, 120 bp, Artificial Sequence
  ENSG00000162869_16 (sequence is synthesized)
gaaaaccagcgaattgcagataagctgaagaatacaggtagtgcccagctggttgggctggcccaggaaaatgctgctgtgtcaaatactgctggccaggatgaagccacagctaaggct

SEQ ID NO: 490990 - DNA, 120 bp, Artificial Sequence
  ENSG00000162869_17 (sequence is synthesized)
gtgttggagcccattcagagcaccagtctaattgggactttaaccaggacatctgacagtgaggttccagatgtggaatctcgtgaagacttaattaaaaatcactacatggcaaggata

SEQ ID NO: 490991 - DNA, 120 bp, Artificial Sequence
  ENSG00000162869_18 (sequence is synthesized)
gtggaacttacgtctcagttgcagctggctgacagtaagtcagtgcatttttatgccgagtgccgagcactgtctaaaagactggccttggctgaaaagtctaaggaagcattgacagaa

SEQ ID NO: 490992 - DNA, 120 bp, Artificial Sequence
  ENSG00000162869_19 (sequence is synthesized)
gaaatgaaacttgccagtcagaacatcagcagacttcaggatgagctgacaactaccaagaggagttacgaggatcagttaagtatgatgagtgaccacctgtgcagcatgaatgagaca

SEQ ID NO: 490993 - DNA, 120 bp, Artificial Sequence
  ENSG00000162869_20 (sequence is synthesized)
ttatctaaacagagagaagagattgacacactaaagatgtccagtaaggggaattctaaaaagaacaagagtcgatagttttgaaatagctggttggcgactgttctttccagacctgct

SEQ ID NO: 490994 - DNA, 120 bp, Artificial Sequence
  ENSG00000162869_21 (sequence is synthesized)
cctgctgcacagagccgcagggctgagaccacgtccatgctggctgccttcaggaagctaaagtattgttggacctagtaaactagtcagtgttggaaacggccttgaaatatttaaaac

SEQ ID NO: 490995 - DNA, 120 bp, Artificial Sequence
  ENSG00000162869_22 (sequence is synthesized)
atatttgtaaccagtgaggcaaatacagaagttgatgtcggcagtaaatggaaaacaatacgtatgtcatggatattgtaggtttccttatgctgtttttactgtgcactttttaaaatt

SEQ ID NO: 490996 - DNA, 120 bp, Artificial Sequence
  ENSG00000162869_23 (sequence is synthesized)
aggttttaatttcagtatgtaagaacaaatattttgtatactttcaaactcaattatatggtaatcgatttggtatctatggaatagatatatgtttctggaaaaaaatgcttaaattgt

SEQ ID NO: 490997 - DNA, 120 bp, Artificial Sequence
  ENSG00000162869_24 (sequence is synthesized)
tctggaaaaaaatgcttaaattgtcaaactgtcattacttcttattatagttgaaggcattctccagattctttttaaaagatttgttcatatttctctctctctctctctctctctctc

SEQ ID NO: 490998 - DNA, 120 bp, Artificial Sequence
  ENSG00000162869_25 (sequence is synthesized)
gggagccctccaaacttcagatcctgtgggtttagtatcattatcttcagctctttgataccctgtgttagagtaatagctaaaggaagttcatgtcaataaattcatacttatatcaca

SEQ ID NO: 490999 - DNA, 120 bp, Artificial Sequence
  ENSG00000162869_26 (sequence is synthesized)
tcccctcagccgtctccgtccaccattacggtgcctccacctgcagctcccaggagatggggccgggcggtgtctgcgtccgtgagcgtttttgcagggagaagctggagtttgattctt

SEQ ID NO: 491000 - DNA, 120 bp, Artificial Sequence
  ENSG00000162869_27 (sequence is synthesized)
ccttttcactgaagtagcgggcttgggactgggatgtcagaaattctggcttcttgcctctaatgctggctgagaagggaagggaaaggtgtggaccactcctcacctcgctgcttcctc

SEQ ID NO: 491001 - DNA, 120 bp, Artificial Sequence
  ENSG00000162869_28 (sequence is synthesized)
gttttcttaggaagattcttccctatcagttaaaaaggtagttacccccggaggccagggaacttggggaattgtgggtgtaacctgatctggctggcgttaataaaatattaacatgtg

SEQ ID NO: 491002 - DNA, 120 bp, Artificial Sequence
  ENSG00000162873_0 (sequence is synthesized)
ctttgcagctgagactgggtggagggagaggcgcggagacactggggctctgacgagctggctgaggccctctcagtaggggggtcacgcctcctggaactcagggaccccaagtttctg

SEQ ID NO: 491003 - DNA, 120 bp, Artificial Sequence
  ENSG00000162873_1 (sequence is synthesized)
tgcattcagggcggggctggccccatgccctgtgcataggggcctggctgcatcccagtcgatcagccagaggcagcagcagtggactcatcaattgtggaggaagccctggggaccctg

SEQ ID NO: 491004 - DNA, 120 bp, Artificial Sequence
  ENSG00000162873_2 (sequence is synthesized)
gggaccttgccgactctattcccagccagctcctaggacaagcctcagagccaacacccgctcgaccctctcccggcccctccccttctttgtcttttgcagatgatcgccgggtgtcga

SEQ ID NO: 491005 - DNA, 120 bp, Artificial Sequence
  ENSG00000162873_3 (sequence is synthesized)
tccttttccctccagtcagggccaggcgtggacgccgccggaccgctgagactcggggcacggtgaagcactggccggggtctggctgggtccggcgctcgggagccagatggaggtggc

SEQ ID NO: 491006 - DNA, 120 bp, Artificial Sequence
  ENSG00000162873_4 (sequence is synthesized)
gataggggccgtgggagccggcgccaagtagccggtggacccccgcgctcgcacctctcccggcgcccgggcgctccccaaggctgccatggaggtgcctaacgtcaaggacttccagtg

SEQ ID NO: 491007 - DNA, 120 bp, Artificial Sequence
  ENSG00000162873_5 (sequence is synthesized)
gaagcgcctggcgccactgcccagccgccgggtctactgctccctgctggagaccgggggccaggtctatgccatcgggggatgtgacgacaacggcgtccccatggactgcttcgaggt

SEQ ID NO: 491008 - DNA, 120 bp, Artificial Sequence
  ENSG00000162873_6 (sequence is synthesized)
ctactccccggaggccgaccagtggaccgccttgccccggctgcccacagcccgggcgggggtggccgtcaccgccctggggaagcggatcatggtgattgggggcgtgggcaccaatca

SEQ ID NO: 491009 - DNA, 120 bp, Artificial Sequence
  ENSG00000162873_7 (sequence is synthesized)
gctgcccctgaaggtcgtggagatgtacaacatcgatgagggcaagtggaagaagaggagcatgctgcgtgaggccgccatgggcatttctgtcacggccaaagattaccgagtatatgc

SEQ ID NO: 491010 - DNA, 120 bp, Artificial Sequence
  ENSG00000162873_8 (sequence is synthesized)
ggcaggcgggatgggcctggacctacgtccacacaaccacctccaacactatgacatgctgaaggacatgtgggtgtccctagcacccatgcccaccccgagatatgctgccacctcctt

SEQ ID NO: 491011 - DNA, 120 bp, Artificial Sequence
  ENSG00000162873_9 (sequence is synthesized)
cctccgaggctccaagatctacgtgctggggggacgacagtccaagtacgcggtcaacgctttcgaggtctttgacatcgagactcgctcctggaccaagtttcccaacattccctataa

SEQ ID NO: 491012 - DNA, 120 bp, Artificial Sequence
  ENSG00000162873_10 (sequence is synthesized)
gcgggccttctccagctttgtgaccctggacaaccacttgtacagcctaggaggcctgcggcaaggtcgcctctaccggcagcccaagttcctgcggacgatggacgtgttcgacatgga

SEQ ID NO: 491013 - DNA, 120 bp, Artificial Sequence
  ENSG00000162873_11 (sequence is synthesized)
acaggggggatggctgaagatggaacgatcgttcttcctcaagaagcggcgggcagattttgtggctggctctctgagtggacgggtcatagtggctgggggacttgggaatcaacccac

SEQ ID NO: 491014 - DNA, 120 bp, Artificial Sequence
  ENSG00000162873_12 (sequence is synthesized)
gatcctccctgccatgcccacaccccgctgtgcctgctccagcatagtcgtcaagaactgcctcctcgccgtgggaggtgtcaaccagggtctgagtgacgcagtggaggccctgtgtgt

SEQ ID NO: 491015 - DNA, 120 bp, Artificial Sequence
  ENSG00000162873_13 (sequence is synthesized)
ctctgactcctagctgtctctgggctcagtacctttgccctggaccatatcacttcactcttaacatgaggaatgatcttgtccaagcagtcggggctacttccaagaatgtcagctcct

SEQ ID NO: 491016 - DNA, 120 bp, Artificial Sequence
  ENSG00000162873_14 (sequence is synthesized)
gttagcaaccagtggagtctggccttggggctctaagttgacctctctatagctccaaatcctaccaatctcagaaaactgtaagaggcacagatgactccaccagctgcagagctgact

SEQ ID NO: 491017 - DNA, 120 bp, Artificial Sequence
  ENSG00000162873_15 (sequence is synthesized)
ctgaagagagtcttcacttactgcacaggcaaagaaaggcacaggaatatttcctacctctccctcctgtgagtcccacctccccccacccccatctccaggaggcaggtagagcagttc

SEQ ID NO: 491018 - DNA, 120 bp, Artificial Sequence
  ENSG00000162873_16 (sequence is synthesized)
tgaccgagaggatagactgctgttgctgtctttccccagctctgaactagttttaaggtagcttaggatgaaaaatggagaatgattgggggttccaaaccactttcttctcccttggct

SEQ ID NO: 491019 - DNA, 120 bp, Artificial Sequence
  ENSG00000162873_17 (sequence is synthesized)
tatatctcttcaccatttggtggtcaactgtgggcctaccctggacctcatctactcagcgagaattggacatgaagctagaggcagctgccttggaagggaagtcaggctcacttggac

SEQ ID NO: 491020 - DNA, 120 bp, Artificial Sequence
  ENSG00000162873_18 (sequence is synthesized)
agcccaggccatggcaggaagaatcccttcctcttggggtccttgatgggcatgtgtgatggggaaggagcagtctcccagccctgggtctgctccccacatctctcctaattccacttc

SEQ ID NO: 491021 - DNA, 120 bp, Artificial Sequence
  ENSG00000162873_19 (sequence is synthesized)
accttttgccaccccctccccaccagaggcctagcccttttgtcaccgaaggcccccagagtgtttctgtgtgaaaccctctcatttacactgtggcatcaaaatccacaaaagatggat

SEQ ID NO: 491022 - DNA, 120 bp, Artificial Sequence
  ENSG00000162873_20 (sequence is synthesized)
taattgcactctggttaatagcagcagcacaatgattaaaatctatattcctatcttctctagcaccctggtgtggggatggggcggaagggtgtcttgaggggcagggaggaccccata

SEQ ID NO: 491023 - DNA, 120 bp, Artificial Sequence
  ENSG00000162873_21 (sequence is synthesized)
aaacaatccctcctgcattctcaggctaaatagggcccccagtgactacctgttcttggctgtcccctctgaagagctctgccttctcacagccaccaccagttgccccactcccaggaa

SEQ ID NO: 491024 - DNA, 120 bp, Artificial Sequence
  ENSG00000162873_22 (sequence is synthesized)
aacagcacatgttcttcttctcctgccttgagactgcgtgttagtcttccattcataactcatcagcagctcagtccttcttatgtctagtctcagttcattcagccaaagctcattttt

SEQ ID NO: 491025 - DNA, 120 bp, Artificial Sequence
  ENSG00000162873_23 (sequence is synthesized)
gtcctatccaaagtagaaagggttcttttagaaaacttgaagaatgtgcctcctcttagcatctgtttctgactcccagttatttttaaaataaatgatgaataaaatgcctgccctgaa

SEQ ID NO: 491026 - DNA, 120 bp, Artificial Sequence
  ENSG00000162873_24 (sequence is synthesized)
ttctctcccatctggcagaggagtccggctccctaaatcttctttttgttgatgatcgccgggtgtcgatccttttccctccagtcagatgaggacactcagattcaaggacataagtga

SEQ ID NO: 491027 - DNA, 120 bp, Artificial Sequence
  ENSG00000162873_25 (sequence is synthesized)
ctggtgcataatcacacagctaggaggtggctgcaccaggattcagatgcagcctgtctgatgctgaccacatggtctgtggggtgctgcagaaagaaaactgcataaagaaggtgatcc

SEQ ID NO: 491028 - DNA, 120 bp, Artificial Sequence
  ENSG00000162873_26 (sequence is synthesized)
tggcctcggggagttcctggtgtgtgcctccagccagcgtggtaccctgcagagggcactccgacaaggtgagcgcttccgcggcggggcttctgtacagaggtcacagcacgctgtgtc

SEQ ID NO: 491029 - DNA, 120 bp, Artificial Sequence
  ENSG00000162873_27 (sequence is synthesized)
ccgggacgcacgcggattcctgcacaggtgtggtggctgcggatggggacggagcggagcaggctcgccggcctcctccccggcggcggctccgcttctccttcctgctgttcacttcat

SEQ ID NO: 491030 - DNA, 120 bp, Artificial Sequence
  ENSG00000162873_28 (sequence is synthesized)
ctcctcatctgcatgtgtgacagcggcgcgcggactggggaaggacagagcgccctctccccggctcccgtgcagcggggcgggggctccgggctccccagtgatgcgtcgtctgcgcct

SEQ ID NO: 491031 - DNA, 120 bp, Artificial Sequence
  ENSG00000162873_29 (sequence is synthesized)
ttctctcccatctggcagaggagtccggctccctaaatcttctttttgttgatgatcgccgggtgtcgatccttttccctccagtcagacaaggtgagcgcttccgcggcggggcttctg

SEQ ID NO: 491032 - DNA, 120 bp, Artificial Sequence
  ENSG00000162877_0 (sequence is synthesized)
agtctgggcgtttaggtcagaactaccccggtagcctgacagcaggagctcgagagaagcatggctcagcggtgcgtttgcgtgctggccctggtggctatgctgctcctagttttccct

SEQ ID NO: 491033 - DNA, 120 bp, Artificial Sequence
  ENSG00000162877_1 (sequence is synthesized)
accgtctccagatcgatgggcccgaggagcggggagcatcaaagggcgtcgcgaatcccttctcagttcagcaaagaggaacgcgtcgcgatgaaagaggcgctgaaaggtgccatccag

SEQ ID NO: 491034 - DNA, 120 bp, Artificial Sequence
  ENSG00000162877_2 (sequence is synthesized)
attccaacagtgacttttagctctgagaagtccaatactacagccctggctgagttcggaaaatacattcataaagtctttcctacagtggtcagcaccagctttatccagcatgaagtc

SEQ ID NO: 491035 - DNA, 120 bp, Artificial Sequence
  ENSG00000162877_3 (sequence is synthesized)
gtggaagagtatagccacctgttcactatccaaggctcggaccccagcttgcagccctacctgctgatggctcactttgatgtggtgcctgcccctgaagaaggctgggaggtgccccca

SEQ ID NO: 491036 - DNA, 120 bp, Artificial Sequence
  ENSG00000162877_4 (sequence is synthesized)
ttctctgggttggagcgtgatggcatcatctatggtcggggcacactggacgacaagaactctgtgatggcattactgcaggccttggagctcctgctgatcaggaagtacatcccccga

SEQ ID NO: 491037 - DNA, 120 bp, Artificial Sequence
  ENSG00000162877_5 (sequence is synthesized)
agatctttcttcatttctctgggccatgatgaggagtcatcagggacaggggctcagaggatctcagccctgctacagtcaaggggcgtccagctagccttcattgtggacgaggggggc

SEQ ID NO: 491038 - DNA, 120 bp, Artificial Sequence
  ENSG00000162877_6 (sequence is synthesized)
ttcatcttggatgatttcattcctaacttcaagaagcccatcgccttgattgcagtctcagagaagggttccatgaacctcatgctgcaagtaaacatgacttcaggccactcttcagct

SEQ ID NO: 491039 - DNA, 120 bp, Artificial Sequence
  ENSG00000162877_7 (sequence is synthesized)
cctccaaaggagacaagcattggcatccttgcagctgctgtcagccgattggagcagacaccaatgcctatcatatttggaagcgggacagtggtgactgtattgcagcaactggcaaat

SEQ ID NO: 491040 - DNA, 120 bp, Artificial Sequence
  ENSG00000162877_8 (sequence is synthesized)
gagtttcccttccctgtcaatataatcctgagcaacccatggctatttgaaccacttataagcaggtttatggagagaaatcccttaaccaatgcaataatcaggaccaccacggcactc

SEQ ID NO: 491041 - DNA, 120 bp, Artificial Sequence
  ENSG00000162877_9 (sequence is synthesized)
tattcaaagcaggggtcaagttcaatgtcatccccccagtggcccaggccacagtcaacttccggattcaccctggacagacagtccaagaggtcctagaactcacgaagaacattgtgg

SEQ ID NO: 491042 - DNA, 120 bp, Artificial Sequence
  ENSG00000162877_10 (sequence is synthesized)
ctgataacagagtccagttccatgtgttgagtgcctttgaccccctccccgtcagcccttctgatgacaaggccttgggctaccagctgctccgccagaccgtacagtccgtcttcccgg

SEQ ID NO: 491043 - DNA, 120 bp, Artificial Sequence
  ENSG00000162877_11 (sequence is synthesized)
aagtcaatattactgccccagttacttctattggcaacacagacagccgattctttacaaacctcaccactggcatctacaggttctaccccatctacatacagcctgaagacttcaaac

SEQ ID NO: 491044 - DNA, 120 bp, Artificial Sequence
  ENSG00000162877_12 (sequence is synthesized)
gcatccatggagtcaacgagaaaatctcagtccaagcctatgagacccaagtgaaattcatctttgagttgattcagaatgctgacacagaccaggagccagtttctcacctgcacaaac

SEQ ID NO: 491045 - DNA, 120 bp, Artificial Sequence
  ENSG00000162877_13 (sequence is synthesized)
tgtgaggtcaaggggcctgctgggttaggcatgcccgaccccgggacaggactaacccaagggggaaagctagtgttgatgaaacttttgatcaaaaccacattgtaaaacattgcccat

SEQ ID NO: 491046 - DNA, 120 bp, Artificial Sequence
  ENSG00000162877_14 (sequence is synthesized)
ctgtcttgctcactcttaaactctcccaagaacaaggccggggtaaggtaaagtcagcagaaatctggcttctcccttcctcccgacatctgcatcccttgatccactggcatttgctgc

SEQ ID NO: 491047 - DNA, 120 bp, Artificial Sequence
  ENSG00000162877_15 (sequence is synthesized)
cctcttgtcccttatctgtcttatgctggttatttcactgcttcaccttccaggcttgacttaacaaatgtagatttgagaaatctcaaccagttgttacctgataggagtctttaattt

SEQ ID NO: 491048 - DNA, 120 bp, Artificial Sequence
  ENSG00000162877_16 (sequence is synthesized)
agggcactcttgctgggatgctttctccagagcttatatatttcttcttactagaactttcttcccccttttattcccctctcttcttggactcatgagctgtctcttcatctctcctct

SEQ ID NO: 491049 - DNA, 120 bp, Artificial Sequence
  ENSG00000162877_17 (sequence is synthesized)
ctctcctgcatctctccccttactcttcaatttattctacttctggacctggacttacccaaactgtgatactaccataattgtcaccataatcagtcaaataaagtgatctgtgcatca

SEQ ID NO: 491050 - DNA, 120 bp, Artificial Sequence
  ENSG00000162877_18 (sequence is synthesized)
acttcaaacggtgagtggaacaggtttgagcagcaggtgggagaaaagaaatacacttgatgtgtccttttcctaccccatgctcctggcagtccacagaatcagggggaaagccaggat

SEQ ID NO: 491051 - DNA, 120 bp, Artificial Sequence
  ENSG00000162877_19 (sequence is synthesized)
ttggcaaaatgaaatggagacattgtagaacctaacccatctactgtccttattgccagagtctcattgtcaccccctagaatttatggaaattggcccctcttttacaaagatggagat

SEQ ID NO: 491052 - DNA, 120 bp, Artificial Sequence
  ENSG00000162877_20 (sequence is synthesized)
aattgggtgattggggagaacctggtggaatcggtacccttgggtgctaatcccagctcttcctctctttgggagagggcttatcctctggaccccgttttctccacttacaaaatgggg

SEQ ID NO: 491053 - DNA, 120 bp, Artificial Sequence
  ENSG00000162878_0 (sequence is synthesized)
ggccggccggccggggggaggggagcgatgcggcgccggcgggcggcagtggccgcgggtttctgcgcctccttcctgctgggctccgtcctcaacgtgctcttcgctccgggctcggag

SEQ ID NO: 491054 - DNA, 120 bp, Artificial Sequence
  ENSG00000162878_1 (sequence is synthesized)
tcctcaacgtgctcttcgctccgggctcggagcctccgaggccaggccagtcccctgagccttcgccggccccgggtccgggccgtcgcgggggccgcggggagctggcccggcagatcc

SEQ ID NO: 491055 - DNA, 80 bp, Artificial Sequence
  ENSG00000162878_2 (sequence is synthesized)
ggagctggcccggcagatccgggcgcgctacgaggaggtgcagcgctattcccgcgggggccccgggcccggggcgggcc

SEQ ID NO: 491056 - DNA, 120 bp, Artificial Sequence
  ENSG00000162878_3 (sequence is synthesized)
ctggcccccggctcccggcccaggctcccccggcccgggcccgcgcctgggctgcgccgcgcttcgcaacgtgtccggcgcgcagtacatgggctcaggctacaccaaggccgtgtaccg

SEQ ID NO: 491057 - DNA, 120 bp, Artificial Sequence
  ENSG00000162878_4 (sequence is synthesized)
cgcagtacatgggctcaggctacaccaaggccgtgtaccgggtccgcctgcccggcggtgccgcggtggcgctcaaggcggtggactttagcggccacgatctgggcagctgcgtgcgcg

SEQ ID NO: 491058 - DNA, 120 bp, Artificial Sequence
  ENSG00000162878_5 (sequence is synthesized)
agttcggggtacggaggggctgctatcggctggcggcccacaagctgcttaaggagatggtgctgctggagcggctgcggcaccccaacgtgctgcagctctatggctactgctaccagg

SEQ ID NO: 491059 - DNA, 120 bp, Artificial Sequence
  ENSG00000162878_6 (sequence is synthesized)
acagcgaggacatcccagacaccctgaccaccatcacggagctgggcgcccctgtagaaatgatccagctgctgcaaacttcctgggaggatcgattccgaatctgcctgagcctgggcc

SEQ ID NO: 491060 - DNA, 120 bp, Artificial Sequence
  ENSG00000162878_7 (sequence is synthesized)
gcctcctccaccacctggcccactccccactgggctccgtcactctgctggacttccgccctcggcagtttgtgctggtggatggggagctcaaagtgacggacctggatgacgcacgtg

SEQ ID NO: 491061 - DNA, 120 bp, Artificial Sequence
  ENSG00000162878_8 (sequence is synthesized)
tggaggagacgccgtgtgcaggcagcaccgactgcatactcgagtttccggccaggaacttcaccctgccctgctcagcccagggctggtgcgagggcatgaacgagaagcggaacctct

SEQ ID NO: 491062 - DNA, 120 bp, Artificial Sequence
  ENSG00000162878_9 (sequence is synthesized)
caggagagctcgcctggggggtggacgagaccctggcccagctggagaaggtgctgcacctgtaccggagcgggcagtatctgcagaactccacggcaagcagcagtaccgagtaccagt

SEQ ID NO: 491063 - DNA, 120 bp, Artificial Sequence
  ENSG00000162878_10 (sequence is synthesized)
gtatcccagacagcaccatcccccaggaagactaccgctgctggccatcctaccaccacgggagctgcctcctttcagtgttcaacctggctgaggctgtggatgtctgtgagagccatg

SEQ ID NO: 491064 - DNA, 120 bp, Artificial Sequence
  ENSG00000162878_11 (sequence is synthesized)
cccagtgtcgggcctttgtggtcaccaaccagaccacctggacaggtcggcagctggtctttttcaagactggatggagccaagtggtccctgatcccaacaagaccacatatgtgaagg

SEQ ID NO: 491065 - DNA, 120 bp, Artificial Sequence
  ENSG00000162878_12 (sequence is synthesized)
cctctggctgacctatctgagggctcggctgaccagctgactatcctcagcagctgggcttgcctgtggagggagtgacttgcactggcagcactgcatgtcacctgggaacccctgcag

SEQ ID NO: 491066 - DNA, 120 bp, Artificial Sequence
  ENSG00000162878_13 (sequence is synthesized)
acaaagctaacatcccagacagacagatgtgaccaggacaaacgtgcaataatgccaaatgttaaaatgtgagtttaccagcctagctatgggactgctggctcctagtccaggaatcat

SEQ ID NO: 491067 - DNA, 120 bp, Artificial Sequence
  ENSG00000162878_14 (sequence is synthesized)
gggggtatgactgcctctccaaccctgtgggctgtaagcaagctcaggctagtctccccactgggggctgtgcccctccctgggacggttccgtgggcagccccatcactgtgttcaata

SEQ ID NO: 491068 - DNA, 120 bp, Artificial Sequence
  ENSG00000162878_15 (sequence is synthesized)
gtgtgagaatgtagctaaagcccctgctgctgctgctgcacatgccacagcaggcggtgggggctgcgtggggacaatccatcgtggagtgttctctcagcttaggtctggacaggagac

SEQ ID NO: 491069 - DNA, 120 bp, Artificial Sequence
  ENSG00000162878_16 (sequence is synthesized)
ttggcgggagatgctccaggatgtgggtgattctgtacctggggaggctatctctgacctcccgacaggggacactcccaggccagcccaggggtcaggggcagaggtgcacacctcagc

SEQ ID NO: 491070 - DNA, 120 bp, Artificial Sequence
  ENSG00000162878_17 (sequence is synthesized)
atgagccaagactggggtcagggagcaggtgtggtttgagccaggacctggggcgggggtggggccggggcctttctgcctcatttgctttcaatgaaagcctcaaagcagccaaaacca

SEQ ID NO: 491071 - DNA, 120 bp, Artificial Sequence
  ENSG00000162878_18 (sequence is synthesized)
ggctttcccccttcctcgagtttgaatatccagaatcttttgtacttcttgttggttaaattgtttatttttgtaaaaaataaaataaaattagttaataaaatgatgtttcacagcaaa

SEQ ID NO: 491072 - DNA, 120 bp, Artificial Sequence
  ENSG00000162878_19 (sequence is synthesized)
gccagccctccaaagcagctcccactcctcctccacccagggagagggaggggaggaaggcgcacaggctgactcagccaccggccaaagggttcaaaaaagaagcaagacttaaaggat

SEQ ID NO: 491073 - DNA, 120 bp, Artificial Sequence
  ENSG00000162878_20 (sequence is synthesized)
tgcgttctgcctggttgctaggcctgagggatccggctccctggccaggttagcgttctgccccaggttggaatagaggaaggatgtgtctccaaaggctggattcctgagccactggtt

SEQ ID NO: 491074 - DNA, 120 bp, Artificial Sequence
  ENSG00000162878_21 (sequence is synthesized)
tccctctgccacaggtttttcttcacatacctcctgcctcacagtgccccgccttcactgcgtcctctgctggacagcatcgtcaacgccacaggtgagctctccagggcccatctgctt

SEQ ID NO: 491075 - DNA, 120 bp, Artificial Sequence
  ENSG00000162878_22 (sequence is synthesized)
ccaggcacctaccccacccccacccgccagcaaaagtggggagaaaaataacccagggcagcaggggttctagaaaccatcacttcctaaggtggcattctgccgcaacctccccgctcc

SEQ ID NO: 491076 - DNA, 120 bp, Artificial Sequence
  ENSG00000162878_23 (sequence is synthesized)
tttttcttcacatacctcctgcctcacagtgccccgccttcactgcgtcctctgctggacagcatcgtcaacgccacaggctctggaggcagaggtgggagcagctggctgctgacttca

SEQ ID NO: 491077 - DNA, 120 bp, Artificial Sequence
  ENSG00000162878_24 (sequence is synthesized)
cctacaggtgacctccacccctgactcgggaactccatcgaaggagaatgggccaggagggcatggcaggaagagagccaacgtggaggccagctgggcagggagactcagccttgacca

SEQ ID NO: 491078 - DNA, 120 bp, Artificial Sequence
  ENSG00000162878_25 (sequence is synthesized)
gagcaagggaaggcttctaccctgtccagaagggaacattcaggcctctgatggagaggctaaaaatagacagctccaaggagaatccgggttagggggtggcagctggaggcttcttaa

SEQ ID NO: 491079 - DNA, 120 bp, Artificial Sequence
  ENSG00000162878_26 (sequence is synthesized)
ggggctgctccgacaccgggagtcagtcaggggataatgtggggctgggaggtgggcaagtcctgggaagggttgggaagcaggcccctggtttcggttagtatgaagttaggtgtggtg

SEQ ID NO: 491080 - DNA, 120 bp, Artificial Sequence
  ENSG00000162878_27 (sequence is synthesized)
cggtgagtggccccaagctgatccacagggaagcaagaaacaggtgggagggtgaatgaccccgcccaattaggctaagtggctcaccctttctctggggacccttgtctccaaaggcca

SEQ ID NO: 491081 - DNA, 120 bp, Artificial Sequence
  ENSG00000162878_28 (sequence is synthesized)
ctgtaggggctcacatagaatcatggaggggctgacatggactaatttgaggttccatctctagctgagctagagcaactataattctgccttcaacctggggttgggcactgatacccc

SEQ ID NO: 491082 - DNA, 120 bp, Artificial Sequence
  ENSG00000162878_29 (sequence is synthesized)
ccacctggacaggtgagccagtgggagaagcccttccaagggagatggcaggacctctctggaggttgatagatagtgatcccccatcggaagtcagagggggtgctgaggtgatgagag

SEQ ID NO: 491083 - DNA, 120 bp, Artificial Sequence
  ENSG00000162878_30 (sequence is synthesized)
agaggtatacgtgtcttcaaggcagtcaaattagggagaatggtcttgcctccagaaagagaaacatccagccctgttacctctcacctctgccccccaggtcggcagctggtctttttc

SEQ ID NO: 491084 - DNA, 120 bp, Artificial Sequence
  ENSG00000162881_0 (sequence is synthesized)
ggctgcagggttccccttggcctgcaaacaggaacacagggtgtttctcagtggctgcgagaatgctgatgaaaaccccaggatgttgtgtcaccgtggtggccagctgatagtgccaat

SEQ ID NO: 491085 - DNA, 120 bp, Artificial Sequence
  ENSG00000162881_1 (sequence is synthesized)
catcccactttgccctgagcactcctgcaggggtagaagactccagaaccttctctcaggcccatggcccaagcagcccatggaacttcataacctgagctctccatctccctctctctc

SEQ ID NO: 491086 - DNA, 120 bp, Artificial Sequence
  ENSG00000162881_2 (sequence is synthesized)
ctcctctgttctccctccctccttctctccctcaccctcctctgctccctctgcctttaccactgtgggggggtcctctggagggccctgccaccccacctcttcctcgctggtgtctgc

SEQ ID NO: 491087 - DNA, 120 bp, Artificial Sequence
  ENSG00000162881_3 (sequence is synthesized)
cttcctggcaccaatcctggccctggagtttgtcctgggcctggtggggaacagtttggccctcttcatcttctgcatccacacgcggccctggacctccaacacggtgttcctggtcag

SEQ ID NO: 491088 - DNA, 120 bp, Artificial Sequence
  ENSG00000162881_4 (sequence is synthesized)
cctggtggccgctgacttcctcctgatcagcaacctgcccctccgcgtggactactacctcctccatgagacctggcgctttggggctgctgcctgcaaagtcaacctcttcatgctgtc

SEQ ID NO: 491089 - DNA, 120 bp, Artificial Sequence
  ENSG00000162881_5 (sequence is synthesized)
caccaaccgcacggccagcgttgtcttcctcacagccatcgcactcaaccgctacctgaaggtggtgcagccccaccacgtgctgagccgtgcttccgtgggggcagctgcccgggtggc

SEQ ID NO: 491090 - DNA, 120 bp, Artificial Sequence
  ENSG00000162881_6 (sequence is synthesized)
cgggggactctgggtgggcatcctgctcctcaacgggcacctgctcctgagcaccttctccggcccctcctgcctcagctacagggtgggcacgaagccctcggcctcgctccgctggca

SEQ ID NO: 491091 - DNA, 120 bp, Artificial Sequence
  ENSG00000162881_7 (sequence is synthesized)
aggcaggcccgcagagggccatgcgtgtgctggccatggtggtggccgtctacaccatctgcttcttgcccagcatcatctttggcatggcttccatggtggctttctggctgtccgcct

SEQ ID NO: 491092 - DNA, 120 bp, Artificial Sequence
  ENSG00000162881_8 (sequence is synthesized)
gccgatccctggacctctgcacacagctcttccatggctccctggccttcacctacctcaacagtgtcctggaccccgtgctctactgcttctctagccccaacttcctccaccagagcc

SEQ ID NO: 491093 - DNA, 120 bp, Artificial Sequence
  ENSG00000162881_9 (sequence is synthesized)
gggccttgctgggcctcacgcggggccggcagggcccagtgagcgacgagagctcctaccaaccctccaggcagtggcgctaccgggaggcctctaggaaggcggaggccatagggaagc

SEQ ID NO: 491094 - DNA, 120 bp, Artificial Sequence
  ENSG00000162881_10 (sequence is synthesized)
tgaaagtgcagggcgaggtctctctggaaaaggaaggctcctcccagggctgagggccagctgcagggctgcagcgctgtgggggtaagggctgccgcgctctggcctggagggacaagg

SEQ ID NO: 491095 - DNA, 120 bp, Artificial Sequence
  ENSG00000162881_11 (sequence is synthesized)
ccagcacacggtgcctcaaccaactggacaagggatggcggcagaccaggggccaggccaaagcactggcaggactcaggtgggtggcagggagagaaacccacctaggcctctcagtgt

SEQ ID NO: 491096 - DNA, 120 bp, Artificial Sequence
  ENSG00000162881_12 (sequence is synthesized)
gtccaggatggcattcccagaatgcaggggagagcaggatgccgggtggaggagacaggcaaggtgccgttggcacaccagctcagacaggggcctgcgcagctgcaggggacagacgcc

SEQ ID NO: 491097 - DNA, 120 bp, Artificial Sequence
  ENSG00000162881_13 (sequence is synthesized)
aatcactgtcacagcagagtcaccttagaaattggacagctgcatgttctgtgctctccagtttgtcccttccaatattaataaacttcccttttaaatatatttatttgcaagaccaaa

SEQ ID NO: 491098 - DNA, 120 bp, Artificial Sequence
  ENSG00000162882_0 (sequence is synthesized)
ctccgacggcgggaggacagcgctgcgaggaggcgcccgggacagtcatggagcgccgcctgggagtgagggcctgggtgaaggagaaccggggctccttccagcccccggtctgcaaca

SEQ ID NO: 491099 - DNA, 120 bp, Artificial Sequence
  ENSG00000162882_1 (sequence is synthesized)
agctcatgcaccaggagcagctcaaagtcatgttcatcggaggccccaacaccaggaaggactatcacatcgaagagggtgaagaggtattttaccagctggagggagacatggttctcc

SEQ ID NO: 491100 - DNA, 120 bp, Artificial Sequence
  ENSG00000162882_2 (sequence is synthesized)
gagtcctggagcaagggaaacaccgggatgtggtcattcggcagggagagatattcctcctgcctgccagggtgccccactcaccacagaggtttgccaacaccgtggggctggtggttg

SEQ ID NO: 491101 - DNA, 120 bp, Artificial Sequence
  ENSG00000162882_3 (sequence is synthesized)
agcgaaggcggctggagaccgagctagatgggctcaggtactatgtgggcgacaccatggacgttctgtttgagaagtggttctactgcaaggacctcggcacgcagttggcccccatca

SEQ ID NO: 491102 - DNA, 120 bp, Artificial Sequence
  ENSG00000162882_4 (sequence is synthesized)
tccaggagttcttcagctctgagcagtacagaacaggaaagcccatccctgaccagctgctcaaggagccaccattccctctgagcacacgatccatcatggagcccatgtccctggatg

SEQ ID NO: 491103 - DNA, 120 bp, Artificial Sequence
  ENSG00000162882_5 (sequence is synthesized)
ggggacacctatgagacccaggtgatcgcctatgggcaaggcagcagcgaaggcctgagacagaatgtggacgtgtggctgtggcagctggagggctcctcggtggtgacaatgggggga

SEQ ID NO: 491104 - DNA, 120 bp, Artificial Sequence
  ENSG00000162882_6 (sequence is synthesized)
cggcgcctgagcctggcccctgatgacagcctcctggtgctagctgggacctcgtatgcctgggagcgaacacaaggctctgtggccctgtctgtgacccaggaccctgcctgcaagaag

SEQ ID NO: 491105 - DNA, 120 bp, Artificial Sequence
  ENSG00000162882_7 (sequence is synthesized)
cccctggggtgaccctcttgccatggcctgaagcagccacaggtgtgccaagcaccctcgagtgccatccctgccaaacaactctcccagcccccactacctctctgtgtactgccgctg

SEQ ID NO: 491106 - DNA, 120 bp, Artificial Sequence
  ENSG00000162882_8 (sequence is synthesized)
tgtcccccacagacctgcacattgttgtcacccaccctcctgcccttctcagcccagatgccatgcccctgggcgggcagcagctccccatcttctctggcagactcagcccactgcctt

SEQ ID NO: 491107 - DNA, 120 bp, Artificial Sequence
  ENSG00000162882_9 (sequence is synthesized)
gccagtcttgccaggtggtctacccccggccccgctcctgcccattcctctgtccctgcagactcagtgcagcacttccacaccaagaaggccctcaataaaggcttcctgaggaacgca

SEQ ID NO: 491108 - DNA, 120 bp, Artificial Sequence
  ENSG00000162882_10 (sequence is synthesized)
ccccagcccagcccctgcctcttgctttcctggggctctgcatcagcacctgatgccctgggagaaagtctcccctcccagggtggagatcctggcccagagagcccactgccaggccgg

SEQ ID NO: 491109 - DNA, 120 bp, Artificial Sequence
  ENSG00000162882_11 (sequence is synthesized)
ggggaggggggagcagcagccccgctgggagggaaaggatggcagacacacagctgtgtgagagccccatgagtgtgtgtgggcacctgcacctgaccgtgagtgtggtgtatgtgtgtg

SEQ ID NO: 491110 - DNA, 120 bp, Artificial Sequence
  ENSG00000162882_12 (sequence is synthesized)
ctgcccttctccttccctccctccccttccaaaataggatgggttttggtccaggggaccggggagtctctttttgaatactctgcccagtcctcaaggtactaagaagatggcagccaa

SEQ ID NO: 491111 - DNA, 120 bp, Artificial Sequence
  ENSG00000162882_13 (sequence is synthesized)
tggtacctcccacatggctgcttgatcattgagctggatacagagcctgttctggcaattgagacctggggcccctgggaactgggcccactggggctgggtgggctgggtcctgaggac

SEQ ID NO: 491112 - DNA, 120 bp, Artificial Sequence
  ENSG00000162882_14 (sequence is synthesized)
ggaggacagcgctgcgaggaggcgcccgggacagtcatggagcgccgcctgggagtgagggcctgggtgaaggagaaccggggctccttccagcccccggtctgcaacaagctcatataa

SEQ ID NO: 491113 - DNA, 120 bp, Artificial Sequence
  ENSG00000162882_15 (sequence is synthesized)
ggttagtaacatgccccagggcctgtgcttataaacacatgccacactgacttgacaccgcctgaggcccctgctagatgtcacggtctcctgcatccactgagccatgcctccagccag

SEQ ID NO: 491114 - DNA, 120 bp, Artificial Sequence
  ENSG00000162882_16 (sequence is synthesized)
ggagcacagctccaaactgcagctgaagggatcctagatagactcaagaaagcacgtcctggccactgagtgggcaggagggcctcacagcagaggcagtggagatcctgtctttgttgg

SEQ ID NO: 491115 - DNA, 120 bp, Artificial Sequence
  ENSG00000162882_17 (sequence is synthesized)
ctgatggtggaggggtagagtggggtggattctgttctctgtgaccccctggaagctcactcagcctgatgaactttggctggaatcagaatctgtgctttctgcgtgaggttgtgaacc

SEQ ID NO: 491116 - DNA, 120 bp, Artificial Sequence
  ENSG00000162882_18 (sequence is synthesized)
ctgtgctttctgcgtgaggttgtgaaccttgaaaattcgagacaggtctcagttaatttaaaagtttgttttgccaaggttgaggacgtgtgcccgtgacacagcctcaggaggtcctga

SEQ ID NO: 491117 - DNA, 120 bp, Artificial Sequence
  ENSG00000162882_19 (sequence is synthesized)
agctcggctttatacattttagggagacatgagacaccgatcaatatatgtaagataaacattggttctgtctggaaaggtgagacaactccaagcaaaggtgggaagactcaaagtggg

SEQ ID NO: 491118 - DNA, 120 bp, Artificial Sequence
  ENSG00000162882_20 (sequence is synthesized)
gcagcgaaggcctgagacagaatgtggacgtgtggctgtggcagctggcaagtggggcccagggacagggttgcagaaccccctgccagagggcatcagcccgctcctcggccctgggct

SEQ ID NO: 491119 - DNA, 120 bp, Artificial Sequence
  ENSG00000162882_21 (sequence is synthesized)
cccacacggggcccactcttggggccttggggcccaggcagactcagacattcacccaggtgatgaggcccaacagtctccatttgattctcctgctcctcttctccaggagggctcctc

SEQ ID NO: 491120 - DNA, 120 bp, Artificial Sequence
  ENSG00000162885_0 (sequence is synthesized)
aagccgcggccacccgcggtctgagggaccggaggagcggggccgggagctgcgaggagccccccagacgtcgccgagcgcgagggcgggcgtgctcggagtggtcgctcgtcagccgcc

SEQ ID NO: 491121 - DNA, 120 bp, Artificial Sequence
  ENSG00000162885_1 (sequence is synthesized)
gcccctcagtctccgcacttgcaggtcccctccctctccgccgggacgcgggagagcccggctcgcggcgggggcggccaatgcgaaactggctggtgctgctgtgcccgtgtgtgctcg

SEQ ID NO: 491122 - DNA, 120 bp, Artificial Sequence
  ENSG00000162885_2 (sequence is synthesized)
gggccgcgctgcacctctggctgcggctgcgctccccgccgcccgcctgcgcctccggggccggccctgcagatcagttggccttatttcctcagtggaaatctactcactatgatgtgg

SEQ ID NO: 491123 - DNA, 120 bp, Artificial Sequence
  ENSG00000162885_3 (sequence is synthesized)
tagttggcgtgttgtcagctcgcaataaccatgaacttcgaaacgtgataagaagcacctggatgagacatttgctacagcatcccacattaagtcaacgtgtgcttgtgaagttcataa

SEQ ID NO: 491124 - DNA, 120 bp, Artificial Sequence
  ENSG00000162885_4 (sequence is synthesized)
taggtgctcatggctgtgaagtgcctgtggaagacagggaggatccttattcctgtaaactactcaacatcacaaatccagttttgaatcaggaaattgaagcgttcagtctgtccgaag

SEQ ID NO: 491125 - DNA, 120 bp, Artificial Sequence
  ENSG00000162885_5 (sequence is synthesized)
acacttcatcggggctgcctgaggatcgagttgtcagcgtgagtttccgagttctctaccccatcgttattaccagtcttggagtgttctacgatgccaatgatgtgggtttccagagga

SEQ ID NO: 491126 - DNA, 120 bp, Artificial Sequence
  ENSG00000162885_6 (sequence is synthesized)
acatcactgtcaaactttatcaggcagaacaagaggaggccctcttcattgctcgcttcagtcctccaagctgtggtgtgcaggtgaacaagctgtggtacaagcccgtggaacaattca

SEQ ID NO: 491127 - DNA, 120 bp, Artificial Sequence
  ENSG00000162885_7 (sequence is synthesized)
tcttaccagagagctttgaaggtacaatcgtgtgggagagccaagacctccacggccttgtgtcaagaaatctccacaaagtgacagtgaatgatggagggggagttctcagagtcatta

SEQ ID NO: 491128 - DNA, 120 bp, Artificial Sequence
  ENSG00000162885_8 (sequence is synthesized)
cagctggggagggtgcattgcctcatgaattcttggaaggtgtggagggagttgcaggtggttttatatatactattcaggaaggtgatgctctcttacacaaccttcattctcgccctc

SEQ ID NO: 491129 - DNA, 120 bp, Artificial Sequence
  ENSG00000162885_9 (sequence is synthesized)
aaagacttattgatcatataaggaatctccatgaggaagatgccttactgaaggaggaaagcagcatctatgatgatattgtttttgtggatgttgtcgacacttatcgtaatgttcctg

SEQ ID NO: 491130 - DNA, 120 bp, Artificial Sequence
  ENSG00000162885_10 (sequence is synthesized)
caaaattattgaacttctatagatggactgtggaaacaacgagcttcaatttgttgctgaagacagatgatgactgttacatagacctcgaagctgtatttaataggattgtccaaaaga

SEQ ID NO: 491131 - DNA, 120 bp, Artificial Sequence
  ENSG00000162885_11 (sequence is synthesized)
atctggatgggcctaatttttggtggggaaatttcagactgaattgggcagttgaccgaaccggaaagtggcaggagttggagtacccgagccccgcttaccctgcctttgcatgtgggt

SEQ ID NO: 491132 - DNA, 120 bp, Artificial Sequence
  ENSG00000162885_12 (sequence is synthesized)
caggatatgtgatctccaaggacatcgtcaagtggctggcaagcaactcggggaggttaaagacctatcagggtgaagatgtaagcatgggcatctggatggctgccataggacctaaaa

SEQ ID NO: 491133 - DNA, 120 bp, Artificial Sequence
  ENSG00000162885_13 (sequence is synthesized)
gataccaggacagtctgtggctgtgtgagaagacctgtgagacaggaatgctgtcttctcctcagtattctccgtgggaactgacggaactgtggaaactgaaggaacggtgcggtgatc

SEQ ID NO: 491134 - DNA, 120 bp, Artificial Sequence
  ENSG00000162885_14 (sequence is synthesized)
cttgtcgatgtcaagcaagataacagggacttgaattagcagagtctaaaatcagggcaggcaaacgataatctgagtgcaagtctgaggagtcccagggtttagcagtagactgtatgg

SEQ ID NO: 491135 - DNA, 120 bp, Artificial Sequence
  ENSG00000162885_15 (sequence is synthesized)
tctttcaagagagttccagactggcactttcacccagaaccaatgcggtgtttcttaatgtttgcacaaatttccttaaaaatcaacttgtactgtagcataagaaaagtttttatttat

SEQ ID NO: 491136 - DNA, 120 bp, Artificial Sequence
  ENSG00000162885_16 (sequence is synthesized)
ctattggaagattatcagaaaaataccaagttattttataaaagaaaaaatatttctaaatcctgatgcattgtggctaattagtaattcaccattacctatagtttttggttaaaactt

SEQ ID NO: 491137 - DNA, 120 bp, Artificial Sequence
  ENSG00000162885_17 (sequence is synthesized)
ggcctagttcagaaatctgtagtagtaactgagagtttgaatttcaacctggattgcaggatagctctgtagagctaattaggataattatcagacaaaaaggaactcacaggaatgctg

SEQ ID NO: 491138 - DNA, 120 bp, Artificial Sequence
  ENSG00000162885_18 (sequence is synthesized)
tgtgatcatgtgatcacatatttgagcagtggtcacttataccaaagtttggggtttctggaaataatgtcagattttgtggatctctgaagtgggcaacttgaactaacttgaagagga

SEQ ID NO: 491139 - DNA, 120 bp, Artificial Sequence
  ENSG00000162885_19 (sequence is synthesized)
agttcatttatatggtagactaatacccaaattttctttctgccatctaacataaatcctgaaggtcacagtttagtactcatagtttttaaatgctaaagttgtgtgagtatgaataaa

SEQ ID NO: 491140 - DNA, 120 bp, Artificial Sequence
  ENSG00000162885_20 (sequence is synthesized)
agcaaatacctctcagggttttagtgccatcgggaaggatatttctaaattttgttgacattttgaaagaattagttttgctttcctcctatcattgcctaatgtttacctaatatgagt

SEQ ID NO: 491141 - DNA, 120 bp, Artificial Sequence
  ENSG00000162885_21 (sequence is synthesized)
acatttcaatcaaagctggttatcacagaagaagatatactcagcttaggtataattgtagggaaaagcatgtgattaatttaagtactcttagaaatagtgcaactgagaagacagata

SEQ ID NO: 491142 - DNA, 120 bp, Artificial Sequence
  ENSG00000162885_22 (sequence is synthesized)
atagcatattgttatacatagtagaggatgtctccccaagtttaagggacatttcccaaaatgaccaaccaaatcatttctagtaaccctttaaaatagtagtttcaatagagaattcca

SEQ ID NO: 491143 - DNA, 120 bp, Artificial Sequence
  ENSG00000162885_23 (sequence is synthesized)
ttaaaactagtcttatgacagatattaactgtgttcagattttattaggctagctagtttctttctatttaatatttaaatcttatcatgaaatgcagtgatgagctgtaaaaataaata

SEQ ID NO: 491144 - DNA, 120 bp, Artificial Sequence
  ENSG00000162885_24 (sequence is synthesized)
tgaaataagatcagaaaatcattagtaggttcaaagcctttattattgctattatgtataagcctagaaatggtcacttcccaacaaaaaatacatcccttgttatacttaggacaagtt

SEQ ID NO: 491145 - DNA, 120 bp, Artificial Sequence
  ENSG00000162885_25 (sequence is synthesized)
gtaaaccccctttgttttgacagtagaattgttccagtgaatcatttatttccggtgaaccccagacacgataagcagtgtggtctttaaattttattagttggttgtcaccatcgcact

SEQ ID NO: 491146 - DNA, 120 bp, Artificial Sequence
  ENSG00000162885_26 (sequence is synthesized)
aatagacaatctccattttccacagaataaaactgtaatgactttaggtcattttccagctcgatttctctgcccggcttctaaaattagaacgaaggtggggaaggatgtgattaagac

SEQ ID NO: 491147 - DNA, 120 bp, Artificial Sequence
  ENSG00000162885_27 (sequence is synthesized)
agatccgataaagcatgctacacatactcttcccccaccccgtccccaggcagtagcttacccttaaaatcaaacaaacagacccatggtctccatttagaatcaaactgttgctatcta

SEQ ID NO: 491148 - DNA, 120 bp, Artificial Sequence
  ENSG00000162885_28 (sequence is synthesized)
gagacagtttaatgtcataatacgaggactaagcttgactttgactttgtattttgctgggcaacttactttgggactttcataggacaacagaaggtctgacacaggaactttgagaag

SEQ ID NO: 491149 - DNA, 120 bp, Artificial Sequence
  ENSG00000162885_29 (sequence is synthesized)
acgtgacagcaatcccttcaccttttgaattgtcatggagcctatcaaaagacaagaaaagtccattcgttctctcaaatgacagttacctgtaaaactagctcatgtgatgagaccaca

SEQ ID NO: 491150 - DNA, 90 bp, Artificial Sequence
  ENSG00000162885_30 (sequence is synthesized)
gacagttacctgtaaaactagctcatgtgatgagaccacagtatcattgcaatgatagcgagactgacttacttacttacttaagtaagt

SEQ ID NO: 491151 - DNA, 90 bp, Artificial Sequence
  ENSG00000162885_31 (sequence is synthesized)
atccgcccgccctggccccagcgcctggctgtatctttcattttacccaagtcactttacccaagtaagtaattaggggaaagcctgagt

SEQ ID NO: 491152 - DNA, 120 bp, Artificial Sequence
  ENSG00000162885_32 (sequence is synthesized)
gtcactttacccaagtaagtaattaggggaaagcctgagtcttgtaccacctgttcatttggggaactgtgggaaacggagccaacggacctaagtgccctttgacagtgagtttcatac

SEQ ID NO: 491153 - DNA, 120 bp, Artificial Sequence
  ENSG00000162885_33 (sequence is synthesized)
catttcagtagtgtatttctttcttaatctgaataaaccagaatgatactctcagcacagaagaataaagggagcgagtcattaacgttttctttttaaacctttatgatgacttcctta

SEQ ID NO: 491154 - DNA, 120 bp, Artificial Sequence
  ENSG00000162885_34 (sequence is synthesized)
tgaattactgaacgaacactggaatgggactcaggtatcctgaggacatctctcaactctggccttagttccccctctgtaaaattagggtgccaactaaatgatctacaaggtcccttc

SEQ ID NO: 491155 - DNA, 120 bp, Artificial Sequence
  ENSG00000162885_35 (sequence is synthesized)
cagcgccgccattctgtaattacatcatgtgtaactgtattaaacatacacaagtgactgccaggcatgggaatgtaacttccgagtaaatgctttggtttgttcagaatacactatgaa

SEQ ID NO: 491156 - DNA, 120 bp, Artificial Sequence
  ENSG00000162885_36 (sequence is synthesized)
cttctttccaaagacgggttgtggtaaatagtggatattttgattataagaaatagagtttccttgaagctttagctggagatacagcaatagtgtggtgttcctacaaatatcacagtg

SEQ ID NO: 491157 - DNA, 120 bp, Artificial Sequence
  ENSG00000162885_37 (sequence is synthesized)
tattcaaacatatttttctatcaaaaatcatttttgtaaaagctgtgtgtttttatccaacttgtgataataaatgttctttattttagaataaaaactggcctttttgtatgtattgaa

SEQ ID NO: 491158 - DNA, 120 bp, Artificial Sequence
  ENSG00000162885_38 (sequence is synthesized)
gaggtacaggatggcaggaaaagactgtagtaccaatgcagtccttcataggagtgggcgtgtgctttcaggggcaggcacttgatattttcttgtaccagggcagcactccagagtgat

SEQ ID NO: 491159 - DNA, 120 bp, Artificial Sequence
  ENSG00000162885_39 (sequence is synthesized)
gaggcctcagaggttccaaaaccactttttgaaaaacattgcatgtttccgtagtttatttagtggagtagagaactacacaattgttttaatgacaaaggatgatgttgggtgtggatt

SEQ ID NO: 491160 - DNA, 120 bp, Artificial Sequence
  ENSG00000162885_40 (sequence is synthesized)
gatggaaagaccagacagagataccatttgggtaaaaattaaataatttgcttatctaaagaatgaaaagaaaaaaaagtcagtgcagacaggttaatgatagagatgggccatgtttcc

SEQ ID NO: 491161 - DNA, 120 bp, Artificial Sequence
  ENSG00000162885_41 (sequence is synthesized)
aagttaaataaaatttctccaaagggtgaacagttgtggatgatagcctgaaaatgtacctgtcaccttctgggtccctctaggtccagtcataactagatatgcactaaagaatgcctc

SEQ ID NO: 491162 - DNA, 120 bp, Artificial Sequence
  ENSG00000162885_42 (sequence is synthesized)
gcctgccaggtgccctcattagtcctggagttaagccacacagtatggtcgcagagtgtgacagaatcaggatcagacataacaaattattcattcatcagcttcagcctttctaggctg

SEQ ID NO: 491163 - DNA, 120 bp, Artificial Sequence
  ENSG00000162885_43 (sequence is synthesized)
ttttagtctaggccgagtacattcctgaactcagtgctctggaaccacaatcggggtcagtttcctagacatctctgggattcactttagatcacctatagagttcatcccgcagcatct

SEQ ID NO: 491164 - DNA, 120 bp, Artificial Sequence
  ENSG00000162885_44 (sequence is synthesized)
cagctgggttaaggtgtggaggctagacaactgaccggccctggtgactaaccaagaaactttttcctacccattctgtggtgtgccattcacaatgtgttcagcaataggaaccacaca

SEQ ID NO: 491165 - DNA, 120 bp, Artificial Sequence
  ENSG00000162885_45 (sequence is synthesized)
tttttgtaacatactatgggtctttggaattgagtacaagtagttgaaactatatgttaattctgtcagtgtcaaagggatctccttttcatttgtatctgaacctccattttaaaaact

SEQ ID NO: 491166 - DNA, 120 bp, Artificial Sequence
  ENSG00000162885_46 (sequence is synthesized)
tctgaatacgctactctcagcatactgcttataggatagcctgctccgcaaaagcagtcaaaaaataaattaaaaaaaacaaaacgacttttaaataaaagccaaactaaaacaggggtg

SEQ ID NO: 491167 - DNA, 82 bp, Artificial Sequence
  ENSG00000162885_47 (sequence is synthesized)
tgtgtgctcggggccgcgctgcacctctggctgcggctgcgctccccgccgcccgcctgcgcctccggggccggccctgcag

SEQ ID NO: 491168 - DNA, 120 bp, Artificial Sequence
  ENSG00000162885_48 (sequence is synthesized)
ttgaaaagtacactgaatgtcttatacttaatctttatacttgagagaaaaggattttttcttttttgtcttttaaaaaactttattcagataaaattcacccttttaaagtggttcagt

SEQ ID NO: 491169 - DNA, 120 bp, Artificial Sequence
  ENSG00000162885_49 (sequence is synthesized)
ggttttagtgtattcttagagttctacaaccggctccacctcccaaaaggaaaccccacacccattagcagttactcctcattcttacctccccaaccccccaccccctaacaactactg

SEQ ID NO: 491170 - DNA, 120 bp, Artificial Sequence
  ENSG00000162885_50 (sequence is synthesized)
atgcactttctttctctatggatttgcctgttttgaacatttcacataaatggaaatgcacagtacgtactctgtgtgtcagtttctttgctgtaacatgtgttccaggtctgtccattt

SEQ ID NO: 491171 - DNA, 120 bp, Artificial Sequence
  ENSG00000162885_51 (sequence is synthesized)
tgtatgtatcagtacttcttttttatgatcatataatattctattgcatcgatatgccctattttattcattcattaatggatggacatttagattgcttctactttttgaatatgaata

SEQ ID NO: 491172 - DNA, 120 bp, Artificial Sequence
  ENSG00000162885_52 (sequence is synthesized)
attctgtagtaaacatgtaggtacaagtttttgtgtggtcatatatttccatttctcttaaatgtctaggagtagaagacctgggtcatataattgtgtgtttaatcacttgaggcactg

SEQ ID NO: 491173 - DNA, 120 bp, Artificial Sequence
  ENSG00000162885_53 (sequence is synthesized)
ccaggttgttttctaaagcagcagcccactttacatttccatagtcagtatatgaggattctagtttctccatattcttgtcaacacttaataaattgtctgtcttttaaaatataccaa

SEQ ID NO: 491174 - DNA, 120 bp, Artificial Sequence
  ENSG00000162885_54 (sequence is synthesized)
atttttctcaagcattttttaaaaattcctgccatttgtgaattatatagcaaatgattacctaggttttggcattaagcccacttcactacttcttactagtaaaacaaaggattacat

SEQ ID NO: 491175 - DNA, 70 bp, Artificial Sequence
  ENSG00000162885_55 (sequence is synthesized)
ttcatgtgcttattggccatttgtatatcttccttttttgtttcgttgtttttctttttttctgagacga

SEQ ID NO: 491176 - DNA, 120 bp, Artificial Sequence
  ENSG00000162885_56 (sequence is synthesized)
agtgcatgccaccatgcccagctaattattaaatgttttgtagagacagggttttgtcatattgctgaggctgcacactgttaacagggtgaattattatggtatatgaactagatgtgg

SEQ ID NO: 491177 - DNA, 120 bp, Artificial Sequence
  ENSG00000162885_57 (sequence is synthesized)
attattatggtatatgaactagatgtgggaagtgagggagggaggagggggaggaagtgagggaggaaggggtggagagagggagaaggtggtgagggagggaggggtggagggaagaag

SEQ ID NO: 491178 - DNA, 120 bp, Artificial Sequence
  ENSG00000162885_58 (sequence is synthesized)
ggaggaaaggaggggagagagagtcatttgtatatctttagagaaatatctattcagatcctttgcccatttataaaattattttattgttgaattgtaagagttctttatatatgctgg

SEQ ID NO: 491179 - DNA, 120 bp, Artificial Sequence
  ENSG00000162885_59 (sequence is synthesized)
atacaagtcccttatcagatacatgctttgcaaatggtgccctttaacacacaaaagttgtaaattttgatgaagtccaattttgtcacatgtttttgctgtcatatgtaaggaactatt

SEQ ID NO: 491180 - DNA, 120 bp, Artificial Sequence
  ENSG00000162885_60 (sequence is synthesized)
gtctaatgtgaggtcacaaagatttgtgcctttgttttacagttccaagagttttatagttttagcacttatacgtaggtcttggatccatgttcattttcatatatggcatgaaataga

SEQ ID NO: 491181 - DNA, 120 bp, Artificial Sequence
  ENSG00000162885_61 (sequence is synthesized)
ggtttaacttcattcttttgcatgtggatatccagttgtcccagcacccatttgttgaaaatcagtgactgtagatgtaaggatttacttgaggactctcaattctattccattgatcta

SEQ ID NO: 491182 - DNA, 120 bp, Artificial Sequence
  ENSG00000162885_62 (sequence is synthesized)
tctcaattctattccattgatctatgtgtctgcgtctttaaccagtactacactgtcttgattatgtagctttttagtaagatttgaaattgggaggctgggcacggtggctcactcctg

SEQ ID NO: 491183 - DNA, 120 bp, Artificial Sequence
  ENSG00000162885_63 (sequence is synthesized)
aaaaaaaaaaagaaattaggaaatgtgaatcctccaaccttgttctttttcaagcttgattggctattctgggtctcttgcacttccatatgaattttatgatcagcttgttaatttgtg

SEQ ID NO: 491184 - DNA, 80 bp, Artificial Sequence
  ENSG00000162889_0 (sequence is synthesized)
ggagccccgcgacccgccgagcctggagccgggccgggtcggggaagccggctccagcccggagcgaacttcgcagcccg

SEQ ID NO: 491185 - DNA, 80 bp, Artificial Sequence
  ENSG00000162889_1 (sequence is synthesized)
ggcaccatgctgtccaactcccagggccagagcccgccggtgccgttccccgccccggccccgccgccgcagccccccac

SEQ ID NO: 491186 - DNA, 120 bp, Artificial Sequence
  ENSG00000162889_2 (sequence is synthesized)
ccctgccctgccgcaccccccggcgcagccgccgccgccgcccccgcagcagttcccgcagttccacgtcaagtccggcctgcagatcaagaagaacgccatcatcgatgactacaaggt

SEQ ID NO: 491187 - DNA, 120 bp, Artificial Sequence
  ENSG00000162889_3 (sequence is synthesized)
caccagccaggtcctggggctgggcatcaacggcaaagttttgcagatcttcaacaagaggacccaggagaaattcgccctcaaaatgcttcaggactgccccaaggcccgcagggaggt

SEQ ID NO: 491188 - DNA, 120 bp, Artificial Sequence
  ENSG00000162889_4 (sequence is synthesized)
ggagctgcactggcgggcctcccagtgcccgcacatcgtacggatcgtggatgtgtacgagaatctgtacgcagggaggaagtgcctgctgattgtcatggaatgtttggacggtggaga

SEQ ID NO: 491189 - DNA, 120 bp, Artificial Sequence
  ENSG00000162889_5 (sequence is synthesized)
actctttagccgaatccaggatcgaggagaccaggcattcacagaaagagaagcatccgaaatcatgaagagcatcggtgaggccatccagtatctgcattcaatcaacattgcccatcg

SEQ ID NO: 491190 - DNA, 120 bp, Artificial Sequence
  ENSG00000162889_6 (sequence is synthesized)
ggatgtcaagcctgagaatctcttatacacctccaaaaggcccaacgccatcctgaaactcactgactttggctttgccaaggaaaccaccagccacaactctttgaccactccttgtta

SEQ ID NO: 491191 - DNA, 120 bp, Artificial Sequence
  ENSG00000162889_7 (sequence is synthesized)
tacaccgtactatgtggctccagaagtgctgggtccagagaagtatgacaagtcctgtgacatgtggtccctgggtgtcatcatgtacatcctgctgtgtgggtatccccccttctactc

SEQ ID NO: 491192 - DNA, 120 bp, Artificial Sequence
  ENSG00000162889_8 (sequence is synthesized)
ttgccatctctccgggcatgaagactcgcatccgaatgggccagtatgaatttcccaacccagaatggtcagaagtatcagaggaagtgaagatgctcattcggaatctgctgaaaacag

SEQ ID NO: 491193 - DNA, 120 bp, Artificial Sequence
  ENSG00000162889_9 (sequence is synthesized)
agcccacccagagaatgaccatcaccgagtttatgaaccacccttggatcatgcaatcaacaaaggtccctcaaaccccactgcacaccagccgggtcctgaaggaggacaaggagcggt

SEQ ID NO: 491194 - DNA, 120 bp, Artificial Sequence
  ENSG00000162889_10 (sequence is synthesized)
gggaggatgtcaaggggtgtcttcatgacaagaacagcgaccaggccacttggctgaccaggttgtgagcagaggattctgtgttcctgtccaaactcagtgctgtttcttagaatcctt

SEQ ID NO: 491195 - DNA, 120 bp, Artificial Sequence
  ENSG00000162889_11 (sequence is synthesized)
ttattccctgggtctctaatgggaccttaaagaccatctggtatcatcttctcattttgcagaagagaaactgaggcccagaggcggagggcagtctgctcaaggtcacgcagctggtga

SEQ ID NO: 491196 - DNA, 120 bp, Artificial Sequence
  ENSG00000162889_12 (sequence is synthesized)
ctggttggggcagaccggacccaggtttcctgactcctggcccaagtctcttcctcctatcctgcgggatcactggggggctctcagggaacagcagcagtgccatagccaggctctctg

SEQ ID NO: 491197 - DNA, 120 bp, Artificial Sequence
  ENSG00000162889_13 (sequence is synthesized)
ctgcccagcgctggggtgaggctgccgttgtcagcgtggaccactaaccagcccgtcttctctctctgctcccacccctgccgccctcaccctgcccttgttgtctctgtctctcacgtc

SEQ ID NO: 491198 - DNA, 120 bp, Artificial Sequence
  ENSG00000162889_14 (sequence is synthesized)
tctcttctgctgtctctcctacctgtcttctggctctctctgtacccttcctggtgctgccgtgcccccaggaggagatgaccagtgccttggccacaatgcgcgttgactacgagcaga

SEQ ID NO: 491199 - DNA, 120 bp, Artificial Sequence
  ENSG00000162889_15 (sequence is synthesized)
tcaagataaaaaagattgaagatgcatccaaccctctgctgctgaagaggcggaagaaagctcgggccctggaggctgcggctctggcccactgagccaccgcgccctcctgcccacggg

SEQ ID NO: 491200 - DNA, 120 bp, Artificial Sequence
  ENSG00000162889_16 (sequence is synthesized)
aggacaagcaataactctctacaggaatatattttttaaacgaagagacagaactgtccacatctgcctcctctcctcctcagctgcatggagcctggaactgcatcagtgactgaattc

SEQ ID NO: 491201 - DNA, 120 bp, Artificial Sequence
  ENSG00000162889_17 (sequence is synthesized)
ttttatcagtaatttgacttagagtttttacgaaacctcttttgttgtccttgccccactcctctccaccagacgccttcctctctggatactgcaaaggcttgtggtttgttagagggt

SEQ ID NO: 491202 - DNA, 120 bp, Artificial Sequence
  ENSG00000162889_18 (sequence is synthesized)
atttgtggaaactgtcatagggattgtccctgtgttgtcccatctgccctccctgtttctccacaacagcctggggttgtccccgctggctcacgcgttctgggagctcaaggccacctt

SEQ ID NO: 491203 - DNA, 120 bp, Artificial Sequence
  ENSG00000162889_19 (sequence is synthesized)
gttctgggagctcaaggccaccttggaggaggatgccacgcacttcctctctcggagccctcagacatctccagtgtgccagacaaataggagtgagtgtatgtgtgtgtgtgtgtgtgt

SEQ ID NO: 491204 - DNA, 120 bp, Artificial Sequence
  ENSG00000162889_20 (sequence is synthesized)
gcgcagatctgtgcctgggatcgtgcatttgaggggccaggggcaggcagggctgcagagggagacggccctgctggggcttaggaaccttctcccttcttgggtctgccctgcccatac

SEQ ID NO: 491205 - DNA, 120 bp, Artificial Sequence
  ENSG00000162889_21 (sequence is synthesized)
tgagcctgccaaagtgcctgggaagcccacccagattctgaaacaggccctctgtggcctgtctctattagctgggttccgggaggcagagaggagtgaccgggcactggcactgcgatc

SEQ ID NO: 491206 - DNA, 120 bp, Artificial Sequence
  ENSG00000162889_22 (sequence is synthesized)
aggaagactggacccccagcccccagggcccccctccccccacttagtgctggtcctaggtcctctgaggcactcatctactgaatgacctctctacttccccttcttgccattattaac

SEQ ID NO: 491207 - DNA, 120 bp, Artificial Sequence
  ENSG00000162889_23 (sequence is synthesized)
ccatttttgtttattttccttaaatttttagccatttctccatgggccaccgcccagctcatgtaggtgagcctgggcagcttctgttggcagagcttttgcatttcctgtgtttgtcct

SEQ ID NO: 491208 - DNA, 120 bp, Artificial Sequence
  ENSG00000162889_24 (sequence is synthesized)
gggttctggggcatcagccagctaccccttgtgggcaaaggcagggccacttttgaagtcttccctcagatttccattgtgtggcctggtgggtcagggggagtctttgcaccaaagatg

SEQ ID NO: 491209 - DNA, 120 bp, Artificial Sequence
  ENSG00000162889_25 (sequence is synthesized)
tcctgactttgcccccttgcccatcagccatttgccatcaccccaaacaactcagcttcggggccggtgaggggaggggcctcccccagcacagatgaggagcagctggggtaggctgtc

SEQ ID NO: 491210 - DNA, 120 bp, Artificial Sequence
  ENSG00000162889_26 (sequence is synthesized)
tgtgccatggccccccactcccccttcccttggagggagaggtggcaggaatacttcacctttcctctccctcaggggcaggtggtggaggggcgcccagggtcgtctttgtgtatgggg

SEQ ID NO: 491211 - DNA, 120 bp, Artificial Sequence
  ENSG00000162889_27 (sequence is synthesized)
gaaggcgctgggtgcctgcagcgcctcccttgtctcagatggtgtgtccagcactcgattgttgtaaactgttgttttgtatgagcgaaattgtctttactaaacagatttaatagttga

SEQ ID NO: 491212 - DNA, 120 bp, Artificial Sequence
  ENSG00000162889_28 (sequence is synthesized)
ggggaagagcccgtgtgtgtgtgtgtgtgtgtatgtgtgtacacgcagacacatgtatgggcctccatctcatgtgcgtggtgtaactgtgggttagcacctatgcccacgcctgcgggg

SEQ ID NO: 491213 - DNA, 120 bp, Artificial Sequence
  ENSG00000162889_29 (sequence is synthesized)
tgcgtcctgcttcattttgcctgtgtggagggctggaggcagggccaaggctgtggggctgtgcagggcctctcaagtggtacagccgtaatggtccttggggccagttgctccggcagc

SEQ ID NO: 491214 - DNA, 120 bp, Artificial Sequence
  ENSG00000162889_30 (sequence is synthesized)
ctgcctccatgcaccccctctttgaacctggtttccccatgaaaactggggaaaggagcaggccagggagagtgacccctgagctgtcactgccccctgtcccaccccacagtgaagatg

SEQ ID NO: 491215 - DNA, 120 bp, Artificial Sequence
  ENSG00000162889_31 (sequence is synthesized)
cacccagagaatgaccatcaccgagtttatgaaccacccttggatcatggctttcactcggaccccttttctctcttctcagcaatcaacaaaggtccctcaaaccccactgcacaccag

SEQ ID NO: 491216 - DNA, 120 bp, Artificial Sequence
  ENSG00000162889_32 (sequence is synthesized)
ccgggtcctgaaggaggacaaggagcggtgggaggatgtcaaggtgaggggcaccactgggtgagaggggctccaggtggggtgggcggcttgcggggagtgcccaggtgtgaggcgtgg

SEQ ID NO: 491217 - DNA, 120 bp, Artificial Sequence
  ENSG00000162889_33 (sequence is synthesized)
tgctggtaggggagagcttgattctgcctctctcatcccaggggtgtcttcatgacaagaacagcgaccaggccacttggctgaccaggttgtgagcagaggattctgtgttcctgtcca

SEQ ID NO: 491218 - DNA, 120 bp, Artificial Sequence
  ENSG00000162891_0 (sequence is synthesized)
ctttgaattcctagctcctgtggtctccagatttcaggcctaagatgaaagcctctagtcttgccttcagccttctctctgctgcgttttatctcctatggactccttccactggactga

SEQ ID NO: 491219 - DNA, 120 bp, Artificial Sequence
  ENSG00000162891_1 (sequence is synthesized)
agacactcaatttgggaagctgtgtgatcgccacaaaccttcaggaaatacgaaatggattttctgagatacggggcagtgtgcaagccaaagatggaaacattgacatcagaatcttaa

SEQ ID NO: 491220 - DNA, 120 bp, Artificial Sequence
  ENSG00000162891_2 (sequence is synthesized)
ggaggactgagtctttgcaagacacaaagcctgcgaatcgatgctgcctcctgcgccatttgctaagactctatctggacagggtatttaaaaactaccagacccctgaccattatactc

SEQ ID NO: 491221 - DNA, 120 bp, Artificial Sequence
  ENSG00000162891_3 (sequence is synthesized)
tggggaggaagcaatgaagaaatacagccagattctgagtcactttgaaaagctggaacctcaggcagcagttgtgaaggctttgggggaactagacattcttctgcaatggatggagga

SEQ ID NO: 491222 - DNA, 120 bp, Artificial Sequence
  ENSG00000162891_4 (sequence is synthesized)
gacagaataggaggaaagtgatgctgctgctaagaatattcgaggtcaagagctccagtcttcaatacctgcagaggaggcatgaccccaaaccaccatctctttactgtactagtcttg

SEQ ID NO: 491223 - DNA, 120 bp, Artificial Sequence
  ENSG00000162891_5 (sequence is synthesized)
tgctggtcacagtgtatcttatttatgcattacttgcttccttgcatgattgtctttatgcatccccaatcttaattgagaccatacttgtataagatttttgtaatatctttctgctat

SEQ ID NO: 491224 - DNA, 120 bp, Artificial Sequence
  ENSG00000162891_6 (sequence is synthesized)
gatggcgcagccacagcttctgtgagattcgatttctccccagttcccctgtgggtctgaggggaccagaagggtgagctacgttggctttctggaaggggaggctatatgcgtcaattc

SEQ ID NO: 491225 - DNA, 120 bp, Artificial Sequence
  ENSG00000162891_7 (sequence is synthesized)
cccaaaacaagttttgacatttcccctgaaatgtcattctctatctattcactgcaagtgcctgctgttccaggccttacctgctgggcactaacggcggagccaggatggggacagaat

SEQ ID NO: 491226 - DNA, 120 bp, Artificial Sequence
  ENSG00000162891_8 (sequence is synthesized)
catgaaactttaaaaaaattcacagattatatttataacctgactagagcaggtgatgtatttttatacagtaaaaaaaaaaaaccttgtaaattctagaagagtggctaggggggttat

SEQ ID NO: 491227 - DNA, 120 bp, Artificial Sequence
  ENSG00000162891_9 (sequence is synthesized)
tcatttgtattcaactaaggacatatttactcatgctgatgctctgtgagatatttgaaattgaaccaatgactacttaggatgggttgtggaataagttttgatgtggaattgcacatc

SEQ ID NO: 491228 - DNA, 120 bp, Artificial Sequence
  ENSG00000162891_10 (sequence is synthesized)
taccttacaattactgaccatccccagtagactccccagtcccataattgtgtatcttccagccaggaatcctacacggccagcatgtatttctacaaataaagttttctttgcataaca

SEQ ID NO: 491229 - DNA, 120 bp, Artificial Sequence
  ENSG00000162892_0 (sequence is synthesized)
gcttgcctgcaaacctttacttctgaaatgacttccacggctgggacgggaaccttccacccacagctatgcctctgattggtgaatggtgaaggtgcctgtctaacttttctgtaaaaa

SEQ ID NO: 491230 - DNA, 120 bp, Artificial Sequence
  ENSG00000162892_1 (sequence is synthesized)
gaaccagctgcctccaggcagccagccctcaagcatcacttacaggaccagagggacaagacatgactgtgatgaggagctgctttcgccaatttaacaccaagaagaattgaggctgct

SEQ ID NO: 491231 - DNA, 120 bp, Artificial Sequence
  ENSG00000162892_2 (sequence is synthesized)
tgggaggaaggccaggaggaacacgagactgagagatgaattttcaacagaggctgcaaagcctgtggactttagccagacccttctgccctcctttgctggcgacagcctctcaaatgc

SEQ ID NO: 491232 - DNA, 120 bp, Artificial Sequence
  ENSG00000162892_3 (sequence is synthesized)
agatggttgtgctcccttgcctgggttttaccctgcttctctggagccaggtatcaggggcccagggccaagaattccactttgggccctgccaagtgaagggggttgttccccagaaac

SEQ ID NO: 491233 - DNA, 120 bp, Artificial Sequence
  ENSG00000162892_4 (sequence is synthesized)
tgtgggaagccttctgggctgtgaaagacactatgcaagctcaggataacatcacgagtgcccggctgctgcagcaggaggttctgcagaacgtctcggatgctgagagctgttaccttg

SEQ ID NO: 491234 - DNA, 120 bp, Artificial Sequence
  ENSG00000162892_5 (sequence is synthesized)
tccacaccctgctggagttctacttgaaaactgttttcaaaaactaccacaatagaacagttgaagtcaggactctgaagtcattctctactctggccaacaactttgttctcatcgtgt

SEQ ID NO: 491235 - DNA, 120 bp, Artificial Sequence
  ENSG00000162892_6 (sequence is synthesized)
cacaactgcaacccagtcaagaaaatgagatgttttccatcagagacagtgcacacaggcggtttctgctattccggagagcattcaaacagttggacgtagaagcagctctgaccaaag

SEQ ID NO: 491236 - DNA, 120 bp, Artificial Sequence
  ENSG00000162892_7 (sequence is synthesized)
cccttggggaagtggacattcttctgacctggatgcagaaattctacaagctctgaatgtctagaccaggacctccctccccctggcactggtttgttccctgtgtcatttcaaacagtc

SEQ ID NO: 491237 - DNA, 120 bp, Artificial Sequence
  ENSG00000162892_8 (sequence is synthesized)
tggcccaggattattgtcaaagaagtcattctttaagcagcgccagtgacagtcagggaaggtgcctctggatgctgtgaagagtctacagagaagattcttgtatttattacaactcta

SEQ ID NO: 491238 - DNA, 120 bp, Artificial Sequence
  ENSG00000162892_9 (sequence is synthesized)
tttaattaatgtcagtatttcaactgaagttctatttatttgtgagactgtaagttacatgaaggcagcagaatattgtgccccatgcttctttacccctcacaatccttgccacagtgt

SEQ ID NO: 491239 - DNA, 120 bp, Artificial Sequence
  ENSG00000162892_10 (sequence is synthesized)
ggggcagtggatgggtgcttagtaagtacttaataaactgtggtgctttttttggcctgtctttggattgttaaaaaacagagagggatgcttggatgtaaaactgaacttcagagcatg

SEQ ID NO: 491240 - DNA, 120 bp, Artificial Sequence
  ENSG00000162892_11 (sequence is synthesized)
aaaatcacactgtcttctgatatctgcagggacagagcattggggtgggggtaaggtgcatctgtttgaaaagtaaacgataaaatgtggattaaagtgcccagcacaaagcagatcctc

SEQ ID NO: 491241 - DNA, 120 bp, Artificial Sequence
  ENSG00000162892_12 (sequence is synthesized)
aataaacatttcatttcccacccacactcgccagctcaccccatcatccctttcccttggtgccctccttttttttttatcctagtcattcttccctaatcttccacttgagtgtcaagc

SEQ ID NO: 491242 - DNA, 120 bp, Artificial Sequence
  ENSG00000162892_13 (sequence is synthesized)
tgaccttgctgatggtgacattgcacctggatgtactatccaatctgtgatgacattccctgctaataaaagacaacataactcaagtctggcagactttcttctctatttctggatgaa

SEQ ID NO: 491243 - DNA, 120 bp, Artificial Sequence
  ENSG00000162892_14 (sequence is synthesized)
tgcccagtgagactgtgttgtacagctagaaaaggccttcttcccaatagcaaggctgtgcatctagcctcaagctctggctgaactttgtggtcgacatcaatctaaagatacagtgtc

SEQ ID NO: 491244 - DNA, 120 bp, Artificial Sequence
  ENSG00000162892_15 (sequence is synthesized)
tgactataaccttgttccaaaaacctaggcaaagagtatatgtaggaggtgggatatcacttccatgacataagtgctattgcagagccgtggccacccaggaactcctgactgctttcc

SEQ ID NO: 491245 - DNA, 120 bp, Artificial Sequence
  ENSG00000162894_0 (sequence is synthesized)
agattgtgaagggttcctgagtaagcagcgtgtctccatccccctctctaggggctcttggatggaccttgcactctagaagggacaatggacttctggctttggccactttacttcctg

SEQ ID NO: 491246 - DNA, 120 bp, Artificial Sequence
  ENSG00000162894_1 (sequence is synthesized)
ccagtatcgggggccctgaggatcctcccagaagtaaaggtagagggggagctgggcggatcagttaccatcaagtgcccacttcctgaaatgcatgtgaggatatatctgtgccgggag

SEQ ID NO: 491247 - DNA, 120 bp, Artificial Sequence
  ENSG00000162894_2 (sequence is synthesized)
atggctggatctggaacatgtggtaccgtggtatccaccaccaacttcatcaaggcagaatacaagggccgagttactctgaagcaatacccacgcaagaatctgttcctagtggaggta

SEQ ID NO: 491248 - DNA, 120 bp, Artificial Sequence
  ENSG00000162894_3 (sequence is synthesized)
acacagctgacagaaagtgacagcggagtctatgcctgcggagcgggcatgaacacagaccggggaaagacccagaaagtcaccctgaatgtccacagtgaatacgagccatcatgggaa

SEQ ID NO: 491249 - DNA, 120 bp, Artificial Sequence
  ENSG00000162894_4 (sequence is synthesized)
gagcagccaatgcctgagactccaaaatggtttcatctgccctatttgttccagatgcctgcatatgccagttcttccaaattcgtaaccagagttaccacaccagctcaaaggggcaag

SEQ ID NO: 491250 - DNA, 120 bp, Artificial Sequence
  ENSG00000162894_5 (sequence is synthesized)
gtccctccagttcaccactcctcccccaccacccaaatcacccaccgccctcgagtgtccagagcatcttcagtagcaggtgacaagccccgaaccttcctgccatccactacagcctca

SEQ ID NO: 491251 - DNA, 120 bp, Artificial Sequence
  ENSG00000162894_6 (sequence is synthesized)
aaaatctcagctctggaggggctgctcaagccccagacgcccagctacaaccaccacaccaggctgcacaggcagagagcactggactatggctcacagtctgggagggaaggccaagga

SEQ ID NO: 491252 - DNA, 120 bp, Artificial Sequence
  ENSG00000162894_7 (sequence is synthesized)
tttcacatcctgatcccgaccatcctgggccttttcctgctggcacttctggggctggtggtgaaaagggccgttgaaaggaggaaagccctctccaggcgggcccgccgactggccgtg

SEQ ID NO: 491253 - DNA, 120 bp, Artificial Sequence
  ENSG00000162894_8 (sequence is synthesized)
aggatgcgcgccctggagagctcccagaggccccgcgggtcgccgcgaccgcgctcccaaaacaacatctacagcgcctgcccgcggcgcgctcgtggagcggacgctgcaggcacaggg

SEQ ID NO: 491254 - DNA, 120 bp, Artificial Sequence
  ENSG00000162894_9 (sequence is synthesized)
gaggcccccgttcccggccccggagcgccgttgccccccgccccgctgcaggtgtctgaatctccctggctccatgccccatctctgaagaccagctgtgaatacgtgagcctctaccac

SEQ ID NO: 491255 - DNA, 120 bp, Artificial Sequence
  ENSG00000162894_10 (sequence is synthesized)
cagcctgccgccatgatggaggacagtgattcagatgactacatcaatgttcctgcctgacaactccccagctatcccccaaccccaggctcggactgtggtgccaaggagtctcatcta

SEQ ID NO: 491256 - DNA, 120 bp, Artificial Sequence
  ENSG00000162894_11 (sequence is synthesized)
tctgctgatgtccaatacctgcttcatgtgttctcagagccctcatcacttcccatgccccatctcgactcccatccccatctatctgtgccctgagcatggctctgcccccaggtcgtc

SEQ ID NO: 491257 - DNA, 120 bp, Artificial Sequence
  ENSG00000162894_12 (sequence is synthesized)
tccaagccgtcgaacagactgtgggatttgcagagtgtttcttccatgtctttgaccacagggttgttgctgcccaggctctagatcacatggcatcaggctggggcagaggcatagcta

SEQ ID NO: 491258 - DNA, 120 bp, Artificial Sequence
  ENSG00000162894_13 (sequence is synthesized)
ttgtctcgggcatccttcccagggttgggtcttacacaaatagaaggctcttgctctgagttatgtgacatgcctcagccccatggactaagcaggggtctggtataaaaacactcctgg

SEQ ID NO: 491259 - DNA, 120 bp, Artificial Sequence
  ENSG00000162894_14 (sequence is synthesized)
aaacgcctttgccctgatccaaatgttagcacttgctagtgaacgtctacttatctcaagttctatgctaaaggcaatttatcttgatgtgatgataaaccaaacttattagcaagatat

SEQ ID NO: 491260 - DNA, 120 bp, Artificial Sequence
  ENSG00000162894_15 (sequence is synthesized)
gcatatatatccataaattctctttactctgtctccatcacttgatgcacataagtgccctgacctcagcatctcccctctaaaaaaaaaaaaaaaaaagtatctctttatctttcttcc

SEQ ID NO: 491261 - DNA, 120 bp, Artificial Sequence
  ENSG00000162894_16 (sequence is synthesized)
atagcctgacactgatatttgtgcacttaccttaactttggtctattttattcatccaaaaccattacatttcttggttttcacaaatgttccccatttcttagccagttccagacaatg

SEQ ID NO: 491262 - DNA, 120 bp, Artificial Sequence
  ENSG00000162894_17 (sequence is synthesized)
tatagcaagcaggggaaggaaagcagtcaggagttcctgggtggccacggctctgcaatagcacttatgtcatggaagtgatatcccacctcctacatatactctttgcctaggtttttg

SEQ ID NO: 491263 - DNA, 120 bp, Artificial Sequence
  ENSG00000162894_18 (sequence is synthesized)
gaacaaggttatagtcagacactgtatctttagattgatgtcgaccacaaagttcagccagagcttgaggctagatgcacagccttgctattgggaagaaggccttttctagctgtacaa

SEQ ID NO: 491264 - DNA, 120 bp, Artificial Sequence
  ENSG00000162894_19 (sequence is synthesized)
cacagtctcactgggcattcatccagaaatagagaagaaagtctgccagacttgagttatgttgtcttttattagcagggaatgtcatcacagattggatagtacatccaggtgcaatgt

SEQ ID NO: 491265 - DNA, 120 bp, Artificial Sequence
  ENSG00000162894_20 (sequence is synthesized)
caccatcagcaaggtcagcttgacactcaagtggaagattagggaagaatgactaggataaaaaaaaaaggagggcaccaagggaaagggatgatggggtgagctggcgagtgtgggtgg

SEQ ID NO: 491266 - DNA, 120 bp, Artificial Sequence
  ENSG00000162894_21 (sequence is synthesized)
gaaatgaaatgtttattgaggatctgctttgtgctgggcactttaatccacattttatcgtttacttttcaaacagatgcaccttacccccaccccaatgctctgtccctgcagatatca

SEQ ID NO: 491267 - DNA, 120 bp, Artificial Sequence
  ENSG00000162894_22 (sequence is synthesized)
gaagacagtgtgattttcatgctctgaagttcagttttacatccaagcatccctctctgttttttaacaatccaaagacaggccaaaaaaagcaccacagtttattaagtacttactaag

SEQ ID NO: 491268 - DNA, 120 bp, Artificial Sequence
  ENSG00000162894_23 (sequence is synthesized)
cacccatccactgccccacactgtggcaaggattgtgaggggtaaagaagcatggggcacaatattctgctgccttcatgtaacttacagtctcacaaataaatagaacttcagttgaaa

SEQ ID NO: 491269 - DNA, 120 bp, Artificial Sequence
  ENSG00000162894_24 (sequence is synthesized)
cctccgctgattggaggctcagactacccagaaaatgtttcacttgggaagattggaacagccatctaactgtaacagtctcctagactcttacactgttgccatataagccacataatg

SEQ ID NO: 491270 - DNA, 120 bp, Artificial Sequence
  ENSG00000162894_25 (sequence is synthesized)
agagaacatgtgacaaatctgctgtgtgggggcgagcagggagtggctgacacaaccactgtggagcccgggtctgtcaggcacatccccccagaaacagtgggctcttggatggacctt

SEQ ID NO: 491271 - DNA, 120 bp, Artificial Sequence
  ENSG00000162896_0 (sequence is synthesized)
gagcagagtttcagttttggcagcagcgtccagtgccctgccagtagctcctagagaggcaggggttaccaactggccagcaggctgtgtccctgaagtcagatcaacgggagagaagga

SEQ ID NO: 491272 - DNA, 120 bp, Artificial Sequence
  ENSG00000162896_1 (sequence is synthesized)
agtggctaaaacattgcacaggagaagtcggcctgagtggtgcggcgctcgggacccaccagcaatgctgctcttcgtgctcacctgcctgctggcggtcttcccagccatctccacgaa

SEQ ID NO: 491273 - DNA, 120 bp, Artificial Sequence
  ENSG00000162896_2 (sequence is synthesized)
gagtcccatatttggtcccgaggaggtgaatagtgtggaaggtaactcagtgtccatcacgtgctactacccacccacctctgtcaaccggcacacccggaagtactggtgccggcaggg

SEQ ID NO: 491274 - DNA, 120 bp, Artificial Sequence
  ENSG00000162896_3 (sequence is synthesized)
agctagaggtggctgcataaccctcatctcctcggagggctacgtctccagcaaatatgcaggcagggctaacctcaccaacttcccggagaacggcacatttgtggtgaacattgccca

SEQ ID NO: 491275 - DNA, 120 bp, Artificial Sequence
  ENSG00000162896_4 (sequence is synthesized)
gctgagccaggatgactccgggcgctacaagtgtggcctgggcatcaatagccgaggcctgtcctttgatgtcagcctggaggtcagccagggtcctgggctcctaaatgacactaaagt

SEQ ID NO: 491276 - DNA, 120 bp, Artificial Sequence
  ENSG00000162896_5 (sequence is synthesized)
ctacacagtggacctgggcagaacggtgaccatcaactgccctttcaagactgagaatgctcaaaagaggaagtccttgtacaagcagataggcctgtaccctgtgctggtcatcgactc

SEQ ID NO: 491277 - DNA, 120 bp, Artificial Sequence
  ENSG00000162896_6 (sequence is synthesized)
cagtggttatgtaaatcccaactatacaggaagaatacgccttgatattcagggtactggccagttactgttcagcgttgtcatcaaccaactcaggctcagcgatgctgggcagtatct

SEQ ID NO: 491278 - DNA, 120 bp, Artificial Sequence
  ENSG00000162896_7 (sequence is synthesized)
ctgccaggctggggatgattccaatagtaataagaagaatgctgacctccaagtgctaaagcccgagcccgagctggtttatgaagacctgaggggctcagtgaccttccactgtgccct

SEQ ID NO: 491279 - DNA, 120 bp, Artificial Sequence
  ENSG00000162896_8 (sequence is synthesized)
gggccctgaggtggcaaacgtggccaaatttctgtgccgacagagcagtggggaaaactgtgacgtggtcgtcaacaccctggggaagagggccccagcctttgagggcaggatcctgct

SEQ ID NO: 491280 - DNA, 120 bp, Artificial Sequence
  ENSG00000162896_9 (sequence is synthesized)
caacccccaggacaaggatggctcattcagtgtggtgatcacaggcctgaggaaggaggatgcagggcgctacctgtgtggagcccattcggatggtcagctgcaggaaggctcgcctat

SEQ ID NO: 491281 - DNA, 120 bp, Artificial Sequence
  ENSG00000162896_10 (sequence is synthesized)
ccaggcctggcaactcttcgtcaatgaggagtccacgattccccgcagccccactgtggtgaagggggtggcaggaggctctgtggccgtgctctgcccctacaaccgtaaggaaagcaa

SEQ ID NO: 491282 - DNA, 120 bp, Artificial Sequence
  ENSG00000162896_11 (sequence is synthesized)
aagcatcaagtactggtgtctctgggaaggggcccagaatggccgctgccccctgctggtggacagcgaggggtgggttaaggcccagtacgagggccgcctctccctgctggaggagcc

SEQ ID NO: 491283 - DNA, 120 bp, Artificial Sequence
  ENSG00000162896_12 (sequence is synthesized)
aggcaacggcaccttcactgtcatcctcaaccagctcaccagccgggacgccggcttctactggtgtctgaccaacggcgatactctctggaggaccaccgtggagatcaagattatcga

SEQ ID NO: 491284 - DNA, 120 bp, Artificial Sequence
  ENSG00000162896_13 (sequence is synthesized)
aggagaaccaaacctcaaggtaccagggaatgtcacggctgtgctgggagagactctcaaggtcccctgtcactttccatgcaaattctcctcgtacgagaaatactggtgcaagtggaa

SEQ ID NO: 491285 - DNA, 120 bp, Artificial Sequence
  ENSG00000162896_14 (sequence is synthesized)
taacacgggctgccaggccctgcccagccaagacgaaggccccagcaaggccttcgtgaactgtgacgagaacagccggcttgtctccctgaccctgaacctggtgaccagggctgatga

SEQ ID NO: 491286 - DNA, 120 bp, Artificial Sequence
  ENSG00000162896_15 (sequence is synthesized)
gggctggtactggtgtggagtgaagcagggccacttctatggagagactgcagccgtctatgtggcagttgaagagaggaaggcagcggggtcccgcgatgtcagcctagcgaaggcaga

SEQ ID NO: 491287 - DNA, 120 bp, Artificial Sequence
  ENSG00000162896_16 (sequence is synthesized)
cgctgctcctgatgagaaggtgctagactctggttttcgggagattgagaacaaagccattcaggatcccaggctttttgcagaggaaaaggcggtggcagatacaagagatcaagccga

SEQ ID NO: 491288 - DNA, 120 bp, Artificial Sequence
  ENSG00000162896_17 (sequence is synthesized)
ggtgcccctgggcctggtgctggcagtgggagccgtggctgtgggggtggccagagcccggcacaggaagaacgtcgaccgagtttcaatcagaagctacaggacagacattagcatgtc

SEQ ID NO: 491289 - DNA, 120 bp, Artificial Sequence
  ENSG00000162896_18 (sequence is synthesized)
agacttcgagaactccagggaatttggagccaatgacaacatgggagcctcttcgatcactcaggagacatccctcggaggaaaagaagagtttgttgccaccactgagagcaccacaga

SEQ ID NO: 491290 - DNA, 120 bp, Artificial Sequence
  ENSG00000162896_19 (sequence is synthesized)
gaccaaagaacccaagaaggcaaaaaggtcatccaaggaggaagccgagatggcctacaaagacttcctgctccagtccagcaccgtggccgccgaggcccaggacggcccccaggaagc

SEQ ID NO: 491291 - DNA, 120 bp, Artificial Sequence
  ENSG00000162896_20 (sequence is synthesized)
ctagacggtgtcgccgcctgctccctgcacccatgacaatcaccttcagaatcatgtcgatcctggggccctcagctcctggggaccccactccctgctctaacacctgcctaggttttt

SEQ ID NO: 491292 - DNA, 120 bp, Artificial Sequence
  ENSG00000162896_21 (sequence is synthesized)
cctactgtcctcagaggcgtgctggtcccctcctcagtgacatcaaagcctggcctaattgttcctattggggatgagggtggcatgaggaggtcccacttgcaacttctttctgttgag

SEQ ID NO: 491293 - DNA, 120 bp, Artificial Sequence
  ENSG00000162896_22 (sequence is synthesized)
agaacctcaggtacggagaagaatagaggtcctcatgggtcccttgaaggaagagggaccagggtgggagagctgattgcagaaaggagagacgtgcagcgcccctctgcacccttatca

SEQ ID NO: 491294 - DNA, 120 bp, Artificial Sequence
  ENSG00000162896_23 (sequence is synthesized)
tgggatgtcaacagaatttttccctccactccatccctccctcccgtccttcccctcttcttctttccttccatcaaaagatgtatttgaattcatactagaattcaggtgctttgctag

SEQ ID NO: 491295 - DNA, 120 bp, Artificial Sequence
  ENSG00000162896_24 (sequence is synthesized)
atgctgtgacaggtatgccaccaacactgctcacagcctttctgaggacaccagtgaaagaagccacagctcttcttggcgtatttatactcactgagtcttaacttttcaccaggggtg

SEQ ID NO: 491296 - DNA, 120 bp, Artificial Sequence
  ENSG00000162896_25 (sequence is synthesized)
ctcacctctgcccctattgggagaggtcataaaatgtctcgagtcctaaggccttaggggtcatgtatgatgagcatacacacaggtaattataaacccacattcttaccatttcacaca

SEQ ID NO: 491297 - DNA, 89 bp, Artificial Sequence
  ENSG00000162896_26 (sequence is synthesized)
cacaggtaattataaacccacattcttaccatttcacacataagaaaattgaggtttggaagagtgaagcgtttttctcactgtcgccc

SEQ ID NO: 491298 - DNA, 62 bp, Artificial Sequence
  ENSG00000162896_27 (sequence is synthesized)
tttttttcttttcttttttttgagacaaagtctcactgtgtcacccagactggaatgcagtg

SEQ ID NO: 491299 - DNA, 120 bp, Artificial Sequence
  ENSG00000162896_28 (sequence is synthesized)
tttttttgagacaaagtctcactgtgtcacccagactggaatgcagtgacacaatctcggctcactgaaacctctgccttccaggttcaagctattctcatgcctcagcctctcaagtag

SEQ ID NO: 491300 - DNA, 120 bp, Artificial Sequence
  ENSG00000162896_29 (sequence is synthesized)
tcagcttctcaaagtactgggattatataggcatgagccactgagcctggccctgaagcgtttttctcaaaggccctcagtgagataaattagatttggcatctcctgtcctgggccagg

SEQ ID NO: 491301 - DNA, 120 bp, Artificial Sequence
  ENSG00000162896_30 (sequence is synthesized)
gatctctctacaagagcccctgcccctctgttggaggcacagttttagaataaggaggaggagggagaagagaaaatgtaaaggagggagatctttcccaggccgcaccatttctgtcac

SEQ ID NO: 491302 - DNA, 120 bp, Artificial Sequence
  ENSG00000162896_31 (sequence is synthesized)
tcacatggacccaagataaaagaatggccaaaccctcacaacccctgatgtttgaagagttccaagttgaagggaaacaaagaagtgtttgatggtgccagagaggggctgctctccaga

SEQ ID NO: 491303 - DNA, 120 bp, Artificial Sequence
  ENSG00000162896_32 (sequence is synthesized)
aagctaaaatttaatttcttttttcctctgagttctgtacttcaaccagcctacaagctggcacttgctaacaaatcagaaatatgacaattaatgattaaagactgtgattgccaccaa

SEQ ID NO: 491304 - DNA, 120 bp, Artificial Sequence
  ENSG00000162897_0 (sequence is synthesized)
agctggagggcaccagctgccagccaaatggcaggggaattcctctcctgaattttgaattttccctgccctcctgcccaagttgttgcatcacttgtccgggagatgcctgaatgggct

SEQ ID NO: 491305 - DNA, 120 bp, Artificial Sequence
  ENSG00000162897_1 (sequence is synthesized)
ggtaagctggggcaccctaaatagtctgagacccctgaaggggacacaagaggaggaaggatatggatcagtgttttcttttttgaagctactgttaccactcctggaaaagttcttcag

SEQ ID NO: 491306 - DNA, 120 bp, Artificial Sequence
  ENSG00000162897_2 (sequence is synthesized)
gaataagtgacagtaagaatgacaagggattaggactggcttcctcttataaataataaaatccaaagagaagtgacttgaggtgagtggcagagctacgccttgcaccccgaccttccg

SEQ ID NO: 491307 - DNA, 120 bp, Artificial Sequence
  ENSG00000162897_3 (sequence is synthesized)
ttgctagctccagctgctttccaaaataccaccttgacttctcagtctccaggtttaaaggagagcaactagaagtcgtccaaacacctgcatctcataaggagaagaaaagtccacctg

SEQ ID NO: 491308 - DNA, 120 bp, Artificial Sequence
  ENSG00000162897_4 (sequence is synthesized)
gatcttgtttctggactgagatggatggagaggccacagtgaagcctggagaacaaaaggaagtggtgaggagaggaagagaagtggactactccaggctcattgctggcactttaccac

SEQ ID NO: 491309 - DNA, 120 bp, Artificial Sequence
  ENSG00000162897_5 (sequence is synthesized)
aatctcacgtcaccagcaggagggcgggatggaaaatgcccctcttcctcatactgtgcctgctacaaggttcttctttcgcccttccacaaaaaagaccccatccgagatggctgtggg

SEQ ID NO: 491310 - DNA, 120 bp, Artificial Sequence
  ENSG00000162897_6 (sequence is synthesized)
agggctctctcccctccaggacccatctccgggccatgggaacactcaggccttcctcgcccctctgctggcgggaggagagctcctttgcagctccaaattcattgaagggctcaaggc

SEQ ID NO: 491311 - DNA, 120 bp, Artificial Sequence
  ENSG00000162897_7 (sequence is synthesized)
tggtgtcaggggagcctggaggagctgtcaccatccagtgccattatgccccctcatctgtcaacaggcaccagaggaagtactggtgccgtctggggcccccaagatggatctgccaga

SEQ ID NO: 491312 - DNA, 120 bp, Artificial Sequence
  ENSG00000162897_8 (sequence is synthesized)
ctttccacagagaggcttgtttgtggtgaggctgtcccaactgtccccggatgacatcggatgctacctctgcggcattggaagtgaaaacaacatgctgttcttaagcatgaatctgac

SEQ ID NO: 491313 - DNA, 120 bp, Artificial Sequence
  ENSG00000162897_9 (sequence is synthesized)
catctctgcagtacttttccagaagatgaaagcagctctcggaccctggctcctgtctctaccatgctggccctgtttatgcttatggctctggttctattgcaaaggaagctctggaga

SEQ ID NO: 491314 - DNA, 120 bp, Artificial Sequence
  ENSG00000162897_10 (sequence is synthesized)
aggaggacctctcaggaggcagaaagggtcaccttaattcagatgacacattttctggaagtgaacccccaagcagaccagctgccccatgtggaaagaaagatgctccaggatgactct

SEQ ID NO: 491315 - DNA, 120 bp, Artificial Sequence
  ENSG00000162897_11 (sequence is synthesized)
cttcctgctggggccagcctgactgccccagagagaaatccaggaccctgagggacagagagatgaactgctcagttaccatgggagaaggaccaagatcaaaggccttcaggaccccag

SEQ ID NO: 491316 - DNA, 120 bp, Artificial Sequence
  ENSG00000162897_12 (sequence is synthesized)
cctctttccatcatccttcctccacctgtgggaagagaagctgatgcagccggtgctccacccatggaagaaaggctggctgtccttgggcccaagaaagtcaagcattatccacgtcca

SEQ ID NO: 491317 - DNA, 120 bp, Artificial Sequence
  ENSG00000162897_13 (sequence is synthesized)
aaggtgacaagatgactcaaaggagacttcaagaacagtgtatgaaacactggaagaggtcacctaggaaaagcatgaaatttccattcctgaatgtttgaaaatagaagaggcttccaa

SEQ ID NO: 491318 - DNA, 120 bp, Artificial Sequence
  ENSG00000162897_14 (sequence is synthesized)
tcagtgtggaaagtgacaaatcccctatcaacactcccagcccttgctgggggctccttttctgactactgttagcactcagcctcccattcacatgtattatatttaagtgtaccagcc

SEQ ID NO: 491319 - DNA, 120 bp, Artificial Sequence
  ENSG00000162897_15 (sequence is synthesized)
ttgccttctcaagtagattctaagctcctttaaggcagtaattgcattttatctgtctcatgatgcccccagagaacttccaactcagtaggaccccaataaatacctgtgtctgattga

SEQ ID NO: 491320 - DNA, 120 bp, Artificial Sequence
  ENSG00000162897_16 (sequence is synthesized)
ccccaggaaccacccagaccttaggacaggggacagcatgggacacagttgcttccactccaggaaccagcaagactacagcttcagctgagggaagacgaaccccaggagcaaccaggc

SEQ ID NO: 491321 - DNA, 120 bp, Artificial Sequence
  ENSG00000162897_17 (sequence is synthesized)
acaacagaaggtgtttgggagggcaccagaagctcggtgacaaacagggctagagccagcaaggacaggagggagatgacaactaccaaggctgataggccaagggaggacatagagggg

SEQ ID NO: 491322 - DNA, 120 bp, Artificial Sequence
  ENSG00000162897_18 (sequence is synthesized)
gtcaggatagctcttgatgcagccaaaaaggtcctaggaaccattgggccaccagctctggtctcagaaactttggcctgggaaatcctcccacaagcaacgccagtttctaagcaacaa

SEQ ID NO: 491323 - DNA, 120 bp, Artificial Sequence
  ENSG00000162897_19 (sequence is synthesized)
tctcagggttccattggagaaacaactccagctgcaggcatgtggaccttgggaactccagctgcagatgtgtggatcttgggaactccagctgcagatgtgtggaccagcatggaggca

SEQ ID NO: 491324 - DNA, 120 bp, Artificial Sequence
  ENSG00000162897_20 (sequence is synthesized)
gcatctggggaaggaagcgctgcaggggacctagatgctgccactggagacagaggtccccaagcaacactgagccagaccccggcagtaggaccctggggaccccctggcaaggagtcc

SEQ ID NO: 491325 - DNA, 120 bp, Artificial Sequence
  ENSG00000162897_21 (sequence is synthesized)
ctggagaacaaaagcctccaatcaaagctgataactccctggaaacattttatctcatactcctgcttcctcattgccccacggagccggcttttctccctgaagcccagagattgctgc

SEQ ID NO: 491326 - DNA, 120 bp, Artificial Sequence
  ENSG00000162897_22 (sequence is synthesized)
ggcccctctccctctgctcacttctctccctttgtacccacaagacagtgacatacacatcggatgccctccctcacccaaggggccttgctgtgagaacgctccctgagtatttccatg

SEQ ID NO: 491327 - DNA, 120 bp, Artificial Sequence
  ENSG00000162897_23 (sequence is synthesized)
tcaagtgatatctaaatgatagaaagacaatatttaggctggaaccttcattaggactttctgtttttaaagataaagaataggcgctccggagagagggggtgatgcactgaagccaca

SEQ ID NO: 491328 - DNA, 120 bp, Artificial Sequence
  ENSG00000162897_24 (sequence is synthesized)
aggaaaggttgtggcagagcccagtgctgaggctggagtcgcttgctcccacctagtcctctttctcactgggaggcatcgcagggcccacacacagatgggtggaagagggaaaaggat

SEQ ID NO: 491329 - DNA, 120 bp, Artificial Sequence
  ENSG00000162897_25 (sequence is synthesized)
tcaggcttggaagcctgaagacagagattctagccccaagctctgacactaaccagccatgggaaccagggctgcccatttgctttggcctcagctccccaatctgtaaagtaaggatgt

SEQ ID NO: 491330 - DNA, 120 bp, Artificial Sequence
  ENSG00000162909_0 (sequence is synthesized)
cgccgggccctggccgcgccccagccgagcgcagcgcggagtcgccccgacctttctctgcgcagtacggccgccgggaccgcagcatggcgggcatcgcggccaagctggcgaaggacc

SEQ ID NO: 491331 - DNA, 120 bp, Artificial Sequence
  ENSG00000162909_1 (sequence is synthesized)
aagctggcgaaggaccgggaggcggccgaggggctgggctcccacgacagggccatcaagtacctcaaccaggactacgaggcgctgcggaacgagtgcctggaggccgggacgctcttc

SEQ ID NO: 491332 - DNA, 120 bp, Artificial Sequence
  ENSG00000162909_2 (sequence is synthesized)
caggacccgtccttcccggccatcccctcggccctgggcttcaaggagttggggccctactccagcaaaacccggggcatcgagtggaagcgccccacggagatctgcgctgacccccag

SEQ ID NO: 491333 - DNA, 120 bp, Artificial Sequence
  ENSG00000162909_3 (sequence is synthesized)
tttatcattggaggagccacccgcacagacatctgccaaggagccctgggtgactgctggctgctggcagccattgcctccctcaccttgaatgaagaaatcctggctcgagtcgtcccc

SEQ ID NO: 491334 - DNA, 120 bp, Artificial Sequence
  ENSG00000162909_4 (sequence is synthesized)
ctaaaccagagcttccaggaaaactatgcagggatctttcacttccagttctggcaatacggcgagtgggtggaggtggtggtggatgacaggctgcccaccaaggacggggagctgctc

SEQ ID NO: 491335 - DNA, 120 bp, Artificial Sequence
  ENSG00000162909_5 (sequence is synthesized)
tttgtgcattcagccgaagggagcgagttctggagcgccctgctggagaaggcatacgccaagatcaacggatgctatgaagcgctatcagggggtgccaccactgagggcttcgaagac

SEQ ID NO: 491336 - DNA, 120 bp, Artificial Sequence
  ENSG00000162909_6 (sequence is synthesized)
ttcaccggaggcattgctgagtggtatgagttgaagaagccccctcccaacctgttcaagatcatccagaaagctctgcaaaaaggctctctccttggctgctccatcgacatcaccagc

SEQ ID NO: 491337 - DNA, 120 bp, Artificial Sequence
  ENSG00000162909_7 (sequence is synthesized)
gccgcggactcggaggccatcacgtttcagaagctggtgaaggggcacgcgtactcggtcaccggagccgaggaggttgaaagtaacggaagcctacagaaactgatccgcatccgaaat

SEQ ID NO: 491338 - DNA, 120 bp, Artificial Sequence
  ENSG00000162909_8 (sequence is synthesized)
ccctggggagaagtggagtggacagggcggtggaatgacaactgcccaagctggaacactatagacccagaggagagggaaaggctgaccagacggcatgaagatggagaattctggatg

SEQ ID NO: 491339 - DNA, 120 bp, Artificial Sequence
  ENSG00000162909_9 (sequence is synthesized)
tctttcagtgacttcctgaggcactattcccgcctggagatctgtaacctgaccccagacactctcaccagcgatacctacaagaagtggaaactcaccaaaatggatgggaactggagg

SEQ ID NO: 491340 - DNA, 120 bp, Artificial Sequence
  ENSG00000162909_10 (sequence is synthesized)
cggggctccaccgcgggaggttgcaggaactacccgaacacattctggatgaaccctcagtacctgatcaagctggaggaggaggatgaggacgaggaggatggggagagcggctgcacc

SEQ ID NO: 491341 - DNA, 120 bp, Artificial Sequence
  ENSG00000162909_11 (sequence is synthesized)
ttcctggtggggctcattcagaagcaccgacggcggcagaggaagatgggcgaggacatgcacaccatcggctttggcatctatgaggttccagaggagttaagtgggcagaccaacatc

SEQ ID NO: 491342 - DNA, 120 bp, Artificial Sequence
  ENSG00000162909_12 (sequence is synthesized)
cacctcagcaaaaacttcttcctgacgaatcgcgccagggagcgctcagacaccttcatcaacctccgggaggtgctcaaccgcttcaagctgccgccaggagagtacattctcgtgcct

SEQ ID NO: 491343 - DNA, 120 bp, Artificial Sequence
  ENSG00000162909_13 (sequence is synthesized)
tccaccttcgaacccaacaaggatggggatttctgcatccgggtcttttctgaaaagaaagctgactaccaagctgtcgatgatgaaatcgaggccaatcttgaagagttcgacatcagc

SEQ ID NO: 491344 - DNA, 120 bp, Artificial Sequence
  ENSG00000162909_14 (sequence is synthesized)
gacattgatgatggattcaggagactgtttgcccagttggcaggagaggatgcggagatctctgcctttgagctgcagaccatcctgagaagggttctagcaaagcgccaagatatcaag

SEQ ID NO: 491345 - DNA, 120 bp, Artificial Sequence
  ENSG00000162909_15 (sequence is synthesized)
tcagatggcttcagcatcgagacatgcaaaattatggttgacatgctagattcggacgggagtggcaagctggggctgaaggagttctacattctctggacgaagattcaaaaataccaa

SEQ ID NO: 491346 - DNA, 120 bp, Artificial Sequence
  ENSG00000162909_16 (sequence is synthesized)
aaaatttaccgagaaatcgacgttgacaggtctggtaccatgaattcctatgaaatgcggaaggcattagaagaagcaggtttcaagatgccctgtcaactccaccaagtcatcgttgct

SEQ ID NO: 491347 - DNA, 120 bp, Artificial Sequence
  ENSG00000162909_17 (sequence is synthesized)
cggtttgcagatgaccagctcatcatcgattttgataattttgttcggtgtttggttcggctggaaacgctattcaagatatttaagcagctggatcccgagaatactggaacaatagag

SEQ ID NO: 491348 - DNA, 120 bp, Artificial Sequence
  ENSG00000162909_18 (sequence is synthesized)
ctcgaccttatctcttggctctgtttctcagtactttgaagttataactaatctgcctgaagacttctcatgatggaaaatcagccaaggactaagcttccatagaaatacactttgtat

SEQ ID NO: 491349 - DNA, 120 bp, Artificial Sequence
  ENSG00000162909_19 (sequence is synthesized)
ctggacctcaaaattatgggaacatttacttaaacggatgatcatagctgaaaataatgatactgtcaatttgagatagcagaagtttcacacatcaaagtaaaagatttgcatatcatt

SEQ ID NO: 491350 - DNA, 120 bp, Artificial Sequence
  ENSG00000162909_20 (sequence is synthesized)
atactaaatgcaaatgagtcgcttaacccttgacaaggtcaaagaaagctttaaatctgtaaatagtatacactttttacttttacacactttcctgttcatagcaatattaaatcagga

SEQ ID NO: 491351 - DNA, 120 bp, Artificial Sequence
  ENSG00000162909_21 (sequence is synthesized)
aaaaaaaatgcagggaggtatttaacagctgagcaaaaacattgagtcgctctcaaaggacacgaggcccttggcagggaatatttaaagcaacttcaagtttaaaatgcagctgttgat

SEQ ID NO: 491352 - DNA, 120 bp, Artificial Sequence
  ENSG00000162909_22 (sequence is synthesized)
tctaccaaacaacagtccaagattaccatttcccatgagccaactgggaaacatggtatatcatgaagtaatcttgtcaaggcatctggagagtccaggagagaagactcacctctgtcg

SEQ ID NO: 491353 - DNA, 120 bp, Artificial Sequence
  ENSG00000162909_23 (sequence is synthesized)
cttgggttaaacaagagacaggttttgtagaatattgattggtaatagtaaatcgttctccttacaatcaagttcttgaccctattcggccttatacatctggtcttacaaagaccaaag

SEQ ID NO: 491354 - DNA, 120 bp, Artificial Sequence
  ENSG00000162909_24 (sequence is synthesized)
ggatcctgcgcttgatcaactgaaccagtatgccaaaaccaggcatccaatttgtaaaccaattatgataaaggacaaaataagctgtttgccacctcaaaactttatgaacttcaccac

SEQ ID NO: 491355 - DNA, 120 bp, Artificial Sequence
  ENSG00000162909_25 (sequence is synthesized)
cactagtgtctgtccatggagttagaggggacatcacttagaagttcttatagaaaggacacaagtttgtttcctggctttaccttgggaaaatgctagcaacattatagaaattttgcc

SEQ ID NO: 491356 - DNA, 120 bp, Artificial Sequence
  ENSG00000162909_26 (sequence is synthesized)
ttgttgccttatcttcttccaaatgtactgttaaataaaaataaagggttaccccatgcaatcacaccatgccatgttttccttcctggagggcagccccacaggacggtttatgagcac

SEQ ID NO: 491357 - DNA, 120 bp, Artificial Sequence
  ENSG00000162909_27 (sequence is synthesized)
acaattatagcttgtttctactttaacaaggtatgctgcctctgtaaattcatgtattcaaaggaaaagacaccttgcctataattaaaatgtggaactataaaattttttaaaatccaa

SEQ ID NO: 491358 - DNA, 120 bp, Artificial Sequence
  ENSG00000162909_28 (sequence is synthesized)
ttaaattttgcgagagcatttgggcccacagtcaccgcttgctgaagcagatgggatgcctggtccaaggtcacgattattaaagtagacacacggggcactttgacccacctgtagtac

SEQ ID NO: 491359 - DNA, 120 bp, Artificial Sequence
  ENSG00000162909_29 (sequence is synthesized)
atttctttcacagcaaggcagtgcaaccggtagcacatcgggctcttttagatgctgctccagccttggtccggtggatcatgcttggtttagaagctgggttgtctttctcctgccccc

SEQ ID NO: 491360 - DNA, 120 bp, Artificial Sequence
  ENSG00000162909_30 (sequence is synthesized)
agtcctgtctttgcttttatagtgcatcatacaccacgtagaaccgagccaggttcctgccatgtggacgctgttcctgcctgagagtctcttagaggaaggctgggaacactgtggaaa

SEQ ID NO: 491361 - DNA, 120 bp, Artificial Sequence
  ENSG00000162909_31 (sequence is synthesized)
gactgggcatctctgcaggcggagctgaatggatgtgaaacccctgtgggcatgtgcttccgagttcctcagcaggcatttgtgttttttggtagaaagtttgctttttgtttttttttt

SEQ ID NO: 491362 - DNA, 90 bp, Artificial Sequence
  ENSG00000162909_32 (sequence is synthesized)
tgtgttttttggtagaaagtttgctttttgttttttttttttttaagacaaggtctcattctgtcacccaggctacgtccttgaactctc

SEQ ID NO: 491363 - DNA, 78 bp, Artificial Sequence
  ENSG00000162909_33 (sequence is synthesized)
tcacgtgattgccgccacccctggctaatatttttattttttgcagagacaggggtctcactacattgcccaggctgg

SEQ ID NO: 491364 - DNA, 120 bp, Artificial Sequence
  ENSG00000162909_34 (sequence is synthesized)
tggtattacaggcgtgagccaccacacctaacaaaagtttgctttttatctaaaatgacccaggcattgtcactgtactgctatttttttaaaaaaattttgttgttttgttgttgttgt

SEQ ID NO: 491365 - DNA, 120 bp, Artificial Sequence
  ENSG00000162909_35 (sequence is synthesized)
tgttgttgttgtcgtcgttatatagatgagggcttcctgtgttgcccaggctggtttctgacgcctggcctcgcctccttatacaccaggacagcaggactgagccaccacactacccaa

SEQ ID NO: 491366 - DNA, 86 bp, Artificial Sequence
  ENSG00000162909_36 (sequence is synthesized)
caaaggaacgaatttccaggatgttcgactatgtggagaaaacaaaaaaaaagcaaagaaaaaaatatttttaaagaaagaaagaa

SEQ ID NO: 491367 - DNA, 120 bp, Artificial Sequence
  ENSG00000162909_37 (sequence is synthesized)
aagtgattcttccacggccaaactagaggcacagagctggaaaaacttcatccccactcagcacatactagggaggtaacttgccagctttgctttgggtcatagttcttacagctaact

SEQ ID NO: 491368 - DNA, 120 bp, Artificial Sequence
  ENSG00000162909_38 (sequence is synthesized)
gctttaaagagctcttggtctgtcggggccaggcctgtaaccggttgtaagatcccacaatgcacttttacttgcagttgttttccaaccacctattctcaagtccaaaatgcacgcctg

SEQ ID NO: 491369 - DNA, 120 bp, Artificial Sequence
  ENSG00000162909_39 (sequence is synthesized)
ctcctgattagcatgcaagggagaacatgtttatataaagaaatccttcagctgaaattcaagttgggttttgggaagatccatcattcttagagtggatctacttaaaatactttaagc

SEQ ID NO: 491370 - DNA, 120 bp, Artificial Sequence
  ENSG00000162909_40 (sequence is synthesized)
aaattagttttctctactccctccccgtttaagataaaaccaatactagtaaatacgtttgccatttattattgttattgcactcatgtgtctggaaccctagcaatacacatctctgaa

SEQ ID NO: 491371 - DNA, 120 bp, Artificial Sequence
  ENSG00000162909_41 (sequence is synthesized)
atgatcatcaatctgaattaagtgggtatgctaatttcacaaaaagcaaagcgtaaaatgttctcgtgtcatcccaatgacaggaagttctctcactgaaagaaagaagccaggtggggt

SEQ ID NO: 491372 - DNA, 120 bp, Artificial Sequence
  ENSG00000162909_42 (sequence is synthesized)
atacttccattatcacctggctccagtcagcatttcctctatactcagggaaggccacagagggccgggcgaagtggctgacactgggtgagaatggcagttgtcagtcctgtccgtgta

SEQ ID NO: 491373 - DNA, 120 bp, Artificial Sequence
  ENSG00000162909_43 (sequence is synthesized)
acagaggagtgaagtggtgaggagggcaggtctaaggcactggcagctcttttccatggattttgaactctggaggaaggcagcaactaaataactgtctcattctgctattatgcattg

SEQ ID NO: 491374 - DNA, 120 bp, Artificial Sequence
  ENSG00000162909_44 (sequence is synthesized)
tattagcaaagtgaaaatatagtctatctggttacaaataacactaacttgcttaaaactttacatatcctaggaaatatctctacccctagattgcaatgtagagtcaaccccatctct

SEQ ID NO: 491375 - DNA, 120 bp, Artificial Sequence
  ENSG00000162909_45 (sequence is synthesized)
ctcggtcaccggagccgaggaggtaacggccggcgcggatgtgcaggggtcctgctgtcctgacacgatggccacaggcacagtttgtggtgatgcccaggggcccgcgcggccccacgg

SEQ ID NO: 491376 - DNA, 120 bp, Artificial Sequence
  ENSG00000162909_46 (sequence is synthesized)
cactcgggccccgcactcctgaagttccgcgcgggaggagaagggcgtccctttcgcagctcgggcgccgggtgcgccgcgctgccacctggtggccgcagtggccggcgccaggggccc

SEQ ID NO: 491377 - DNA, 120 bp, Artificial Sequence
  ENSG00000162909_47 (sequence is synthesized)
tttacttgttttagatgttaccctgttttacagttacaaccttactattttgataagctaaaaataataaaacaatgcatcttcatagtgttttatactctataaggtgctttctctttt

SEQ ID NO: 491378 - DNA, 120 bp, Artificial Sequence
  ENSG00000162909_48 (sequence is synthesized)
atacagggtttggttctgggcagaaaatccatgatcctgagactgcaggaggcttttcacaaagttctttgtcactcttaggagaagactgagtcagggaaaaggtgaaccctgcagact

SEQ ID NO: 491379 - DNA, 120 bp, Artificial Sequence
  ENSG00000162909_49 (sequence is synthesized)
gtactagaagacaacgcgggagcacagaggagaccaggacccaattcccaggctgtgtgaccttggacacgttacagctcctctctgcatttcagggttttgttttttttttttttgatt

SEQ ID NO: 491380 - DNA, 63 bp, Artificial Sequence
  ENSG00000162909_50 (sequence is synthesized)
ttttttttttttgatttttggtttgtttgtttgttttttgtctcgctctttcacccaggatga

SEQ ID NO: 491381 - DNA, 120 bp, Artificial Sequence
  ENSG00000162909_51 (sequence is synthesized)
ctcccaaagtgctaggattacaggtgtagccaccgtgcctggctgcatttcagtttatttttcagtaaaactggtcaaccatccacctcactgcactaccgtggaatgacttaaattttg

SEQ ID NO: 491382 - DNA, 120 bp, Artificial Sequence
  ENSG00000162909_52 (sequence is synthesized)
taagatgcagcaactcctgcacagagtggagaaacatttccaaggggattgggattttacccataatgaagctcagagtgagtaaagatggggctgaggaaatgcaaacaaaaaaccaac

SEQ ID NO: 491383 - DNA, 120 bp, Artificial Sequence
  ENSG00000162909_53 (sequence is synthesized)
caggacttcgcaggtgaaatggcctattcccttcctcctgattattgggatcatctaaaggccaccatcaagggtttcctgaaaagggtttttgacagctaaagtacaaaaattatataa

SEQ ID NO: 491384 - DNA, 120 bp, Artificial Sequence
  ENSG00000162909_54 (sequence is synthesized)
tataaaataaagtaggtgctggtttaatacagacacctccttttcattcccctttcaaagactaattggtaaaattaaatgcagtaggatgctctgccctctgtgccttcttgaatccaa

SEQ ID NO: 491385 - DNA, 120 bp, Artificial Sequence
  ENSG00000162909_55 (sequence is synthesized)
gtttcctttggagccgcctggcacagtaagcaggcaaagccaggtctcaacagcctcctccaggtgcttcctttctggtgcagggttggttaggcagaaatcaaatgtctcagctcagcc

SEQ ID NO: 491386 - DNA, 120 bp, Artificial Sequence
  ENSG00000162909_56 (sequence is synthesized)
cttagggtaagaccctagcagaattggatatcaataaaaggacacaagcgagtggtagaccagcaaagcaggagactgctgggctttgggaacaaatgtgtcagcatgaggctgttcatt

SEQ ID NO: 491387 - DNA, 120 bp, Artificial Sequence
  ENSG00000162909_57 (sequence is synthesized)
ctatttgctggaatataatgctgctgcagagaccccacacaacattggtttatacgaggtatgtctttctgtcgtatagcaatcccagctccagcagtccacggctaggacggtgcctcc

SEQ ID NO: 491388 - DNA, 120 bp, Artificial Sequence
  ENSG00000162909_58 (sequence is synthesized)
tactatcctaccatgtcactatctgatcacgcttcccccagcctccccccatccatgatgcccaccggaccttcaagggtcaccctcatccaagggacctgggacagcctgccaccacaa

SEQ ID NO: 491389 - DNA, 120 bp, Artificial Sequence
  ENSG00000162909_59 (sequence is synthesized)
acacatgccaccaacaggttgacagaagaagggccccttgcctttaagggcacacaggccatttccggtcacacatcccaccagccagactctgatcacaaggcctctgttgactgcaag

SEQ ID NO: 491390 - DNA, 120 bp, Artificial Sequence
  ENSG00000162909_60 (sequence is synthesized)
gaagctgggacatgcagtcttgatgctaggtggccataggctcaataaaaattattttactctggaaggagagagaactactatgagtttaccaggaaagcttctgctcacatatatcca

SEQ ID NO: 491391 - DNA, 120 bp, Artificial Sequence
  ENSG00000162909_61 (sequence is synthesized)
ggaagaatctgatcttcaagacgattgagagctaaacaaaaaatcaaacagcagcagcatggttaacaacatgaagcaactgtgaccatgagaacagaaacaggcaagaaaacacttatg

SEQ ID NO: 491392 - DNA, 120 bp, Artificial Sequence
  ENSG00000162909_62 (sequence is synthesized)
tgtcagcaaaggacacaggcagggtgaaggtggacagttcaaaaacaaaagaaacagcagaaggtactggctttgcaaaatcaaaccagtctcacagaagagcagccaagggacaaaagc

SEQ ID NO: 491393 - DNA, 120 bp, Artificial Sequence
  ENSG00000162909_63 (sequence is synthesized)
aattatacctcatttaaatcaccacattagtttcatagcctgtgagcgcagctaaatggaacaatctaatgcttagcaatgagtttgtttgttcatgtaacttcaggtttcaagatgccc

SEQ ID NO: 491394 - DNA, 120 bp, Artificial Sequence
  ENSG00000162909_64 (sequence is synthesized)
gaggtacgtctggcccatgtcccggggtgctcaggtcaccaaaaaagcgagaggcttagactgctggagctcagggagcgtcgtgaagcccgggcaggggctggtggtcatgaaggatga

SEQ ID NO: 491395 - DNA, 120 bp, Artificial Sequence
  ENSG00000162909_65 (sequence is synthesized)
tggggatttctgcatccgggtcttttctgaaaagaaagctgactaccaagctgtcgatgatgaaatcgaggccaatcttgaagaggtatttgtaactctttgaatttcacccactctgtc

SEQ ID NO: 491396 - DNA, 120 bp, Artificial Sequence
  ENSG00000162910_0 (sequence is synthesized)
agtgacgtcgtgggctgcagcgcagcagcacccaacgcatctagcaggaaaggagagggagctttccccgaagaccctcctggaccagccccaggctcctgtgctggttgcacgccaggg

SEQ ID NO: 491397 - DNA, 120 bp, Artificial Sequence
  ENSG00000162910_1 (sequence is synthesized)
cctgtactgaccacctccacgtgccactggggctgtaaggaggaatggcggccgtgggcagcctgcttggccggctgaggcagagcaccgtgaaggccaccggacctgcactccgccgcc

SEQ ID NO: 491398 - DNA, 120 bp, Artificial Sequence
  ENSG00000162910_2 (sequence is synthesized)
agggcctcactcactcgtgtgcaccgccaggcttatgcacgactctaccccgtgctgctggtgaagcaggatggctccaccatccacatccgctacagggagccacggcgcatgctggcg

SEQ ID NO: 491399 - DNA, 120 bp, Artificial Sequence
  ENSG00000162910_3 (sequence is synthesized)
atgcccatagatctggacaccctgtctcctgaggagcgccgggccaggctgcggaagcgtgaggctcagctccagtcgaggaaggagtacgagcaggagctcagtgatgacttgcatgtg

SEQ ID NO: 491400 - DNA, 120 bp, Artificial Sequence
  ENSG00000162910_4 (sequence is synthesized)
gagcgctaccgacagttctggaccaggaccaagaagtgaccgtggctccagccaccccgggacattgctaagatgggagggctgttcttaaatcactcgttcttgaagctgccacctgga

SEQ ID NO: 491401 - DNA, 120 bp, Artificial Sequence
  ENSG00000162910_5 (sequence is synthesized)
gcctgccagtgacgtcgtgggctgcagcgcagcagcacccaacgcagtgagtaccttgatctcctgcgtggcctcgtccctggtcttagttccaccgggcagcgggagtcaggaccgcct

SEQ ID NO: 491402 - DNA, 120 bp, Artificial Sequence
  ENSG00000162910_6 (sequence is synthesized)
tgggaatccaggtcacagcaaagcagccctgggcctccattctcctttaagcaagcatgacaatcctcacttcactgagtttttattaaaactagcaatgaccttagaaagcaaggcatg

SEQ ID NO: 491403 - DNA, 120 bp, Artificial Sequence
  ENSG00000162910_7 (sequence is synthesized)
acctcagctccacttttgaggctgcagtccattcagagaggtttcgcagactcggtaacggccagaacagacagcctgggccctgccgcaggctgactcagaatctttgggagtagtgac

SEQ ID NO: 491404 - DNA, 120 bp, Artificial Sequence
  ENSG00000162910_8 (sequence is synthesized)
aggcagccggacctgtcttcaggtcccttccttggtgagagacaggggtacgccagaggaagctgggcgctcggcctctgtgcagcctcatctcctggaatctgagtattgaaaactggg

SEQ ID NO: 491405 - DNA, 120 bp, Artificial Sequence
  ENSG00000162910_9 (sequence is synthesized)
caggaaaggagagggagctttccccgaagaccctcctggaccagccccaggctcctgtgctgtgaccaacttctgcttttggaaaaacctctacaggcggttctgagaagtccaagggtt

SEQ ID NO: 491406 - DNA, 120 bp, Artificial Sequence
  ENSG00000162910_10 (sequence is synthesized)
ccccatgcagtctagcaggaaaggagagggagctttccccgaagaccctcctggaccagccccaggctcctgtgctggcggttctgagaagtccaagggttgctgggagaggttggttgc

SEQ ID NO: 491407 - DNA, 120 bp, Artificial Sequence
  ENSG00000162910_11 (sequence is synthesized)
tccaagggttgctgggagaggttgcaggttgcacgccagggcctgtactgaccacctccacgtgccactggggctgtaaggaggaatggcggccgtgggcagcctgcttggccggctgag

SEQ ID NO: 491408 - DNA, 120 bp, Artificial Sequence
  ENSG00000162910_12 (sequence is synthesized)
taaggaggaatggcggccgtgggcagcctgcttggcctggcagcctcttcctggctagggggccagaacgcctctgaccacagcctgtggctcctgaggaagccccgaggctcatcctgc

SEQ ID NO: 491409 - DNA, 120 bp, Artificial Sequence
  ENSG00000162910_13 (sequence is synthesized)
gtgggctgcagcgcagcagcacccaacgcatctagcaggaaaggagagggagctttccccgaagaccctcctggaccagccccaggctcctgtgctggtgaggccgagggagagggatgt

SEQ ID NO: 491410 - DNA, 120 bp, Artificial Sequence
  ENSG00000162910_14 (sequence is synthesized)
cttctgcttttggaaaaacctctacaggcggttctgagaagtccaagggttgctgggagaggttggtgagtggcgtggtgattacatgtgtcttggaagcatcctgggctgggatttgat

SEQ ID NO: 491411 - DNA, 120 bp, Artificial Sequence
  ENSG00000162910_15 (sequence is synthesized)
ccctctcttcagcaggaaaccgccattctaatcctccctagtccttgctattgtccactgtcccctgtgctggaagctttgtgcccttgctcagcctggcagcctcttcctggctagggg

SEQ ID NO: 491412 - DNA, 120 bp, Artificial Sequence
  ENSG00000162910_16 (sequence is synthesized)
accttgatctcctgcgtggcctcgtccctggtcttagttccaccgggcagcgggagtcaggaccgcctgtcctcagacccctccgcagcgactgtggcggccgcaggttggcgcctcgtg

SEQ ID NO: 491413 - DNA, 120 bp, Artificial Sequence
  ENSG00000162910_17 (sequence is synthesized)
tgggccgggaacagaggcgggaggcgctgtaccctcccggtggagtcgggagggagggaggcagggaaggggacagggggctgcacctgtgataagcccttgtccccatgcagtctagca

SEQ ID NO: 491414 - DNA, 120 bp, Artificial Sequence
  ENSG00000162923_0 (sequence is synthesized)
cggagggagtaggagagcccggggcttcggcaggcagagcaggcctctcccctccgtcctcgtcgtcctcgtcctcctcctcctcctcctcctccgtggtggtagtggtgggacttcccc

SEQ ID NO: 491415 - DNA, 120 bp, Artificial Sequence
  ENSG00000162923_1 (sequence is synthesized)
cggctgctgcccctcccgccgccgctgctgtcccccaccgaagtagcggccacagcctggtcagcggcagcatcatgcaggccaatggggcaggaggaggaggaggaggtggcggcggcg

SEQ ID NO: 491416 - DNA, 120 bp, Artificial Sequence
  ENSG00000162923_2 (sequence is synthesized)
gcggtggaggaggagggggcggcgggggccagggacagaccccggaactcgcctgcttgtcggcccagaacggggagtcgtccccctcgtcgtcgtcgtccgcgggggacctggcccacg

SEQ ID NO: 491417 - DNA, 120 bp, Artificial Sequence
  ENSG00000162923_3 (sequence is synthesized)
ccaatgggctcctgccttccgccccctccgccgccagcaacaatagcaacagcctgaatgtcaataacggggttcccggcggggcggccgccgcatcctcagccaccgtcgcagctgcct

SEQ ID NO: 491418 - DNA, 120 bp, Artificial Sequence
  ENSG00000162923_4 (sequence is synthesized)
ccgccaccaccgccgcctcctcttccttggccaccccagaactgggcagcagcctcaagaagaagaagcggctctcccagtcagatgaggatgtcattaggctaataggacagcacttga

SEQ ID NO: 491419 - DNA, 120 bp, Artificial Sequence
  ENSG00000162923_5 (sequence is synthesized)
atggcttagggctcaaccagactgttgatctcctcatgcaagagtcaggatgtcgtttagaacatccttctgctaccaaattccgaaatcatgtcatggaaggagactgggataaggcag

SEQ ID NO: 491420 - DNA, 120 bp, Artificial Sequence
  ENSG00000162923_6 (sequence is synthesized)
aaaatgacctgaatgaactaaagcctttagtgcattctcctcatgctattgtggtaagaggcgcacttgaaatctctcaaacgttgttgggaataattgtgaggatgaagtttttgctgc

SEQ ID NO: 491421 - DNA, 120 bp, Artificial Sequence
  ENSG00000162923_7 (sequence is synthesized)
tgcagcagaagtacctagaatacctggaggatggcaaggtcctggaggcacttcaagttctacgctgtgaattgacgccgctgaaatacaatacagagcgcattcatgttcttagtgggt

SEQ ID NO: 491422 - DNA, 120 bp, Artificial Sequence
  ENSG00000162923_8 (sequence is synthesized)
atctgatgtgtagccatgcagaagacctacgtgcaaaagcagaatgggaaggcaaagggacagcttcccgatctaaactattggataaacttcagacctatttaccaccatcagtgatgc

SEQ ID NO: 491423 - DNA, 120 bp, Artificial Sequence
  ENSG00000162923_9 (sequence is synthesized)
ttcccccacggcgtttacagactctcctgcggcaggcggtggaactacaaagggatcggtgcctatatcacaataccaaacttgataataatctagattctgtgtctctgcttatagacc

SEQ ID NO: 491424 - DNA, 120 bp, Artificial Sequence
  ENSG00000162923_10 (sequence is synthesized)
atgtttgtagtaggaggcagttcccatgttatacgcagcagatacttacggagcattgtaatgaagtgtggttctgtaaattctctaatgatggcactaaactagcaacaggatcaaaag

SEQ ID NO: 491425 - DNA, 120 bp, Artificial Sequence
  ENSG00000162923_11 (sequence is synthesized)
atacaacagttatcatatggcaagttgatccggatacacacctgctaaaactgcttaaaacattagaaggacatgcttatggcgtttcttatattgcatggagtccagatgacaactatc

SEQ ID NO: 491426 - DNA, 120 bp, Artificial Sequence
  ENSG00000162923_12 (sequence is synthesized)
ttgttgcttgtggcccagatgactgctctgagctttggctttggaatgtacaaacaggagaactaaggacaaaaatgagccagtctcatgaagacagtttgacaagtgtggcttggaatc

SEQ ID NO: 491427 - DNA, 120 bp, Artificial Sequence
  ENSG00000162923_13 (sequence is synthesized)
cagatgggaagcgctttgtgactggaggtcagcgtgggcagttctatcagtgtgacttagatggtaatctccttgactcctgggaaggggtaagagtgcaatgcctttggtgcttgagtg

SEQ ID NO: 491428 - DNA, 120 bp, Artificial Sequence
  ENSG00000162923_14 (sequence is synthesized)
atggaaagactgttctggcatcagatacacaccagcgaattcggggctataacttcgaggaccttacagataggaacatagtacaagaagatcatcctattatgtcttttactatttcaa

SEQ ID NO: 491429 - DNA, 120 bp, Artificial Sequence
  ENSG00000162923_15 (sequence is synthesized)
aaaatggccgattagctttgttaaatgtagcaactcagggagttcatttatgggacttgcaagacagagttttagtaagaaagtatcaaggtgttacacaagggttttatacaattcatt

SEQ ID NO: 491430 - DNA, 120 bp, Artificial Sequence
  ENSG00000162923_16 (sequence is synthesized)
catgttttggaggccataatgaagacttcatcgctagtggcagtgaagatcacaaggtttacatctggcacaaacgtagtgaactgccaattgcggagctgacagggcacacacgtacag

SEQ ID NO: 491431 - DNA, 120 bp, Artificial Sequence
  ENSG00000162923_17 (sequence is synthesized)
taaactgtgtgagctggaacccacagattccatccatgatggccagcgcctcagatgatggcactgttagaatatggggaccagcaccttttatagaccaccagaatattgaagaggaat

SEQ ID NO: 491432 - DNA, 120 bp, Artificial Sequence
  ENSG00000162923_18 (sequence is synthesized)
gcagtagcatggatagttgatggtgaatttggagcagacgacttctgtttaacttaaaattagtcgtattttaatggcttgggatttggtgcaaacaaacatgattgatagctggacaga

SEQ ID NO: 491433 - DNA, 120 bp, Artificial Sequence
  ENSG00000162923_19 (sequence is synthesized)
catgctcgtcatgaaaaaagaaccatttctgaagcccgattggggccaaacatttacaccttgcttcatagtaaccagttgagatgaagcacgtcgttagaacgttgttggacaccatgt

SEQ ID NO: 491434 - DNA, 120 bp, Artificial Sequence
  ENSG00000162923_20 (sequence is synthesized)
tgaattattcccccatcggttgtgaagaactgtgctacattcaggcttacccattgaactcagtatatatatttttttccttcctgtcttttgtctggcaggataccattcttgttgctc

SEQ ID NO: 491435 - DNA, 120 bp, Artificial Sequence
  ENSG00000162923_21 (sequence is synthesized)
ttctgtgtaatgaagtttaaatgcttgtttggaaaactttatttaacagtttagaaggcttgatagaaagagtgcattagtctgaagagtatacattggataggaaagaatttccttctt

SEQ ID NO: 491436 - DNA, 120 bp, Artificial Sequence
  ENSG00000162923_22 (sequence is synthesized)
ttgtttctccaaatctttccgccttatttagcttgagatctttgcagcttggttcatggattctagccttgcccgttgcgcagtatatactgatccagatgataaaccagtgaactatgt

SEQ ID NO: 491437 - DNA, 120 bp, Artificial Sequence
  ENSG00000162923_23 (sequence is synthesized)
caaaagcactctcaatattacatttgacaaaaagttttgtacttttcacatagcttgttgccccgtaaaagggttaacagcacaattttttaaaaataaattaagaagtatttataggat

SEQ ID NO: 491438 - DNA, 120 bp, Artificial Sequence
  ENSG00000162923_24 (sequence is synthesized)
taaagtgacttcatttgtatacatttggaatctaaaccagcttaaaaacagtttcctcaatgacttagatacacagtataactgatgctcttctggaataccacatgagacatggtcaga

SEQ ID NO: 491439 - DNA, 120 bp, Artificial Sequence
  ENSG00000162923_25 (sequence is synthesized)
aacagtgcttggaaggacattacacaagaaattcagagtaatgctttgaagatttccccccttttgttttattcctgaaggaacatcagtacccgatcttgaagaaattcaagattcaaa

SEQ ID NO: 491440 - DNA, 120 bp, Artificial Sequence
  ENSG00000162923_26 (sequence is synthesized)
aagaattttaaatacaccaacatgagacatcagtagtcagttggttttcagtaaagcttgttccaagttgttctcaacttaggaagtaattttggtgtgatctagcaaaagagtaggaat

SEQ ID NO: 491441 - DNA, 120 bp, Artificial Sequence
  ENSG00000162923_27 (sequence is synthesized)
cagcgatacaaccactttggaagtttatagtataattgaaattattagaagaattcagcaggttacagacatacttaaactgggattaaaacctcatagtcatttttcttaattgccctt

SEQ ID NO: 491442 - DNA, 120 bp, Artificial Sequence
  ENSG00000162923_28 (sequence is synthesized)
aatttaaagaatattttttctcagttttttcagatattgccatactgaacctcattctaaactggtgctgtggatagtctttccctctcccctcctgttttagtttaaggaaaggtttcc

SEQ ID NO: 491443 - DNA, 120 bp, Artificial Sequence
  ENSG00000162923_29 (sequence is synthesized)
ttcatggaaaagcacttttaattttgagaatttcacatttaaaataagccaaaagcctgatgttcacattgtgcttttaaactccgtaacagctgaatacaacataacatagtctccctt

SEQ ID NO: 491444 - DNA, 120 bp, Artificial Sequence
  ENSG00000162923_30 (sequence is synthesized)
gaaattccctccctttttcagtagaggataaatagggtgactccagctgttggaatgagaatggggatacccccaaaataagattctggtgaagaaaaagtcttgtactaagttcccctt

SEQ ID NO: 491445 - DNA, 120 bp, Artificial Sequence
  ENSG00000162923_31 (sequence is synthesized)
taggtgtagccaagtctataatataattatgatcatgaatagactccagaatccacaaagagaagagggcttggatgtcaaaaattcttccattgtggggtaggtggtcggggatgggag

SEQ ID NO: 491446 - DNA, 120 bp, Artificial Sequence
  ENSG00000162923_32 (sequence is synthesized)
aaagggaaaagtcagggaaggggagaagaaagaaaaacacatttggccttaaaatagcatgcattctcccagaagcccatagtaaagaaaatgacagatcgtggtcagcagactcttatc

SEQ ID NO: 491447 - DNA, 120 bp, Artificial Sequence
  ENSG00000162923_33 (sequence is synthesized)
aaattggtatgtaaaagatttcttcaagctccattttgcagagaccaccacttagagaatcaaaaaattcctgttttgatacttctaagttaaaatatatgttacagtttatctggtact

SEQ ID NO: 491448 - DNA, 120 bp, Artificial Sequence
  ENSG00000162923_34 (sequence is synthesized)
tcatttttcttaactaaaattactttttactttaagcttgaataaaaatcttcattggtaactgtatgtaattaagtggcaacttctctttacctcagtatagttaaaaaccattcatat

SEQ ID NO: 491449 - DNA, 120 bp, Artificial Sequence
  ENSG00000162923_35 (sequence is synthesized)
tttaagtgattcatgtataccctgaagccgttaatacaccccagtctctatggtaacatcactaaatgtgggcatagaaactccacagctgtttacaaatttggttacagtgtgctacgg

SEQ ID NO: 491450 - DNA, 120 bp, Artificial Sequence
  ENSG00000162923_36 (sequence is synthesized)
tgcatttgtaacactcagatttgtgcccattcaggggcaatttggcactcagattctactctacttcacctaaccacccctagatctgagttttcagagtgcttctgaagtacagtttaa

SEQ ID NO: 491451 - DNA, 120 bp, Artificial Sequence
  ENSG00000162923_37 (sequence is synthesized)
aaacactttttaaaaagtggagtaaaagtgaggcacattttacaagaacataactcctattaaaacggagtaacaactatgcaaaggtttctatagcagctaggtgagtttgttttccgg

SEQ ID NO: 491452 - DNA, 120 bp, Artificial Sequence
  ENSG00000162923_38 (sequence is synthesized)
gtctgtcttaactggcagcttcctgtacatactggtacttatttgctgtaaacgtctgtttcatacatttgccatgcagtgactgtgctcgaaaggtgaaatcaatggtaaagaagccta

SEQ ID NO: 491453 - DNA, 120 bp, Artificial Sequence
  ENSG00000162923_39 (sequence is synthesized)
ggattttatggtatgagaaactgatcgcaggattttctgatccatagctattaattgaaaacttctgatagtgctgtaggctctatagtaggcttaagagtgagtcttatactatgaagc

SEQ ID NO: 491454 - DNA, 120 bp, Artificial Sequence
  ENSG00000162923_40 (sequence is synthesized)
cagccacaagatactaacaaatgtataaattgaaaagtaccaatactttttgcacatagatcaaaatagagtggagaatttgggctccaaaaatcaggttagtaggctcatttccatgtg

SEQ ID NO: 491455 - DNA, 120 bp, Artificial Sequence
  ENSG00000162923_41 (sequence is synthesized)
cttaaaaatgtttttgttgttatgcattgattaagggctagagcaaatataaaattaaatgtctttttcctccaaataattggttattaatggtaaaatgttggacttggggattactga

SEQ ID NO: 491456 - DNA, 120 bp, Artificial Sequence
  ENSG00000162923_42 (sequence is synthesized)
gattagtatgtgggtagtaaagaattggagtgggagttagtggggagggatgacaaagcttcagctttggtttttgtatttttttagtcttcataacagctacatttctgttgctcttat

SEQ ID NO: 491457 - DNA, 120 bp, Artificial Sequence
  ENSG00000162923_43 (sequence is synthesized)
tggccagataaatgtgttatattaaaccaggtaagtattttaaacagagaacattttatttgcatatatccctacaaattggcccattttattgggtggggggataaaaaagggattccc

SEQ ID NO: 491458 - DNA, 120 bp, Artificial Sequence
  ENSG00000162923_44 (sequence is synthesized)
taactttaaataatcagaatatcctgcaattgaaaggagaaaaaaatccaattttgtcagtattttcttagtctgaaaaaaacagcagtagtaatctggtgaatgttattattaggagtg

SEQ ID NO: 491459 - DNA, 120 bp, Artificial Sequence
  ENSG00000162923_45 (sequence is synthesized)
ttctgcctctacagtggcatattccatgacattaatagaaaacccttctttcccacccctccccatcttgacattttcttttttaggatgttggttcctgcaaacaagaactgaccctat

SEQ ID NO: 491460 - DNA, 120 bp, Artificial Sequence
  ENSG00000162923_46 (sequence is synthesized)
cacctctgcctcacagtgggtaaatatatcatacatctcttgaaagggaaaatatccatgtcagtttctttcacagtagaagaatggctgcttttgaatggggaggaaagaagacatttt

SEQ ID NO: 491461 - DNA, 120 bp, Artificial Sequence
  ENSG00000162923_47 (sequence is synthesized)
tcttaatatcctttttgtcccatctctaaaatgtataaatattttgatttggttttactttaatttctcattcataatttcgcaactgtccttttgggttgccctccaacacattacttc

SEQ ID NO: 491462 - DNA, 120 bp, Artificial Sequence
  ENSG00000162923_48 (sequence is synthesized)
catttcagaaaccatatctgatttaatataaactgctaacttaagaagaggtgaatttgcatttacacttagacactttctaaaaacagggtgaacttaattgaaatttttcagtgttgt

SEQ ID NO: 491463 - DNA, 120 bp, Artificial Sequence
  ENSG00000162923_49 (sequence is synthesized)
taagctattgttatagtagctgccctatagttacaaaaataaaaactataaaaacccatcccctatctacttaatccagatagcctggatttaacaaaaccaatagtataaaaatgtgtg

SEQ ID NO: 491464 - DNA, 120 bp, Artificial Sequence
  ENSG00000162923_50 (sequence is synthesized)
tgtgtgttctgtgtgtgtgtgagagagagagtacttgattcattaaaaagtcctggaaacagctgttctaggatcttgtcatttttactgaaagtctcgtgcacatgtgaagtgccctct

SEQ ID NO: 491465 - DNA, 120 bp, Artificial Sequence
  ENSG00000162923_51 (sequence is synthesized)
gagtttaaggtttggttaatactggtatatttttataagattgaaattgtgtccccatctttaacttaaacattttcattatcagggtcaatgtgctagaactgaattgtaacattttta

SEQ ID NO: 491466 - DNA, 120 bp, Artificial Sequence
  ENSG00000162923_52 (sequence is synthesized)
ggcacagatggaaaaaaatgttattggctccttgaaaatgtgtgtgtgtggcgaggggaatagatccacaaaagcatgtatgtacttacaaaccaagctgtagagatcaagaaaagaact

SEQ ID NO: 491467 - DNA, 120 bp, Artificial Sequence
  ENSG00000162923_53 (sequence is synthesized)
taagtgttgatctcaagatttctaaattgtcaagatttacatggcattgtggtggaactagttaacacttagagcttttggtatgtaataactatttgctatggactgattaaatgtttc

SEQ ID NO: 491468 - DNA, 120 bp, Artificial Sequence
  ENSG00000162923_54 (sequence is synthesized)
aaaagattgtgttcttcaattttggtgggttttgatttttgtttttttaactgcctctcagattatatttacttagtttaaatttctttgctttattcattaaagtataaaaacttcagg

SEQ ID NO: 491469 - DNA, 120 bp, Artificial Sequence
  ENSG00000162923_55 (sequence is synthesized)
tctctgatatttattttcacttgtttactaattatttacaaaacaccctttgttgacttttattttataaatgtgtaatgtattaaacgtctttaaatttttgttcaactgaaactacat

SEQ ID NO: 491470 - DNA, 120 bp, Artificial Sequence
  ENSG00000162923_56 (sequence is synthesized)
taactttgatttgctttactgggatttttttttaaagacactttttccatgtcagtgcgcagcacttaaccagtcgtttgtattccctttctttcaatccaataaacagaatgaatacct

SEQ ID NO: 491471 - DNA, 120 bp, Artificial Sequence
  ENSG00000162923_57 (sequence is synthesized)
tccttatcagtttacatatgttgatattaaagtctgtaaatctcaatttatgaaggcagtcatgtctccaagaaaattcagggtagtaagttaaaattctttcatttatccaatacacgg

SEQ ID NO: 491472 - DNA, 120 bp, Artificial Sequence
  ENSG00000162923_58 (sequence is synthesized)
ttaatttctctctgtaatgacctaagcccctgtattatcacaaattgtcacatgctgtcatgtattactttctccttttctgtaatgacctaagccctccatattgtcatgtattgtcac

SEQ ID NO: 491473 - DNA, 120 bp, Artificial Sequence
  ENSG00000162923_59 (sequence is synthesized)
ggattagcagtgcttattctgaccacgtagcagtgtgtttggtgcatgtgtctaatcaagatttagttaaattattatactttcatatgttgacttgtattttcatgggactgatggttt

SEQ ID NO: 491474 - DNA, 120 bp, Artificial Sequence
  ENSG00000162923_60 (sequence is synthesized)
ggaataattgtggtaaatacacttttgttcttagtttcacatttatgcttattttagtaggttattgataactctaggcttctgcctcttataaaaaaataaggcctaaaagtagttaaa

SEQ ID NO: 491475 - DNA, 120 bp, Artificial Sequence
  ENSG00000162923_61 (sequence is synthesized)
tgtaaactaggatgagtataatgttttaaagtatgagttttatttctttaaaatcatacttagtaaatgtgtcatttgaaccttataaattaagctctacaaaaaatatattgaaagctc

SEQ ID NO: 491476 - DNA, 120 bp, Artificial Sequence
  ENSG00000162923_62 (sequence is synthesized)
tattgaaagctcttcatgctttcagtgctactaatagaggttttatatttatagagttaaagataaattatacttttattatgttacttaaaatactgaatgtgctggttaaagagaaaa

SEQ ID NO: 491477 - DNA, 120 bp, Artificial Sequence
  ENSG00000162923_63 (sequence is synthesized)
tgtgtttgggtgtgtgtatatccatacagccttaagaagctgatacattatctttttttttaatctttgggaattacagttaattcaagccaactccatttgtgtgctggccattttcca

SEQ ID NO: 491478 - DNA, 120 bp, Artificial Sequence
  ENSG00000162923_64 (sequence is synthesized)
ttcttgcattccagttgtgtgaattgacagtgtcaaagtttgtataataacgtatcactctggtggagggtttgtgtgcagatttgaccatttggccctgcttactggccttatttccct

SEQ ID NO: 491479 - DNA, 120 bp, Artificial Sequence
  ENSG00000162923_65 (sequence is synthesized)
gacaagatcaatttagtagtttaacctgttagccgctttcataattcttaatgaatcttttagacttatgggctttaattcttcagtagatggtggtgagggagagaggaaataagtttt

SEQ ID NO: 491480 - DNA, 120 bp, Artificial Sequence
  ENSG00000162923_66 (sequence is synthesized)
ttctaaatgctggagtttggaaaccatgaagaatcagctgctagctgctggctttttaacttctagctgattcatttgttgtcaaaagcagtttcctgtctgggggtggggagagaaaga

SEQ ID NO: 491481 - DNA, 120 bp, Artificial Sequence
  ENSG00000162923_67 (sequence is synthesized)
tgtttgttaaatattagtaaatgactattacattttgatttttttaaaattgagtcaaacattaatcttttctgcctttttctataaaaataaggccttgtgtttttttcttttgaaatc

SEQ ID NO: 491482 - DNA, 120 bp, Artificial Sequence
  ENSG00000162923_68 (sequence is synthesized)
ttattacaaaagagttttcaaactcagtataattctacacaataatataatcctagagaaatgggcttcaggtgaattaaaggtgcaaacaagcaagaataaatgcaaattcatttaaat

SEQ ID NO: 491483 - DNA, 120 bp, Artificial Sequence
  ENSG00000162923_69 (sequence is synthesized)
aggtgcaaacaagcaagaataaatgcaaattcatttaaattgatgatgtagtgtattatttttattctttcattaaatacttaaaatattaaaaattttaaactactgttgactaagatg

SEQ ID NO: 491484 - DNA, 120 bp, Artificial Sequence
  ENSG00000162923_70 (sequence is synthesized)
attgaaaaataaaaacagaagttaaaatagttaaacatctatattcaaagggattggaaatttttcgttaactaaagtttcctcagttggtgtgtttggggtttaaaaaaaaaataccca

SEQ ID NO: 491485 - DNA, 120 bp, Artificial Sequence
  ENSG00000162923_71 (sequence is synthesized)
agtacattttattgagcagttctgcataaatttttgcttctgactgaatgagctaaaataaaaacagttagatggccaaaagaagaattaaggttgctttcccattgggcaagttagcac

SEQ ID NO: 491486 - DNA, 120 bp, Artificial Sequence
  ENSG00000162923_72 (sequence is synthesized)
tacttgtgtgttgacaataaagaacttgcctgtggactggtttaaaatgtgtgtgatttcttggaggttgtttaagcttcgcccaaattatatctgtaatttagtagtaaaaaatttaat

SEQ ID NO: 491487 - DNA, 120 bp, Artificial Sequence
  ENSG00000162923_73 (sequence is synthesized)
aggcttacttcctatttttttcttatttgtttatagtaatttgagagttctgtattggatttcgattatgactatctcattagaaaccttcattagaggcagcatgtaaactgaagaaag

SEQ ID NO: 491488 - DNA, 120 bp, Artificial Sequence
  ENSG00000162923_74 (sequence is synthesized)
gtagttatagataataaggaggaatcctttctttttacagcctgttcagtctgtagaacattctaggatctaataaaagatgaagattaaatctctggctgagcctcatgccatcaaact

SEQ ID NO: 491489 - DNA, 120 bp, Artificial Sequence
  ENSG00000162923_75 (sequence is synthesized)
gtttaggtatttataaaaagaaaagggttccaacttttatctcactttaagcattgatgaatcaattgcttttaaagattaatttcagcattttttgaagttgctcttcacctctctaat

SEQ ID NO: 491490 - DNA, 120 bp, Artificial Sequence
  ENSG00000162923_76 (sequence is synthesized)
tgtgtttaaatttacttttctcatccatcccatctccagaagaagagaatctaatataagcttaaatttgtaataatatcttagaagacaactattagggtttctttaaacgtaattatt

SEQ ID NO: 491491 - DNA, 120 bp, Artificial Sequence
  ENSG00000162923_77 (sequence is synthesized)
ttaattgtatacccagacacatttgatggcttagtctagactaaaattgtactttattttttaagcctgaatgttttcattgacccaatccactctctctacagcctactccctttgttt

SEQ ID NO: 491492 - DNA, 120 bp, Artificial Sequence
  ENSG00000162923_78 (sequence is synthesized)
gagtggaagtcaggaaaggctcccctgaggaggtttgaaatgagctgagtcttgaaagactgactggcatcagacaggtgaagaaaagacgggagagtgtagtcaaagactctcaaggag

SEQ ID NO: 491493 - DNA, 120 bp, Artificial Sequence
  ENSG00000162923_79 (sequence is synthesized)
aaatgagccagtacatttggcggacagtagacaggtccctgaagaggagcaataagagatgaagccaaaaagaaagactgaaagcaacctgtggaaaactacttcagagaaagactttaa

SEQ ID NO: 491494 - DNA, 120 bp, Artificial Sequence
  ENSG00000162923_80 (sequence is synthesized)
atttctgagaaaatctttatacatattgagtatagatgctatcaaccacatacatgaaaataattgtttggggataatgcacaccatttgccaatgattaagattcagcccagtctttgt

SEQ ID NO: 491495 - DNA, 120 bp, Artificial Sequence
  ENSG00000162923_81 (sequence is synthesized)
aggcagcagctgggggaagaatcaacacaccagggagcagagcggagcggatccgaggacagaggcggcagctgcctccgctgccgcccgccgccgccgccgccgcagccactgccgggg

SEQ ID NO: 491496 - DNA, 80 bp, Artificial Sequence
  ENSG00000162923_82 (sequence is synthesized)
ccccggcgcgacccccgggccgcgcaccccgagctgcctccgggaggggggggggaaagggcccggatcctccttctccc

SEQ ID NO: 491497 - DNA, 120 bp, Artificial Sequence
  ENSG00000162923_83 (sequence is synthesized)
cttctccccctcctcctcctccccctcctctcaccctcaccctcaccctcctaccctgaccccctccccgcctccccggcccccctcaccccgaccctctccccggcccccgcctcccct

SEQ ID NO: 491498 - DNA, 120 bp, Artificial Sequence
  ENSG00000162923_84 (sequence is synthesized)
cccccgcctcgccccaccggcttcccaccacggcctctctcggcgaggaaactctggcctccgcttcctcctcctccgactcggacaccggcggagcctccccgcccccgcggaagaaac

SEQ ID NO: 491499 - DNA, 120 bp, Artificial Sequence
  ENSG00000162923_85 (sequence is synthesized)
caagatacacttaaaggtgtatccattattgtttaaataacgttttttttgggggggggggtttttgttgttgttgttgtttgagactatctcactctgtcacccaggctggagtggagt

SEQ ID NO: 491500 - DNA, 120 bp, Artificial Sequence
  ENSG00000162924_0 (sequence is synthesized)
agccgcgggaaattcccctcccgccaggctgctcgcctctcggctgggccagcactcggctctccccgctccgccccctgcccctggctcccgtacggtggacggcgacgctgggtgacc

SEQ ID NO: 491501 - DNA, 120 bp, Artificial Sequence
  ENSG00000162924_1 (sequence is synthesized)
cggggtgcaagaattcaggggttgggaaggtgtgagccgcaaacccagcggagggcgggaagaaggaggaggcctctagggtggtcgggggactgggggccccgccggcagaggtccctc

SEQ ID NO: 491502 - DNA, 120 bp, Artificial Sequence
  ENSG00000162924_2 (sequence is synthesized)
ggcctcctgactgactgactgcggccgcctccggccaggacgctgggagctgcctgcgggaaggtgcggggagcggagccatggcctccggtgcgtataacccgtatatagagataattg

SEQ ID NO: 491503 - DNA, 120 bp, Artificial Sequence
  ENSG00000162924_3 (sequence is synthesized)
aacaacccaggcagaggggaatgcgttttagatacaaatgtgaagggcgatcagcaggcagcattccaggggagcacagcacagacaacaaccgaacatacccttctatccagattatga

SEQ ID NO: 491504 - DNA, 120 bp, Artificial Sequence
  ENSG00000162924_4 (sequence is synthesized)
actattatggaaaaggaaaagtgagaattacattagtaacaaagaatgacccatataaacctcatcctcatgatttagttggaaaagactgcagagacggctactatgaagcagaatttg

SEQ ID NO: 491505 - DNA, 120 bp, Artificial Sequence
  ENSG00000162924_5 (sequence is synthesized)
gacaagaacgcagacctttgtttttccaaaatttgggtattcgatgtgtgaagaaaaaagaagtaaaagaagctattattacaagaataaaggcaggaatcaatccattcaatgtccctg

SEQ ID NO: 491506 - DNA, 120 bp, Artificial Sequence
  ENSG00000162924_6 (sequence is synthesized)
aaaaacagctgaatgatattgaagattgtgacctcaatgtggtgagactgtgttttcaagtttttctccctgatgaacatggtaatttgacgactgctcttcctcctgttgtctcgaacc

SEQ ID NO: 491507 - DNA, 120 bp, Artificial Sequence
  ENSG00000162924_7 (sequence is synthesized)
caatttatgacaaccgtgctccaaatactgcagaattaaggatttgtcgtgtaaacaagaattgtggaagtgtcagaggaggagatgaaatatttctactttgtgacaaagttcagaaag

SEQ ID NO: 491508 - DNA, 120 bp, Artificial Sequence
  ENSG00000162924_8 (sequence is synthesized)
atgacatagaagttcgttttgtgttgaacgattgggaagcaaaaggcatcttttcacaagctgatgtacaccgtcaagtagccattgttttcaaaactccaccatattgcaaagctatca

SEQ ID NO: 491509 - DNA, 120 bp, Artificial Sequence
  ENSG00000162924_9 (sequence is synthesized)
cagaacccgtaacagtaaaaatgcagttgcggagaccttctgaccaggaagttagtgaatctatggattttagatatctgccagatgaaaaagatacttacggcaataaagcaaagaaac

SEQ ID NO: 491510 - DNA, 120 bp, Artificial Sequence
  ENSG00000162924_10 (sequence is synthesized)
cggcaataaagcaaagaaacaaaagacaactctgcttttccagaaactgtgccaggatcacgtagaaacagggtttcgccatgttgaccaggatggtcttgaactcctgacatcaggtga

SEQ ID NO: 491511 - DNA, 120 bp, Artificial Sequence
  ENSG00000162924_11 (sequence is synthesized)
aaagtgctgggattacagttaattttcctgagagaccaagacctggtctcctcggttcaattggagaaggaagatacttcaaaaaagaaccaaacttgttttctcatgatgcagttgtga

SEQ ID NO: 491512 - DNA, 120 bp, Artificial Sequence
  ENSG00000162924_12 (sequence is synthesized)
gagaaatgcctacaggggtttcaagtcaagcagaatcctactatccctcacctgggcccatctcaagtggattgtcacatcatgcctcaatggcacctctgccttcttcaagctggtcat

SEQ ID NO: 491513 - DNA, 120 bp, Artificial Sequence
  ENSG00000162924_13 (sequence is synthesized)
cagtggcccaccccaccccacgctcaggcaatacaaacccactgagtagtttttcaacaaggacacttccttctaattcgcaaggtatcccaccattcctgagaatacctgttgggaatg

SEQ ID NO: 491514 - DNA, 120 bp, Artificial Sequence
  ENSG00000162924_14 (sequence is synthesized)
atttaaatgcttctaatgcttgcatttacaacaatgccgatgacatagtcggaatggaagcgtcatccatgccatcagcagatttatatggtatttctgatcccaacatgctgtctaatt

SEQ ID NO: 491515 - DNA, 120 bp, Artificial Sequence
  ENSG00000162924_15 (sequence is synthesized)
gttctgtgaatatgatgacaaccagcagtgacagcatgggagagactgataatccaagacttctgagcatgaatcttgaaaacccctcatgtaattcagtgttagacccaagagacttga

SEQ ID NO: 491516 - DNA, 120 bp, Artificial Sequence
  ENSG00000162924_16 (sequence is synthesized)
gacagctccatcagatgtcctcttccagtatgtcagcaggcgccaattccaatactactgtttttgtttcacaatcagatgcatttgagggatctgacttcagttgtgcagataacagca

SEQ ID NO: 491517 - DNA, 120 bp, Artificial Sequence
  ENSG00000162924_17 (sequence is synthesized)
tgataaatgagtcgggaccatcaaacagtactaatccaaacagtcatggttttgttcaagatagtcagtattcaggtattggcagtatgcaaaatgagcaattgagtgactcctttccat

SEQ ID NO: 491518 - DNA, 120 bp, Artificial Sequence
  ENSG00000162924_18 (sequence is synthesized)
atgaattttttcaagtataacttgcaagatttaaatccttttaaatcttgataccacctatatagatgcagcattttgtatttgtctaactggggatataatactatatttatactgtat

SEQ ID NO: 491519 - DNA, 120 bp, Artificial Sequence
  ENSG00000162924_19 (sequence is synthesized)
atataatactgactgagaatataatactgtatttgagaatataaaaaacttttttcagggaagaagcatacaactttggacatagcgaatacaaaattggaagctgtcataaaaagacaa

SEQ ID NO: 491520 - DNA, 74 bp, Artificial Sequence
  ENSG00000162924_20 (sequence is synthesized)
cgtgcctgtactgtcagctacttgggaggctgaggcacaataattgtttgaacccaggaagcagaggttgcagt

SEQ ID NO: 491521 - DNA, 120 bp, Artificial Sequence
  ENSG00000162924_21 (sequence is synthesized)
caagcaaatttaagataaaacttgtaatggctatgccattgaaaaacttaattttttatttttgaggcccatgggccaaggtaacccctaaggggttttcttaggcttcttggagcttag

SEQ ID NO: 491522 - DNA, 120 bp, Artificial Sequence
  ENSG00000162924_22 (sequence is synthesized)
atttgtatgtatatcaaaatgtctttaaaatgttaagttgggcagaaggcagttgaagtgagctttcaaggtatgggaggttttctacattttatactatttcaatctatgcctttaaag

SEQ ID NO: 491523 - DNA, 120 bp, Artificial Sequence
  ENSG00000162924_23 (sequence is synthesized)
ttgcttatgattttagctgtacactcattttttaaggggaagaagtttccttggaccattcgcctttcttagatgtcctcactccctgtgatctcataaaactgcctatttgacatctct

SEQ ID NO: 491524 - DNA, 120 bp, Artificial Sequence
  ENSG00000162924_24 (sequence is synthesized)
atctagaaatctaattaaagctcacactcagcatatccaaaactgaattcttggtcttccctcccaaacttgcttctccttcagtcttctccaactcagtaaatggcaatgccatacttc

SEQ ID NO: 491525 - DNA, 120 bp, Artificial Sequence
  ENSG00000162924_25 (sequence is synthesized)
tggttgctcaggccaaaaaccctgaagtcatccttgattcttcttttagcacccatatccaatccattagcaaatctggtagaccctaccttcacaatatatctaaagctgaccacctct

SEQ ID NO: 491526 - DNA, 120 bp, Artificial Sequence
  ENSG00000162924_26 (sequence is synthesized)
tttgacctctactattaacgccctattccaagccaccatcatctcttccctggattgaagctgtcatctacaaaaattcttcttatatccttgcattcctacagtctgttccccataaag

SEQ ID NO: 491527 - DNA, 120 bp, Artificial Sequence
  ENSG00000162924_27 (sequence is synthesized)
tagccagaatgattatttttaaaacaagtcaactcataccattcatctgctcaaaaccattcattggcttctcatctcactcagagcagtcaaagtccttaaaagttgcaggcctagact

SEQ ID NO: 491528 - DNA, 120 bp, Artificial Sequence
  ENSG00000162924_28 (sequence is synthesized)
ccctgtcctacctcaggtaccaccatatcccacctcctcatgcagctccaggcaccttggcctcagtgctcctcaaagcatcaagtatgcacttgccttggacagtctgtacttggtatt

SEQ ID NO: 491529 - DNA, 120 bp, Artificial Sequence
  ENSG00000162924_29 (sequence is synthesized)
ccctctgccttgaatgttgttctcccagaaaaatgcatagttcactcttacatccttcaggtgtcactccactgttacctgagcaggtcgtccttgaatatatacatcagcattcccttt

SEQ ID NO: 491530 - DNA, 120 bp, Artificial Sequence
  ENSG00000162924_30 (sequence is synthesized)
cccccctgctttatgtatgtccatagcactcaccacgatctgactttactaagtatttattcatttactgtttgttttcccataccgaaatataaactttctaaggacagaaatttttgt

SEQ ID NO: 491531 - DNA, 120 bp, Artificial Sequence
  ENSG00000162924_31 (sequence is synthesized)
gctttattgttgaatctccaatttgtagaaaaatgcctaccttatattaaacactcagtaaatgtttattgaacattaaaagtattactaatagaactttggtttttgaaagaaataata

SEQ ID NO: 491532 - DNA, 120 bp, Artificial Sequence
  ENSG00000162924_32 (sequence is synthesized)
actttaattataagacgtatatgatttttgcagttttacttagtgtgacattgggtttatgagaatcgtgtacattcaagtccaggaataataatggtcatccaaattgtttgaaaggaa

SEQ ID NO: 491533 - DNA, 120 bp, Artificial Sequence
  ENSG00000162924_33 (sequence is synthesized)
aataatcccagtggcaaaatgatggtagaatttgggtaatcttttttttccttttatgaaaagagattttattgaaggtaaaacattagaggttcattgagaatctctaaatccatgttt

SEQ ID NO: 491534 - DNA, 120 bp, Artificial Sequence
  ENSG00000162924_34 (sequence is synthesized)
tgacattgtcaagctcattgcaacttccagattgagtaacacttataacacatttccttttcaaagtgcaagatttttaaaagagacttgtcacatattcatttggctggtttcaaatgg

SEQ ID NO: 491535 - DNA, 120 bp, Artificial Sequence
  ENSG00000162924_35 (sequence is synthesized)
tgagctgaatgctgggtaatctctactagctccttaatcagatttaaaattctcagtgtttcctagttgtttctgcatactttatgtgagttgttatagctgtaacattacactttattt

SEQ ID NO: 491536 - DNA, 120 bp, Artificial Sequence
  ENSG00000162924_36 (sequence is synthesized)
gctgtttgtgtttcgtgacttttggtaattctggcatttagaaacctttcactttgcttcaaaacgtagttatattttggagttttcatttgatatataattatttattttgccctttta

SEQ ID NO: 491537 - DNA, 120 bp, Artificial Sequence
  ENSG00000162924_37 (sequence is synthesized)
tttcccaaagacattgtaagggttaattagatcattatattttattattacagattaaagttgggcagtaatcttaattatgatggaattatcattatgctaagtaattaactttaccta

SEQ ID NO: 491538 - DNA, 120 bp, Artificial Sequence
  ENSG00000162924_38 (sequence is synthesized)
gtttgttttacaactagaacctgccctaaatgttgaatatcttcctagcaagaaacagtctgtcattttacttacacgatgtctaaccaaaccataactttacataaactagtcgtttcg

SEQ ID NO: 491539 - DNA, 120 bp, Artificial Sequence
  ENSG00000162924_39 (sequence is synthesized)
gtcaaatagaaaaatgtgtgaatgccataaaaacaaaaattctcagttaaatgatactgggaaatagggaagacagcaaagtgagacttgggctcaggatggttcaggaagaaaaaaaaa

SEQ ID NO: 491540 - DNA, 120 bp, Artificial Sequence
  ENSG00000162924_40 (sequence is synthesized)
gaaagacccctgagtaccattaatattcctcagaaattattatttcaaaaggaaatatttctgtattataaatttttcatgagcagccattatgaaatctcacaagaatcatagaattca

SEQ ID NO: 491541 - DNA, 120 bp, Artificial Sequence
  ENSG00000162924_41 (sequence is synthesized)
ataaaaaaggtagaaagtaatttttttacttaaaaatataaattaaaataaatttttaaaatcataagcacataaatagaacttaccagggagaaagaaaaacctgaaggcacaatttct

SEQ ID NO: 491542 - DNA, 120 bp, Artificial Sequence
  ENSG00000162924_42 (sequence is synthesized)
tttctgttcaaaatgtgaacccaggatgtctctagatgatgatggatgataggtggggagattttttttttttttaatacagaatctcatagttttggattaattagcaccaatcagttt

SEQ ID NO: 491543 - DNA, 120 bp, Artificial Sequence
  ENSG00000162924_43 (sequence is synthesized)
aaacactgactgttagaatagctgcatgggtttttttctttaaactaattaagcgttggctacttagtataagtaagtataagccgaattaaggttctgctacatctgtgtttagaatat

SEQ ID NO: 491544 - DNA, 120 bp, Artificial Sequence
  ENSG00000162924_44 (sequence is synthesized)
catttttcaggtgctattttttgaccctgtatagactttaatttaaaatgaatttggtaacgtttctcctctgtctctacatatattcatgctttcacctgctcttttaacacctgcttt

SEQ ID NO: 491545 - DNA, 120 bp, Artificial Sequence
  ENSG00000162924_45 (sequence is synthesized)
tagtatctgaggcactttttctgaactctacttgtgcactggatccctcctcctttctctgccaggctgtgtttactttatccttacatcaccacttagtgattcctttctttgtataaa

SEQ ID NO: 491546 - DNA, 120 bp, Artificial Sequence
  ENSG00000162924_46 (sequence is synthesized)
catggtaaatgtcttcattagcctaaaaggaaagaccaaataaaacctttcctaccacttggatgcatttgcatcctgacttctgaaatgcctccagcctccattttctcccttcccagt

SEQ ID NO: 491547 - DNA, 120 bp, Artificial Sequence
  ENSG00000162924_47 (sequence is synthesized)
tattccttagcccagccatctctgtctttagctcctacaattttcttaggatattctgggaaagatgagcggagactgcccgccttgtcaaatctagtgtctttttttcagtcctcacac

SEQ ID NO: 491548 - DNA, 120 bp, Artificial Sequence
  ENSG00000162924_48 (sequence is synthesized)
tgcttgacctatgtataacctcctatacttccctctttgcatactcctctgggttttctgtggtagtcaagattcctccctgagatttatttcccatgagtcttgacccctcccctcagt

SEQ ID NO: 491549 - DNA, 120 bp, Artificial Sequence
  ENSG00000162924_49 (sequence is synthesized)
tggtgctatttccccctacccgccctccgatgatcttatcagagcccacaggttcagttttctttcatgctacctgaatgtcctgataaactggctcgctctcttctttaccttccataa

SEQ ID NO: 491550 - DNA, 120 bp, Artificial Sequence
  ENSG00000162924_50 (sequence is synthesized)
tggcattaccatttaccacgccacccaagatacttactaggaacctcaaagtattgtattctttttctccatcacactcatacttaatcatcaagtccttttgagcttgtctcctcttga

SEQ ID NO: 491551 - DNA, 120 bp, Artificial Sequence
  ENSG00000162924_51 (sequence is synthesized)
atatgtcccttcttaattcctgctgccttcttagtaaaggccttcattcttttttccctagtaataatcttttccatatgttccagttaaaataccatgttctccctattccttattaca

SEQ ID NO: 491552 - DNA, 120 bp, Artificial Sequence
  ENSG00000162924_52 (sequence is synthesized)
tagctagcattccttgaaaaaaaacaattctctcaggcctccatacctttagcatgttacccactctgcctctgctcttctggaactagaacactcatccttgaaggctgggcttctgta

SEQ ID NO: 491553 - DNA, 120 bp, Artificial Sequence
  ENSG00000162924_53 (sequence is synthesized)
tgaaggttggtcctgcctccttacttgaggtgaagctttgtacatgcctgtattacggacatcctcttatttaagtgtttgtctctttcgtcattgggactccagcacccagcatagtcc

SEQ ID NO: 491554 - DNA, 120 bp, Artificial Sequence
  ENSG00000162924_54 (sequence is synthesized)
ctagtatactagttggtgctgaataaatagtagctattattagaaaaggaagggtgaaattgacatgggagttagtaaaatgtatatggaaatgatttttaaagggaaaggtaatgattt

SEQ ID NO: 491555 - DNA, 120 bp, Artificial Sequence
  ENSG00000162924_55 (sequence is synthesized)
tctggcaggaaaagcagcaatgacaagattacttaagtcttgtgaaataacacttctcttccttgacctgctgcttcccttttttaccacacacacacgcacacataccacagccctttg

SEQ ID NO: 491556 - DNA, 120 bp, Artificial Sequence
  ENSG00000162924_56 (sequence is synthesized)
agactgaaagcagctctattgagaatagtagtgtcaactgtattatgtagaaattctaaagtttttgggattatttcatagccctgaccttgctacttctctccactttatgtggcaggt

SEQ ID NO: 491557 - DNA, 120 bp, Artificial Sequence
  ENSG00000162924_57 (sequence is synthesized)
ttaatctcaggtctccctcatacacttctcagcctcagcacctaaccctcacacaacactccagtattgatgcagtcaatcttgtataacattttttgaatgtccaatgtgcaaagcacg

SEQ ID NO: 491558 - DNA, 120 bp, Artificial Sequence
  ENSG00000162924_58 (sequence is synthesized)
atgttggaaattatacagaggtgaataagacaaaaactcttgctctcaaagatgtcagtctttttctttgcaaggataacacatgtagagtaaaatgcataaaggggactaattttaaat

SEQ ID NO: 491559 - DNA, 120 bp, Artificial Sequence
  ENSG00000162924_59 (sequence is synthesized)
gtacagcttaattaatttttatgtatgttaacacccatgtcaccaccatgtttaggacatttccagcacccctgaaatttccttcatgccccttcccagtctgtacctacacctctaaat

SEQ ID NO: 491560 - DNA, 120 bp, Artificial Sequence
  ENSG00000162924_60 (sequence is synthesized)
ctattttcaatcttaatggccttttaaataactgggcttctcacaaccatagtgaacagaaacagctgggttgtcaacgtctaacctaatacttcaggaaaactcatgatggtttccatg

SEQ ID NO: 491561 - DNA, 76 bp, Artificial Sequence
  ENSG00000162924_61 (sequence is synthesized)
ctaacctaatacttcaggaaaactcatgatggtttccatgttaagagagacatggagcagggcactggcatggtgg

SEQ ID NO: 491562 - DNA, 83 bp, Artificial Sequence
  ENSG00000162924_62 (sequence is synthesized)
ggtaatataaggaaaacctgtctctgcaaaaaaaaaaaaaaaaagaggatacaaccaaatggaagaacattccatgctcatgg

SEQ ID NO: 491563 - DNA, 120 bp, Artificial Sequence
  ENSG00000162924_63 (sequence is synthesized)
aagtataataaaaaataaataaataaataaataagaaaaagaaagccaggcatggtgacatgtgcctgtggtcccagctattagggaggctgaggtgggaggatcccttgaacccaggag

SEQ ID NO: 491564 - DNA, 90 bp, Artificial Sequence
  ENSG00000162924_64 (sequence is synthesized)
agccgacttagaattggtgatccaggccgcctaatggcatcaaataatttgttatatctttaatttattgaaggatcaccacatgctttt

SEQ ID NO: 491565 - DNA, 120 bp, Artificial Sequence
  ENSG00000162924_65 (sequence is synthesized)
gttatatctttaatttattgaaggatcaccacatgcttttaaatagcatggagaaatggaaagaatagggactttttactcaggtaatacccagcctgctacctaacaggttgtgttgta

SEQ ID NO: 491566 - DNA, 120 bp, Artificial Sequence
  ENSG00000162924_66 (sequence is synthesized)
ctaaataaaatggtacataagaagaaacactgtaaattatatagtgcgaatcaaatattgttaataaaccaatatctgtatatcctatgtcccggattaatctttaatttagatactcct

SEQ ID NO: 491567 - DNA, 120 bp, Artificial Sequence
  ENSG00000162924_67 (sequence is synthesized)
tctagttatctaatacacagcagagtgagaaaaatcattatggattaggttctttagtaagaaacctgagatggacttctcattagcattaactagttattgcccagctttggagagcct

SEQ ID NO: 491568 - DNA, 120 bp, Artificial Sequence
  ENSG00000162924_68 (sequence is synthesized)
tcttttggcttatcatttattataagcccagaaataggtgactaatcagagataaatgtatgggttgtctgtatctagttttatgccttttttttgcctaagacgtagtcaaattaatat

SEQ ID NO: 491569 - DNA, 120 bp, Artificial Sequence
  ENSG00000162924_69 (sequence is synthesized)
tttaactaatacatcttagcagagtttagttaagcacaaagttaacagtgggtaggattgaatcttgaaagtaatcatgtctgtaatgtttttcatgcatgcaaaaagcacagacaaaac

SEQ ID NO: 491570 - DNA, 120 bp, Artificial Sequence
  ENSG00000162924_70 (sequence is synthesized)
cactcatgccctattaataaacaaaatacagatcaaagttttcaaaagtaatcactctatttattctaaatgtctgtggctttaggaaaataccaccagctagtacttacctatttaaag

SEQ ID NO: 491571 - DNA, 120 bp, Artificial Sequence
  ENSG00000162924_71 (sequence is synthesized)
atgtagaatttattatcctctaatattcttatcagttgtttccacaactttagtttactattggactttcaaaaatttaaagaattacaagtaaaattcattaaacacttgtgtgtgaat

SEQ ID NO: 491572 - DNA, 120 bp, Artificial Sequence
  ENSG00000162924_72 (sequence is synthesized)
agtaatacacagtaattagtacagcatgttgcttcttcaacaaattgagttttcagggaaatcagcaagtaaatgaaatataaatttttggtaaaagtatcaaacattcatcttgcccat

SEQ ID NO: 491573 - DNA, 120 bp, Artificial Sequence
  ENSG00000162924_73 (sequence is synthesized)
ttttcctcttaaactttattatctaatcaaacatagttttccataagatgtaataaaatatagataaggttggaatatttgaggatccatttgtggaactgaatttaatgagacttcatt

SEQ ID NO: 491574 - DNA, 120 bp, Artificial Sequence
  ENSG00000162924_74 (sequence is synthesized)
ggtgatacactcaatttttactgggtaattagctaataatgttggtcactgtctcacagttcaagtagctttaagatgatgtggcaaggaaaacacaaagcttttgggtaaccagcgttc

SEQ ID NO: 491575 - DNA, 120 bp, Artificial Sequence
  ENSG00000162924_75 (sequence is synthesized)
ttaaatgtatggtttttgaccaggtgaaccctttagaagtgatttctgttttaaaagtatgtacttaaaatacctttggctgtgatgaatgtagatcccagcagaataccaaaatcctat

SEQ ID NO: 491576 - DNA, 120 bp, Artificial Sequence
  ENSG00000162924_76 (sequence is synthesized)
tttttttgactgagtatttgtagatgcttaatgactgaaatgaatttggaggcactgatgaaagtgatttttttaaagttctcaggtactgttcaattatttaatgttaagtttagtatc

SEQ ID NO: 491577 - DNA, 120 bp, Artificial Sequence
  ENSG00000162924_77 (sequence is synthesized)
aagatacagttgtttttaaaatgccaaaatgctgtttattatacagaatattttattacatttgcaatatctttgtatatagtgatttttttcttgataataaatggaaaaattctaaaa

SEQ ID NO: 491578 - DNA, 120 bp, Artificial Sequence
  ENSG00000162924_78 (sequence is synthesized)
tattaatatgaagaattctataaaatcttttaccaaagaaaaagaatcaaaccaagaatctttcaaagaagtggaaatacttttgaggaagaggattatagttgcaagatttcaagaaag

SEQ ID NO: 491579 - DNA, 89 bp, Artificial Sequence
  ENSG00000162924_79 (sequence is synthesized)
ttttgaggaagaggattatagttgcaagatttcaagaaaggattaagaattcaagatttagctgaccaagcatagtggctcatgcctat

SEQ ID NO: 491580 - DNA, 120 bp, Artificial Sequence
  ENSG00000162924_80 (sequence is synthesized)
tgcttgagtccaggagcttaagaccagcctgggcaacctggtgaaaccctggctctacaaaaatacaaaaattagccaggtagggtgtcatgtacctgtagtccagctactcaggaggct

SEQ ID NO: 491581 - DNA, 120 bp, Artificial Sequence
  ENSG00000162924_81 (sequence is synthesized)
ttgcagtgagccggtatggtgccactgcattccagcctgggtggcagagtgagatcatctcaaaaaaaaatgttttttaagatttatttttgtagttattggaggcagaggaaggaaatg

SEQ ID NO: 491582 - DNA, 120 bp, Artificial Sequence
  ENSG00000162924_82 (sequence is synthesized)
tgaaagatattttagatgctagcaaaattgtagatgtgaagaacatgagcataagacagcatgagtatggagacaggcagacaaagtagcctccggttgcaagtgccatgtgaagtttga

SEQ ID NO: 491583 - DNA, 120 bp, Artificial Sequence
  ENSG00000162924_83 (sequence is synthesized)
acaatagtaatgttattataattgagttttgcttccttattcacgcccacccaattttactgatgtcatggtttttccatgtgggaacaagtatgactggtggtggtgggggagttcccc

SEQ ID NO: 491584 - DNA, 120 bp, Artificial Sequence
  ENSG00000162924_84 (sequence is synthesized)
atacaaaaacattttagtaattttttatgatgaatggctataactttatataatgtggcacaaaacatattctactgctaataacagtgaattcagggctcaaaaagcaaatctctgtgg

SEQ ID NO: 491585 - DNA, 120 bp, Artificial Sequence
  ENSG00000162924_85 (sequence is synthesized)
agctaggcaagcagcataaatgagtggtgtggatcaagtgtaggaggactaacaggcactgtagcaaactaaagagccctgaataaatggggcttagtccctagcctgttgtttctgtgc

SEQ ID NO: 491586 - DNA, 120 bp, Artificial Sequence
  ENSG00000162924_86 (sequence is synthesized)
caacctagtattgccaggtctttaaaatgtacaagagaagccggaaatccagatgttcatatgcaattacctgatttctaaatgtagataacctgtgcagatttttaaaaatataggcaa

SEQ ID NO: 491587 - DNA, 120 bp, Artificial Sequence
  ENSG00000162924_87 (sequence is synthesized)
cacttttgtgagcctagcaaaacatacctgtgggcttcaacctgtgaacatctctttacagcttttgctttacattatcaaacagactttattgatttgattctgaatttgtttgggagg

SEQ ID NO: 491588 - DNA, 120 bp, Artificial Sequence
  ENSG00000162924_88 (sequence is synthesized)
gaggcaaattttaccatttaatattgctttactgttaatctatattttggtatgtttgacataggcatattagtaattgtaaaacactgtatgttaaaatgatatagtatatattatttt

SEQ ID NO: 491589 - DNA, 64 bp, Artificial Sequence
  ENSG00000162924_89 (sequence is synthesized)
attatttttcttttaacagttcttagaagtacaaccccacttctttttttttttttgagcgcaa

SEQ ID NO: 491590 - DNA, 85 bp, Artificial Sequence
  ENSG00000162924_90 (sequence is synthesized)
gcgcccagccatataatcccacttcttactctctcatctttatcagagcaattggaagcacgttcatgctttgtttccaaaattt

SEQ ID NO: 491591 - DNA, 120 bp, Artificial Sequence
  ENSG00000162924_91 (sequence is synthesized)
gagcaattggaagcacgttcatgctttgtttccaaaatttgggtattcgatgtgtgaagaaaaaagaagtaaaagaagctattattacaagaataaaggcaggaatcaatccattcaatg

SEQ ID NO: 491592 - DNA, 120 bp, Artificial Sequence
  ENSG00000162927_0 (sequence is synthesized)
agagactttgctccctgtcgatgccgtggctggacaaatgccgctctcaactgctacagaccaaagtctacgctttaaagatagagaagccattctgtcaaagtgaaaacagaagcggta

SEQ ID NO: 491593 - DNA, 120 bp, Artificial Sequence
  ENSG00000162927_1 (sequence is synthesized)
ggtaggaagccgcccccctttctttcaagcacagagacccagagagacgcccaggagctcccgaaaaaaacgttgctgattagagctgccgggtcagaaacagctgtgagacactaaagt

SEQ ID NO: 491594 - DNA, 120 bp, Artificial Sequence
  ENSG00000162927_2 (sequence is synthesized)
ccccactgttataattattcaatatgttcccactgactgaggaaaacaagcatgtggcccagttgttgctcaatactggtacttgtccaagatgtatcttcagattctgtggtgtggatt

SEQ ID NO: 491595 - DNA, 120 bp, Artificial Sequence
  ENSG00000162927_3 (sequence is synthesized)
ttcatgcaccttacaaacttccatacaaggagttgctcaatgaactacagaaatttctggaaactgaaaaagatgaattaattttggaagttatgaacccacctcccaagaaaattcgac

SEQ ID NO: 491596 - DNA, 120 bp, Artificial Sequence
  ENSG00000162927_4 (sequence is synthesized)
tgcaagaactggaagatagtattgataatctaagtcaaaatggagagggaaggatctctgttagtcatgttggaagcactgcttccaagaactcaaatttaaatgtatgtaatgtatgcc

SEQ ID NO: 491597 - DNA, 120 bp, Artificial Sequence
  ENSG00000162927_5 (sequence is synthesized)
taggaattcttcaagaattctgtgagaaagatttcattaaaaaggtgtgccaaaaggttgaggcctctgggtttgaattcaccagcttggtattttcagtctccttcccaccacaactat

SEQ ID NO: 491598 - DNA, 120 bp, Artificial Sequence
  ENSG00000162927_6 (sequence is synthesized)
ctgtaagagagcatgctgcatggttgctggtaaaacaggaaatgggaaagcagagtctgtcgctgggaagagatgatatagttcagctaaaagaagcctacaaatggataactcaccccc

SEQ ID NO: 491599 - DNA, 120 bp, Artificial Sequence
  ENSG00000162927_7 (sequence is synthesized)
tgttttcagaggaactgggtgttcccattgatggaaagagcttgtttgaagtgagtgtggtctttgctcacccagaaacagttgaggattgccacttcctagctgcgatatgcccagatt

SEQ ID NO: 491600 - DNA, 120 bp, Artificial Sequence
  ENSG00000162927_8 (sequence is synthesized)
gttttaagccagccaaaaacaaacagtctgtattcactagaatggcagttatgaaagccttgaataagataaaggaagaggatttccttaagcagtttccttgtcctccaaactcaccaa

SEQ ID NO: 491601 - DNA, 120 bp, Artificial Sequence
  ENSG00000162927_9 (sequence is synthesized)
aggctgtatgcgctgttcttgaaattgaatgtgctcatggtgctgtttttgtggctgggagatataataaatactccaggaatctaccacaaactccttggataattgatggagaaagga

SEQ ID NO: 491602 - DNA, 120 bp, Artificial Sequence
  ENSG00000162927_10 (sequence is synthesized)
agctggaatcttcagtggaagaattaatttcagatcatctgttggcagtatttaaagcagagagttttaatttttcatcctctggaagagaagatgtagatgtgagaacattaggaaatg

SEQ ID NO: 491603 - DNA, 120 bp, Artificial Sequence
  ENSG00000162927_11 (sequence is synthesized)
gaaggccctttgcaattgagctggtgaatcctcatagagtacatttcacttcacaagaaattaaggaacttcagcagaaaattaataactcatctaacaaaatccaagtacgtgacttgc

SEQ ID NO: 491604 - DNA, 120 bp, Artificial Sequence
  ENSG00000162927_12 (sequence is synthesized)
agcttgtcacaagagaggcaataggacatatgaaagaaggtgaagaagaaaagacaaagacctacagtgccttaatttggacaaataaagcgatacagaagaaagacattgaattcctaa

SEQ ID NO: 491605 - DNA, 120 bp, Artificial Sequence
  ENSG00000162927_13 (sequence is synthesized)
atgacataaaggacttaaaaatcgaccagaaaacacctttgcgcgtccttcaccgaaggcccctggctgtgcgagctcgcgtcattcacttcatggagacacagtacgtggatgagcacc

SEQ ID NO: 491606 - DNA, 120 bp, Artificial Sequence
  ENSG00000162927_14 (sequence is synthesized)
acttccgcctccacttgaaaactcaggctggcacctacattaaagagtttgtacatggagacttcgggagaaccaagccaaacattgggtccctgatgaatgtgactgcagacattctgg

SEQ ID NO: 491607 - DNA, 120 bp, Artificial Sequence
  ENSG00000162927_15 (sequence is synthesized)
agctggatgttgagtctgtagatgttgactggccacctgctctggatgactagctttcaaatttggagacaaagagtatggttttcctggcatgatgtggacatccatggagcacatgcc

SEQ ID NO: 491608 - DNA, 120 bp, Artificial Sequence
  ENSG00000162927_16 (sequence is synthesized)
aattgttaatttgttgtaacatctcaggatctatatatgtgtatattttgtgttaaattgttccaaggatgtcttaggatttttctcattccctctttcacccccacaaaccaaactatg

SEQ ID NO: 491609 - DNA, 120 bp, Artificial Sequence
  ENSG00000162927_17 (sequence is synthesized)
aataatgaaataattctccttaattctttcatttagagaggtgcacaaacaggacacattctctgttaacctaagaagctgtaatttcagcaagatttccctccacaagagatataccac

SEQ ID NO: 491610 - DNA, 120 bp, Artificial Sequence
  ENSG00000162927_18 (sequence is synthesized)
ctttaaaatcatgttctaatttttgtaaattatctgaataaaagttatatctagatttatgcagcataatatcctataatagtctaagattgcaaatgcaaatctgacatcattattttc

SEQ ID NO: 491611 - DNA, 120 bp, Artificial Sequence
  ENSG00000162927_19 (sequence is synthesized)
cccaggaagcctcaaacaagctattaccaatgaagttcttttggctgtgatttgtcataaatcttaaccaaactatgaataatgaaataattctcattaatactttcattaagaaagaat

SEQ ID NO: 491612 - DNA, 120 bp, Artificial Sequence
  ENSG00000162927_20 (sequence is synthesized)
tttgacaatctaaaattgtcaatataggtttcctgtggagggaaagtaaaaccgtaggagccaaggcatgccatggtaggagcctttcataaatcttttaaataaggagaaacaagtgcc

SEQ ID NO: 491613 - DNA, 120 bp, Artificial Sequence
  ENSG00000162927_21 (sequence is synthesized)
tttaataacttcaatcccagggttaagaatttgaaaaattgagattgctaaacaaagacgaactggtattatttcagaatgcttcaatatattatccaattataaacattttaataatac

SEQ ID NO: 491614 - DNA, 120 bp, Artificial Sequence
  ENSG00000162927_22 (sequence is synthesized)
cttattaaagtagataggatattgtctccattttataaatatggaaaccaaagactagaagttaaatgacttatccaaaattgttagctacttctatattgaggactagaactgaagttt

SEQ ID NO: 491615 - DNA, 120 bp, Artificial Sequence
  ENSG00000162927_23 (sequence is synthesized)
cttggtttctagggtctttctaataagccctattactgagcacctgtttgtgtgaaggggcagctatggatgccatttaaactcatgtaactgataattaacttttggaatgtagttacc

SEQ ID NO: 491616 - DNA, 120 bp, Artificial Sequence
  ENSG00000162927_24 (sequence is synthesized)
aaatcaaagagcttaccaaaaaatagcccaagactatttaatacaatcttatatagttaccatttgttattaagttaaacctcagttggtattatgaagaggaaaaacattaagctaaac

SEQ ID NO: 491617 - DNA, 120 bp, Artificial Sequence
  ENSG00000162927_25 (sequence is synthesized)
ctaaaaaaaatgaatgggtcatttaagtttcagaaaggagcctcattacaatttcagatttgagtataatttccatcaccctaattcaactatttgagctttttttaagaatacatgtga

SEQ ID NO: 491618 - DNA, 120 bp, Artificial Sequence
  ENSG00000162927_26 (sequence is synthesized)
cttgactagtattagattactaaccatttcccatctctatattaaacataaatcacagataccaagattcactttagatatgaggaaaatggttttaatggacacaaaggagtcagccac

SEQ ID NO: 491619 - DNA, 120 bp, Artificial Sequence
  ENSG00000162927_27 (sequence is synthesized)
gttggaaccaacatagtttcataccacgttgaaaccatgtgtttgatatgcaaataacagcaaataattttttcactcttgtcaatgccaatgcattgaaaggcccagaaaatgagaaaa

SEQ ID NO: 491620 - DNA, 120 bp, Artificial Sequence
  ENSG00000162927_28 (sequence is synthesized)
ggataacaaacttttgataaaaaggtaagaatttctgtgtggatgttcctcagtttctgggaaaattttgctacaaaagagatttaaataatttaggaggcagtcttttgcatggtattt

SEQ ID NO: 491621 - DNA, 120 bp, Artificial Sequence
  ENSG00000162927_29 (sequence is synthesized)
ttggcttacctttgaatctagtggacctgtaatatgtaagaatgaagaatgtgcttagcaaactgaaatgagaagatttctatttcttaaatttctattcctgagattatataaaatttc

SEQ ID NO: 491622 - DNA, 120 bp, Artificial Sequence
  ENSG00000162927_30 (sequence is synthesized)
acgcaaagagtaagcattagctttaaatacttcttccaaatgttcctagaattttgagacaaagattgttaaaaattaatgtatgtctttgttttaggcagaactggaaatattaagtag

SEQ ID NO: 491623 - DNA, 120 bp, Artificial Sequence
  ENSG00000162927_31 (sequence is synthesized)
tgagagtactatagtttcccttttgcctacataaaagcattttaaaattagttttatgatttctttgtaagctttatttaaattcaaagtctttttcataacacttaagagaaagagccc

SEQ ID NO: 491624 - DNA, 120 bp, Artificial Sequence
  ENSG00000162927_32 (sequence is synthesized)
tttgtacttcttagtatctcttatatagtcccaaatatagtctgtggtttattttaggaaaaacatcaactctgaatacctggaaaagtcaaaagaaaataaagttggtaaaatgaaaaa

SEQ ID NO: 491625 - DNA, 120 bp, Artificial Sequence
  ENSG00000162927_33 (sequence is synthesized)
ttggaactagaagacatggatttgaatcccagttccaccactttccagcttcagtttactcctctgtaaatgggaatgatgataatacccacctcacaggactttaagggacaataccta

SEQ ID NO: 491626 - DNA, 66 bp, Artificial Sequence
  ENSG00000162927_34 (sequence is synthesized)
ttgtgagactccgtctgaaaattaaaaaaacaaaaacaaaaaaccagaaatggtacttgtgctatg

SEQ ID NO: 491627 - DNA, 120 bp, Artificial Sequence
  ENSG00000162927_35 (sequence is synthesized)
aaaacaaaaacaaaaaaccagaaatggtacttgtgctatgatgatttaaatatgtgtatattcatttatacacaatatgactgtaaagtaataagactggttttgtgtaaccctgcttac

SEQ ID NO: 491628 - DNA, 120 bp, Artificial Sequence
  ENSG00000162927_36 (sequence is synthesized)
acatttttttcagacacactgtaacctattatctattatatgttattaggttttaaatttatattatattaagagactgagtgttatcaactttcgtttgtttcattttatgtaaggcaa

SEQ ID NO: 491629 - DNA, 120 bp, Artificial Sequence
  ENSG00000162927_37 (sequence is synthesized)
tatacaagaatatttggacagctttttggaaatgttcataaattttgatctgttctattcatgtaactatgtatgtacatgcacatctgtatatgcactatgttatatctatattataga

SEQ ID NO: 491630 - DNA, 120 bp, Artificial Sequence
  ENSG00000162927_38 (sequence is synthesized)
tcttaggtaacaacaaacatatttgtgtgagtcaaaatgtacctgtatatgtatgtatgtatgtatatttctctgttaaagcaggagagctaatttctcaataaaatggatttaaatttg

SEQ ID NO: 491631 - DNA, 120 bp, Artificial Sequence
  ENSG00000162927_39 (sequence is synthesized)
gccaaaaaaacttctttttaaataatccagtgaaggattttttaagcttttaaaatgttaaattctgatagtcttaaattgaagtcaaagcatttctttttttctttttcccttagactt

SEQ ID NO: 491632 - DNA, 120 bp, Artificial Sequence
  ENSG00000162927_40 (sequence is synthesized)
ctttatgatctaagacacttatgaaggtaccaggtgccctaattgaccttaaaaggttagaaatgaatctttgccttgatgcaaagcatcagacttgatgcaaagcaacatataaataac

SEQ ID NO: 491633 - DNA, 120 bp, Artificial Sequence
  ENSG00000162927_41 (sequence is synthesized)
tgcaagcaaatatagagtcaactctggactatttaattttggtttatctgtggctaatcttgttttcaaatgcatggacagaacctattcaactacaatgagtatgggctcaatcctacc

SEQ ID NO: 491634 - DNA, 120 bp, Artificial Sequence
  ENSG00000162927_42 (sequence is synthesized)
ttgttggtatctcaaatccccctgtttacttttaggcagtaactgcctttgaaaacagaacatttcccttttccagagcagaccttacctcagtctctgaaatgggttgactttcaggga

SEQ ID NO: 491635 - DNA, 120 bp, Artificial Sequence
  ENSG00000162927_43 (sequence is synthesized)
agactcaacaggcttccaggtgtgaaaacaggaaggtcatcttaaattagattttaatattatggcctcattgcttcatcattttgctagaaggaaattccctgaatatcagatacaccc

SEQ ID NO: 491636 - DNA, 120 bp, Artificial Sequence
  ENSG00000162927_44 (sequence is synthesized)
ctattcaaataaaatcacaaaaccatctactaaagctaaacagtttttcaaaaccattctgaattatgcagtaatatttccttctgtaagaatatgctctgttctgtaaaccgagtattg

SEQ ID NO: 491637 - DNA, 120 bp, Artificial Sequence
  ENSG00000162927_45 (sequence is synthesized)
agagaatagagaataaaaccacttcacagatagcatgaagaggaaatgaggtaatgaaagtattttggaagttagagaagtcattaatgcaaaatatttttacctcaaatttcagttttg

SEQ ID NO: 491638 - DNA, 120 bp, Artificial Sequence
  ENSG00000162927_46 (sequence is synthesized)
aagcacaaataattttacatgttgtatcagtgagaacagaaaatagaaaacaaaagatgtgggttgagtgaagtttccctgaataaaaggaatgcgttgttcattttaattattgtatag

SEQ ID NO: 491639 - DNA, 120 bp, Artificial Sequence
  ENSG00000162927_47 (sequence is synthesized)
attagaataaggagcgagaaaaaaaaagctattcattattgtgattctagagtagctaataggtctactaactatccaatgaactcagtaaatataaagacaaaattgcaacatagtatg

SEQ ID NO: 491640 - DNA, 120 bp, Artificial Sequence
  ENSG00000162927_48 (sequence is synthesized)
gcatttttagctattcctgcccctgacccctccccgatatggaattttgtatattctccatggaggtaaaagtataaaatcatgctttttttggtgtacaaggatgttcattatagcatt

SEQ ID NO: 491641 - DNA, 120 bp, Artificial Sequence
  ENSG00000162927_49 (sequence is synthesized)
ttttttttgttacagaaaaattttctacagcttaaatgtctgacagtccctagagttgaaaagatttccatgatataatattaaagcaattttccaaaagcatgtcttaaaaaataatac

SEQ ID NO: 491642 - DNA, 120 bp, Artificial Sequence
  ENSG00000162927_50 (sequence is synthesized)
atatacatttatattcacaaaaatgcctagaaagaaacatcaaattgttaatggttctgcttcagtggcgtgggattgaaaaactgtcttgtatttgatcattttataatttatgtgtat

SEQ ID NO: 491643 - DNA, 120 bp, Artificial Sequence
  ENSG00000162927_51 (sequence is synthesized)
aatttttgtaataaaacaaaaaaaattaagatctggttttaaaactcaaatccattaagacgtttgagcactttaaaaagaagcttcatatggtttttagggatctgaatagtatgtttt

SEQ ID NO: 491644 - DNA, 120 bp, Artificial Sequence
  ENSG00000162927_52 (sequence is synthesized)
ttgccttgctaataattcaaatcatagtattggcagaataattcttcatttctctctgttattatttattttcaattctgtaaattctcattcatctttatacctaatttacacatttgt

SEQ ID NO: 491645 - DNA, 120 bp, Artificial Sequence
  ENSG00000162927_53 (sequence is synthesized)
ccaaaaagtatacacatttattttaaaacttttttggtaggatcactaatgactgagttttagaagttaaaaaaaaaaacaaaactatttcctttacagctgccctgataacaagttgat

SEQ ID NO: 491646 - DNA, 120 bp, Artificial Sequence
  ENSG00000162927_54 (sequence is synthesized)
ttgagagcagtagtatttccagtttttctggtcattcttttctgagccaatctttgagaattaatttctatttccattaataagttgttagatgttagtttccttttgctcatttttaaa

SEQ ID NO: 491647 - DNA, 120 bp, Artificial Sequence
  ENSG00000162927_55 (sequence is synthesized)
ctgtctttataatttttagagcttgtttgaagtgagtgtggtctttgctcacccagaaacagttgaggattgccacttcctgtaagttgccatgtaaacaacgtcaatggtgtaaaattg

SEQ ID NO: 491648 - DNA, 120 bp, Artificial Sequence
  ENSG00000162927_56 (sequence is synthesized)
ttaatgctgtttggttttcatgaaaatagtattgcttctcttcctaataagaaagagaagaacttgttatgtcttagtaggtttaaaatgtgccctcaaaaaaataaaatgtgtccttga

SEQ ID NO: 491649 - DNA, 120 bp, Artificial Sequence
  ENSG00000162927_57 (sequence is synthesized)
ttcctgggcaaaccgatatagctcatacagggactcattttgtctgctcctgatgtcctgagtttagcagccattttgtatgaaatatatttgaattatatctaccccaaaataaactca

SEQ ID NO: 491650 - DNA, 120 bp, Artificial Sequence
  ENSG00000162927_58 (sequence is synthesized)
agtcgggctgggagtaaagccgcacgcactccttcgctcgtgggggaggtagggtgaggtggcaaaccaggcagtttttcggatttcctctacaaacaagaagggagaagctcacttagt

SEQ ID NO: 491651 - DNA, 120 bp, Artificial Sequence
  ENSG00000162928_0 (sequence is synthesized)
agtcaggggtaggagcgggagccgagaggaggcggaggagatggcgtcccagccgccacctccccccaaaccctgggagacccgccgaattccgggagccggaccgggaccaggaccggg

SEQ ID NO: 491652 - DNA, 120 bp, Artificial Sequence
  ENSG00000162928_1 (sequence is synthesized)
ccccactttccaatctgctgatttgggtcctactttaatgacaagacctggacaaccagcacttaccagagtgcccccacctattcttccaaggccatcacagcagacaggaagtagcag

SEQ ID NO: 491653 - DNA, 120 bp, Artificial Sequence
  ENSG00000162928_2 (sequence is synthesized)
tgtgaacacttttagacctgcttacagttcattttcttctggatatggtgcctatggaaattcattttatggaggctatagtccttatagttatggatataatgggctgggctacaaccg

SEQ ID NO: 491654 - DNA, 120 bp, Artificial Sequence
  ENSG00000162928_3 (sequence is synthesized)
cctccgtgtagatgatcttccacccagtagatttgttcagcaagctgaagaaagcagcaggggtgcatttcagtccattgaaagtattgtgcatgcatttgcctctgtcagtatgatgat

SEQ ID NO: 491655 - DNA, 120 bp, Artificial Sequence
  ENSG00000162928_4 (sequence is synthesized)
ggatgctaccttttcagctgtctataacagtttcagggctgtattggatgtagcaaatcacttttcccgattgaaaatacactttacaaaagtgttttcagcttttgcattggttaggac

SEQ ID NO: 491656 - DNA, 120 bp, Artificial Sequence
  ENSG00000162928_5 (sequence is synthesized)
tatacggtatctttacagacggctacagcggatgttaggtttaagaagaggctctgagaatgaagacctctgggcagagagtgaaggaactgtggcatgccttggtgctgaggaccgagc

SEQ ID NO: 491657 - DNA, 120 bp, Artificial Sequence
  ENSG00000162928_6 (sequence is synthesized)
agctacctcagcaaaatcttggccaatattcttgttctttgctgttatccttggtggtccttacctcatttggaaactattgtctactcacagtgatgaagtaacagacagcatcaactg

SEQ ID NO: 491658 - DNA, 120 bp, Artificial Sequence
  ENSG00000162928_7 (sequence is synthesized)
ggcaagtggtgaggatgaccatgtagttgccagagcagaatatgattttgctgccgtatctgaagaagaaatttctttccgggctggtgatatgctgaacttagctctcaaagaacaaca

SEQ ID NO: 491659 - DNA, 120 bp, Artificial Sequence
  ENSG00000162928_8 (sequence is synthesized)
acccaaagtgcgtggttggcttctggctagccttgatggccaaacaacaggacttatacctgcgaattatgtcaaaattcttggcaaaagaaaaggtaggaaaacggtggaatcaagtaa

SEQ ID NO: 491660 - DNA, 120 bp, Artificial Sequence
  ENSG00000162928_9 (sequence is synthesized)
agtttccaagcagcaacaatcttttaccaacccaacactaactaaaggagccacggttgctgattctttggatgaacaggaagctgcctttgaatctgtttttgttgaaactaataaggt

SEQ ID NO: 491661 - DNA, 120 bp, Artificial Sequence
  ENSG00000162928_10 (sequence is synthesized)
tccagttgcacctgattccattgggaaagatggagaaaagcaagatctttgatatctttcatgtttgcctgcagttgaacaatactttagagtactttttaaaattatttctcacaaaga

SEQ ID NO: 491662 - DNA, 120 bp, Artificial Sequence
  ENSG00000162928_11 (sequence is synthesized)
aatgaatgtacaatccaatgaaaacatttgttattggctatttcaggtgttttgctgctagaaattattaaagttacacactagtatgttggtctggtgacctggttacattttattata

SEQ ID NO: 491663 - DNA, 120 bp, Artificial Sequence
  ENSG00000162928_12 (sequence is synthesized)
cacattattggaccataaggacatttgtttcacctagattttaagattatggagactgctgtcatttttatcttatttaaatctctaggtttattggaagagtaagattgatgaactata

SEQ ID NO: 491664 - DNA, 120 bp, Artificial Sequence
  ENSG00000162928_13 (sequence is synthesized)
gcatgcacagtttggtacagtagagatcattaatacttttaaaagttctgcattaattgacttggaatccttagaaatggagtggtgacatgtcagtatgagaacaggcaaaaggtaaat

SEQ ID NO: 491665 - DNA, 120 bp, Artificial Sequence
  ENSG00000162928_14 (sequence is synthesized)
ttttttttttttttacaaccttaagtaatctcaataataaaattttctgatctgtattatatccagtgttgggtttatattttcacccacaaacaactgacactgctatcttttactgta

SEQ ID NO: 491666 - DNA, 120 bp, Artificial Sequence
  ENSG00000162928_15 (sequence is synthesized)
tttttaaaaatttaatttgaaaaggtcacccagaagcattctgaaggaaatggttctagaattatagagtatgtagccctaatagttttccctcctagcaaaaagtctgaaatttatctt

SEQ ID NO: 491667 - DNA, 120 bp, Artificial Sequence
  ENSG00000162928_16 (sequence is synthesized)
aatagttttccctcctagcaaaaagtctgaaatttatctttcttacaaactgttccatttcttctaaggatcccttaattatttatctctttaagccaggcatggtggctcacgcctgta

SEQ ID NO: 491668 - DNA, 89 bp, Artificial Sequence
  ENSG00000162928_17 (sequence is synthesized)
taaaattatttatttctttaaaatatgactagttttcatactgggtgaatcagaagtatatgaaaggtatactttcttttcctacaaca

SEQ ID NO: 491669 - DNA, 120 bp, Artificial Sequence
  ENSG00000162928_18 (sequence is synthesized)
tcagaagtatatgaaaggtatactttcttttcctacaacaaatacttgagttcttttgagtttgcacttaatgatataatcagttataatagtaatttttaatattttcatagattgttt

SEQ ID NO: 491670 - DNA, 120 bp, Artificial Sequence
  ENSG00000162928_19 (sequence is synthesized)
gcttctaccttgtgtaattttttaaattccatatttaggatgctctgtaaatattgaaaatgtgtcacattggatacatttttcttttaggtttagtttttactactgagacttatttat

SEQ ID NO: 491671 - DNA, 87 bp, Artificial Sequence
  ENSG00000162928_20 (sequence is synthesized)
tttcttttaggtttagtttttactactgagacttatttatagtcttagtgctctattgccatttagaatatgataatcctcatgcct

SEQ ID NO: 491672 - DNA, 79 bp, Artificial Sequence
  ENSG00000162928_21 (sequence is synthesized)
aggtaataatacgataatgctatttgacgtgttttttggtttataatgattttaaatgcagttaactttcagtacactg

SEQ ID NO: 491673 - DNA, 120 bp, Artificial Sequence
  ENSG00000162928_22 (sequence is synthesized)
tttataatgattttaaatgcagttaactttcagtacactgaatatttccccagaaaattggaaacttcatatacttggctacgaacatactacagagtaatactatcaggaatacaggtg

SEQ ID NO: 491674 - DNA, 120 bp, Artificial Sequence
  ENSG00000162928_23 (sequence is synthesized)
ggaatacaggtgtataagaatacatttatagatattgttgaaaactttgaactgtttgataaaaattgtgatttagtattttttcttttgtctttttttgaaacggagtctcactctgtc

SEQ ID NO: 491675 - DNA, 120 bp, Artificial Sequence
  ENSG00000162928_24 (sequence is synthesized)
gcacccagcgatttagtatttttttctaatagactatgttcaacaaataagtaattctcgaatagttcagattaaaacatacaggaaccaagtacatacccagcatagaagaactttact

SEQ ID NO: 491676 - DNA, 120 bp, Artificial Sequence
  ENSG00000162928_25 (sequence is synthesized)
aaaggcttcttggaaagcccttttttgaaacgacagtatcgtaagtaacatatcatttataatagaaatcttgacccagtgcagaaaaataaatatagtaaaatttatttatctttggcc

SEQ ID NO: 491677 - DNA, 120 bp, Artificial Sequence
  ENSG00000162928_26 (sequence is synthesized)
agttttccaacacccaggtattagccttgaagttgaagagataaggtttcttgtatattatttttcatttgtgttctacaattaaaggttctgctttgatttgtcagataatttatagaa

SEQ ID NO: 491678 - DNA, 120 bp, Artificial Sequence
  ENSG00000162928_27 (sequence is synthesized)
attttgttctcaaaacaaatgtttgataaaacagattattaaatttggggttgagatgtctaaattgaatgctagaagtaaagtagaagtgaccactattaaagatgtatagggagaaga

SEQ ID NO: 491679 - DNA, 120 bp, Artificial Sequence
  ENSG00000162928_28 (sequence is synthesized)
gtacagcacaaagtgataaaatagtgacacttttgtaggggtgtttattgtttggttaagtctgctaaattacggtatgcattatctggtgactatttgtgcctgaaaattcgttttgta

SEQ ID NO: 491680 - DNA, 120 bp, Artificial Sequence
  ENSG00000162928_29 (sequence is synthesized)
ttaaaattctggagaaggaattcaggactagaataaagagaaattttgtaaccttttttatcatgacagttttagaataatttttttagctgagattaaatgttcaaggctccaatatta

SEQ ID NO: 491681 - DNA, 120 bp, Artificial Sequence
  ENSG00000162928_30 (sequence is synthesized)
gctccaatattatttttaggaacttatttaaggagtgctactttacagaaattactaacacaccaaaacattattaattaaataaaatataagtttacaataataaaacatgtttctttt

SEQ ID NO: 491682 - DNA, 120 bp, Artificial Sequence
  ENSG00000162928_31 (sequence is synthesized)
tatattttatgagttcagaaaggaaatggtaaaagaactatacattttcatgttttaacattttatgtacgtacttgattctgtctgtgtcataattacacatttacttgaacacagcta

SEQ ID NO: 491683 - DNA, 120 bp, Artificial Sequence
  ENSG00000162928_32 (sequence is synthesized)
tcctttatcttgtgctttctttaatagaaaaatgaacagaaactgaatgcagttaaatttttatttttagtaggttgtgaagttacttttactggagaaataaaaatatgttaaacttga

SEQ ID NO: 491684 - DNA, 120 bp, Artificial Sequence
  ENSG00000162928_33 (sequence is synthesized)
caactttggtctgtagcagttgagagcggcatttgtccagccacggcatcgacagggagcaaagtctctccttaaaggtgttaacctctcgagaagttgctgaaagccggaaaggtttta

SEQ ID NO: 491685 - DNA, 120 bp, Artificial Sequence
  ENSG00000162928_34 (sequence is synthesized)
cgcaacaggaactcaagccccgtacactttgcattcttttccagcataactcagccagtgtttcggatcgagattggagaagcaactttaaagcaggagttctagatctgaggcctatgg

SEQ ID NO: 491686 - DNA, 120 bp, Artificial Sequence
  ENSG00000162928_35 (sequence is synthesized)
atggactttgtgtgcaaaatagtgtatttttctgaggcctgtattttttttttgtttggtttttaatcagtatcagttggtttctaggactttaaaaaggctaaaacatgcagagttggg

SEQ ID NO: 491687 - DNA, 120 bp, Artificial Sequence
  ENSG00000162928_36 (sequence is synthesized)
agataggtgtgattcaaatgtcaaatcacctactattgtaggttttcctaagcgtaaaaaccccaacatattggaatgtatttctgctgtattctgaaatcttttatttaaacactaaaa

SEQ ID NO: 491688 - DNA, 120 bp, Artificial Sequence
  ENSG00000162928_37 (sequence is synthesized)
tgctttaacacagtaacgacttagtttaataaggatatatacataacaagtaataagtttgattaggctggtaagccacggtgacattatctgctaccttttttttgagtgggttctttt

SEQ ID NO: 491689 - DNA, 120 bp, Artificial Sequence
  ENSG00000162928_38 (sequence is synthesized)
ttccccatttaggctgcttgtcgaatgagagaggttttattttttgcatctgttaaagttctttttatgtaaaattaaccattttcccactttatcgtgaaatattttaaacacagagac

SEQ ID NO: 491690 - DNA, 120 bp, Artificial Sequence
  ENSG00000162928_39 (sequence is synthesized)
cagtagagagtaagataatacctatatattcactactcaactttaaacagtgttaacatttgccagacttatgtcgaatttttcaaaataaaagacggctaaactctcccattcttcttt

SEQ ID NO: 491691 - DNA, 120 bp, Artificial Sequence
  ENSG00000162928_40 (sequence is synthesized)
aagacaacgcacctattgcgtctagcaattctgttccccgaggaaacgtgcgttttagaacaaaagtaccagcccgctctcgctaggactaagtgagcttctcccttcttgtttgtagag

SEQ ID NO: 491692 - DNA, 120 bp, Artificial Sequence
  ENSG00000162928_41 (sequence is synthesized)
gaaatccgaaaaactgcctggtttgccacctcaccctacctcccccacgagcgaaggagtgcgtgcggctttactcccagcccgactggtccactcccagaaaagcctcggtgggactcc

SEQ ID NO: 491693 - DNA, 120 bp, Artificial Sequence
  ENSG00000162928_42 (sequence is synthesized)
gacgtctagggagttgtagccgctaccagaaatatcgatgagcctttaccctgaggtttagaaaggcagctctttctggggcaaatacaaagagcgtgtttcttcctacaaattagtggc

SEQ ID NO: 491694 - DNA, 120 bp, Artificial Sequence
  ENSG00000162928_43 (sequence is synthesized)
atcctcccgctgtatggattcagctggcaaagtaactcaagccttgtcctgactgcaagggtgggcggggtggacggctcggtgttctgcccgttgtgtcttacgctccaggtgctggtc

SEQ ID NO: 491695 - DNA, 120 bp, Artificial Sequence
  ENSG00000162929_0 (sequence is synthesized)
agtctccgcagccgcctgcaagcgggcgggggcggggtgtgaggcgctgcggacggggttgcgggctcggtagcggcagcttcagggcgcgagcgcgggcggtgccgaccactgcaggta

SEQ ID NO: 491696 - DNA, 120 bp, Artificial Sequence
  ENSG00000162929_1 (sequence is synthesized)
acagaggcgctgcgagggcagccgcggccctgtggagatgaggaaattgaggcacagagattaactaatctgaaccagataatgccataagtagtagaactgcgatgcaaacttggacag

SEQ ID NO: 491697 - DNA, 120 bp, Artificial Sequence
  ENSG00000162929_2 (sequence is synthesized)
tctgactccagagtctgcacacttaaccactccactattctggccttctacaagttccaaaagatgagtcgtggatattcagaaaacaacaatttcctgaacaataataaccaaatggta

SEQ ID NO: 491698 - DNA, 120 bp, Artificial Sequence
  ENSG00000162929_3 (sequence is synthesized)
ttggacatgatcctttatccattaattggaatccctcagactatcaactgggaaactatagcaaggctcgtgcctggattaacaccaaaagagtgtgcaaaaaggtttgatgaattaaag

SEQ ID NO: 491699 - DNA, 120 bp, Artificial Sequence
  ENSG00000162929_4 (sequence is synthesized)
agcagtggaagctcgcctgttgacaaccagtataattccctaatggctgctggagagagtcctgttgaaactttagccacatatatcaaatcctcacttcttgacatacatggagaattt

SEQ ID NO: 491700 - DNA, 120 bp, Artificial Sequence
  ENSG00000162929_5 (sequence is synthesized)
caggagactccagttggacatgatgcagtttccaaaactggaagacatagtatagcttccacaaggaattgttcttcagaaagtgaaaattgtactactcataatggtggagaaatgact

SEQ ID NO: 491701 - DNA, 120 bp, Artificial Sequence
  ENSG00000162929_6 (sequence is synthesized)
gaagaatctgaagggccaaacatggtgatccatgtgtgtgatgaagcaaaaaacttgaaagaagattttacttgcccgcgagatcttttgatatcagaaatgaagtactttgctgaatat

SEQ ID NO: 491702 - DNA, 120 bp, Artificial Sequence
  ENSG00000162929_7 (sequence is synthesized)
ttatctatggatgcccagcgctgggaagaggtggacatttcagttcattgcgacgttcacattttcaactggttgataaaatacattaaaaggaacactaaggagaataaagattgtgag

SEQ ID NO: 491703 - DNA, 120 bp, Artificial Sequence
  ENSG00000162929_8 (sequence is synthesized)
atgcccactttagagccaggaaatgtcatttcaattcttatttcttcggagtttttaaaaatggattcactagttgaacagtgtattcagtattgccacaaaaatatgaatgccatagta

SEQ ID NO: 491704 - DNA, 120 bp, Artificial Sequence
  ENSG00000162929_9 (sequence is synthesized)
gctaccccatgcaacatgaactgtattaatgcaaatcttctcacacgtatagctgatctgttctcacacaatgaagttgatgatttaaaggacaaaaaagataaatttaaaagcaaactt

SEQ ID NO: 491705 - DNA, 120 bp, Artificial Sequence
  ENSG00000162929_10 (sequence is synthesized)
ttttgtaagaagattgaaagactgtttgatcctgagtacttgaatccagattctcggagtaatgcagcaacattgtatagatgctgtttgtgtaagaaacttttaacaaaagaaacagaa

SEQ ID NO: 491706 - DNA, 120 bp, Artificial Sequence
  ENSG00000162929_11 (sequence is synthesized)
agaagaattccttgcattcctggaaaaatcaatgtggatcgacgtggaaatattgtctatattcacataagagataagacatgggatgttcatgagtatttgaatagtcttttcgaagaa

SEQ ID NO: 491707 - DNA, 120 bp, Artificial Sequence
  ENSG00000162929_12 (sequence is synthesized)
ttaaaatcttggagagatgtatactggcgattgtggggaacaatcaattggctgacttgttcaagatgttatcaggcctttctctgtattgaattttcacattgtcaataccactcagaa

SEQ ID NO: 491708 - DNA, 120 bp, Artificial Sequence
  ENSG00000162929_13 (sequence is synthesized)
acagtggtttatcctactgcagcaagttcattgaatactgttggcactggaatttatccctgctgtaaccaaaaggttcttcggtttgatcctactcagcttacaaagggctgtaaagtg

SEQ ID NO: 491709 - DNA, 120 bp, Artificial Sequence
  ENSG00000162929_14 (sequence is synthesized)
agggaccacatggttacacttcgtgatcaaggtgaaggcggagatttgccgtcctgtcccactgctagaatgttggacgatttgcacaagtacagagatgtcattgttgtgcctttttca

SEQ ID NO: 491710 - DNA, 120 bp, Artificial Sequence
  ENSG00000162929_15 (sequence is synthesized)
aaagatacagttagtgatgttggggttggcctctgtgatgaaaagggtatagaatgtgatgttttactggagccaaatacaccatggggtcccaaaactggggagctcaatgctttcttg

SEQ ID NO: 491711 - DNA, 120 bp, Artificial Sequence
  ENSG00000162929_16 (sequence is synthesized)
tcattgaaaaactggactctacaactgaaacaacagtcactgttttcagaagaagaagaatataccactggatctgaggtcactgaagatgaagttggagatgaagaagaagtatccaag

SEQ ID NO: 491712 - DNA, 120 bp, Artificial Sequence
  ENSG00000162929_17 (sequence is synthesized)
aaacaaaggaaaaaggagaagccaaagaagttcactagacaaccaaaaaagcaggtatcttcaccctgtgcccagaggaaagaaaaggcattggagaagtcagcttctagagatgtgtct

SEQ ID NO: 491713 - DNA, 120 bp, Artificial Sequence
  ENSG00000162929_18 (sequence is synthesized)
cctttcgttatgagtatgcagaagaataagtgggatgccacaagatccttgagattcaaccaggatgcacaaagagaagacgatcaacggcgaatgactgaaattacagggcacctaata

SEQ ID NO: 491714 - DNA, 120 bp, Artificial Sequence
  ENSG00000162929_19 (sequence is synthesized)
ctggaccgagtcaagtcaaaggaagcaaaagaatttgcaggaggtatttattccaggctggaagcacaaatcaaggcctcagtgccagttagtgcacgccaaagcagctcagagaaaaac

SEQ ID NO: 491715 - DNA, 120 bp, Artificial Sequence
  ENSG00000162929_20 (sequence is synthesized)
acaaggtctaaaagtcgttttggtcaagggcgtcctgcataaagtaccttaaaatataagtaaaaagagagaaggcactcttctggacatctgaaattgctcacttcttgaagatcttca

SEQ ID NO: 491716 - DNA, 120 bp, Artificial Sequence
  ENSG00000162929_21 (sequence is synthesized)
ttcagaacaatgacttccaactgttttatgttattattattttaatccacataaatcataattctaaaagaaatgcatagttaggttttatgaaaatctaattgtaaatatgaaactttt

SEQ ID NO: 491717 - DNA, 120 bp, Artificial Sequence
  ENSG00000162929_22 (sequence is synthesized)
tctgattttcttctaatatcattctaggctatgtagaaagcaattatttacaaatttgcatagttgagactcccagtgttttcctttatttatttgaaaaagaaaggcctaaactgtcag

SEQ ID NO: 491718 - DNA, 120 bp, Artificial Sequence
  ENSG00000162929_23 (sequence is synthesized)
gtagccaagtttttttaagaccttaaaagttaggggaacacaactggtagtgttaccatgcatggcactgattgtagtatgtctttggagctgtaaatcttgagatagcattgagaactg

SEQ ID NO: 491719 - DNA, 120 bp, Artificial Sequence
  ENSG00000162929_24 (sequence is synthesized)
caggttgtgtgacgaaattcccaatgatgctaattttaagtctgcatgaatattaaggagtgacaggtctcaagactgcattaaatgaagtttcagggtaaggtatttcagtactgtgtt

SEQ ID NO: 491720 - DNA, 120 bp, Artificial Sequence
  ENSG00000162929_25 (sequence is synthesized)
gggcagaagggttaatttttttcagcattatatcgtggaaagtacaatgttaatccaacttttttttctttcagtttttaatgcttatctattgatcatctgagctggaattactgatta

SEQ ID NO: 491721 - DNA, 120 bp, Artificial Sequence
  ENSG00000162929_26 (sequence is synthesized)
ttactctgtcctctgtgaaactagtggcattctgaatttggtaaaataaccattgatagttttaggatagtaaatcatttctgttatatgagacacccactgtacagttctcagggctct

SEQ ID NO: 491722 - DNA, 120 bp, Artificial Sequence
  ENSG00000162929_27 (sequence is synthesized)
aaaacccaaccatatttctgtaaccattcaaataactccttaaaacagttatacttgctagttcggtctaaaattttccaaatacattagataggtgaaaatttgcatatattcaagaaa

SEQ ID NO: 491723 - DNA, 120 bp, Artificial Sequence
  ENSG00000162929_28 (sequence is synthesized)
aatcaaaataaaattctattttataaatcatgtttaaatttttctagccaggcagaaagagtgctcagggaaaatttgttccaaactataaccatataataaattatgtgtttgtaaatt

SEQ ID NO: 491724 - DNA, 120 bp, Artificial Sequence
  ENSG00000162929_29 (sequence is synthesized)
atatgtaggtctctgaaaaactttaagatgcactgtttctatttttttaagtcttaatttgccttataactgacatttcttcaaattattcagagaacagactttaataatgtgtgacaa

SEQ ID NO: 491725 - DNA, 120 bp, Artificial Sequence
  ENSG00000162929_30 (sequence is synthesized)
aagagcaatttccattgaaatattgaagtgttacactcagtttacacgtacagaaatcattctttttagtgagtcttttagttgataaatgaagctagatgttatttgataactggcttt

SEQ ID NO: 491726 - DNA, 120 bp, Artificial Sequence
  ENSG00000162929_31 (sequence is synthesized)
gccaaggtttttgaactgctgtttagaaattttgttcccatttatatttgtttcaattgtttgatactgtggaaatagacttttattttcgaaagaaaatgtcttgtagtacatattata

SEQ ID NO: 491727 - DNA, 120 bp, Artificial Sequence
  ENSG00000162929_32 (sequence is synthesized)
tgtaagtactctgttaaataccagagttttttttgtagtttactgtgttttctgattaaaggatttggatttgtacatgtaaacagtgctgtaatggtcacgactagataaggaaaaaat

SEQ ID NO: 491728 - DNA, 120 bp, Artificial Sequence
  ENSG00000162929_33 (sequence is synthesized)
atatatgctcttttgatttttaactgatggtaaaaaggcaaactgcttctcccctgggaggcctataccactgaattaatttttacaaaccagagtttatcagaatttgattctcttcag

SEQ ID NO: 491729 - DNA, 120 bp, Artificial Sequence
  ENSG00000162929_34 (sequence is synthesized)
tgggtgacagagcaagactccatctcaatttaaaacaaaaaaagaatgtgtttttaattttgttaatgtttgtctgttatacatagcactggtaccgcaaacattttacttaaactctta

SEQ ID NO: 491730 - DNA, 120 bp, Artificial Sequence
  ENSG00000162929_35 (sequence is synthesized)
taccgcaaacattttacttaaactcttaatagcatttctttcgccagatactttaatatttcaccttacattaatcctggattcacatttctttaattgaaataaatgttaatgacaaaa

SEQ ID NO: 491731 - DNA, 86 bp, Artificial Sequence
  ENSG00000162929_36 (sequence is synthesized)
tttagagacagtctttgttgctagtctctctctgttgctgaggctggaatgcagtggcggaatgcagtggtgcgatcatagctcac

SEQ ID NO: 491732 - DNA, 120 bp, Artificial Sequence
  ENSG00000162929_37 (sequence is synthesized)
gagagatgtatactggcgattgtggggaacaatcaattggctgacttgttcaagatgttatcagacttgttgaatttttagaaaagcaacaggttttggccaggcacggtggctcacgcc

SEQ ID NO: 491733 - DNA, 120 bp, Artificial Sequence
  ENSG00000162929_38 (sequence is synthesized)
ttttttttaagataaatcatatgaacactagaaacatatcatttgagtttggttttatgttttgtttcaatgattatattatcaaggcactaattagaaacagattttaacttaaaagat

SEQ ID NO: 491734 - DNA, 120 bp, Artificial Sequence
  ENSG00000162929_39 (sequence is synthesized)
aaaatctaatgaaaatatagctttgtggattttttaaagttttctgcttgttggactagcttcattctgagccaactcctgataaaaatgtaagctatagtgctactggaagtagcagaa

SEQ ID NO: 491735 - DNA, 120 bp, Artificial Sequence
  ENSG00000162929_40 (sequence is synthesized)
tctgactccagagtctgcacacttaaccactccactattctggccttctacaagatgcagtgcctggcacacagtgatggctcagtaaatgtttgaataaattccaaaagatgagtcgtg

SEQ ID NO: 491736 - DNA, 120 bp, Artificial Sequence
  ENSG00000162929_41 (sequence is synthesized)
atattgtctatattcacataaggtgtcgtgaagataaaatacatacatgtatttttgtatatatatatatatagttgttgttgttgttttggagacggagtcttactctgtcacccaggc

SEQ ID NO: 491737 - DNA, 72 bp, Artificial Sequence
  ENSG00000162929_42 (sequence is synthesized)
actctgtcacccaggctggcgtgcagtggtgtggtcttggctgactgcaaaagctgggactacaggcgtgtg

SEQ ID NO: 491738 - DNA, 70 bp, Artificial Sequence
  ENSG00000162929_43 (sequence is synthesized)
cctcatgatttcccagcccagattttttttaaatgtgaatttctagcatatttataaaaatataactact

SEQ ID NO: 491739 - DNA, 120 bp, Artificial Sequence
  ENSG00000162929_44 (sequence is synthesized)
aaatgtgaatttctagcatatttataaaaatataactacttttataaggaatgggataacatcttttctgcatgttatccaactttcatttagaaaaatactttctaaacaaggtagttg

SEQ ID NO: 491740 - DNA, 120 bp, Artificial Sequence
  ENSG00000162929_45 (sequence is synthesized)
ttagtacattttatttactgggtaagtgtcataatgttttacacattaaaatgataaaaattattgtatattaatcttgaaaggtattctggttagtgcctttaaaatgctctcttttca

SEQ ID NO: 491741 - DNA, 120 bp, Artificial Sequence
  ENSG00000162929_46 (sequence is synthesized)
ctaacagattttagttatctgtacaaatgttatattgaattttacaagagaaccaaatttactttcaggtaaattttggtgaggaaaattgtctttagcattggattttctgtcatctat

SEQ ID NO: 491742 - DNA, 76 bp, Artificial Sequence
  ENSG00000162929_47 (sequence is synthesized)
gaggaaaattgtctttagcattggattttctgtcatctatttgttcttcatactttgtcagtatttcattaatatg

SEQ ID NO: 491743 - DNA, 79 bp, Artificial Sequence
  ENSG00000162929_48 (sequence is synthesized)
caacatggtgagaccccgtctctactacaaaaaactagttgagcaagcaggggactcacttgaacccaggaggcagagg

SEQ ID NO: 491744 - DNA, 79 bp, Artificial Sequence
  ENSG00000162929_49 (sequence is synthesized)
gaaaaaaataaataaaataaaaattagctgggaatggtggtgcacacctgtaacccagctacttgggaggccaaggcag

SEQ ID NO: 491745 - DNA, 88 bp, Artificial Sequence
  ENSG00000162929_50 (sequence is synthesized)
tcccaagtggacctccaataatgtacttttttttgtatcaggaatgtgtgaattaaacacacaattcaattaaattcatgttgtagga

SEQ ID NO: 491746 - DNA, 120 bp, Artificial Sequence
  ENSG00000162929_51 (sequence is synthesized)
cacagcggcgggaaccccagcttctgcgcgcccggccgcgccccgggcctctgccccgcctcgctcccgctgcccggcgcctttgtccgctctgcgcccctggagtttctgtgcctccac

SEQ ID NO: 491747 - DNA, 120 bp, Artificial Sequence
  ENSG00000162929_52 (sequence is synthesized)
ctttgtccgctctgcgcccctggagtttctgtgcctccacgggcgggagcggggcgcgaaggtctgggggtgccccgaggacgcgccgcgtagtgagcctccgggcccaagatgaggaaa

SEQ ID NO: 491748 - DNA, 120 bp, Artificial Sequence
  ENSG00000162929_53 (sequence is synthesized)
gcaaaagaaacagacaaactgagacccagagacggcactgtgtctaagagcaacagaaaaagtggtttgagcagtgtgctcttgatgacagtgttgctgtgttaaacgaattaatacatg

SEQ ID NO: 491749 - DNA, 120 bp, Artificial Sequence
  ENSG00000162929_54 (sequence is synthesized)
aaaggacttggaatactgcttgacatatcgtgaggcagagacacaaagatatggaagaacattggacagatttacatcgatatattaattaaggtgatttcagagttggagcaggagagg

SEQ ID NO: 491750 - DNA, 120 bp, Artificial Sequence
  ENSG00000162929_55 (sequence is synthesized)
aagccttatagatatttttttttctttttgcttgcttgtattttctttttaattattattcagtatttcaagtagacagaaaagtacagaggataatacaacaaatatccaggtacccac

SEQ ID NO: 491751 - DNA, 120 bp, Artificial Sequence
  ENSG00000162929_56 (sequence is synthesized)
cacccagcatttttacatagtagcatttgatgttttgaaataagacataaaacattccaaataccctatcaccgaggatcctgcatcctcttcttttcccagaagtgaacatttctctga

SEQ ID NO: 491752 - DNA, 120 bp, Artificial Sequence
  ENSG00000162929_57 (sequence is synthesized)
atttgatgcttattatgcccatgcatgttgttatacttttactacatattttatgtagctacagcataatatgctatgtttactttatatagtgacctcatactatacatatcctcatgc

SEQ ID NO: 491753 - DNA, 120 bp, Artificial Sequence
  ENSG00000162929_58 (sequence is synthesized)
aattttttagactctgtttgagaattatatattttgattcaggtagcttaagtttattttagctactcagtagtaatgtattctattaatctactaatatatatttcttgtctatggaca

SEQ ID NO: 491754 - DNA, 120 bp, Artificial Sequence
  ENSG00000162929_59 (sequence is synthesized)
tcaaaaaaaaaaaaaattgcataagctgggattccaaggttaacaaatgaagctggattcaaattctaggtctgtatctctttggagaagtttcttaacttctctgaacctgttttatta

SEQ ID NO: 491755 - DNA, 120 bp, Artificial Sequence
  ENSG00000162929_60 (sequence is synthesized)
tgaagatattaatagtgcctgtctcatttggttggtgcaaggtttaaatgaaatagcacttgtaatgctcttggtacagtgtcttcacactcagtaagagtgaactctttttattactaa

SEQ ID NO: 491756 - DNA, 120 bp, Artificial Sequence
  ENSG00000162929_61 (sequence is synthesized)
ttttttagtcagcttctagagatgtgtctcctttcgtgtgagtattgctccttaatccaatcggatatccactcttaaagaagcatcaatgctgatttttgttcaattttttcaatagta

SEQ ID NO: 491757 - DNA, 120 bp, Artificial Sequence
  ENSG00000162931_0 (sequence is synthesized)
ggccgggccgcagcctcctgggcttcgtgggggcagacccagcctttcccggcagcgagcgctcggccaggtgcactaggcgctgtgcgggccccccttccccgcggagccatggaggct

SEQ ID NO: 491758 - DNA, 120 bp, Artificial Sequence
  ENSG00000162931_1 (sequence is synthesized)
cccgcggagccatggaggctgtggaactcgccagaaaactgcaggaggaagctacgtgctccatctgtctggattacttcacagaccctgtgatgaccacctgtggccacaacttctgcc

SEQ ID NO: 491759 - DNA, 120 bp, Artificial Sequence
  ENSG00000162931_2 (sequence is synthesized)
gagcctgcatccagctgagctgggaaaaggcgaggggcaagaaggggaggcggaagcggaagggctccttcccctgccccgagtgcagagagatgtccccgcagaggaacctgctgccca

SEQ ID NO: 491760 - DNA, 120 bp, Artificial Sequence
  ENSG00000162931_3 (sequence is synthesized)
accggctgctgaccaaggtggccgagatggcgcagcagcatcctggtctgcagaagcaagacctgtgccaggagcaccacgagcccctcaagcttttctgccagaaggaccagagcccca

SEQ ID NO: 491761 - DNA, 120 bp, Artificial Sequence
  ENSG00000162931_4 (sequence is synthesized)
tctgtgtggtgtgcagggagtcccgggagcaccggctgcacagggtgctgcccgccgaggaggcagtgcaggggtacaagttgaagctggaggaggacatggagtaccttcgggagcaga

SEQ ID NO: 491762 - DNA, 120 bp, Artificial Sequence
  ENSG00000162931_5 (sequence is synthesized)
tcaccaggacagggaatctgcaggccagggaggagcagagcttagccgagtggcagggcaaggtgaaggagcggagagaacgcattgtgctggagtttgagaagatgaacctctacctgg

SEQ ID NO: 491763 - DNA, 120 bp, Artificial Sequence
  ENSG00000162931_6 (sequence is synthesized)
tggaagaagagcagaggctcctccaggctctggagacggaagaagaggagactgccagcaggctccgggagagcgtggcctgcctggaccggcagggtcactctctggagctgctgctgc

SEQ ID NO: 491764 - DNA, 120 bp, Artificial Sequence
  ENSG00000162931_7 (sequence is synthesized)
atgaaggaacccctgagcaggaagaacaacgtgagtgtgcagtgcccagaggttgcccccccaaccagacccaggactgtgtgcagagttcccggacagattgaagtgctaagaggcttt

SEQ ID NO: 491765 - DNA, 120 bp, Artificial Sequence
  ENSG00000162931_8 (sequence is synthesized)
ctagaggatgtggtgcctgatgccacctccgcgtacccctacctcctcctgtatgagagccgccagaggcgctacctcggctcttcgccggagggcagtgggttctgcagcaaggaccga

SEQ ID NO: 491766 - DNA, 120 bp, Artificial Sequence
  ENSG00000162931_9 (sequence is synthesized)
tttgtggcttacccctgtgctgtgggccagacggccttctcctctgggaggcactactgggaggtgggcatgaacatcaccggggacgcgttgtgggccctgggtgtgtgcagggacaac

SEQ ID NO: 491767 - DNA, 120 bp, Artificial Sequence
  ENSG00000162931_10 (sequence is synthesized)
gtgagccggaaagacagggtccccaagtgccccgaaaacggcttctgggtggtgcagctgtccaaggggaccaagtacttatccaccttctctgccctaaccccggtcatgctgatggag

SEQ ID NO: 491768 - DNA, 120 bp, Artificial Sequence
  ENSG00000162931_11 (sequence is synthesized)
cctcccagccacatgggcatcttcctggacttcgaagccggggaagtgtccttctacagtgtaagcgatgggtcccacctgcacacctactcccaggccaccttcccaggccccctgcag

SEQ ID NO: 491769 - DNA, 120 bp, Artificial Sequence
  ENSG00000162931_12 (sequence is synthesized)
cctttcttctgcctgggggctccgaagtctggtcagatggtcatctccacagtgaccatgtgggtgaaaggatagacacagaccgggggactcgggcactgctcctggctctgcagaagg

SEQ ID NO: 491770 - DNA, 120 bp, Artificial Sequence
  ENSG00000162931_13 (sequence is synthesized)
tgtgggccttctgcttactgcaggccacctgccagggttctctggcatcacgctggcagccattagacacacaggggggtttctcaaattctaaatataattgtgattagaactgtcaaa

SEQ ID NO: 491771 - DNA, 120 bp, Artificial Sequence
  ENSG00000162931_14 (sequence is synthesized)
agatctccactgcgtggggtcgcgagtgttgagattgcagggggcatctatgtgcatgcttgtgtgcctgtgcgtgtgtgcgcgcgtgtacctgtgtgtacatgcatgtatgtttaccga

SEQ ID NO: 491772 - DNA, 120 bp, Artificial Sequence
  ENSG00000162931_15 (sequence is synthesized)
tatgtgcatctgtgcctgtgtgtgctgtgtttgtggatcagtgtttctgtgcgtacatgtttgtatttgtgtggtgtgtatgcgtgggtatgcgtgtgtgcacatgcacgtttgtataca

SEQ ID NO: 491773 - DNA, 120 bp, Artificial Sequence
  ENSG00000162931_16 (sequence is synthesized)
tacatgggtatgtgtatgggtgttcgtctgtgcgtacatgcacacgcgtgttttttctgaaccccacctcactaccgaatggaagagagcttttttcctctgatagcccatcccttcttc

SEQ ID NO: 491774 - DNA, 120 bp, Artificial Sequence
  ENSG00000162931_17 (sequence is synthesized)
ctttggtgtacggggttttgttaaagaaaaaattctgacatttgaaaggctctttagtcaggctacttgcaatgggagagttgcgccagcaaagacagctggggatgtatgggggagttg

SEQ ID NO: 491775 - DNA, 120 bp, Artificial Sequence
  ENSG00000162931_18 (sequence is synthesized)
gagtggggatctgggtggggtcagtggatggaaagtgattaagggaaggctccaagggtaggggcttctccctaagctgacctagcaggcttctccagaaaggcaggttgaaggcctagc

SEQ ID NO: 491776 - DNA, 120 bp, Artificial Sequence
  ENSG00000162931_19 (sequence is synthesized)
cggcaacggtctgtcggggaggaggagctgatgagatgtggagctgggggtagccagcagcaggcggaagtggacgggtagggtccaggcccagtggagaggagaggcggaggggcctgc

SEQ ID NO: 491777 - DNA, 120 bp, Artificial Sequence
  ENSG00000162931_20 (sequence is synthesized)
agagcattggtcagggagggtctgtgtagtttctggggaggcatctgtgtctgttgttgacaaggctaaaaatgatgactctggactctctaactggactgcagtcctagccctcctctg

SEQ ID NO: 491778 - DNA, 120 bp, Artificial Sequence
  ENSG00000162931_21 (sequence is synthesized)
agtcagcacccgctgcgcctgtccccggctcgtccagagccttccaccccctgccgccttccttccccaagccacccccaacctctcctaagaggcgccgccccagtcccggccgccgaa

SEQ ID NO: 491779 - DNA, 120 bp, Artificial Sequence
  ENSG00000162931_22 (sequence is synthesized)
ccccgggccgggccgcagcctcctgggcttcgtgggggcagacccagcctttcccggcagcgagcgctcggccaggtgcactaggcgctgtgcgggccccccttccccgcgaccctgtga

SEQ ID NO: 491780 - DNA, 120 bp, Artificial Sequence
  ENSG00000162931_23 (sequence is synthesized)
caccccgccgcctaggctaccctcctgtggcgcctgggccacgacctaagcctaacccggtcctcctcgccctccaacgcccggccttcccgcctccgccggccgccgcgtccctggagg

SEQ ID NO: 491781 - DNA, 120 bp, Artificial Sequence
  ENSG00000162931_24 (sequence is synthesized)
ggctagcgcgcttcaacaagaccctgtgatgaccacctgtggccacaacttctgccgagcctgcatccagctgagctgggaaaaggcgaggggcaagaaggggaggcggaagcggaaggg

SEQ ID NO: 491782 - DNA, 120 bp, Artificial Sequence
  ENSG00000162931_25 (sequence is synthesized)
tggtgacggtcactggctattcactgtgccttcgtagggcggcgttactggtggttctaattcatgggatgaatcttgttgagttcccagtggtctctctgcccagccccctgtacctta

SEQ ID NO: 491783 - DNA, 120 bp, Artificial Sequence
  ENSG00000162931_26 (sequence is synthesized)
ttgccaccaaggcccacacacaattggtgtgtggaagcatcaagtaaccccagattcacagcaggggaggcctctgcggagttaggggaccattggccacatccaccactagggcccggg

SEQ ID NO: 491784 - DNA, 120 bp, Artificial Sequence
  ENSG00000162931_27 (sequence is synthesized)
gactcccacctttgaccctgaatgccccacacctctccccatctctccaccaccacgcccatctacagaggatgtggtgcctgatgccacctccgcgtacccctacctcctcctgtatga

SEQ ID NO: 491785 - DNA, 120 bp, Artificial Sequence
  ENSG00000162944_0 (sequence is synthesized)
gttatctatagtttagctgaaaacaaaatcaaagcagttaagtctgtaactttctttttgcagcttaaacaacagaatttgctgctctccctcccctttcctgcaatttaattccttaca

SEQ ID NO: 491786 - DNA, 120 bp, Artificial Sequence
  ENSG00000162944_1 (sequence is synthesized)
gattttgccatggggtgcggacttagaaagctagaagaccctgatgatagcagccctggaaaaatattttctaccctgaagagaccgcaagtggaaacaaagacagaatttgcttacgaa

SEQ ID NO: 491787 - DNA, 120 bp, Artificial Sequence
  ENSG00000162944_2 (sequence is synthesized)
tatgtattgctggattttactctacaagcttcatcaaacccagaagtcatcaagataaattcaattctggatatagtaacaaaagtggaaaactattatcttaaaggatatattgtcggg

SEQ ID NO: 491788 - DNA, 120 bp, Artificial Sequence
  ENSG00000162944_3 (sequence is synthesized)
gctattcatcctgttatacaacctgtggggcagcgaaaacacctacctgcaagttacctatacagagtggtgctattgcgcttgaaattaagcccaaagaattcggcagcacccagtgga

SEQ ID NO: 491789 - DNA, 120 bp, Artificial Sequence
  ENSG00000162944_4 (sequence is synthesized)
caaagacgcccaaggctcgtgattgaggaatgtcccctaacttctgaggcacaaacaaatgacgcagcaaaagaactgatagaaaagattaatgtcgctgctaaaagaggaatgaaattt

SEQ ID NO: 491790 - DNA, 120 bp, Artificial Sequence
  ENSG00000162944_5 (sequence is synthesized)
gttggattcatatcacagcattattctccatctaaattctgcaatggaaccaaccatgatggagatatagaatcgatgctacatgtgagacacggttcagatgaaaactgtagaagttgg

SEQ ID NO: 491791 - DNA, 120 bp, Artificial Sequence
  ENSG00000162944_6 (sequence is synthesized)
aatgaagggacgttaagtgggcagtcatctgaaagcggaattgaggaagaacttcatcatgaaagtggacagtatcaaatggaacaaaatggcagccctacttcctctaaatcaagaaag

SEQ ID NO: 491792 - DNA, 120 bp, Artificial Sequence
  ENSG00000162944_7 (sequence is synthesized)
ggagaagcctcagataacaaattgtatacagtcttcaatgcttttgatgatgattcaacctcctgggcctatcaggaaggcatcctgtcaatgaaagtaacaagaaaaggatcagtcatt

SEQ ID NO: 491793 - DNA, 120 bp, Artificial Sequence
  ENSG00000162944_8 (sequence is synthesized)
agtacacttgatgctgattggctggagttaactaccttttattataaacaaggcttgtctttaattgattcttttgtattctgggaaacatctaaaggggaacatttgcctaaatctttg

SEQ ID NO: 491794 - DNA, 120 bp, Artificial Sequence
  ENSG00000162944_9 (sequence is synthesized)
gaaggattttttatctatgaagaagaaggttctggagttccaggttctagtaggaaaggaaatgatgccatcgtagtagaacaatggactgttattgagggatgtgaaatcaaaacagat

SEQ ID NO: 491795 - DNA, 120 bp, Artificial Sequence
  ENSG00000162944_10 (sequence is synthesized)
tatggccctctgctgcacactctggctgaattcggatggcttctgacaagcgtgttgcccacacctgtattgagacatgacagtgaagggaatttggctacaaagcagatcgtattcctt

SEQ ID NO: 491796 - DNA, 120 bp, Artificial Sequence
  ENSG00000162944_11 (sequence is synthesized)
cagaggccagttatgtggaattcagctgctcaaacaccagataagaaagccagccgccacataaaaggtgaagacaagaataaagccactagtagaagcatcggattagacacaacctcg

SEQ ID NO: 491797 - DNA, 120 bp, Artificial Sequence
  ENSG00000162944_12 (sequence is synthesized)
tcacaacctgcagagagcagacacctgcctgaggagtgccgcctttctccctcccgggaatgctggacaaaggagggaaggctggcacagcacaacagcttctctgggttcagcagcagt

SEQ ID NO: 491798 - DNA, 120 bp, Artificial Sequence
  ENSG00000162944_13 (sequence is synthesized)
gacaacgtcctccgggaattagacgacggacagtttgatcaggaagatggagtgactcaggtcacttgtatgtgagccatgaggtgaagcaaaggaaggccctgtaaataattgttaaaa

SEQ ID NO: 491799 - DNA, 120 bp, Artificial Sequence
  ENSG00000162944_14 (sequence is synthesized)
tcattgccaactgaccttattgtattactttctctgcatttatgtaatatttttgaatttttccagacccagcctttcctctaatctatgtaaactttggcacaacctcccagacaagga

SEQ ID NO: 491800 - DNA, 120 bp, Artificial Sequence
  ENSG00000162944_15 (sequence is synthesized)
agaataaccaacatatttatacatttagaatcatgtttacacttctctcaactaaaacatctggttaaacagatgttccattcggttattacacaataatctatttcagcttctcatgaa

SEQ ID NO: 491801 - DNA, 120 bp, Artificial Sequence
  ENSG00000162944_16 (sequence is synthesized)
tgtacaaagtagactttcttacaattcctggtaaggagactgaatatctcaatcagtattttacccaattagagagagttctcaggaagttacagtcttatttaagctgaaaaataacct

SEQ ID NO: 491802 - DNA, 120 bp, Artificial Sequence
  ENSG00000162944_17 (sequence is synthesized)
ctctctctctttttttttctctctctctcatacacacacacagctaattagtgcaaataaatatctatttcccaaatataataattaatccacattttgtctttaactatagcatgtata

SEQ ID NO: 491803 - DNA, 120 bp, Artificial Sequence
  ENSG00000162944_18 (sequence is synthesized)
tacaaagcaagcccctatgtgttaaaatattttttgaaaaaaatcttttttatgtatctttgcttttaaagggtcatgtcaccaaccctgtactgattcattgtacataaatgttgttgc

SEQ ID NO: 491804 - DNA, 120 bp, Artificial Sequence
  ENSG00000162944_19 (sequence is synthesized)
tcctaaaagcctaaaaatgcagacagcaaagcagcatctcttaaaattcaatatgaaaagaacccataatctcaatacataaataccttagtagagagtaagatttaatttttttttatt

SEQ ID NO: 491805 - DNA, 120 bp, Artificial Sequence
  ENSG00000162944_20 (sequence is synthesized)
ttaaagtccaaatactatgaagaggaaaaatatcaacttcaatttgaaactgaagtcttttacatctgtctagatttgaattctgcttttattttgacttgttaaatcctgaagaatgtt

SEQ ID NO: 491806 - DNA, 120 bp, Artificial Sequence
  ENSG00000162944_21 (sequence is synthesized)
gaaacctagaattttcaatctggcaggagtagaaagatgctcatagcacacgcgatatgtatgataacatattttgtttcatcttgcttttctttccccttctaatagaggtggctttgc

SEQ ID NO: 491807 - DNA, 120 bp, Artificial Sequence
  ENSG00000162944_22 (sequence is synthesized)
atctttaaaattctacaaaataaaggattttcatttatctatgaaaggcttactttgaaagatggaacctccaagtgaattacaacttattctatcattgatgaattcagcctattatat

SEQ ID NO: 491808 - DNA, 120 bp, Artificial Sequence
  ENSG00000162944_23 (sequence is synthesized)
atttttattaacattgatgttgacattgtaagatcattttaataataaaacatcatttttattgtgttattgttttattgaacacaaatattcatataatatgtttggtttgggggtttt

SEQ ID NO: 491809 - DNA, 65 bp, Artificial Sequence
  ENSG00000162944_24 (sequence is synthesized)
aacacaaatattcatataatatgtttggtttgggggttttttgtggtcgcagctcactgcaacct

SEQ ID NO: 491810 - DNA, 120 bp, Artificial Sequence
  ENSG00000162944_25 (sequence is synthesized)
caggcgtgagccaccatgcctggccttcatataatatgttttatacatataacagatatgtattacatgttatcaattatatagtgtatctaaactaagtcaatctccattaattgctga

SEQ ID NO: 491811 - DNA, 120 bp, Artificial Sequence
  ENSG00000162944_26 (sequence is synthesized)
tctaaactaagtcaatctccattaattgctgataaaattaacaggaattattccacttttatcatccagaagtacagtataaaggaatttaagaatattcttctcagtcttattctatag

SEQ ID NO: 491812 - DNA, 120 bp, Artificial Sequence
  ENSG00000162944_27 (sequence is synthesized)
caatagctgtcaacaatatttgcagaaatggtttttgttttgacttttagatggacttgagttccataatcaagagttagtggatttttggtagaaacaatcactgcttcaggagtccat

SEQ ID NO: 491813 - DNA, 120 bp, Artificial Sequence
  ENSG00000162944_28 (sequence is synthesized)
aaaacgtaatgaagttaggaagcacaaagaacaaatcagaaagatctgtttttcccaattccagggtctacaagaggtagagacttctttatcattcagcccacatacataggggattgg

SEQ ID NO: 491814 - DNA, 120 bp, Artificial Sequence
  ENSG00000162944_29 (sequence is synthesized)
cagcccacatacataggggattggaagtagtaaattaaaaacagagataggaatttatatttgactaagaaaaaactcagaaatatagcaataactttttttttttttttttttttttga

SEQ ID NO: 491815 - DNA, 120 bp, Artificial Sequence
  ENSG00000162944_30 (sequence is synthesized)
gccaagcaatcgcttttttaaaaaatttgtgtaagcatactttctcagtttatttttttctcccctcccgtttatttttaatctgagttatttcttattaaaataacttttattaaaata

SEQ ID NO: 491816 - DNA, 120 bp, Artificial Sequence
  ENSG00000162944_31 (sequence is synthesized)
aacttactagtctgtcatatcctcaaaacttgttttagaagcatttgctccaacaattacccttaagttatgtgatgaatttgtatgatagcgaataatttatgatcaagtggttctaga

SEQ ID NO: 491817 - DNA, 120 bp, Artificial Sequence
  ENSG00000162944_32 (sequence is synthesized)
gtattttaaatgtgtgtaaatagctatgagcctattattttaaaaaaagaaaaaaacttgggctctctatgcctaaggagttaaatatgtctaattttattatctgccagttgtatattc

SEQ ID NO: 491818 - DNA, 120 bp, Artificial Sequence
  ENSG00000162944_33 (sequence is synthesized)
agttctttttataacactatgatttccttaggggctctggcatgtgaatttttaaaacctgtaagttataatgaaaggtatcaagatcccagatgttgggtgaagatctgccattcccct

SEQ ID NO: 491819 - DNA, 120 bp, Artificial Sequence
  ENSG00000162944_34 (sequence is synthesized)
tggtgtagtatctatggcattttcatcttcgttttcaataccaagtgttaattccatcccctttggattgtataccaccttgttatcttttatggacacatttaacacctacctaatcac

SEQ ID NO: 491820 - DNA, 120 bp, Artificial Sequence
  ENSG00000162944_35 (sequence is synthesized)
cagggaaatcagctctatcagtgtcattacaattcatttcagtaaaagagaaaaggaaaggtcaccctctttgagagattctagggctttcaggaggaggagaagcaggagacagagcta

SEQ ID NO: 491821 - DNA, 120 bp, Artificial Sequence
  ENSG00000162944_36 (sequence is synthesized)
cagtctattcaaatcacaactatctccaaatcatttgtgttatcaggagcaggtgtttatatatttgaatataaatgtaacagatgcattttcatttctttcattctggagtgccagagg

SEQ ID NO: 491822 - DNA, 120 bp, Artificial Sequence
  ENSG00000162944_37 (sequence is synthesized)
agctgtcccgttttcccgcccttgcctgttattgattcctcaccaccattccttcttggctggaaggactgtggccctttccctccccatatggctaaagaggatttctttctcttaact

SEQ ID NO: 491823 - DNA, 120 bp, Artificial Sequence
  ENSG00000162944_38 (sequence is synthesized)
cttcagagccccagagtagtactgtatggaaagtgtaaattcagatggagaatcaaatgaagtgaaattgctaacaatggggatagtatataactaagaacacattatataaaaatgtac

SEQ ID NO: 491824 - DNA, 120 bp, Artificial Sequence
  ENSG00000162944_39 (sequence is synthesized)
tagtggatacatagaaaaactagctaaatgttactcatcagaacttgtaacatatcaatttaaataacatttgctggtaatctatcatcccttgagaatgaattttatttgtgtaatagt

SEQ ID NO: 491825 - DNA, 120 bp, Artificial Sequence
  ENSG00000162944_40 (sequence is synthesized)
gcaaagtttgcagaaccaggtctgtcagatatttaagttctgagatggtgtttgaggcagaaaattaggcaaaactgtaaaatgatgagcctcagttttgatgaggttcataaagttttg

SEQ ID NO: 491826 - DNA, 120 bp, Artificial Sequence
  ENSG00000162944_41 (sequence is synthesized)
gtgaagacgactgcaaaagaaatgggttctaaacatgttttgagcattcaaatttttgtatgtaaaaataccaagtaattaaatcaatggaataaatgaatcatttatgtgtaagataaa

SEQ ID NO: 491827 - DNA, 120 bp, Artificial Sequence
  ENSG00000162944_42 (sequence is synthesized)
ttttccttcagtttcctatatgagttatttaaggatttagatggttttatgagccacttagtatttacaacccttcttaattgtaccctcttcctcacaggggaacatttgcctaaatct

SEQ ID NO: 491828 - DNA, 120 bp, Artificial Sequence
  ENSG00000162944_43 (sequence is synthesized)
tttcttggtagtagttgagaggaaggagggtaggcgcaggacagagaggagagggaaaacagaaaaagaattgtgtgccactatgtctgaatatatcttctacttgtagataattacatc

SEQ ID NO: 491829 - DNA, 80 bp, Artificial Sequence
  ENSG00000162946_0 (sequence is synthesized)
ggaaggagcaggaggcagcccaggcggagcgggaggagctggcagcggggcgcatgccaggcgggggtcctcagggcgcc

SEQ ID NO: 491830 - DNA, 120 bp, Artificial Sequence
  ENSG00000162946_1 (sequence is synthesized)
gcagccgggattgcttaccacctgcagcgtgctttcggaggcggcggctggcacggaggccgggctacatgagaagctcgacagggcctgggatcgggttcctttccccagcagtgggca

SEQ ID NO: 491831 - DNA, 120 bp, Artificial Sequence
  ENSG00000162946_2 (sequence is synthesized)
cactgttccggttcccaggaggggtgtctggcgaggagtcccaccactcggagtccagggccagacagtgtggccttgactcgagaggcctcttggtccggagccctgtttccaagagtg

SEQ ID NO: 491832 - DNA, 120 bp, Artificial Sequence
  ENSG00000162946_3 (sequence is synthesized)
cagcagcccctactgtgacctctgtgagaggaacctcggcgcactttgggattcagctcagaggtggcaccagattgcctgacaggcttagctggccgtgtggccctgggagtgctgggt

SEQ ID NO: 491833 - DNA, 120 bp, Artificial Sequence
  ENSG00000162946_4 (sequence is synthesized)
ggcagcaagagtttgcagccatggatagttctgagaccctggacgccagctgggaggcagcctgcagcgatggagcaaggcgtgtccgggcagcaggctctctgccatcagcagagttga

SEQ ID NO: 491834 - DNA, 120 bp, Artificial Sequence
  ENSG00000162946_5 (sequence is synthesized)
gtagcaacagctgcagccctggctgtggccctgaggtccccccaacccctcctggctctcacagtgcctttacctcaagctttagctttattcggctctcgcttggctctgccggggaac

SEQ ID NO: 491835 - DNA, 120 bp, Artificial Sequence
  ENSG00000162946_6 (sequence is synthesized)
gtggagaagcagaaggctgcccaccatccagagaggctgagtcccattgccagagcccccaggagatgggagccaaagctgccagcttggacgggcctcacgaggacccgcgatgtctct

SEQ ID NO: 491836 - DNA, 120 bp, Artificial Sequence
  ENSG00000162946_7 (sequence is synthesized)
ctcggcccttcagtctcttggctacacgggtctctgcagacttggcccaggccgcaaggaacagctccaggccagagcgtgacatgcattctttaccagacatggaccctggctcctcca

SEQ ID NO: 491837 - DNA, 120 bp, Artificial Sequence
  ENSG00000162946_8 (sequence is synthesized)
gttctctggatccctcactggctggctgtggtggtgatgggagcagcggctcaggggatgcccactcttgggacaccctgctcaggaaatgggagccagtgctgcgggactgcctgctga

SEQ ID NO: 491838 - DNA, 120 bp, Artificial Sequence
  ENSG00000162946_9 (sequence is synthesized)
agttgagaatgatgattatgataaagctgagacgttacaacaaagattagaagacctggaacaagagaaaatcagcctgcactttcaacttccttcaaggcagccagctcttagcagttt

SEQ ID NO: 491839 - DNA, 120 bp, Artificial Sequence
  ENSG00000162946_10 (sequence is synthesized)
cctgggtcacctggcagcacaagtccaggctgccttgcgccgtggggccactcagcaggccagcggagatgacacccacaccccactgagaatggagccgaggctgttggaacccactgc

SEQ ID NO: 491840 - DNA, 120 bp, Artificial Sequence
  ENSG00000162946_11 (sequence is synthesized)
tcaggacagcttgcacgtgtccatcacgagacgagactggcttcttcaggaaaagcagcagctacagaaagaaatcgaagctctccaagcaaggatgtttgtgctggaagccaaagatca

SEQ ID NO: 491841 - DNA, 120 bp, Artificial Sequence
  ENSG00000162946_12 (sequence is synthesized)
acagctgagaagggaaatagaggagcaagagcagcaactccagtggcagggctgcgacctgaccccactggtgggccagctgtccctgggtcagctgcaggaggtcagcaaggccttgca

SEQ ID NO: 491842 - DNA, 120 bp, Artificial Sequence
  ENSG00000162946_13 (sequence is synthesized)
ggacaccctggcctcagccggtcagattcccttccatgcagagccaccggaaaccataaggagcctccaggaaagaataaaatccctcaacttgtcacttaaagaaatcactactaaggt

SEQ ID NO: 491843 - DNA, 120 bp, Artificial Sequence
  ENSG00000162946_14 (sequence is synthesized)
gtgtatgagtgagaaattctgcagcaccctgaggaagaaagttaacgatattgaaacccaactaccagccttgcttgaagccaaaatgcatgccatatcaggaaaccatttctggacggc

SEQ ID NO: 491844 - DNA, 120 bp, Artificial Sequence
  ENSG00000162946_15 (sequence is synthesized)
taaagacctcaccgaggagattagatcattaacatcagagagagaagggctggagggactcctcagcaagctgttggtgttgagttccaggaatgtcaaaaagctgggaagtgttaaaga

SEQ ID NO: 491845 - DNA, 120 bp, Artificial Sequence
  ENSG00000162946_16 (sequence is synthesized)
agattacaacagactgagaagagaagtggagcaccaggagactgcctatggatataagtactgtgatgcagagtcctggacacagagaagtcagcaacttgcctgaggacagcctgcagg

SEQ ID NO: 491846 - DNA, 120 bp, Artificial Sequence
  ENSG00000162946_17 (sequence is synthesized)
acacagcactgtgatttgaacccagagagtctgacttcagcccccagcgctcaactactattaattgaaagggcattgaagagacatgatgtcacaataaaaagaaaaaaagaaaagaaa

SEQ ID NO: 491847 - DNA, 120 bp, Artificial Sequence
  ENSG00000162946_18 (sequence is synthesized)
gaaaccggaggcagatggagctggaaccaattgctttggatccaccatggaagcctcgacatcctgaaccaaactcctattaatgaaacttcccaaatttaaacaaagcaagacaaatag

SEQ ID NO: 491848 - DNA, 120 bp, Artificial Sequence
  ENSG00000162946_19 (sequence is synthesized)
acattatttcaggatagcagctgtctggatgctggccatgggcttgaaaaaaaccaggtgggcatttctgcccactgtaccgtttctcccatgcgtttcccagtcccctgtcatggcatg

SEQ ID NO: 491849 - DNA, 120 bp, Artificial Sequence
  ENSG00000162946_20 (sequence is synthesized)
aaaaaaccgctattgttctgtgttgggacaattagatttttgtaggggggagaaaccacccaaaagcaaatggaaaaatatgctatgattaatgtcagttacgggaattaaacttcggag

SEQ ID NO: 491850 - DNA, 120 bp, Artificial Sequence
  ENSG00000162946_21 (sequence is synthesized)
gcctttaggacaattatgaaggaatcattttccccttggtggcaatatgtactacagttgtcccttgatatccatgggggattaattccaggacgcctgtggatacagaaatccacgtgt

SEQ ID NO: 491851 - DNA, 120 bp, Artificial Sequence
  ENSG00000162946_22 (sequence is synthesized)
actcaagtcttgttttcagtggatatgaaaagtcggccctccatatctgcaggttttacacttggcgaatgctgtatttttgattcatgttggattaaggatctggaacccctgatacag

SEQ ID NO: 491852 - DNA, 120 bp, Artificial Sequence
  ENSG00000162946_23 (sequence is synthesized)
actgtatttattgaaaaaaaagtctgcctatgagtagactcacatgttaaaacccgtgttgttcaagggtcaaccataactgcaggcagaacatctgggcaggaagctcctgcaggaaga

SEQ ID NO: 491853 - DNA, 120 bp, Artificial Sequence
  ENSG00000162946_24 (sequence is synthesized)
cctgtaaactcaggtctgtggaacggcgatgatcttcttcccttgcttccagaattattgctgtgagatcaggtgcactggctacgaccttactctttgtgcagaacttatttctggtct

SEQ ID NO: 491854 - DNA, 120 bp, Artificial Sequence
  ENSG00000162946_25 (sequence is synthesized)
ggtttaagtgaacgttattctttctgtgcagtcctgtggttacatcaaaggttaaatttcatatagcatgtctgttatatcagacttctctgatggcctgtccagagcaaacattttaaa

SEQ ID NO: 491855 - DNA, 120 bp, Artificial Sequence
  ENSG00000162946_26 (sequence is synthesized)
atattggtcctattctgtcttataacagtctgctctggtgatttttgtctcatcaattggattatgacactgtcagccactgttagtgttattctcaaattcagtcttccattcatctct

SEQ ID NO: 491856 - DNA, 120 bp, Artificial Sequence
  ENSG00000162946_27 (sequence is synthesized)
ccttcccttccctggcagacagacttctgcagccactgggactgttggggtgaggaaaggcaagaaccgatgtttcattctctccctcccttcttcctccctcttttttgttggttgtgg

SEQ ID NO: 491857 - DNA, 120 bp, Artificial Sequence
  ENSG00000162946_28 (sequence is synthesized)
ggtgggctacatcttcttacccaaacaaccaggagcatttgttggcaagtttattgtgcccagtgccgatgtctggacaattaattccctaggtcagtggctttcacagtttgtgatggt

SEQ ID NO: 491858 - DNA, 120 bp, Artificial Sequence
  ENSG00000162946_29 (sequence is synthesized)
gactccaggaaggaaactcaccatgaccctgtatatacatagaacaaaaatgcagcccactctgatattgtatttgttctattctagttcattaaaagtgaatgttggtcttcatccttt

SEQ ID NO: 491859 - DNA, 120 bp, Artificial Sequence
  ENSG00000162946_30 (sequence is synthesized)
aataattctttaatgtgaggaaatatcaaatgaaaaataagaaattctaggtaaggaaagaaatttatttagtggaagtataaaagaagtttaaaaagttgaagaaaattttggttttca

SEQ ID NO: 491860 - DNA, 120 bp, Artificial Sequence
  ENSG00000162946_31 (sequence is synthesized)
atgttgatgcagcgtcctttgtgaatctttaaatttgtgaatgacacttttgaaaacttacaccttattctaagtgtctttgttcactttacactgtactgtaaagaatcacaagagtgt

SEQ ID NO: 491861 - DNA, 120 bp, Artificial Sequence
  ENSG00000162946_32 (sequence is synthesized)
gtgtgaaggaaaatactatgaagtacatggaaacacttaagaataaactgtgcagctgcaagtgtccactgcttgggaaagtgtgggaagctgacttggaagcttgtcgattgcttatcc

SEQ ID NO: 491862 - DNA, 120 bp, Artificial Sequence
  ENSG00000162946_33 (sequence is synthesized)
agagcctacagctccaggaagccaggggaagcctgtctgtagaagatgagaggcagatggatgacttagagggagctgctcctcctattccccccaggctccactccgaggataaaagga

SEQ ID NO: 491863 - DNA, 120 bp, Artificial Sequence
  ENSG00000162946_34 (sequence is synthesized)
agacccctttgaaggaatcttacatcctttctgcagaacttggagaaaagtgtgaagacataggcaagaagctattgtacttggaagatcaacttcacacagcaatccacagtcatgatg

SEQ ID NO: 491864 - DNA, 120 bp, Artificial Sequence
  ENSG00000162946_35 (sequence is synthesized)
aagatctcattcagtctctcaggagggagctccagatggtgaaggaaactctgcaggccatgatcctgcagctccagccagcaaaggaggcgggagaaagagaagctgcagcttcctgca

SEQ ID NO: 491865 - DNA, 120 bp, Artificial Sequence
  ENSG00000162946_36 (sequence is synthesized)
tgacagctggtgtccacgaagcacaagcctgaggagtgacgggatgggggagggaggtgggccaccatgtttggacccggggggctgctcttccctcccccgccatagctaagatgcctg

SEQ ID NO: 491866 - DNA, 120 bp, Artificial Sequence
  ENSG00000162946_37 (sequence is synthesized)
aatcaattacggagatacagagccttgaggtctttcagtggaaaggtggttcatgttcattctcatcagtgtgaaactgaggagtctgcaatttggaatatggagagagagactgatttg

SEQ ID NO: 491867 - DNA, 120 bp, Artificial Sequence
  ENSG00000162946_38 (sequence is synthesized)
ctgaatttccttctaaatgtcactcaaaaatttcttttccatgtcattcttgggaatgtcttccacaggatttgagaatagtttcatctcagcccccattagagagaagttggggtgaat

SEQ ID NO: 491868 - DNA, 120 bp, Artificial Sequence
  ENSG00000162946_39 (sequence is synthesized)
tctggaaaaatgtctctttttcctgtgccatttgccttctgctgcaacgaaaatatttcctgattcaagattctataaaaaggaaaccaagcataagactctgtcatcatacctgttaca

SEQ ID NO: 491869 - DNA, 120 bp, Artificial Sequence
  ENSG00000162946_40 (sequence is synthesized)
cgttcctacaggtgcacaatctaagagagctaattaacctcagagtctggagttaacagcttttcaccttacttctcctgtgatctaatattatcttagaaaaattaatatgcaatttcc

SEQ ID NO: 491870 - DNA, 120 bp, Artificial Sequence
  ENSG00000162946_41 (sequence is synthesized)
aaaagatattttggtaagacaacaacctcccagtgatatgccacctttcaattttccttttgtggcaatgattgcatctgaagaaaggatccctgagagtctctgtttcatcaggacatt

SEQ ID NO: 491871 - DNA, 120 bp, Artificial Sequence
  ENSG00000162946_42 (sequence is synthesized)
ctgaaatttacccacagtgaggctgtggatggatcaggggacctgtataaaatgtttgagcctgttccattttcccgtggaacctgtttcactcaatgccaggcagtgcagcatttagga

SEQ ID NO: 491872 - DNA, 120 bp, Artificial Sequence
  ENSG00000162946_43 (sequence is synthesized)
cagtactcagtaaggcagtgcagtactcagtaacacaatacagtactcaggcagtgcagtactcagtaagacagtgcagtgctcagtaaggcagtgcaatactcagtaacagtgtagtac

SEQ ID NO: 491873 - DNA, 120 bp, Artificial Sequence
  ENSG00000162946_44 (sequence is synthesized)
tcagtaacagtgaagtactcagtaatacagtacagtattcagtaaggcagtgaagtactcagtaatacaatacagtactcagttaggcagtgcagtactcaggaatgcagcacagtactc

SEQ ID NO: 491874 - DNA, 120 bp, Artificial Sequence
  ENSG00000162946_45 (sequence is synthesized)
aggcagtgcaatactcagtgcggtactcagtaacacagtgcagtactcagtaacagtgcagtactcagtaacagtgcagtactcagtaaggcagtgcagtactcagtaacacagtgcagt

SEQ ID NO: 491875 - DNA, 120 bp, Artificial Sequence
  ENSG00000162946_46 (sequence is synthesized)
actcagtaatacagtacagtactcagtaaggcagtatggtactcagtaaagcaatgcaatgctcagtaacacagtgcagtgctcaataaggcagtgcagtgctcagtaaggcagtgaatt

SEQ ID NO: 491876 - DNA, 120 bp, Artificial Sequence
  ENSG00000162946_47 (sequence is synthesized)
gcttagtaacacagtgtagtgctcagtaggacagcatagtactcagtaacacagggcagctagtactcagtactataagtactgagtacttatataggcaatgtagtactcagtaaatca

SEQ ID NO: 491877 - DNA, 120 bp, Artificial Sequence
  ENSG00000162946_48 (sequence is synthesized)
gtgcagtactcagtaatgcaagggcatttcaggctcctgctgggctgcttctttggcccagctgggactcctattgagacagctgcaaaacaggctgatttcaattaggcagcacttccc

SEQ ID NO: 491878 - DNA, 120 bp, Artificial Sequence
  ENSG00000162946_49 (sequence is synthesized)
aaagtgcactgaggaaggtggccccaagagaagctctctaaacaaaggagtaccctctctggtcaagtacctttggtaaatacaccataccataatatctgcttggagaaccacaatgca

SEQ ID NO: 491879 - DNA, 120 bp, Artificial Sequence
  ENSG00000162946_50 (sequence is synthesized)
cattagcatattagtctgagagagaacttatagtaaggaaactcacttgattttatctaacctcaaactttccaagtttaatggatcgtgaatttttttcatgtaactcctattcatatc

SEQ ID NO: 491880 - DNA, 120 bp, Artificial Sequence
  ENSG00000162946_51 (sequence is synthesized)
ccatagatctagtattgtacagcactgcattctctgaggaagtcccagtccaaactctgatttacatcactttagaaaccacactcacacttttgcagagtgttgagcttaataactacc

SEQ ID NO: 491881 - DNA, 120 bp, Artificial Sequence
  ENSG00000162946_52 (sequence is synthesized)
tgccacagattggtaaatttaatccagtggttgttctgtttgtgcttctgttctcatttatgtgtttagggatagtgaggttcctgccttcactaggatccacggatatgagaccatttt

SEQ ID NO: 491882 - DNA, 120 bp, Artificial Sequence
  ENSG00000162946_53 (sequence is synthesized)
tgtcatttcctgaagtcacactggcgtttccagaaggcatctggtgctttgctcagccttccatgctgtgcagcacttctgtcctcagtcaaggagatggccatgcttaagccagcaatt

SEQ ID NO: 491883 - DNA, 120 bp, Artificial Sequence
  ENSG00000162946_54 (sequence is synthesized)
ggctggggtccaggaaacaaagcaaaagcacaatatgtgaatgtgctgattgtgttccctatggctttatctcgagcaaaatacactctacatattttaataataagtataattagcttg

SEQ ID NO: 491884 - DNA, 120 bp, Artificial Sequence
  ENSG00000162946_55 (sequence is synthesized)
ttcctggacttcattttcaatgatgaaccaaattcctgaattatttataattgtgtctaaagaaaattatgaactggtcacatggcacttggaatccttgagttaattccagtgaagcaa

SEQ ID NO: 491885 - DNA, 120 bp, Artificial Sequence
  ENSG00000162946_56 (sequence is synthesized)
aacttgggaagagtcaggattggccacattgccaataacaaattcctacttcgacatatgtcttttcaaaaagcctcccagacacaagacatcttaaccgtcactagcccaagtgttttg

SEQ ID NO: 491886 - DNA, 120 bp, Artificial Sequence
  ENSG00000162946_57 (sequence is synthesized)
tattactcagacaccatcatgaaataattctgtgaggtcatgatgtatttgaaaattctgcaagttaataactgccttgaattgtttgaacccgaaataagggttctttggtacctctag

SEQ ID NO: 491887 - DNA, 120 bp, Artificial Sequence
  ENSG00000162946_58 (sequence is synthesized)
tagatagtgtgttcatttccctgctgcaaattttgaagtatttgggcaggtgagtcatgttttaaccacaagccataactcatctgttgtctttgcttggtcttagagtatcattcagaa

SEQ ID NO: 491888 - DNA, 120 bp, Artificial Sequence
  ENSG00000162946_59 (sequence is synthesized)
agtccgctaagggccagcgtgcttcttctggctacacaaccttctcaggacaagcccactgtcttaagccactttgaccctgggagacacaggactgtgtatcctcaatcatactataca

SEQ ID NO: 491889 - DNA, 120 bp, Artificial Sequence
  ENSG00000162946_60 (sequence is synthesized)
gcagtttttgtcaggggaacataaaaatatccaagagaggttagggcttagatttaaaagcatcaaaacaacaacaatggaaatttatgttggcgatagccaagaccacaagcaaaagca

SEQ ID NO: 491890 - DNA, 120 bp, Artificial Sequence
  ENSG00000162946_61 (sequence is synthesized)
catactggaaatgatgagttagaatctgatttgactgggatgttttatgagaatgtaagtgtgatattatactgtctgccttgctggaatgctggctttcaaatggtcacccatttttct

SEQ ID NO: 491891 - DNA, 120 bp, Artificial Sequence
  ENSG00000162946_62 (sequence is synthesized)
tttcaaatggtcacccatttttctttcactggcctgagttaggacatgctatcagtaatagtcccagttccatccaactttctgaaatttcatttttttttttgagatggagtctctctc

SEQ ID NO: 491892 - DNA, 120 bp, Artificial Sequence
  ENSG00000162946_63 (sequence is synthesized)
ccggccaactttctgaaatttcaaaactgaattgatccttctccaaattagtatatactattggaaacttgtctttccctgcagtaaggctggtttccccaccccagaaacatgtaacgg

SEQ ID NO: 491893 - DNA, 120 bp, Artificial Sequence
  ENSG00000162946_64 (sequence is synthesized)
ttggtaccatgctaagcccttgccatgctaagccctttacagtcatatcctataatccccatatcaaccttataaggaaggtgtttgtagatgatgcaactgagccttaagaggactaat

SEQ ID NO: 491894 - DNA, 120 bp, Artificial Sequence
  ENSG00000162946_65 (sequence is synthesized)
tccctttttctaaggcacagagctggtaaaatgtgaagtaatagtgaacctaacagtcagagacaggcagcatgctcttaactagtgctcttcctaaagttcctttaatgtccttttgag

SEQ ID NO: 491895 - DNA, 120 bp, Artificial Sequence
  ENSG00000162946_66 (sequence is synthesized)
attttgagccatggaacttacttgttcacctggctaagaactcatggccactgtggaaatcttggttagggagtcaaagaaactgagcctggggcaaacgaggcttcccacactgccagg

SEQ ID NO: 491896 - DNA, 120 bp, Artificial Sequence
  ENSG00000162946_67 (sequence is synthesized)
ggagcctcactgtgaagtctaggctcagacaggcatcaacaaacctattcaccccaccatcatcctgatctaaccattccccagtcatcccaggaaaaccactcacagcctgacactggg

SEQ ID NO: 491897 - DNA, 120 bp, Artificial Sequence
  ENSG00000162946_68 (sequence is synthesized)
ctgactttcttgaagatcctcatccaattggtgtttttcagaagtgttccaatattatgaattctgtgttgtggagaaaagcaaccatgcatttactggtcaatgccttcttgtatatgt

SEQ ID NO: 491898 - DNA, 120 bp, Artificial Sequence
  ENSG00000162946_69 (sequence is synthesized)
aattcaatacttttacttttaatatcctcaccttatctaatctttgaattttgtcatgtaatttattgcttcattaaggttactttttgttatacaaaataaaagctgatatccaaggca

SEQ ID NO: 491899 - DNA, 77 bp, Artificial Sequence
  ENSG00000162946_70 (sequence is synthesized)
tcccaagtagctggggttacaggcatttgccaccgggccctgattaggagggtctcaaactcctgacctcaggcgat

SEQ ID NO: 491900 - DNA, 120 bp, Artificial Sequence
  ENSG00000162946_71 (sequence is synthesized)
ctttgaagtatggatgatagaaaaatgtatcaggtttattcatctcatctttctgttacaggatgattaattgtacagttacatcacacgaaacatttataataaagtcatgctttagaa

SEQ ID NO: 491901 - DNA, 120 bp, Artificial Sequence
  ENSG00000162946_72 (sequence is synthesized)
ctctctgcactgtgctggaggtgaacagaaagaggtctgtccttttcacatggcctccagaggggacccttattctaaggggtgctttgggaccatgctccaaatgggaacaataaatat

SEQ ID NO: 491902 - DNA, 120 bp, Artificial Sequence
  ENSG00000162946_73 (sequence is synthesized)
tgggaaggcttcccattgagcatataaacttttaaaagtttcaataactcttgaatatgattacaaaataaagtagaatttttgtagaagtttgaaatatagaagagcaaaaaaacccaa

SEQ ID NO: 491903 - DNA, 120 bp, Artificial Sequence
  ENSG00000162946_74 (sequence is synthesized)
ttctgcctgatgtctctggaggcatagttggtgcccatcccactttttattaactctcttggttgaaaacacagcccagaagacatgttgggacttcataagcacagcctaaggaggaac

SEQ ID NO: 491904 - DNA, 120 bp, Artificial Sequence
  ENSG00000162946_75 (sequence is synthesized)
gtgcacaactgttccccggcaagatattgatgatatttgttgtgttttgtggccaggcagaatgttctgtgccttatgtgaacgtcactgtgaagagcgtcatggagcacatggcccttt

SEQ ID NO: 491905 - DNA, 120 bp, Artificial Sequence
  ENSG00000162946_76 (sequence is synthesized)
tccttggggacatttttggcaggtgccttggcaaaccgaatggaattacttgtcagcttttgttttcatattcacatgtgacatcttttctttttctgttccctgtctcaacctgtgttt

SEQ ID NO: 491906 - DNA, 120 bp, Artificial Sequence
  ENSG00000162946_77 (sequence is synthesized)
gctaatagccttgttattatttagagcagtctctcccttggcaaggtcttgagcattttctttgtgtgacaattatcttccttttgtcccttggctccgtctccttgtctgcacaatcat

SEQ ID NO: 491907 - DNA, 120 bp, Artificial Sequence
  ENSG00000162946_78 (sequence is synthesized)
agactaaatcaggctgatctgagaaaattgagggaagaccataaagtggctcttctatgtgtggacttttctgagagcttctttccccaggaaggatgatgtagaagatgtgaatgccgc

SEQ ID NO: 491908 - DNA, 120 bp, Artificial Sequence
  ENSG00000162946_79 (sequence is synthesized)
cttagccaaagtgtctgcttgtcagaggagttcaagtgttcctgtgttctttccttttccagtcgttaggagtaactgagcttactctgagatttgcacccagagggatggtctcagaag

SEQ ID NO: 491909 - DNA, 120 bp, Artificial Sequence
  ENSG00000162946_80 (sequence is synthesized)
acgctggttcagtgcaaattgagatggtaaaaacttatttcttaaaaaatggttcctaaataaatgtcatttactaaaacaaatgaaagaaatatatatatgaataaatggctatatttt

SEQ ID NO: 491910 - DNA, 120 bp, Artificial Sequence
  ENSG00000162946_81 (sequence is synthesized)
ggtcagattcccttccatgcagagccaccggaaaccataaggagaaacaagtgtgaaggaaaatactatgaagtacatggaaacacttaagaataaactgtgcaggtaaggataataatt

SEQ ID NO: 491911 - DNA, 120 bp, Artificial Sequence
  ENSG00000162946_82 (sequence is synthesized)
tctgtatttcagactccgtagcacatctagattctttattataacagaatttagttaaatcgatgaaaaaggctggccagtttctctaataaattaacaaagaaagacacaaaaaagcct

SEQ ID NO: 491912 - DNA, 120 bp, Artificial Sequence
  ENSG00000162946_83 (sequence is synthesized)
tttgaaccccatcagtgaaagagcaggtgccagccctcatcttgtcttttaaaaagtaagtagattaagatgtttaaaagtgtcttggagagatcacaggagagttttcatgttccataa

SEQ ID NO: 491913 - DNA, 120 bp, Artificial Sequence
  ENSG00000162946_84 (sequence is synthesized)
gagaagaatcttctttactatattaaattcagaattcattccttagtctgtttttcccttttttaaactttagtgtttgaggggggtcttaaggattttaaggcggtttatacatggttt

SEQ ID NO: 491914 - DNA, 120 bp, Artificial Sequence
  ENSG00000162946_85 (sequence is synthesized)
ggaataatatagaaatgcacgtcttaggttctgttttgaatcctgaatcaaaaccagcatgaaaatttctggttgctttttttaaaacccaattaggaattcatctttgagaaatgtcag

SEQ ID NO: 491915 - DNA, 120 bp, Artificial Sequence
  ENSG00000162946_86 (sequence is synthesized)
ggatgctgcagcatgacaagatgtttctggcttttgtggatgtgtgcttaggaaaataaatcccagtcatcagaatctgttcctaattaaggcaacaagtactagagtggaatatgcgct

SEQ ID NO: 491916 - DNA, 80 bp, Artificial Sequence
  ENSG00000162946_87 (sequence is synthesized)
ttggcatatttagttccattttcattctaatttagtggctagaattagaatatgcagtctaatatagaattaccatatat

SEQ ID NO: 491917 - DNA, 120 bp, Artificial Sequence
  ENSG00000162946_88 (sequence is synthesized)
attaattgtttttaccaaaaccagatcataatgaatgtttataatgttcttctttcataaacacaactaaagtttggcctgagatatatgtattacaaattaaaatatggttttatttaa

SEQ ID NO: 491918 - DNA, 120 bp, Artificial Sequence
  ENSG00000162946_89 (sequence is synthesized)
tcatcaatatttgggctttccatttgagaaggaagatatgtcttttccaagctgatgggctgcagcatggatctgcagaagtgaagcatttgaaagaaaccagtgtagaaccagctggct

SEQ ID NO: 491919 - DNA, 120 bp, Artificial Sequence
  ENSG00000162946_90 (sequence is synthesized)
ttgctcacccaagatgcctccagaagaaagcagaaacttccgagaggagcgtgaatgctctgtttctgtgctgcagaaacaattcctagtttatttgtttcctaaattaagtttatctta

SEQ ID NO: 491920 - DNA, 120 bp, Artificial Sequence
  ENSG00000162946_91 (sequence is synthesized)
gaggcagatggaggtaatatccttaagattaaaacttcagaaacttcaggaagatgcagttgagaatgatgattatgataaaggtgagttttaatttgtttattgattgttttgtcatca

SEQ ID NO: 491921 - DNA, 120 bp, Artificial Sequence
  ENSG00000162946_92 (sequence is synthesized)
tgtcccaattttctttccatctttactcatatctaccttttgaatcccaaaagaattgtacaatctgttcctctgatcatctctaccagggaatagttgactcttttacagcattattgt

SEQ ID NO: 491922 - DNA, 120 bp, Artificial Sequence
  ENSG00000162946_93 (sequence is synthesized)
tttgtagatttcaaagtacttcatgaacattaatcctttgggttataaatataaccttatcaattgtccagaaacacttagcatactcacacaataaaaattatattagcttgccacctg

SEQ ID NO: 491923 - DNA, 120 bp, Artificial Sequence
  ENSG00000162946_94 (sequence is synthesized)
tctgcccatggtgtgatgtatctataatccacttgttcataaaaaatattcgtctgacacctatgatatgctagggaatatgggagacaataggaaagtaagacagacatggtatctgcc

SEQ ID NO: 491924 - DNA, 120 bp, Artificial Sequence
  ENSG00000162946_95 (sequence is synthesized)
cttgtgatgccagtaaacttaagccttcatggggctctctgacttcataatttccagaaccagagataggaaatgaggtgaatttgagaaatgtcagactgtgccaaagggggtcacatg

SEQ ID NO: 491925 - DNA, 120 bp, Artificial Sequence
  ENSG00000162946_96 (sequence is synthesized)
catcaaatttccacatacatggcctaaaatacccaagagaaaaagaagttacaacattagaccagagatagagggactgatctgaggccaggaaaacaaacaaacaaaaaaacaaaaaaa

SEQ ID NO: 491926 - DNA, 120 bp, Artificial Sequence
  ENSG00000162946_97 (sequence is synthesized)
gtaggattcatgccttccgactgtgaggctgttgtaaggaagtagcgtttgtgggaatgccacccaggagtcaaatctctagcctttgggtgatcaggaggctgacaggaaaacagcgac

SEQ ID NO: 491927 - DNA, 120 bp, Artificial Sequence
  ENSG00000162946_98 (sequence is synthesized)
agagctttgcctctggtggaactcctggtggcctgcagacctgttggcgtctgtacctgcagtccactcagctttccagatgactgaaatgccccaacagggtagagtggctcgcctctc

SEQ ID NO: 491928 - DNA, 120 bp, Artificial Sequence
  ENSG00000162946_99 (sequence is synthesized)
agcagttggtgaataatcatgcctgggaaaacaatccgcctggcaaagagatggatggtatccgttggtgaatgtgatggcagcaagcccagtgcaagattctgtggcgattccttgatt

SEQ ID NO: 491929 - DNA, 120 bp, Artificial Sequence
  ENSG00000162946_100 (sequence is synthesized)
gacctgctcggcagccgggattgcttaccacctgcagcgtgctttcggaggcggcggctggcacggaggccgggctacatgagaagctcgacagggcctgggatcgggttcctttcccca

SEQ ID NO: 491930 - DNA, 120 bp, Artificial Sequence
  ENSG00000162949_0 (sequence is synthesized)
aagcagacaccagcactgctctttctccaagacggccggccatgctctcctcctctgccagtctcctccaccactctctaacctgagagcctgtggaacctgcccgtctcccctcctcca

SEQ ID NO: 491931 - DNA, 120 bp, Artificial Sequence
  ENSG00000162949_1 (sequence is synthesized)
tcagacacacctgcctaggaaacaggaaaggacctcggaagtcttctaaggagagtcatggcgtattaccaggagccttcagtggagacctccatcatcaagttcaaagaccaggacttt

SEQ ID NO: 491932 - DNA, 120 bp, Artificial Sequence
  ENSG00000162949_2 (sequence is synthesized)
accaccttgcgggatcactgcctgagcatgggccggacgtttaaggatgagacattccctgcagcagattcttccataggccagaagctgctccaggaaaaacgcctctccaatgtgata

SEQ ID NO: 491933 - DNA, 120 bp, Artificial Sequence
  ENSG00000162949_3 (sequence is synthesized)
tggaagcggccacaggatctaccagggggtcctcctcacttcatcctggatgatataagcagatttgacatccaacaaggaggcgcagctgactgctggttcctggcagcactgggatcc

SEQ ID NO: 491934 - DNA, 120 bp, Artificial Sequence
  ENSG00000162949_4 (sequence is synthesized)
ttgactcagaacccacagtacaggcagaagatcctgatggtccaaagcttttcacaccagtatgctggcattttccgtttccggttctggcaatgtggccagtgggtggaagtggtgatt

SEQ ID NO: 491935 - DNA, 120 bp, Artificial Sequence
  ENSG00000162949_5 (sequence is synthesized)
gatgaccgcctacctgtccagggagataaatgcctctttgtgcgtcctcgccaccaaaaccaagagttctggccctgcctgctggagaaggcctatgccaagctgctcggatcctattcc

SEQ ID NO: 491936 - DNA, 120 bp, Artificial Sequence
  ENSG00000162949_6 (sequence is synthesized)
gatctgcactatggcttcctcgaggatgccctggtggacctcacaggaggcgtgatcaccaacatccatctgcactcttcccctgtggacctggtgaaggcagtgaagacagcgaccaag

SEQ ID NO: 491937 - DNA, 120 bp, Artificial Sequence
  ENSG00000162949_7 (sequence is synthesized)
gcaggctccctgataacctgtgccactccaagtgggccaacagatacagcacaggcgatggagaatgggctggtgagtctccatgcctacactgtgactggggctgagcagattcaatac

SEQ ID NO: 491938 - DNA, 120 bp, Artificial Sequence
  ENSG00000162949_8 (sequence is synthesized)
cgaaggggctgggaagaaattatctccctgtggaacccctggggctggggcgaggccgaatggagagggcgctggagtgatgggtctcaggagtgggaggaaacctgtgatccgcggaaa

SEQ ID NO: 491939 - DNA, 120 bp, Artificial Sequence
  ENSG00000162949_9 (sequence is synthesized)
agccagctacataagaaacgggaagatggcgagttttggatgtcgtgtcaagatttccaacagaaattcatcgccatgtttatatgtagcgaaattccaattaccctggaccatggaaac

SEQ ID NO: 491940 - DNA, 120 bp, Artificial Sequence
  ENSG00000162949_10 (sequence is synthesized)
acactccacgaaggatggtcccaaataatgtttaggaagcaagtgattctaggaaacactgcaggaggacctcggaatgatgctcaattcaacttctctgtgcaagagccaatggaaggc

SEQ ID NO: 491941 - DNA, 120 bp, Artificial Sequence
  ENSG00000162949_11 (sequence is synthesized)
atttgaaagcagaagatgcaaaatttccactcgatttccaagtgattctggctggctcacagcggttccgggagaaatttccacccgtgtttttttcctcgttcagaaacactgtccaaa

SEQ ID NO: 491942 - DNA, 120 bp, Artificial Sequence
  ENSG00000162949_12 (sequence is synthesized)
gctcaaataataaattccgccgcaacttcaccatgacttaccatctgagccctgggaactatgttgtggttgcacagacacggagaaaatcagcggagttcttgctccgaatcttcctga

SEQ ID NO: 491943 - DNA, 120 bp, Artificial Sequence
  ENSG00000162949_13 (sequence is synthesized)
aaatgccagacagtgacaggcacctgagcagccatttcaacctcagaatgaagggaagcccttcagaacatggctcccaacaaagcattttcaacagatatgctcagcagaggctggaca

SEQ ID NO: 491944 - DNA, 120 bp, Artificial Sequence
  ENSG00000162949_14 (sequence is synthesized)
ttgatgccacccagcttcagggccttctcaaccaggagcttctaacaggacctccaggggacatgttctccttagatgagtgccgcagcttggtggctctgatggaactgaaagtgaatg

SEQ ID NO: 491945 - DNA, 120 bp, Artificial Sequence
  ENSG00000162949_15 (sequence is synthesized)
ggcggctagaccaagaggagtttgcgcgactgtggaagcgccttgttcactaccagcatgttttccagaaggttcagacaagccctggagtcctcctgagctcggacttgtggaaggcca

SEQ ID NO: 491946 - DNA, 120 bp, Artificial Sequence
  ENSG00000162949_16 (sequence is synthesized)
tagagaatacagacttcctcagagggatcttcatcagccgtgagctgctgcatctggtgaccctcaggtacagcgacagcgtcggcagggtcagcttccccagcctggtctgcttcctga

SEQ ID NO: 491947 - DNA, 120 bp, Artificial Sequence
  ENSG00000162949_17 (sequence is synthesized)
tgcggcttgaagccatggcaaagaccttccgcaacctctctaaggatggaaaaggactctacctgacagaaatggagtggatgagcctggtcatgtacaactgaagcaaagaggaaagca

SEQ ID NO: 491948 - DNA, 120 bp, Artificial Sequence
  ENSG00000162949_18 (sequence is synthesized)
gacccatggctcaggacaagctcccagtgatcactcaagaatctggctctcattctaagaggctgtgctgcccagtatggtggttgtgataaatctaaaccagccctgcatgaaacagag

SEQ ID NO: 491949 - DNA, 120 bp, Artificial Sequence
  ENSG00000162949_19 (sequence is synthesized)
tccaagctgtctcccaacagcctgggttcggtccttggctggcccaggcccagttaagcctgtggccaccaagcagctcatctgagcactttgggatgtattcagcctacgttgccctgg

SEQ ID NO: 491950 - DNA, 120 bp, Artificial Sequence
  ENSG00000162949_20 (sequence is synthesized)
aaaaggaagcaggagatgtctccctgtgggaaaggagaagagaagttgtctctgagtcccctgtcaccagttggattcatttcttggaagagccagaatgagccactttgaccaccctcg

SEQ ID NO: 491951 - DNA, 120 bp, Artificial Sequence
  ENSG00000162949_21 (sequence is synthesized)
ggtgctatgggtgacacaagagctgtccactgggtgtttgcagaataattacactatcttatgtctggatcctgatgatttcacagctaaatggcaaaaataaaacatgtttcccataaa

SEQ ID NO: 491952 - DNA, 120 bp, Artificial Sequence
  ENSG00000162949_22 (sequence is synthesized)
acagtatttaatctcccattcatgtaccttgaagtcaagagacagacactgtctccataaataatgttgtagcataaatatttcctgatgaacgcttgatgctttctaatgatcgcaaat

SEQ ID NO: 491953 - DNA, 120 bp, Artificial Sequence
  ENSG00000162949_23 (sequence is synthesized)
gaatactgcagagatcatagttaatttgacccaatcatatttccttgagttctcctttcactcctttttaaaaacagaacatttgattattttcagttttattgtgtctgttccaatctg

SEQ ID NO: 491954 - DNA, 120 bp, Artificial Sequence
  ENSG00000162949_24 (sequence is synthesized)
ggtacagaaccctctgggattgtaaatgttttattctacttaactttataaaaacacattgtgtaattatgggcagttctctgtgcattcgtgcagcctgtgctatgtcactggggacat

SEQ ID NO: 491955 - DNA, 120 bp, Artificial Sequence
  ENSG00000162949_25 (sequence is synthesized)
gatattggccccactctagagcagctcaccataaagggggagcgagaaagtctatgaaccaagaaccagaccacaaacaggatgggtccattgccagatggaaatgcaaagtggcacggg

SEQ ID NO: 491956 - DNA, 120 bp, Artificial Sequence
  ENSG00000162949_26 (sequence is synthesized)
tccctcccatgctctgagcacccctcagctctgtgggcttccccagagacctaattaggacagtagggaacccttttcccactcagtattttctcttcttccctgtccttgagtttctgg

SEQ ID NO: 491957 - DNA, 120 bp, Artificial Sequence
  ENSG00000162949_27 (sequence is synthesized)
gtttctggggattctctactaactcactaacataccacagcaacaatgataatagttaccatctatcaagcacctactatgtgctgatcagtgtactggggtgtgtgtgtgtgtgtgtgt

SEQ ID NO: 491958 - DNA, 120 bp, Artificial Sequence
  ENSG00000162949_28 (sequence is synthesized)
gtgtgtgtgtgtccttataattcttgaagcaatccctctgatacaaaaaagtatcatctcataatacagtagaagaaacaggagttcagagaggttaagtaatttgcccagatcacacag

SEQ ID NO: 491959 - DNA, 120 bp, Artificial Sequence
  ENSG00000162949_29 (sequence is synthesized)
ctagtcaggactcatgctcagatttgaagttggagctttcagcctccaaagtcgatgctctaaccttatcctaaaccgcccctttatagcaccgttgggaactattttcccttttaccca

SEQ ID NO: 491960 - DNA, 120 bp, Artificial Sequence
  ENSG00000162949_30 (sequence is synthesized)
ttcacttcccactggaggagtctccattatttaaatttcttacttcaacaagtccccaattcaatcaagataactaccaccaaaacatggaaaactgcctggtctacacagcagttgcac

SEQ ID NO: 491961 - DNA, 120 bp, Artificial Sequence
  ENSG00000162949_31 (sequence is synthesized)
cccagcattgctatgctgcattcacagcgggagacgctgggcagaggcagttcagagactcactccaggcccgtggctacaagtgtaggaccaagaattgaaccccagactcctgaccct

SEQ ID NO: 491962 - DNA, 120 bp, Artificial Sequence
  ENSG00000162949_32 (sequence is synthesized)
tggcttggcaagcagaagaggctgactccatgagtgtagacccccagatgctgccctgccagcccctcactcggcagtgtgctgtctcctgagacgcattgccccgctcctgcaccgttg

SEQ ID NO: 491963 - DNA, 120 bp, Artificial Sequence
  ENSG00000162949_33 (sequence is synthesized)
acaaggctgaattgggactgtgaagccggccattgtgaaacaagagggcttttttgatgaaatcataaatcaggccctgtctctgctggctgtgctttggaatctatcagagacacagcc

SEQ ID NO: 491964 - DNA, 120 bp, Artificial Sequence
  ENSG00000162949_34 (sequence is synthesized)
catctcccacagaggaatccaaatggtcctcacagtgccacggcccggggatggcagcccctctgcaccttgcacgctggctggttcactcttaactccttacccagctgaaagtgaatg

SEQ ID NO: 491965 - DNA, 120 bp, Artificial Sequence
  ENSG00000162949_35 (sequence is synthesized)
agtgcttgcactgagcccacagtccttatcctcatgcgtggcccattgtctaatgatcgtcccctcaaaataggtggcaggccactgcccaatgctgaagtcactgtttaacgaaggtgg

SEQ ID NO: 491966 - DNA, 120 bp, Artificial Sequence
  ENSG00000162949_36 (sequence is synthesized)
gggagggacagctctcacaggcccttactgggatgcagagaggagaagtgacttgatggactattttacctgcctctcttcctggatcgtctccagaactgctgtggctgccaagctcgg

SEQ ID NO: 491967 - DNA, 120 bp, Artificial Sequence
  ENSG00000162949_37 (sequence is synthesized)
tagagacgtggcgccccacccagtgtcatccgggggacttcaagctggaatgcagagcttagaaagggaggggataattatggggtgtgaggtgcattgccctctaaatctttaaacaag

SEQ ID NO: 491968 - DNA, 120 bp, Artificial Sequence
  ENSG00000162949_38 (sequence is synthesized)
caattggcagtaccccgtgaaacctttccttctcctactcggccacctcccaccaacctggcatcgttcctcccgggagctagccagcttcagaaagcacatacagcatccttgctgcca

SEQ ID NO: 491969 - DNA, 120 bp, Artificial Sequence
  ENSG00000162949_39 (sequence is synthesized)
aaccacctatgtgcacacaggatttccttaatggcttaataaactgttataaagaactccttgacttgtcagaataaaatagctgccaggggctctgcacaatgagcctcttaccgttaa

SEQ ID NO: 491970 - DNA, 120 bp, Artificial Sequence
  ENSG00000162951_0 (sequence is synthesized)
gacactcagtgagcagtaggtgcctgtgcaagctcgcgccgcacactgcctggtggagggaaggagcccgggcgccgctcgccgctccccgcgccgccgtccgcacctccccaccgcccg

SEQ ID NO: 491971 - DNA, 120 bp, Artificial Sequence
  ENSG00000162951_1 (sequence is synthesized)
ccgcccgccgcccgccgcccgcaaagcatgagtgagcccgctctctgcagctgcccggggcgcgaatggcaggctgtttccgcggagtaaaaggtggcgccggtcagtggtcgtttccaa

SEQ ID NO: 491972 - DNA, 120 bp, Artificial Sequence
  ENSG00000162951_2 (sequence is synthesized)
tgacggacattaaccagactgtcagatcctggggagtcgcgagccccgagtttggagttttttccccccacaacgtcacagtccgaactgcagagggaaaggaaggcggcaggaaggcga

SEQ ID NO: 491973 - DNA, 120 bp, Artificial Sequence
  ENSG00000162951_3 (sequence is synthesized)
agctcgggctccggcacgtagttgggaaacttgcgggtcctagaagtcgcctccccgccttgccggccgcccttgcagccccgagccgagcagcaaagtgagacattgtgcgcctgccag

SEQ ID NO: 491974 - DNA, 120 bp, Artificial Sequence
  ENSG00000162951_4 (sequence is synthesized)
atccgccggccgcggaccggggctgcctcggaaacacagaggggtcttctctcgccctgcatataattagcctgcacacaaagggagcagctgaatggaggttgtcactctctggaaaag

SEQ ID NO: 491975 - DNA, 120 bp, Artificial Sequence
  ENSG00000162951_5 (sequence is synthesized)
gatttctgaccgagcgcttccaatggacattctccagtctctctggaaagattctcgctaatggatttcctgctgctcggtctctgtctatactggctgctgaggaggccctcgggggtg

SEQ ID NO: 491976 - DNA, 120 bp, Artificial Sequence
  ENSG00000162951_6 (sequence is synthesized)
gtcttgtgtctgctgggggcctgctttcagatgctgcccgccgcccccagcgggtgcccgcagctgtgccggtgcgaggggcggctgctgtactgcgaggcgctcaacctcaccgaggcg

SEQ ID NO: 491977 - DNA, 120 bp, Artificial Sequence
  ENSG00000162951_7 (sequence is synthesized)
ccccacaacctgtccggcctgctgggcttgtccctgcgctacaacagcctctcggagctgcgcgccggccagttcacggggttaatgcagctcacgtggctctatctggatcacaatcac

SEQ ID NO: 491978 - DNA, 120 bp, Artificial Sequence
  ENSG00000162951_8 (sequence is synthesized)
atctgctccgtgcagggggacgcctttcagaaactgcgccgagttaaggaactcacgctgagttccaaccagatcacccaactgcccaacaccaccttccggcccatgcccaacctgcgc

SEQ ID NO: 491979 - DNA, 120 bp, Artificial Sequence
  ENSG00000162951_9 (sequence is synthesized)
agcgtggacctctcgtacaacaagctgcaggcgctcgcgcccgacctcttccacgggctgcggaagctcaccacgctgcatatgcgggccaacgccatccagtttgtgcccgtgcgcatc

SEQ ID NO: 491980 - DNA, 120 bp, Artificial Sequence
  ENSG00000162951_10 (sequence is synthesized)
tgtttaagctcaccgagctgcacctcgagcacaacgacttggtcaaggtgaacttcgcccacttcccgcgcctcatctccctgcactcgctctgcctgcggaggaacaaggtggccattg

SEQ ID NO: 491981 - DNA, 120 bp, Artificial Sequence
  ENSG00000162951_11 (sequence is synthesized)
tggtcagctcgctggactgggtttggaacctggagaaaatggacttgtcgggcaacgagatcgagtacatggagccccatgtgttcgagaccgtgccgcacctgcagtccctgcagctgg

SEQ ID NO: 491982 - DNA, 120 bp, Artificial Sequence
  ENSG00000162951_12 (sequence is synthesized)
actccaaccgcctcacctacatcgagccccggatcctcaactcttggaagtccctgacaagcatcaccctggccgggaacctgtgggattgcgggcgcaacgtgtgtgccctagcctcgt

SEQ ID NO: 491983 - DNA, 120 bp, Artificial Sequence
  ENSG00000162951_13 (sequence is synthesized)
ggctcaacaacttccaggggcgctacgatggcaacttgcagtgcgccagcccggagtacgcacagggcgaggacgtcctggacgccgtgtacgccttccacctgtgcgaggatggggccg

SEQ ID NO: 491984 - DNA, 120 bp, Artificial Sequence
  ENSG00000162951_14 (sequence is synthesized)
agcccaccagcggccacctgctctcggccgtcaccaaccgcagtgatctggggccccctgccagctcggccaccacgctcgcggacggcggggaggggcagcacgacggcacattcgagc

SEQ ID NO: 491985 - DNA, 120 bp, Artificial Sequence
  ENSG00000162951_15 (sequence is synthesized)
ctgccaccgtggctcttccaggcggcgagcacgccgagaacgccgtgcagatccacaaggtggtcacgggcaccatggccctcatcttctccttcctcatcgtggtcctggtgctctacg

SEQ ID NO: 491986 - DNA, 120 bp, Artificial Sequence
  ENSG00000162951_16 (sequence is synthesized)
tgtcctggaagtgtttcccagccagcctcaggcagctcagacagtgctttgtcacgcagcgcaggaagcaaaagcagaaacagaccatgcatcagatggctgccatgtctgcccaggaat

SEQ ID NO: 491987 - DNA, 120 bp, Artificial Sequence
  ENSG00000162951_17 (sequence is synthesized)
actacgttgattacaaaccgaaccacattgagggagccctggtgatcatcaacgagtatggctcgtgtacctgccaccagcagcccgcgagggaatgcgaggtgtgattgtcccagtggc

SEQ ID NO: 491988 - DNA, 120 bp, Artificial Sequence
  ENSG00000162951_18 (sequence is synthesized)
tctcaacccatgcgctaccaaatacgcctgggcagccgggacgggccggcgggcaccaggctggggtctccttgtctgtgctctgatatgctccttgactgaaactttaaggggatctct

SEQ ID NO: 491989 - DNA, 120 bp, Artificial Sequence
  ENSG00000162951_19 (sequence is synthesized)
cccagagacttgacattttagctttattgtgtcttaaaaacaaaagcgaattaaaacacaacaaaaaaccccaccccacaaccttcaggacagtctatcttaaatttcatatgagaactc

SEQ ID NO: 491990 - DNA, 120 bp, Artificial Sequence
  ENSG00000162951_20 (sequence is synthesized)
cttcctccctttgaagatctgtccatattcaggaatctgagagtgtaaaaaaggtaccaatcattgattttttttttttttgtaaactaaaatgtttaaaataaaatagcatttacagtt

SEQ ID NO: 491991 - DNA, 120 bp, Artificial Sequence
  ENSG00000162951_21 (sequence is synthesized)
tcaacagattcagtccccagtcctccttctctgagcagacctctcatccgcagcatatatctgctagatcttctaagagctgaaatggagacttctggaagaaggtgggaaagaaatcca

SEQ ID NO: 491992 - DNA, 120 bp, Artificial Sequence
  ENSG00000162951_22 (sequence is synthesized)
tctcggcttaattaaccatttatcgcatcatattactcccatcttaaaagtgcacgcgttgtttttctgaaccctcacacaaaggctactactgtggtcccatatctgtcggcccatgag

SEQ ID NO: 491993 - DNA, 120 bp, Artificial Sequence
  ENSG00000162951_23 (sequence is synthesized)
aaacagtgttcttggacctcacagccaagcagcactgaactgcagcaaaatccagcaacacattcagcagcgagcagcctgctgagctccactggtttatccggggccaccaaccccaaa

SEQ ID NO: 491994 - DNA, 120 bp, Artificial Sequence
  ENSG00000162951_24 (sequence is synthesized)
gaactgggatgaaagcagatgtgagagaggaaaaggatctgtttttgttttattttctaccaggcccagctctttgtggggggaataaaaaagaagaaaaatcgagctccaagctggtgc

SEQ ID NO: 491995 - DNA, 120 bp, Artificial Sequence
  ENSG00000162951_25 (sequence is synthesized)
cctgccaagcttcctcccctcccttcctagtccaagcactccaccgtctgtgcagactgcataacagcaatttctggaaacaggctgaagaatctgggccagtccagaggcagtggattc

SEQ ID NO: 491996 - DNA, 120 bp, Artificial Sequence
  ENSG00000162951_26 (sequence is synthesized)
ctggtttatgtgtggtggggtttttaggaattttatttttcaccttaattctttcaacaactgccagctgtttgaagcacatctgtaataaacagcttctgtttgtaaaatgagactgaa

SEQ ID NO: 491997 - DNA, 120 bp, Artificial Sequence
  ENSG00000162951_27 (sequence is synthesized)
gttatcctctccagagaaattcctgaatcttctctgtagttcaatgccttcactgacagtttggctcaaaaagtatgagtgtggtaaatattaaagaatgttaatacaagtgtaatgaaa

SEQ ID NO: 491998 - DNA, 120 bp, Artificial Sequence
  ENSG00000162951_28 (sequence is synthesized)
ccgctctctgcagctgcccggggcgcgaatggcaggctgtttccgcggagtaaaaggtggcgccgcatctaacatggaccaaatcaccatctctttgatctttccgtggctgtgaacttt

SEQ ID NO: 491999 - DNA, 120 bp, Artificial Sequence
  ENSG00000162951_29 (sequence is synthesized)
cctccctttgaagatctgtccatattcaggaatctgagagtgtaaaaaaggtggccataagacagagagagaataatcgtgctttgttttatgctactcctcccaccctgcccatgatta

SEQ ID NO: 492000 - DNA, 120 bp, Artificial Sequence
  ENSG00000162951_30 (sequence is synthesized)
aacatcatgtatgtagaagatcttaagtccatacgcatttcatgaagaaccattggaaagaggaatctgcaatctgggagcttaagagcaaatgatgaccatagaaagctatgttcttac

SEQ ID NO: 492001 - DNA, 120 bp, Artificial Sequence
  ENSG00000162951_31 (sequence is synthesized)
tttgtgtgtgtgtctgtatgtttctgcgttgtgtgtctttgtaggcaagcaaacgttgtctacacaaacgggaatttagctcacatcatttcatgcccctgtgcctctagctctggagat

SEQ ID NO: 492002 - DNA, 120 bp, Artificial Sequence
  ENSG00000162951_32 (sequence is synthesized)
tggtggggggaggtggggggaaacggcaggaataagggaaagtggtagttttaactaaggttttgtaacacttgaaatcttttctttctcaaattaattaatctttaagcttcaagaaac

SEQ ID NO: 492003 - DNA, 120 bp, Artificial Sequence
  ENSG00000162951_33 (sequence is synthesized)
ttgctctgacccctctaagcaaactactaagcatttaaaagagaatctaatttttaaaggtgtagcaccttttttttattcttcccacagagggtgctaatctcattatgctgtgctatc

SEQ ID NO: 492004 - DNA, 120 bp, Artificial Sequence
  ENSG00000162951_34 (sequence is synthesized)
tgaaaagaacttaaggccacaattcacgtctcgtcctgggcattgtgatggattgaccctccatttgcagtaccttcccagctgattaaagttcagcagtggtattgaggtttttcgaat

SEQ ID NO: 492005 - DNA, 120 bp, Artificial Sequence
  ENSG00000162951_35 (sequence is synthesized)
atttatatagaaaaaaagtcttttcacatgacaaatgacactctcacaccagtcttagccctagtagttttttaggttggaccagaggaagcaggttaaatgagacctgtcctctgctgc

SEQ ID NO: 492006 - DNA, 120 bp, Artificial Sequence
  ENSG00000162951_36 (sequence is synthesized)
actcagaaaaaataggcagtccctgatgctcagatcttagccttgatattaatagttgagaccacctacccacaatgcagcctatactcccaagactacaaagttaccatcgcaaaggaa

SEQ ID NO: 492007 - DNA, 120 bp, Artificial Sequence
  ENSG00000162951_37 (sequence is synthesized)
aggttattccagtaaaaggaaatagttttctcaaccatttaaaaatattcttctgaactcatcaaagtagaagagcccccaaccttttctctctgccttcaagaaggcagacatttggta

SEQ ID NO: 492008 - DNA, 120 bp, Artificial Sequence
  ENSG00000162951_38 (sequence is synthesized)
tgatttagcatcaacaacacatttatgagtatatgtaagtaatcagaggggcaaatgccacttgttattcctcccaagttttccaagcaagtacacacagatctctggtaggattagggg

SEQ ID NO: 492009 - DNA, 120 bp, Artificial Sequence
  ENSG00000162951_39 (sequence is synthesized)
ccacttgtgtttccggcttattttagtcgacttgtcagcaagtttgatgcctagtctatctgacatggcccagtagaacagggcattgatggatcacatgagatggtagaaggaacatca

SEQ ID NO: 492010 - DNA, 120 bp, Artificial Sequence
  ENSG00000162951_40 (sequence is synthesized)
tcacatacccctctcacagagaaaattatcaaagaaccagaaattatatctgttttggagcaagagtgtcataatgtttcagggtagtcaaaataaacataaattatctcctctagatga

SEQ ID NO: 492011 - DNA, 120 bp, Artificial Sequence
  ENSG00000162951_41 (sequence is synthesized)
gtggcgatgttggctgatttgggtctgccattgacagaatgtcaaataaaaaggaattagctagaatatgaccattaaatgtgcttctgaaatatattttgagataggtttagaatgtca

SEQ ID NO: 492012 - DNA, 120 bp, Artificial Sequence
  ENSG00000162959_0 (sequence is synthesized)
gggacgccgggggccggggccagggctttccgggcttcggtgaggccgccgtgggccccatcttccggcggtcgccggagtttgtggtgattgttgctgccgccgccaccgccccggctg

SEQ ID NO: 492013 - DNA, 120 bp, Artificial Sequence
  ENSG00000162959_1 (sequence is synthesized)
ccatctcctcctcctgggccgccgcctcctcctcttcctcctcctcctgggccgggctgatcccctccccgctgccgcctcctcctgggctgggcccgcggtgtctcgtcccctcgcgga

SEQ ID NO: 492014 - DNA, 120 bp, Artificial Sequence
  ENSG00000162959_2 (sequence is synthesized)
gccgctcctgccgccgccgccgccgcctcctcattcatcctcgtgcaccataggcggcacaggcaccaagatgtccaaccgagtggtctgccgagaagccagtcacgccgggagctggta

SEQ ID NO: 492015 - DNA, 120 bp, Artificial Sequence
  ENSG00000162959_3 (sequence is synthesized)
cacagcctcaggaccgcagctgaatgcacagctagaaggttggctttcacaagtacagtctacaaaaagacctgctagagccattattgccccccatgcaggatatacgtactgtgggtc

SEQ ID NO: 492016 - DNA, 120 bp, Artificial Sequence
  ENSG00000162959_4 (sequence is synthesized)
ttgtgctgcccatgcttataaacaagtggatccgtctattacccggagaattttcatccttgggccttctcatcatgtgcccctctctcgatgtgcactttccagtgtggatatatatag

SEQ ID NO: 492017 - DNA, 120 bp, Artificial Sequence
  ENSG00000162959_5 (sequence is synthesized)
gacacctctgtatgaccttcgtattgaccaaaagatttacggagaactgtggaagacaggaatgtttgaacgcatgtctctgcagacagatgaagatgaacacagtattgaaatgcattt

SEQ ID NO: 492018 - DNA, 120 bp, Artificial Sequence
  ENSG00000162959_6 (sequence is synthesized)
gccttatacagctaaagccatggaaagccataaggatgagtttaccattattcctgtactggttggagctctgagtgagtcaaaagaacaggaattcggaaaactcttcagtaaatatct

SEQ ID NO: 492019 - DNA, 120 bp, Artificial Sequence
  ENSG00000162959_7 (sequence is synthesized)
agcggatcctagtaatctctttgtggtttcttctgatttctgccattggggtcaaaggttccgttacagttactatgatgaatcccagggggagatttatagatccattgaacatctaga

SEQ ID NO: 492020 - DNA, 120 bp, Artificial Sequence
  ENSG00000162959_8 (sequence is synthesized)
taaaatgggtatgagtattatagaacaattagaccctgtatcttttagcaattacttgaagaaataccataatactatatgtggaagacatcccattggggtgttattaaatgctatcac

SEQ ID NO: 492021 - DNA, 120 bp, Artificial Sequence
  ENSG00000162959_9 (sequence is synthesized)
agagctccagaagaatggaatgaatatgagtttttcgtttttgaattatgcccagtcgagccagtgtagaaactggcaagacagttcagtgagttatgcagctggagcactcacggtcca

SEQ ID NO: 492022 - DNA, 120 bp, Artificial Sequence
  ENSG00000162959_10 (sequence is synthesized)
ctgaagctctgaatcctcagggatgccacctgcacattctcatactctgtccggggtcccagcctagcctttaccacgatactggtcctggtttggggggattctgaaacctcaaactaa

SEQ ID NO: 492023 - DNA, 120 bp, Artificial Sequence
  ENSG00000162959_11 (sequence is synthesized)
tagaactttcttctctttttttctagtaggtgtagtccttccttaatttcaactcattaaaaaatgctttatagtttagggcagtggaaggaaggctggcatcaaaatattttgatcaaa

SEQ ID NO: 492024 - DNA, 120 bp, Artificial Sequence
  ENSG00000162959_12 (sequence is synthesized)
aaagatgacaatgtaaaggctcagttgtggcagacagttttttgaaagtaacttgtaaagcatttaccatatcctaaatttgcactctttgcagacttgtgcacatatattccgctttca

SEQ ID NO: 492025 - DNA, 120 bp, Artificial Sequence
  ENSG00000162959_13 (sequence is synthesized)
gaatagttttgcaaattgtacacaaacaaacaaaaaggtggaagctttttaataaagaaattgcatttataaatgatctgtattagaatataataaatctccagttatagtcaattacta

SEQ ID NO: 492026 - DNA, 120 bp, Artificial Sequence
  ENSG00000162959_14 (sequence is synthesized)
cccatgttgtacaacagataccttctattttagttgctaataaagggctacacaactcaaaatagtctgatttaaacttattgctctgtggtatatatgaaaattgttttttattaattc

SEQ ID NO: 492027 - DNA, 120 bp, Artificial Sequence
  ENSG00000162959_15 (sequence is synthesized)
ttgctctgtggtatatatgaaaattgttttttattaattccatctcagaatttttgttaaaaatggtaaacctcagctcttatgtaaaaatatattaggatgtattttatattttatata

SEQ ID NO: 492028 - DNA, 120 bp, Artificial Sequence
  ENSG00000162959_16 (sequence is synthesized)
tcttaaagttaactttttaaattacatgcagtttgcctttttgtctgtgacatccctttgtgtcattactatattgtaacagaatatatattcaagattggtaaaagaacgtagatgtaa

SEQ ID NO: 492029 - DNA, 120 bp, Artificial Sequence
  ENSG00000162959_17 (sequence is synthesized)
tccttgacttcaaagatcatgtttgatagtctgcaaatgaggaaacattgaagagtgttcttagtgtttttcaaatcattgcagaccttacactgctgtgcttttttaatgctttaagca

SEQ ID NO: 492030 - DNA, 120 bp, Artificial Sequence
  ENSG00000162959_18 (sequence is synthesized)
ggattttcttatggttacacaattttttttgtcatgatttttggtgcggctcttccaactaaaataatggtatgatgttgtatttctttctttctttagcatagaccaattctagtcact

SEQ ID NO: 492031 - DNA, 120 bp, Artificial Sequence
  ENSG00000162959_19 (sequence is synthesized)
aaaaaaaaaaaaaaaagatataatttagttaataattcagttaccatgtatgtactgcattatacctattttaacctaacagtgtctacattatattagagagtgtttatatctccagtg

SEQ ID NO: 492032 - DNA, 120 bp, Artificial Sequence
  ENSG00000162959_20 (sequence is synthesized)
gtttatatctccagtgttatgccagagtagcacaatttttagatgccttgcaccaattttatttaaagatttatgtttcttatttattaaatatcaactttctatactcgagtgaaataa

SEQ ID NO: 492033 - DNA, 120 bp, Artificial Sequence
  ENSG00000162959_21 (sequence is synthesized)
aataatgttaccttttagattcaaagtcgcccacctatgtatgtgtggaaattatattcttacacattagtgatttattttccgtaatttagatacactttttagtactattaatattta

SEQ ID NO: 492034 - DNA, 120 bp, Artificial Sequence
  ENSG00000162959_22 (sequence is synthesized)
aatggacaacagtgaatttttaaaataatgttttctgagtataagactaatacatgattattttagaaaatttgaaaattactgaaaagttataaagagaaaaaattatctgcaatctca

SEQ ID NO: 492035 - DNA, 120 bp, Artificial Sequence
  ENSG00000162959_23 (sequence is synthesized)
gttataaagagaaaaaattatctgcaatctcactacccagagataaccctgttaatatttttctgtatttcttttcagtctttgtctgtgctatttctatgtatgagtgtgtatacatgt

SEQ ID NO: 492036 - DNA, 120 bp, Artificial Sequence
  ENSG00000162959_24 (sequence is synthesized)
gtttgtgtgtgtgtgtaataacaaacttgagattatactgaccatatagttatgtaccctgttttttataacctaacttcatacatatttacccatgtctatgaaaatgtgacttttaaa

SEQ ID NO: 492037 - DNA, 120 bp, Artificial Sequence
  ENSG00000162959_25 (sequence is synthesized)
aatggctgcctaatattctattgtatgaatatgccacaatttaactacttctctctttggatattaggttgttctaatctttcaccattataaataatagtgggatagacatccttgttt

SEQ ID NO: 492038 - DNA, 120 bp, Artificial Sequence
  ENSG00000162959_26 (sequence is synthesized)
gtaaaatttcatctctatattagactctttaggatatactcatgtacatggaataagtggtttagacagtgagaactttttaggctctttaaaatatttccaagttataaccctttagaa

SEQ ID NO: 492039 - DNA, 120 bp, Artificial Sequence
  ENSG00000162959_27 (sequence is synthesized)
agattgtactaaattaacaatgtatgagtacccatcattctgccccttcaccagtatcattatttttttaatctttgacagttggttaacataacaatcggttgtttctttgaccattct

SEQ ID NO: 492040 - DNA, 120 bp, Artificial Sequence
  ENSG00000162959_28 (sequence is synthesized)
ctataattttatagttgattgatttttaaaaagacaagagggttgcctaagttgggtggactatagtacaagtatggttcttgcacttttaaaactgtagaagctggacacgatggtatg

SEQ ID NO: 492041 - DNA, 90 bp, Artificial Sequence
  ENSG00000162959_29 (sequence is synthesized)
ttgcacttttaaaactgtagaagctggacacgatggtatgcacctgtagtcccagctactttgactgtggaggcaggaggatcacttgac

SEQ ID NO: 492042 - DNA, 120 bp, Artificial Sequence
  ENSG00000162959_30 (sequence is synthesized)
atatttcagcatcactctacactttcctagaatatcaacatacctgataatgaagtagaaagagttccaaattgatgattgagtgttgggttctagttctatttctgccactaattagtt

SEQ ID NO: 492043 - DNA, 120 bp, Artificial Sequence
  ENSG00000162959_31 (sequence is synthesized)
ctctgaacttaagtgtttcatgtcatattgaaactttctcatttgtaaaatgtggaggggatctcttaagtgctttctagtttcaaagtactttgatactgtgactttattttgtagagg

SEQ ID NO: 492044 - DNA, 120 bp, Artificial Sequence
  ENSG00000162959_32 (sequence is synthesized)
ttctggtgtcatttatttttaatagctacatgaataatgtagagatactatcttttgatttcaacttcacatacatggaaatgaaagtcttgttatttaacacaaaaggaaatttaattt

SEQ ID NO: 492045 - DNA, 120 bp, Artificial Sequence
  ENSG00000162959_33 (sequence is synthesized)
gcattatttaatgcagttaatattacctaaaatgttgaacttaagcttttctactttaagtgcctttaaaagttttgtatttggaatctaaaatataaaggaaattcttatgtagctcta

SEQ ID NO: 492046 - DNA, 120 bp, Artificial Sequence
  ENSG00000162959_34 (sequence is synthesized)
acaagtggatccgtctattacattttccaggagtgctctgatgttaaatatcctttctctctgtcttttcatattttcctcaatcagaaaaatgccctttctcattatttgattcttggt

SEQ ID NO: 492047 - DNA, 120 bp, Artificial Sequence
  ENSG00000162959_35 (sequence is synthesized)
tcatatactacctggccctagtcaggctacctaaacatttctgagttaccattctctatagcccacgtaagcctttaatttaaaacaaagtgtcatgttatttatgtgctattaagatag

SEQ ID NO: 492048 - DNA, 120 bp, Artificial Sequence
  ENSG00000162959_36 (sequence is synthesized)
cctatctgtagatctgtttatcttcaatatagaaagagatttatttggaattgactcatgccattatggagggctgacaagtgccaagatgtgcagtcagcaagctggagacccaggaga

SEQ ID NO: 492049 - DNA, 120 bp, Artificial Sequence
  ENSG00000162959_37 (sequence is synthesized)
gagaccttgggggtgcaaatcgatgagagatgcctgtatatgatggatacccgcgggactgtcctcgtggaaagccgcatccgcgagccctaggtgctctccatttgaggaagttggctg

SEQ ID NO: 492050 - DNA, 120 bp, Artificial Sequence
  ENSG00000162959_38 (sequence is synthesized)
aaccccggagagcggagcgtgcacgttgagattcctcggcgggcggcacaggcaccaagatgtccaaccgagtggtctgccgagaagccagtcacgccgggagctggtacacagcctcag

SEQ ID NO: 492051 - DNA, 120 bp, Artificial Sequence
  ENSG00000162959_39 (sequence is synthesized)
ggagatctgtatgatctgtttatttcgcaattgacaggccataaggatgagtttaccattattcctgtactggttggagctctgagtgagtcaaaagaacaggaattcggaaaactcttc

SEQ ID NO: 492052 - DNA, 120 bp, Artificial Sequence
  ENSG00000162959_40 (sequence is synthesized)
ctgatttctgccattgggggtatgagtattatagaacaattagaccctgtatcttttagcaattacttgaagaaataccataatactatatgtggaagacatcccattggggtgttatta

SEQ ID NO: 492053 - DNA, 120 bp, Artificial Sequence
  ENSG00000162961_0 (sequence is synthesized)
acggccggagctgtttgtgctgggagctggtggcgcggtgcagggctcttaagaacgaacggcttgggcgcgggtaatcagctccctttcccccactttctcacttattctaggtacttg

SEQ ID NO: 492054 - DNA, 120 bp, Artificial Sequence
  ENSG00000162961_1 (sequence is synthesized)
ggactgtcgtagagtttccagaccccatgtaggcgcccagtcgtggactgtcccactctgctgctctactgctcgtggtgctcccgcgcccagactggtatccggggactgtgacttgca

SEQ ID NO: 492055 - DNA, 120 bp, Artificial Sequence
  ENSG00000162961_2 (sequence is synthesized)
agggacaaacgcaggttgcagaaaatcctcactctgagtacggtctcacagacaacgttgagagaatagtagaaaatgagaagattaatgcagaaaagtcatcaaagcagaaggtagatc

SEQ ID NO: 492056 - DNA, 120 bp, Artificial Sequence
  ENSG00000162961_3 (sequence is synthesized)
tccagtctttgccaactcgtgcctacctggatcagacagttgtgcctatcttattacagggacttgctgtgcttgcaaaggaaagaccaccaaatcccattgaatttctagcatcttatc

SEQ ID NO: 492057 - DNA, 120 bp, Artificial Sequence
  ENSG00000162961_4 (sequence is synthesized)
ttttaaaaaacaaggcacagtttgaagatcgaaactgacttaatgggaagaacagaaaaatttagttgctactgtagatttacatgattaagaggcagctttaattgccatgatcattcc

SEQ ID NO: 492058 - DNA, 120 bp, Artificial Sequence
  ENSG00000162961_5 (sequence is synthesized)
acggccggagctgtttgtgctgggagctggtggcgcggtgcagggctcttaagaacgaacggcttgggcgcggactggtatccggggactgtgacttgcagggtccgccatggagccaga

SEQ ID NO: 492059 - DNA, 120 bp, Artificial Sequence
  ENSG00000162961_6 (sequence is synthesized)
ttttgatttaatcaccataaaccatacctatttaatgagtgtattctgtgcaatttttttctcagattgtctttaactttgtttttaaaatgaccttcaaaataaactgtcaaaacacca

SEQ ID NO: 492060 - DNA, 72 bp, Artificial Sequence
  ENSG00000162961_7 (sequence is synthesized)
agacaacactgctgggtcttgctacgtacgttgcccaggttggaatgcagtggcgtgatcatcgcctaccaa

SEQ ID NO: 492061 - DNA, 120 bp, Artificial Sequence
  ENSG00000162961_8 (sequence is synthesized)
tatcttattacagggacttgctgtgcttgcaaaggaaagatgaggaaacagacttggagaggttaagtgacatgctcaagacaacactgctgacggggtttcaccgtgttgcccaggctg

SEQ ID NO: 492062 - DNA, 74 bp, Artificial Sequence
  ENSG00000162961_9 (sequence is synthesized)
gttgcgaactcctgagctcaggcaatctgtccgcctcggcctcccaattttttttttaagaggtgaggtctcac

SEQ ID NO: 492063 - DNA, 120 bp, Artificial Sequence
  ENSG00000162961_10 (sequence is synthesized)
aaggaaagagttttacaacagagagaaaatacagcagtcaagtataatttaaaaaattcagccaatttttctcagcattgtttctggacctttctgagggtgggatctgggcatcttcaa

SEQ ID NO: 492064 - DNA, 120 bp, Artificial Sequence
  ENSG00000162961_11 (sequence is synthesized)
agacaacactgctggaccgcagctgaatgcacagctagaaggttggctttcacaagtacagtctacaaaaagacctgctagagccattattgccccccatgcaggatatacgtactgtgg

SEQ ID NO: 492065 - DNA, 120 bp, Artificial Sequence
  ENSG00000162961_12 (sequence is synthesized)
gtcttgtgctgcccatgcttataaacaagtggatccgtctattacccggagaattttcatccttgggccttctcatcatgtgcccctctctcgatgtgcactttccagtgtggatatata

SEQ ID NO: 492066 - DNA, 120 bp, Artificial Sequence
  ENSG00000162961_13 (sequence is synthesized)
taggacacctctgtatgaccttcgtattgaccaaaagatttacggagaactgtggaagacaggaatgtttgaacgcatgtctctgcagacagatgaagatgaacacagtattgaaatgca

SEQ ID NO: 492067 - DNA, 120 bp, Artificial Sequence
  ENSG00000162961_14 (sequence is synthesized)
tttgccttatacagctaaagccatggaaagccataaggatgagtttaccattattcctgtactggttggagctctgagtgagtcaaaagaacaggaattcggaaaactcttcagtaaata

SEQ ID NO: 492068 - DNA, 120 bp, Artificial Sequence
  ENSG00000162961_15 (sequence is synthesized)
tctagcggatcctagtaatctctttgtggtttcttctgatttctgccattggggtcaaaggttccgttacagttactatgatgaatcccagggggagatttatagatccattgaacatct

SEQ ID NO: 492069 - DNA, 120 bp, Artificial Sequence
  ENSG00000162961_16 (sequence is synthesized)
atatgtggaagacatcccattggggtgttattaaatgctatcacagagctccagaagaatggaatgaatatgagtttttcgtttttgaattatgcccagtcgagccagtgtagaaactgg

SEQ ID NO: 492070 - DNA, 120 bp, Artificial Sequence
  ENSG00000162961_17 (sequence is synthesized)
caagacagttcagtgagttatgcagctggagcactcacggtccactgaagctctgaatcctcagggatgccacctgcacattctcatactctgtccggggtcccagcctagcctttacca

SEQ ID NO: 492071 - DNA, 120 bp, Artificial Sequence
  ENSG00000162961_18 (sequence is synthesized)
cgatactggtcctggtttggggggattctgaaacctcaaactaatagaactttcttctctttttttctagtaggtgtagtccttccttaatttcaactcattaaaaaatgctttatagtt

SEQ ID NO: 492072 - DNA, 120 bp, Artificial Sequence
  ENSG00000162961_19 (sequence is synthesized)
tagggcagtggaaggaaggctggcatcaaaatattttgatcaaaaaagatgacaatgtaaaggctcagttgtggcagacagttttttgaaagtaacttgtaaagcatttaccatatccta

SEQ ID NO: 492073 - DNA, 120 bp, Artificial Sequence
  ENSG00000162961_20 (sequence is synthesized)
aatttgcactctttgcagacttgtgcacatatattccgctttcagaatagttttgcaaattgtacacaaacaaacaaaaaggtggaagctttttaataaagaaattgcatttataaatga

SEQ ID NO: 492074 - DNA, 120 bp, Artificial Sequence
  ENSG00000162961_21 (sequence is synthesized)
tctgtattagaatataataaatctccagttatagtcaattactacccatgttgtacaacagataccttctattttagttgctaataaagggctacacaactcaaaatagtctgatttaaa

SEQ ID NO: 492075 - DNA, 120 bp, Artificial Sequence
  ENSG00000162971_0 (sequence is synthesized)
agagggcaggcgtgagcaaccatggccgggcagcacctcccggtaccccggctggagggcgtttctcgggagcagttcatgcagcacctctacccacagagaaaacctcttgtgttggaa

SEQ ID NO: 492076 - DNA, 120 bp, Artificial Sequence
  ENSG00000162971_1 (sequence is synthesized)
gggattgatttggggccatgtacaagcaaatggacagtggattacctaagccaagttggagggaagaaagaagtaaagattcatgttgctgcagttgcacagatggacttcattagtaag

SEQ ID NO: 492077 - DNA, 120 bp, Artificial Sequence
  ENSG00000162971_2 (sequence is synthesized)
aactttgtatatagaactttaccttttgaccagttggtccagagggcagctgaagagaaacataaagaattctttgtttcagaggatgagaaatactacttacggtcacttggagaagac

SEQ ID NO: 492078 - DNA, 120 bp, Artificial Sequence
  ENSG00000162971_3 (sequence is synthesized)
cctagaaaggatgttgcagatatcagaaagcagtttcctttgttgaaaggagatattaagtttccagaattcttcaaagaggaacagttcttttccagtgtttttcgaattagttcacca

SEQ ID NO: 492079 - DNA, 120 bp, Artificial Sequence
  ENSG00000162971_4 (sequence is synthesized)
ggattacaactatggactcattatgatgtaatggataatttgttaatacaagtgacaggaaaaaagcgtgttgtactcttcagtcctcgagatgcccagtatttatatttaaaaggtact

SEQ ID NO: 492080 - DNA, 120 bp, Artificial Sequence
  ENSG00000162971_5 (sequence is synthesized)
aaatcagaagtactgaatatagataacccagacttggctaaatatccacttttttccaaggctagaagatatgaatgttcccttgaagctggtgatgtattattcattcctgctttatgg

SEQ ID NO: 492081 - DNA, 120 bp, Artificial Sequence
  ENSG00000162971_6 (sequence is synthesized)
ttccataatgtaatttctgaagagtttggagtgggagtgaatatcttttggaagcaccttccatctgaatgctatgataaaacagatacctatggaaacaaagatcctacagcagcatca

SEQ ID NO: 492082 - DNA, 120 bp, Artificial Sequence
  ENSG00000162971_7 (sequence is synthesized)
agagctgcacaaattctggacagagccttgaaaacactggccgagttaccagaggaatatagggacttctatgcacgacgaatggtcctacacattcaagacaaagcctacagcaagaac

SEQ ID NO: 492083 - DNA, 120 bp, Artificial Sequence
  ENSG00000162971_8 (sequence is synthesized)
tctgagtaaataatgaagtgaatgcaatgcacattaacactttagtaaggtataacgatataaattaaagattttgttaaaataggaaagatacatcagatttacagattatgtaagtac

SEQ ID NO: 492084 - DNA, 120 bp, Artificial Sequence
  ENSG00000162971_9 (sequence is synthesized)
gaaggggtgtttgtgtggattctacttgatacagattgttataattaaagaatgctgtgctgggaccactctttaacattcagatgctgaccactaaaagtccaacttaaaatgacttaa

SEQ ID NO: 492085 - DNA, 120 bp, Artificial Sequence
  ENSG00000162971_10 (sequence is synthesized)
aaacagtaagaaaatatattgattcacaatacatgaaatctattgacagaatgtgctgcagtgtttctgatccaatgattcagtaatgtcatcaagaaccttgggaacccgcctccacac

SEQ ID NO: 492086 - DNA, 120 bp, Artificial Sequence
  ENSG00000162971_11 (sequence is synthesized)
cccacccccttttcaaccacaacattggcatcatcctaaggctggctaccctcgtggtcatgggatgattgccagtagcagttggagccttgtgcatcttcatttacatgcagcggaaga

SEQ ID NO: 492087 - DNA, 120 bp, Artificial Sequence
  ENSG00000162971_12 (sequence is synthesized)
gtcaggctggattctaggggccctgtcctagtatgagaaagctttcccagaattcactttccatatccttaggtctcattgctctaaagtaacttagacctgtccatccctgagccagtc

SEQ ID NO: 492088 - DNA, 120 bp, Artificial Sequence
  ENSG00000162971_13 (sequence is synthesized)
actggcaaagggtctagaataacctttagggcagtcaggtccactggagctgagagtagaagtggaggccacatgagggatatatggggacagaaaggatagtttttttaaaatcatggt

SEQ ID NO: 492089 - DNA, 120 bp, Artificial Sequence
  ENSG00000162971_14 (sequence is synthesized)
tctgataggaaaaacatgagcaacgcacaatatctattacatttgcctagaagcagaattttttgaggaactttaaaaaatgtacagatacctaggtcccaactttgtagactgattcaa

SEQ ID NO: 492090 - DNA, 120 bp, Artificial Sequence
  ENSG00000162971_15 (sequence is synthesized)
gagtgtttgggatttggtataggaacttaatagacctcacagggtgttctgatgcataatcagagctgagatcaactggagttgatgatagtgacttggattattagttttgtgattagt

SEQ ID NO: 492091 - DNA, 120 bp, Artificial Sequence
  ENSG00000162971_16 (sequence is synthesized)
gcaaaacaaatgtttaatctgatcttgacttttcttgccacccagtatgtcagggtggtttttggtttttgaatgttacaaaataaataatttatacctatgtctaaaccttagcctagt

SEQ ID NO: 492092 - DNA, 120 bp, Artificial Sequence
  ENSG00000162971_17 (sequence is synthesized)
taaagatttcccaactattttttccacctatcccttttttaaaagaaaaattacttaaagaatgaataaatgagatcctaaaagtgttgtcatcgaagacagtgagccattgtgtgtgga

SEQ ID NO: 492093 - DNA, 120 bp, Artificial Sequence
  ENSG00000162971_18 (sequence is synthesized)
tctctgcttttgttttgtacctagtaattatattgcagtgtcattgaagaccacataatcttcactgaacataaatgtgttcatctaaagcaatctcttagtacatcaatttggtgcatt

SEQ ID NO: 492094 - DNA, 120 bp, Artificial Sequence
  ENSG00000162971_19 (sequence is synthesized)
ttaattagagaaaatcattttctctattgaagagaatccatccactcatgtcctataaattatagtaaataaggaaaagcatatataacattctgaatttcctaggtgtctttggaaaca

SEQ ID NO: 492095 - DNA, 120 bp, Artificial Sequence
  ENSG00000162971_20 (sequence is synthesized)
ggtaagttactcaggtgaataaaggtgaaaaaagtcttgtcagaaaaggaatgattatattagccaaatttaattaccaggttttgatcttcattaagcaaagcaaagaacttctttact

SEQ ID NO: 492096 - DNA, 120 bp, Artificial Sequence
  ENSG00000162971_21 (sequence is synthesized)
tttttttcttaaccagcaagagaattgatacaaagtataaatccagagtcatgtagaaaacttggaagtattaataaaacagattacagtttgtgcactgaatagtcatcttaattgatt

SEQ ID NO: 492097 - DNA, 120 bp, Artificial Sequence
  ENSG00000162971_22 (sequence is synthesized)
gtttaatggagaagcaaactggatgaccttagacaaaataacatttatctatgaagcttattttcctcatctttaaaacagaactacaaaaatgcagagagttcaagggcaggcacatag

SEQ ID NO: 492098 - DNA, 120 bp, Artificial Sequence
  ENSG00000162971_23 (sequence is synthesized)
ttgataactggtgctagttcttctatttaattatattccatctttgttgagagatttgaggtagctcctgttgcagtattaatttataatattttaaaagttagagaactttcctttggg

SEQ ID NO: 492099 - DNA, 120 bp, Artificial Sequence
  ENSG00000162971_24 (sequence is synthesized)
atgttttaaaattatttccctggtcataattaatattagggtctgtttatttcaaatacaaaatattttaatcttttcttcctactgggttaagaccaaatgagatgtttgtttttaatg

SEQ ID NO: 492100 - DNA, 120 bp, Artificial Sequence
  ENSG00000162971_25 (sequence is synthesized)
tataaaatcttatacagtgtatgttagctgcaacttctcaggaattctgaatcttagaacttttttattgaaagagatcttagaagccatctaaccaacccagattgcttaatgattgtc

SEQ ID NO: 492101 - DNA, 120 bp, Artificial Sequence
  ENSG00000162971_26 (sequence is synthesized)
tgggttcacatagctatgggtgatagaaaccgggattcgttgtgaccagtaattctccattctccctaatgtgcagcacatctccagtacttctgaatagattacacagcttttctttgg

SEQ ID NO: 492102 - DNA, 120 bp, Artificial Sequence
  ENSG00000162971_27 (sequence is synthesized)
ctagtttgggggcttgacctgatgcaaaaaggaatttttttcctctgccaacaaaatttctcactgcactgcttgctacacagacaagattcaaaataaaagtaatggtgggtcaggtgc

SEQ ID NO: 492103 - DNA, 72 bp, Artificial Sequence
  ENSG00000162971_28 (sequence is synthesized)
ggtgggcagatcacgaggtcagatcaagaccataatgttacatgaaaaacatatttgaaactgtactgccat

SEQ ID NO: 492104 - DNA, 120 bp, Artificial Sequence
  ENSG00000162971_29 (sequence is synthesized)
aaatgttacatgaaaaacatatttgaaactgtactgccatttgtgtaaaacaaggtatgtggtgtgtgaacatcttatttgcatatgcatataattatctctaaggatgcacgagaaacc

SEQ ID NO: 492105 - DNA, 120 bp, Artificial Sequence
  ENSG00000162971_30 (sequence is synthesized)
agtgataattatgcctccaagaagaggttcaactaggtgggctgcttagaatctagttttgtattatttggacttttgttcacattatcctttcaaaatacattttaaaaatactatatg

SEQ ID NO: 492106 - DNA, 75 bp, Artificial Sequence
  ENSG00000162971_31 (sequence is synthesized)
cacattatcctttcaaaatacattttaaaaatactatatgcaccgaggtgggtggatcatctgtctctaccaaaa

SEQ ID NO: 492107 - DNA, 80 bp, Artificial Sequence
  ENSG00000162971_32 (sequence is synthesized)
gtagtcccagctactcaggaggctaagataggaggatcacttgagcctgggaggtgcaggttgcagtgagctggaattgt

SEQ ID NO: 492108 - DNA, 120 bp, Artificial Sequence
  ENSG00000162971_33 (sequence is synthesized)
aaaaaaaaaaaaaaaaaatattatatgcagagctggggagtggtggtccacacctgtagtcccagcatcttgggaggctgaggcaggaggagtgcttgaagccaggagttcaagttcagt

SEQ ID NO: 492109 - DNA, 120 bp, Artificial Sequence
  ENSG00000162971_34 (sequence is synthesized)
cagtctgggcaacatggggagacctgtctcaaaaaaaaaaactaaacagagtgtaattattagcatttcataacattatttgtcttggtatttgaatacattagaattctatttgtcctg

SEQ ID NO: 492110 - DNA, 120 bp, Artificial Sequence
  ENSG00000162971_35 (sequence is synthesized)
taattaatttctaactcactttgataaaataccaaaacaaaggaaacaaagtcaacaaaacttaatttgtatccttcatccttttgaacagcagctatgtgaacatttggaaagaacctt

SEQ ID NO: 492111 - DNA, 120 bp, Artificial Sequence
  ENSG00000162971_36 (sequence is synthesized)
agtaaggcggcttttctatcacctataaaaagttgccaacagacatcaaaggagttgacaaaaaaaaaaaaaaaaaaatgcaggaagctggaaggcaggcctggatggaattggaactgt

SEQ ID NO: 492112 - DNA, 120 bp, Artificial Sequence
  ENSG00000162971_37 (sequence is synthesized)
gctgctgtgactcctttccccagtgctaaaaaatagatgtagtcaggaggaactaacatagattggcagtcacccacacatctctggtgttaccttagtcttgtttcaagcatacaagcc

SEQ ID NO: 492113 - DNA, 87 bp, Artificial Sequence
  ENSG00000162971_38 (sequence is synthesized)
tctctggtgttaccttagtcttgtttcaagcatacaagccacaagtttttgggtgtcttaaatatacctaagttgtagtctctattt

SEQ ID NO: 492114 - DNA, 73 bp, Artificial Sequence
  ENSG00000162971_39 (sequence is synthesized)
gatgtagtctctttctaagttccattaaacagaatactaaaatgaccttttttggtgactcttgcctgtctct

SEQ ID NO: 492115 - DNA, 120 bp, Artificial Sequence
  ENSG00000162971_40 (sequence is synthesized)
atactaaaatgaccttttttggtgactcttgcctgtctctaccactaactggcttaaaagctgctgggtctcttcctttgtaaagagcaacatgagtttacagatgaggtctgtctatat

SEQ ID NO: 492116 - DNA, 120 bp, Artificial Sequence
  ENSG00000162971_41 (sequence is synthesized)
ctcctcttatgtttttctcttaagaacttcaagtgaaataaaacaaaatagctcttttatgaatactaccttttgtattttacctcataagatttaatgtattaaacatttctataccaa

SEQ ID NO: 492117 - DNA, 120 bp, Artificial Sequence
  ENSG00000162971_42 (sequence is synthesized)
gcctcagcggtgtcggagaaagagactggagagcaaagtggacctgttgctgcagcctctggtgagtcggccccgtccccgctctccagcacgcagcccaggccgaggcccttcggcaac

SEQ ID NO: 492118 - DNA, 120 bp, Artificial Sequence
  ENSG00000162971_43 (sequence is synthesized)
ccgccccgcgctcggacccagccactctggagtctgccggcctcgcggaccttttctctgtcgctcgtgtttccgggcggatggcgctgaggaacgctttagagccgaagttccgaagac

SEQ ID NO: 492119 - DNA, 120 bp, Artificial Sequence
  ENSG00000162971_44 (sequence is synthesized)
catcttttggctggtttgatgtaatcatggaatagcttactgatttttaaagagtggtttttaaaagacaagagttctgagtttacataattatacagtgacaattttttattttatttt

SEQ ID NO: 492120 - DNA, 90 bp, Artificial Sequence
  ENSG00000162971_45 (sequence is synthesized)
gtttacataattatacagtgacaattttttatttactgcgccacccaggctggagtgcaggtgtgtgattttggctcactgcaacctctg

SEQ ID NO: 492121 - DNA, 120 bp, Artificial Sequence
  ENSG00000162971_46 (sequence is synthesized)
caggcatgagccaccatgcctggccaacaattttttaaatagggtatatacccaataccttctggagtcatggaaggaagataaaatttctgtaactagggttagatttcatacgaagtt

SEQ ID NO: 492122 - DNA, 120 bp, Artificial Sequence
  ENSG00000162971_47 (sequence is synthesized)
taactagggttagatttcatacgaagttggatgtgccatactcattcaatgcttgattaattagttgatcctaccacattagtaactgttatctagaataggaaattctaaaaggctcat

SEQ ID NO: 492123 - DNA, 120 bp, Artificial Sequence
  ENSG00000162971_48 (sequence is synthesized)
gttttctttttctgtcctctccagaaaaccaggacaagctatgtttggtataatctttcatcatcttagataacttttaaaaatcatacttaattttcccttttgataaaatagtcttaa

SEQ ID NO: 492124 - DNA, 120 bp, Artificial Sequence
  ENSG00000162971_49 (sequence is synthesized)
atacctttaatttctcccatgatggttattttatgctgtggaatttcttaaaagtaaataagaaatagtcaaaagctgctgattgtctaaagatgaaagttttaaatgctgtcatcttgc

SEQ ID NO: 492125 - DNA, 120 bp, Artificial Sequence
  ENSG00000162971_50 (sequence is synthesized)
agatttcatttgctatttattcccatgagtttcatttaaattgttaaattaaaaacaaacagctctcaaactctgagcatgtgaagttcccagcaaaatcagtctattgaaaaaccatgt

SEQ ID NO: 492126 - DNA, 120 bp, Artificial Sequence
  ENSG00000162971_51 (sequence is synthesized)
agttcacaagacttcaatttagagatgagttaaatagagcttctaatgtccacagccattcctttctcattagagttttccaagttcatatagcagctgccaaagcattcctcagttttt

SEQ ID NO: 492127 - DNA, 120 bp, Artificial Sequence
  ENSG00000162971_52 (sequence is synthesized)
aatcctttgaatattcaccataatggttttagttattaatagtccatgaattgaatttaattgccttaagtttttccaagtgtaggaacttttcattttttatcaaattaaaaatgccag

SEQ ID NO: 492128 - DNA, 120 bp, Artificial Sequence
  ENSG00000162971_53 (sequence is synthesized)
aatgatgagtgtttttcagctggcagttaatgatgtttattttccagggagtccaatgccataacaaatgagtactgaaacttcatcttgaattgccttgatgttttgtcatgtcttttt

SEQ ID NO: 492129 - DNA, 120 bp, Artificial Sequence
  ENSG00000162971_54 (sequence is synthesized)
aaacttttcaaaagttgtttttgaagcacatacattatgtaatagttcctatcacagcttcctccaagcctttcactagagctactaaaaagttgcaagattattttttttagtgcaacc

SEQ ID NO: 492130 - DNA, 120 bp, Artificial Sequence
  ENSG00000162971_55 (sequence is synthesized)
aaaaaaataggtttagtcatttttagcatttaccaggcagtaagaaagaaggaatgcatccaggccaaagagagactagaaagtaagaaaccctgcacacacatgtatattattattatc

SEQ ID NO: 492131 - DNA, 120 bp, Artificial Sequence
  ENSG00000162971_56 (sequence is synthesized)
acttcaaattgaggttgcttttatgccttatcaaacattggaagattgatacgttaacaggtatgaacttttacttctttcttattggtagtgctcattgttcagagtcaggagagtctg

SEQ ID NO: 492132 - DNA, 120 bp, Artificial Sequence
  ENSG00000162971_57 (sequence is synthesized)
gacaaaagaaccttgtgtggtgaaaggatattgttggcattcttctgatcatagatttttttaaaaagtctcatcatgtaaggtttgccacatcttcctgtcacatcctgtaattcctgt

SEQ ID NO: 492133 - DNA, 120 bp, Artificial Sequence
  ENSG00000162971_58 (sequence is synthesized)
catcatcttgctcttgtttattgtactctcatcagttctgatcttgattttgtaaagcagccttttccaaatggggaacaagacagtgaagggctttcttcttcttttttaaaatgttga

SEQ ID NO: 492134 - DNA, 120 bp, Artificial Sequence
  ENSG00000162971_59 (sequence is synthesized)
tgactacttgcgtgctgcaaaagggtacattatcattgttgttaaccccaccatctgtcctttactgagtacttattatatatcagctactgtgccaagcaatctaggttatattactca

SEQ ID NO: 492135 - DNA, 120 bp, Artificial Sequence
  ENSG00000162971_60 (sequence is synthesized)
tttaaacttcagaacaatctgtgaggtagatatttttaataataatttcacagatgaggaaagagaggtttaaaaatattaagtaacttctccaggatcacatagcttgaagtgatggaa

SEQ ID NO: 492136 - DNA, 120 bp, Artificial Sequence
  ENSG00000162971_61 (sequence is synthesized)
cccaaggtgtttactctaatttccctgactccacggagcccatgattaagccttctttgacattaccctccttactggtgctgccagtccagacaaatggccctttaataaccaatgccc

SEQ ID NO: 492137 - DNA, 120 bp, Artificial Sequence
  ENSG00000162971_62 (sequence is synthesized)
ttgtttttgaaacatggataggatagatttttaaaaagccaaagaacttcccaatttacatacctaatttctcccccatctgggcttagtagaagctatgacaggtaccattacctagga

SEQ ID NO: 492138 - DNA, 120 bp, Artificial Sequence
  ENSG00000162971_63 (sequence is synthesized)
gaaaaggttgctggtgacaccccagttctgcttatctgggctgagctactctgtctgctctttcagggtcactgttctgttctgtttttctaaaggtcttgaaacacttttgtgttattc

SEQ ID NO: 492139 - DNA, 120 bp, Artificial Sequence
  ENSG00000162971_64 (sequence is synthesized)
ctggtaagaaagctaagcctggttaaatgcagcaattacagtagtggctatggtccagataaacttccccactggcccagactcttcaaagatgctttgaagaatgaaagcaagaaggaa

SEQ ID NO: 492140 - DNA, 120 bp, Artificial Sequence
  ENSG00000162971_65 (sequence is synthesized)
tgaagggtatatggtgaggtcagagatgggaaacactgagtaggagaatgccaagtaaatttgttgatattagttagtcagacactatctatagtcaaagaaatagtactctgcattggt

SEQ ID NO: 492141 - DNA, 120 bp, Artificial Sequence
  ENSG00000162971_66 (sequence is synthesized)
ctgagtagatggcagacccctcttttctctcctgcagtgctcactctacataattaccagcagtggcctcaagttcagactgacatacagagcacccaccaatccataacctggcttcag

SEQ ID NO: 492142 - DNA, 120 bp, Artificial Sequence
  ENSG00000162971_67 (sequence is synthesized)
tctagcagggtagtatcagtggagtctttatacaaatccagggaatatttgttttactcatcaagttacagcttagttgtaagggaatgagacaatggaggtagtatagaaacacctgag

SEQ ID NO: 492143 - DNA, 120 bp, Artificial Sequence
  ENSG00000162971_68 (sequence is synthesized)
cttaggtaagacatatggtccatagaaaccggtagcttgaaacaccccatgaacttagcttctgcgttcctccaagggccatactcagttaggagagttgcactacacacaggaaagcca

SEQ ID NO: 492144 - DNA, 120 bp, Artificial Sequence
  ENSG00000162971_69 (sequence is synthesized)
aatcatctgcttctgaacaagtatttgtagtccacttataggccacctggtgcaaacataattcatctatcaggttatttttatgataaacagtgttacctgatatcacaactgacattc

SEQ ID NO: 492145 - DNA, 120 bp, Artificial Sequence
  ENSG00000162971_70 (sequence is synthesized)
cacatttatctttaattttttttattcaacataattcatgggttcacaccatgtttgtgtttacccagtatatttctgggaaaacagtgcaaggagaaagtaagctggcccaaggtcatc

SEQ ID NO: 492146 - DNA, 120 bp, Artificial Sequence
  ENSG00000162971_71 (sequence is synthesized)
ttctcatagagaaggagaaagtatttaaccttttctttcgactttctcagtacagagttcaagtgggaagatatttagtagtaagagtgaaaagattacagcttttaatcagaagtttgg

SEQ ID NO: 492147 - DNA, 120 bp, Artificial Sequence
  ENSG00000162971_72 (sequence is synthesized)
aggcaggagtgtagtgggggtagcagaggagaggattttgacctagaggcttttgaggacttcattgtcttgttacttatacagtatcaccatcatttatagagcagtacttttgattct

SEQ ID NO: 492148 - DNA, 120 bp, Artificial Sequence
  ENSG00000162971_73 (sequence is synthesized)
agagagtaaaggaatagatgcaatctggagtaagaatatccttctagctcaagagtgtgatgtaaaggaaacaaattttgcttccacagtgttcagccctgttcatcaggatggaaggag

SEQ ID NO: 492149 - DNA, 120 bp, Artificial Sequence
  ENSG00000162971_74 (sequence is synthesized)
acaggcatttgggcagaaattttgaagaataaaaattggtcacttcactggaattctccttgagctattcttcagaagccttaaaatgatagagggtggtgcagcaggatgagagcagtg

SEQ ID NO: 492150 - DNA, 120 bp, Artificial Sequence
  ENSG00000162971_75 (sequence is synthesized)
ttactggcttctgtgttctgtgatatgccaaaaggcaggaatatggggggtggttatcttcatgggaccatttgtgtactgtctcttccaaagtagcactagtagtttgccccactcttc

SEQ ID NO: 492151 - DNA, 120 bp, Artificial Sequence
  ENSG00000162971_76 (sequence is synthesized)
acaagatttgttttgccatgccacttaaaaacaggtagcaatcagaacctgaaagtctgtgtatttacaaaggtaatcagataccatagaaacatttttctgtcataacttggaatagaa

SEQ ID NO: 492152 - DNA, 120 bp, Artificial Sequence
  ENSG00000162971_77 (sequence is synthesized)
tattgatctattgaaagattcatctgtatcatagattttgaaatatttaattccaaaatttcagacaacttagatcaagtaaacatactgctcaataagttttgaaaagttagaatttca

SEQ ID NO: 492153 - DNA, 120 bp, Artificial Sequence
  ENSG00000162971_78 (sequence is synthesized)
cataataggttataataaaaattacagatattataaaacaggagattatatccaactccagcaagcctttatgtatagtgattagattcttactagttgatctgttattattaagtccaa

SEQ ID NO: 492154 - DNA, 120 bp, Artificial Sequence
  ENSG00000162971_79 (sequence is synthesized)
ggattcctttgtgtttatttcagaactttaccttttgaccagttggtccagagggcagctgaagagaaacataaagaattctttgtttcagaggtaattgcttttaacatttttaaaaga

SEQ ID NO: 492155 - DNA, 120 bp, Artificial Sequence
  ENSG00000162971_80 (sequence is synthesized)
aggcattaatatctatatactaaatggattttcttatgaaagaatagtagatacacaagagcaacagccgtctctgatagacattcgtaagatttggttggatgcaccacagactgtagc

SEQ ID NO: 492156 - DNA, 120 bp, Artificial Sequence
  ENSG00000162971_81 (sequence is synthesized)
tctgctatttattagctctcaaactttggccaaattatttttctgtacttcagtatactcatctgtgaaatgggggtgataatagtacctattttataaagtgtttgtgaggattaacta

SEQ ID NO: 492157 - DNA, 120 bp, Artificial Sequence
  ENSG00000162971_82 (sequence is synthesized)
aataaaatagtaaaatacttagcagtgtgcctgatgtatagaaattacgcattaaatgttagctattaatgttacgtccttttaaaatgctttggtctgatatgccaacttcaaatgcta

SEQ ID NO: 492158 - DNA, 120 bp, Artificial Sequence
  ENSG00000162971_83 (sequence is synthesized)
atggaaaacttcattttcatatctattgactattagactgtttctgtattcttgttatcaatgtgatttctattgtgtatatttgctgtaatatttgttcaggattaaatgcggaagaat

SEQ ID NO: 492159 - DNA, 120 bp, Artificial Sequence
  ENSG00000162971_84 (sequence is synthesized)
tctacttaattatagtctagctttaaataattcaatttaaataccttgagataaggcatcaaggccttgtatataaatatgtttttaaaaatttcctgtgttggtcgagcgcaatggctc

SEQ ID NO: 492160 - DNA, 81 bp, Artificial Sequence
  ENSG00000162971_85 (sequence is synthesized)
ggctgaggcaggcgaatcacttgaacccaggtagcggaggttgcagtgagcttaactgtccaaaaaaaaaaaaaattcact

SEQ ID NO: 492161 - DNA, 120 bp, Artificial Sequence
  ENSG00000162971_86 (sequence is synthesized)
caacaagagcataactgtccaaaaaaaaaaaaaattcactgtgttattcaaaagcacattttaaaaacaaattgctttttaatctttgaatgaagctgttttctgcatttgagccagctg

SEQ ID NO: 492162 - DNA, 120 bp, Artificial Sequence
  ENSG00000162971_87 (sequence is synthesized)
ggctggggagtttggttctaaaaggtgctgcatttttacagtcctcttgtcaggtaatagttatactagattactgccacaatccccacaaactctgtaggtctgtgattctgtagtata

SEQ ID NO: 492163 - DNA, 120 bp, Artificial Sequence
  ENSG00000162971_88 (sequence is synthesized)
accaaaatgtctttttaaatggattccattagctgcacctgagaactgttttataactttatagccatgctttgaacatgtatattcagttgccctttggtactttgatgtctaagggta

SEQ ID NO: 492164 - DNA, 120 bp, Artificial Sequence
  ENSG00000162971_89 (sequence is synthesized)
atcagtggtatatatttaaatagccatgaaatgtgaagtaaaagaaatagacacgtggtaaaagattaaagtctaaaaatcatggaaactatgtaaacaagatcaacttgaactgtcagt

SEQ ID NO: 492165 - DNA, 89 bp, Artificial Sequence
  ENSG00000162971_90 (sequence is synthesized)
catggaaactatgtaaacaagatcaacttgaactgtcagtttggtcctctaagaagcagatgctgagatggaattaggagtgcaaaagg

SEQ ID NO: 492166 - DNA, 120 bp, Artificial Sequence
  ENSG00000162972_0 (sequence is synthesized)
agttcccagctgtccgaaaggtcttcggaacttcggctctaaagcgttcctcagcgccatccgcccggaaacacgagcgacagagaaaaggtccgcgaggccggcagactccagagtggc

SEQ ID NO: 492167 - DNA, 120 bp, Artificial Sequence
  ENSG00000162972_1 (sequence is synthesized)
tgggtccgagcgcggggcgggttgccgaagggcctcggcctgggctgcgtgctggagagcggggacggggccgactcaccagaggctgcagcaacaggtccactttgctctccagtctct

SEQ ID NO: 492168 - DNA, 120 bp, Artificial Sequence
  ENSG00000162972_2 (sequence is synthesized)
ttctccgacaccgctgaggcggtttcccaccgacttcctttccatacagcaccggcaggcaccggtgtgaagggtcataaaaatggcgctggccgctcgtttgctaccccagttcctgca

SEQ ID NO: 492169 - DNA, 120 bp, Artificial Sequence
  ENSG00000162972_3 (sequence is synthesized)
ctctcggtcgctgccctgcggggccgtccgactccggactcctgctgtggccgaggtgaggctgccgtcggccacactttgctacttctgccgctgtcgcctcggcttgggagcggcgtt

SEQ ID NO: 492170 - DNA, 120 bp, Artificial Sequence
  ENSG00000162972_4 (sequence is synthesized)
atttccacgaagcgctagggccttggcagcctcggcgctacctgcccagggctcccggtggccagtgctcagcagcccgggactccccgcagccttcgcttctttccctgcctgccctca

SEQ ID NO: 492171 - DNA, 120 bp, Artificial Sequence
  ENSG00000162972_5 (sequence is synthesized)
gcgcagctacagcacggaggagaagccccagcagcaccagaaaaccaagatgatcgtcctgggattctccaaccccatcaactgggttaggactcgaattaaggccttccttatctgggc

SEQ ID NO: 492172 - DNA, 120 bp, Artificial Sequence
  ENSG00000162972_6 (sequence is synthesized)
tttgctcatgtatccaagttgctgtcacagtgtaaatttgatctgttggaagaacttgtggccaaagaggtgctacatgcattgaaagaaaaggttacttcactacctgacaaccataaa

SEQ ID NO: 492173 - DNA, 120 bp, Artificial Sequence
  ENSG00000162972_7 (sequence is synthesized)
aatgcccttgctgctaacatagatgaaattgtatttacatcaacaggagacatctccatttactatgatgagaaaggaaggaagtttgttaacatcctgatgtgcttttggtatctaacc

SEQ ID NO: 492174 - DNA, 120 bp, Artificial Sequence
  ENSG00000162972_8 (sequence is synthesized)
agtgccaacatccccagtgaaactttaagaggagccagtgtattccaggttaagttggggaatcagaatgtggaaactaaacaacttcttagtgcaagctatgagtttcagagggagttc

SEQ ID NO: 492175 - DNA, 120 bp, Artificial Sequence
  ENSG00000162972_9 (sequence is synthesized)
acacaaggagtaaagcctgactggaccattgcacggattgaacactcaaaattattagaataattttcttggaaaaatcagcttatggactttagcagttgctgtgaaaaactaaggaag

SEQ ID NO: 492176 - DNA, 120 bp, Artificial Sequence
  ENSG00000162972_10 (sequence is synthesized)
aaaaattttggggtcatttgatcttcacttaatctaagtctgtgaattacttttatattattttgaaatactccttgcagtatattggcatgatacagtaaaagcattttccacagattg

SEQ ID NO: 492177 - DNA, 120 bp, Artificial Sequence
  ENSG00000162972_11 (sequence is synthesized)
ttatcaccttctttaaaagaagtcaaaatttaaaaaatacaatagcacgttgttggtgtcatattcaataacatttccaatgctacatataattttatagacataataaagaaggtattg

SEQ ID NO: 492178 - DNA, 120 bp, Artificial Sequence
  ENSG00000162972_12 (sequence is synthesized)
gatgagaaaggtaaatatctaagtgtggaattgctggattatgagaggaagaggccatgagccaaggagagtgggtggcctctagaagatggaaaagacaaggaaatggattcttcccca

SEQ ID NO: 492179 - DNA, 120 bp, Artificial Sequence
  ENSG00000162972_13 (sequence is synthesized)
tactatgatgagaaaggtttcagagggagttcacacaaggagtaaagcctgactggaccattgcacggattgaacactcaaaattattagaataattttcttggaaaaatcagcttatgg

SEQ ID NO: 492180 - DNA, 120 bp, Artificial Sequence
  ENSG00000162975_0 (sequence is synthesized)
ctattgtgtttagaaaaggctcgggcaaagccagcccaagttcgctctctgcacacctcgagcacctcgcggacggcgtgggtccgccagctccgggacctgccgccgctgcctgcgcgc

SEQ ID NO: 492181 - DNA, 80 bp, Artificial Sequence
  ENSG00000162975_1 (sequence is synthesized)
cccggggcggaggacggtgccagccgcccacgaggagaccccgctcccgcaggaggccgagctgaagcggcggagcgcgc

SEQ ID NO: 492182 - DNA, 80 bp, Artificial Sequence
  ENSG00000162975_2 (sequence is synthesized)
ggcgcgcccccgcaggctgctgcccgctgtgaccgcccttccccgcaggcgggcgccggccaggctctccccgagatcag

SEQ ID NO: 492183 - DNA, 80 bp, Artificial Sequence
  ENSG00000162975_3 (sequence is synthesized)
ccttccccgcaggcgggcgccggccaggctctccccgagatcagcgcacgggtggcacccgccggacccccagcggcagc

SEQ ID NO: 492184 - DNA, 120 bp, Artificial Sequence
  ENSG00000162975_4 (sequence is synthesized)
gcgcgcggggaggatggacgggtccggggagcgcagcctcccggagccgggcagccagagctccgctgccagcgacgacatagagatagtcgtcaacgtggggggcgtgcggcaggtgct

SEQ ID NO: 492185 - DNA, 120 bp, Artificial Sequence
  ENSG00000162975_5 (sequence is synthesized)
gtacggggacctcctcagtcagtaccctgagacccggctggcggagctcatcaactgcttggctgggggctacgacaccatcttctccctgtgcgacgactacgaccccggcaagcgcga

SEQ ID NO: 492186 - DNA, 120 bp, Artificial Sequence
  ENSG00000162975_6 (sequence is synthesized)
gttctactttgacagggacccggacgccttcaagtgtgtcatcgaggtgtactatttcggggaggtccacatgaagaagggcatctgccccatctgcttcaagaacgagatggacttctg

SEQ ID NO: 492187 - DNA, 120 bp, Artificial Sequence
  ENSG00000162975_7 (sequence is synthesized)
gaaggtggacctcaagttcctggacgactgttgcaagagccacctgagcgagaagcgcgaggagctggaggagatcgcgcgccgcgtgcagctcatcctggacgacctgggcgtggacgc

SEQ ID NO: 492188 - DNA, 120 bp, Artificial Sequence
  ENSG00000162975_8 (sequence is synthesized)
agccgagggccgctggcgccgctgccagaagtgcgtctggaagttcctggagaagcccgagtcgtcgtgcccggcgcgggtggtggccgtgctctccttcctgctcatcctcgtctcgtc

SEQ ID NO: 492189 - DNA, 120 bp, Artificial Sequence
  ENSG00000162975_9 (sequence is synthesized)
catgggcaccatccccgagctgcaggtgctggacgccgagggcaaccgcgtggagcacccgacgctggagaacgtggagacggcgtgcattggctggttcaccctggagtacctgctgcg

SEQ ID NO: 492190 - DNA, 120 bp, Artificial Sequence
  ENSG00000162975_10 (sequence is synthesized)
cctcttctcgtcacccaacaagctgcacttcgcgctgtccttcatgaacattgtggacgtgctggccatcctccccttctacgtgagcctcacgctcacgcacctgggtgcccgcatgat

SEQ ID NO: 492191 - DNA, 120 bp, Artificial Sequence
  ENSG00000162975_11 (sequence is synthesized)
ggagctgaccaacgtgcagcaggccgtgcaggcgctgcggatcatgcgcatcgcgcgcatcttcaagctggcccgccactcctcgggcctgcagaccctcacctatgccctcaagcgcag

SEQ ID NO: 492192 - DNA, 120 bp, Artificial Sequence
  ENSG00000162975_12 (sequence is synthesized)
cttcaaggaactggggctgctgctcatgtacctggcagtgggtatcttcgtcttctctgccctgggctacaccatggagcagagccatccagagaccctgtttaagagcatcccccagtc

SEQ ID NO: 492193 - DNA, 120 bp, Artificial Sequence
  ENSG00000162975_13 (sequence is synthesized)
cttctggtgggccatcatcaccatgaccaccgtcggctacggcgacatctaccccaagaccacgctgggcaagctcaacgcggccatcagcttcttgtgtggtgtcatcgccatcgccct

SEQ ID NO: 492194 - DNA, 120 bp, Artificial Sequence
  ENSG00000162975_14 (sequence is synthesized)
gcccatccaccccatcatcaacaactttgtcaggtactacaacaagcagcgcgtcctggagaccgcggccaagcacgagctggagctgatggaactcaactccagcagcgggggcgaggg

SEQ ID NO: 492195 - DNA, 120 bp, Artificial Sequence
  ENSG00000162975_15 (sequence is synthesized)
caagaccgggggctcccgcagtgacctggacaacctccctccagagcctgcggggaaggaggcgccgagctgcagcagccggctgaagctctcccacagcgacaccttcatccccctcct

SEQ ID NO: 492196 - DNA, 120 bp, Artificial Sequence
  ENSG00000162975_16 (sequence is synthesized)
gaccgaggagaagcaccacaggacccggctccagagttgcaagtgacaggagggcccctcaggcagagatggaccaggcggtggacagatgggtagatgtggcaggcatgtcatcgacag

SEQ ID NO: 492197 - DNA, 120 bp, Artificial Sequence
  ENSG00000162975_17 (sequence is synthesized)
cacagaagggctgtcctgtgtccccccaaccctcccctggacagactctgaaggccctcccggcacctctgccaaggctgggtaagactcctctatgttgcctgctgtccaggagcccgg

SEQ ID NO: 492198 - DNA, 120 bp, Artificial Sequence
  ENSG00000162975_18 (sequence is synthesized)
gagggaggggtgtgcaggagccgcagggccgtgtgggacgagtggaggccgcggcctggctggcacgagagcccacgcccgcttctgtatctccctcaataaagcctcctgctctgtgca

SEQ ID NO: 492199 - DNA, 120 bp, Artificial Sequence
  ENSG00000162976_0 (sequence is synthesized)
aggcttcggcagagctgcgccgccgaggctgagcggtcccttctcgctgcggccgcccaggtgcccgcgcccgtggcgctatggaggcggcgctgctggggctgtgtaactggagcacgc

SEQ ID NO: 492200 - DNA, 120 bp, Artificial Sequence
  ENSG00000162976_1 (sequence is synthesized)
tgggcgtgtgcgccgcgctgaagctgccgcagatctccgctgtgctagcggcgcgcagcgcgcggggcctcagccttccgagtttacttctggagctggcaggattcctggtgtttctgc

SEQ ID NO: 492201 - DNA, 120 bp, Artificial Sequence
  ENSG00000162976_2 (sequence is synthesized)
ggtaccagtgttactatgggtatccgccgctgacctacctggagtaccccatcctcatcgcgcaagatgtcatcctcctgctctgtatctttcattttaacgggaacgtgaagcaggcca

SEQ ID NO: 492202 - DNA, 120 bp, Artificial Sequence
  ENSG00000162976_3 (sequence is synthesized)
ctccttacatcgctgtattggtgtcttcttggttcatccttgccctgcagaagtggatcatagacctggccatgaatctatgtactttcatcagcgcggccagtaagtttgcacagctcc

SEQ ID NO: 492203 - DNA, 120 bp, Artificial Sequence
  ENSG00000162976_4 (sequence is synthesized)
agtgtctgtggaagacgagagactcaggaactgtgagtgcgctgacttggagcctctcttcctatacctgtgcaacaagaataatcacaaccttaatgaccaccaatgattttacaattc

SEQ ID NO: 492204 - DNA, 120 bp, Artificial Sequence
  ENSG00000162976_5 (sequence is synthesized)
ttctacgttttgtgatcatgctggctttaaatatatgggtaacagtgacagtacttcgctaccggaagaccgctataaaggctgaatgatggatacattattccttcacacagtggattt

SEQ ID NO: 492205 - DNA, 120 bp, Artificial Sequence
  ENSG00000162976_6 (sequence is synthesized)
tgagtaactgaaccaaaggaaaaagaagctctttgctaaattaaggtcttttataaatttagtaaatcagtttataatctttaaagccaaaggtttttttagacttgaaagaaagagcca

SEQ ID NO: 492206 - DNA, 120 bp, Artificial Sequence
  ENSG00000162976_7 (sequence is synthesized)
cttcctcacttcgttaggttatggtagtgctcagacatctgcagtgttgaggccagtcactgttggaagtcatccaagaagcccattttgaggccattttgagccttactcttaagttct

SEQ ID NO: 492207 - DNA, 120 bp, Artificial Sequence
  ENSG00000162976_8 (sequence is synthesized)
ctatgaagaactacattgatttgttggctttcagaatcttttaggaaataaatcctctccaggacaaaaatgaacatgaatggagtggcattttgttccaagtcagaggtgggcacctat

SEQ ID NO: 492208 - DNA, 120 bp, Artificial Sequence
  ENSG00000162976_9 (sequence is synthesized)
aataaatgactagggttcactttctgggactgatgtttaattgtaacacagatacaacagggtggccttgttgtgtataatacggtattatacccgcatgtgctctagcaaggataccaa

SEQ ID NO: 492209 - DNA, 120 bp, Artificial Sequence
  ENSG00000162976_10 (sequence is synthesized)
ggcaagcatacatgtagctggcttgagtttgtaccaaaacagtccttcaactttgcactgtgccttaagtaattactaacaaaaggtactaggattagctgcaatctctactttcgatga

SEQ ID NO: 492210 - DNA, 120 bp, Artificial Sequence
  ENSG00000162976_11 (sequence is synthesized)
ggaaatcccagtaagctttctgattcaagtacaatgctgccattttttaaagggccacaactatagaattaccactgttggaatttggtacaaaatatgttttgtctattgaaaacatac

SEQ ID NO: 492211 - DNA, 120 bp, Artificial Sequence
  ENSG00000162976_12 (sequence is synthesized)
acggtaaatggtgttgttaggtaggttctgtccagttcttagggacttttttcacattatagcatttttaccctaaacatgatgttgagattattatatactgtattttcttctaaatta

SEQ ID NO: 492212 - DNA, 120 bp, Artificial Sequence
  ENSG00000162976_13 (sequence is synthesized)
accctaatgtttaaaaactcactttccccctttaattgaaggcattgttttgttagatgcagtaatgatgtttaccagagattattgtttcctatgcaaaataaattttcatattttgaa

SEQ ID NO: 492213 - DNA, 120 bp, Artificial Sequence
  ENSG00000162976_14 (sequence is synthesized)
cctctcttcctatacctgtgcaaggtctcgctctctctcacaggctggagtgcagtgatacgatcttcactcactgcgggtttccaagtagctgggacaagaataatcacaaccttaatg

SEQ ID NO: 492214 - DNA, 120 bp, Artificial Sequence
  ENSG00000162976_15 (sequence is synthesized)
gaatctgggggcggggcgagatgagggtagtccgaggactgagcgagcccgggcgggcccgtaggcgaggtgcccgcgcccgtggcgctatggaggcggcgctgctggggctgtgtaact

SEQ ID NO: 492215 - DNA, 120 bp, Artificial Sequence
  ENSG00000162976_16 (sequence is synthesized)
acagatgattcaactgaattccatctattttgttctaaaccttcctctttgacactggcgtgtccacacccccactgcaaggattcggcaaactgacctcagtgttctggtgcctgccag

SEQ ID NO: 492216 - DNA, 120 bp, Artificial Sequence
  ENSG00000162976_17 (sequence is synthesized)
tgttatttgtgaatgaatctatgtactttcatcagcgcggccagtaagtttgcacagctccagtgtctgtggaagacgagagactcaggaactgtgagtgcgctgacttggagcctctct

SEQ ID NO: 492217 - DNA, 120 bp, Artificial Sequence
  ENSG00000162976_18 (sequence is synthesized)
ctttctgaatctgagccagaagtgggaacggggatgttatttgtgaatggtatgcattgtgaagcaggctcctttaccagatgtgtattttttggttaaactaaaaaaaaaaaaaaaaaa

SEQ ID NO: 492218 - DNA, 80 bp, Artificial Sequence
  ENSG00000162980_0 (sequence is synthesized)
gcagacaacgcggcggcgatgtccgcgagccaggcgagtgccgcggcggcagcggcggggccttgcgcgcggcagggcgg

SEQ ID NO: 492219 - DNA, 120 bp, Artificial Sequence
  ENSG00000162980_1 (sequence is synthesized)
cgcgaccagcgcgggagcagcagcagaggcggaggctccagcgcgtctctctcctccccctcagcctgagccgggggaagccaggcggcccgggtgtctggagggggggggtccgctgcc

SEQ ID NO: 492220 - DNA, 120 bp, Artificial Sequence
  ENSG00000162980_2 (sequence is synthesized)
cgagaatgggaattctcttcactagaatatggagactgttcaatcaccaggagcacaaagttatcattgttgggctggataatgcagggaaaactaccattctttaccaattttctatga

SEQ ID NO: 492221 - DNA, 120 bp, Artificial Sequence
  ENSG00000162980_3 (sequence is synthesized)
atgaagttgtacatacatctcctacaataggaagtaatgtagaagagatagtgattaataatacacgtttcctaatgtgggatattggtggccaagaatctcttcgttcttcctggaaca

SEQ ID NO: 492222 - DNA, 120 bp, Artificial Sequence
  ENSG00000162980_4 (sequence is synthesized)
cttactatactaacacagagtttgtaatagttgttgtggacagtacagacagagagaggatttctgtaactagagaagaactctataaaatgttagcgcatgaggacctaagaaaagctg

SEQ ID NO: 492223 - DNA, 120 bp, Artificial Sequence
  ENSG00000162980_5 (sequence is synthesized)
gattgctgatttttgctaataaacaagatgttaaagaatgcatgactgtagcagaaatctcccagtttttgaagctaacttctattaaagatcaccagtggcatatccaggcatgctgtg

SEQ ID NO: 492224 - DNA, 120 bp, Artificial Sequence
  ENSG00000162980_6 (sequence is synthesized)
ctctaactggcgagggattgtgccaaggacttgaatggatgatgtcacgacttaagattagatgatctctactgacctcttctcatagattttgtataaatgaagtgctggactttacct

SEQ ID NO: 492225 - DNA, 120 bp, Artificial Sequence
  ENSG00000162980_7 (sequence is synthesized)
gaaagctgcaaaaattaatggtttagatatatttataataaactgatttaaactttttctataagaagaaaaattaagaccacttatttgaaaacaaagatgaagtctcaccttccagtt

SEQ ID NO: 492226 - DNA, 120 bp, Artificial Sequence
  ENSG00000162980_8 (sequence is synthesized)
tgctttctcattagttttttccaaagtaagttattgaagctgtgattgacatttttctcataatgaatcctctcaggacattgtgtagcctatggtaagtacaaagggagaggaagacat

SEQ ID NO: 492227 - DNA, 120 bp, Artificial Sequence
  ENSG00000162980_9 (sequence is synthesized)
tttgaattttaagagctttattatcagtttaaccctccctagttgaatgttattttcttcttgttccattaagtcagaatacaaatcagcacagatattcgaatgtttccaatattttaa

SEQ ID NO: 492228 - DNA, 120 bp, Artificial Sequence
  ENSG00000162980_10 (sequence is synthesized)
aatgtaatgttacttatgaaaagtattttgcttaaggttgtgtgtgtattgtgtatatacctcaagttcaagttaatggcattgatttatgttccagacaaaaataacacaaataataat

SEQ ID NO: 492229 - DNA, 120 bp, Artificial Sequence
  ENSG00000162980_11 (sequence is synthesized)
atccttcgttataaccacaatgagataagtattggcattagtgttcagtgccattttatactttctctctgtgttctctgtattgtactaaccaacctcccaaatcgctgagctgcttgt

SEQ ID NO: 492230 - DNA, 120 bp, Artificial Sequence
  ENSG00000162980_12 (sequence is synthesized)
ttaaaaaaaaaaaaaaggaaaaggaaaaagcatgacattgtgtatcgattttttgttgttgaccaaaatcacacacatggaaacatgtaattcaacagagtgggaaagctagcagattct

SEQ ID NO: 492231 - DNA, 120 bp, Artificial Sequence
  ENSG00000162980_13 (sequence is synthesized)
tggcttagtattactaataggcaggattgtacaatgagcaactatcagattattcctttcagtggttcttatggcatctaaattactgaataaattattaatccattaatcagtgaatca

SEQ ID NO: 492232 - DNA, 120 bp, Artificial Sequence
  ENSG00000162980_14 (sequence is synthesized)
aattatgattacaattatcaaatgaatgctcagcattaattgaaaactgttttgtgaaacatgtctacccagaaaagtagcattctataaatactattaaacaacttagctatattattt

SEQ ID NO: 492233 - DNA, 120 bp, Artificial Sequence
  ENSG00000162980_15 (sequence is synthesized)
ttaagtattaaattatatgtcaagcagttaaagtgaatttcagagtaaaagtaaggcatgtttctgagcaacattgataatttcttaatttgcaaatttcttcttattttggtacttgga

SEQ ID NO: 492234 - DNA, 120 bp, Artificial Sequence
  ENSG00000162980_16 (sequence is synthesized)
atatagtgtgagattttttatttctaaattttgttgtatcttctattacataaatgcattgacaattataaaatgcaagtgttttttgaatgattttaagaatttggcttaaaaattgat

SEQ ID NO: 492235 - DNA, 120 bp, Artificial Sequence
  ENSG00000162980_17 (sequence is synthesized)
tgatacaacgtattatttgtactaagaagtaacttgacccaaaacaccttttatgtttgcttagggtatattttttcagtgtctgaaagtcaaaggtattcctgtcacaactgtaaacaa

SEQ ID NO: 492236 - DNA, 120 bp, Artificial Sequence
  ENSG00000162980_18 (sequence is synthesized)
acttatcctaaatgtgttaaaacatattcttgggtactctatttatgtatctttcatgccttgaaaatctgaaggttaatccaaactcacatgttttagcatatttgagaaaaaaaaact

SEQ ID NO: 492237 - DNA, 120 bp, Artificial Sequence
  ENSG00000162980_19 (sequence is synthesized)
accttcaatatcagccttttaaatttcatgaagattttggtgaggaataatagtatatagtttaagtattgacaaaactttgaaagtttctttctttaaaatgggaaatactcaatatct

SEQ ID NO: 492238 - DNA, 120 bp, Artificial Sequence
  ENSG00000162980_20 (sequence is synthesized)
aaatccaggtcaggcatgggatatcagtatttaacattggatgttttatgttttatatttataatgttcaaaatgcaagcataacatttaatatttgtccacatggttttacaaaagtaa

SEQ ID NO: 492239 - DNA, 120 bp, Artificial Sequence
  ENSG00000162980_21 (sequence is synthesized)
atggtttcgccagacaaatattatgtgatgtagcccagaaaatccacaccttttgtcctttttatgttttaatttgaataatcatgtgcttagtcccttggattactgccacatcagttt

SEQ ID NO: 492240 - DNA, 120 bp, Artificial Sequence
  ENSG00000162980_22 (sequence is synthesized)
aacacgatatcagcacattcccttgtcatcatcaaggtgttggctcagatttattcttaattggatgtttaaagcatgtactaccttgttacagttggtttagtgtagtggattattgac

SEQ ID NO: 492241 - DNA, 120 bp, Artificial Sequence
  ENSG00000162980_23 (sequence is synthesized)
atgacatcatgagaagatgtgtaattttataccacatttataaaacatgattttgttttctacccttcaaggtaaacattaaaaataaggtggtacttgtgtacttgtacataaaaccaa

SEQ ID NO: 492242 - DNA, 120 bp, Artificial Sequence
  ENSG00000162980_24 (sequence is synthesized)
aattatagttgggaaaaaaataaatttatatatgaaaatgtcaaaatcattttaaaagtattattttcaaataaaatggagaagctggtgaaaagtcatattggcaatttttatgtagtt

SEQ ID NO: 492243 - DNA, 120 bp, Artificial Sequence
  ENSG00000162980_25 (sequence is synthesized)
taagtggaattaagcagagggagatgcttttgggtttttaatatgccacttctgagtgaaaacatctcgtggagtcattgtgttcagctctgagaagaacaaagattcatagttctgtac

SEQ ID NO: 492244 - DNA, 120 bp, Artificial Sequence
  ENSG00000162980_26 (sequence is synthesized)
atgtggctggatttaaatatcctgtttttgatactaattttgaaagtcatgtaacttcttttgatatctgggcaaaagtaaccatatgctataagcatttgaatatgtttaattttatca

SEQ ID NO: 492245 - DNA, 120 bp, Artificial Sequence
  ENSG00000162980_27 (sequence is synthesized)
taatagcatctgtaaaagtacatcttacacattatatagagggttcttgtttgaaattttcagttctctttatcttcccagtacctcttggtcctcataatgggcaaaggatacaacgaa

SEQ ID NO: 492246 - DNA, 120 bp, Artificial Sequence
  ENSG00000162980_28 (sequence is synthesized)
ggcaggttgtataggggttatagtggggaagtggataggggattcattttcttatgtgacattttgccttaagaatataaaagtgctttagcactgatggctggcatttttaatataggc

SEQ ID NO: 492247 - DNA, 120 bp, Artificial Sequence
  ENSG00000162980_29 (sequence is synthesized)
agtgaaagtgactttagaagcatgggatgaaatagagggaagaagagtttttattttctggcctttaaaaagtgcctagtaggtcatttgagacccagagaaatgcacagagcttgagca

SEQ ID NO: 492248 - DNA, 120 bp, Artificial Sequence
  ENSG00000162980_30 (sequence is synthesized)
aaggcatgaagtccctgacattgttttcctttttgtctcagcatatagtattaagatgcctagaaataggactctattgttccctcttgtataggcactttacatttcttgtcactacag

SEQ ID NO: 492249 - DNA, 120 bp, Artificial Sequence
  ENSG00000162980_31 (sequence is synthesized)
caaccacatacagtacagacaacctccaaacctgtttatattagtgtaaatagaaaatctatagacaactttctagttttctctggaggcatttttgggaatgtacgtgtaataggctct

SEQ ID NO: 492250 - DNA, 120 bp, Artificial Sequence
  ENSG00000162980_32 (sequence is synthesized)
gctttgtatacaggagataataccacatcatcggttatctccaaactccagtcttctctcaactgcccagttgtatgttgtcatcaatcactttttcaaggctgggtagagacaagtttc

SEQ ID NO: 492251 - DNA, 120 bp, Artificial Sequence
  ENSG00000162980_33 (sequence is synthesized)
tcctcgtaactttgacctctcccactctccaaatgtaatctggacctcattgctttcaaggtcagcttccccatagctcaggtatcctttgctctcctgtatcttcatttactattagtg

SEQ ID NO: 492252 - DNA, 120 bp, Artificial Sequence
  ENSG00000162980_34 (sequence is synthesized)
aagagatctctgtcctggaggttattctaaactttctttgtaactattgttatagacaatggtttccaaaccagtggtttctatgtagcttttctagttccttgctatcttctcaccact

SEQ ID NO: 492253 - DNA, 120 bp, Artificial Sequence
  ENSG00000162980_35 (sequence is synthesized)
ggcttgaggtagtgatttggactttgctcattagagagcattatcagagatgtggagtccatcagaagaccagcttgcagtgtgtatagcatatagatgccaatattagaattctttaaa

SEQ ID NO: 492254 - DNA, 120 bp, Artificial Sequence
  ENSG00000162980_36 (sequence is synthesized)
ttatatttaacattttcatgcttcttaatttaacttcacatgttgggaagtagattcagaaagataggagaaatacccagactctaccacttccgtgagctactagttaggcatgggcag

SEQ ID NO: 492255 - DNA, 120 bp, Artificial Sequence
  ENSG00000162980_37 (sequence is synthesized)
gattaagttttatgtgtattatcttcccactaccaagaatggttatgtttcacagaataccagttcagtttgatttggaaaaagatgccaaaccaaatttatatgtagtctataatctaa

SEQ ID NO: 492256 - DNA, 120 bp, Artificial Sequence
  ENSG00000162980_38 (sequence is synthesized)
gggcattcttgaaactattgcccacatcccattttttttttcatgtttacttacaaaacagagataaacattagatgtctaaaggagttagtaatgaaaagcctatccttaaaaaataaa

SEQ ID NO: 492257 - DNA, 120 bp, Artificial Sequence
  ENSG00000162980_39 (sequence is synthesized)
cctgttgaaatgggctttaaagacatcgaaataatcacttgtcatgcattgactgtaaatgcagatagagaaatatgtctttgaagctccacttacacaaaaataaaacttgtatatcat

SEQ ID NO: 492258 - DNA, 120 bp, Artificial Sequence
  ENSG00000162980_40 (sequence is synthesized)
gctccctcaaagaatgtgcgatagattattttaagaccatgataatagagtaaaaaggaaagaaagccagaaattacaattttggatgctaaaaagtaactttctagttaaccctaaagt

SEQ ID NO: 492259 - DNA, 120 bp, Artificial Sequence
  ENSG00000162980_41 (sequence is synthesized)
cctgtcagattgtgaagaaatgttccaggatacacttggattagttatgcagtatttcttatcaatgtctagcccttgtgtattgttctgaaaactaaagtttaaatctttatgctgttg

SEQ ID NO: 492260 - DNA, 120 bp, Artificial Sequence
  ENSG00000162980_42 (sequence is synthesized)
cttgctagatatcctgttctttggtagaaaattcccatagtctgtactcaagaagtgcctaaaaatggatttgtgttgattttaagcccatctaataaattatatgtattttctatggta

SEQ ID NO: 492261 - DNA, 120 bp, Artificial Sequence
  ENSG00000162980_43 (sequence is synthesized)
atgaagctctcagttcagagatcaagatgattgggggataagaagaagaaaaacattcctgcaggactggtctgggcagaagaggagttgtggtaactagatatgaggagaaagagagga

SEQ ID NO: 492262 - DNA, 120 bp, Artificial Sequence
  ENSG00000162980_44 (sequence is synthesized)
ttgcccaggctggacttcaactcctcagtacaagtgatcctcctgcctgagcctcctgaatagctgggactacaggcctgcaccaccataccctgctctagttacacaaatcttaaaatg

SEQ ID NO: 492263 - DNA, 120 bp, Artificial Sequence
  ENSG00000162980_45 (sequence is synthesized)
atgctgttatgttaattcaattaagaaagtaaactagttctatgatccaagcacatagttgtgactcaattcatgttgttgtttttaatcctgaaatgatattgtaaaataagagctttg

SEQ ID NO: 492264 - DNA, 120 bp, Artificial Sequence
  ENSG00000162980_46 (sequence is synthesized)
cttgagcccaggagttcaaggctgcggcgagctgtgtttgcactccagcctaggtgtcagagtgagactatgtctttaaaaaaaaaaaaaagaagaaagaaatgtattataacattagga

SEQ ID NO: 492265 - DNA, 120 bp, Artificial Sequence
  ENSG00000162980_47 (sequence is synthesized)
gttgtaggcggcaacattacaaccagtatttttctgattacgattttgtatgttacagatattctatattgagcgcattataccaataatcagaaaacattgctgaatcattttgtcttt

SEQ ID NO: 492266 - DNA, 120 bp, Artificial Sequence
  ENSG00000162980_48 (sequence is synthesized)
acggtatgataaagagatgggatgatgtgaaataattcacattgttaattatgaagtgtgttttgaatcacctcagtgttacccagaaacgacactcggttatcatgttcagatagggga

SEQ ID NO: 492267 - DNA, 120 bp, Artificial Sequence
  ENSG00000162980_49 (sequence is synthesized)
tccgacgtccctgagtagcacggcctggcctgtctttcagccctttctttgctcaccagttgtgtttggacaccacatagaagtgctggggtcttctggaatgaaggttatagattgctg

SEQ ID NO: 492268 - DNA, 120 bp, Artificial Sequence
  ENSG00000162980_50 (sequence is synthesized)
ccctaaccgcaccactgagcgaccgagggttgcagaatgcggaaaacgggaggaatcgctcgacttgtccattacacctctggtttatgagcctgccctccactgccacccgtctttgtg

SEQ ID NO: 492269 - DNA, 120 bp, Artificial Sequence
  ENSG00000162980_51 (sequence is synthesized)
tgtgttgggggcagggggggttcttctgcctcctgaatagagatggacttctctccatttgttttacttattatatctgtgtttaaggttaagcttaaggtcatttttctactcgtgtgg

SEQ ID NO: 492270 - DNA, 120 bp, Artificial Sequence
  ENSG00000162980_52 (sequence is synthesized)
gcccgcgtggtcgtcgccaccgcagccgcccgagaggagctgggggaggacggtggcccgcgaggctcgtcgcagacaacgcggcggcgatgtccgcgagccagagcacaaagttatcat

SEQ ID NO: 492271 - DNA, 120 bp, Artificial Sequence
  ENSG00000162981_0 (sequence is synthesized)
aaagcagagccgagccgggactgtccagtgggagcaggcgccccggccagcgcagacctggaggcgcacgggcgccgcaccgcacgattcggctcggggtagagcggagccgcagcccca

SEQ ID NO: 492272 - DNA, 120 bp, Artificial Sequence
  ENSG00000162981_1 (sequence is synthesized)
cgcgcagcccaggacccactcgccaccgccgcttcctcagcacccatggggaccaggagactttaaaggagtttggggtttcgggagcagggaaatcacggatccccgctcctggccctc

SEQ ID NO: 492273 - DNA, 120 bp, Artificial Sequence
  ENSG00000162981_2 (sequence is synthesized)
gcctcgccacctcattgatgggcaaccaactggaccgcatcacccacctcaactacagcgagttgcccacaggggacccgtcggggattgaaaaggacgaactgcgggtcggggttgcct

SEQ ID NO: 492274 - DNA, 120 bp, Artificial Sequence
  ENSG00000162981_3 (sequence is synthesized)
acttcttctcggatgatgaggaagacctggacgaacgcgggcagcccgacaagtttggcgtgaaggcccccccgggttgcaccccctgcccggagagccccagccgccaccaccaccacc

SEQ ID NO: 492275 - DNA, 120 bp, Artificial Sequence
  ENSG00000162981_4 (sequence is synthesized)
tgctgcaccagctggtcctcaacgagactcagttttccgcctttcggggccaggaatgcatcttttccaaagtgagcggtggccctcagggcgccgacctaagcgtctacgcggtcaccg

SEQ ID NO: 492276 - DNA, 120 bp, Artificial Sequence
  ENSG00000162981_5 (sequence is synthesized)
cgctgccagcgctctgcgaacccggcgacctgctggagctgctgtggctgcagcccgcgccggagccgcccgcgcccgccccgcactgggccgtctacgtgggcggcgggcagatcatcc

SEQ ID NO: 492277 - DNA, 120 bp, Artificial Sequence
  ENSG00000162981_6 (sequence is synthesized)
acctgcaccaaggcgagatccgccaggacagcctgtatgaggcgggcgcggccaacgtgggccgggtggtgaatagctggtaccgctaccgcccgctggtggccgagctggtggtgcaga

SEQ ID NO: 492278 - DNA, 120 bp, Artificial Sequence
  ENSG00000162981_7 (sequence is synthesized)
acgcctgcggccacctgggcctcaagagcgaggagatctgctggacgaactcggagagcttcgccgcctggtgccgctttggcaagcgggagttcaaggcgggaggggaggtgccggcag

SEQ ID NO: 492279 - DNA, 120 bp, Artificial Sequence
  ENSG00000162981_8 (sequence is synthesized)
gcacgcagcccccgcagcagcagtactatctcaaggtgcacctgggagagaacaaggtccacaccgccaggtttcacagcctggaagacctcatccgcgagaagcgccgtatcgacgcca

SEQ ID NO: 492280 - DNA, 120 bp, Artificial Sequence
  ENSG00000162981_9 (sequence is synthesized)
gcggccgcctgcgagtgctccaggagctcgccgacctcgtggacgacaaggagtagccgcctaggggctgccggcccctctgcctcccccgcacctcgctcccttcccttccccgcaccc

SEQ ID NO: 492281 - DNA, 120 bp, Artificial Sequence
  ENSG00000162981_10 (sequence is synthesized)
ggacttcgcagtcagcggttctcaacctctgccccgccccgccacgcgcgtccgccgccggtggcccgggcccgggctgcacccccgcatccccaagccagcggcaggaagtctcaggaa

SEQ ID NO: 492282 - DNA, 120 bp, Artificial Sequence
  ENSG00000162981_11 (sequence is synthesized)
ctgccccagggccgaaagggcgccgctgcgagcgcctggctgacagccacagcggtggtgacggtgctgggagaccccgcgtgcgctttccccttgagatgtaaaccgggaacggggaag

SEQ ID NO: 492283 - DNA, 120 bp, Artificial Sequence
  ENSG00000162981_12 (sequence is synthesized)
gggctgaggggagaaaggacatggccttccccgcgagtccatggccagtgactgtggcccgactcgaaaacaaccctcttctcaaaagggaccatcaccgccccgagcgtgcgcacacag

SEQ ID NO: 492284 - DNA, 120 bp, Artificial Sequence
  ENSG00000162981_13 (sequence is synthesized)
accggtcggaggcgagaactggtctctacagggcacagttcagctcctctgtggatgcgtccccagatcgcaggatttccaagaaatcgagcctgtcccttgtgcacttgggaataattc

SEQ ID NO: 492285 - DNA, 120 bp, Artificial Sequence
  ENSG00000162981_14 (sequence is synthesized)
cccaagacagcacttcgggattccgggttatcctgaggctgcccgggacttttccagctctccagccccaggtctcctgacattgtgttccaggctgcgggctaagccagacagtgtttg

SEQ ID NO: 492286 - DNA, 120 bp, Artificial Sequence
  ENSG00000162981_15 (sequence is synthesized)
cctccggttctttccaccgtgggaagcgaacgccacccccacccgcctttgcctgcgagtctccctcgctggcagaagggaagccggcccggtcccgggaggaagatggcgctgcgaatt

SEQ ID NO: 492287 - DNA, 120 bp, Artificial Sequence
  ENSG00000162981_16 (sequence is synthesized)
cggtgaggacagccggccccgcccccgacaaggagctcgctcgttcacctggtgtctgggaacttgaatgtgtgaagggcgcttattgttctgaacccttgattgctccctcctcgggct

SEQ ID NO: 492288 - DNA, 120 bp, Artificial Sequence
  ENSG00000162981_17 (sequence is synthesized)
gcatttcaaaaatagtcatatttttaaaggagttggaggagagggagggggaggacatggcaccattccagaaaccagcattgttacaacaccatagccagtatatttagtttggctttt

SEQ ID NO: 492289 - DNA, 120 bp, Artificial Sequence
  ENSG00000162981_18 (sequence is synthesized)
cctaacatagaaatcttcaaagctggggaagtggaaataaagttttaaaaatgagagagcagttttccaactatgtcaacaaagcctatcgtgttgatgtttttattgaccattttagca

SEQ ID NO: 492290 - DNA, 120 bp, Artificial Sequence
  ENSG00000162981_19 (sequence is synthesized)
acaggctaataaaatttcaaattgaaatttttattttcatggctttaatccatgatagtttaaatactgggggccattaagagtggatgtagctaagagcttagctaacattgccttttc

SEQ ID NO: 492291 - DNA, 120 bp, Artificial Sequence
  ENSG00000162981_20 (sequence is synthesized)
actctatttttctcagatattgtaagcattctgtttttcaatattgtagttaattttttggctttcaacagcagccctagtaatggtggagttgttaattaatgtgtatattgtactgaa

SEQ ID NO: 492292 - DNA, 120 bp, Artificial Sequence
  ENSG00000162981_21 (sequence is synthesized)
tttctgtcagttaaggggttcactgctttggtggaaattggtggaaattgctagcaggttccacgatgtttatttttttctccatgttgtatatcattaccatttcacatacgcgtttct

SEQ ID NO: 492293 - DNA, 120 bp, Artificial Sequence
  ENSG00000162981_22 (sequence is synthesized)
atttttcttcctctcctcctgatctccttaaaaatgaatctagagttggtggctttttccccctcctctttggccagttccacagttcagttcttcctgaaaacagggatgatgaacttg

SEQ ID NO: 492294 - DNA, 120 bp, Artificial Sequence
  ENSG00000162981_23 (sequence is synthesized)
taggatcaggacaaatgtgtgtttttcaaaaacttaaggctgggtgtgaaacaccttctgtggacaaggatttgtaaacttctctcctccctccagctgcggccccagcctaactgatag

SEQ ID NO: 492295 - DNA, 120 bp, Artificial Sequence
  ENSG00000162981_24 (sequence is synthesized)
ttacttgattcagtgtgctagacacttaaatagcatctatgtctctttcaagggaatttgtcaaataatgctgtttagctaattgttgcaagcaattgcatattaacagctgtgattttg

SEQ ID NO: 492296 - DNA, 120 bp, Artificial Sequence
  ENSG00000162981_25 (sequence is synthesized)
ttggacagcaagtattatggccaaagccagtttcttggcatttcaaaaataatgcaataaaaactagttgaggttagctgaggctggaaatgcctttttcatggtaaatgattcacttct

SEQ ID NO: 492297 - DNA, 120 bp, Artificial Sequence
  ENSG00000162981_26 (sequence is synthesized)
tcaatgaactatgaactaaagtatttttcttaagcctattgagtgatttattttttaaaaaatgtttaaatgcatatgcttttctttcagcacaaacaacagcaaaaacttttgtaataa

SEQ ID NO: 492298 - DNA, 120 bp, Artificial Sequence
  ENSG00000162981_27 (sequence is synthesized)
ctaacttacctttgcatgtatgaagaactgagtcatttatttccctaacttactcctctttcaagtaacaggtggcagatcataaaatgaattctttattgtatctacacactccacatt

SEQ ID NO: 492299 - DNA, 120 bp, Artificial Sequence
  ENSG00000162981_28 (sequence is synthesized)
ctttactgtgtcctactactgtatcttggctccctgctgtattaaacaccatcttaagcacttgttcctgcaggactccttcttgacattttgtctcccccttcaaagtcactcaaagag

SEQ ID NO: 492300 - DNA, 120 bp, Artificial Sequence
  ENSG00000162981_29 (sequence is synthesized)
tgggacttcatcaaaagaaatgaattagtctctatcacaccgaatactaagatttatttcctctgatggtacatagatttctctctcactaagagggtcactctcatagaggaatgtctt

SEQ ID NO: 492301 - DNA, 120 bp, Artificial Sequence
  ENSG00000162981_30 (sequence is synthesized)
gtcagttttatacttgctgaggctagactgacaataaaaatgagctgggcagttaaattagcatttgttactatattggcctataaaggatcaggttgatgataatacctctaaaaatat

SEQ ID NO: 492302 - DNA, 120 bp, Artificial Sequence
  ENSG00000162981_31 (sequence is synthesized)
gcaataataaaacaatagttatgaaagaaacttgaaaggtttgcaaggtttctcctatccctgttaaaattatcatttattatctctttgtcagtgttagtaaggtaacccatgacagaa

SEQ ID NO: 492303 - DNA, 120 bp, Artificial Sequence
  ENSG00000162981_32 (sequence is synthesized)
taatttgagtgatagttcatcatgcagaggatatgatcaagatattacctaatggttttatcctgaaaaaggtgtatacttttagggcactgttaacaatgcgagtgaaaccaagatggt

SEQ ID NO: 492304 - DNA, 120 bp, Artificial Sequence
  ENSG00000162981_33 (sequence is synthesized)
gcaagttccctttgcagatggcgtgggcacacttgatttttattatgagtgaatgtaatctttctgtattttaccagagttacagcaattacctgaaaagtttcctaacattttaataat

SEQ ID NO: 492305 - DNA, 120 bp, Artificial Sequence
  ENSG00000162981_34 (sequence is synthesized)
gttagggatttcgttttggttttagttgtcctcaagagacaacaggttcacagtaatttccatgatgttgggtgtggctaagctggggattggttctgttccccctgctcccgtgtagag

SEQ ID NO: 492306 - DNA, 120 bp, Artificial Sequence
  ENSG00000162981_35 (sequence is synthesized)
aaaagctatatttatactgcattctttctcaactttcaggtaaaacaaactatgatttaaaaaaagaaaaaagaaaagacaggtacttttacttcaaagagtgctttgctacatttttat

SEQ ID NO: 492307 - DNA, 120 bp, Artificial Sequence
  ENSG00000162981_36 (sequence is synthesized)
ttaaaccaaaaatcaaataaaataaggaggggggctgggtatactttaaacaaaaccagtcctgaaatgctgttattctcaaagtacattccaaaaaaaaaaaaaaaaaaaaactataga

SEQ ID NO: 492308 - DNA, 120 bp, Artificial Sequence
  ENSG00000162981_37 (sequence is synthesized)
acgtatgttacatttttaagtatgagttaaattgatataaagtgttcctcaatatttaataatgtaagctgttgtcatgacagtattttttaaaaataataacgtatattatagttacga

SEQ ID NO: 492309 - DNA, 120 bp, Artificial Sequence
  ENSG00000162981_38 (sequence is synthesized)
acgaaacacttgtgccagattagaacatcaagcacagaagcagctgtatgatttacctgtttttttgaaactttaatgtttaccttcccctatgtttaatttttctgtggtgaacacttt

SEQ ID NO: 492310 - DNA, 120 bp, Artificial Sequence
  ENSG00000162981_39 (sequence is synthesized)
tgttagaacatggcttttttatttttcttggaaaaatatgctattagtatttacaaaataattaattacctgaataagcagtatatactaaaagtcttcaaacattactttattgattac

SEQ ID NO: 492311 - DNA, 120 bp, Artificial Sequence
  ENSG00000162981_40 (sequence is synthesized)
ttatgttttgtggtgcgctttcaacatccctaagagttaaatgtcttagtcatctaatacatggaacagggtcaaacttcaatgaaattaatacttattgcacaatcataatatagcaac

SEQ ID NO: 492312 - DNA, 120 bp, Artificial Sequence
  ENSG00000162981_41 (sequence is synthesized)
ctaattttcttttatttataggcatatctttaaagctttcttctcttttttgaacaaatgaagagaatccagttagtttttgcctttcagaggtgatttgccacgtgcacaaagggtctg

SEQ ID NO: 492313 - DNA, 120 bp, Artificial Sequence
  ENSG00000162981_42 (sequence is synthesized)
taggtgaaaagacaggcttttgggtttcttgaaacatcaaaaactgaatttagagaatggttatctaacactcaagtcaatgttttttttgaaattactagctattggtataatatacat

SEQ ID NO: 492314 - DNA, 120 bp, Artificial Sequence
  ENSG00000162981_43 (sequence is synthesized)
atatgtacatgtatacatatacatacacacatatgtacatttacacatatgtaagtatacactcatatacatatatacacatgtatatatacttgtgtacacatacatttttgcctatag

SEQ ID NO: 492315 - DNA, 120 bp, Artificial Sequence
  ENSG00000162981_44 (sequence is synthesized)
atacacacacacacacacacacacacaggctacttaaaatagagagtgacttgagatatacaaaaacaggaagaaaagccctggaggtcatatagctaatgtataactgcacagcaagca

SEQ ID NO: 492316 - DNA, 120 bp, Artificial Sequence
  ENSG00000162981_45 (sequence is synthesized)
gtataactgcacagcaagcagctatgtctaaagctaacaataaaaagaaaatgtgggagttgtgcaattagttttattctcattttttggaagaatatgttcctggtttctctaactaaa

SEQ ID NO: 492317 - DNA, 120 bp, Artificial Sequence
  ENSG00000162981_46 (sequence is synthesized)
aggaaaaaattcaaaggaaagttgtaaatattaggaagtaactgaaaaataagaagcaagataaagtggggaggctatgagatcatataatgagctaataaacttttcaacaggggacac

SEQ ID NO: 492318 - DNA, 120 bp, Artificial Sequence
  ENSG00000162981_47 (sequence is synthesized)
ctgttctcccttctaactgaagacactaaagagaagctaagatcctatctttcaatcatttagtaattcataaaatcccattatttcataactcaaagtttacctttgaggttgtatgtt

SEQ ID NO: 492319 - DNA, 120 bp, Artificial Sequence
  ENSG00000162981_48 (sequence is synthesized)
tacctcatttgaactcgaaatagaagaggtttaagtatttgaataagttgggaaaaaaaggaaaaatagtcttccctgcccttgtcactgatggtgacactacttgtaattactgtattt

SEQ ID NO: 492320 - DNA, 120 bp, Artificial Sequence
  ENSG00000162981_49 (sequence is synthesized)
tttggcagaacactcagatgaacagattcctatgctgtggacttttatcattctttttgatggctgatagtagaaagcacacagtaggtactccataaatgtaagactatggcagctgtc

SEQ ID NO: 492321 - DNA, 120 bp, Artificial Sequence
  ENSG00000162981_50 (sequence is synthesized)
tagtacaagtgcttctcactgattcttggttaccaggaaaaccagaaagcccgtcacttgccttgcctgcaaaggcgagcctaaagaaatttctctaaccaaaattggcaggttctttcc

SEQ ID NO: 492322 - DNA, 120 bp, Artificial Sequence
  ENSG00000162981_51 (sequence is synthesized)
accacaaaaggctcttggaaatataacttatggggcttaaggctaatttgagttgaagggtatttgtaatatttgatttgcttttagcagagaaaacaataaaagaatccaggaaaagta

SEQ ID NO: 492323 - DNA, 120 bp, Artificial Sequence
  ENSG00000162981_52 (sequence is synthesized)
cacccctcggtccttcctgggtgtccgtctcccacactgccacagccagcactctcctccccaccgggaccccgcaagctctccagccagcctgggtgttttcttctgggagttggaccg

SEQ ID NO: 492324 - DNA, 120 bp, Artificial Sequence
  ENSG00000162981_53 (sequence is synthesized)
agttcccggaaggggtcggaggctgtgtggtggcgtctgctctcgcctgacctgtggcggcttctccgcccctcgtacccctggggaggcacggaggactcggctggaaagggtgactcc

SEQ ID NO: 492325 - DNA, 120 bp, Artificial Sequence
  ENSG00000162981_54 (sequence is synthesized)
accaaccaccaactccttgtattgcaactggaccccctcgacctgggtgaatgtactcttttcagcaaccatatcctccctcctgttgccaggtaaggtgagaagcaattcctctgccta

SEQ ID NO: 492326 - DNA, 120 bp, Artificial Sequence
  ENSG00000162981_55 (sequence is synthesized)
gaagctctgccgggtgaaatatcaggagatcccacccaagctttctcttgcgtgtagcctatatccagcacgggagcataggctaatcctgcagttggccagcctcttgtcctctggata

SEQ ID NO: 492327 - DNA, 120 bp, Artificial Sequence
  ENSG00000162981_56 (sequence is synthesized)
tcctgggatggaatcctaatgaaggaaactccagtggtttactgaagccctttgtgctaggcctgaggtgagatagaattgctccatcctatgcccaggaggcctgcgtggactcacagt

SEQ ID NO: 492328 - DNA, 120 bp, Artificial Sequence
  ENSG00000162981_57 (sequence is synthesized)
cagaaatcctctctccctgtaggctgtggtctgaatctttgtgtcttcccaaaattcatatgttgaaatcctaacgccccaggtgatgatattagaagatggggcctttcaggagttgac

SEQ ID NO: 492329 - DNA, 120 bp, Artificial Sequence
  ENSG00000162981_58 (sequence is synthesized)
taaaacttcagggaaaagccctcacaaatgggattagttcccttataaaataggtccaaggaaacttgctcacttctaacaccatgtgaggacacagtgagaaggcaccatctataagcc

SEQ ID NO: 492330 - DNA, 120 bp, Artificial Sequence
  ENSG00000162981_59 (sequence is synthesized)
agaaagcagtccctcaccagacatagatctgctggcaccttgatcttggacttctcaccctccagaactgggagaaataagtgtatattgtttataagctacacagtttatgatattata

SEQ ID NO: 492331 - DNA, 120 bp, Artificial Sequence
  ENSG00000162981_60 (sequence is synthesized)
gcagcccaaacagacattgtatttcctcaatgttggtttaagagttgtctgaaccagtttcttgttatcatactgtggatgtttctagctctcactgtagcattccacctcttttctgtc

SEQ ID NO: 492332 - DNA, 120 bp, Artificial Sequence
  ENSG00000162981_61 (sequence is synthesized)
tcagtgacttagtcaaagcatctagttgaacactctgttatttaaagaaaccagcattcactggctgttcccagctccaggaactcaggtggattcataatttgttctgtttccttgctc

SEQ ID NO: 492333 - DNA, 120 bp, Artificial Sequence
  ENSG00000162981_62 (sequence is synthesized)
ttaggaaaagtactgacagctcataattggttgtatttcttaggatatttgcatttaaactagaagcaatgctttcttttcttggtataatttgtcttacatttttgaaagtaatagcta

SEQ ID NO: 492334 - DNA, 120 bp, Artificial Sequence
  ENSG00000162981_63 (sequence is synthesized)
ttcattaaattacatttgaaaatgcaggaagaaagaaaaaattgtctataattctactactcatataaaaccactattcacatatgtgtactttcctctattaacctttcaaagcatgcc

SEQ ID NO: 492335 - DNA, 120 bp, Artificial Sequence
  ENSG00000162981_64 (sequence is synthesized)
tcaattttaattgtattcacacaaatacaattttatgccatacattttacttattaatatgctattagcatcaccaatgtcaatataaactccttgtaaacatcaatttaatggttgcaa

SEQ ID NO: 492336 - DNA, 120 bp, Artificial Sequence
  ENSG00000162981_65 (sequence is synthesized)
agtattacatcaactggatatgccatggcttatttaatcactgtatttattgttaaatatttgcattgtttacattgtttagtattgaaaaccacgctgcaataaatatctttggataga

SEQ ID NO: 492337 - DNA, 120 bp, Artificial Sequence
  ENSG00000162981_66 (sequence is synthesized)
agtggccagttaatgaagatgagctcttaatttttcacaatgatctaccttagagagaaacagaggtgcatctgttggataatagtcaaggcgtctgtgtcggtaaccaggggtccaaga

SEQ ID NO: 492338 - DNA, 120 bp, Artificial Sequence
  ENSG00000162981_67 (sequence is synthesized)
ctccctcctgttgccagcctatatccagcacgggagcataggctaatcctgcagttggccagcctcttgtcctctggatatcctgggatggaatcctaatgaaggaaactccagtggttt

SEQ ID NO: 492339 - DNA, 120 bp, Artificial Sequence
  ENSG00000162989_0 (sequence is synthesized)
acctccttattggtgctagtttgcagcgcccagctcctgcgccttcgcttcgcgtttgaatctggctcgccccttcgtattatgtctgcactccgaaggaaatttggggacgattatcag

SEQ ID NO: 492340 - DNA, 120 bp, Artificial Sequence
  ENSG00000162989_1 (sequence is synthesized)
gtagtgaccacatcgtccagcggctcgggcttgcagccccaggggccaggccaggaccctcagcagcagcttgtgcccaagaagaagcggcagcggttcgtggacaagaacggccggtgc

SEQ ID NO: 492341 - DNA, 120 bp, Artificial Sequence
  ENSG00000162989_2 (sequence is synthesized)
aatgtacagcacggcaacctgggcagcgagacaagccgctacctctcggacctcttcaccacgctggtggacctcaagtggcgctggaacctcttcatcttcattctcacctacaccgtg

SEQ ID NO: 492342 - DNA, 120 bp, Artificial Sequence
  ENSG00000162989_3 (sequence is synthesized)
gcctggcttttcatggcgtccatgtggtgggtgatcgcctacactcggggcgacctgaacaaagcccacgtcggtaactacacgccttgcgtggccaatgtctataacttcccttctgcc

SEQ ID NO: 492343 - DNA, 120 bp, Artificial Sequence
  ENSG00000162989_4 (sequence is synthesized)
ttcctcttcttcatcgagacggaggccaccatcggctatggctaccgatacatcacagacaagtgccccgagggcatcatcctcttcctcttccagtccatcctgggctccatcgtggac

SEQ ID NO: 492344 - DNA, 120 bp, Artificial Sequence
  ENSG00000162989_5 (sequence is synthesized)
gccttcctcatcggctgcatgttcatcaagatgtcccagcccaagaagcgcgccgagaccctcatgttcagcgagcacgcggtgatctccatgagggacggaaaactcacgcttatgttc

SEQ ID NO: 492345 - DNA, 120 bp, Artificial Sequence
  ENSG00000162989_6 (sequence is synthesized)
cgggtgggcaacctgcgcaacagccacatggtctccgcgcagattcgctgcaagctgctcaaatctcggcagacacctgagggtgagttccttccccttgaccaacttgaactggatgta

SEQ ID NO: 492346 - DNA, 120 bp, Artificial Sequence
  ENSG00000162989_7 (sequence is synthesized)
ggttttagtacaggggcagatcaactttttcttgtgtcccccctcacaatttgccacgtgatcgatgccaaaagccccttttatgacctatcccagcgaagcatgcaaactgaacagttc

SEQ ID NO: 492347 - DNA, 120 bp, Artificial Sequence
  ENSG00000162989_8 (sequence is synthesized)
gagattgtcgtcatcctagaaggcattgtggaaacaactgggatgacttgtcaagctcgaacatcatatactgaagatgaagttctttggggtcatcgtttttttcctgtaatttcctta

SEQ ID NO: 492348 - DNA, 120 bp, Artificial Sequence
  ENSG00000162989_9 (sequence is synthesized)
gaagagggattctttaaagttgattactcccagttccatgcaacatttgaagtccccaccccaccttacagtgtgaaagagcaggaggaaatgcttctcatgtcgtcccctttaatagca

SEQ ID NO: 492349 - DNA, 120 bp, Artificial Sequence
  ENSG00000162989_10 (sequence is synthesized)
ccagccataactaacagcaaagaaagacataattctgtggaatgcttagatggactagatgatattactacaaaactaccatctaagctgcagaaaattactggaagagaagactttccc

SEQ ID NO: 492350 - DNA, 120 bp, Artificial Sequence
  ENSG00000162989_11 (sequence is synthesized)
aaaaaactcttgaggatgagttctacaacttcagaaaaagcctacagcttgggagacttgcccatgaaacttcaacgaataagttcagttccgggcaactcagaagaaaaactggtatct

SEQ ID NO: 492351 - DNA, 120 bp, Artificial Sequence
  ENSG00000162989_12 (sequence is synthesized)
aaaaccaccaagatgttatctgatcccatgagccagtctgtggctgatttgccaccaaagcttcaaaagatggctggaggagcagctaggatggaagggaaccttccagccaaattaaga

SEQ ID NO: 492352 - DNA, 120 bp, Artificial Sequence
  ENSG00000162989_13 (sequence is synthesized)
aaaatgaactctgatcgcttcacataacaaagcactcccttaggcattatttaatgtttgatttagtaatagtccaatatttggcgatgaggtaattctccctaaggaatctgaaagtat

SEQ ID NO: 492353 - DNA, 120 bp, Artificial Sequence
  ENSG00000162989_14 (sequence is synthesized)
attttcctcccagttctacaagcatatttgagaacccttcctttcccaagtattgcgaatgtgcagaaagcaacagttacggagggaggacatcataaggaagttattaacgggcatgta

SEQ ID NO: 492354 - DNA, 120 bp, Artificial Sequence
  ENSG00000162989_15 (sequence is synthesized)
ttatcacatcaagcatgcaataatgtgcaaattttgcatttagttttatggcatgatttatatatggcatatttatattgtatattctggaaaaaaaatatatatatatatttaaagggg

SEQ ID NO: 492355 - DNA, 120 bp, Artificial Sequence
  ENSG00000162989_16 (sequence is synthesized)
agatactctccctgacatttctaacatatgtattaagccaaacatgagtgaatagctttcagggcgataaaactaaatatatgtctgtgtgtgtgtgtgtatgtatacacacatatacat

SEQ ID NO: 492356 - DNA, 120 bp, Artificial Sequence
  ENSG00000162989_17 (sequence is synthesized)
atatatatacacatacatacacatacatacatacatacatatatatctgataaaattgtgatgttttgttcaaagttgtagttcttgtgcatgtttactttattagagtaggaaggctac

SEQ ID NO: 492357 - DNA, 120 bp, Artificial Sequence
  ENSG00000162989_18 (sequence is synthesized)
tggcattaattattaataccaaatattttagccttaaatttttgtcattttaaaatctgatttaatgttttctgctgtttaaggtcttgggaggctttcaattgtattttatatgagaga

SEQ ID NO: 492358 - DNA, 120 bp, Artificial Sequence
  ENSG00000162989_19 (sequence is synthesized)
tagagcataccagtactcagtatagcattgaacatttcttatgatttttaaaagttgctagtactggggagaaataattgttgattaatttgagaattattcctttcctagactaattaa

SEQ ID NO: 492359 - DNA, 120 bp, Artificial Sequence
  ENSG00000162989_20 (sequence is synthesized)
aatctggaaatctgttttgtatatgatctaatacaaagatgagctctgaacaaacactgaatcatgttaatagacagtagccaagttatattgaatatatcagaatctgtgtgaagttac

SEQ ID NO: 492360 - DNA, 120 bp, Artificial Sequence
  ENSG00000162989_21 (sequence is synthesized)
acaattaattgtccctgtttcaaactgagtaaattggaaacattttctttctttttctggaaattttgtccattttaaaaaccaatcattttaagaagacatgacaatgcaatgaaacag

SEQ ID NO: 492361 - DNA, 120 bp, Artificial Sequence
  ENSG00000162989_22 (sequence is synthesized)
atgataaatatttatgcttaaaatatgtatgtctaattgagtctcttttttattctgttttcttgtttatggcatttgttgtaacaggatagactttttcctcacctaggaaacctatcc

SEQ ID NO: 492362 - DNA, 120 bp, Artificial Sequence
  ENSG00000162989_23 (sequence is synthesized)
catgcctgtcacttatagttcaggaggaagtttttgcacagaccagagagaaattaaaattagatgataaattgaagatatcttacacacagttttttggtgaacactgattttattggt

SEQ ID NO: 492363 - DNA, 120 bp, Artificial Sequence
  ENSG00000162989_24 (sequence is synthesized)
gtcttagatccctagtctacccaaataattttaacagtactgttttttctaatcctgaagtctgatatttatgactcattagcaggaatcaaaactagtgatcagtagaacactttcaaa

SEQ ID NO: 492364 - DNA, 120 bp, Artificial Sequence
  ENSG00000162989_25 (sequence is synthesized)
ataaaaatttggaatgcagacttttatgaaaatttaaaagtgctccttaacagaatatcatgggttttcctataaaacttctttaagtattgtaattccagtctgccccaactttaaaaa

SEQ ID NO: 492365 - DNA, 120 bp, Artificial Sequence
  ENSG00000162989_26 (sequence is synthesized)
aaattcttattaatatgtcagtcattaattgctagtttgggctctcattatttcctgttttttaacaattttgtgataattttattattggcaaattaatacatcaacacttaaatcatt

SEQ ID NO: 492366 - DNA, 120 bp, Artificial Sequence
  ENSG00000162989_27 (sequence is synthesized)
gactataataataccttctggctacctctgtatcaaccaaattctgtaggtgcaaacatataccagggaattcttactggcaaaatgatcaatctggagtgtgcatccactgtgaatgga

SEQ ID NO: 492367 - DNA, 120 bp, Artificial Sequence
  ENSG00000162989_28 (sequence is synthesized)
gcaaattgccctatacccattgataacctagctttcttagtttgtagatgtaggaaacaaaatagtgacagagagagaagggggtccacagggcatggtatatttatcagcagtggaaaa

SEQ ID NO: 492368 - DNA, 120 bp, Artificial Sequence
  ENSG00000162989_29 (sequence is synthesized)
aaagtgcatagatcatttagtccaagaacttaaaactaaatagagccataatttactttggagagtcattttaatttgtctttggtaccaaggagaagacggaaccaaaaacaaactctc

SEQ ID NO: 492369 - DNA, 120 bp, Artificial Sequence
  ENSG00000162989_30 (sequence is synthesized)
caagtatattcacacattcaacaaaatttttgcatgccttctatgtcgtaggcatttttagttcctggggatttggacatggctaagtcagagaaggccattgctcaccatgaacactgt

SEQ ID NO: 492370 - DNA, 120 bp, Artificial Sequence
  ENSG00000162989_31 (sequence is synthesized)
ataccagaaggagagtggggaggagacaaaaaacaaataagaccacttcagacaatcaaagtatcagttaagagaatgaaaacaggcctgactcagtggctcacgcctgtaatcccagta

SEQ ID NO: 492371 - DNA, 120 bp, Artificial Sequence
  ENSG00000162989_32 (sequence is synthesized)
aaaaaaaaaaaaagaataaaaacagggtaacataatgcaaagtaactgtgtggaataaaaattgattattttagaaaatgtgactggcttaggacggggataatatgtgaacagaaatct

SEQ ID NO: 492372 - DNA, 120 bp, Artificial Sequence
  ENSG00000162989_33 (sequence is synthesized)
tgactggcttaggacggggataatatgtgaacagaaatctatctcatgagaaagtgctactgttgtcaaaattaccttatctgagtgaatggtattttttttatcttttccacacatgcg

SEQ ID NO: 492373 - DNA, 120 bp, Artificial Sequence
  ENSG00000162989_34 (sequence is synthesized)
tgggaaaggtatgatttctgcatgtaattgcagtttaacccttatttctaggttgatcataggtcccagtttacccaggaaaattccagtttatacctgttgtacctgtgtaattattgg

SEQ ID NO: 492374 - DNA, 120 bp, Artificial Sequence
  ENSG00000162989_35 (sequence is synthesized)
tagcactccctttcactcttacaatgtcttggtttggatgatatatggtgaagtttttgttgaaactaaattatgaagtctgatatatttggataaaaataaagaattgcttttcttctc

SEQ ID NO: 492375 - DNA, 120 bp, Artificial Sequence
  ENSG00000162989_36 (sequence is synthesized)
attggcgcccatcgtggtacaccaggaaaagtgggaacgaggaaaacagccgtgagcgcagagtgcgaggccaggctgccgctaccgcccgctgcgccgcctcctgccctctcccgctgg

SEQ ID NO: 492376 - DNA, 120 bp, Artificial Sequence
  ENSG00000162992_0 (sequence is synthesized)
tgggccactttcttctggccacaaaggggccggaatggagcgctccgcggcatacaaatgggcaggtcacgtggttccaggctcttggctggaccgggaagaccatatggcgcatgccgg

SEQ ID NO: 492377 - DNA, 120 bp, Artificial Sequence
  ENSG00000162992_1 (sequence is synthesized)
ggaggaaggaggaggggcgggggtaggggtggagggtgaggggagcggttgtcggaggagggcgggagacgagcaaggcgtggggagaagtggggaggaggggagaacggggagcgcaca

SEQ ID NO: 492378 - DNA, 120 bp, Artificial Sequence
  ENSG00000162992_2 (sequence is synthesized)
gcctggacgcgtgcgcaggcgtcaggcgcatagacctgctagcccctcagctagcggccccgcccgcgcttagcatcactaactgggctatataacctgagcgcccgcgcggccacgaca

SEQ ID NO: 492379 - DNA, 120 bp, Artificial Sequence
  ENSG00000162992_3 (sequence is synthesized)
cgaggaattcgcccacgcaggaggcgcggcgtccggaggccccagggttatgagactatcactgctcaggacctactaacaacaaaggaaatcgaaacatgaccaaatcgtacagcgaga

SEQ ID NO: 492380 - DNA, 120 bp, Artificial Sequence
  ENSG00000162992_4 (sequence is synthesized)
gtgggctgatgggcgagcctcagccccaaggtcctccaagctggacagacgagtgtctcagttctcaggacgaggagcacgaggcagacaagaaggaggacgacctcgaaaccatgaacg

SEQ ID NO: 492381 - DNA, 120 bp, Artificial Sequence
  ENSG00000162992_5 (sequence is synthesized)
cagaggaggactcactgaggaacgggggagaggaggaggacgaagatgaggacctggaagaggaggaagaagaggaagaggaggatgacgatcaaaagcccaagagacgcggccccaaaa

SEQ ID NO: 492382 - DNA, 120 bp, Artificial Sequence
  ENSG00000162992_6 (sequence is synthesized)
agaagaagatgactaaggctcgcctggagcgttttaaattgagacgcatgaaggctaacgcccgggagcggaaccgcatgcacggactgaacgcggcgctagacaacctgcgcaaggtgg

SEQ ID NO: 492383 - DNA, 120 bp, Artificial Sequence
  ENSG00000162992_7 (sequence is synthesized)
tgccttgctattctaagacgcagaagctgtccaaaatcgagactctgcgcttggccaagaactacatctgggctctgtcggagatcctgcgctcaggcaaaagcccagacctggtctcct

SEQ ID NO: 492384 - DNA, 120 bp, Artificial Sequence
  ENSG00000162992_8 (sequence is synthesized)
tcgttcagacgctttgcaagggcttatcccaacccaccaccaacctggttgcgggctgcctgcaactcaatcctcggacttttctgcctgagcagaaccaggacatgcccccccacctgc

SEQ ID NO: 492385 - DNA, 120 bp, Artificial Sequence
  ENSG00000162992_9 (sequence is synthesized)
cgacggccagcgcttccttccctgtacacccctactcctaccagtcgcctgggctgcccagtccgccttacggtaccatggacagctcccatgtcttccacgttaagcctccgccgcacg

SEQ ID NO: 492386 - DNA, 120 bp, Artificial Sequence
  ENSG00000162992_10 (sequence is synthesized)
cctacagcgcagcgctggagcccttctttgaaagccctctgactgattgcaccagcccttcctttgatggacccctcagcccgccgctcagcatcaatggcaacttctctttcaaacacg

SEQ ID NO: 492387 - DNA, 120 bp, Artificial Sequence
  ENSG00000162992_11 (sequence is synthesized)
tcaggcaccgctgcccctcgctgcgagatccccatagacaatattatgtccttcgatagccattcacatcatgagcgagtcatgagtgcccagctcaatgccatatttcatgattagagg

SEQ ID NO: 492388 - DNA, 120 bp, Artificial Sequence
  ENSG00000162992_12 (sequence is synthesized)
cacgccagtttcaccatttccgggaaacgaacccactgtgcttacagtgactgtcgtgtttacaaaaggcagccctttgggtactactgctgcaaagtgcaaatactccaagcttcaagt

SEQ ID NO: 492389 - DNA, 120 bp, Artificial Sequence
  ENSG00000162992_13 (sequence is synthesized)
gatatatgtatttattgtcattactgcctttggaagaaacaggggatcaaagttcctgttcaccttatgtattattttctatagctcttctatttaaaaaataaaaaaatacagtaaagt

SEQ ID NO: 492390 - DNA, 120 bp, Artificial Sequence
  ENSG00000162992_14 (sequence is synthesized)
ttaaaaaatacaccacgaatttggtgtggctgtattcagatcgtattaattatctgatcgggataacaaaatcacaagcaataattaggatctatgcaatttttaaactagtaatgggcc

SEQ ID NO: 492391 - DNA, 120 bp, Artificial Sequence
  ENSG00000162992_15 (sequence is synthesized)
aattaaaatatatataaatatatatttttcaaccagcattttactacttgttacctttcccatgctgaattattttgttgtgattttgtacagaatttttaatgactttttataatgtgg

SEQ ID NO: 492392 - DNA, 120 bp, Artificial Sequence
  ENSG00000162992_16 (sequence is synthesized)
atttcctattttaaaaccatgcagcttcatcaatttttatacatatcagaaaagtagaattatatctaatttatacaaaataatttaactaatttaaaccagcagaaaagtgcttagaaa

SEQ ID NO: 492393 - DNA, 78 bp, Artificial Sequence
  ENSG00000162992_17 (sequence is synthesized)
tttgagcaattcatttcactttaaagtctttccgtctccctaaaataaaaaccagaatcataattttcaagagaagaa

SEQ ID NO: 492394 - DNA, 120 bp, Artificial Sequence
  ENSG00000162992_18 (sequence is synthesized)
cctaaaataaaaaccagaatcataattttcaagagaagaaaaaattaagagatacattccctatcaaaacatatcaattcaacacattacttgcacaagcttgtatatacatattataaa

SEQ ID NO: 492395 - DNA, 120 bp, Artificial Sequence
  ENSG00000162992_19 (sequence is synthesized)
taaatgccaacatacccttctttaaatcaaaagctgcttgactatcacatacaatttgcactgttactttttagtcttttactcctttgcattccatgattttacagagaatctgaagct

SEQ ID NO: 492396 - DNA, 120 bp, Artificial Sequence
  ENSG00000162992_20 (sequence is synthesized)
attgatgtttccagaaaatataaatgcatgattttatacatagtcacaaaaatggtggtttgtcatatattcatgtaataaatctgagcctaaatctaatcaggttgttaatgttgggat

SEQ ID NO: 492397 - DNA, 120 bp, Artificial Sequence
  ENSG00000162992_21 (sequence is synthesized)
ttatatctatagtagtcaattagtacagtagcttaaataaattcaaaccatttaattcataattagaacaatagctattgcatgtaaaatgcagtccagaataagtgctgtttgagatgt

SEQ ID NO: 492398 - DNA, 120 bp, Artificial Sequence
  ENSG00000162992_22 (sequence is synthesized)
gatgctggtaccactggaatcgatctgtactgtaattttgtttgtaatcctgtatattatggtgtaatgcacaatttagaaaacattcatccagttgcaataaaatagtattgaaagtga

SEQ ID NO: 492399 - DNA, 120 bp, Artificial Sequence
  ENSG00000162992_23 (sequence is synthesized)
atataacctgagcgcccgcgcggccacgacacgaggaattcgcccacgcaggaggcgcggcgtccggaggccccagggttatgagactatcactgctcaggacctactaacaacaaaggg

SEQ ID NO: 492400 - DNA, 120 bp, Artificial Sequence
  ENSG00000162992_24 (sequence is synthesized)
tctgatgaagaataaaagagccaatgcaacatcttgtggaacaccaggactgagaactcttgttgttaccattgcaaagaggcgttctggcgtcagatgcacagtgatttgtatggtggc

SEQ ID NO: 492401 - DNA, 120 bp, Artificial Sequence
  ENSG00000162992_25 (sequence is synthesized)
atcatctgccttcctatgacaggaagaattctgtgctggcaattgactcatggactctcttcacatacactaaggcttggtccagtggctctgatggaattaactgtgcagccaaactag

SEQ ID NO: 492402 - DNA, 120 bp, Artificial Sequence
  ENSG00000162992_26 (sequence is synthesized)
tggcattgacaagacagggccacagtctctggggacttcaggagaaattgctaattttaaaatgcagagtattatgttaatgctggattaaatcttcagatacattaaatgtggatttgg

SEQ ID NO: 492403 - DNA, 120 bp, Artificial Sequence
  ENSG00000162994_0 (sequence is synthesized)
agattccctagttactatctctaagcactgaagtcggtgtttggagaaaaggactcaggtgaggactggagcctaacagatgagacagaatataaacaggaagtctctaaggcagtgtgg

SEQ ID NO: 492404 - DNA, 120 bp, Artificial Sequence
  ENSG00000162994_1 (sequence is synthesized)
tggaaggataataccatgatggaggaagtgcacagtattatgggagaacatagcagtggcatctgaccaattttaagggaatccaggacagctttcctgaagctgaagaaagagtaaaag

SEQ ID NO: 492405 - DNA, 120 bp, Artificial Sequence
  ENSG00000162994_2 (sequence is synthesized)
ccaggcttatcaaagttttggctttgttgcaagagcaggtcaagatttagctgttcttcagtgaacaagtgtgcagattgtcaaatatgtcagttcatcaaataagaaaacatgcagttc

SEQ ID NO: 492406 - DNA, 120 bp, Artificial Sequence
  ENSG00000162994_3 (sequence is synthesized)
tcccacctatcatttgtagaagtgacaaggaatttttggaaagtgtgcaaagatacataattacagaaactgaaagactgggctgtagtgaggaaggacctgctgatgaatattacatca

SEQ ID NO: 492407 - DNA, 120 bp, Artificial Sequence
  ENSG00000162994_4 (sequence is synthesized)
tataccgaaatgtttttgataaggtaatagagcatatcactgcatacaaatccattcttacttcaatcaaaaaagaatatgatgcctttattgagacaataaagaaagaccgaagaacta

SEQ ID NO: 492408 - DNA, 120 bp, Artificial Sequence
  ENSG00000162994_5 (sequence is synthesized)
cattttgtcttcatggaaaacttaaaggtttggcagcagagcctacagctttggtatattacaggaaaagaacaatccaacttgaagcaaaaatgaggattatcgaaagtaattcctcga

SEQ ID NO: 492409 - DNA, 120 bp, Artificial Sequence
  ENSG00000162994_6 (sequence is synthesized)
agattcaatctcaaatagatcacatcaagcagtgtagggcagagtatgacacaaaagaagtaaaatattgtactttctccaaagatccttcaaaacctattccaggcatgactcttcaag

SEQ ID NO: 492410 - DNA, 120 bp, Artificial Sequence
  ENSG00000162994_7 (sequence is synthesized)
aatccatgaatctagatgctctcactaaatacatgaaacatcttgaagataaatatgcagaaattaaacaagctatgttgataaaatatgtgccagctcagaggaaggctgatttagatg

SEQ ID NO: 492411 - DNA, 120 bp, Artificial Sequence
  ENSG00000162994_8 (sequence is synthesized)
aagaaatgattgtgttattaaaacggcgagatgtagctgaaaatctgaacaaaaaattgcagttttgtcatcaaagactgcagataatttcacaggcacttagttcatgggtaaaatctg

SEQ ID NO: 492412 - DNA, 120 bp, Artificial Sequence
  ENSG00000162994_9 (sequence is synthesized)
atatgagcagcccatttcaagactttgtggagcaaattcagaaaaccaaatatttacaaggtgaccaaggcattgttgaagaactaatggaagatgatccacgcagggcaaaagaagctg

SEQ ID NO: 492413 - DNA, 120 bp, Artificial Sequence
  ENSG00000162994_10 (sequence is synthesized)
aaattatgcttcactacattgaaaggtttaatgagttaatctcacttggtgaatatgaaaaggcagcttgttatgcagcaaacagtcctagaagaattcttcgaaacattggtacaatga

SEQ ID NO: 492414 - DNA, 120 bp, Artificial Sequence
  ENSG00000162994_11 (sequence is synthesized)
atacatttaaggctgttggaaaaattagaggaaagcctcttccattactcttattttttgaggccctctttatcacaagtcatgcttttccatgtcctgttgatgcagctctaaccctgg

SEQ ID NO: 492415 - DNA, 120 bp, Artificial Sequence
  ENSG00000162994_12 (sequence is synthesized)
aaggaatcaaatgtggattatcagaaaaacggttagatttagttaccaattgggttacacaggaaagactgacattttctgaggaggctggggatgtgatttgtgattatggggagcagg

SEQ ID NO: 492416 - DNA, 120 bp, Artificial Sequence
  ENSG00000162994_13 (sequence is synthesized)
atacttataacaaggccaagtgcctggctttagctcagattgtctacagtgaatgtggcctgcacaagaaagctattctttgcttgtgtaaacagggtcagactcatagggtcatggagt

SEQ ID NO: 492417 - DNA, 120 bp, Artificial Sequence
  ENSG00000162994_14 (sequence is synthesized)
acatacagcagttgaaggactttactaccgatgacctgttgcagctattaatgtcatgtccccaagttgaattaattcagtgtctcactaaagagttgaatgagaaacaaccatctttat

SEQ ID NO: 492418 - DNA, 120 bp, Artificial Sequence
  ENSG00000162994_15 (sequence is synthesized)
cttttggtcttgctatacttcatctgttctctgcagacatgaaaaaagttggcattaagctacttcaagaaatcaataaaggtgggatagatgcagtagaaagtcttatgataaatgatt

SEQ ID NO: 492419 - DNA, 120 bp, Artificial Sequence
  ENSG00000162994_16 (sequence is synthesized)
ccttttgctccatagaaaagtggcaagaagtggcaaatatatgttcacagaatggctttgacaaattatctaatgacatcacgtctattcttcgatctcaggctgcagttacagaaattt

SEQ ID NO: 492420 - DNA, 120 bp, Artificial Sequence
  ENSG00000162994_17 (sequence is synthesized)
ctgaagaggatgacgcagtcaacctaatggaacatgtgttttggtagttctatatcttaaccagctgagggagcttgtacaacaccttatgtatgctggttgggaaaaactgattttaac

SEQ ID NO: 492421 - DNA, 120 bp, Artificial Sequence
  ENSG00000162994_18 (sequence is synthesized)
gtaactaacttataaataaatctagagtaagaagatctcagaaataaatcacacttttgttatgatgacatttagatttgtctttgaaatatttatactattgcttccttttccccatat

SEQ ID NO: 492422 - DNA, 120 bp, Artificial Sequence
  ENSG00000162994_19 (sequence is synthesized)
ggtcatttcttatattgaatcttgataaaatccaagattataactttgtgtgaaacagtgtagggcatttttatctaaggacataagctaatgtccagatatattactttctggtgatgt

SEQ ID NO: 492423 - DNA, 120 bp, Artificial Sequence
  ENSG00000162994_20 (sequence is synthesized)
aatatgatagcaagaactgaggaaggtgtgggtagtatcctgtgtgttagactgtcttcccaaacatgaaatgctacaagcctgacttgaccagaaaagcaggaaatcatttcaaggttg

SEQ ID NO: 492424 - DNA, 120 bp, Artificial Sequence
  ENSG00000162994_21 (sequence is synthesized)
gacttgctggcaaaaacctagagtatagtaattttgtactgctgatttaaagatgcgccccatgctttgatatatataaatatggcaaagcttaggcttctagtataaaagctgggactc

SEQ ID NO: 492425 - DNA, 120 bp, Artificial Sequence
  ENSG00000162994_22 (sequence is synthesized)
agacctgtgatacctataggtatggaaaatatgtcataagaagtggttttggattatttcaagtgtctgaataagtatttgattgaaaactctgaaagttctgtgccatggacaggtgta

SEQ ID NO: 492426 - DNA, 120 bp, Artificial Sequence
  ENSG00000162994_23 (sequence is synthesized)
atattaaaaatatttaatgattagtatggcatgggcacaaatcaagcagaacagatacctaattaatcagaacagcctttagcccttatgccacaccagagcttactagctaaatgtcat

SEQ ID NO: 492427 - DNA, 84 bp, Artificial Sequence
  ENSG00000162994_24 (sequence is synthesized)
agcccttatgccacaccagagcttactagctaaatgtcatccttgaccatggaacatggttaaaatgagctgctggctgggcaa

SEQ ID NO: 492428 - DNA, 120 bp, Artificial Sequence
  ENSG00000162994_25 (sequence is synthesized)
agctaggtaacacagtgagatcccgtctctgttattaaaaaaagaaaaaaaaatttcaagtaaaaaatgaaaatgatctgctattagaataagagcaaagagcataacttttcccatcct

SEQ ID NO: 492429 - DNA, 120 bp, Artificial Sequence
  ENSG00000162994_26 (sequence is synthesized)
aaatttaaattgaatatgtatttttatgttatagtggaaagaagatgaacggggagtcagacagcttcatattaaaattctggtcctacctcttactcacttataaaatatgggcagtct

SEQ ID NO: 492430 - DNA, 120 bp, Artificial Sequence
  ENSG00000162994_27 (sequence is synthesized)
tccttaggcttgttgtgaggattagtgataatgtatgtgtagtgtaagtgtataacatgatagaggaacttaggaaaagatagctgtaattcctttgtaatcggccccagaaacacacat

SEQ ID NO: 492431 - DNA, 120 bp, Artificial Sequence
  ENSG00000162994_28 (sequence is synthesized)
ttctctacttagtttgtacttactaaatcccatatgtctactcatttgtatttatatgtttatccttctttaaagtatttgatatattggtacaacttattgctgagattaagttatctg

SEQ ID NO: 492432 - DNA, 120 bp, Artificial Sequence
  ENSG00000162994_29 (sequence is synthesized)
tccacacttgtattagggttgcctggcttatcttataaattcagaagcattcaagctgagtttttaatttttccatttggtgctaaatagaatactggataattataattcagctttcta

SEQ ID NO: 492433 - DNA, 120 bp, Artificial Sequence
  ENSG00000162994_30 (sequence is synthesized)
aaacgtagcatttttaaagtaatacatgtgcatagtttaaaaagcaatttattactaaaagccttatcaaaataatattttgatttttggccttcatacaggctgttgaaaagagcagat

SEQ ID NO: 492434 - DNA, 120 bp, Artificial Sequence
  ENSG00000162994_31 (sequence is synthesized)
aaaggatggaaaaaaggaatggaaagggagaggtatttcggcagcactggttctttgtgtgccaacggcttaaaacctttttttttttttttttcctttgagacctatatgattgataga

SEQ ID NO: 492435 - DNA, 120 bp, Artificial Sequence
  ENSG00000162994_32 (sequence is synthesized)
aagctattatgtgtccattgacagagcttagaaaaaaaaatgtcttcatgaaagccaggaggataaagtaggtatataaatctagagaaagcttaaacagcggttgttgttgttattcta

SEQ ID NO: 492436 - DNA, 120 bp, Artificial Sequence
  ENSG00000162994_33 (sequence is synthesized)
attttgccttgtttttccttttctcattattactccttctcagttagcattgcctttggcagctttcccaaggaaagtaaaagttgtcaagtgaatataaattaaaatgcctggtgatgg

SEQ ID NO: 492437 - DNA, 120 bp, Artificial Sequence
  ENSG00000162994_34 (sequence is synthesized)
aaaatggagttgggaggaagagcaagattacaaagttaaatgaggaaggagaaagaattgagttgtgagctacagagggctttgaagctataagagcctccatgtaagctacactgaagg

SEQ ID NO: 492438 - DNA, 120 bp, Artificial Sequence
  ENSG00000162994_35 (sequence is synthesized)
aggtataatctgggcctcagcacagaaacctgcattctagaccagccccaccactgtctagctatgtgtccttttcctcatgcttaagataaatttattttgactagatacctcctcttg

SEQ ID NO: 492439 - DNA, 120 bp, Artificial Sequence
  ENSG00000162994_36 (sequence is synthesized)
tcatttccaactctaaaattcagtaattctgaaaaggtacaaattatttcccaatgcttcttgaccttcagcctaaatttcaaatactacaattcaacatcagcatcaacaacatctacc

SEQ ID NO: 492440 - DNA, 120 bp, Artificial Sequence
  ENSG00000162994_37 (sequence is synthesized)
gaatacctgttttgcacacaatttctgctagcaagattacaaccttaatggaaacacacaacgtattttaaaagttactaataataattccttagcattatctaatagccagtccatatt

SEQ ID NO: 492441 - DNA, 120 bp, Artificial Sequence
  ENSG00000162994_38 (sequence is synthesized)
caaatttcaccagttgctaaaaatgccttttaacatttgaattgttccaatgaagatttaaccaacgttcatgtgttctattaggtcttgctgtcttgagcgtgtcttctctcctttttt

SEQ ID NO: 492442 - DNA, 120 bp, Artificial Sequence
  ENSG00000162994_39 (sequence is synthesized)
cctcttgccattgattgctttacatagcagttgcaaagcaagggtcatgatgaactaagtttctctgatttcatattaggttttctttctaccataccagtgaggaaaggaagatatttc

SEQ ID NO: 492443 - DNA, 120 bp, Artificial Sequence
  ENSG00000162994_40 (sequence is synthesized)
ttccaaggtctgaaagatttaattgtaactagttacatttttgtttattatagtcaagcatgtatcaaaatgaatttctattaaattcattcatttggaaaggtttagagatgttgaaca

SEQ ID NO: 492444 - DNA, 120 bp, Artificial Sequence
  ENSG00000162994_41 (sequence is synthesized)
gaagtctagtctaatgaaaaaaatttttttaatatttagaacttttcctaaatcctgaattaactaagaaatgaccattaaattaatcacttttttaactttaaaaggtgaaaacctgtt

SEQ ID NO: 492445 - DNA, 120 bp, Artificial Sequence
  ENSG00000162994_42 (sequence is synthesized)
actttttaggtgcctggaattctgttggattgctaaagcatatgttaagtcaaaaatcatagcagaggcctttttttttttttttaactttgtacatttcatagaaagctcatacatttc

SEQ ID NO: 492446 - DNA, 120 bp, Artificial Sequence
  ENSG00000162994_43 (sequence is synthesized)
ttccattctttctcagaaaaaaatggcatttaacaaatgttcggtgtataaagctgtcagtttgctagtagttataatttgttgtgttcttgaataaaaatatattgggtacataaaaaa

SEQ ID NO: 492447 - DNA, 120 bp, Artificial Sequence
  ENSG00000162994_44 (sequence is synthesized)
gttaagcggggggcaaagggtgcggggcacgaaaggtgtccttcactcacttccagaagcggtgatgggcagagaatcagcaatctaccagacgctccttgggccttcaagggaagggaa

SEQ ID NO: 492448 - DNA, 120 bp, Artificial Sequence
  ENSG00000162994_45 (sequence is synthesized)
tagttctccactgctttcttctaccttggactacttgtcccaagatgcagttccacctcccagattccctagttactatctctaagcactgaagtcggtgtttggagaaaaggactcagc

SEQ ID NO: 492449 - DNA, 120 bp, Artificial Sequence
  ENSG00000162994_46 (sequence is synthesized)
aagtagcaggagggagctgtcaaggcgtggagttcacactcaaacactcccagaggacggcactctgcatgggacgccatccagctcctttgactgtggaatcaagtacattatcagctg

SEQ ID NO: 492450 - DNA, 120 bp, Artificial Sequence
  ENSG00000162994_47 (sequence is synthesized)
gcccctggctcctggctgtgacctcccttcgcttgaactgagccttgtgtgtaagggcgtatcaagttgtatgggcttcgccgctgggtgaccccaaatgcaactccaggaagcatgggt

SEQ ID NO: 492451 - DNA, 120 bp, Artificial Sequence
  ENSG00000162994_48 (sequence is synthesized)
ttttcttctgttatccttccagagattttctatgcctaaacaccatttgaagccatgaatgtatagtgatgaggggttttttacagttgcacatgactgggaatagaaatgcaattagat

SEQ ID NO: 492452 - DNA, 120 bp, Artificial Sequence
  ENSG00000162994_49 (sequence is synthesized)
attgagaatattgatgagccaataggagctgatgggttagaaaaataaggaggtgaagagaatccaggattttaaggtttaagtgaagttagagactagatttggagcgagtaagagaag

SEQ ID NO: 492453 - DNA, 120 bp, Artificial Sequence
  ENSG00000162994_50 (sequence is synthesized)
ggcctttttttctctcatatttaaactccacattatctactgtaatgttccacaaagagcacatgtttagtaaatattgcctttagtgtccaattatgtttgagcttgctgtagagttta

SEQ ID NO: 492454 - DNA, 120 bp, Artificial Sequence
  ENSG00000162994_51 (sequence is synthesized)
accaaatatttacaaggtttaatgagttaatctcacttggtgaatatgaaaaggcagcttgttatgcagcaaacagtcctagaagaattcttcgaaacattggtacaatgaatacattta

SEQ ID NO: 492455 - DNA, 120 bp, Artificial Sequence
  ENSG00000162994_52 (sequence is synthesized)
actgctttcttctaccttggactacttgtcccaagatgcagttccacctcccagattccctagttactatctctaagcactgaagtcggtgtttggagaaaaggactcaggtgaggactg

SEQ ID NO: 492456 - DNA, 66 bp, Artificial Sequence
  ENSG00000162994_53 (sequence is synthesized)
cgatctcctgacctcgtgatcccccaaatttggtttaatgagttaatctcacttggtgaatatgaa

SEQ ID NO: 492457 - DNA, 120 bp, Artificial Sequence
  ENSG00000162994_54 (sequence is synthesized)
aatgagttaatctcacttggtgaatatgaaaaggcagcttgttatgcagcaaacagtcctagaagaattcttcgaaacattggtacaatgaatacatttaaggttgagacagggtttccc

SEQ ID NO: 492458 - DNA, 120 bp, Artificial Sequence
  ENSG00000162998_0 (sequence is synthesized)
acttgcagcgggggaggcggagacggcggagcgggccttttggcgtccactgcgcggctgcaccctgccccatcctgccgggatcatggtctgcggcagcccgggagggatgctgctgct

SEQ ID NO: 492459 - DNA, 120 bp, Artificial Sequence
  ENSG00000162998_1 (sequence is synthesized)
gcgggccgggctgcttgccctggctgctctctgcctgctccgggtgcccggggctcgggctgcagcctgtgagcccgtccgcatccccctgtgcaagtccctgccctggaacatgactaa

SEQ ID NO: 492460 - DNA, 120 bp, Artificial Sequence
  ENSG00000162998_2 (sequence is synthesized)
gatgcccaaccacctgcaccacagcactcaggccaacgccatcctggccatcgagcagttcgaaggtctgctgggcacccactgcagccccgatctgctcttcttcctctgtgccatgta

SEQ ID NO: 492461 - DNA, 120 bp, Artificial Sequence
  ENSG00000162998_3 (sequence is synthesized)
cgcgcccatctgcaccattgacttccagcacgagcccatcaagccctgtaagtctgtgtgcgagcgggcccggcagggctgtgagcccatactcatcaagtaccgccactcgtggccgga

SEQ ID NO: 492462 - DNA, 120 bp, Artificial Sequence
  ENSG00000162998_4 (sequence is synthesized)
gaacctggcctgcgaggagctgccagtgtacgacaggggcgtgtgcatctctcccgaggccatcgttactgcggacggagctgattttcctatggattctagtaacggaaactgtagagg

SEQ ID NO: 492463 - DNA, 120 bp, Artificial Sequence
  ENSG00000162998_5 (sequence is synthesized)
ggcaagcagtgaacgctgtaaatgtaagcctattagagctacacagaagacctatttccggaacaattacaactatgtcattcgggctaaagttaaagagataaagactaagtgccatga

SEQ ID NO: 492464 - DNA, 120 bp, Artificial Sequence
  ENSG00000162998_6 (sequence is synthesized)
tgtgactgcagtagtggaggtgaaggagattctaaagtcctctctggtaaacattccacgggacactgtcaacctctataccagctctggctgcctctgccctccacttaatgttaatga

SEQ ID NO: 492465 - DNA, 120 bp, Artificial Sequence
  ENSG00000162998_7 (sequence is synthesized)
ggaatatatcatcatgggctatgaagatgaggaacgttccagattactcttggtggaaggctctatagctgagaagtggaaggatcgactcggtaaaaaagttaagcgctgggatatgaa

SEQ ID NO: 492466 - DNA, 120 bp, Artificial Sequence
  ENSG00000162998_8 (sequence is synthesized)
gcttcgtcatcttggactcagtaaaagtgattctagcaatagtgattccactcagagtcagaagtctggcaggaactcgaacccccggcaagcacgcaactaaatcccgaaatacaaaaa

SEQ ID NO: 492467 - DNA, 120 bp, Artificial Sequence
  ENSG00000162998_9 (sequence is synthesized)
gtaacacagtggacttcctattaagacttacttgcattgctggactagcaaaggaaaattgcactattgcacatcatattctattgtttactataaaaatcatgtgataactgattatta

SEQ ID NO: 492468 - DNA, 120 bp, Artificial Sequence
  ENSG00000162998_10 (sequence is synthesized)
ttcttttgcaataataataaattaaacatgctgttaccagagcctctttgctggagtctccagatgttaatttactttctgcaccccaattgggaatgcaatattggatgaaaagagagg

SEQ ID NO: 492469 - DNA, 120 bp, Artificial Sequence
  ENSG00000162998_11 (sequence is synthesized)
tttctggtattcacagaaagctagatatgccttaaaacatactctgccgatctaattacagccttatttttgtatgccttttgggcattctcctcatgcttagaaagttccaaatgttta

SEQ ID NO: 492470 - DNA, 120 bp, Artificial Sequence
  ENSG00000162998_12 (sequence is synthesized)
taaaggtaaaatggcagtttgaagtcaaatgtcacataggcaaagcaatcaagcaccaggaagtgtttatgaggaaacaacacccaagatgaattatttttgagactgtcaggaagtaaa

SEQ ID NO: 492471 - DNA, 120 bp, Artificial Sequence
  ENSG00000162998_13 (sequence is synthesized)
ataaataggagcttaagaaagaacattttgcctgattgagaagcacaactgaaaccagtagccgctggggtgttaatggtagcattcttcttttggcaatacatttgatttgttcatgaa

SEQ ID NO: 492472 - DNA, 120 bp, Artificial Sequence
  ENSG00000162998_14 (sequence is synthesized)
tatattaatcagcattagagaaatgaattataactagacatctgctgttatcaccatagttttgtttaatttgcttccttttaaataaacccattggtgaaagtctttttttttctcttc

SEQ ID NO: 492473 - DNA, 120 bp, Artificial Sequence
  ENSG00000162998_15 (sequence is synthesized)
ttttaaaataaatcagaattgccgtattgaccaggaaaagattatgtatgcacgtgcaccagggttagtttttaaaagtacatggctccataaaaatgctgtagattacagagtgataaa

SEQ ID NO: 492474 - DNA, 120 bp, Artificial Sequence
  ENSG00000162998_16 (sequence is synthesized)
atatgcaggtttttttgtttttgttttttctgttgtgtgtgtgtctgtatttgtgtacatgtgtgtccttgcactcacacccaaggtggattaaaatacaggcctgcaaactggcctgca

SEQ ID NO: 492475 - DNA, 120 bp, Artificial Sequence
  ENSG00000162998_17 (sequence is synthesized)
ctttatcatttggatttgtgctgcttaatgctcagcgaaaaatgtctagtaaaatgaattatggttgtcaggagagaggttatttcgacttttgaaccaattgcacatttctcattaccc

SEQ ID NO: 492476 - DNA, 120 bp, Artificial Sequence
  ENSG00000162998_18 (sequence is synthesized)
aagctgtggtgagatcccaggggctgtggtgaacaaatgatgcttttatagatggtccctagcttacaatgattcaatttacaatgcttcaatttaacaatttgttgacttacaatgggt

SEQ ID NO: 492477 - DNA, 120 bp, Artificial Sequence
  ENSG00000162998_19 (sequence is synthesized)
ttatcaggatgtaacccaatgcatttcaacttacgatattttcagtttcgaatgggtttatccagatgtaaccccatcgtaaatggcggagcatctgtacttccttcctctggcagagtt

SEQ ID NO: 492478 - DNA, 120 bp, Artificial Sequence
  ENSG00000162998_20 (sequence is synthesized)
ccttagagcctgtgccaattacttgaaagtttcattctctgccatttacatgtgtgctattagtagaaccaaatttctaagctgtggcgtgctgaaaataaaatgcttatgaagcaaaaa

SEQ ID NO: 492479 - DNA, 120 bp, Artificial Sequence
  ENSG00000162999_0 (sequence is synthesized)
acattgcatcgctgggataaacggagctggacgactcagtctcttggtctgtggctgctgcggttacctggatgggcgagcacctctgaggctggctttgttacctgggcaataagggac

SEQ ID NO: 492480 - DNA, 120 bp, Artificial Sequence
  ENSG00000162999_1 (sequence is synthesized)
tagcagttcagccgttttctatgcctgctggatttgtttgtatttgttcccagccactgctcatgtaatgtactcccttaaccaggaaattaaagcattctcccggaataatctcaggaa

SEQ ID NO: 492481 - DNA, 120 bp, Artificial Sequence
  ENSG00000162999_2 (sequence is synthesized)
gcaatgcaccagggtgacaacgctaactggaaagaaaattatagaaacatggaaagatgccagaattcatgttgtggaagaagtagagccgagcagtgggggtggttgtggttatgtgca

SEQ ID NO: 492482 - DNA, 120 bp, Artificial Sequence
  ENSG00000162999_3 (sequence is synthesized)
ggaccttagctcggacctgcaagttggcgttattaagccatggttgctcctagggtcacaagatgctgctcatgatttggatacactgaaaaagaataaggtgactcatattcttaatgt

SEQ ID NO: 492483 - DNA, 120 bp, Artificial Sequence
  ENSG00000162999_4 (sequence is synthesized)
tgcatatggagttgaaaatgctttcctcagtgactttacatataagagcatttctatattggatctgcctgaaaccaacatcctgtcttattttccagaatgttttgaatttattgaaga

SEQ ID NO: 492484 - DNA, 120 bp, Artificial Sequence
  ENSG00000162999_5 (sequence is synthesized)
agcaaaaagaaaagatggagtggttcttgttcattgtaatgcaggcgtttccagggctgctgcaattgtaataggtttcctgatgaattctgaacaaacctcatttaccagtgctttttc

SEQ ID NO: 492485 - DNA, 120 bp, Artificial Sequence
  ENSG00000162999_6 (sequence is synthesized)
tttggtgaaaaatgcaagaccttccatatgtccaaattctggcttcatggagcagcttcgtacatatcaagagggcaaagaaagcaataagtgtgacagaatacaggagaacagttcatg

SEQ ID NO: 492486 - DNA, 120 bp, Artificial Sequence
  ENSG00000162999_7 (sequence is synthesized)
agttgcattgtagcagacaatggacaactgtagtttctgaattgacttctatagccatcttttcccttttttggagagtagactagcaaaactcccttttttctcttgccttttttatgc

SEQ ID NO: 492487 - DNA, 120 bp, Artificial Sequence
  ENSG00000162999_8 (sequence is synthesized)
ataaatggaggtcaatttgattgtcctgacctactgtataagtaaatttcaaatgtcattactttctctttgttattataatgtgtgattaaatgcttttttaaattgctaagggaaaat

SEQ ID NO: 492488 - DNA, 120 bp, Artificial Sequence
  ENSG00000162999_9 (sequence is synthesized)
aacaaagtgttagtaatcattgctttctgtagaagaaaaaggtttaaatttaaaatgtgtatttagagcatggagagaatcatttaatgaagcctatttttctgttccagcaactgtttt

SEQ ID NO: 492489 - DNA, 120 bp, Artificial Sequence
  ENSG00000162999_10 (sequence is synthesized)
tatgaaagaaaaacttgaaatgctacttaacttactatttcaaagggaagtatatttctttttaaagaatctttttaagattaaaaatgaataccttaaatctcccaaaagagataacca

SEQ ID NO: 492490 - DNA, 120 bp, Artificial Sequence
  ENSG00000162999_11 (sequence is synthesized)
accagtatctgaaggtttatacaatatttacacagtggctacaatattcacaaaattcttatgttctcttatgaaaaatatacacttttcattttgtcttcttctttttttttctttttt

SEQ ID NO: 492491 - DNA, 73 bp, Artificial Sequence
  ENSG00000162999_12 (sequence is synthesized)
aatttttgtgtttttagtagagatggagtctcaccacataggccaggtaaatactgggattacaggcgtgagc

SEQ ID NO: 492492 - DNA, 120 bp, Artificial Sequence
  ENSG00000162999_13 (sequence is synthesized)
gattacaggcgtgagccactgcatccgacctcattttgtttttttcaattctgttatcggcatttctttctttttttttttaatgtataggtgttctgtcatacgttattgtgagctttg

SEQ ID NO: 492493 - DNA, 120 bp, Artificial Sequence
  ENSG00000162999_14 (sequence is synthesized)
gagctttggttctttgaacaggtgatctattctcttacattttgtgctttttatcttgggtgcctagcattctgtttttttgatcctatgtcataattttttgagaaaatgtttgatact

SEQ ID NO: 492494 - DNA, 120 bp, Artificial Sequence
  ENSG00000162999_15 (sequence is synthesized)
gcaagatcattgtttagtggtctgttttctacttcagtattctaccagagaacatattttttaggggagaagggttatggttttgtaagaaactttaaatatacttttaggagacccaca

SEQ ID NO: 492495 - DNA, 120 bp, Artificial Sequence
  ENSG00000162999_16 (sequence is synthesized)
atcatttacagttttatctttggcctttgaataggttcttttttctttaatgtctccgtatttgaagaactgagctctgtacattataaatttgcttaaagattttgattttttcttcag

SEQ ID NO: 492496 - DNA, 89 bp, Artificial Sequence
  ENSG00000162999_17 (sequence is synthesized)
tttttcttttcttttttttttttttcgagacagggtcttgctctgtcacctaggctagagtggagtggcatgaacacaacggtcctccc

SEQ ID NO: 492497 - DNA, 120 bp, Artificial Sequence
  ENSG00000162999_18 (sequence is synthesized)
tgggctcaagcagtcctcccacctcagtctcctgagtagctgagactacagctgtgcgccaccacatctggctaattttatttttatttttgtagagacaggagtcttgccatgttgccc

SEQ ID NO: 492498 - DNA, 120 bp, Artificial Sequence
  ENSG00000162999_19 (sequence is synthesized)
tgttgcccaggctgatctcaaactcctaggcttaagtgatcctcccgccttagcctcccaagtgctaggattacaggcatcagccaccacgcctggcctgatagtttccacatagttttt

SEQ ID NO: 492499 - DNA, 120 bp, Artificial Sequence
  ENSG00000162999_20 (sequence is synthesized)
ttgccatgtaggttttatttttaaaagtcttgagctcttcttaaatatacattataaagagcaagcatagatggaaagtgcatattgaacacatctgtgcatttgagaaggcaggctttc

SEQ ID NO: 492500 - DNA, 120 bp, Artificial Sequence
  ENSG00000162999_21 (sequence is synthesized)
atatgctgtcatgagcaaaaagtagaagtgataaatgcaagttatgttttgagattgcttacaccgtgacaagatgccatcacttgtgatgttatgaactgttataaactctttgcttct

SEQ ID NO: 492501 - DNA, 120 bp, Artificial Sequence
  ENSG00000162999_22 (sequence is synthesized)
gctaagaagcagtctaaatataatcaacgtacagtgagctctttgaagccaaccaaggcaggcagaaccctcttaaatatgagactgatgtataggttctctctatggtcagtatcactg

SEQ ID NO: 492502 - DNA, 120 bp, Artificial Sequence
  ENSG00000162999_23 (sequence is synthesized)
gataagccttctcctttcataagaaaggatgtatttaaatacattttattttgctaaatcctgtttagttttcagccattaaatgtcacatgaagccttgatagaatttgttcataatgg

SEQ ID NO: 492503 - DNA, 120 bp, Artificial Sequence
  ENSG00000162999_24 (sequence is synthesized)
gtcacatgaagccttgatagaatttgttcataatggctcatgtattattattatttttgagatggagttttgctcttaatgatattattattatttgagacagagttttgctcttattgc

SEQ ID NO: 492504 - DNA, 71 bp, Artificial Sequence
  ENSG00000162999_25 (sequence is synthesized)
ttctcctgtaaaattttgtatttttttttggtagagacagggttcaaccatgttggtcaggctggtctcga

SEQ ID NO: 492505 - DNA, 90 bp, Artificial Sequence
  ENSG00000162999_26 (sequence is synthesized)
aagtgatccacaggtgttagccactacacctggcctggattgtgtattatttatgtctgtagtttatatgcttagttgttgcctatagtg

SEQ ID NO: 492506 - DNA, 120 bp, Artificial Sequence
  ENSG00000162999_27 (sequence is synthesized)
ttatgtctgtagtttatatgcttagttgttgcctatagtgatctgggtaagattcaaacatttatcttttgtatcttctacagaagtgctttgagcatcaaatttgttttaacgttaaat

SEQ ID NO: 492507 - DNA, 120 bp, Artificial Sequence
  ENSG00000162999_28 (sequence is synthesized)
tgtagtttgctgtattaaaatagatcaatgaatataattcagtcttttaggggcaccaagtaaagcataaggtcatatatactatacaatatgtttattgcacttcccatggggataaat

SEQ ID NO: 492508 - DNA, 120 bp, Artificial Sequence
  ENSG00000162999_29 (sequence is synthesized)
cactctgtcattcctagttattttaaaaaaagaactttatgattacggtcctctttctcacatactgcaaacttaaaagatacatacaccaaatataggtctgttttaaaggagaggaaa

SEQ ID NO: 492509 - DNA, 120 bp, Artificial Sequence
  ENSG00000162999_30 (sequence is synthesized)
aatagttcaaggagtttttgcctctttgtttttcaatagattattctgccattttttaaaggaaagggaaaatgaaaacagcatgtctttttaaacattgaaaagaaatatggaggcttt

SEQ ID NO: 492510 - DNA, 120 bp, Artificial Sequence
  ENSG00000162999_31 (sequence is synthesized)
aaaccgcaaactgaaaaagctgagtagaacaaaggcagtggagcatacaatacaattctatttatttgaggttaattgaagttaataatttttaaatttttttctaattttatgccttaa

SEQ ID NO: 492511 - DNA, 120 bp, Artificial Sequence
  ENSG00000162999_32 (sequence is synthesized)
aataggtttctgattacataaaatttgaatagaacactcaagaagtatgtagatttttgaaaaacccaaacaatattcttcttagatttttggaggcaaaatttagaccagtatactaat

SEQ ID NO: 492512 - DNA, 120 bp, Artificial Sequence
  ENSG00000162999_33 (sequence is synthesized)
tcaaaagacaaatatttcagaggaagtggagtacagtatttaacattttgtttgcaattttactttttcttcccttcttccctattgaaccttgattaaaatgtatgaatacaatacttg

SEQ ID NO: 492513 - DNA, 120 bp, Artificial Sequence
  ENSG00000162999_34 (sequence is synthesized)
gatttttttttttcagcttagactctgataatttcagtggtagtggggaaacctgaatttgtcagcatgattatttgtaactcagattgttcaaatgtatatagaaggtccccttcaagt

SEQ ID NO: 492514 - DNA, 120 bp, Artificial Sequence
  ENSG00000162999_35 (sequence is synthesized)
gttgtttctccaagtagtcataaatgtagcaagtataaatcagaatatcatcttataatcttacagagttaacctaatgagtcaatacctttataagcaaaaccatgataaatttaaaaa

SEQ ID NO: 492515 - DNA, 120 bp, Artificial Sequence
  ENSG00000162999_36 (sequence is synthesized)
caacagaaatgtggcatgattacttatttatttgttccaggtgactctaaatagttgatttttctgcctgaaggatcctgaacatatttagttaccctgtagttatttaggaatttaaac

SEQ ID NO: 492516 - DNA, 120 bp, Artificial Sequence
  ENSG00000162999_37 (sequence is synthesized)
cagaagactttgaagttgtatattcttgcaatgcataaaatgacattataatcaacaaacttatggtttgtttcaattgatgcacacaaaaaataacttatagttagacttttctatttc

SEQ ID NO: 492517 - DNA, 120 bp, Artificial Sequence
  ENSG00000162999_38 (sequence is synthesized)
aagtaaagctttgagttacttgtttttatacatattcatcatgtaccctttattgtttctaggtgttgatatactttaataaaaatgatatgtttaatattttcccattaatatatttct

SEQ ID NO: 492518 - DNA, 120 bp, Artificial Sequence
  ENSG00000162999_39 (sequence is synthesized)
atattttcccattaatatatttctttgaagctatttgttttaaaagatgtaacacttatttgctgtcaaattctgaattaaaaaatctgttggtggccaggcgcagtggctcatgcctgt

SEQ ID NO: 492519 - DNA, 120 bp, Artificial Sequence
  ENSG00000162999_40 (sequence is synthesized)
tctccaacgaagtcttatattttaccattctgcgtgtattagaaagctaaatttaaacagcaacaataagaaatcttccccagtggatccctcgagcctttcgggaaaatgcaggtttct

SEQ ID NO: 492520 - DNA, 120 bp, Artificial Sequence
  ENSG00000163001_0 (sequence is synthesized)
ttaactggttggtagcttctatcctgggggctgagcgactgcgggccagctcttcccctactccctctcggctccttgtggcccaaaggcctaaccggggtccggcggtctggcctaggg

SEQ ID NO: 492521 - DNA, 120 bp, Artificial Sequence
  ENSG00000163001_1 (sequence is synthesized)
atcttccccgttgcccctttggggcgggatggctgcggaagaagaagacgaggtggagtgggtagtggagagcatcgcggggttcctgcgaggcccagactggtccatccccatcttgga

SEQ ID NO: 492522 - DNA, 120 bp, Artificial Sequence
  ENSG00000163001_2 (sequence is synthesized)
ctttgtggaacagaaatgtgaagtttttgatgatgaagaagaaagcaaattgacctatacagagattcatcaggaatacaaagaactagttgaaaagctgttagaaggttacctcaaaga

SEQ ID NO: 492523 - DNA, 120 bp, Artificial Sequence
  ENSG00000163001_3 (sequence is synthesized)
aattggaattaatgaagatcaatttcaagaagcatgcacttctcctcttgcaaagacccatacatcacaggccattttgcaacctgtgttggcagcagaagattttactatctttaaagc

SEQ ID NO: 492524 - DNA, 120 bp, Artificial Sequence
  ENSG00000163001_4 (sequence is synthesized)
aatgatggtccagaaaaacattgaaatgcagctgcaagccattcgaataattcaagagagaaatggtgtattacctgactgcttaaccgatggctctgatgtggtcagtgaccttgaaca

SEQ ID NO: 492525 - DNA, 120 bp, Artificial Sequence
  ENSG00000163001_5 (sequence is synthesized)
cgaagagatgaaaatcctgagggaagttcttagaaaatcaaaagaggaatatgaccaggaagaagaaaggaagaggaaaaaacagttatcagaggctaaaacagaagagcccacagtgca

SEQ ID NO: 492526 - DNA, 120 bp, Artificial Sequence
  ENSG00000163001_6 (sequence is synthesized)
ttccagtgaagctgcaataatgaataattcccaaggggatggtgaacattttgcacacccaccctcagaagttaaaatgcattttgctaatcagtcaatagaacctttgggaagaaaagt

SEQ ID NO: 492527 - DNA, 120 bp, Artificial Sequence
  ENSG00000163001_7 (sequence is synthesized)
ggaaaggtctgaaacttcctccctcccacaaaaagacctgaagattcctggcttagagcatgcgagcattgaaggaccaatagcaaacttatcagtacttggaacagaagaacttcggca

SEQ ID NO: 492528 - DNA, 120 bp, Artificial Sequence
  ENSG00000163001_8 (sequence is synthesized)
actatctcaagcagaagagagataagttgatgtccatgagaaaggatatgaggactaaacagatacaaaatatggagcagaaaggaaaacccactggggaggtagaggaaatgacagaga

SEQ ID NO: 492529 - DNA, 120 bp, Artificial Sequence
  ENSG00000163001_9 (sequence is synthesized)
aaccagaaatgacagcagaggagaagcaaacattactaaagaggagattgcttgcagagaaactcaaagaagaagttattaataagtaataattaagaacaatttaacaaaatggaagtt

SEQ ID NO: 492530 - DNA, 120 bp, Artificial Sequence
  ENSG00000163001_10 (sequence is synthesized)
caaattgtcttaaaaataaattatttagtccttacactgagccttttagtttcgaacacttttgtaaatccaaatatcttaaacactttaggtaaaggacagtagggaaggcagctactc

SEQ ID NO: 492531 - DNA, 120 bp, Artificial Sequence
  ENSG00000163001_11 (sequence is synthesized)
atactgattagtttaatacaaattcctggatgttttcccttggaaagagggtatagaaggaaactagttgatagtatgttcattcattcaaactcggttacctactgtttgtgccaggca

SEQ ID NO: 492532 - DNA, 120 bp, Artificial Sequence
  ENSG00000163001_12 (sequence is synthesized)
ttgtgctaagcactaaggatacaggagtcaactagattgacagggtcactgccttcatggggctagtggagagggcccaaagacgaaactgttagaaaggcaaagtgtagtgtcctatga

SEQ ID NO: 492533 - DNA, 120 bp, Artificial Sequence
  ENSG00000163001_13 (sequence is synthesized)
gcagggctggctaagcctctttaagctgaatggaaggttaattacacaaagaataggtaaggaacagttcaggttctgcagcaggaaataaagcatatactgaaaaactggagtatatat

SEQ ID NO: 492534 - DNA, 120 bp, Artificial Sequence
  ENSG00000163001_14 (sequence is synthesized)
atgagtggagacggttagcatatgaaattggagacaggtgggggactgacagtgcagagtcttacagggaatgtgaggatttaatttttttaaaaattattttagagacaggatcttgct

SEQ ID NO: 492535 - DNA, 120 bp, Artificial Sequence
  ENSG00000163001_15 (sequence is synthesized)
ctgctgcccaggctggcgtgcagttgcacaatcccagctctggattttaaattttgtaataccagcagtgtcaagtcattgaaaaattttaatgcaggggccaggcacggtggctgacac

SEQ ID NO: 492536 - DNA, 120 bp, Artificial Sequence
  ENSG00000163001_16 (sequence is synthesized)
tgacttaccttggtcttctgacactaaatatattcttctaaaccttagtttagaagaacttctataattgagattagtgtgatgtttacccattaattttttaatgtaagttggagaaca

SEQ ID NO: 492537 - DNA, 120 bp, Artificial Sequence
  ENSG00000163001_17 (sequence is synthesized)
cctttctttaatatgcctaatttaagctgttttaggttcacagtaaaattgagcagaaggtacagagatttcccccatatagtccctgccctagtacatgcctagcctctcccattatcg

SEQ ID NO: 492538 - DNA, 120 bp, Artificial Sequence
  ENSG00000163001_18 (sequence is synthesized)
accccctcaaaagtagtacatttgttacgttggtgaaccttccttgacacaacattaccaaccaaagagcatagtttacattagggttcactcttgctattgtatattctgtggattttg

SEQ ID NO: 492539 - DNA, 120 bp, Artificial Sequence
  ENSG00000163001_19 (sequence is synthesized)
acaaatgtatgatgacatgcattcaccattatagtatcatgtagtatacagtttcattgccctaaaaattctttgtgctctgcctattcatccttcccacctcctagcccatggcaacca

SEQ ID NO: 492540 - DNA, 120 bp, Artificial Sequence
  ENSG00000163001_20 (sequence is synthesized)
ctgatcttttactgtttccacagttttgccttttctagaatgtcatatagttgaaatcatacagtagtacgtagccttttcagattggcttctttcacttagtaataatccatttaagat

SEQ ID NO: 492541 - DNA, 72 bp, Artificial Sequence
  ENSG00000163001_21 (sequence is synthesized)
cagattggcttctttcacttagtaataatccatttaagatttctccatgtcttgtcatggctttgccacggt

SEQ ID NO: 492542 - DNA, 120 bp, Artificial Sequence
  ENSG00000163001_22 (sequence is synthesized)
acatataacagaagtattttattgctgttatctcttattaagtttacacctagatcttactattaaaatttatacttatgtggaactacataattttaagtacaatgtaaatattgacca

SEQ ID NO: 492543 - DNA, 120 bp, Artificial Sequence
  ENSG00000163001_23 (sequence is synthesized)
aaaagacctgaagattcctggcttagagcatgcgagcattgaaggaccaatagcagtaagtaaacgacatcacttaagaactataagcaaaatgacaaggtactgggaaatcaaacttcg

SEQ ID NO: 492544 - DNA, 120 bp, Artificial Sequence
  ENSG00000163001_24 (sequence is synthesized)
aattgaatcactcagtgggcatctgtgctacttactaaatggatttgaatttagatagctccttttcttacttgacccagaacttatcagtacttggaacagaagaacttcggcaacgag

SEQ ID NO: 492545 - DNA, 120 bp, Artificial Sequence
  ENSG00000163001_25 (sequence is synthesized)
ctcttagagccagccaccatcataatcatctactagaatcccaagatgctttccccagcagctaatagcgctgttgtctgtgggtagggggaaaacaccaccctaaccctgaagaatcca

SEQ ID NO: 492546 - DNA, 120 bp, Artificial Sequence
  ENSG00000163001_26 (sequence is synthesized)
tgacatagtgctattactttgatgtgaataagtctggaaaatagtctctttctactgtggtttgctctataaaatccttgcctctgaattttcctgaaaactatgctttattctgactta

SEQ ID NO: 492547 - DNA, 120 bp, Artificial Sequence
  ENSG00000163002_0 (sequence is synthesized)
gtagttgccgacgcaatggcagcctttgcagtggaacctcaggggcccgcgttaggatctgaaccaatgatgctgggttcacccacatctccaaagccaggagttaatgcccagttctta

SEQ ID NO: 492548 - DNA, 120 bp, Artificial Sequence
  ENSG00000163002_1 (sequence is synthesized)
cctggatttttaatgggggatttgccagctccggtgactccacaacctcgatcaattagtggcccttcagtaggagtaatggaaatgagatcacctttacttgcaggtgggtcaccacca

SEQ ID NO: 492549 - DNA, 120 bp, Artificial Sequence
  ENSG00000163002_2 (sequence is synthesized)
caaccagttgtaccagctcataaagataaaagtggcgctccaccagttagaagtatatatgatgacatttctagcccaggacttggatcaacacctttaacttcaagaagacagccaaac

SEQ ID NO: 492550 - DNA, 120 bp, Artificial Sequence
  ENSG00000163002_3 (sequence is synthesized)
atttcagtaatgcagagtcctcttgttggagttacatctactcctggaacagggcaaagtatgtttagtccagcaagtatcggtcagccacgaaagacgacattatctcctgcccagttg

SEQ ID NO: 492551 - DNA, 120 bp, Artificial Sequence
  ENSG00000163002_4 (sequence is synthesized)
gatcctttttatactcaaggagattctttgacttcagaagatcacctcgatgactcttgggtgactgtatttgggtttcctcaagcatctgcttcctacatattactacaatttgcacag

SEQ ID NO: 492552 - DNA, 120 bp, Artificial Sequence
  ENSG00000163002_5 (sequence is synthesized)
tatgggaatatcttaaaacatgtgatgtctaatacaggaaattggatgcatattcgttatcaatctaaactgcaggctcggaaagccttaagcaaagatgggaggatttttggagaatcc

SEQ ID NO: 492553 - DNA, 120 bp, Artificial Sequence
  ENSG00000163002_6 (sequence is synthesized)
ctaggtacaccaacacaacctggaagtactcctaggatttctaccatgagacctcttgctacagcatacaaagcctctactagtgattatcaggttatttctgacagacaaacgccaaaa

SEQ ID NO: 492554 - DNA, 120 bp, Artificial Sequence
  ENSG00000163002_7 (sequence is synthesized)
aaagatgaaagtcttgtatccaaagcaatggagtacatgtttggctggtagtagaacaccaagaaggaggttgctacactaaaacagagttagcagagtgctgctggttccttcggttag

SEQ ID NO: 492555 - DNA, 120 bp, Artificial Sequence
  ENSG00000163002_8 (sequence is synthesized)
ttatataactgttcctgcagtattggatagctatctcatacttcttttagaaagaagcctttttcattaaggatacaacctatttgtagctcgcactttaaaagatgcttgagatacatt

SEQ ID NO: 492556 - DNA, 120 bp, Artificial Sequence
  ENSG00000163002_9 (sequence is synthesized)
ttaaagaaaactaaaaatccctgtaaataggattttgtgctttctgtaacagtgcatgcttcagcacagaaaactcagcattgattattgtaaattaaataactgaaattgtggtgagac

SEQ ID NO: 492557 - DNA, 120 bp, Artificial Sequence
  ENSG00000163002_10 (sequence is synthesized)
gtcatagtcttcatgagaacgtgggggtgaatttcatgaaggggaactatagttatttctaccgacacaaatattataattagcaatttgaattatggtcttttaatttagatagtattt

SEQ ID NO: 492558 - DNA, 120 bp, Artificial Sequence
  ENSG00000163002_11 (sequence is synthesized)
aatattttaattatccttgtttgtatatgtcctgtcacagagtgtcctcttggtgtattctaaaacgagcattcttttaaaaaacctaaagtttcttgataataaacattgtcaatgata

SEQ ID NO: 492559 - DNA, 120 bp, Artificial Sequence
  ENSG00000163002_12 (sequence is synthesized)
acaccaggtgctgaaggctgagacggtgagagcatgagtgataagatgctctctccccttgctctctttctgaagatgacaaactccatcttttttctaaagtcttactaaaggtgacaa

SEQ ID NO: 492560 - DNA, 120 bp, Artificial Sequence
  ENSG00000163002_13 (sequence is synthesized)
tgtatatagtataatgaaggatgttactaaatgacatgtgctgcacacctgagtcttgtggaggctgaagaaaaggaggcttctgtagaaaataggaactcagatctgaaccaatgatgc

SEQ ID NO: 492561 - DNA, 120 bp, Artificial Sequence
  ENSG00000163002_14 (sequence is synthesized)
acaccaggtgctgaaggctgagacggtgagagcatgagtgataagatgctctctccccttgctctctttctgaagatgacaaactccatcttttttctaaagtcttactaaaggatctga

SEQ ID NO: 492562 - DNA, 120 bp, Artificial Sequence
  ENSG00000163002_15 (sequence is synthesized)
ggtgagagcatgagtgataagatgctctctccccttgctctctttctgaagatgacaaactccatcttttttctaaagtcttactaaagtttaacaagaaataaaaaaagtacaaatgtt

SEQ ID NO: 492563 - DNA, 120 bp, Artificial Sequence
  ENSG00000163002_16 (sequence is synthesized)
aactctgcagccttgaactcctgggttcaaccaatcctcctgcctcaactgtcctattgggatataggcacgtgctgctatgcctggctaattgtatttttttttgtagagatgaggtct

SEQ ID NO: 492564 - DNA, 120 bp, Artificial Sequence
  ENSG00000163002_17 (sequence is synthesized)
tgccggattcaggtgatccttgcaccttgacctctcaaagcgctagattataaatgtgagccactgtgcctggccgacttttcttttaagtagaaaatttagtagcttcatagacacaag

SEQ ID NO: 492565 - DNA, 120 bp, Artificial Sequence
  ENSG00000163002_18 (sequence is synthesized)
tgttgtttcctattattattgtgcttagtaggacatataaacaaagtttatcagttaagttgccaaacatttcagtaatgcagagtcctcttgttggagttacatctactcctggaacag

SEQ ID NO: 492566 - DNA, 120 bp, Artificial Sequence
  ENSG00000163002_19 (sequence is synthesized)
aggtgctgaaggctgagacggtgagagcatgagtgataagatgctctctccccttgctctctttctgaagatgacaaactccatcttttttctaaagtcttactaaagtggtgggaatcc

SEQ ID NO: 492567 - DNA, 120 bp, Artificial Sequence
  ENSG00000163002_20 (sequence is synthesized)
aaattacacagcaccaaaatatgttgtcagcggcaaatccatacgggtctgcaacaacaattcttgtgtcctcaggagagaatctgactaaggggcataaggcagaagagaccaagacaa

SEQ ID NO: 492568 - DNA, 120 bp, Artificial Sequence
  ENSG00000163002_21 (sequence is synthesized)
ttgagaggaggaatgaaaagaaagtaaagtacacttggaagagggccaagcgggcatcttggaggacaagtgccccatttgaccttggacgtagggttttacatgttggcatacttctgg

SEQ ID NO: 492569 - DNA, 120 bp, Artificial Sequence
  ENSG00000163002_22 (sequence is synthesized)
catcttgcatcccttttcccttgattcctcccttggagtgagaggcctgttagcactttggaggtgacaatgtatatagtataatgaaggatgttactaaatgacatgtgctgcacacct

SEQ ID NO: 492570 - DNA, 120 bp, Artificial Sequence
  ENSG00000163002_23 (sequence is synthesized)
ctgagtgcatagcatgcttaactttttcattgtattgatttgtatgccattaaatgtttcctgtggaggctattaccttgatgaaacctttacgctttaaaagttttctgctttaaagtt

SEQ ID NO: 492571 - DNA, 120 bp, Artificial Sequence
  ENSG00000163002_24 (sequence is synthesized)
aacatcttggccaattggaaagttatcatgaattaaaaaaaaaaaattatttgccattcctttaaattttttgaaagttgttttagctttttctaagttatatttgcatacatacgaaat

SEQ ID NO: 492572 - DNA, 120 bp, Artificial Sequence
  ENSG00000163002_25 (sequence is synthesized)
gtatcctgtgtgcatctttgacatgagggcgcattaaaactttattaaattgatgactaaattgatggtatccaaagtgcagaaccttaggttggagtagctttggttatttaaatgaag

SEQ ID NO: 492573 - DNA, 120 bp, Artificial Sequence
  ENSG00000163002_26 (sequence is synthesized)
acattgaccaacctccagacagaaaaaaatttctcacttcaaaaaagcttaaagaagttaattatgttctttgaagaatggtagaagtattatgatctcattcagtatattattgtctcc

SEQ ID NO: 492574 - DNA, 120 bp, Artificial Sequence
  ENSG00000163002_27 (sequence is synthesized)
acacttgtgctttagtagggcagatagtggtagttcagttttttgacttcctctgaaatttggagattattctagaactgtttttttctttaggttctattactgttattttaaatttcc

SEQ ID NO: 492575 - DNA, 120 bp, Artificial Sequence
  ENSG00000163002_28 (sequence is synthesized)
cattcagtgcagcttttgttattcaatttttctttcttttgttttgagacggaatgtctctctgttacctaggctggagtacagtggtgctatcccagctcactgcaacctctgcctcct

SEQ ID NO: 492576 - DNA, 60 bp, Artificial Sequence
  ENSG00000163002_29 (sequence is synthesized)
gagtccatgttggccagggtggtctcaaacttttgacctcaagtaatctgcccaccttgg

SEQ ID NO: 492577 - DNA, 90 bp, Artificial Sequence
  ENSG00000163002_30 (sequence is synthesized)
gcccagctattcaattttctaatttaagaaacagatgttatttgctttgccaaaggaataaaattttggcattcttaaaagcataaggat

SEQ ID NO: 492578 - DNA, 120 bp, Artificial Sequence
  ENSG00000163002_31 (sequence is synthesized)
tgctttgccaaaggaataaaattttggcattcttaaaagcataaggatattctaagtccatattttaattttaaaaatatacaattcaggccgggcgcaggggctcatgcctgtaatccc

SEQ ID NO: 492579 - DNA, 65 bp, Artificial Sequence
  ENSG00000163002_32 (sequence is synthesized)
caatttagtgctataaatgcattttggtgtttctcttttaaatgagcaattctagaattgcctat

SEQ ID NO: 492580 - DNA, 120 bp, Artificial Sequence
  ENSG00000163002_33 (sequence is synthesized)
ggtgtttctcttttaaatgagcaattctagaattgcctatgacactgaagtaacaataacctaaccgttttttttgtgtgtgttttttaataggttatttctgacagacaaacgccaaaa

SEQ ID NO: 492581 - DNA, 120 bp, Artificial Sequence
  ENSG00000163006_0 (sequence is synthesized)
gcgggtttgatgaacgcggttcccggggagactggtacggttgctgtgtgctatggagccgagggtcgtcaagccaccggggcaggatttagtagtggagagtctcaaaagccgctacgg

SEQ ID NO: 492582 - DNA, 120 bp, Artificial Sequence
  ENSG00000163006_1 (sequence is synthesized)
actcgggggcagctgccccgacgagtatgatttttcaaatttttatcagtctaagtataagagaagaactctaacctccccaggtgatttggatatctactctggagataaagttggttc

SEQ ID NO: 492583 - DNA, 120 bp, Artificial Sequence
  ENSG00000163006_2 (sequence is synthesized)
atcgttaaaatattctgatgaaagcaagcattgtagaacaccattgggcagcttattcaagcacgtaaatgtgaattgcctagatgatgaactggattctttccatgatttgaagaaaca

SEQ ID NO: 492584 - DNA, 120 bp, Artificial Sequence
  ENSG00000163006_3 (sequence is synthesized)
ggaaacagaagaagagttaattgaaaatgattatagagttagtacctcgaaaataaccaagcagtcttttaaagaaatagaaaaagttgccttgccaactaatacgacctcatcgagacc

SEQ ID NO: 492585 - DNA, 120 bp, Artificial Sequence
  ENSG00000163006_4 (sequence is synthesized)
tcggactgagtgttgtagtgatgcaggtgactctcctttgaaacctgtcagctgtccaaaatctaaagcatcagacaagcggagtttacttccacatcagatcagtcagatatatgacga

SEQ ID NO: 492586 - DNA, 120 bp, Artificial Sequence
  ENSG00000163006_5 (sequence is synthesized)
attatttcagatacatctgaaattgcagtgtgaaactgcagcacaacagaaatttgctgaagaacttcaaaagcgagaacgttttttacttgaaagagaacaactgcttttcagacatga

SEQ ID NO: 492587 - DNA, 120 bp, Artificial Sequence
  ENSG00000163006_6 (sequence is synthesized)
aaatgccttgagtaaaattaaaggtgttgaagaagaggttcttacaagatttcaaattataaaagagcagcatgatgcagaagttgaacacttaaccgaagttcttaaggaaaagaataa

SEQ ID NO: 492588 - DNA, 120 bp, Artificial Sequence
  ENSG00000163006_7 (sequence is synthesized)
agaaaccaagagactgaggtcctcttttgatgcattgaaagaattgaatgataccttaaaaaaacagttaaatgaagcaagtgaagaaaacaggaagatagacattcaggctaaaagagt

SEQ ID NO: 492589 - DNA, 120 bp, Artificial Sequence
  ENSG00000163006_8 (sequence is synthesized)
tcaagctcgtttagataatttacagaggaagtacgagtttatgacaatacagagattgaaaggaagttcccatgctgttcatgaaatgaaaagtttaaaacaagaaaaagcaccagtttc

SEQ ID NO: 492590 - DNA, 120 bp, Artificial Sequence
  ENSG00000163006_9 (sequence is synthesized)
atgaagaatctggaatggatggtaaaaaaccacaactcaaatttgcttcccagagaaatgatattcaggagaagtgtgtaaagcttttgcctctaatgacagagcagctacagtggatgc

SEQ ID NO: 492591 - DNA, 120 bp, Artificial Sequence
  ENSG00000163006_10 (sequence is synthesized)
catttgtgaatatcaaacttcacgagccttttgtaaaatttatatattggtccctaaggcagctagatgctggagcacagcactcgactatgacatcaacattgaggagattgggtgaag

SEQ ID NO: 492592 - DNA, 120 bp, Artificial Sequence
  ENSG00000163006_11 (sequence is synthesized)
acatttttaaaggagtggtaactaaaggaattcaggataattctccacagcattctgtggagaataaaccaaagacagctgctttctttaagagctccaatttgccattgagatttttat

SEQ ID NO: 492593 - DNA, 120 bp, Artificial Sequence
  ENSG00000163006_12 (sequence is synthesized)
caaccttaattgttctcaaaacagtcactcaagctgattacctggctcaggcatttgattctctttgtttggacttgaagacagaagaaggaaaaaccttgtttttggagtatcaggctg

SEQ ID NO: 492594 - DNA, 120 bp, Artificial Sequence
  ENSG00000163006_13 (sequence is synthesized)
ttccagtaatattaagtcatctaagaatatccagtaaaggactcctgtctaatgttattgatagtttgctccagatgacggtggaatctaaatccttgcagcctttcctggaagcctgta

SEQ ID NO: 492595 - DNA, 120 bp, Artificial Sequence
  ENSG00000163006_14 (sequence is synthesized)
gcaactctttattttttcgtacttgctctgtgctgcttcgagcccctaagcttgatcttcaaatactagaaaaactcagtattattttacagaaactttccaaaatcaagagtaataaga

SEQ ID NO: 492596 - DNA, 120 bp, Artificial Sequence
  ENSG00000163006_15 (sequence is synthesized)
agctctttgaactttttacgattcatctgatgcttcaagaaatacaaaggacaacaaacccagagcatgcatttctctgtattaatctaaattcaactctgttcaatctgggtttaacaa

SEQ ID NO: 492597 - DNA, 120 bp, Artificial Sequence
  ENSG00000163006_16 (sequence is synthesized)
aatgtaactccctggtctccagtgcaagcccttagactggctaattttttaatatagtatatgtggtgcttatttataaacatgtagaaattaccaaagtaactacaattctaccaagta

SEQ ID NO: 492598 - DNA, 120 bp, Artificial Sequence
  ENSG00000163006_17 (sequence is synthesized)
aagttatcagtagcatcatttatcatgaaaaataaataatttttttgaactgtaaaaatgaaatctgtagaaggtattggaacttttggaatgtttcagttcaggtaaggtaatactaat

SEQ ID NO: 492599 - DNA, 120 bp, Artificial Sequence
  ENSG00000163006_18 (sequence is synthesized)
atacaagatggcgtttctagaatgtatgacactgaagtgactttttgtaaaaatatattaggaaaattatttcttaaaattatgtgattatttggaataaaattggtgcttatgtgagaa

SEQ ID NO: 492600 - DNA, 120 bp, Artificial Sequence
  ENSG00000163006_19 (sequence is synthesized)
tctaatgttattgatagtttgctccagatgacggtggaatctagtcatcctccatgcccttctgatgtccacatgtctcttcattttcttctcaggcctcctctttctctcaccatctaa

SEQ ID NO: 492601 - DNA, 120 bp, Artificial Sequence
  ENSG00000163006_20 (sequence is synthesized)
gttattgaaattcttgaaatcctaagcaggcctggcactgagaggtactctgtaagggagctgaaacttccagcctttcttcctattcacaaacccacctttacccgcccccaatgctgg

SEQ ID NO: 492602 - DNA, 120 bp, Artificial Sequence
  ENSG00000163006_21 (sequence is synthesized)
gtttttgtcctgaggggccagtgcagttttcttgccactttgttttcctctcatataacttttccctgtcaataaggcatttaggctgagagaaaaagttattgagcatgtgcatccaaa

SEQ ID NO: 492603 - DNA, 120 bp, Artificial Sequence
  ENSG00000163006_22 (sequence is synthesized)
tttgagatgattgttatttcattacctaatgactttaacttctttgatactgtgtttgtcttatgaatataatggctttctcactttaatgaaaagttatacaataaaattgaaaagtaa

SEQ ID NO: 492604 - DNA, 120 bp, Artificial Sequence
  ENSG00000163006_23 (sequence is synthesized)
gatcaccatgacagatataataacataatagtaacagaaaagtttgaaaaatgcaaattaccaaaatgtgagctcatggttttggagaaaatggttccaatagactcaccagatgcaggg

SEQ ID NO: 492605 - DNA, 120 bp, Artificial Sequence
  ENSG00000163006_24 (sequence is synthesized)
ttgccacaaatcttcaatttgtaaaaaacgcaatatctctgaaccacagtaaagttgaagtgcaacaaaattaggtatgcctgtatggaaacgcagagctcacacccttctgatgaacag

SEQ ID NO: 492606 - DNA, 120 bp, Artificial Sequence
  ENSG00000163006_25 (sequence is synthesized)
acagaagtgtcagatccttttctatgctagcaaaggattttaagggtttggaattctctaaaagtgtaaagctcttaggagggcgttacttggcaaagcagtgctttatctcattctctt

SEQ ID NO: 492607 - DNA, 120 bp, Artificial Sequence
  ENSG00000163006_26 (sequence is synthesized)
gtttgcctgttcaaacttcccacccattgtagacccacttgctgtgttattgcaggttaagcccccaagacccttttctctcaccttttttgttcacttcccatcccctttccttttcag

SEQ ID NO: 492608 - DNA, 120 bp, Artificial Sequence
  ENSG00000163006_27 (sequence is synthesized)
ggtaagcacctgagagtgtcagtcttccctagataaatggaactgtgtgcagatctgggactgctggaagggtgtgaggtagggatttaaggatggcgcaagtagggtggggctaaaaaa

SEQ ID NO: 492609 - DNA, 120 bp, Artificial Sequence
  ENSG00000163006_28 (sequence is synthesized)
gaccttgtcttctttatataggagcatcgagattaaagggtgtgaggtaggggtttaaggatggcgcaagtcaggtggggctaaaaaagaccttgtcttctttatataggagcatcgaga

SEQ ID NO: 492610 - DNA, 120 bp, Artificial Sequence
  ENSG00000163006_29 (sequence is synthesized)
ttaaacactgaattcagcagtgttcaattcatttcttattttccactgtatttcatttcaacccatcctctatattttgtgagcccaaagcctttagatatgtgtagaggaaggtgtgat

SEQ ID NO: 492611 - DNA, 120 bp, Artificial Sequence
  ENSG00000163006_30 (sequence is synthesized)
acagctttcaacttcttgaaatttgcccaagaaatactttgtatcatgaggtctgcagttatttatacaaatccctgaaaatatttcatggcaaatctgtagcacccagttgagatgaga

SEQ ID NO: 492612 - DNA, 120 bp, Artificial Sequence
  ENSG00000163006_31 (sequence is synthesized)
ccaaactggaaaaatctctgtggctgtggttattgtcagttctgtaagatgaagatgggaccagtgacaagaatgtgcactatttactgagcactcacctgcacggggccatgtgctttt

SEQ ID NO: 492613 - DNA, 120 bp, Artificial Sequence
  ENSG00000163006_32 (sequence is synthesized)
cagacattgcctctttcagtcttgagcacaatgccagttgtgccatcccctgacatatagatgagatgaagatccagacataaccagcaagggcagggctgggatgcgatccatgtgtgc

SEQ ID NO: 492614 - DNA, 120 bp, Artificial Sequence
  ENSG00000163006_33 (sequence is synthesized)
ctggttcccagggttggcatgtttgcagtgttctctccataatggtttgccttaatgaagagaggattcaggatgtccagtttcagcctcactggctgggctggaatcttccattgaccc

SEQ ID NO: 492615 - DNA, 120 bp, Artificial Sequence
  ENSG00000163006_34 (sequence is synthesized)
ttccactctacattcctccctggcctgggatgctcactcgagtgggcttcttgctgggcttggccagtgggggttgccatcaggagacaacagggcatctgcttctccagggcatccccc

SEQ ID NO: 492616 - DNA, 120 bp, Artificial Sequence
  ENSG00000163006_35 (sequence is synthesized)
cctaaacctcactcctctctttgtaaacagcccctttataaattacgcaccttgagggtgtcatctgctttctttcaggagcaggactgactcactagcatcactcctaaataatgtgaa

SEQ ID NO: 492617 - DNA, 88 bp, Artificial Sequence
  ENSG00000163006_36 (sequence is synthesized)
gcaggactgactcactagcatcactcctaaataatgtgaacttgttttgattttttgtttgaggcagagtctctcacaggttcctttc

SEQ ID NO: 492618 - DNA, 90 bp, Artificial Sequence
  ENSG00000163006_37 (sequence is synthesized)
aaaataaggctggtcttgaactccagggctcaagtgatccttctgcctcggcttcctaaagtgttgggattacaggtatgagccactgca

SEQ ID NO: 492619 - DNA, 120 bp, Artificial Sequence
  ENSG00000163006_38 (sequence is synthesized)
ggattacaggtatgagccactgcacctgcccaatgatgtgaacttttagtaagtcacttcagttatctgggcccaacttgctttacctgtcaagcagggaccatggtgcctggtctccca

SEQ ID NO: 492620 - DNA, 120 bp, Artificial Sequence
  ENSG00000163006_39 (sequence is synthesized)
ggtgcctggtctcccagattgtgaatgtcaaagaaaacaggtagagaggcactttggaagataaacactcctcagaatgggagctagcagtgtaattccacaaggcacagaatgggcatt

SEQ ID NO: 492621 - DNA, 120 bp, Artificial Sequence
  ENSG00000163006_40 (sequence is synthesized)
cactgcatagcctgactggaagtggagcatcctttgtgagaaaaggaaacctctgagacagtgaatatgttcccattctgaaaagcttgatgcaatcaaaatagaagaaagagcaccgct

SEQ ID NO: 492622 - DNA, 120 bp, Artificial Sequence
  ENSG00000163006_41 (sequence is synthesized)
gaagagaataagagaagagatctttgttttgtttttgcttgtttctttgtggtagtgacagcgtatttcatgtaggaacctgtgacaaagctccacataataaacatcagaaagtcaagg

SEQ ID NO: 492623 - DNA, 120 bp, Artificial Sequence
  ENSG00000163006_42 (sequence is synthesized)
atgatggttttggccaaggagcaaatgacacatgccacagctctcctggcaggtccccttttcgagattgtgtcctcccggataggactctcaagcagctgcaacaggcatcttccagct

SEQ ID NO: 492624 - DNA, 120 bp, Artificial Sequence
  ENSG00000163006_43 (sequence is synthesized)
gggaaaggccacttgacctctttttctctttcgaaagccgggcagctgtgagtccaggcttgtcactcctgggtgcaggctcaggaattgaaggcgggtctgccaagccacacaccctcg

SEQ ID NO: 492625 - DNA, 120 bp, Artificial Sequence
  ENSG00000163006_44 (sequence is synthesized)
ttgaaacacctctgctctgtggccaggcttttcagcccctccccactccccatcagcagtggcttctggaatttccctgtctgtagaatgagaatagttacatcaaaatttcttcccaag

SEQ ID NO: 492626 - DNA, 120 bp, Artificial Sequence
  ENSG00000163006_45 (sequence is synthesized)
gagctaattggaatattgtaatacaaatatttgcagagaattaatactgagagatgctaaaggagaatttagctcatgtaattactaatcagtgtcttttttccaggtactctgtaaggg

SEQ ID NO: 492627 - DNA, 120 bp, Artificial Sequence
  ENSG00000163006_46 (sequence is synthesized)
ccgacgaggtgatttggatatctactctggagataaagttggttcatcgttaaaatattctgatgaaagcaagcattgtagaacaccattgggcagcttattcaagcacgtaaatgtgaa

SEQ ID NO: 492628 - DNA, 120 bp, Artificial Sequence
  ENSG00000163006_47 (sequence is synthesized)
atgctgttaatatttgaaaagcagttttatctttttaaagtgctatagtaaacttctagattgctgtgatacaattatttttttaaagcctagatgatgaactggattctttccatgatt

SEQ ID NO: 492629 - DNA, 120 bp, Artificial Sequence
  ENSG00000163012_0 (sequence is synthesized)
agtgagccgagcagaggggccgcctccgcccgcacccagcatgcttcgccgaggctataaggcctctgaaaggcgaagacacttgagcgagaggctcagctggcaccaagaccaggcgct

SEQ ID NO: 492630 - DNA, 120 bp, Artificial Sequence
  ENSG00000163012_1 (sequence is synthesized)
gagtagcagcatctacctcctacgagagatgggccccactggcttcctgctgagggaggaggagccggaatacatggatttccgagtttttctaggaaatcctcacgtttgtaactgttc

SEQ ID NO: 492631 - DNA, 120 bp, Artificial Sequence
  ENSG00000163012_2 (sequence is synthesized)
cacatttccgaaaggaggggaactttgtaagcatatctgctgggtcttgttgaaaaaattcaagcttccaaggaaccatgaatctgctttacaactgggtcttggagaaagagagataag

SEQ ID NO: 492632 - DNA, 120 bp, Artificial Sequence
  ENSG00000163012_3 (sequence is synthesized)
tgacttgcttcgggggatacatcgagttcaaactccccaaccaggaacaaatgacgaaaatgaacatgttgaagaagatgggtacattaaacagaaggaaattgattcagaggatatctg

SEQ ID NO: 492633 - DNA, 120 bp, Artificial Sequence
  ENSG00000163012_4 (sequence is synthesized)
ctctatttgtcaagagctacttttagagaaaaagcttcctgtcaccttttgcaggtttggctgtggcaatagtattcatataaaatgcatgaagatcttagctaattatcagagtacatc

SEQ ID NO: 492634 - DNA, 120 bp, Artificial Sequence
  ENSG00000163012_5 (sequence is synthesized)
aaacacttccatgttgaaatgtcctctgtgcaggaaagagtttgcaccattaaaactgattttggaggaattcaaaaactctagcaaactagtagctgcagcagaaaaagagagactgga

SEQ ID NO: 492635 - DNA, 120 bp, Artificial Sequence
  ENSG00000163012_6 (sequence is synthesized)
caaacaccttgggattccctgtaataactgcaaacagtttccaattgaggggaagtgttataagtgtaccgaatgcatagaatatcacttatgccaggaatgttttgatagctgctgcca

SEQ ID NO: 492636 - DNA, 120 bp, Artificial Sequence
  ENSG00000163012_7 (sequence is synthesized)
tctttcccacacgtttacatttcgtgagaaaagaaaccaaaaatggagatcactagaaaaaagagcagatgaagttgtaaaatacatagatactaaaaatgagattgaagaaaagatgtc

SEQ ID NO: 492637 - DNA, 120 bp, Artificial Sequence
  ENSG00000163012_8 (sequence is synthesized)
acattttcaagaaaagcaaggccaagtttacacaccaaaacacattgtaagatcactgcctctccaactgattactaagaatagtaagctgcttgctccaggctaccagtgtctactttg

SEQ ID NO: 492638 - DNA, 120 bp, Artificial Sequence
  ENSG00000163012_9 (sequence is synthesized)
tttgaaggcatttcatcttggtcaacatacaagattgctaccatgtactcacaagtttcacaggaagtgtattgacaactggttattccacaagtgcaattcatgccctattgatggaca

SEQ ID NO: 492639 - DNA, 120 bp, Artificial Sequence
  ENSG00000163012_10 (sequence is synthesized)
acatcagtctgtttcaaacagagacatcattcatctatcaaagcagaaagaaccagatctttttattcctggtactggattagtcttaaaacaaaatagacttggaattttacctagcat

SEQ ID NO: 492640 - DNA, 120 bp, Artificial Sequence
  ENSG00000163012_11 (sequence is synthesized)
acctcagtgtaattttgatgaattgaatacacctcaaagcccaaaagatgcctatgaaaatacaacaatagataatctatgctctatcaaattagataattcaaattcaaaaaaattaac

SEQ ID NO: 492641 - DNA, 120 bp, Artificial Sequence
  ENSG00000163012_12 (sequence is synthesized)
ctatgattataaaattagccaacattttcccaggtatcttcaagatttacccactgtgtcatttgggaaaataccatctcaaacactgcttcctcctattgttcataagaatattgtgtg

SEQ ID NO: 492642 - DNA, 120 bp, Artificial Sequence
  ENSG00000163012_13 (sequence is synthesized)
tcccactgcaatggaaagtccatgcatcagtggaaaatttcacactagtctaagccggatgaccaaaggctgtaaatgtaataaccacaacctaaagaagactcctgccactaaaataag

SEQ ID NO: 492643 - DNA, 120 bp, Artificial Sequence
  ENSG00000163012_14 (sequence is synthesized)
agaggacaacaagagatcaactttacttccagaggatttcaatcttattgtcaattggagcacagctaaacttagtttgtctaaaaggtatagtaactgtatgggggaaattacacgaaa

SEQ ID NO: 492644 - DNA, 120 bp, Artificial Sequence
  ENSG00000163012_15 (sequence is synthesized)
atgtagtcatctatcaagacagcctgtgtctcactctgtaaatacaaaaagtactgagctatctttaataatagaaggagttcaattgtgaaaaagtttactatctgaaaatatttgaat

SEQ ID NO: 492645 - DNA, 120 bp, Artificial Sequence
  ENSG00000163012_16 (sequence is synthesized)
gttgaatataaaaaaatgttttatatagaacataaaaagcacacatagtcttgacaaatgtatataaaattctctgttggaatttgcctacttacctataaacagctcactacacttaaa

SEQ ID NO: 492646 - DNA, 120 bp, Artificial Sequence
  ENSG00000163012_17 (sequence is synthesized)
ggaaatgattctattacttatatgacttacagcattaggtgtcttcatgaatatattcaggatgttataaataatgaataatttttagagcctttatcttattttactctgattttagaa

SEQ ID NO: 492647 - DNA, 120 bp, Artificial Sequence
  ENSG00000163012_18 (sequence is synthesized)
atgttttacttaaattaaggaaatagatttttcctactttgagtcactgttttcaaatatttttcacggtagcacataacatgcagggattactccccggtacttctgtattttttgcat

SEQ ID NO: 492648 - DNA, 120 bp, Artificial Sequence
  ENSG00000163012_19 (sequence is synthesized)
ttttcttgcactagtaattaccacaaacctataaaaaaaaaccttaaaaaactccataaaggagttttcttatacataaaatgaaaataaaatgaaatactatcagctatgtcacattta

SEQ ID NO: 492649 - DNA, 120 bp, Artificial Sequence
  ENSG00000163012_20 (sequence is synthesized)
ctcacccccgaaagcgccttcccacgagtgttccagactctaaaatacgtgaaattacagaaggaaatagtatttattagaagtttcttttttggaggttaagaccaaactgcaactctt

SEQ ID NO: 492650 - DNA, 120 bp, Artificial Sequence
  ENSG00000163012_21 (sequence is synthesized)
gtaaaagatgatggctcttgatctttaggcttgaaaatgtttttctaggaaatcctcacgtttgtaactgttccacatttccgaaaggaggggaactttgtaagcatatctgctgggtct

SEQ ID NO: 492651 - DNA, 120 bp, Artificial Sequence
  ENSG00000163013_0 (sequence is synthesized)
atggcctcgctggacctgccgtaccgctgcccccgctgcggggagcacaagcgcttccggagcctgtcgtcgctgcgcgcgcacctggagtacagccacacctacgagacgctctacatc

SEQ ID NO: 492652 - DNA, 120 bp, Artificial Sequence
  ENSG00000163013_1 (sequence is synthesized)
acgctctacatcctctccaagaccaacagcatctgcgacggcgccgccgccgccgcggccgccgccgccgctgcctcggggttcccgctggctcccgagcccgccgccctgctggccgtg

SEQ ID NO: 492653 - DNA, 120 bp, Artificial Sequence
  ENSG00000163013_2 (sequence is synthesized)
cgagaggtcttcgagagcacttccttccagggcaaggagcaggcggccgggccgtcgcccgcggcgccgcacctgctgcaccaccaccatcaccacgctcccctcgcccacttccccggc

SEQ ID NO: 492654 - DNA, 120 bp, Artificial Sequence
  ENSG00000163013_3 (sequence is synthesized)
gacctggtgcccgctagcctgccctgtgaggagttggccgagccgggccttgtgcccgccgcagcagcgcgctatgcgctgcgcgagatcgagatcccgctgggggagctgttcgcccgc

SEQ ID NO: 492655 - DNA, 120 bp, Artificial Sequence
  ENSG00000163013_4 (sequence is synthesized)
aagtccgtggcgtcctcggcgtgctcgacgccgccgcctggccccggccccggcccttgccccgggcctgcctccgcttcgcccgcgtccccctcacccgctgatgtggcctacgaagag

SEQ ID NO: 492656 - DNA, 120 bp, Artificial Sequence
  ENSG00000163013_5 (sequence is synthesized)
ggcctggcgcgcctcaagatccgcgcgctggagaagctggaggtggaccggcggctggagcggctgagcgaggaggtggagcagaagatcgcgggccaggtgggccggctgcaggccgag

SEQ ID NO: 492657 - DNA, 120 bp, Artificial Sequence
  ENSG00000163013_6 (sequence is synthesized)
ctggagcgcaaggcggccgaactggagactgcgcggcaggagagtgcgaggctcgggcgcgagaaggaggagctggaggagcgcgcgtctgagctctcccgccaggtggacgtgagcgta

SEQ ID NO: 492658 - DNA, 120 bp, Artificial Sequence
  ENSG00000163013_7 (sequence is synthesized)
gagctgctggcctcactcaagcaggacctggtgcacaaggaacaggagctgagccgcaagcagcaggaggtggtgcagatcgaccagttcctgaaggagacggcggcgcgggaggccagc

SEQ ID NO: 492659 - DNA, 120 bp, Artificial Sequence
  ENSG00000163013_8 (sequence is synthesized)
gccaagctgcggctgcagcagttcattgaggagctccttgagcgggctgaccgtgccgagcggcagctgcaggtcatcagcagcagctgtggcagcacgcccagcgccagcctgggccgt

SEQ ID NO: 492660 - DNA, 120 bp, Artificial Sequence
  ENSG00000163013_9 (sequence is synthesized)
ggaggtgggggcggtggtgctggacccaatgcccggggcccaggcagaatgcgagaacaccacgtgggcccggccgtgcctaacacatatgcagtgtcacggcatggctcctctccgagc

SEQ ID NO: 492661 - DNA, 120 bp, Artificial Sequence
  ENSG00000163013_10 (sequence is synthesized)
acaggggcctccagccgtgtgccagccgcatcccagagctcaggctgctatgacagtgacagtctggagctgcccaggccagaggagggggcccctgaggacagtggccctgggggcttg

SEQ ID NO: 492662 - DNA, 120 bp, Artificial Sequence
  ENSG00000163013_11 (sequence is synthesized)
ggcacacgggcccaggctgccaacgggggctcagagcggtcccagccccctcgcagctcaggcctgcggcgccaggccatccagaactggcagcgcagaccccgccgacacagcactgag

SEQ ID NO: 492663 - DNA, 120 bp, Artificial Sequence
  ENSG00000163013_12 (sequence is synthesized)
ggggaagagggtgatgtctccgacgttggctcccgaaccactgagtcagaggctgagggcccgttggatgcgccccgccccgggcctgctatggctgggccattgagcagctgccggctc

SEQ ID NO: 492664 - DNA, 120 bp, Artificial Sequence
  ENSG00000163013_13 (sequence is synthesized)
tcagcccgccccgagggaggcagtgggcggggtcggcgagcagagagggtcagcccctcacgctccaatgaggtcatcagcccagagatcctgaagatgcgagctgccctcttctgcatc

SEQ ID NO: 492665 - DNA, 120 bp, Artificial Sequence
  ENSG00000163013_14 (sequence is synthesized)
ttcacctacctggacacgcgcacactgctgcatgctgccgaggtctgccgggactggcgcttcgtggcccgccaccccgcagtctggacaagggtgctgcttgagaatgcccgtgtctgc

SEQ ID NO: 492666 - DNA, 120 bp, Artificial Sequence
  ENSG00000163013_15 (sequence is synthesized)
tccaagttcctggcaatgctggctcagtggtgcacccaggcccactctctgacgctgcagaacttgaagccccggcagcggggaaagaaggagagcaaggaggagtatgcccggagcacc

SEQ ID NO: 492667 - DNA, 120 bp, Artificial Sequence
  ENSG00000163013_16 (sequence is synthesized)
cggggctgcctggaagctgggctggagtccctgctgaaggcagctggggggaacctgctgatcctgcgcatctcccactgtccaaacatcctcaccgaccgctcgctctggctggccagc

SEQ ID NO: 492668 - DNA, 120 bp, Artificial Sequence
  ENSG00000163013_17 (sequence is synthesized)
tgctactgccgtgccctgcaggctgtcacgtacaggagtgccacagaccccgtgggccatgaggtcatttgggccctgggcgcaggctgcagagagatcgtctccctccaagtggcacca

SEQ ID NO: 492669 - DNA, 120 bp, Artificial Sequence
  ENSG00000163013_18 (sequence is synthesized)
cttcacccctgccagcagcccacacgcttcagtaaccgctgcctgcagatgattggtcgctgttggccccacctgcgggccctgggggtcgggggtgccggctgtggggtgcagggcctg

SEQ ID NO: 492670 - DNA, 120 bp, Artificial Sequence
  ENSG00000163013_19 (sequence is synthesized)
gcatcactcgcgagaaactgcatgcggctgcaggtcctggagcttgaccacgtgtcagagatcacccaggaggtggcagcagaggtctgccgggaaggcctgaagggactggagatgctg

SEQ ID NO: 492671 - DNA, 120 bp, Artificial Sequence
  ENSG00000163013_20 (sequence is synthesized)
gtgctcacggcgactcccgtcacccctaaggccctactgcacttcaacagcatctgccggaacctcaagtccattgtggtccagattgggattgcggattatttcaaagagcccagcagc

SEQ ID NO: 492672 - DNA, 120 bp, Artificial Sequence
  ENSG00000163013_21 (sequence is synthesized)
cctgaggcccagaagctgtttgaggacatggtgacaaaactccaggctctgcgacggaggcccggcttctctaagattctgcacatcaaggtggaaggcggctgctaacccgggtagggg

SEQ ID NO: 492673 - DNA, 120 bp, Artificial Sequence
  ENSG00000163013_22 (sequence is synthesized)
gcggcagggcccctgccagccccacaccagggcactctctttggacctcagagggaccctggtttggactagacctttggaggccgagtgttatccctggcttctggagggggactgtca

SEQ ID NO: 492674 - DNA, 120 bp, Artificial Sequence
  ENSG00000163013_23 (sequence is synthesized)
agtctcctgtcctcctcctggagcagcagagcaacaggcctgacccagggcactgcctccccagtacaggggcttggacagaagctgccctccgacccccaccctaccccggctggagta

SEQ ID NO: 492675 - DNA, 120 bp, Artificial Sequence
  ENSG00000163013_24 (sequence is synthesized)
gcctctggcacagccagtgaggagctgtcaccaccagcgcctggtgtcatcacctggaggatctgcaataaccacccagtggctcctcagctgttctggctggcctctccttcctgaggc

SEQ ID NO: 492676 - DNA, 120 bp, Artificial Sequence
  ENSG00000163013_25 (sequence is synthesized)
ccagcctcctggtcaggagcatctggggccccaagccaatgggggctccacaaggcagctcagacttggcaaggagggctcttctcctcaaccttgctgcagccttctgggggcacccct

SEQ ID NO: 492677 - DNA, 120 bp, Artificial Sequence
  ENSG00000163013_26 (sequence is synthesized)
tcagacagcctgcccaggctgtggatccacatttcctgggggtaccacagccagacctaggggcctgggcacgtggtcagccaaaagctgggggcagcagtacagtggggtagtgggggt

SEQ ID NO: 492678 - DNA, 120 bp, Artificial Sequence
  ENSG00000163013_27 (sequence is synthesized)
gggtttggaaaggaaacagtcacccagaacttctccccaggatgagaccacccttccaaggtgggggattgccagggggagaaaacttatttattgctgtaagacaggacccctcctccc

SEQ ID NO: 492679 - DNA, 120 bp, Artificial Sequence
  ENSG00000163013_28 (sequence is synthesized)
agagggtcaaggtcccagccccaggcagccctgtcacagtgagaagtagttcctgtccttaaggaatttccttctaatccaggtgcttgggcaggaacccgatggccttcgggtcaccaa

SEQ ID NO: 492680 - DNA, 120 bp, Artificial Sequence
  ENSG00000163013_29 (sequence is synthesized)
ggctgtctgggagggaggcacagggccgccctctgtgctgaggccgtggaggaagccaggaggagggtggcttgctttgcttccttgtctaattagcttgcttgaagatgtggccttggc

SEQ ID NO: 492681 - DNA, 120 bp, Artificial Sequence
  ENSG00000163013_30 (sequence is synthesized)
agggagccagacccatggggccaaggaagaggaagagcatcctcaatagactcactcccccttccttggtctccacgggccccgtggactgagggctgcattggggtcttctgcctaggg

SEQ ID NO: 492682 - DNA, 120 bp, Artificial Sequence
  ENSG00000163013_31 (sequence is synthesized)
gaagtgctggacctgagctggagccacttggcttagaagccacaggattcacttttcactggcctttgcagtccccaaaggatcaggtctcagaaccaaggctccaaaggctgaggtctc

SEQ ID NO: 492683 - DNA, 120 bp, Artificial Sequence
  ENSG00000163013_32 (sequence is synthesized)
cccagttcctcctctcagaactcccacagtagctcagaggccgggggtcctgccaactttcatttggaaagttctttcgaacatctaaactagatctatcttagggtttctttctctcct

SEQ ID NO: 492684 - DNA, 120 bp, Artificial Sequence
  ENSG00000163013_33 (sequence is synthesized)
agataggatcagctcccagccctagccattaggctgctggtcctggcgggggatggggtcccctcgttacccagtccttcccagggacccaacttcctaacacaacctggcttggacatg

SEQ ID NO: 492685 - DNA, 120 bp, Artificial Sequence
  ENSG00000163013_34 (sequence is synthesized)
aagaccctcccccaggttaccttgtaaagagtcctccagagctgggatcccatgggcgcagcagcacacccagctcccatggcgtcactccctagctctgtcccagcttttgctatcatt

SEQ ID NO: 492686 - DNA, 120 bp, Artificial Sequence
  ENSG00000163013_35 (sequence is synthesized)
gctgacttttcctcctgtggctcattctgtccctgccctttgaaaacctaaaataccaagggtgtcatgctggcaactccctgcccagtcctgcacaaagccttggctgtgtgtggcacc

SEQ ID NO: 492687 - DNA, 120 bp, Artificial Sequence
  ENSG00000163013_36 (sequence is synthesized)
ccttgcctcctaccccagagcagctggctccattggcttctccctgcaccagccctgtcctcaggggtcaggaaaaagcagcacagctttctttcctctcctccagaggcctggaaggga

SEQ ID NO: 492688 - DNA, 120 bp, Artificial Sequence
  ENSG00000163013_37 (sequence is synthesized)
ggtggaggtccagtaagggcctggctgccttggatttcttggtcctgccttgccaactgcaccctgtagctcctgctccctgtgaccccagaaccagaggtgctgccttccctgtctcct

SEQ ID NO: 492689 - DNA, 120 bp, Artificial Sequence
  ENSG00000163013_38 (sequence is synthesized)
agacaaagcacaaagggatgccctgcttggcttgagcctgcccaactgaaggattttctctgccccagggaccttccatccctgaatacaaggctctaggcaacttctctctgggtggta

SEQ ID NO: 492690 - DNA, 120 bp, Artificial Sequence
  ENSG00000163013_39 (sequence is synthesized)
cacactagaatgcctggcattagccctagaaaggaggttggggtgtatgggtagtgagctagggtgggagaaaggtggtgctgaaaggacagatgctagttgtagtttcactcactcatt

SEQ ID NO: 492691 - DNA, 120 bp, Artificial Sequence
  ENSG00000163013_40 (sequence is synthesized)
cattcattagtgcaacagtactgagcaccacctgcactagaggcagaggggtgaacaagatacccttctgcctggggggacgtccacttcccatgggtttggctatttccaggaaagccc

SEQ ID NO: 492692 - DNA, 120 bp, Artificial Sequence
  ENSG00000163013_41 (sequence is synthesized)
ctcagtcctccaccctgttctggctgtgtgtgaaggatgtgtgtgagcaggcccaatcctttgcagcaagaatgagaggtcagagtattccattgcacacgcaccctggggctgacagac

SEQ ID NO: 492693 - DNA, 120 bp, Artificial Sequence
  ENSG00000163013_42 (sequence is synthesized)
ttgtgccccctagccttcatgcatgcccaagcactggcagctttgcagcccctgccccaccagccccttgacgctcttcttttgttctctcctcggggatgagctctgctgctgagtagg

SEQ ID NO: 492694 - DNA, 120 bp, Artificial Sequence
  ENSG00000163013_43 (sequence is synthesized)
gagcttttgcttgctgggaggctctatgcatggatttttttggtgaccatacagctagggctgaggatgggaacagggacagagggcctggctatccctagaagcacttcatccatcttt

SEQ ID NO: 492695 - DNA, 120 bp, Artificial Sequence
  ENSG00000163013_44 (sequence is synthesized)
acccacccaaacgggatcccttcacatctcatacccagtaagatgcaagaaaggaatatctgagagcaagcagccctgctccaggggccccaggtatgtgtagaggcccagtgggggtgg

SEQ ID NO: 492696 - DNA, 120 bp, Artificial Sequence
  ENSG00000163013_45 (sequence is synthesized)
ccacttggtgtttctaccaccccctgccatccagtctggccccagtacctacctgggaggttggtgtacttggcttaagtacttcatgctttattcaggctgcttccccacagcaccggc

SEQ ID NO: 492697 - DNA, 120 bp, Artificial Sequence
  ENSG00000163013_46 (sequence is synthesized)
aggaaatgaaggtgcacttatatgcatccctgcaggaataaagagtgggtggcctgcccagcccagcaccacagcctttccccagccaggagagaccacctaaggatcaaggcagctcct

SEQ ID NO: 492698 - DNA, 120 bp, Artificial Sequence
  ENSG00000163013_47 (sequence is synthesized)
gttttcttggttctgtgacactcgagtctgagccagcccctcaggaattgcctcaaaagagaaaaacaaaaaaaagtcctccttcccaaggcctgctactccaaggtttggctccatccc

SEQ ID NO: 492699 - DNA, 120 bp, Artificial Sequence
  ENSG00000163013_48 (sequence is synthesized)
ttgcctttgggtcctgcctatttccccactcctggtctcttatctttggggccaccagtggggagtcacccgggccccaatccctctaaggcgctaagttgaaggaggccttcccagagt

SEQ ID NO: 492700 - DNA, 120 bp, Artificial Sequence
  ENSG00000163013_49 (sequence is synthesized)
gactattggtgccaaagtcccagttcctgttggacttggggtaaaaacaggagatggtgagtgggtgtaaggcccaaatgcccagagaagttaactcgaacccatgggacctgtcccagc

SEQ ID NO: 492701 - DNA, 120 bp, Artificial Sequence
  ENSG00000163013_50 (sequence is synthesized)
ctgtcagtccctgatgagtgtaacttccttcccctgggggcctggcccttctctccaacccagtggccatgctttctcacccagccttgtgcccggcctgcatttctgtatatattgctg

SEQ ID NO: 492702 - DNA, 120 bp, Artificial Sequence
  ENSG00000163013_51 (sequence is synthesized)
tgtattgtgtgtatgtatgtattcctggacaagtgtgttcatctgcagcccttgcctgaggataaggtttaggattgggtaaagatcagaataccagggccagctaaggcaacgactccc

SEQ ID NO: 492703 - DNA, 120 bp, Artificial Sequence
  ENSG00000163013_52 (sequence is synthesized)
tccccaaacccttgggacctcagccagtcccaaggctgccctgacaatcaggcaggctccccaccgtgaggccaagcctcctctgccactgccagcatggcccaagggaggcttggcctt

SEQ ID NO: 492704 - DNA, 120 bp, Artificial Sequence
  ENSG00000163013_53 (sequence is synthesized)
gggcttgccagcctcagctctgccctgacaagggtcttgtatccagggcagaggcctgaggtgacccaggcttgctttgtggctgatgccagcaggcttggttctagtgggcaccactgg

SEQ ID NO: 492705 - DNA, 120 bp, Artificial Sequence
  ENSG00000163013_54 (sequence is synthesized)
tgggcaacctccataactggcccttaggccctaccttcctacacagctaggctataatgggcctgagtgagagggtagcttccccagccccaagcacaggcagaggggtggagagcaatt

SEQ ID NO: 492706 - DNA, 120 bp, Artificial Sequence
  ENSG00000163013_55 (sequence is synthesized)
tttggttttatttttgtttctgaagtggtgcctgtacctccagcccccagggggccttccctggccacacttctctgccccacccaggcatcgccatcccagcactttgctccatgtcac

SEQ ID NO: 492707 - DNA, 120 bp, Artificial Sequence
  ENSG00000163013_56 (sequence is synthesized)
ccgtaagatgccctttgctgaatgtacctgagtgtatgtatttaaaaggactcacatgggcatcagagaatttatggctctgtatccaataaaaaagatggtgaaactggtctatctgcc

SEQ ID NO: 492708 - DNA, 120 bp, Artificial Sequence
  ENSG00000163013_57 (sequence is synthesized)
ggggcgctagccgcggcggccacccaaggctgcggaggggaacgagatccgaggccccaaggcggccctgcgtctggaccgggcacgcgggggctcttctgcgtccccagccctgggccg

SEQ ID NO: 492709 - DNA, 80 bp, Artificial Sequence
  ENSG00000163013_58 (sequence is synthesized)
ctgggcctggcctcgccgcggggtggaggagcctcctcgccccaggccgcgggcgccctgagccttcctgaccccgcagg

SEQ ID NO: 492710 - DNA, 120 bp, Artificial Sequence
  ENSG00000163013_59 (sequence is synthesized)
gcgccccctcctccccctcctcctcctcctcctcctccatccttcctcccgccgggttcgtgcgcccctcccgctgcgactggctgggaggttcggccgcccccgccccgagagggaggc

SEQ ID NO: 492711 - DNA, 120 bp, Artificial Sequence
  ENSG00000163013_60 (sequence is synthesized)
gaccataagcagacaccgcaggcagctgtgccagtgtctccccgcactggccaggctctcctccagagggtgggtgggcaggcaggctgaggctctggggtaagagactgctctgggccc

SEQ ID NO: 492712 - DNA, 120 bp, Artificial Sequence
  ENSG00000163013_61 (sequence is synthesized)
caacatcctgacatttttctacaaatcccctaatgttccagccatggtgtctcctcccaaaaggagaaaggatggcaccagcagctctggccttctccatcagcttagaaacctgatccc

SEQ ID NO: 492713 - DNA, 120 bp, Artificial Sequence
  ENSG00000163013_62 (sequence is synthesized)
aaagacaatgctttccctcagtcattccagaacagtcctggggctcactggctcaactttggtgctctatgtttaccccacgactgatttgccaggtctatgtcatatccccaagaccat

SEQ ID NO: 492714 - DNA, 120 bp, Artificial Sequence
  ENSG00000163013_63 (sequence is synthesized)
gtggactgagaaagtggggaaggatggttccctatggtcaaagcagggtgctgttaccaggaggaggactggatgctgggctggcaaaaggaacagacatccacccatacatcctgtgga

SEQ ID NO: 492715 - DNA, 120 bp, Artificial Sequence
  ENSG00000163017_0 (sequence is synthesized)
acaccagccctcagtcactgggagaagaacctctcataccctcggtgctccagtccccagctcactcagccacacacaccatgtgtgaagaggagaccaccgcgctcgtgtgtgacaatg

SEQ ID NO: 492716 - DNA, 120 bp, Artificial Sequence
  ENSG00000163017_1 (sequence is synthesized)
gctctggcctgtgcaaggcaggcttcgcaggagatgatgccccccgggctgtcttcccctccattgtgggccgccctcgccaccagggtgtgatggtgggaatgggccagaaagacagct

SEQ ID NO: 492717 - DNA, 120 bp, Artificial Sequence
  ENSG00000163017_2 (sequence is synthesized)
ggccagaaagacagctatgtgggggatgaggctcagagcaagcgagggatcctaactctcaaataccccattgaacacggcatcatcaccaactgggatgacatggagaagatctggcac

SEQ ID NO: 492718 - DNA, 120 bp, Artificial Sequence
  ENSG00000163017_3 (sequence is synthesized)
agctgcgtgtagcacctgaagagcaccccaccctgctcacagaggctcccctaaatcccaaggccaacagggaaaagatgacccagatcatgtttgaaaccttcaatgtccctgccatgt

SEQ ID NO: 492719 - DNA, 120 bp, Artificial Sequence
  ENSG00000163017_4 (sequence is synthesized)
acgtcgccattcaagctgtgctctccctctatgcctctggccgcacgacaggcatcgtcctggattcaggtgatggcgtcacccacaatgtccccatctatgaaggctatgccctgcccc

SEQ ID NO: 492720 - DNA, 120 bp, Artificial Sequence
  ENSG00000163017_5 (sequence is synthesized)
atgccatcatgcgcctggacttggctggccgtgacctcacggactacctcatgaagatcctcacagagagaggctattcctttgtgaccacagctgagagagaaattgtgcgagacatca

SEQ ID NO: 492721 - DNA, 120 bp, Artificial Sequence
  ENSG00000163017_6 (sequence is synthesized)
ttcctccctggagaagagctatgagctgccagatgggcaggttatcaccattggcaatgagcgcttccgctgccctgagaccctcttccagccttcctttattggcatggagtccgctgg

SEQ ID NO: 492722 - DNA, 120 bp, Artificial Sequence
  ENSG00000163017_7 (sequence is synthesized)
aattcatgagacaacctacaattccatcatgaagtgtgacattgacatccgtaaggacttatatgccaacaatgtcctctctgggggcaccaccatgtaccctggcattgctgacaggat

SEQ ID NO: 492723 - DNA, 120 bp, Artificial Sequence
  ENSG00000163017_8 (sequence is synthesized)
gcagaaggagatcacagccctggcccccagcaccatgaagatcaagattattgctcccccagagcggaagtactcagtctggatcgggggctctatcctggcctctctctccaccttcca

SEQ ID NO: 492724 - DNA, 120 bp, Artificial Sequence
  ENSG00000163017_9 (sequence is synthesized)
gcagatgtggatcagcaagcctgagtatgatgaggcagggccctccattgtccacaggaagtgcttctaaagtcagaacaggttctccaaggatcccctcgagactactctgttaccagt

SEQ ID NO: 492725 - DNA, 120 bp, Artificial Sequence
  ENSG00000163017_10 (sequence is synthesized)
catgaaacattaaaacctacaagccttacttctctgtgtggggctcttttttcctgggctatgtctcatacacagtgctaaggacttttcacacattacttttaatccatgcaatagtgc

SEQ ID NO: 492726 - DNA, 120 bp, Artificial Sequence
  ENSG00000163017_11 (sequence is synthesized)
tgtaaggtaggtgctatcattatacccatattacagatgaggaaattgaggctcagagaagtcaaggacttgcgaagatcacacagattccagattaaaattcaagtatctgactgcaaa

SEQ ID NO: 492727 - DNA, 120 bp, Artificial Sequence
  ENSG00000163017_12 (sequence is synthesized)
acaccagccctcagtcactgggagaagaacctctcataccctcggggaataaaagcttcattcctgagtcagtgagagcttcaatgaagcccagatgtcattcgtgctgaaagaaccaga

SEQ ID NO: 492728 - DNA, 120 bp, Artificial Sequence
  ENSG00000163017_13 (sequence is synthesized)
acaactctctgctccctgccaagcatgaagcggttgtgaccccaggaaaccacagtgactttgactctggttcagctgacatgctcgagtctagccacaaattaccagaaagcagctgag

SEQ ID NO: 492729 - DNA, 120 bp, Artificial Sequence
  ENSG00000163017_14 (sequence is synthesized)
gaaagtttagaatttctcctggcagagatggtccacgagtctggctccagggtgaaccccttcttcccagagcagcacggggccctttggaggctcgactccgccagccctcccactgcc

SEQ ID NO: 492730 - DNA, 120 bp, Artificial Sequence
  ENSG00000163017_15 (sequence is synthesized)
ttccccctgccttccccaccctcacttcggttgagttttgccttcaaaatagcagactccaagccacctgaagggctgcagaacagcgttgttgacagcttcaagtcgccttgtggcttc

SEQ ID NO: 492731 - DNA, 120 bp, Artificial Sequence
  ENSG00000163017_16 (sequence is synthesized)
tctgagctgctgctgtgctttggaaacaaaattccaggctctccctctttctgtgtgtgggaaacaccggagagagtttggggagggagacaaaagggcccattgaaaacccagacaggc

SEQ ID NO: 492732 - DNA, 120 bp, Artificial Sequence
  ENSG00000163017_17 (sequence is synthesized)
gttaggtgtgcctcaaccctgaagcaggtccctcagtctgcagatatttagagatatttaaaggaaaaccaggaaggagccaagagagaatgaagcctaaggtgtcctgagaccctcaga

SEQ ID NO: 492733 - DNA, 120 bp, Artificial Sequence
  ENSG00000163017_18 (sequence is synthesized)
aagccagaaagcaatgaacacttgagtgatacaatgtgccttgcatcactcagtgcacaaaggcaggggagagactgtaggagagtgaagaggagggaaggtcaaatggaaataatgaac

SEQ ID NO: 492734 - DNA, 120 bp, Artificial Sequence
  ENSG00000163017_19 (sequence is synthesized)
acatagaaaatactggttccaggtctgagtcctacctggggccctgttgagaaggagtataccctttaaatgtcaatcagaaatttccagggctgaccattctcctctccagatccatcc

SEQ ID NO: 492735 - DNA, 120 bp, Artificial Sequence
  ENSG00000163017_20 (sequence is synthesized)
catcctgtgtaacatggtgccacactctcccagcatgggaatgtcaatgagaattttccagccattgggagtctgccaggctcatatggcttttgtctccactagatctggcaccactcc

SEQ ID NO: 492736 - DNA, 120 bp, Artificial Sequence
  ENSG00000163017_21 (sequence is synthesized)
gtagacttccccttaatgagcctgctttaatgatcacccatcatcatgaccctcgtattcataggccactgtgctctgtcaactctccctctaaaatgcttctcacttctgtctttcctt

SEQ ID NO: 492737 - DNA, 120 bp, Artificial Sequence
  ENSG00000163017_22 (sequence is synthesized)
tcttttcagccccacgaccatttctccaacctaggctgccaacatctctccctggactattgcaatggcttcctggctgatttcttggtctcttgccctcattcaccgaattaattctct

SEQ ID NO: 492738 - DNA, 120 bp, Artificial Sequence
  ENSG00000163017_23 (sequence is synthesized)
ccctcattcaccgaattaattctctacactgctgcaaaactgatctttctaaacacaggtcagctcatgtcactcacctcctcagaaatcttcagtagctcttcattaaccaacaggggg

SEQ ID NO: 492739 - DNA, 120 bp, Artificial Sequence
  ENSG00000163017_24 (sequence is synthesized)
ttcctaactccccgtcttggcattggaggacctttccctgcctgatccccgcgatcatcttttcctgcaatatttactcaggccagtgctcaccccttctttaaaatgctggtgctggct

SEQ ID NO: 492740 - DNA, 120 bp, Artificial Sequence
  ENSG00000163017_25 (sequence is synthesized)
caagagaggcaaacagccatctctctcattcttatcttccctgtcaagacttcacataggtggactgatgctagactatgatgatgagtctccagtgaaagtttctaagtagaactctct

SEQ ID NO: 492741 - DNA, 120 bp, Artificial Sequence
  ENSG00000163017_26 (sequence is synthesized)
cagggtttctagaagcatttttgtttaagaaaatattgtggggggagcgggatttttaaatggtggagctcatggtaaacaaaattatgtgtgcaaaatgttaatagagcctttctaata

SEQ ID NO: 492742 - DNA, 120 bp, Artificial Sequence
  ENSG00000163017_27 (sequence is synthesized)
gtgtgtgtgtgtgtgtctgtgcgtgtgtgtgtgtgtgtgtctgtgcatgcacatgcgtgtgtgcacgccaggtgtagggagttcttttctgattaactgatagagcaggaccctttaaat

SEQ ID NO: 492743 - DNA, 120 bp, Artificial Sequence
  ENSG00000163017_28 (sequence is synthesized)
agaaatatccagggccaaaaccaacatacatcaggcacacaatgacactactatgtctggcttacatttggggggttgccaggtttggaaaagttaatttatatgggattgaacaagcct

SEQ ID NO: 492744 - DNA, 120 bp, Artificial Sequence
  ENSG00000163026_0 (sequence is synthesized)
agaacttcttatgtgcggcggcgtgatgttgggcggccacagagagattggtgtttttgtgaggcagtgagacctaaggtaacctttatcaaaaggatggagttgggaaaaggaaaacta

SEQ ID NO: 492745 - DNA, 120 bp, Artificial Sequence
  ENSG00000163026_1 (sequence is synthesized)
ctcaggactggactgaatgcgttgcatcaagcagtgcatccgatccatggccttgcctggaccgatgggaatcaagttgtcctaactgatttgcggcttcacagtggagaggtcaagttt

SEQ ID NO: 492746 - DNA, 120 bp, Artificial Sequence
  ENSG00000163026_2 (sequence is synthesized)
ggggactccaaagtcattggacagtttgaatgtgtctgtgggttgtcctgggccccacctgttgcagatgatacacctgttctactcgctgtccagcatgagaagcatgtcactgtgtgg

SEQ ID NO: 492747 - DNA, 120 bp, Artificial Sequence
  ENSG00000163026_3 (sequence is synthesized)
cagctgtgtcccagccctatggagtcaagcaaatggctgacgtctcagacttgtgagattagaggatcactacctatccttccccagggctgtgtgtggcacccaaaatgtgctattctg

SEQ ID NO: 492748 - DNA, 120 bp, Artificial Sequence
  ENSG00000163026_4 (sequence is synthesized)
actgtgttgactgctcaggatgtctccattttccctaatgttcactctgatgattcccaggtaaaggcagacatcaacacccagggccgcattcactgtgcatgttggacccaggatggc

SEQ ID NO: 492749 - DNA, 120 bp, Artificial Sequence
  ENSG00000163026_5 (sequence is synthesized)
ctgaggctggtggtggcagtaggcagcagcctgcattcttatatttgggacagcgctcagaagactcttcacaggtgctcctcctgcctggtgtttgatgtggacagccacgtctgctcc

SEQ ID NO: 492750 - DNA, 120 bp, Artificial Sequence
  ENSG00000163026_6 (sequence is synthesized)
atcacagcaactgtggactcacaggttgctatagctactgagcttccattggataagatctgtggcttaaatgcatctgaaacctttaatatcccacctaacagtaaagacatgactccg

SEQ ID NO: 492751 - DNA, 120 bp, Artificial Sequence
  ENSG00000163026_7 (sequence is synthesized)
tatgctttaccagttattggtgaagtacgctctatggataaagaggcaactgattctgaaacaaattctgaagtatcagtttcttcttcctatttagaacctctggatctaactcacata

SEQ ID NO: 492752 - DNA, 120 bp, Artificial Sequence
  ENSG00000163026_8 (sequence is synthesized)
catttcaatcaacataagtctgagggtaattctcttatttgtctaagaaaaaaggactacttgacaggaactggccaagattcttcacatttggtccttgtgacctttaagaaggcagtt

SEQ ID NO: 492753 - DNA, 120 bp, Artificial Sequence
  ENSG00000163026_9 (sequence is synthesized)
accatgacgagaaaagtcactattccaggcattctggttcctgatctgatagcatttaatcttaaagcccacgtagtggcagtggcttccaacacttgtaatataattttgatctactct

SEQ ID NO: 492754 - DNA, 120 bp, Artificial Sequence
  ENSG00000163026_10 (sequence is synthesized)
gtcattccatcttcagtcccaaacatccagcaaattcgattagagaacactgaaagaccaaaagggatatgtttcttgacagaccaactattactaattttggtaggaaaacaaaaactc

SEQ ID NO: 492755 - DNA, 120 bp, Artificial Sequence
  ENSG00000163026_11 (sequence is synthesized)
actgatacaacatttcttccttcttcaaagtctgatcagtatgccattagcttgattgttagagaaataatgttggaagaagaaccttcaataacatcaggtgaaagccagactacctac

SEQ ID NO: 492756 - DNA, 120 bp, Artificial Sequence
  ENSG00000163026_12 (sequence is synthesized)
tctactttcagtgctccgttaaataaagcaaatagaaaaaagttaattgaaagtctttccccagatttttgtcaccaaaacaaagggctgttgctgacagttaataccagtagtcagaat

SEQ ID NO: 492757 - DNA, 120 bp, Artificial Sequence
  ENSG00000163026_13 (sequence is synthesized)
ggaaggcctggaagaacacttattaaagaaatccagagtcctctgtctagtatctgtgatggctccatagctctagatgctgagcctgttacccagccagcatcgctgcccagacacagc

SEQ ID NO: 492758 - DNA, 120 bp, Artificial Sequence
  ENSG00000163026_14 (sequence is synthesized)
agcacaccagaccacaccagcacactggagcctcctcgtttgcctcaaagaaagaacttacaaagtgaaaaggaaacttatcagctgtctaaggaagtggaaattttatctaggaacctg

SEQ ID NO: 492759 - DNA, 120 bp, Artificial Sequence
  ENSG00000163026_15 (sequence is synthesized)
gttgaaatgcaacggtgtctttctgaacttacaaaccgtctgcataatgggaagaaatcctcttcagtgtatccactctctcaagatcttccttatgttcacatcatttaccagaaacct

SEQ ID NO: 492760 - DNA, 120 bp, Artificial Sequence
  ENSG00000163026_16 (sequence is synthesized)
aggtcctgttgttgaaaaaagagcggtgcttctctgtgatggtaaactaaggctcagtacagttcagcagacttttggcctttctctcattgaaatgctacatgattcccactggattct

SEQ ID NO: 492761 - DNA, 120 bp, Artificial Sequence
  ENSG00000163026_17 (sequence is synthesized)
tctctctgctgacagtgagggctttatcccgttaaccttcacagccacacaggaaataatcataagagatggcagcctgtccaggtcagatgtcttcagagactctttttctcacagtcc

SEQ ID NO: 492762 - DNA, 120 bp, Artificial Sequence
  ENSG00000163026_18 (sequence is synthesized)
aggtgctgtttcttctcttaaagtctttacaggccttgctgcccccagtttagataccactggctgttgtaaccatgtagatggcatggcttgatatctgcagtgtccttgctgtgtagc

SEQ ID NO: 492763 - DNA, 120 bp, Artificial Sequence
  ENSG00000163026_19 (sequence is synthesized)
tcttcagatgagaccattacaaacaaggcctgcttgacactggacactcgccaatgagactcccactgcactcaggcgaagcgcttgccatggtcggctctcctggtttccccctgtttc

SEQ ID NO: 492764 - DNA, 120 bp, Artificial Sequence
  ENSG00000163026_20 (sequence is synthesized)
ccctgagctgaggctcgctgctgtgtagcagagctcagtctttattagatggctccgaaagtggtgtttatgtattcatgactgtgtggttttgactaagggcagaattctcagaacaaa

SEQ ID NO: 492765 - DNA, 120 bp, Artificial Sequence
  ENSG00000163026_21 (sequence is synthesized)
acaatattatggtgccatatggatggtgttttatggtttctctgaggctttgtgtcccttgtccaaagctgcattgaagctgtcttaggagcacttaaaagataccttggcattgttata

SEQ ID NO: 492766 - DNA, 120 bp, Artificial Sequence
  ENSG00000163026_22 (sequence is synthesized)
ggtctttttcttggcttcaagaggaggttgaggagtctgctggggggcatgtgctctagcatattaacctcaaaccagcaagaattagcagagctccaaggaggaccagagacccactgg

SEQ ID NO: 492767 - DNA, 120 bp, Artificial Sequence
  ENSG00000163026_23 (sequence is synthesized)
cttctgctctcaggaacaggaagtggctctgatgttgcctggacctcccagaatttaaaccaaaccctcttgcttccttaacaaattctggctgacgaaggtccaggtactcttaaaaac

SEQ ID NO: 492768 - DNA, 120 bp, Artificial Sequence
  ENSG00000163026_24 (sequence is synthesized)
tggccctgggaaaattttgaatgaaatttcaagggaatttgtcccctctgggttccacttgaggttgtgccgatgctgctaccacactgtcgagcccaggtaagtcctactgcaggattt

SEQ ID NO: 492769 - DNA, 120 bp, Artificial Sequence
  ENSG00000163026_25 (sequence is synthesized)
tgtgctgtggccactcatgagtgtccctgaaataactttttttttttttaaatccagttttgggatcacgcaactttcctatttttctcccagtagtcagctcccttagttaacttgtca

SEQ ID NO: 492770 - DNA, 120 bp, Artificial Sequence
  ENSG00000163026_26 (sequence is synthesized)
ctttaatttgatatttttattttctctccttttaagtcttagagaccagcagagaatctgtgagagaaagtatttcaggaagttagaaattcaaccgaatctgaggtagtcctaaaaagt

SEQ ID NO: 492771 - DNA, 120 bp, Artificial Sequence
  ENSG00000163026_27 (sequence is synthesized)
gccattttgtttcacttatgggctaaagtaccagcttagtcaggtaagagccctgacccacttcagatggtaacaccacttctcactgccttcagatggaatcacagatttcagtcacgg

SEQ ID NO: 492772 - DNA, 120 bp, Artificial Sequence
  ENSG00000163026_28 (sequence is synthesized)
cgcataacaaattgatcagtgagtggctaggcatctgcagataaattgtttcagccatagaagctccattagcacatatgcttccttttccccccttcctttaaaatcatctggaaagaa

SEQ ID NO: 492773 - DNA, 120 bp, Artificial Sequence
  ENSG00000163026_29 (sequence is synthesized)
actattttgtgcccttggggactcctgtctgtctgttacagtttaccaagatggagctgggttaggaaagaagtgagggcccattttgtggttcaagtgcactagacagctgctggggta

SEQ ID NO: 492774 - DNA, 120 bp, Artificial Sequence
  ENSG00000163026_30 (sequence is synthesized)
ggaagcacaggcaatgtctgtaatcagctgtgggagagcagtgactgagaacagtctgaggcctggctccacttggaagtatctggggtgcgatgaaatcacaattatcttgaagcctaa

SEQ ID NO: 492775 - DNA, 120 bp, Artificial Sequence
  ENSG00000163026_31 (sequence is synthesized)
agagggaactacaagactgttaactaagatcaatgtgggcacctaaaagggtatgttaaaatcaccatttctcaggtcaaaatactgtgaataagtcttcaataaaatcactaatggtta

SEQ ID NO: 492776 - DNA, 120 bp, Artificial Sequence
  ENSG00000163029_0 (sequence is synthesized)
ggagggcggggcgcaggcgcggttagtaccgcggtgggcgccggggctcccgggaatctaccttctcctgcggccggcacgcggttcccagggggccagcggcggtcagccgaggtcgag

SEQ ID NO: 492777 - DNA, 120 bp, Artificial Sequence
  ENSG00000163029_1 (sequence is synthesized)
acgcccgcagggtggccttagcggccggtcgtaccacggcagccccgccgatcaggttcctttgggagacttcgacttgttggcgacctgatggccaaaagaaaggaagaaaatttttcc

SEQ ID NO: 492778 - DNA, 120 bp, Artificial Sequence
  ENSG00000163029_2 (sequence is synthesized)
tctcctaaaaatgccaaaaggccaagacaagaagaattggaggattttgataaagatggtgacgaagacgaatgtaaaggtactactttgactgcagcagaagttggaataattgagagt

SEQ ID NO: 492779 - DNA, 120 bp, Artificial Sequence
  ENSG00000163029_3 (sequence is synthesized)
attcacctaaaaaacttcatgtgtcattcaatgcttggaccttttaagtttggttctaatgtcaactttgttgttggcaacaatggaagtgggaagagtgcagtactcacagctctcata

SEQ ID NO: 492780 - DNA, 120 bp, Artificial Sequence
  ENSG00000163029_4 (sequence is synthesized)
gtcggtcttggtggaagagcagttgctactaatagaggatcctctttaaaaggttttgtgaaagatggacagaactctgcagatatctcaataacattgaggaacagaggagatgatgcc

SEQ ID NO: 492781 - DNA, 120 bp, Artificial Sequence
  ENSG00000163029_5 (sequence is synthesized)
tttaaagccagtgtgtatggtaactctatacttatacagcaacacatcagcatagatggaagtcgatcttataaacttaaaagtgcaacaggctccgtggtttccacgaggaaagaagag

SEQ ID NO: 492782 - DNA, 120 bp, Artificial Sequence
  ENSG00000163029_6 (sequence is synthesized)
ctgattgcaattcttgatcattttaacatccaggtggataatccagtttctgttttaacacaagaaatgagcaagcagttcttacagtctaaaaatgaaggagacaaatacaaattcttc

SEQ ID NO: 492783 - DNA, 120 bp, Artificial Sequence
  ENSG00000163029_7 (sequence is synthesized)
atgaaagcaacgcaacttgaacagatgaaggaagattattcatacattatggaaacgaaagaaagaacaaaggagcagatacatcaaggagaagagcggcttactgaactaaagcgccag

SEQ ID NO: 492784 - DNA, 120 bp, Artificial Sequence
  ENSG00000163029_8 (sequence is synthesized)
tgtgtagagaaagaggaacgttttcaaagtattgctggtttaagtacaatgaagactaatttagagtccttgaaacatgaaatggcttgggcagtggtcaatgaaattgaaaaacaattg

SEQ ID NO: 492785 - DNA, 120 bp, Artificial Sequence
  ENSG00000163029_9 (sequence is synthesized)
aatgccatcagagataatatcaaaattggagaagatcgtgctgctagacttgacaggaaaatggaagaacagcaggtcagacttaatgaggcagaacaaaagtacaaggatattcaagac

SEQ ID NO: 492786 - DNA, 120 bp, Artificial Sequence
  ENSG00000163029_10 (sequence is synthesized)
aaactagaaaagattagtgaagagacaaatgcacgagcaccagaatgtatggcattgaaagcagatgttgttgctaagaaaagggcctataatgaagctgaggttttatataaccgatcc

SEQ ID NO: 492787 - DNA, 120 bp, Artificial Sequence
  ENSG00000163029_11 (sequence is synthesized)
ttaaacgaatataaagcattaaagaaagatgatgagcagctttgtaaacgaattgaagagctgaaaaaaagtactgaccaatctttggaacctgaacggttggaaagacaaaaaaaaata

SEQ ID NO: 492788 - DNA, 120 bp, Artificial Sequence
  ENSG00000163029_12 (sequence is synthesized)
tcttggttaaaagagagagtaaaggcctttcaaaatcaagaaaattcagtcaatcaagagatcgaacagtttcagcaagccatagaaaaggacaaagaagaacatggcaaaattaagaga

SEQ ID NO: 492789 - DNA, 120 bp, Artificial Sequence
  ENSG00000163029_13 (sequence is synthesized)
gaagaattagatgtgaagcatgcactgagctacaatcagaggcaactgaaagaattgaaagatagtaaaactgatcgactcaaaagatttggccctaatgttccagctcttcttgaagcc

SEQ ID NO: 492790 - DNA, 120 bp, Artificial Sequence
  ENSG00000163029_14 (sequence is synthesized)
atagatgatgcttatagacaaggacattttacctataaacctgtaggccctttaggagcttgcattcatcttcgggacccagaacttgctttggctattgaatcttgcttaaaagggctt

SEQ ID NO: 492791 - DNA, 120 bp, Artificial Sequence
  ENSG00000163029_15 (sequence is synthesized)
ctgcaggcctattgttgccataatcatgctgatgaaagggtccttcaggcactcatgaaaaggttttatttaccagggacctcacggccaccgataatagtttctgagtttcggaatgag

SEQ ID NO: 492792 - DNA, 120 bp, Artificial Sequence
  ENSG00000163029_16 (sequence is synthesized)
atatatgatgtaagacacagagctgcttatcatccagactttccaacagttctgacagctttagaaatagataatgcggttgtggcaaatagcctaattgacatgagaggcatagagaca

SEQ ID NO: 492793 - DNA, 120 bp, Artificial Sequence
  ENSG00000163029_17 (sequence is synthesized)
gtgctactaatcaaaaataattctgtagctcgtgcagtaatgcagtcccaaaagccacccaaaaattgtagagaagcttttactgctgatggtgatcaagtttttgcaggacgttattat

SEQ ID NO: 492794 - DNA, 120 bp, Artificial Sequence
  ENSG00000163029_18 (sequence is synthesized)
tcatctgaaaatacaagacctaagttcctaagcagagatgtggattctgaaataagtgacttggagaatgaggttgaaaataagacggcccagatattaaatcttcagcaacatttatct

SEQ ID NO: 492795 - DNA, 120 bp, Artificial Sequence
  ENSG00000163029_19 (sequence is synthesized)
gcccttgaaaaagatattaaacacaatgaggaacttcttaaaaggtgccaactacattataaagaactaaagatgaaaataagaaaaaatatttctgaaattcgggaacttgagaacata

SEQ ID NO: 492796 - DNA, 120 bp, Artificial Sequence
  ENSG00000163029_20 (sequence is synthesized)
gaagaacaccagtctgtagatattgcaactttggaagatgaagctcaggaaaataaaagcaaaatgaaaatggttgaggaacatatggagcaacaaaaagaaaatatggagcatcttaaa

SEQ ID NO: 492797 - DNA, 120 bp, Artificial Sequence
  ENSG00000163029_21 (sequence is synthesized)
aagcagaaaataagtatgatgcaattaaattcaaaattaatcaactatcggagctagcagacccacttaaggatgaattaaaccttgctgattctgaagtggataaccaaaaacgaggga

SEQ ID NO: 492798 - DNA, 120 bp, Artificial Sequence
  ENSG00000163029_22 (sequence is synthesized)
aacgacattatgaagaaaaacaaaaagaacacttggataccttaaataaaaagaaacgagaactggatatgaaagagaaagaactagaggagaaaatgtcacaagcaagacaaatctgcc

SEQ ID NO: 492799 - DNA, 120 bp, Artificial Sequence
  ENSG00000163029_23 (sequence is synthesized)
cagagcgtatagaagtagaaaaatctgcatcaattctggacaaagaaattaatcgattaaggcagaagatacaggcagaacatgctagtcatggagatcgagaggaaataatgaggcagt

SEQ ID NO: 492800 - DNA, 120 bp, Artificial Sequence
  ENSG00000163029_24 (sequence is synthesized)
accaagaagcaagagagacctatcttgatctggatagtaaagtgaggactttaaaaaagtttattaaattactgggagaaatcatggagcacagattcaagacatatcaacaatttagaa

SEQ ID NO: 492801 - DNA, 120 bp, Artificial Sequence
  ENSG00000163029_25 (sequence is synthesized)
ggtgtttgactttacgatgcaaattatactttgacaacttactatctcagcgggcctattgtggaaaaatgaattttgaccacaagaatgaaactctaagtatatcagttcagcctggag

SEQ ID NO: 492802 - DNA, 120 bp, Artificial Sequence
  ENSG00000163029_26 (sequence is synthesized)
aaggaaataaagctgctttcaatgacatgagagccttgtctggaggtgaacgttctttctccacagtgtgttttattctttccctgtggtccatcgcagaatctcctttcagatgcctgg

SEQ ID NO: 492803 - DNA, 120 bp, Artificial Sequence
  ENSG00000163029_27 (sequence is synthesized)
atgaatttgatgtctacatggatatggttaataggagaattgccatggacttgatactgaagatggcagattcccagcgttttagacagtttatcttgctcacacctcaaagcatgagtt

SEQ ID NO: 492804 - DNA, 120 bp, Artificial Sequence
  ENSG00000163029_28 (sequence is synthesized)
cacttccatccagtaaactgataagaattctccgaatgtctgatcctgaaagaggacaaactacattgcctttcagacctgtgactcaagaagaagatgatgaccaaaggtgatttgtaa

SEQ ID NO: 492805 - DNA, 120 bp, Artificial Sequence
  ENSG00000163029_29 (sequence is synthesized)
cttaacatgccttgtcctgatgttgaaggatttgtgaagggaaaaaaaattctggactctttgatataataaaatgagactggaggcattctgaaatgaaagaaactcctttatatatcc

SEQ ID NO: 492806 - DNA, 120 bp, Artificial Sequence
  ENSG00000163029_30 (sequence is synthesized)
aaccacaatcaaacatataaataagcctggaaaaccaactacaacctgcaatttaagattactattactttaagaaaatcaatttcatagtattggttttaaatctttttaagttttttt

SEQ ID NO: 492807 - DNA, 120 bp, Artificial Sequence
  ENSG00000163029_31 (sequence is synthesized)
aatacgatctatttttataggttctttttcagaagtaaaattttgtacatatatacatgtacatatctgtttagtttgggttcatttctataacattttgtaagaaaataaaagtttgag

SEQ ID NO: 492808 - DNA, 120 bp, Artificial Sequence
  ENSG00000163029_32 (sequence is synthesized)
cacctgattatatttagttttgcttttccagatattacattctatagttaccaaaaatggttgaagggagggatttctcattgcagagggtggggtgcaagggaataagacacttgtacg

SEQ ID NO: 492809 - DNA, 120 bp, Artificial Sequence
  ENSG00000163029_33 (sequence is synthesized)
gaacactgaagctttgccaacttctacacatgccttttttgcagtcctttaactgtccaccctaccaagagcttataaccagtatcagaactggataatgacgcagtttttcactctgac

SEQ ID NO: 492810 - DNA, 120 bp, Artificial Sequence
  ENSG00000163029_34 (sequence is synthesized)
ctccatcatgcttgcctgatttaaaagccctcagtttgcagtccagggactgttcaggcttgtcctcagctgagaggacacaggctagagggactgtgcagaaccaggctgggagaaggg

SEQ ID NO: 492811 - DNA, 120 bp, Artificial Sequence
  ENSG00000163029_35 (sequence is synthesized)
ctgggaaaactgggagtggagggtggatcctcatggagcaggagagtagctcatggctccaggagcctgaggccatgcagttgatggtgagctgacatcaattctaagactcatcctaat

SEQ ID NO: 492812 - DNA, 120 bp, Artificial Sequence
  ENSG00000163029_36 (sequence is synthesized)
tgaggggtgttaaaaagtgtgctgcttagaatgaccaaatatagttattgtaaaaaatgatatttatgaactttttattttagaaaacatgaattttattgctccctgtattatttgttt

SEQ ID NO: 492813 - DNA, 120 bp, Artificial Sequence
  ENSG00000163029_37 (sequence is synthesized)
gatactaggattcatgctaaactttttaagaatgtattggatatcaagaagcattccttacattagtagcaataaatattagaataaatatgaaattgaactattttcagaaaaagggca

SEQ ID NO: 492814 - DNA, 120 bp, Artificial Sequence
  ENSG00000163029_38 (sequence is synthesized)
gtatattaagagcagggactgttctctagttattgaggaaaactggactttgtttgtgtttttggtggaggaagaagtttaagatactttagtcttaaattgaggtttgccaaatgagaa

SEQ ID NO: 492815 - DNA, 120 bp, Artificial Sequence
  ENSG00000163029_39 (sequence is synthesized)
gttcaaaaacttgggctttctaatcagaatttccaggaggaggaaagtgtgtgctgaatattttaaacatttcccactgatcatacaaagtctgatttttaaatttacacttataatgcc

SEQ ID NO: 492816 - DNA, 120 bp, Artificial Sequence
  ENSG00000163029_40 (sequence is synthesized)
tttgtattaaaattatttttaacatgtgcttttccaaattaaaaatgaagtagagtataccaaatgcataaactttcattagctaaggaactcatgtctgaattttgttgtagttttgaa

SEQ ID NO: 492817 - DNA, 120 bp, Artificial Sequence
  ENSG00000163029_41 (sequence is synthesized)
tgttgtgctctttcatacagaatgggaaacataatcctcaggtatcccagcatctcttgttgaattgaagattattcattgctttggcctcacaaagttttgatttcaactatcataagt

SEQ ID NO: 492818 - DNA, 120 bp, Artificial Sequence
  ENSG00000163029_42 (sequence is synthesized)
ctcacaaagttttgatttcaactatcataagtgaaaatatcttcctttaatgttctaagtagtgataatattactagaatgaaagaataaaaagaaattgttcttttaaaatatgtgtaa

SEQ ID NO: 492819 - DNA, 120 bp, Artificial Sequence
  ENSG00000163029_43 (sequence is synthesized)
tagctcaaaatgttctaaagataaaatctaatgatttcttataggaaggctaggcttggtgggtacaagtaagaaagccaagcagagagaagcttcctggtccttctccacctttccctt

SEQ ID NO: 492820 - DNA, 120 bp, Artificial Sequence
  ENSG00000163029_44 (sequence is synthesized)
tcctccagtctggactttgccttctccacctccttggaagacaggctgctcatcccattgtggtgtctcggctggtgtatgttttctgcctaggcttaatggacagcacgaggaggtagg

SEQ ID NO: 492821 - DNA, 90 bp, Artificial Sequence
  ENSG00000163029_45 (sequence is synthesized)
gttttctgcctaggcttaatggacagcacgaggaggtagggactgacgttacccatgttttacagtggaagaacctgaggcttaaagaga

SEQ ID NO: 492822 - DNA, 120 bp, Artificial Sequence
  ENSG00000163029_46 (sequence is synthesized)
tatgatgtaagacacaggaccaaagagaatagtcctggccattctggtggggcctgctctgtgaactgacacaaagactctgaagaagagtgcctggcactgccttgctggcacattgtg

SEQ ID NO: 492823 - DNA, 120 bp, Artificial Sequence
  ENSG00000163029_47 (sequence is synthesized)
tagaaaccacaatttcacaaaatcttttaccttttgtgagtttagtagtcacaacatttaggtaggcttatactgataaaatcttggctatgaatacctctgaagtaaaatcaactagta

SEQ ID NO: 492824 - DNA, 120 bp, Artificial Sequence
  ENSG00000163029_48 (sequence is synthesized)
tagaatatgcagatgttaaagcaatacaaacttactatcttacgcttctgtggattagaagtccaacacagatctcactgggctaaaatccagatgtcagtagggctatgttctgtttta

SEQ ID NO: 492825 - DNA, 120 bp, Artificial Sequence
  ENSG00000163029_49 (sequence is synthesized)
gggcctctaggggaaaatctatttccttgccttttccagcattttttgactcatgtccctcttccttagtgcaagatgcaagactaatttactttaatttttaaggtaaaaatggatgga

SEQ ID NO: 492826 - DNA, 120 bp, Artificial Sequence
  ENSG00000163029_50 (sequence is synthesized)
catagtacctaaagtttaattagccttgttagatttattttgttgagtttaatatatatggaacttgatttacctcattgttactataaatatttgttcagacctgatggccaaaagaaa

SEQ ID NO: 492827 - DNA, 120 bp, Artificial Sequence
  ENSG00000163029_51 (sequence is synthesized)
tcctttgggagacttcgacttgttggcgaaatgaaccggagaagaatcccaattgggaattgcggaaaacaggactctagggtagagaaaggttgtagaaccaatagggtttgagacctg

SEQ ID NO: 492828 - DNA, 120 bp, Artificial Sequence
  ENSG00000163029_52 (sequence is synthesized)
agacatgacctcaaaagccagtactgtgctcttccacatggcatccactggccacgtgtggtgatttaacatgtgaaatgaagtctcaaggctgagatgtgatgcgagtgtataatacac

SEQ ID NO: 492829 - DNA, 120 bp, Artificial Sequence
  ENSG00000163029_53 (sequence is synthesized)
tgagatgtgatgcgagtgtataatacacactagatctcaaaaacttagtagaaataaaaaatgtaaaatatcataaaaagattttaaaactacataaaaagaaaaaaaatttcaaaagaa

SEQ ID NO: 492830 - DNA, 120 bp, Artificial Sequence
  ENSG00000163029_54 (sequence is synthesized)
cagaaatttgtatttaaaaggtttttttaaagtactgatcttacagtttacaggcatacctcattttactgcagttcactttactgcactttacaaatatttcattttttacaaattgaa

SEQ ID NO: 492831 - DNA, 120 bp, Artificial Sequence
  ENSG00000163029_55 (sequence is synthesized)
ggtttatggcaagcctgcttcaaccaagtctgtcagcaccatttatccaacagcatatgatccctttatgtctctgtgtcatattttgtttaatttttgcaatatttcagactttttcat

SEQ ID NO: 492832 - DNA, 120 bp, Artificial Sequence
  ENSG00000163029_56 (sequence is synthesized)
tattattaatctgttgtagtgatctgtcatcagtgatctttgttactgttcaaattgttttcgggtgccacagactgcccatataagacagcagacttcatcaacaaatgttgtgtgtgt

SEQ ID NO: 492833 - DNA, 120 bp, Artificial Sequence
  ENSG00000163029_57 (sequence is synthesized)
tcttcctgctccactgactggctattgattccctcatctctctgtccccttgggtctccctattccctgagacacagcaatattgaaattaggctagttaatagccttacagtgacctct

SEQ ID NO: 492834 - DNA, 80 bp, Artificial Sequence
  ENSG00000163029_58 (sequence is synthesized)
tatgtcaaaagccaagataagccaaaagctagacctcttgtgccagttagccaagttgtaaatgcaaaggaaaagttctt

SEQ ID NO: 492835 - DNA, 120 bp, Artificial Sequence
  ENSG00000163029_59 (sequence is synthesized)
aagttcttgaaggaaattaaaagtgctattccagtgaatacactaatgataagaaaattaaacagccttattgttgatatgaagaaagttccaatggtctggatagaagatcaaagcagc

SEQ ID NO: 492836 - DNA, 120 bp, Artificial Sequence
  ENSG00000163029_60 (sequence is synthesized)
ttccaatggtctggatagaagatcaaagcagctacaacattcccttaagtcaaaacctaatccagagcaatgccttaactctccaattcgatgaaggctgagaaaggtgaggaagctgca

SEQ ID NO: 492837 - DNA, 120 bp, Artificial Sequence
  ENSG00000163029_61 (sequence is synthesized)
gaagaaaagtatgacgctagcagaggtttgttcatgaggttgaaggaaagaggccgtctttgtaatataaaagtgcaaggtgaaacagcaagcgctgatgtagaagctgcacattatcca

SEQ ID NO: 492838 - DNA, 120 bp, Artificial Sequence
  ENSG00000163029_62 (sequence is synthesized)
gaagaactgactaagataactgatgaaagtggctacactaaacaatggattttcaacacagacaaaacagccttgtattagaagatacgatctacggctttcatagctggaaaggagaag

SEQ ID NO: 492839 - DNA, 120 bp, Artificial Sequence
  ENSG00000163029_63 (sequence is synthesized)
tcaattcctggctttgtaggacaggccaaatctcttattagaggcaaatgaagctagtgactttaagtttaagccaatgtttatttaccattctgaaaatcctaggacccttaagaattg

SEQ ID NO: 492840 - DNA, 120 bp, Artificial Sequence
  ENSG00000163029_64 (sequence is synthesized)
tgctaaatctactttgtatgtgctctacaaatggaaaaacaaagcctgatgagagcacatctgtttatagtatcatggattactgaatattttaagcccactattgagtcctacggctca

SEQ ID NO: 492841 - DNA, 120 bp, Artificial Sequence
  ENSG00000163029_65 (sequence is synthesized)
gaagaaaatatttctttgaaaatgttactgctcattgacagtacacctggtcacccaagagctgatatgatatacaaggagattaatgttgttttcttgcctactaacatctattcgtaa

SEQ ID NO: 492842 - DNA, 120 bp, Artificial Sequence
  ENSG00000163029_66 (sequence is synthesized)
cccatagatcaaggagtaattttaactttcaagtcttttatttgagaaatatattttgtaagaccatagctgctgtacgtagtgatacctttaatcgatctgagcaaagtaaattgaaaa

SEQ ID NO: 492843 - DNA, 120 bp, Artificial Sequence
  ENSG00000163029_67 (sequence is synthesized)
ccttctggaaaggactcatcattctagatagcattaagaacatttatgattcatgggaggaagtcaaaatatcaacaacagtgtaaacaaaacttttgtatgcagtgggaaaccaaaaaa

SEQ ID NO: 492844 - DNA, 120 bp, Artificial Sequence
  ENSG00000163029_68 (sequence is synthesized)
tgtgtgtgactcactttattgcaatattcgccttttttgtggtagtctggaactgaacctgcagtatttctgaagtatgctgtattaccttcatatgattcttcaccactgacatatttc

SEQ ID NO: 492845 - DNA, 120 bp, Artificial Sequence
  ENSG00000163029_69 (sequence is synthesized)
atattgtttacccagtcttagaaggggagtaaaaatgacctaatttttaaaattgtttatgtctttactctggagaactttgccattttatgacaacagtctcttttagacatcccatga

SEQ ID NO: 492846 - DNA, 120 bp, Artificial Sequence
  ENSG00000163029_70 (sequence is synthesized)
gaaaaccagctagcagtggttgctgtggcagcagaaggaaactcaggctatcagtgatttctagtgtgggaatttaatgcagttcagggagggaaataggaaggaaaagagtaccagaga

SEQ ID NO: 492847 - DNA, 120 bp, Artificial Sequence
  ENSG00000163029_71 (sequence is synthesized)
aatgagccttaggtttactagggagcaaagatgttatgaaaccacagccagtgacttaccatgcagattttattttctaaataccattccccactaaaaggaaccagggctccatggaga

SEQ ID NO: 492848 - DNA, 120 bp, Artificial Sequence
  ENSG00000163029_72 (sequence is synthesized)
aatggcgattccagagctgggcagggaaggtacagatgagcctcatactatggcagagaggaaggaagggctgagaaaaaaaaggggggacacatccagcttgaaggggtgcccattgga

SEQ ID NO: 492849 - DNA, 120 bp, Artificial Sequence
  ENSG00000163029_73 (sequence is synthesized)
aaaatctaggacagtctgaggatctcaataaggatagtaatagatggtgtgaataatgtaaaaataaagccaatgaatatcagactccctaatctattctgataaatagaaagttagata

SEQ ID NO: 492850 - DNA, 120 bp, Artificial Sequence
  ENSG00000163029_74 (sequence is synthesized)
aggaaataaagaactgaggaagaagggaaagttccttacagtaaaatgccatctaatatatagagaaggaaagatagagtttgcattgtgccaagcaaagtgtaaggcattagaggtacc

SEQ ID NO: 492851 - DNA, 120 bp, Artificial Sequence
  ENSG00000163029_75 (sequence is synthesized)
cagtgcttaagagagtgcccttagcttttttgctactgtgaagttagaaggaggcaaataaatagatactttgtccatttatcttgtcaccattacagttaatcctctcaaggacaagat

SEQ ID NO: 492852 - DNA, 120 bp, Artificial Sequence
  ENSG00000163029_76 (sequence is synthesized)
acctttataatgtattagggtaatgccttagattattaattagttgaatgactgatgcattcctaagcactgactgtggtataatgggttatattaaatgtgagatgactctttaattca

SEQ ID NO: 492853 - DNA, 120 bp, Artificial Sequence
  ENSG00000163029_77 (sequence is synthesized)
tttcattaatttttttgttataaaagtaaatgaactggtgaaagtgtagggacataaatgaatataaagacacaaggcaaaaaatactacctaaaactcaactattaaatgagtaaccaa

SEQ ID NO: 492854 - DNA, 120 bp, Artificial Sequence
  ENSG00000163032_0 (sequence is synthesized)
aatctgcagcagagatttacccgagcgtgttgcggcagcggctgggcttgcaaggcgcgatccaagagggatttaagcagcccagagctccagagaaaaagagagcgagagagaaccaca

SEQ ID NO: 492855 - DNA, 120 bp, Artificial Sequence
  ENSG00000163032_1 (sequence is synthesized)
cacagagacggcttaagcgtttacccgaattaaatatatatttttaaaaagaactgttgagttttatcattttcgttaagtgaccgtgcgcagcgctgtaactgcaggatggggaagcag

SEQ ID NO: 492856 - DNA, 120 bp, Artificial Sequence
  ENSG00000163032_2 (sequence is synthesized)
aatagcaaactggcccctgaagtgatggaggacctggtgaagagcacagagtttaatgagcatgaactcaagcagtggtacaaaggatttctcaaggactgtccaagtgggaggctaaat

SEQ ID NO: 492857 - DNA, 120 bp, Artificial Sequence
  ENSG00000163032_3 (sequence is synthesized)
ctcgaggaatttcagcagctctatgtgaagttctttccttatggagacgcctccaagtttgcccagcatgccttccgaaccttcgacaagaatggggacggcaccattgacttccgagag

SEQ ID NO: 492858 - DNA, 120 bp, Artificial Sequence
  ENSG00000163032_4 (sequence is synthesized)
ttcatctgcgctctgtccatcacctccaggggcagctttgagcagaagctgaactgggccttcaatatgtatgacctggatggtgatggcaagatcacccgagtggagatgctggagatc

SEQ ID NO: 492859 - DNA, 120 bp, Artificial Sequence
  ENSG00000163032_5 (sequence is synthesized)
atcgaggctatctacaaaatggtaggcactgtgatcatgatgaaaatgaatgaggatggcctgacgcctgagcagcgagtagacaagattttcagcaagatggataagaacaaagatgac

SEQ ID NO: 492860 - DNA, 120 bp, Artificial Sequence
  ENSG00000163032_6 (sequence is synthesized)
cagattacactggatgaattcaaagaagctgcaaagagcgacccttccattgtattacttctgcagtgcgacatccagaaatgagctgatgtcaatgctatggactgcacaaaagtctca

SEQ ID NO: 492861 - DNA, 83 bp, Artificial Sequence
  ENSG00000163032_7 (sequence is synthesized)
gcttggactacctataaatggacttgcttcttgtgtttgaaacactcgtgtgcatgagaatgtcatttgctaatgaattttaa

SEQ ID NO: 492862 - DNA, 120 bp, Artificial Sequence
  ENSG00000163032_8 (sequence is synthesized)
actcgtgtgcatgagaatgtcatttgctaatgaattttaaaagcatatataaaacaaaacaaacaacctgccacaatgtgatatgtgtaatatcatttcataaaaatccctcttcctcca

SEQ ID NO: 492863 - DNA, 120 bp, Artificial Sequence
  ENSG00000163032_9 (sequence is synthesized)
aagcctgggcagaaatgtgctgcaaagagttatatgacttcttgttcatgttttgctaatgctcgtatctccttgattacataatgttagtagcactgagacccccatggtaatgtaact

SEQ ID NO: 492864 - DNA, 120 bp, Artificial Sequence
  ENSG00000163032_10 (sequence is synthesized)
gtaaaatactattggacagacacagagggacccttggctcctgtgtctggtccacacaccacagaagcttgtattatcagtgaatataaatgtactacatttgcatgccttttgggtttg

SEQ ID NO: 492865 - DNA, 120 bp, Artificial Sequence
  ENSG00000163032_11 (sequence is synthesized)
ccttaattcttacctcatttgcatcctatcgatctggaaagagctgttttggatgaatgcagtataaaatgtaaaaaccctgctaaatgacttattgattaagtatatctatctatatat

SEQ ID NO: 492866 - DNA, 120 bp, Artificial Sequence
  ENSG00000163032_12 (sequence is synthesized)
acatatacacaaagatattatttatcgaaagtaaaaaagatggaagtgtattggtttctgtttgaattttcaaaggcttccaatgtggtggcaataaatgtcccaaataaatttataaca

SEQ ID NO: 492867 - DNA, 120 bp, Artificial Sequence
  ENSG00000163032_13 (sequence is synthesized)
attgattttccccctaattcttattttataattttaaaattgcagcagttgctagcaacaacttactaaatctactcttaaatatacaactttggaatttgaagaattaatgacaacaaa

SEQ ID NO: 492868 - DNA, 120 bp, Artificial Sequence
  ENSG00000163032_14 (sequence is synthesized)
agggaaaaaagcaactttccaacttttcatccaggctcccaaaagagggacaacgaacatggcatgtgaaaagtaaaacagatttgttcattccgaaaaaaaaatgttcattctatgaca

SEQ ID NO: 492869 - DNA, 120 bp, Artificial Sequence
  ENSG00000163032_15 (sequence is synthesized)
ataaattttatctcagtgtgactttggtgctaacaacgtatgttcagtgcaactacgtggagctgtgcacacacagcaggtaggctgcaggtgtcccccaacataagtcagtaggaaaga

SEQ ID NO: 492870 - DNA, 120 bp, Artificial Sequence
  ENSG00000163032_16 (sequence is synthesized)
agacatctgtcttcccaaatctaaagtaggcaaaaaataacagaagtagctatttttaataacagaacagaactctgactcttttgatcttgaaggaggcagaagagattccatcaaaac

SEQ ID NO: 492871 - DNA, 120 bp, Artificial Sequence
  ENSG00000163032_17 (sequence is synthesized)
ctctaaaagcaggtttgcattttcagaacatgcccccctagagagttgagttttttacacagcactacccggtagtactttctctgatgatgggaaggtctacatctgcacagcacgcta

SEQ ID NO: 492872 - DNA, 120 bp, Artificial Sequence
  ENSG00000163032_18 (sequence is synthesized)
gctataactgcacatatggctactgagcacttcaagtatggctagcgtgactaaggaactgaattttatactgtaattaagtgtaatttgccacatatagctagtggctttagtaacaga

SEQ ID NO: 492873 - DNA, 120 bp, Artificial Sequence
  ENSG00000163032_19 (sequence is synthesized)
cagtttagtgctatattatttattcaagtactttttatcaaattcgttttttaccgaattcgttttttaccattctttatttgtcttaggatcattacataacactaaactagggtctaa

SEQ ID NO: 492874 - DNA, 120 bp, Artificial Sequence
  ENSG00000163032_20 (sequence is synthesized)
caaccttcccgaggcgtcctgcccgggaagccagttcctgggttctgggctggctaggttggcagcgaatgaggcttaggcatcactgcctgaggccctcacttagcatgtcgacagcca

SEQ ID NO: 492875 - DNA, 120 bp, Artificial Sequence
  ENSG00000163032_21 (sequence is synthesized)
cagacttgtctggcggagtttctcctggtgcccacttaagtagtctcaagtttgttcaaagctggactcctcgacttggaaccaggagcagctggagatttgtcaatttagagctcattt

SEQ ID NO: 492876 - DNA, 120 bp, Artificial Sequence
  ENSG00000163032_22 (sequence is synthesized)
agactagatttaagacaggtgaaactgagatgctttcttagtttgtcttagacagatttaagtagctaattgaccgattgtgaagttttccggttgctgataaaactattgagcgggtac

SEQ ID NO: 492877 - DNA, 120 bp, Artificial Sequence
  ENSG00000163032_23 (sequence is synthesized)
agtcgagtagcaacctgtcatccgtgggattggtgcaccatttttctcactgtggaagggcagcaaaggtgtttgctaagtaaaactgagtggatgagattggtatggaaatcatggttg

SEQ ID NO: 492878 - DNA, 120 bp, Artificial Sequence
  ENSG00000163032_24 (sequence is synthesized)
atctctgagcgggatgttagtgtttaagatccacggagtcaggcgcaaaatgagcacatttctctcagtattcagaaatgagtagataatttttttcgtctttgatttttgtcacaatgg

SEQ ID NO: 492879 - DNA, 120 bp, Artificial Sequence
  ENSG00000163032_25 (sequence is synthesized)
tgaatgggcagaaaagggaaagatgctctactgcactgtcgattttgaacggagtcacaggctcggtcgctgaatggggactgtcagacccaaactagttacctgcctttgcattccgtg

SEQ ID NO: 492880 - DNA, 120 bp, Artificial Sequence
  ENSG00000163032_26 (sequence is synthesized)
agtgcatacagaaggcgcttggctcagggtacacagggcaagaagcctcggatcccagctccctttaacacacattttttcaacgccgttctggaccgagactgtccggggcactgggtg

SEQ ID NO: 492881 - DNA, 120 bp, Artificial Sequence
  ENSG00000163040_0 (sequence is synthesized)
cagcgacaggccccgcccccgccaaccgcctcgcgccttccgtcgcccggtttccatggtgacggggcgccaggctagggcggcctggccactgagccggggtgcagtggcagcgggaga

SEQ ID NO: 492882 - DNA, 120 bp, Artificial Sequence; identical to SEQ ID NO: 430195
  ENSG00000163040_1 (sequence is synthesized)

SEQ ID NO: 492883 - DNA, 120 bp, Artificial Sequence
  ENSG00000163040_2 (sequence is synthesized)
aggccgcagagcccgcagctcaggcagagcgacccgcagaaacggaacctggacctggagaaaagcctgcagttcctgcagcagcagcactcggagatgctggccaagctccatgaggag

SEQ ID NO: 492884 - DNA, 120 bp, Artificial Sequence
  ENSG00000163040_3 (sequence is synthesized)
atcgagcatctgaagcgggaaaacaaggatctccattacaagctcataatgaatcagacatcacagaagaaagatggcccctcaggaaaccacctttccagggcctctgctcccttgggc

SEQ ID NO: 492885 - DNA, 120 bp, Artificial Sequence
  ENSG00000163040_4 (sequence is synthesized)
gctcgctgggtctgcatcaacggagtgtgggtagagccgggaggacccagccctgccaggctgaaggagggctcctcacggacacacaggccaggaggcaagcgtgggcgtcttgcgggc

SEQ ID NO: 492886 - DNA, 120 bp, Artificial Sequence
  ENSG00000163040_5 (sequence is synthesized)
ggtagcgccgacactgtgcgctctcctgcagacagcctctccatgtcaagcttccagtctgtcaagtccatctctaattcaggcaaggccaggccccagcccggctccttcaacaagcaa

SEQ ID NO: 492887 - DNA, 120 bp, Artificial Sequence
  ENSG00000163040_6 (sequence is synthesized)
aggagaaagcagaggcctctaatgcaggagctgcctgtatggggaacagccagcaccagggcaggcagatgggggcgggggcacaccccccaatgatcctgccccttcccctgcgaaagc

SEQ ID NO: 492888 - DNA, 120 bp, Artificial Sequence
  ENSG00000163040_7 (sequence is synthesized)
ccaccacacttaggcagtgcgaagtgctcatccgcgagctgtggaataccaacctcctgcagacccaagagctgcggcacctcaagtccctcctggaagggagccagaggccccaggcag

SEQ ID NO: 492889 - DNA, 120 bp, Artificial Sequence
  ENSG00000163040_8 (sequence is synthesized)
ccccggaggaagctagctttcccagggaccaagaagccacgcatttccccaaggtctccaccaagagcctctccaagaaatgcctgagcccacctgtggcggagcgtgccatcctgcccg

SEQ ID NO: 492890 - DNA, 120 bp, Artificial Sequence
  ENSG00000163040_9 (sequence is synthesized)
cactgaagcagaccccgaagaacaactttgccgagaggcagaagaggctgcaggcaatgcagaaacggcgcctgcatcgctcagtgctttgagccaccccaatctggtcagtgccaggcc

SEQ ID NO: 492891 - DNA, 120 bp, Artificial Sequence
  ENSG00000163040_10 (sequence is synthesized)
caccaacctgcagctggagactggctctctatagcatttcctgatacttccgctacttttaggcctggctaaattccaagacagataacactcaagatagataaagtacttgatctccaa

SEQ ID NO: 492892 - DNA, 120 bp, Artificial Sequence; identical to SEQ ID NO: 430205
  ENSG00000163040_11 (sequence is synthesized)

SEQ ID NO: 492893 - DNA, 120 bp, Artificial Sequence
  ENSG00000163040_12 (sequence is synthesized)
gtttcgccatgttggtcaggctggtcacgaactcctgacctcaaatgatccgtccgcctcggcctcccaaacttcggggattacaggcgtgagccccggcgcccagccctggatgccttg

SEQ ID NO: 492894 - DNA, 120 bp, Artificial Sequence
  ENSG00000163040_13 (sequence is synthesized)
gggcccttcagtgactgatgggatgctcttgccacccaggggagcccctccagactgtccttgcccacctggctgcactggcccctgtatgccaacccagtgggtacaggttctggggga

SEQ ID NO: 492895 - DNA, 120 bp, Artificial Sequence
  ENSG00000163040_14 (sequence is synthesized)
cctggacagatgccgctacctctagccgtggctggacgatgttatgcagccaagcacagcacgtgctgctctcgggaagcccagggcctgaggtcattgcagtggggaggtgggcacagg

SEQ ID NO: 492896 - DNA, 120 bp, Artificial Sequence
  ENSG00000163040_15 (sequence is synthesized)
gtgctccccagacctccctcctccaagtagagctgaaatgggaaggaacccctgggacagcccctgccctgctagatctttgcctcagattgctgctgtggccaggcccaggatttccag

SEQ ID NO: 492897 - DNA, 120 bp, Artificial Sequence
  ENSG00000163040_16 (sequence is synthesized)
ccctatggctctgagtcctcacatgctgggggcccaggggctctggacacactccatccagggatcccttcctgccatctgggcagcaaccatggggacaaagggaggaagcagagtcct

SEQ ID NO: 492898 - DNA, 120 bp, Artificial Sequence
  ENSG00000163040_17 (sequence is synthesized)
ggaaaacaagggtgagccggcgcggggccctaggccggccctgcctccccaggcacactcaacactgccgctcccgcagcacagaaacacagccatcaactccagcacacgcctgggctc

SEQ ID NO: 492899 - DNA, 120 bp, Artificial Sequence
  ENSG00000163040_18 (sequence is synthesized)
agggggaacacaggacgatctccattacaagctcataatgaatcagacatcacagaagaaaggtgagaactgggcccttcagtgactgatgggatgctcttgccacccaggggagcccct

SEQ ID NO: 492900 - DNA, 120 bp, Artificial Sequence
  ENSG00000163040_19 (sequence is synthesized)
gtctcgtagggcagcagcatttcagatgctgactccgccaatcctctcctctccaagcagggtcagacacacctctgttaaaaactttatagaggggcccgggcgcggcggctcacgcct

SEQ ID NO: 492901 - DNA, 120 bp, Artificial Sequence
  ENSG00000163040_20 (sequence is synthesized)
ctgagtgccgagtatcccatcaccaggcgtctgttttgtcaggaccccgcttccccatgtcttcttgagcctcaggacgcccagttcctaatgtcttcttgagcctcccccgcagtccct

SEQ ID NO: 492902 - DNA, 120 bp, Artificial Sequence
  ENSG00000163040_21 (sequence is synthesized)
gatccccacgggatcatgacactgccatagccaggggttccggagttcacctctgtacccctaaagcccaggccctgcctgggcagtgtggatgccctccagtcatctcagatggatgag

SEQ ID NO: 492903 - DNA, 120 bp, Artificial Sequence
  ENSG00000163040_22 (sequence is synthesized)
gccgatatgcccggtgggctctgcctagggaacaggcagggccattcctggcctgacacccacgacgaaggcgtggtggagagcgggatccatggggcagggcccaatcagccagtgggg

SEQ ID NO: 492904 - DNA, 120 bp, Artificial Sequence
  ENSG00000163040_23 (sequence is synthesized)
ttgggctcagcagccaggagaggacaggccaggcttcttctctcagaatagctgtggtttcacaagtgctgaggagagcgtgtgcttgctttcagatctccattacaagctcataatgaa

SEQ ID NO: 492905 - DNA, 120 bp, Artificial Sequence
  ENSG00000163040_24 (sequence is synthesized)
cggacctggaagaggagcccctacttcacaacagcaagctggacaaagttcctggggtacaagggcaggccagctgcggcacctcaagtccctcctggaagggagccagaggccccaggc

SEQ ID NO: 492906 - DNA, 120 bp, Artificial Sequence
  ENSG00000163041_0 (sequence is synthesized)
ttttcttttgacttgtttgtggatggaatgtttacagacatttctaattactgctttaattaaataaattggatcaaaggccgttcgaggtatttttgttttgccgtttgtcgctcagaa

SEQ ID NO: 492907 - DNA, 120 bp, Artificial Sequence
  ENSG00000163041_1 (sequence is synthesized)
ttggcattttgagaggtgattgatactgctaacaattttctagtactctagtttgtttcaagaagagattttgggtagacgtaatcttcaccctttcaaattatataacaatacgaacat

SEQ ID NO: 492908 - DNA, 120 bp, Artificial Sequence
  ENSG00000163041_2 (sequence is synthesized)
tattttttatactgatcataatttccagatttggggagggggtgatcgtggcaggaaaagttgtatgtttggtagttgcatatggtgatttttgatttttcaatgctggtaggtaagtaa

SEQ ID NO: 492909 - DNA, 120 bp, Artificial Sequence
  ENSG00000163041_3 (sequence is synthesized)
ggaggtctctgtaccatggctcgtacaaagcagactgcccgcaaatcgaccggtggtaaagcacccaggaagcaactggctacaaaagccgctcgcaagagtgcgccctctactggaggg

SEQ ID NO: 492910 - DNA, 120 bp, Artificial Sequence
  ENSG00000163041_4 (sequence is synthesized)
gtgaagaaacctcatcgttacaggcctggtactgtggcgctccgtgaaattagacgttatcagaagtccactgaacttctgattcgcaaacttcccttccagcgtctggtgcgagaaatt

SEQ ID NO: 492911 - DNA, 120 bp, Artificial Sequence
  ENSG00000163041_5 (sequence is synthesized)
gctatccatgccaaacgtgtaacaattatgccaaaagacatccagctagcacgccgcatacgtggagaacgtgcttaagaatccactatgatgggaaacatttcattctcaaaaaaaaaa

SEQ ID NO: 492912 - DNA, 120 bp, Artificial Sequence
  ENSG00000163041_6 (sequence is synthesized)
aaaaaaatttctcttcttcctgttattggtagttctgaacgttagatattttttttccatggggtcaaaaggtacctaagtatatgattgcgagtggaaaaataggggacagaaatcagg

SEQ ID NO: 492913 - DNA, 120 bp, Artificial Sequence
  ENSG00000163041_7 (sequence is synthesized)
tattggcagtttttccattttcatttgtgtgtgaatttttaatataaatgcggagacgtaaagcattaatgcaagttaaaatgtttcagtgaacaagtttcagcggttcaactttataat

SEQ ID NO: 492914 - DNA, 120 bp, Artificial Sequence
  ENSG00000163041_8 (sequence is synthesized)
aattataaataaacctgttaaatttttctggacaatgccagcatttggatttttttaaaacaagtaaatttcttattgatggcaactaaatggtgtttgtagcatttttatcatacagta

SEQ ID NO: 492915 - DNA, 120 bp, Artificial Sequence
  ENSG00000163041_9 (sequence is synthesized)
gattccatccattcactatacttttctaactgagttgtcctacatgcaagtacatgtttttaatgttgtctgtcttctgtgctgttcctgtaagtttgctattaaaatacattaaactat

SEQ ID NO: 492916 - DNA, 120 bp, Artificial Sequence
  ENSG00000163041_10 (sequence is synthesized)
cgcgacacagccatcttgcgtcgggggcccgggcccgggaggagagcgagccccgtcccctgatcccggaggccaacaccggcgaggggctgccctgcacgcaggcggccggcccaggag

SEQ ID NO: 492917 - DNA, 120 bp, Artificial Sequence
  ENSG00000163041_11 (sequence is synthesized)
tcttagcggatcaagttgtctacggcggactcgggccggtcccgcaggacccggccgcacttggccgagcgcgcaggcgggaaggaggccgtcggtccgcccctcccgctgccgcagcgg

SEQ ID NO: 492918 - DNA, 120 bp, Artificial Sequence
  ENSG00000163041_12 (sequence is synthesized)
aacagatctgcgcttccagagcgcagctatcggtgctttgcaggtaaaatggtgggtgggaagactcagagtttgtattcctgttgtgtaccaagaacagttccaaattgttgcatgtgc

SEQ ID NO: 492919 - DNA, 120 bp, Artificial Sequence
  ENSG00000163041_13 (sequence is synthesized)
ttatatcatttaatcacaagcctgtcaggtagttgatattgttacttcactgttgagacttcagaaaggttaaattgctcaaggtcatacacgtagaaaatggcaaaaccataatttgaa

SEQ ID NO: 492920 - DNA, 120 bp, Artificial Sequence
  ENSG00000163041_14 (sequence is synthesized)
cctatttgactccaaggcttagtgcacattccattataccatttaaaattttgaaacattgcactaaaaacaatatttaaagaaaatcctctggtttggtttatggatgctgcaggacat

SEQ ID NO: 492921 - DNA, 120 bp, Artificial Sequence
  ENSG00000163041_15 (sequence is synthesized)
taagaagaacttgagactagaggtctatatttgtagtaacaatttcaaacaacagtgcctagaataaaagaaatgtctcttcaggtcctgaagaaacatataggtagagagagcttaata

SEQ ID NO: 492922 - DNA, 120 bp, Artificial Sequence
  ENSG00000163041_16 (sequence is synthesized)
gaggataggattggattggcaagattgggggaacggtgcttaaaggtgatactggacgtgtaaaggggccaggatttgccttgtggtttcctaaaggggattagggattgccacttacat

SEQ ID NO: 492923 - DNA, 120 bp, Artificial Sequence
  ENSG00000163041_17 (sequence is synthesized)
gtggagcatattgaatttaatcttaatctctagcatgtcaggacttagagaaatactgttctagagatatttatgtatttgagatatttgtggtttaagttaagaccaaaacttgaaatt

SEQ ID NO: 492924 - DNA, 120 bp, Artificial Sequence
  ENSG00000163041_18 (sequence is synthesized)
cctacaagatacttgataaaggtatgtagacgtcattaacatcagtcacttaagtaacctattttatattgtgtggttggattctttagttgcaagtatcccagaatacagtaaagctac

SEQ ID NO: 492925 - DNA, 120 bp, Artificial Sequence
  ENSG00000163041_19 (sequence is synthesized)
cacctccatcagaagcatgcagttgggggtcgttaaaaatgctgattgttaggcaccattgcagacctgaatcattctgggggtggggagggggcatccagaatctaagtacattccatt

SEQ ID NO: 492926 - DNA, 120 bp, Artificial Sequence
  ENSG00000163041_20 (sequence is synthesized)
ggaggattttcaaggctgctgttgctgtgctgggcttttgctttatgtatgagaaagataggataggtggattccaccctgaagtgtaattggtcgagctgtttctatggttaatctaaa

SEQ ID NO: 492927 - DNA, 120 bp, Artificial Sequence
  ENSG00000163041_21 (sequence is synthesized)
cttcatttgattggtgaattccaggagtaggcatccattaaattctcagtgagttgctgaaatttcaactactaaaatcttccatgtttttacttaaaactttattttctgttttaatag

SEQ ID NO: 492928 - DNA, 120 bp, Artificial Sequence
  ENSG00000163041_22 (sequence is synthesized)
ccgattatcttcagttcttatttattactaaatacagaaatgttactaagattcgtaagcattggtacaaagctgctaatattttctagttagaactgtgcttaaagaacaatactgtac

SEQ ID NO: 492929 - DNA, 120 bp, Artificial Sequence
  ENSG00000163041_23 (sequence is synthesized)
ttgaaaagtgtagcgtttttagcttaaatgtcaataatgtagccttttaaattgaatttactaaacaatctgggtaaaagactcatctttctaaaattattcacatgtaaacttccattg

SEQ ID NO: 492930 - DNA, 120 bp, Artificial Sequence
  ENSG00000163041_24 (sequence is synthesized)
ggtattttcgagcgatttggtgttttgtctctttggaacggaatcggatacgttttgcgattgtttccattttgttctggtcggggagccgagttggttcctgctcgaggcgctgggagc

SEQ ID NO: 492931 - DNA, 120 bp, Artificial Sequence
  ENSG00000163041_25 (sequence is synthesized)
cgtcgctctccaacgccagcgccgcctctcgctcgccgagctccagccgaaggagaaggggggtaagtttccccgtctgcccgcttccccggaaccgagccccgcttgccgtcagccccg

SEQ ID NO: 492932 - DNA, 120 bp, Artificial Sequence
  ENSG00000163041_26 (sequence is synthesized)
cgccgagctccagccgaaggagaagggggcgtctggtgcgagaaattgctcaggactttaaaacagatctgcgcttccagagcgcagctatcggtgctttgcaggaggcaagtgaggcct

SEQ ID NO: 492933 - DNA, 120 bp, Artificial Sequence
  ENSG00000163041_27 (sequence is synthesized)
ctctttggaacggaatcggatacgttttgcgattgtttccattttgttctggtcggggagccgagttggttcctgctcgaggcgctgggagcgaggcgggcaggttgggggaccctgtgc

SEQ ID NO: 492934 - DNA, 120 bp, Artificial Sequence
  ENSG00000163041_28 (sequence is synthesized)
ttttttttcatttgaacacttaactactgcttaaataaatgtactgtatgatcatttatatataaagttaagtattaggttttattgaaaacgtttaactttgaagccataatcttacct

SEQ ID NO: 492935 - DNA, 120 bp, Artificial Sequence
  ENSG00000163041_29 (sequence is synthesized)
ggaggtctaaggagacctcgtatatcactgataatgttaatgggatatattgacattttagttaactattagtaattctttaaaaatagttaagtgttgctttcttgaatacacttttga

SEQ ID NO: 492936 - DNA, 120 bp, Artificial Sequence
  ENSG00000163046_0 (sequence is synthesized)
gcctaacggttctgctcagctgcctaaaggttctgctcaggtgcctaacggttctgctcagctgcctaacggttttgcgcagccattttctcccgggagaggttggagtgtccaaaagct

SEQ ID NO: 492937 - DNA, 120 bp, Artificial Sequence
  ENSG00000163046_1 (sequence is synthesized)
tggcccgactgagatttctagtcttgtcagggcggatgcagggactgaagaagggcgagggcgagcggcggggactggggaagggcgagcagcgggaggcacgggctctctctagcaggt

SEQ ID NO: 492938 - DNA, 120 bp, Artificial Sequence
  ENSG00000163046_2 (sequence is synthesized)
ggctgcagccatggagaggctctctgccgcccctgtcaagggccagacgggcccagagcgcccgagccccttcagtcagctggtctacaccaacaacgactcttacgtgattcaccatgg

SEQ ID NO: 492939 - DNA, 120 bp, Artificial Sequence
  ENSG00000163046_3 (sequence is synthesized)
ggatctcaggaagatccacaaagctgcctcccggggccaagcctggaagctggagaggatgatgaagaagacgacaatggacctgaacataagagatgcgaagaagaggactgctctata

SEQ ID NO: 492940 - DNA, 120 bp, Artificial Sequence
  ENSG00000163046_4 (sequence is synthesized)
ctgggcctgtgccaatggccatgcagaagtagtaacacttctggtagatagaaagtgtcagcttgacgtccttgatggtgaaaacaggaccattctgatgaaggctctgcaatgccagag

SEQ ID NO: 492941 - DNA, 120 bp, Artificial Sequence
  ENSG00000163046_5 (sequence is synthesized)
agatgtgtatggcaacacagctgtccattatgctgttaacagtgagaatttgtcagtggtggcaaaattgctgtcctgtggtgcagacatcgaagtgaagaacaaggctggccacacacc

SEQ ID NO: 492942 - DNA, 120 bp, Artificial Sequence
  ENSG00000163046_6 (sequence is synthesized)
acttttactggccataaggaaaagaagtgaggaaattgtggaatttttactgacaaaaaatgcaaatgcaaatgcagttgataagtttaaatgcgttcatcaacaacttttggaatataa

SEQ ID NO: 492943 - DNA, 120 bp, Artificial Sequence
  ENSG00000163046_7 (sequence is synthesized)
acaaaagatatctaaaaattctcaaaatagtaatccagaaggaacatctgaaggaacacctgatgaggctgcacccttggcggaaagaacacctgacacggctgaaagcttggtggaaag

SEQ ID NO: 492944 - DNA, 120 bp, Artificial Sequence
  ENSG00000163046_8 (sequence is synthesized)
aacacctgatgaataggatacagtgaattcctcttcaaagattttagcctgtaaacatcctttaaaattcaagagggggaagattaagtacaatgagttctgagttcctcatcaaagaac

SEQ ID NO: 492945 - DNA, 120 bp, Artificial Sequence
  ENSG00000163046_9 (sequence is synthesized)
aaatatgtcagtatgttcagcttctctgttctttgttctccgttttaaagtttaacttcctcgttcgttatgcctccttgcccctagtttcattaaacagcccccttctagcctctaaca

SEQ ID NO: 492946 - DNA, 120 bp, Artificial Sequence
  ENSG00000163046_10 (sequence is synthesized)
ttgacatctgtgctgaagctacatgtggaatgattgcagaacgttatgctgttgcttgtggatttaatctctaagtgtttacatttaaaggctagcgttcatcaacaacttttggaatat

SEQ ID NO: 492947 - DNA, 120 bp, Artificial Sequence
  ENSG00000163046_11 (sequence is synthesized)
agatgacgcgtgcgccggccggccgccgaggggctaccgttctgcctccgacaggttgtgtgtgggtttacttggaggtgctttgcctgggagaaaggaggctggtggactagggggccc

SEQ ID NO: 492948 - DNA, 120 bp, Artificial Sequence
  ENSG00000163046_12 (sequence is synthesized)
ttcggggattgcgcgcacgcgcagcggccaggccccctgcccagaccgcgaaggctcaaggttgccgcacgcagatttttcctggtaccgcaggccccctcccttccccaggcgtccctg

SEQ ID NO: 492949 - DNA, 120 bp, Artificial Sequence
  ENSG00000163046_13 (sequence is synthesized)
agcgcctctgcgggcccgacgaggggcgactggcgtgtggggagtgtgacccaccctcggtgagaaagccttctctagcgatctgagaggtgtgcctttggggtaccggatcccccggcc

SEQ ID NO: 492950 - DNA, 120 bp, Artificial Sequence
  ENSG00000163046_14 (sequence is synthesized)
tgccgcctctctttgcgttatggtagcgctgccgtggcgactggcttgcagaggaccctcctccacttcccccttgatgaggctctgcaatgccagagggaggcttgtgcaaatattctc

SEQ ID NO: 492951 - DNA, 120 bp, Artificial Sequence
  ENSG00000163046_15 (sequence is synthesized)
ttcccgctgaaactactcaccctgccactccagctcatacccctgccctctttaaatagccaatctgaattggcttagagtgtgcagtccaaccctatccaatagggaaaagacacaaca

SEQ ID NO: 492952 - DNA, 120 bp, Artificial Sequence
  ENSG00000163046_16 (sequence is synthesized)
gtagggactagctgcgttagaaataagaacactttcccctcccttgtccggtgtgatcttgccattgctccatctgcaagaccactcttccatagaagtaaatttgccttgctgtaaaaa

SEQ ID NO: 492953 - DNA, 120 bp, Artificial Sequence
  ENSG00000163046_17 (sequence is synthesized)
tgtaagtcaggttgaaataatgttacaggaagaaattagagatccattttgtctttgttaccagatctatatccctggccctttatatcctgtgtagcaccattttgtaggcagtggacg

SEQ ID NO: 492954 - DNA, 120 bp, Artificial Sequence
  ENSG00000163046_18 (sequence is synthesized)
gtctcattctgtaaaatcccatgtcatctttcccaagttgtagtgggttccaacttgtggttgtcccctcaagtgattcttttttcctaaaagtaaaaatctcccatgctacttacatct

SEQ ID NO: 492955 - DNA, 120 bp, Artificial Sequence
  ENSG00000163046_19 (sequence is synthesized)
aaatctcccatgctacttacatctctacctcgagtttctaaaatattttcaaatgctgcatcaccatgaagccattcaatagacttcactaaatctcaagtaagttggttagatttaaca

SEQ ID NO: 492956 - DNA, 120 bp, Artificial Sequence
  ENSG00000163046_20 (sequence is synthesized)
tcagtcttcacgtataaaagtaaggatttgtgctggcttcagtggtacatatagtaaaattaaaacaacgttgagaagatcagcatggtccccgcacaaagatgacatagaaatctgtaa

SEQ ID NO: 492957 - DNA, 120 bp, Artificial Sequence
  ENSG00000163046_21 (sequence is synthesized)
atttgttttaacattaacatatgtaaattgttttatatttggaagctcaaacattcctatttttctatgaaaatagtttgagaaaacttaattgtctaggattttgctttaaatattaat

SEQ ID NO: 492958 - DNA, 120 bp, Artificial Sequence
  ENSG00000163046_22 (sequence is synthesized)
ttacaagaactattagtatggcttttctgtgcattatgataaatatttaaatttgttaaaggtaaaacattttcaaatattctttcccacccaagttttttttttctttccagttagtgt

SEQ ID NO: 492959 - DNA, 120 bp, Artificial Sequence
  ENSG00000163046_23 (sequence is synthesized)
aaaactacaggaaagtaaaatttgcctgcataaattgagtcaacatgtaaaatttaggagacatgcagaaatctggatttcctcttaaaggattgaatcttgtgtcttttgagcccgtat

SEQ ID NO: 492960 - DNA, 120 bp, Artificial Sequence
  ENSG00000163046_24 (sequence is synthesized)
gactgtttggtatgctatgaagacattctaattttacataaagcatatgtttccagtttgctactgtgcccacctagttacatcacttattcaacttacctcttttgcctctgtaaatat

SEQ ID NO: 492961 - DNA, 120 bp, Artificial Sequence
  ENSG00000163046_25 (sequence is synthesized)
tcttttgcctctgtaaatatttcagttatcaattcctctctcatagtacatttgggtaaagatttcaagttattgaagacagtttataggtgtttataatatatagtttatattttacat

SEQ ID NO: 492962 - DNA, 120 bp, Artificial Sequence
  ENSG00000163046_26 (sequence is synthesized)
gggttgtcttctaaaatttagaatattttttaaatgatgatttttcttcatataaaccataaataatcatcttctattagaaagcctttaagcctttttagattaatcatgtttgtattt

SEQ ID NO: 492963 - DNA, 120 bp, Artificial Sequence
  ENSG00000163046_27 (sequence is synthesized)
aggttatgcatattgcagaaaaaatattatatctttctccacagaattgtcccttaaaattcaagtgatttatggcttctattttgctaagccacatacatgagttagaactttcgttaa

SEQ ID NO: 492964 - DNA, 120 bp, Artificial Sequence
  ENSG00000163046_28 (sequence is synthesized)
taagccgttttattcatacttctgatattttgccaaaaaatagtatcaattacaatagaaaccagaataaaagtggattattgcattttaagaagtagatatgcattaggatcctaggag

SEQ ID NO: 492965 - DNA, 65 bp, Artificial Sequence
  ENSG00000163046_29 (sequence is synthesized)
ccttgtatactgaatttttaatagccgagataaaatcctattgtctggtaataggataaacccca

SEQ ID NO: 492966 - DNA, 120 bp, Artificial Sequence
  ENSG00000163046_30 (sequence is synthesized)
cgagataaaatcctattgtctggtaataggataaaccccatggaccatttaataataagcaatcaaagtttatttgaagccaatctcttttaatttagagccacttccttagtgacccat

SEQ ID NO: 492967 - DNA, 120 bp, Artificial Sequence
  ENSG00000163046_31 (sequence is synthesized)
ttagagcaggagtgcctgacattggcatttggaatcttggaatcattgatagaagagaatcaagtgagtttgtatcagccagaggaaacctccatttttggggggaagctttcaaaactg

SEQ ID NO: 492968 - DNA, 120 bp, Artificial Sequence
  ENSG00000163046_32 (sequence is synthesized)
tatccctgaaattctaatttgtcaaatgttaatgtttgccacaaaaatatactgtcaaataaggattaggtaaagttcaattcatttcttgaataatgaatatttaattcacagttttat

SEQ ID NO: 492969 - DNA, 120 bp, Artificial Sequence
  ENSG00000163046_33 (sequence is synthesized)
aacatttcttgaacatagataatggtggaatcttttggggtacagtgcttctggtaaggtaattattctttggaatatagttgaagaaacactgttctagaggtaataatttagattact

SEQ ID NO: 492970 - DNA, 120 bp, Artificial Sequence
  ENSG00000163046_34 (sequence is synthesized)
aatttagtaaaaaataaagtatttactactatgtcttagggtttaaggacatagaggtaaaagatacagcccctgccctcaagaagctcttggtttacatgggaaacaataaaatcatta

SEQ ID NO: 492971 - DNA, 120 bp, Artificial Sequence
  ENSG00000163046_35 (sequence is synthesized)
caatataatgatttttggagataactagagttaatgtggtgatgcagaggctgaatgtttacaagagaaggtgcagtgcatgggaaagcacagaaaagtgagaaagaagggattgctatt

SEQ ID NO: 492972 - DNA, 120 bp, Artificial Sequence
  ENSG00000163046_36 (sequence is synthesized)
gatttactttccattgtttaagttcataggatattatataaggtattcaattcagctgagaaatatgtaatttcatgaattataaattgtttttgctgttttacaggctggccacacacc

SEQ ID NO: 492973 - DNA, 120 bp, Artificial Sequence
  ENSG00000163050_0 (sequence is synthesized)
aaacagatccggagcgcgtggcgggcgtcagcgcggtggccagcgcgcagaggcgggcgcggaggcggctagaaggtgaccgcggatcccagcttcctgcagccagccctgaaggatggc

SEQ ID NO: 492974 - DNA, 120 bp, Artificial Sequence
  ENSG00000163050_1 (sequence is synthesized)
tgccatattgggagacaccatcatggtggctaaaggccttgtcaagctgacccaggcggccgtggaaacccacctgcagcacttgggcatcggaggggagctgatcatggcggccagggc

SEQ ID NO: 492975 - DNA, 120 bp, Artificial Sequence
  ENSG00000163050_2 (sequence is synthesized)
cctgcagtccacggctgtggagcagattggcatgttcttggggaaggtgcagggtcaggataaacatgaagaatattttgctgagaacttcggcggcccagaaggggagttccacttctc

SEQ ID NO: 492976 - DNA, 120 bp, Artificial Sequence
  ENSG00000163050_3 (sequence is synthesized)
agtcccgcatgcagccggagcctccacagacttctcttcagcctccgctcccgaccagtcagcgcccccatccctgggtcatgcccacagcgagggcccagctcctgcctacgtggccag

SEQ ID NO: 492977 - DNA, 120 bp, Artificial Sequence
  ENSG00000163050_4 (sequence is synthesized)
tggaccctttagagaagccgggttccccggccaggcctcctcccctctgggcagggccaacgggaggctctttgcaaaccccagagactcattctctgccatgggctttcagcgaaggtt

SEQ ID NO: 492978 - DNA, 120 bp, Artificial Sequence
  ENSG00000163050_5 (sequence is synthesized)
cttccaccaggaccaatcccctgttgggggcctcacagccgaggacattgagaaggcccggcaggctaaggctcgccccgagaacaagcagcacaaacagacgctcagcgagcatgcccg

SEQ ID NO: 492979 - DNA, 120 bp, Artificial Sequence
  ENSG00000163050_6 (sequence is synthesized)
ggagcggaaggtgcctgtgacgaggattggccggctggccaacttcggaggtctggccgtgggcctgggcttcggggcactggcagaggtcgccaagaagagcctgcgctccgaggaccc

SEQ ID NO: 492980 - DNA, 120 bp, Artificial Sequence
  ENSG00000163050_7 (sequence is synthesized)
ctcagggaagaaggccgtgctgggttccagtcctttcctgtccgaggccaatgcagagcggatcgtgcgcacgctctgcaaggtgcgtggtgcggcactcaagctgggccagatgctgag

SEQ ID NO: 492981 - DNA, 120 bp, Artificial Sequence
  ENSG00000163050_8 (sequence is synthesized)
catccaggatgatgcctttatcaacccccacctggctaagatcttcgagcgggtgcggcagagcgcggacttcatgccactgaagcagatgatgaaaactctcaacaacgacctgggccc

SEQ ID NO: 492982 - DNA, 120 bp, Artificial Sequence
  ENSG00000163050_9 (sequence is synthesized)
caactggcgggacaagttggaatacttcgaggagcggcccttcgccgccgcatccattgggcaggtgcacttggcccgaatgaagggcggccgcgaggtggccatgaagatccagtaccc

SEQ ID NO: 492983 - DNA, 120 bp, Artificial Sequence
  ENSG00000163050_10 (sequence is synthesized)
tggcgtggcccagagcatcaacagtgatgtcaacaacctcatggccgtgttgaacatgagcaacatgcttccagaaggcctgttccccgagcacctgatcgacgtgctgaggcgggagct

SEQ ID NO: 492984 - DNA, 120 bp, Artificial Sequence
  ENSG00000163050_11 (sequence is synthesized)
tgcagcccacatgtgctgaccacagagctggtgtctggcttccccctggaccaggccgaagggctcagccaggagattcggaacgagatctgctacaacatcctggttctgtgcctgagg

SEQ ID NO: 492985 - DNA, 120 bp, Artificial Sequence
  ENSG00000163050_12 (sequence is synthesized)
gagctgttcgagttccacttcatgcaaacagaccccaactggtccaacttcttctatgacccccagcagcacaaggtggctcttttggattttggggcaacgcgggaatatgacagatcc

SEQ ID NO: 492986 - DNA, 120 bp, Artificial Sequence
  ENSG00000163050_13 (sequence is synthesized)
ttcaccgacctctacattcagatcatcagggctgctgccgacagggacagggagactgtgcgggcgaaatccatagagatgaagttcctcaccggctacgaggtcaaggtcatggaagac

SEQ ID NO: 492987 - DNA, 120 bp, Artificial Sequence
  ENSG00000163050_14 (sequence is synthesized)
gcccacttggatgccatcctcatcctgggggaggccttcgcctctgatgagccttttgattttggcactcagagcaccaccgagaagatccacaacctgattcccgtcatgctgaggcac

SEQ ID NO: 492988 - DNA, 120 bp, Artificial Sequence
  ENSG00000163050_15 (sequence is synthesized)
cgtctcgtccccccacccgaggaaacctactccctgcacaggaagatggggggctccttcctcatctgctccaagctgaaggcccgcttcccctgcaaggccatgttcgaggaggcctac

SEQ ID NO: 492989 - DNA, 120 bp, Artificial Sequence
  ENSG00000163050_16 (sequence is synthesized)
agcaactactgcaagaggcaggcccagcagtagggctgcgggccacgcccaggccggctccgcgggaactctctccctcagacaggccaaaaaccagtagcgaggtcgtggtgatgctct

SEQ ID NO: 492990 - DNA, 120 bp, Artificial Sequence
  ENSG00000163050_17 (sequence is synthesized)
ttttaactcctttgcccaataaggggggtggctgcctggagccccgtagccagcgctttccacggtttctgttgctaaatggttgtagggtgagaagtgcaagaatgaagatgaagcccc

SEQ ID NO: 492991 - DNA, 120 bp, Artificial Sequence
  ENSG00000163050_18 (sequence is synthesized)
actgctcggtcagtctgcctccgtgtgtcctctgaaataagcagatgaagatgaaagggcaactttgttttcttctttttcctgatgtgaatgttaagcagaagggagagagtccttact

SEQ ID NO: 492992 - DNA, 120 bp, Artificial Sequence
  ENSG00000163050_19 (sequence is synthesized)
cccttccaatctctgttcagtgcaaaacccagaaacatgaacagatacgattgtgggattttatcatctgtgtagtaggtgtgtgtatgtgtttctagagtgagatttgtgttttctgcc

SEQ ID NO: 492993 - DNA, 120 bp, Artificial Sequence
  ENSG00000163050_20 (sequence is synthesized)
cttttcctctccagccgatgggctggagctgggagaggtgctgagctaacagtgccaacaagtgctccttaagcctgcgaggcccaggcctgtggggctggttctcacctttgacagctg

SEQ ID NO: 492994 - DNA, 120 bp, Artificial Sequence
  ENSG00000163050_21 (sequence is synthesized)
aatgttcctaaagaactgctgccccacagtgagggtgggagcagcggaacagggaatgccagacacaggctcgctgctgctggaaggcggggtgggacttccttcctctgtccggagagg

SEQ ID NO: 492995 - DNA, 120 bp, Artificial Sequence
  ENSG00000163050_22 (sequence is synthesized)
cacaggtgtcaccagttccagccaaaggctcctcacaggcgctgtgaatttttgtacaagtcttgtaattatcgaatcaacaacttgtttcaatttaataaaaatgctcatgggaagtgc

SEQ ID NO: 492996 - DNA, 120 bp, Artificial Sequence
  ENSG00000163050_23 (sequence is synthesized)
cttggaggtccccagagagcagggagacaaatgaacccagaacacaaatggcaaagaagaaaaatgagagaatttgtaaaagacagcattcgaacatgccgaacaagagcagggtactgg

SEQ ID NO: 492997 - DNA, 120 bp, Artificial Sequence
  ENSG00000163050_24 (sequence is synthesized)
tgttcaaacacctgtatctcccccgtgtaacccgtcaactaatatctttccatatttgctccagatttgtctttagaaataaaacccacgttctgaagtcctgtttgtatgtggccccag

SEQ ID NO: 492998 - DNA, 120 bp, Artificial Sequence
  ENSG00000163050_25 (sequence is synthesized)
tcctgttgcctccgcctcctgtcctgaagtcgatttctgcccttctcatctatggttagttttgttttgtatgttggcatgttttcttaactttacagaaatggtatcatactgtacata

SEQ ID NO: 492999 - DNA, 120 bp, Artificial Sequence
  ENSG00000163050_26 (sequence is synthesized)
agaaatggtatcatactgtacatatttgataattttttaaaatattgcattctggaggcatgtataaatgtagctccagttcatttattttatttattttttgagatggagttttgctct

SEQ ID NO: 493000 - DNA, 63 bp, Artificial Sequence
  ENSG00000163050_27 (sequence is synthesized)
aatggcatttcctgagtagctgggattacagttgcccgccaccatgcctggctaattttgtat

SEQ ID NO: 493001 - DNA, 61 bp, Artificial Sequence
  ENSG00000163050_28 (sequence is synthesized)
aactcctgactgcaggtgatccactattttaactattgtatagtgttccattgtatgagtt

SEQ ID NO: 493002 - DNA, 120 bp, Artificial Sequence
  ENSG00000163050_29 (sequence is synthesized)
agttattttaactattgtatagtgttccattgtatgagttctactgtttatatgctattgatcgacctgtaggggttttgcagtgtttctgtattacagctgtgctgcagtgagcatccc

SEQ ID NO: 493003 - DNA, 120 bp, Artificial Sequence
  ENSG00000163050_30 (sequence is synthesized)
atcacattgtgtggatttgaggaagtattggaattcccccaattgactggacattcccaattaccctccaagtatgtgtctgtttatccttccatccgcaatctgagagttccccaactc

SEQ ID NO: 493004 - DNA, 120 bp, Artificial Sequence
  ENSG00000163050_31 (sequence is synthesized)
tataatacttggtgtcatcagacttttcatcttgtctgattggatgggtgtcatttcctttaggttttataattatcttttcatatgtgtattggctgtacaaggttccttctctgttca

SEQ ID NO: 493005 - DNA, 63 bp, Artificial Sequence
  ENSG00000163050_32 (sequence is synthesized)
tcatatgtgtattggctgtacaaggttccttctctgttcattattattaatttttttagacag

SEQ ID NO: 493006 - DNA, 120 bp, Artificial Sequence
  ENSG00000163050_33 (sequence is synthesized)
acaggtgtgagtcactgcgcccagcccaagtttccttctctgttacttgttcatatcctctgcccatttttcacttggattttttgtcttacggatatttaagcctcttaaaatatatat

SEQ ID NO: 493007 - DNA, 120 bp, Artificial Sequence
  ENSG00000163050_34 (sequence is synthesized)
ttacggatatttaagcctcttaaaatatatattctggagagatgctaatctttgattaattatatgcattgcaaatgtctggtacattgtggcttgcctctcttccctgcctttaggagt

SEQ ID NO: 493008 - DNA, 120 bp, Artificial Sequence
  ENSG00000163050_35 (sequence is synthesized)
gttttgctggacccaagtaatttttaaatgttaatgttattaaatctatcagttttttgcttgtatggcttatgccattgaatcttgttttaagagatccttccctaccctcaaggtttt

SEQ ID NO: 493009 - DNA, 120 bp, Artificial Sequence
  ENSG00000163050_36 (sequence is synthesized)
ctaaatttttattttcataataagatttttagttcatctgaaatgtatttttatgattgtatttagtagggacctaattttgtttttctttgtaaccaggtgtcccagcactgtttactg

SEQ ID NO: 493010 - DNA, 120 bp, Artificial Sequence
  ENSG00000163050_37 (sequence is synthesized)
aacagtctctcctttctcgctggtctgtagaactctcctgacatataccaagtttccataagtgggtggatgggttcctgagctctctactgttaatagaacttgctctctcgcaggcca

SEQ ID NO: 493011 - DNA, 120 bp, Artificial Sequence
  ENSG00000163050_38 (sequence is synthesized)
atgcctcaccaggtgattgaagcagagaaacttaggtggtgaaaggagaagatggggcctgtcctgagagtttctgttcctgagatgctagaggcagaggtttccagaaccacaagacag

SEQ ID NO: 493012 - DNA, 120 bp, Artificial Sequence
  ENSG00000163050_39 (sequence is synthesized)
acccaagagggctgtgttggcaaaacaaatggcagagtggagctggccagaggcatctgtgcgtggcgactccaagagagcacccgactccagatggcgacactgcaggatggagcgggg

SEQ ID NO: 493013 - DNA, 120 bp, Artificial Sequence
  ENSG00000163050_40 (sequence is synthesized)
cactgcaggatggagcggggcatgcctgcagacaggtgtcagagacggggtcttgctgtattgcccaggctagatttgaactcctggcctgaagtaatcctcccaccttggcctcccaaa

SEQ ID NO: 493014 - DNA, 120 bp, Artificial Sequence
  ENSG00000163050_41 (sequence is synthesized)
cagaccattcgtatatatcttctttggagaaatgtgtggtgcaatcttggttcactgcaacttccacctcctgagttccagcaattctccagtctcagcctctcgagtagctgggattac

SEQ ID NO: 493015 - DNA, 76 bp, Artificial Sequence
  ENSG00000163050_42 (sequence is synthesized)
ttacaggcatgtgccaccatgcctggccatcttcgctcttgagcacctgtgtcatgatggggctcactgtggcctc

SEQ ID NO: 493016 - DNA, 120 bp, Artificial Sequence
  ENSG00000163050_43 (sequence is synthesized)
gcgattctcctgcctcagcctcccataccagttcaactttttcagattccacgtgagggagtgacggggcaaatctgcgtgctgctggtggcggtgcctcccagggctgctcggcgggga

SEQ ID NO: 493017 - DNA, 120 bp, Artificial Sequence
  ENSG00000163050_44 (sequence is synthesized)
gggacgccgagggctgcacccgagctccatcccgtgttggctgcgcgccctccaaaaccccggctgtcagcgactgcgggcacctgcacgccgacgagaccggcgggcggacagcgactc

SEQ ID NO: 493018 - DNA, 120 bp, Artificial Sequence
  ENSG00000163050_45 (sequence is synthesized)
gtcgaacatcctctgatctacctgatcctgctgcccttccattccacttccccacatctgttctttctggtcgtgtttactcccctattaaaaaaacaaaaccagaaaacgtgtttgcct

SEQ ID NO: 493019 - DNA, 120 bp, Artificial Sequence
  ENSG00000163050_46 (sequence is synthesized)
agatcttgagactctggaagatcttaacagtcagaggttccccctatttgcaatgatctcctttcctgccccttcctatccttgcaataatccttttgaataaagtctctccttactaaa

SEQ ID NO: 493020 - DNA, 120 bp, Artificial Sequence
  ENSG00000163050_47 (sequence is synthesized)
atcccagcttcctgcagccaggtaaggctgccacccgccggcccgccgcgtgcccaggcgccgtctggctgcggccagagctggggtcaacacccacctcagcccttcttgcattctctt

SEQ ID NO: 493021 - DNA, 120 bp, Artificial Sequence
  ENSG00000163050_48 (sequence is synthesized)
gagagctgtgtgcctgaaagtggccagagaacagtttgaggggggtcctgatggagggtgatgagggggacacacctctgcctgcagaaggaggagctcaatgtggcccaccctacagct

SEQ ID NO: 493022 - DNA, 120 bp, Artificial Sequence
  ENSG00000163050_49 (sequence is synthesized)
tccacctgcccctctcgtgggcttgtctctggacttgcttcaggcagagaagaatccagacacagagagacattggtgaaggtctggccgtgggcctgggcttcggggcactggcagagg

SEQ ID NO: 493023 - DNA, 120 bp, Artificial Sequence
  ENSG00000163050_50 (sequence is synthesized)
cagggaggcagaagggaccatgttcagcagctggtgaaggcccctccagctctgaggggcagagggctggggttgcagcctgggccgaggccatatcctgcctggggtgaaggagggccc

SEQ ID NO: 493024 - DNA, 120 bp, Artificial Sequence
  ENSG00000163050_51 (sequence is synthesized)
tctgcctggttggggggtgtgtgtggggggggggacggtgtggagggcctgtggctagggcgtgacctccctcccctacccagggacctgctgaagggccaccccttcttctatgtgcct

SEQ ID NO: 493025 - DNA, 120 bp, Artificial Sequence
  ENSG00000163050_52 (sequence is synthesized)
aaacagatccggagcgcgtggcgggcgtcagcgcggtggccagcgcgcagaggcgggcgcggaggcggctagaaggtgaccgcggatcccagcttcctgcagccaggtctggccgtgggc

SEQ ID NO: 493026 - DNA, 120 bp, Artificial Sequence
  ENSG00000163050_53 (sequence is synthesized)
cttccagggccgggagcagtggccccaccaaagctcagtgggcaagatgtgagcaggctggggagagatcttagaagataataggcctggtctccagacgggtggctctgggtccaaaga

SEQ ID NO: 493027 - DNA, 120 bp, Artificial Sequence
  ENSG00000163050_54 (sequence is synthesized)
aacacatggaataaagagcagagaggaaaaattgctctctacaggtggtcagaacacaggtcatttcaacattttactatgttttattttccaaatttcttttgtaattatgaaaaactc

SEQ ID NO: 493028 - DNA, 120 bp, Artificial Sequence
  ENSG00000163050_55 (sequence is synthesized)
tgcatgttgagtgtaaaaagcccaccttctcaggtcactgggcggaggctggggctcccgggaagctgagtggccgagggcgtgtgtgcgagggctcctgtctttctggcctcacccgtg

SEQ ID NO: 493029 - DNA, 120 bp, Artificial Sequence
  ENSG00000163050_56 (sequence is synthesized)
gcctgtccctatgggggctgcaaggggcagagctggggcctggctcatggaggcctctacaccccacgtcccgcagggcaccctctctcctggcagggccatatgtggtgtcttctggcc

SEQ ID NO: 493030 - DNA, 120 bp, Artificial Sequence
  ENSG00000163050_57 (sequence is synthesized)
ccagtgcctggacggcaccagaagcttgggaagtatttgctaaatgagtgactttgggggcacagaggggcccccagcaagcttgatttggggtgggcaaggacaggggacaagtgattg

SEQ ID NO: 493031 - DNA, 120 bp, Artificial Sequence
  ENSG00000163050_58 (sequence is synthesized)
ctttttggggccagagctggtgggagggtggccgtgagctgttcccaggggtgaggtgaggcaggagtaggtggacaacgaggctgtgatggggtccaggtcacggcagcatggctgggt

SEQ ID NO: 493032 - DNA, 120 bp, Artificial Sequence
  ENSG00000163050_59 (sequence is synthesized)
cttagctctggttctccagggtgtgggctggggccaggacacagctgggaagccagttgggggttgggggagtgccccaggcagggcccacccgtctccctgggctaactcccctgcctc

SEQ ID NO: 493033 - DNA, 120 bp, Artificial Sequence
  ENSG00000163050_60 (sequence is synthesized)
acccatacccccacagtaccctggcgtggcccagagcatcaacagtgatgtcaacaacctcatggccgtgttgaacatgagcaacatgcttccagaaggtctgaggctaggtggttgggt

SEQ ID NO: 493034 - DNA, 120 bp, Artificial Sequence
  ENSG00000163050_61 (sequence is synthesized)
caagggcaggagtgggtggcaggcatctgtgttgggttctggggaccagagggggtcctccctgcagagcccccttcctcgctgatgccctcctccctggcccaggcctgttccccgagc

SEQ ID NO: 493035 - DNA, 120 bp, Artificial Sequence
  ENSG00000163053_0 (sequence is synthesized)
agaattagccggtataggaatgaacgagcatgaagatttgaaattgctccgattggaaggaagcccaggttaggtttgggcacctccaaacgcacccgttttaaagccacctggactgag

SEQ ID NO: 493036 - DNA, 120 bp, Artificial Sequence
  ENSG00000163053_1 (sequence is synthesized)
gcgtcgagctttcagctccaccaaacgctcacctggcctggcagcgagcggcggaagagcccgggagcccctcacagagcgcaccgagccgggcggagagctgagccgcaggcacccgcg

SEQ ID NO: 493037 - DNA, 120 bp, Artificial Sequence
  ENSG00000163053_2 (sequence is synthesized)
tctccaggatgataggcgacattgcaacaaatctctacacccagcagctcagggggctccaagcagagcagcaagttcgaggatccgggcgtggagccgagtgaggccgcagcccagcgg

SEQ ID NO: 493038 - DNA, 120 bp, Artificial Sequence
  ENSG00000163053_3 (sequence is synthesized)
gcctcgggcgaaaaatcttggaaaatgtataccagtcatgaagatattgggtatgattttgaagatggccccaaagacaaaaagacactgaagccccacccaaacattgatggcggatgg

SEQ ID NO: 493039 - DNA, 120 bp, Artificial Sequence
  ENSG00000163053_4 (sequence is synthesized)
gcttggatgatggtgctctcctctttctttgtgcacatcctcatcatgggctcccagatggccctgggtgtcctcaacgtggaatggctggaagaattccaccagagccgcggcctgacc

SEQ ID NO: 493040 - DNA, 120 bp, Artificial Sequence
  ENSG00000163053_5 (sequence is synthesized)
gcctgggtcagctccctcagcatgggcatcaccttgatagtgggccctttcatcggcttgttcattaacacctgtgggtgccgccagactgcgatcattggagggctcgtcaactccctg

SEQ ID NO: 493041 - DNA, 120 bp, Artificial Sequence
  ENSG00000163053_6 (sequence is synthesized)
ggctgggtgttgagtgcctatgctgcaaacgtgcattatctcttcattacttttggagtcgcagctggcctgggcagcgggatggcctacctgccagcggtggtcatggtgggcaggtat

SEQ ID NO: 493042 - DNA, 120 bp, Artificial Sequence
  ENSG00000163053_7 (sequence is synthesized)
ttccagaagagacgcgccctcgcccagggcctcagcaccacggggaccggattcggtacgttcctaatgactgtgctgctgaagtacctgtgcgcagagtacggctggaggaatgccatg

SEQ ID NO: 493043 - DNA, 120 bp, Artificial Sequence
  ENSG00000163053_8 (sequence is synthesized)
ttgatccaaggtgccgtttccctaaacctgtgtgtttgtggggcgctcatgaggcccctctctcctggtaaaaacccaaacgacccaggagagaaagatgtgcgtggcctgccagcgcac

SEQ ID NO: 493044 - DNA, 120 bp, Artificial Sequence
  ENSG00000163053_9 (sequence is synthesized)
tccacagaatctgtgaagtcaactggacagcagggaagaacagaagagaaggatggtgggctcgggaacgaggagaccctctgcgacctgcaagcccaggagtgccccgatcaggccggg

SEQ ID NO: 493045 - DNA, 120 bp, Artificial Sequence
  ENSG00000163053_10 (sequence is synthesized)
cacaggaagaacatgtgtgccctccggattctgaagactgtcagctggctcaccatgagagtcaggaagggcttcgaggactggtattcgggctactttgggacagcctctctatttaca

SEQ ID NO: 493046 - DNA, 120 bp, Artificial Sequence
  ENSG00000163053_11 (sequence is synthesized)
aatcgaatgtttgtagcctttattttctgggctttgtttgcatacagcagctttgtcatccccttcattcacctcccagaaatcgtcaatttgtataacttatcggagcaaaacgacgtt

SEQ ID NO: 493047 - DNA, 120 bp, Artificial Sequence
  ENSG00000163053_12 (sequence is synthesized)
ttccctctgacgtcaattatagcaatagttcacatctttggaaaagtgatcctgggcgtcatagccgacttgccttgcattagtgtttggaatgtcttcctgttggccaacttcaccctt

SEQ ID NO: 493048 - DNA, 120 bp, Artificial Sequence
  ENSG00000163053_13 (sequence is synthesized)
gtcctcagtatttttattctgccgttgatgcacacgtacgctggcctggcggtcatctgtgcgctgatagggttttccagtggttatttctccctaatgcccgtagtgactgaagacttg

SEQ ID NO: 493049 - DNA, 120 bp, Artificial Sequence
  ENSG00000163053_14 (sequence is synthesized)
gttggcattgaacacctggccaatgcctacggcatcatcatctgtgctaatggcatctctgcattgctgggaccaccttttgcagggtggatctatgacatcacgcaaaaatatgatttt

SEQ ID NO: 493050 - DNA, 120 bp, Artificial Sequence
  ENSG00000163053_15 (sequence is synthesized)
tccttctacatatgtggtttgctttacatgataggaatactctttttacttattcagccgtgcattcgaattatagaacaatccagaagaaaatacatggatggtgcacatgtttagtat

SEQ ID NO: 493051 - DNA, 120 bp, Artificial Sequence
  ENSG00000163053_16 (sequence is synthesized)
catgtaatgttccgtgtaggtttcattgtaatactcatgcctacctcgcatggttgctgtgaggcacctatgacaggacgtgggaaagcattttgtacggtaactggcactgtcatttgt

SEQ ID NO: 493052 - DNA, 120 bp, Artificial Sequence
  ENSG00000163053_17 (sequence is synthesized)
gacagcctagtaagtaattggtagaaatgcccttataaaaaccattctcttgtcatctactgggactagggttttaaatacagcttttaaaaacaaaaacagggaataaaagcttttcaa

SEQ ID NO: 493053 - DNA, 120 bp, Artificial Sequence
  ENSG00000163053_18 (sequence is synthesized)
ctcaaccacttctttgtaagacaaaactgaagtatctgtgtgcttccagaaagcttacagataaatgggtttcaagcacaagaatatgactagatttcagaaattaattattacagggag

SEQ ID NO: 493054 - DNA, 120 bp, Artificial Sequence
  ENSG00000163053_19 (sequence is synthesized)
ctattgatctactagcatcaaacaaaggcaagctctaattccacaggtaatacaatttagtgcaattaaagaaacacggcttgtatttttatgagggaattctgcagctagggattgtga

SEQ ID NO: 493055 - DNA, 120 bp, Artificial Sequence
  ENSG00000163053_20 (sequence is synthesized)
ctcctaaatcctcctctaaaagaaggcacttgccattaatcctaattcagtgctatccagttataaatggaatcttgagacaaaaccttaacaaagaaataacagtaatgatttccttag

SEQ ID NO: 493056 - DNA, 120 bp, Artificial Sequence
  ENSG00000163053_21 (sequence is synthesized)
cagaagccgtatttgtacgcacaacattaaatcaagggctacaattcaagcacttttattcgtatcattggcctcttagatgatataagcatgaggtggggcctgtaatatttttttctg

SEQ ID NO: 493057 - DNA, 120 bp, Artificial Sequence
  ENSG00000163053_22 (sequence is synthesized)
agtttcttctgcccaaaaatataatatagaactaattgctaactgacaaataaagttaatagttaaatcatctccaaggaatgttgctaatccaaagtataacactatcaatttgtgagg

SEQ ID NO: 493058 - DNA, 120 bp, Artificial Sequence
  ENSG00000163053_23 (sequence is synthesized)
ataataaatggaatgccattagtgtagatgtctgtgccacatctgacactggagtagtgataacaaatagcccatctctagactctcgtgttgttatatagaccattcatttgcctgagc

SEQ ID NO: 493059 - DNA, 120 bp, Artificial Sequence
  ENSG00000163053_24 (sequence is synthesized)
gtggcacagttttaaaaatagttctcttgattgatttcatacagaagatgactgtgatccatgacatctaataatgccctttctttatctgagatgtctatttttctaagccaaacgttt

SEQ ID NO: 493060 - DNA, 120 bp, Artificial Sequence
  ENSG00000163053_25 (sequence is synthesized)
ttcagactgcagaatgttcttcccagatcatttgaaatttctggctgccttacttgtttacagatagtttaagactatttaaatttctactcacaatttgatcatcacacacacacaaat

SEQ ID NO: 493061 - DNA, 120 bp, Artificial Sequence
  ENSG00000163053_26 (sequence is synthesized)
ccttgaatatcattgccagtgtcttaggtcaaatttacctaaagtgaatacagcccattctcaattatccttcacaattagacgcaggaatgctactaggaattggaatcaaacaatgcc

SEQ ID NO: 493062 - DNA, 120 bp, Artificial Sequence
  ENSG00000163053_27 (sequence is synthesized)
accccaagcgtaattttagccagcagtttcagttatactcaaccatgcccttctgagctgttaacaagtgattcaatggacaagttctctttttgttccatctccattatttcctgctct

SEQ ID NO: 493063 - DNA, 120 bp, Artificial Sequence
  ENSG00000163053_28 (sequence is synthesized)
aatgtatagtgggagtggttgtgtaatgaaaggaccaccaaaataataaaaggcagctaatggaaaggagagacaaaagcatggttaatatatatacttaatattacctccaatgactcg

SEQ ID NO: 493064 - DNA, 120 bp, Artificial Sequence
  ENSG00000163053_29 (sequence is synthesized)
ggaattgcctgtaaattattatagacaatagattgcatgtcatactccatttggttcaacacaacaacctatgtgttatcattacagctttggctgctgttaaagaatccagctctctat

SEQ ID NO: 493065 - DNA, 120 bp, Artificial Sequence
  ENSG00000163053_30 (sequence is synthesized)
tttgataaagataatcttaaagctgaggcaatgctccctcctctatctctctctgtgtaatttaccatagaattaggatgattagattgaaacacatgttgtatgttttaaaaactacat

SEQ ID NO: 493066 - DNA, 120 bp, Artificial Sequence
  ENSG00000163053_31 (sequence is synthesized)
tgcttcattactttcattttccgacaacatcaaactaacaagaggcagtgttaaatattttaaatggtgctatagccaatgtatttgaatgcttgcactgctggttgtgtatcatcaata

SEQ ID NO: 493067 - DNA, 120 bp, Artificial Sequence
  ENSG00000163053_32 (sequence is synthesized)
tgaactttttatccaatgactcaactctaattacatctaagttagacttgctcacgttcagtttgtacagttgtgtgttgacttactatgttttgaaagtggtgacttctaccgaatgag

SEQ ID NO: 493068 - DNA, 120 bp, Artificial Sequence
  ENSG00000163053_33 (sequence is synthesized)
tggaagttcccattgtcaaaaaaaataaagacctgcttgcagtattcatgttgacaacagagtaaaagagaatactgtaaagaattactgcaaatatttcctgtttatgttatttgccgt

SEQ ID NO: 493069 - DNA, 120 bp, Artificial Sequence
  ENSG00000163053_34 (sequence is synthesized)
tgtttgaagatattataaagggttaattgtatatttatatcatgtgctttatcgttttcccctcatgtatccaagtaatttttatttacatacaactaaataaatgttgtcctctttgaa

SEQ ID NO: 493070 - DNA, 120 bp, Artificial Sequence
  ENSG00000163053_35 (sequence is synthesized)
atccgaggccgcgcgcgccgcgggcctggggaatggagcgacgccgggggcatcggagcctagctcagctcagctccgctccccagccttctccgcggcagcctcttcagcctgctggcc

SEQ ID NO: 493071 - DNA, 120 bp, Artificial Sequence
  ENSG00000163053_36 (sequence is synthesized)
catctctgcattgctgggaccaccttttgcaggtaaactctctgaggttttaagagctcagagtgcatgtacatatggtgcgttatgttataaagtcccagataaagaagaaggtttcca

SEQ ID NO: 493072 - DNA, 120 bp, Artificial Sequence
  ENSG00000163053_37 (sequence is synthesized)
gcttggggacgcgcgccttgctgctcaagctggccggggccccgcgagcgtcatcctgggcacccccgtccggctggagaagcgcgttctgcccggagcccagcctcgctgcccggctgc

SEQ ID NO: 493073 - DNA, 120 bp, Artificial Sequence
  ENSG00000163053_38 (sequence is synthesized)
tctctaggcccgtttgggactcgaactggacagtgatgaggcgcagagcgggggacccggggctgcgcctagggacttcgcggggtgcggatgcctctctgcacaggctgtggtgctgca

SEQ ID NO: 493074 - DNA, 120 bp, Artificial Sequence
  ENSG00000163060_0 (sequence is synthesized)
ggtttacacagtgtcacccaagcgactgggagccgcgtcctgctctgggactgagccgttggagctgccccgctgaccgcactaggctgaccgcaaccggctgaccacacacagtcctca

SEQ ID NO: 493075 - DNA, 120 bp, Artificial Sequence
  ENSG00000163060_1 (sequence is synthesized)
ctcccctggccctggtgggcggcaggcaccatggcgcagacagtgccgccctgcgagctgccctgcaaagagtacgacgtggcccgtaacacgggcgcctacacgtcctccggcctggcc

SEQ ID NO: 493076 - DNA, 120 bp, Artificial Sequence
  ENSG00000163060_2 (sequence is synthesized)
accgccagcttccgcacctccaagtacctgctggaggagtggttccagaactgctatgctcgctaccaccaggccttcgccgaccgcgaccagtcggagcggcagcggcacgagagccag

SEQ ID NO: 493077 - DNA, 120 bp, Artificial Sequence
  ENSG00000163060_3 (sequence is synthesized)
cagctggccacagagacccaggcgctggcgcagcgcacgcagcaagactccacgcgcacagtgggcgagcgactgcaggacacgcacagctggaagtcggagctgcagcgtgagatggag

SEQ ID NO: 493078 - DNA, 120 bp, Artificial Sequence
  ENSG00000163060_4 (sequence is synthesized)
gcgctggctgcggagaccaacttgctcctggcccagaagcaacggctggagcgcgccctggacgccacagaggtgcccttctccatcaccactgacaacctgcagtgccgtgagcgccgc

SEQ ID NO: 493079 - DNA, 120 bp, Artificial Sequence
  ENSG00000163060_5 (sequence is synthesized)
gagcaccccaacctcgtgcgcgaccatgtggaaacggagctgctgaaggaagccgagctcatccggaacattcaggagctgctgaagagaaccatcatgcaagcagtgagccagatccga

SEQ ID NO: 493080 - DNA, 120 bp, Artificial Sequence
  ENSG00000163060_6 (sequence is synthesized)
acctgcgggcgccaccacagccagagcaccgaggtgcaggctcatccgtactccaccaccttccaagagagcgcctccaccccggagacccgggccaagttcacgcaggacaatctgtgc

SEQ ID NO: 493081 - DNA, 120 bp, Artificial Sequence
  ENSG00000163060_7 (sequence is synthesized)
cgtgcccagcgcgagcgcctggcctcggccaacctgcgggtgctggtggactgcatccttcgcgacacctccgaggacctgcggctccagtgcgacgccgtgaacctggccttcgggcgc

SEQ ID NO: 493082 - DNA, 120 bp, Artificial Sequence
  ENSG00000163060_8 (sequence is synthesized)
cgctgtgaggagctggaggacgcgcggtacaagctgcatcaccacctgcacaagacactgcgggaaatcacagatcaggaacacaacgtggcggcactgaagcaggccatcaaggacaaa

SEQ ID NO: 493083 - DNA, 120 bp, Artificial Sequence
  ENSG00000163060_9 (sequence is synthesized)
gaggcacctctgcacgtagcccagacccggctgtacctgcgctcgcaccggcccaacatggagctgtgccgtgacgcagcccagttcaggctgttgagtgaggtggaggagctgaacatg

SEQ ID NO: 493084 - DNA, 120 bp, Artificial Sequence
  ENSG00000163060_10 (sequence is synthesized)
tccctcacagcactgcgagagaagcttctagaagcggagcagtccctgcgcaacctcgaggacatccacatgagcctggagaaggacattgccgccatgaccaacagtctcttcatcgac

SEQ ID NO: 493085 - DNA, 120 bp, Artificial Sequence
  ENSG00000163060_11 (sequence is synthesized)
cgccagaagtgcatggcccatcgtactcgctaccccaccatcctgcagctggctggctaccagtgagcagcggcacggtgcttccccccagtcccccaaataaacagcgcgttagctttc

SEQ ID NO: 493086 - DNA, 120 bp, Artificial Sequence
  ENSG00000163060_12 (sequence is synthesized)
caccccaacctcgtgcgcgaccatgtggaaacggagctgctgaaggcccttccccctgcactctctcagtgcctcaagaactcctgcagctcccgcaaactctctgcccgcaacaagggc

SEQ ID NO: 493087 - DNA, 120 bp, Artificial Sequence
  ENSG00000163060_13 (sequence is synthesized)
acctgccaactgatggagacactgacagtgcacggagaggcaaacccagggatagaggggcgcaggacccgggccctggcacacaaggaagtacccagtggttgaggcaaagaccccaat

SEQ ID NO: 493088 - DNA, 120 bp, Artificial Sequence
  ENSG00000163060_14 (sequence is synthesized)
cacagagaaaaggcttgttcctacacacagcaaattaaactggccaggcaataagaagaaacacagggtccttctcctgttcttggtgtgaagatggcctttcccagcacagagccctga

SEQ ID NO: 493089 - DNA, 120 bp, Artificial Sequence
  ENSG00000163060_15 (sequence is synthesized)
ggggcagcctgggcgggcatctgggcccccagagtttgggtcctcaggggctgtccagaggccaagggcaggccaacgttcccaggtgcactgagtgagcagcagcgatgactcctgaag

SEQ ID NO: 493090 - DNA, 120 bp, Artificial Sequence
  ENSG00000163060_16 (sequence is synthesized)
ccctggaggaaaacaccccacttacaacgcaccaaggagaatgcccaaaagcccaagataaacccagtgagagagcagaacttacacagtcagagctcaggcccggcattcaactccttg

SEQ ID NO: 493091 - DNA, 120 bp, Artificial Sequence
  ENSG00000163060_17 (sequence is synthesized)
tggttgctcaggtgttgaccaaggcctgcagcagctgggcctcctgggatcctcaccagggactggctctggtgctcagggcgtctcctccctcaggaagccgagctcatccggaacatt

SEQ ID NO: 493092 - DNA, 120 bp, Artificial Sequence
  ENSG00000163064_0 (sequence is synthesized)
cgattaaaggcgctgccagcctcacgctctgggcacagctgagcgtgacactcggggaagtcaaacccctcactactgcctaggaagatggctagactttaaatactatttttttccctt

SEQ ID NO: 493093 - DNA, 120 bp, Artificial Sequence
  ENSG00000163064_1 (sequence is synthesized)
taagaaaaaaattattggagctttttttcttgctttctttttccttttctttttctttttttccttcatttttttggccgtggcttactccccatttaaatcaaatcattgaatctggtt

SEQ ID NO: 493094 - DNA, 120 bp, Artificial Sequence
  ENSG00000163064_2 (sequence is synthesized)
gcagaaagaaaaaagaaatagccaagtgtctccatatctggatgtctacaaattagagagggagagacagcgagatctatctgctagataagaacgagcgatccaggccagacgcctgag

SEQ ID NO: 493095 - DNA, 120 bp, Artificial Sequence
  ENSG00000163064_3 (sequence is synthesized)
cttttttcctgcacccgccccgtgccttcgctgaggcttcgcctgcctccttcctccgcgcacccccacgggccgctggcaaagtggggtggggagcgaggcggtgggggcgggggccgg

SEQ ID NO: 493096 - DNA, 120 bp, Artificial Sequence
  ENSG00000163064_4 (sequence is synthesized)
cgcggcggccggggcggcggggcggccgagcatggaagaacagcagccggaacctaaaagtcagcgcgactcggccctcggcgcggcggcggcggcgactccgggcggcctcagcctgag

SEQ ID NO: 493097 - DNA, 80 bp, Artificial Sequence
  ENSG00000163064_5 (sequence is synthesized)
cctcagtccgggcgccagcggcagcagcggcagcggcagcgatggagacagcgtgccggtgtccccgcagcctgcgcccc

SEQ ID NO: 493098 - DNA, 120 bp, Artificial Sequence
  ENSG00000163064_6 (sequence is synthesized)
ccacccgcacctccccccacaccccccgcccccgccgcctcagcatctcgcggcgcctgctcaccagccgcagccagcggcccagctgcaccgcaccaccaactttttcatcgacaacat

SEQ ID NO: 493099 - DNA, 120 bp, Artificial Sequence
  ENSG00000163064_7 (sequence is synthesized)
cctgaggccggacttcggctgcaaaaaggagcagccgccaccgcagcttctggtggctgcggcggccagaggaggcgcaggaggaggaggccgggtcgagcgtgacagaggccagactgc

SEQ ID NO: 493100 - DNA, 120 bp, Artificial Sequence
  ENSG00000163064_8 (sequence is synthesized)
cgcaggtagagaccctgtccacccgttgggcacccgggcgccaggcgctgcctcgctcctgtgcgccccggacgcgaactgtggcccacccgacggctcccagccagccgccgccggcgc

SEQ ID NO: 493101 - DNA, 80 bp, Artificial Sequence
  ENSG00000163064_9 (sequence is synthesized)
ggccgcagcagccaagccctcggacaccggtggcggcggcagtggaggcggcgcggggagccccggagcgcagggcacca

SEQ ID NO: 493102 - DNA, 120 bp, Artificial Sequence
  ENSG00000163064_10 (sequence is synthesized)
tatcctacttatgggctcagccaacggcgggcccgtggtcaaaactgactcgcagcagcctctcgtatggcccgcctgggtgtactgcacacgttattcggatcgtccatcctccggtcc

SEQ ID NO: 493103 - DNA, 120 bp, Artificial Sequence
  ENSG00000163064_11 (sequence is synthesized)
gcgcaccaggaagctgaagaagaagaagaacgagaaggaggacaagcggccgcggaccgcgttcacggccgagcagctgcagagactcaaggcggagttccaggcaaaccgctacatcac

SEQ ID NO: 493104 - DNA, 120 bp, Artificial Sequence
  ENSG00000163064_12 (sequence is synthesized)
ggagcagcggcggcagaccctggcccaggaactcagcctcaacgagtcccagatcaagatctggttccagaacaagcgcgccaagatcaagaaagccacaggcatcaagaacggcctggc

SEQ ID NO: 493105 - DNA, 120 bp, Artificial Sequence
  ENSG00000163064_13 (sequence is synthesized)
gctgcacctcatggcccagggactgtacaaccactccaccaccacggtccaggacaaagacgagagcgagtagccgccacaggccggggccgcgcccgcgccccctcccggcaccgccgc

SEQ ID NO: 493106 - DNA, 120 bp, Artificial Sequence
  ENSG00000163064_14 (sequence is synthesized)
cgtcgtctcccggcccctcgctgggggagaaagcatctgctccaaggagggagggagcgcagggaaaagagcgagagagacagaaagagagcctcagaatggacaatgacgttgaaacgc

SEQ ID NO: 493107 - DNA, 120 bp, Artificial Sequence
  ENSG00000163064_15 (sequence is synthesized)
agcatttttgaaaagggagaaagactcggacaggtgctatcgaaaaataagatccattctctattcccagtataagggacgaaactgcgaactccttaaagctctatctagccaaaccgc

SEQ ID NO: 493108 - DNA, 120 bp, Artificial Sequence
  ENSG00000163064_16 (sequence is synthesized)
ttacgaccttgtatatatttaatttcaggtaaggaaaacacatacgtgtagcgatctctatttgctggacatttttattaatctcctttattattattgttataattattataattatta

SEQ ID NO: 493109 - DNA, 120 bp, Artificial Sequence
  ENSG00000163064_17 (sequence is synthesized)
taattattttatcccctcccccaccgcctcgctgcccccgcccagtttcgttttcgttgcctttttcatttgaatgtcattgcttctccggtgcctcccgacccgcatcgccggccctgg

SEQ ID NO: 493110 - DNA, 120 bp, Artificial Sequence
  ENSG00000163064_18 (sequence is synthesized)
tttctctgggacttttctttgtgtgcgagagtgtgtttcctttcgtgtctgcccacctcttctcccccacctcccgggtcccttctgtcggtctgtctgttctgcccccctttcgttttc

SEQ ID NO: 493111 - DNA, 120 bp, Artificial Sequence
  ENSG00000163064_19 (sequence is synthesized)
cggagacttgttgagaaatacgaccccacagactgcgagactgaaccgccgctacaagccaaagattttattatgttcagaaacctgtagtctgaaataaagtgtacactgtgctcacga

SEQ ID NO: 493112 - DNA, 120 bp, Artificial Sequence
  ENSG00000163064_20 (sequence is synthesized)
ttcccattcctatctggtggtcaaagcacatttttttttttctggattgtccctgcttccctccctctcctttttgctcataggtgggggaaggggctgcagtctccttgcaaatgtcat

SEQ ID NO: 493113 - DNA, 120 bp, Artificial Sequence
  ENSG00000163064_21 (sequence is synthesized)
agacccagataagagagaccctgccccacgcagccggttagaggaatgtggaaggccctccctttcttattggcaccatccaaggggcaaggctgaaaacccagagccagggtcatgagg

SEQ ID NO: 493114 - DNA, 120 bp, Artificial Sequence
  ENSG00000163064_22 (sequence is synthesized)
atggatcagggccttttctccttcagagaaggggtggtccctgcatccctgagaccctagaaaaggcttcctttaggccaaagagaaagaaggcgaggaggtccgcgcaccaggaagctg

SEQ ID NO: 493115 - DNA, 120 bp, Artificial Sequence
  ENSG00000163069_0 (sequence is synthesized)
atacaacgcgccccaggccaaggtcctaggtgcaggggccgccgcagagcctgagcccgcagggctgggatgcgggtcgtcagggatgcgggctggggaggggagggtgtgagcagcggg

SEQ ID NO: 493116 - DNA, 120 bp, Artificial Sequence
  ENSG00000163069_1 (sequence is synthesized)
gcgcgcagggtgcggtcgcggaggggcgggcacagtcgggcggggagctcggcggcggcgggcgcgggaagatggcggcagcggcggcggcggctgcagaacagcaaagttccaatggtc

SEQ ID NO: 493117 - DNA, 120 bp, Artificial Sequence
  ENSG00000163069_2 (sequence is synthesized)
ggcggctgcagaacagcaaagttccaatggtcctgtaaagaagtccatgcgtgagaaggctgttgagagaaggagtgtcaataaagagcacaacagtaactttaaagctggatacattcc

SEQ ID NO: 493118 - DNA, 120 bp, Artificial Sequence
  ENSG00000163069_3 (sequence is synthesized)
gattgatgaagatcgtctccacaaaacagggttgagaggaagaaagggcaatttagccatctgtgtgattatcctcttgtttatcctggctgtcatcaatttaataataacacttgttat

SEQ ID NO: 493119 - DNA, 120 bp, Artificial Sequence
  ENSG00000163069_4 (sequence is synthesized)
ttgggccgtgattcgcattggaccaaatggctgtgatagtatggagtttcatgaaagtggcctgcttcgatttaagcaagtatctgacatgggagtgatccaccctctttataaaagcac

SEQ ID NO: 493120 - DNA, 120 bp, Artificial Sequence
  ENSG00000163069_5 (sequence is synthesized)
agtaggaggaaggcgaaatgaaaatttggtcatcactggcaacaaccagcctattgtttttcagcaagggacaacaaagctcagtgtagaaaacaacaaaacttctattacaagtgacat

SEQ ID NO: 493121 - DNA, 120 bp, Artificial Sequence
  ENSG00000163069_6 (sequence is synthesized)
cggcatgcagttttttgacccgaggactcaaaatatcttattcagcacagactatgaaactcatgagtttcatttgccaagtggagtgaaaagtttgaatgttcaaaaggcatctactga

SEQ ID NO: 493122 - DNA, 120 bp, Artificial Sequence
  ENSG00000163069_7 (sequence is synthesized)
aaggattaccagcaatgctaccagtgatttaaatataaaagttgatgggcgtgctattgtgcgtggaaatgaaggtgtattcattatgggcaaaaccattgaatttcacatgggtggtaa

SEQ ID NO: 493123 - DNA, 120 bp, Artificial Sequence
  ENSG00000163069_8 (sequence is synthesized)
tatggagttaaaggcggaaaacagtatcatcctaaatggatctgtgatggtcagcaccacccgcctacccagttcctccagtggagaccagttgggtagtggtgactgggtacgctacaa

SEQ ID NO: 493124 - DNA, 120 bp, Artificial Sequence
  ENSG00000163069_9 (sequence is synthesized)
gctctgcatgtgtgctgatgggacgctcttcaaggtgcaagtaaccagccagaacatgggctgccaaatctcagacaacccctgtggaaacactcattaaaagaaccccagaggtcacca

SEQ ID NO: 493125 - DNA, 120 bp, Artificial Sequence
  ENSG00000163069_10 (sequence is synthesized)
acatgtttatatcttgacttgacttttttatgcatgcaaatcattgtttttacagagtttgtgataactcataattattttaatggcagagcactgctgtatctgttttatggtctacat

SEQ ID NO: 493126 - DNA, 120 bp, Artificial Sequence
  ENSG00000163069_11 (sequence is synthesized)
acatagttaaaatcttctcagagagcctaaattctaatacattttattaatttatactaatcttcatatttactgttctctaaaataattatgagaagcaaataaaatcaaaagtcatgt

SEQ ID NO: 493127 - DNA, 120 bp, Artificial Sequence
  ENSG00000163069_12 (sequence is synthesized)
agacgtgtttttaaaattccactatcccttttctaaaggttaaaggtctgaagcagctgtttagattcactgtaagtaaactttggtaactctaatggggatagacccacttaagatatt

SEQ ID NO: 493128 - DNA, 120 bp, Artificial Sequence
  ENSG00000163069_13 (sequence is synthesized)
taaaaaggtatggcatcagcgtttcatgctctgccttttagcttctaaaaggaaagatgcagatttctagtgcattaagcctgagccatattctcacatgcaagtgaagtcattaaagaa

SEQ ID NO: 493129 - DNA, 120 bp, Artificial Sequence
  ENSG00000163069_14 (sequence is synthesized)
ctttacatatgtgagatagaaacaatggttccttagttttgcactgggaagaaaatattttgtaaaagaatgtttatttgaaataatgataactatcaattgttcacaatgtggtggaaa

SEQ ID NO: 493130 - DNA, 120 bp, Artificial Sequence
  ENSG00000163069_15 (sequence is synthesized)
ttaaaacaccatctcagctttaacttttaaataataatgataactatctttattgagcatcttctacatcctaggcattgtcctaggcattgcatgtttatatccccaattctcaccaca

SEQ ID NO: 493131 - DNA, 120 bp, Artificial Sequence
  ENSG00000163069_16 (sequence is synthesized)
accctgcaagtaggtggtattatccaagttttacccattaagaaactgaagatcagagaagttaagaaacttgctcaacatcatatagtaagtagcagagttgggattggaattcaggca

SEQ ID NO: 493132 - DNA, 120 bp, Artificial Sequence
  ENSG00000163069_17 (sequence is synthesized)
tgactcaaacctggatgtacttgattccaaatgccatgttgttttcactctctgcactgactttttaattatttaaaactctagaaagatgaacaaaggttaatttaaacttacctaaga

SEQ ID NO: 493133 - DNA, 120 bp, Artificial Sequence
  ENSG00000163069_18 (sequence is synthesized)
attccaaaatattatacgatggagaggtcaaatttacctacttctgagttacctcagtttcccaacaatggaccttggcacactggagtaacaatacataacagagttgccaagatattt

SEQ ID NO: 493134 - DNA, 120 bp, Artificial Sequence
  ENSG00000163069_19 (sequence is synthesized)
ataccctcagcactcggggcaacacagtggaaagtggggaggccatagacccaaacaagttctttgggccaggcatggcctagtaagtacaccatgcctcgaaaataagtccagaagcac

SEQ ID NO: 493135 - DNA, 120 bp, Artificial Sequence
  ENSG00000163069_20 (sequence is synthesized)
tggactaaagagtgctaatgcaggaaataatacacataatttttaggtaaggataataatttatctctgctcctaatattactatcccattgtaattatttataaccctcaagccagttg

SEQ ID NO: 493136 - DNA, 120 bp, Artificial Sequence
  ENSG00000163069_21 (sequence is synthesized)
atttttaatatatttgattggaaaagaactctctggtattattaagactcacacagaatcagggacagggcccccaaaggagtttgctgtaaaataggcagtagagttgtggcatgggcc

SEQ ID NO: 493137 - DNA, 120 bp, Artificial Sequence
  ENSG00000163069_22 (sequence is synthesized)
caaccctgcattcaagtgtaacagcattctgtcagggtcactttgaattgtgcacataagaaaaccaatacaaaaaacaatttgtattcaatattgtcacatttctctctggtagaaaaa

SEQ ID NO: 493138 - DNA, 120 bp, Artificial Sequence
  ENSG00000163069_23 (sequence is synthesized)
tcaaataccttagagattatgaagtcattaatttatactgaaattggattgacttactacctaacactgagcgctgtttttaaatgaaaagaatgagatttataaccacttgagtgttat

SEQ ID NO: 493139 - DNA, 120 bp, Artificial Sequence
  ENSG00000163069_24 (sequence is synthesized)
tgcagtgatatttgaactcatttgaatatattcagtatcatttaatgtctgaattcagaaaaaaatgccgaaatttttattcagatggtccataaattaaattgcatattcattacttat

SEQ ID NO: 493140 - DNA, 120 bp, Artificial Sequence
  ENSG00000163069_25 (sequence is synthesized)
atatttttataaaaaccagaaaacactgtattacaaaatattatttattaaatgtagttcaggaaataatctatttttactcttttttgggaaatacttgtgtttttgatacatctccat

SEQ ID NO: 493141 - DNA, 120 bp, Artificial Sequence
  ENSG00000163069_26 (sequence is synthesized)
tcttttttgggaaatacttgtgtttttgatacatctccatgaagttcttttgagaggagaggctattttgatgtttttatacaactgaaggttaacagccatagcattttatgatacttt

SEQ ID NO: 493142 - DNA, 120 bp, Artificial Sequence
  ENSG00000163069_27 (sequence is synthesized)
acaggtagtcctggctttttccctgaaacataagcttggaaaatctattagaaagcagaacagggcaaactctccattttacttatggcttttctaatttttaattaattaatttatttt

SEQ ID NO: 493143 - DNA, 120 bp, Artificial Sequence
  ENSG00000163069_28 (sequence is synthesized)
caggtgtgagccaccacgcctggccggcttatttttatccacagtaaatcttcagcaactcattgtctccaccagatagtatttttctgtaaatgaaatgctgacttcgcctcttcctgc

SEQ ID NO: 493144 - DNA, 120 bp, Artificial Sequence
  ENSG00000163069_29 (sequence is synthesized)
aatgctgacttcgcctcttcctgctgtatgctcatccctgcactgagcacagatatgacaagcagtagccatgggggaggtgggtgacaaagataggaccccgggagggggcgcaggtac

SEQ ID NO: 493145 - DNA, 120 bp, Artificial Sequence
  ENSG00000163069_30 (sequence is synthesized)
atgctagtttcaattaccacagtattctagagacgggttgcaatgacaaggggggcaaatgaaatcaatgcaagatttcttaataatgggcagacagaaaaatgtaaaaccacacaaaac

SEQ ID NO: 493146 - DNA, 120 bp, Artificial Sequence
  ENSG00000163069_31 (sequence is synthesized)
ggactgctgataatattttaaaatatacttatttgtcttctttttgcattgtgaaaaaaacaaaataaattttgtgtgataattttgatgatgaaaggtggaagttctacctagatttga

SEQ ID NO: 493147 - DNA, 120 bp, Artificial Sequence
  ENSG00000163069_32 (sequence is synthesized)
atgagtgtttttttaagggaatgagaatgtcatggtgctaaacctgacaaataagagatcattgaaatgctgaaaattttaacagtcttcttaaaagtattgagggggcaaaaattacca

SEQ ID NO: 493148 - DNA, 120 bp, Artificial Sequence
  ENSG00000163069_33 (sequence is synthesized)
attatggtatacaaaaataagcctataaatgtgtttcacattgctaacttgagtttcagttgattcagtttgtaataactagtaatgagcttctgtttacaataaaaattctgtaaattg

SEQ ID NO: 493149 - DNA, 120 bp, Artificial Sequence
  ENSG00000163071_0 (sequence is synthesized)
agtccacccctggggcgcgcggctgtcacccagggcggggcggcgcgggcgttgccacgacgcgggccgcgcgcgtccctggcagccaacccgtccacgtcaaggtttgtttaataatcg

SEQ ID NO: 493150 - DNA, 120 bp, Artificial Sequence
  ENSG00000163071_1 (sequence is synthesized)
ccagggtatctatggccgggctcaggcggctgctggggagccaggagaccgcgcgggacggcggatgaggcgcggcggctgcggcccagggcacctcccctctggcttcccgaacccggc

SEQ ID NO: 493151 - DNA, 120 bp, Artificial Sequence
  ENSG00000163071_2 (sequence is synthesized)
caggtccgacccgagggggaggatggaaacacctgccgcgctctgagccccccagaagagaacacccttcccgccatatcaccccacggtcctgcggaggccaccgcctggtccccccaa

SEQ ID NO: 493152 - DNA, 120 bp, Artificial Sequence
  ENSG00000163071_3 (sequence is synthesized)
gtctccatcgcgcagcgtggggccgagaggaatagtgagcgatggcggaaaacctgaaaagactggtctcaaacgaaactttacgaacgttgcaggaaaagctagacttctggctgaagg

SEQ ID NO: 493153 - DNA, 120 bp, Artificial Sequence
  ENSG00000163071_4 (sequence is synthesized)
agtacaacacaaacacgtgtgatcaaaatctaaaccattgccttgaactcattgagcaagttgccaaggtgcagggacaactctttgggatcctcacagcagcagcccaagaaggaggac

SEQ ID NO: 493154 - DNA, 120 bp, Artificial Sequence
  ENSG00000163071_5 (sequence is synthesized)
gtaatgatggtgtggaaacaatcaagtcacgccttttgccttggctggaggcttcctttactgctgcttccctgggaaaatctgttgacagcaaggtcccctctctgcaggacacgtttg

SEQ ID NO: 493155 - DNA, 120 bp, Artificial Sequence
  ENSG00000163071_6 (sequence is synthesized)
atagggagagacataaagatcccagtcctcgggatcgggatatgcaacagttagactctaatttgaactcaacccggagtcaatgcaaccaggttcaagacgatctggttgaaactgaaa

SEQ ID NO: 493156 - DNA, 120 bp, Artificial Sequence
  ENSG00000163071_7 (sequence is synthesized)
agaatcttgaagaaagcaagaacagatcggccatatcccttttggctgcagaggaggaaataaatcagctgaaaaagcagcttaaatctcttcaagctcaggaggatgcccgccacagaa

SEQ ID NO: 493157 - DNA, 120 bp, Artificial Sequence
  ENSG00000163071_8 (sequence is synthesized)
acacagatcagaggagctcagagaataggcggtcagagccttggagcttggaggagcggaagcgtgagcagtggaactcactcaagcagaatgcagaccagcaggacacagaagccatgt

SEQ ID NO: 493158 - DNA, 120 bp, Artificial Sequence
  ENSG00000163071_9 (sequence is synthesized)
ccgattataagaaacagctccgaaacctgaaggaggagatagctgttctgtctgctgagaaaagtgcactccaaggaaggtcctccaggagccggtctcccagccctgcccctcgcagcc

SEQ ID NO: 493159 - DNA, 120 bp, Artificial Sequence
  ENSG00000163071_10 (sequence is synthesized)
gtagctgcagccgcagcagatctgccagcccctccaccgctgtcaaggtcaggagaccgtccccaaaccgctccaagctgtccaatgtggcgcgcaaggctgccctcttgtcccggttca

SEQ ID NO: 493160 - DNA, 120 bp, Artificial Sequence
  ENSG00000163071_11 (sequence is synthesized)
gcgattcctattcccaggcccgcctggacgcgcagtgcctgctgcggcgctgcatcgacaaggctgagaccgttcagcggatcatctacatcgccacagtggaggcattccatgtagcaa

SEQ ID NO: 493161 - DNA, 120 bp, Artificial Sequence
  ENSG00000163071_12 (sequence is synthesized)
aaatggcattcagacacttcaagatccatgtgagaaaatcgttgacaccatcttatgtggggtcgaatgactttgagaatgctgtcttggattatgtcatttgtcatcttgatctatatg

SEQ ID NO: 493162 - DNA, 120 bp, Artificial Sequence
  ENSG00000163071_13 (sequence is synthesized)
attctcaaagcagtgtcaatgatgtgatccgagccatgaatgtcaatcccaagatttcattccctcctgtcgttgacttttgccttctcagtgacttcatccaggagatatgttgcattg

SEQ ID NO: 493163 - DNA, 120 bp, Artificial Sequence
  ENSG00000163071_14 (sequence is synthesized)
cctttgcaatgcaggccttagaaccacccctagatattgcatatggagcagatggagaagtttttaatgattgcaaataccgccgcagctacgactcggatttcactgctcccttagtcc

SEQ ID NO: 493164 - DNA, 120 bp, Artificial Sequence
  ENSG00000163071_15 (sequence is synthesized)
tctatcacgtgtggcctgctctcatggagaatgactgtgtcattatgaagggagaagctgtcaccaggagaggggctttttggaattcggtgcgatctgtaagtcgttgtcgaagcagga

SEQ ID NO: 493165 - DNA, 120 bp, Artificial Sequence
  ENSG00000163071_16 (sequence is synthesized)
gtttaagtcccatttgcccccgtagccaaattggtttaaacacgatgtctcgaagtcggagtccttctccaataagatgtggattgccaagattttaaaagcaccagacctgctcctttg

SEQ ID NO: 493166 - DNA, 120 bp, Artificial Sequence
  ENSG00000163071_17 (sequence is synthesized)
acccagtgcgtggaaacagctgctttctccagtgccgccatctgtcttctgtgtctgcctcagacctcacttaagataatgtcaaaaggcaattctgtgtatcaccccacacagagagtt

SEQ ID NO: 493167 - DNA, 120 bp, Artificial Sequence
  ENSG00000163071_18 (sequence is synthesized)
catattcattcgaagcaaagtccgttacaaaggttcaagatttccatctcaaaacactacgctcttttatgggaactgtgtgaactgaagtggaaagcatctaccatgctgaggctaaaa

SEQ ID NO: 493168 - DNA, 120 bp, Artificial Sequence
  ENSG00000163071_19 (sequence is synthesized)
gaaaagatgaatcattttagtttgcagatggatcgtaaatataattgttggtatcagctttagctcaaaaccaatattaggtgttttaatttccttttaaggtttggaagacagccctaa

SEQ ID NO: 493169 - DNA, 120 bp, Artificial Sequence
  ENSG00000163071_20 (sequence is synthesized)
tctcaggttggggagctcatgttagtagcagtgacttaaggctaagtgtagaagataatttaagatacattttctttatatattagccaacaaattatatttattggttggcttgctttt

SEQ ID NO: 493170 - DNA, 120 bp, Artificial Sequence
  ENSG00000163071_21 (sequence is synthesized)
ccgttctgattttgagagtgcccagtttggtttagttgaccaatgaatgtcaaagctacttagttgagagaatttccttgttcataaatgtagagcagtgatttgattagaagccagctt

SEQ ID NO: 493171 - DNA, 120 bp, Artificial Sequence
  ENSG00000163071_22 (sequence is synthesized)
tgagataaatgttaattacctcatgcatatctcctgggaatatttcaaactgttttaatgcatgtgttatatataaaagtttcttgggacatgctcttcacctgttctacctagttattt

SEQ ID NO: 493172 - DNA, 120 bp, Artificial Sequence
  ENSG00000163071_23 (sequence is synthesized)
gcaaattcagacctcctattgaactctgtctgaccaaaactacttaaactcaaggcccaaaactaggggcaccatttactgattttaaattgagtatatatcccttgacttcttcactgt

SEQ ID NO: 493173 - DNA, 120 bp, Artificial Sequence
  ENSG00000163071_24 (sequence is synthesized)
caaatacttttgaaacttcacgttcaagataagaatggaatgttgctttcttgcaataagtaatgttctttctgcctttttttcacttttaagtcagccttaaacacatgcctcacaaac

SEQ ID NO: 493174 - DNA, 120 bp, Artificial Sequence
  ENSG00000163071_25 (sequence is synthesized)
atctactttctccacatacctttgagagagacactgaattggcctcagctcagttttgcataagcttagtgccagaaccagcacctgatgcttttcaggtgaaaataaaacaaacagctt

SEQ ID NO: 493175 - DNA, 120 bp, Artificial Sequence
  ENSG00000163071_26 (sequence is synthesized)
ctctaaagcatcttacccctgtgctggaggtttgagggacctcttcagtgcctgccccttgagtctaatggtcaccacctcattctgaagtatgagttgaattttttgccctctttgcat

SEQ ID NO: 493176 - DNA, 120 bp, Artificial Sequence
  ENSG00000163071_27 (sequence is synthesized)
atttacattagtcatcactttgaagcaatgcagtgtgctggaaggagcactatctgcctaggtaactgctagtcatgacttggtcatcagcttgctttgtggcactgagcaagttacttc

SEQ ID NO: 493177 - DNA, 120 bp, Artificial Sequence
  ENSG00000163071_28 (sequence is synthesized)
acttctctgagccttggttttatcatagggtgaggaggttggatacaattagtgcccctcttaaccctgcagactcaatgttcccttttataacaagtattttattctgaatatgaaatg

SEQ ID NO: 493178 - DNA, 120 bp, Artificial Sequence
  ENSG00000163071_29 (sequence is synthesized)
aaaattaaagttaatataatcatctatgtgcatgtataattttaagcagtgaacatagtaccctaactataatataaagcagaaaaaaaggcaacttttaataaaataaaatgtatttca

SEQ ID NO: 493179 - DNA, 120 bp, Artificial Sequence
  ENSG00000163071_30 (sequence is synthesized)
ataaaaaagcttgggtataaccaccctagaagataaaattaagtcattagatggctgaacctgcatgtagagccaccagctacaaatgaaaatcaatgtgtgtattggcaacagaaaatc

SEQ ID NO: 493180 - DNA, 120 bp, Artificial Sequence
  ENSG00000163071_31 (sequence is synthesized)
acggtgttgtcattggatgtgactttctgaagtggtgggcaattcttgttaatgttttaaacaaaaaaaaaaaaaccttacagtcttgccctgatttacacagcagtcacattcctggaa

SEQ ID NO: 493181 - DNA, 120 bp, Artificial Sequence
  ENSG00000163071_32 (sequence is synthesized)
aattcaagtgtttattaaaactatgcaacagttactgtgtgttatacgttgaaaggtcttcactaatatctcactaagtaatgagaatgcctacatatcagaattttttttttcaggagc

SEQ ID NO: 493182 - DNA, 120 bp, Artificial Sequence
  ENSG00000163071_33 (sequence is synthesized)
caagcacatatactgatttggaaaaaggcacaggtagctcagtttatttgctttctaccctgcctggccacttgctgtttcttcagtttctaatttgagctgtaactacacaaggaaagc

SEQ ID NO: 493183 - DNA, 120 bp, Artificial Sequence
  ENSG00000163071_34 (sequence is synthesized)
taaatagtctggaaaatttttggaaagaatccacaaagccaaaggagactggcctatactcattttatctggggatgtaccttacccttagagactttgaaaaatgtgaagctcttattt

SEQ ID NO: 493184 - DNA, 120 bp, Artificial Sequence
  ENSG00000163071_35 (sequence is synthesized)
tgtaacctgggtaaatgttagtttctagattttcggcttaacatctaataataacatttaaaaagtgcttttgtaactattagttatttgcaataaaatgctttccttctacagtcccaa

SEQ ID NO: 493185 - DNA, 120 bp, Artificial Sequence
  ENSG00000163071_36 (sequence is synthesized)
agtgtttgattcacaagttcgagaacatttataaacccagagattctataaaagaagtttataaagagttgataagatttcatacaaaggagaggtcggagatgatctcaagaagaactg

SEQ ID NO: 493186 - DNA, 120 bp, Artificial Sequence
  ENSG00000163071_37 (sequence is synthesized)
gacacatgtctgagtctggatatgtgtttataacataaacactagactgataatgttctcttatttcttgaccagtaatgtgatattgctatgggcttatagcaggggatttatttcctt

SEQ ID NO: 493187 - DNA, 120 bp, Artificial Sequence
  ENSG00000163071_38 (sequence is synthesized)
caatttctgcactgtcctgcttcctgcactcagaatttctagaataatagtcaactgtcttgatgttagtgagcatggattattatatgtttatgtacttttcaaagttagagatgtatt

SEQ ID NO: 493188 - DNA, 120 bp, Artificial Sequence
  ENSG00000163071_39 (sequence is synthesized)
gcaggcttaaatctcttcaagctcaggaggatgcccgccacagaaacacagatcagaggagctcagagaataggcggtcagagccttggagcttggaggagcggaagcgtgagcagtgga

SEQ ID NO: 493189 - DNA, 120 bp, Artificial Sequence
  ENSG00000163072_0 (sequence is synthesized)
attctcactatctcacactggccgtcttgacccagagcagttctttactttctcgggacacaaacgggatgaaagtccagggctgggacttcctccttggaatgtttgacaaggactgac

SEQ ID NO: 493190 - DNA, 120 bp, Artificial Sequence
  ENSG00000163072_1 (sequence is synthesized)
gtactctaggccctttgaatcccggaagtccaggacacacccaaccttgattacagtgtccagaatgctggagcgtaggtgaaaggacaaaagccagacacatttcaacatgagggaccc

SEQ ID NO: 493191 - DNA, 120 bp, Artificial Sequence
  ENSG00000163072_2 (sequence is synthesized)
actgacagattgtccgtataataaagtatacaagaacctaaaggagttttctcaaaatggagagaatttctgcaaacaggtcacatctgttcttcagcaaagggcaaacctggaaattag

SEQ ID NO: 493192 - DNA, 120 bp, Artificial Sequence
  ENSG00000163072_3 (sequence is synthesized)
ctatgccaaaggacttcagaaactggcaagcaagctgagcaaagcattacagaacacgagaaaaagttgtgttagcagtgcctgggcctgggcctcagagggaatgaaatccacagcgga

SEQ ID NO: 493193 - DNA, 120 bp, Artificial Sequence
  ENSG00000163072_4 (sequence is synthesized)
cctgcatcaaaaacttggcaaagcaattgaattggaagcaataaaaccgacttatcaagtcctaaatgtacaagagaagaagagaaaatcacttgacaatgaagttgaaaagacagcaaa

SEQ ID NO: 493194 - DNA, 120 bp, Artificial Sequence
  ENSG00000163072_5 (sequence is synthesized)
tcttgtcattagcaactggaatcagcaaattaaggccaagaagaaattaatggttagtaccaagaaacatgaagcacttttccagcttgtagaaagctccaagcaatctatgactgagaa

SEQ ID NO: 493195 - DNA, 120 bp, Artificial Sequence
  ENSG00000163072_6 (sequence is synthesized)
ggagaagcggaagctcctcaataaactgacaaaatcaactgaaaagttggaaaaggaagatgaaaattactaccaaaaaaacatggcgggttattctaccagactgaaatgggaaaacac

SEQ ID NO: 493196 - DNA, 120 bp, Artificial Sequence
  ENSG00000163072_7 (sequence is synthesized)
actagagaactgctaccagagcattctggagctggagaaggaaagaattcaacttttatgcaataacttaaaccagtacagccaacatatttctctttttggccaaaccctgaccacatg

SEQ ID NO: 493197 - DNA, 120 bp, Artificial Sequence
  ENSG00000163072_8 (sequence is synthesized)
ccacacgcagattcactgtgccatcagcaagattgacattgaaaaagatatccaggctgtaatggaagaaactgcaattttatctacagaaaacaaatctgagttcctgttaacggatta

SEQ ID NO: 493198 - DNA, 120 bp, Artificial Sequence
  ENSG00000163072_9 (sequence is synthesized)
ctaacagtgcaatggataaagagagacgaaagtctttactaaaaccaaaattattgagactgcagagagacattgaaaaagcctcaaaagacaaggaaggcctggaacgaatgcttaaaa

SEQ ID NO: 493199 - DNA, 120 bp, Artificial Sequence
  ENSG00000163072_10 (sequence is synthesized)
cgtactccagcacctcctccttctctgatgcaaagagccagaaagacacagcagcgttaatggatgagaacaatttgaaactagaccttttggaagcgaactcctacaaactgtcatcaa

SEQ ID NO: 493200 - DNA, 120 bp, Artificial Sequence
  ENSG00000163072_11 (sequence is synthesized)
tgttagcagaacttgagcaaagacctcaacccagccatccttgtagtaattccatcttcaggtggagggaaaaggagcatactcatagctatgtgaaaatatctcggccttttttaatga

SEQ ID NO: 493201 - DNA, 120 bp, Artificial Sequence
  ENSG00000163072_12 (sequence is synthesized)
agagattagagaatattgtgagcaaggcatcttctggtgggcagagcaatccaggttcttcaactccagcccctggtgcagcccagctcagcagcagactttgcaaggccttgtattctt

SEQ ID NO: 493202 - DNA, 120 bp, Artificial Sequence
  ENSG00000163072_13 (sequence is synthesized)
ttcaagccaggcaagatgatgagttgaatttggaaaagggtgacattgtgattatacacgagaaaaaagaaggaggatggtggtttggatctttgaatgggaaaaaaggccattttcctg

SEQ ID NO: 493203 - DNA, 120 bp, Artificial Sequence
  ENSG00000163072_14 (sequence is synthesized)
ccgcttatgtggaggagttaccttcaaatgctggcaacacagctacaaaggcataaaacaagactctgaacatactaccttcacactcggtaatcaacaatacagtgtggttcaaataag

SEQ ID NO: 493204 - DNA, 120 bp, Artificial Sequence
  ENSG00000163072_15 (sequence is synthesized)
aataaagtgctcttacctttacatgtttttcttttgaaatggatggagttctacctgcatgtcacagcactttgcattcatgattattagcttgaaacagtcagaaaaaagatggatggg

SEQ ID NO: 493205 - DNA, 120 bp, Artificial Sequence
  ENSG00000163072_16 (sequence is synthesized)
tggagacagacaaggaagaggctccttggttcctagaggagtttccaaattctaggagaccctagagatgatccagtataacccctggtgtcacagaaacagacggagtccaaggtgggt

SEQ ID NO: 493206 - DNA, 120 bp, Artificial Sequence
  ENSG00000163072_17 (sequence is synthesized)
tcagctgcttgcctgaagtcagagttatctggtagacaacagcagtgggacttagatgtctttttcctctggatttgggtggcaacagaacacagcaggcctatgagggggtcaagcaga

SEQ ID NO: 493207 - DNA, 120 bp, Artificial Sequence
  ENSG00000163072_18 (sequence is synthesized)
gcctgggagatgaggaacacagatcaattccaagaagagagacaggcaatcaagacaccaatgagatcaacccaaattaggggatggtaggatatctctgacaaacccacagccaatatc

SEQ ID NO: 493208 - DNA, 120 bp, Artificial Sequence
  ENSG00000163072_19 (sequence is synthesized)
gcgcatgcagcccttcccaagcactggtagggcactgggcatgcagacagcccaccagaagggaagaatcaggagaaaagggatgcaagatcccagagataaactgaagcacaagagggt

SEQ ID NO: 493209 - DNA, 120 bp, Artificial Sequence
  ENSG00000163072_20 (sequence is synthesized)
aaaaactttgtccttggtcttacagccagaaagtggtgatgcaaagaacttagtccaagctttgatctgttctgcactgcctgccaaagcagaaccttgagaaatacccatgtttggggg

SEQ ID NO: 493210 - DNA, 120 bp, Artificial Sequence
  ENSG00000163072_21 (sequence is synthesized)
atgagaagaagaagataaatcagcaaagaaaatagtgataagaaagatgcagaacccagggatatggagagccaattgtatttgtaaaacacttagaatggtgcctgacacgtgagttgc

SEQ ID NO: 493211 - DNA, 120 bp, Artificial Sequence
  ENSG00000163072_22 (sequence is synthesized)
tttgtctaattctagccctgtggtagctacccaagattgttgtaacctccagtgatcaagttctttggataagcaaagagggagggcattaagtgtgtggaaaagacccctcctctccac

SEQ ID NO: 493212 - DNA, 120 bp, Artificial Sequence
  ENSG00000163072_23 (sequence is synthesized)
ggtacaaaatgcacgtttgcaataaatggttcttcctctttagttgtagcaagtgatatgactggaggagtgattacaagctgtcctactttccagaatgtggtgttatattttggtact

SEQ ID NO: 493213 - DNA, 120 bp, Artificial Sequence
  ENSG00000163072_24 (sequence is synthesized)
gcaggaagtaattcagcttaggaaggctcagtcaagtctcttctgattcctcagactgggtttattaccctctcctggggcccactgttggatctgatgcatagtctcattattgtactt

SEQ ID NO: 493214 - DNA, 120 bp, Artificial Sequence
  ENSG00000163072_25 (sequence is synthesized)
ttcacaccgacagcaattatttacatttttctctcccctcgaagggcagaggcagtcttactcatcattgtatgctgacctcttagagcctggccttttgatttccttagtcactgtcag

SEQ ID NO: 493215 - DNA, 120 bp, Artificial Sequence
  ENSG00000163072_26 (sequence is synthesized)
ttaattcaattctgttcacaatatttagcactgatggctcaccttcttcgcagaccaccaaaaatctaccttctacaatcaacacttatcccctttcttgtccctcagcagaaaattgag

SEQ ID NO: 493216 - DNA, 120 bp, Artificial Sequence
  ENSG00000163072_27 (sequence is synthesized)
taaaacctcttcattgccataaaatactaatatattaccaaggtttcctgttcacccccagagtacagaatgagacacactcaacaactaaaacctccctctaaactgcttaaagagttt

SEQ ID NO: 493217 - DNA, 120 bp, Artificial Sequence
  ENSG00000163072_28 (sequence is synthesized)
ctgatattcctatccagttgtgcctcatttactagaaatttgctcacatggccaaatgatgtatccacagaacaatttgaaactagaccttttggaagcgaactcctacaaactgtcatc

SEQ ID NO: 493218 - DNA, 120 bp, Artificial Sequence
  ENSG00000163072_29 (sequence is synthesized)
ctatataagtattatactactattttcagaaatgtagcattttaactgtgtttctgaaattggctagaatgagagataatgtgtttggtttaaaacatggtcaaccaactgtgcatgaga

SEQ ID NO: 493219 - DNA, 120 bp, Artificial Sequence
  ENSG00000163072_30 (sequence is synthesized)
gttttggatgagttttttggtttgtttcttttgacttttgaaacaatgtaaaaacctttcaaattaaattctgtacgtagaagttaggcatgtcagactgtgaagcagctctaaagcaac

SEQ ID NO: 493220 - DNA, 120 bp, Artificial Sequence
  ENSG00000163072_31 (sequence is synthesized)
aaggatgacaaaaacgactccacatttgtgactctgatgtctacctagtaacttgttttatatggaccacgataactcattgcaatggaatactagagagcaaattcaagatagaaaaca

SEQ ID NO: 493221 - DNA, 120 bp, Artificial Sequence
  ENSG00000163072_32 (sequence is synthesized)
tttagtgatgtgaataccataacgaggaagaagccaacgttgggtaactgttagcaattgctagaatgggtcgactgaaagaatttcaaaatctcatctggaaaaataacaatcaagatg

SEQ ID NO: 493222 - DNA, 120 bp, Artificial Sequence
  ENSG00000163072_33 (sequence is synthesized)
ctttaagcaccagcacttctcaaatttcattaagtgaagagaaaggtaaacagttcatttatcattcagtcaaatttattaagaactacctgcagagactccctcagccatttaagaaac

SEQ ID NO: 493223 - DNA, 81 bp, Artificial Sequence
  ENSG00000163072_34 (sequence is synthesized)
aagaactacctgcagagactccctcagccatttaagaaaccctactggtggctgggtgctgtggctcacgcctataatcct

SEQ ID NO: 493224 - DNA, 65 bp, Artificial Sequence
  ENSG00000163072_35 (sequence is synthesized)
tctcactggtatcacttctaggctccctttgagagcgaccgactcctggctgtgtcccactgaga

SEQ ID NO: 493225 - DNA, 120 bp, Artificial Sequence
  ENSG00000163072_36 (sequence is synthesized)
tttcattcagagttaggattgatctgcttttgctatttggcaggggtcttctcatttaaagaaccatatatcaaacttcagttgtgtgaacaaaaaaaaaaaaagtagaagaaaaaagaa

SEQ ID NO: 493226 - DNA, 120 bp, Artificial Sequence
  ENSG00000163072_37 (sequence is synthesized)
aagagaaaggcctggaacgaatgcttaaaacgtactccagcacctcctccttctctgatgcaaagagccagaaagacacagcagcgttaatggatgagaacaatttgaaactagaccttt

SEQ ID NO: 493227 - DNA, 120 bp, Artificial Sequence
  ENSG00000163072_38 (sequence is synthesized)
atgagggacccactgacagattgtccgtataataaagtatacaagaacctaaaggagttttctcaaaatggagagaatttctgcaaacaggtcacatctgttcttcagcaaagttgtgtt

SEQ ID NO: 493228 - DNA, 120 bp, Artificial Sequence
  ENSG00000163075_0 (sequence is synthesized)
gacgctccgagcgggcgccggcgctggcgccggccgaatccggcccgggaaccacctccagggacatgacctttggctctaaaaagaagactccatttttcatgataaaatggcagtggt

SEQ ID NO: 493229 - DNA, 120 bp, Artificial Sequence
  ENSG00000163075_1 (sequence is synthesized)
gaaaacccccagcagaggactaaagaatgctaaagaaccctttaataatgcatcaccccatctcttgaagaacctagtggaggagccgaaaaaaagaaaagaagtacctaatcacctcct

SEQ ID NO: 493230 - DNA, 120 bp, Artificial Sequence
  ENSG00000163075_2 (sequence is synthesized)
agaatcaaaggtttatgcaaaacttgtgaataataaggtcatacaggcaagacctggcataatacattttggaggctatcaagtagaaaaacaacaccaacagattctgcatctggtcaa

SEQ ID NO: 493231 - DNA, 120 bp, Artificial Sequence
  ENSG00000163075_3 (sequence is synthesized)
tgtttccaatgaagacacacgtgttcatattttacccccgcaaaccaaatactttgagatcaattatgtaagaaaggaacaccacctggtccctggcttgtccctcacggtcaccgttac

SEQ ID NO: 493232 - DNA, 120 bp, Artificial Sequence
  ENSG00000163075_4 (sequence is synthesized)
attttctccagatgagtggcgatactattatgactgcatccgtgttcactgtaagggagatgacactttgcttgttcctattcatgcctatccagtcatgaactcactagactttccttc

SEQ ID NO: 493233 - DNA, 120 bp, Artificial Sequence
  ENSG00000163075_5 (sequence is synthesized)
atttataaatctgtcaaatgttctacttggtgaaagcaaaacttatgttattcctttgcagtgcagctgccctgtagattttgagttttatatcaccttgattcagtctcatcaagcctt

SEQ ID NO: 493234 - DNA, 120 bp, Artificial Sequence
  ENSG00000163075_6 (sequence is synthesized)
tgctattgagccaacatcaggaataattccggctaatgggaagatgactgtgactattaagtttacaccctttcagtatgggactgcacaaataaaaatgcagttatggatttcgcagtt

SEQ ID NO: 493235 - DNA, 120 bp, Artificial Sequence
  ENSG00000163075_7 (sequence is synthesized)
caactctcaaccatacgaatgtgtcttcaccggaacatgctatcccaacatggccttaccattagaagagtttgaaaggttgaataccctttctaagaaagtaaacgttcctccagaaaa

SEQ ID NO: 493236 - DNA, 120 bp, Artificial Sequence
  ENSG00000163075_8 (sequence is synthesized)
agcaatgatgcatataaattttcaccgaccgccagcgaagccgaagcctcagaaggtgaaggaaattgagtaccagaacctcagatttccagtagatttatcgaatccatttgctgtggc

SEQ ID NO: 493237 - DNA, 120 bp, Artificial Sequence
  ENSG00000163075_9 (sequence is synthesized)
aactgttttaaaccaagaaccaggaaaattgaagattaaagaattaagagaagttttggaccagggcactgaaatttcaaaaacgagacagatgaaggaggcactctttgaacagaaagt

SEQ ID NO: 493238 - DNA, 120 bp, Artificial Sequence
  ENSG00000163075_10 (sequence is synthesized)
cagacaggacattcacgaagagatggaaaatcatcttaagtggcaggtgcaccttggtaaagatcctatgtcttttaaacttaaaaaagagcttactgaagagtggcaaaaagcatgtgc

SEQ ID NO: 493239 - DNA, 120 bp, Artificial Sequence
  ENSG00000163075_11 (sequence is synthesized)
agttagccataaacgggttgttcgcaatcaagaagagaaaatcaaggaatttcatcctacttttgatccactcattaataacacttggctcagcaggtccagggcacaaaaacggtttca

SEQ ID NO: 493240 - DNA, 120 bp, Artificial Sequence
  ENSG00000163075_12 (sequence is synthesized)
acaagtagcacgcaaggtcatgattcagggacgattattcaatatgctgagtgctgttcgtgaaatggacaaagagagtatactgagaaagattggccaagcaaaacaatcgatagcaca

SEQ ID NO: 493241 - DNA, 120 bp, Artificial Sequence
  ENSG00000163075_13 (sequence is synthesized)
agaggcgaatttcttcaaattcttcctgaggcggatcagtcaggatgattataccagccggttctctgtgtcgcccaaggaggtgctgcccttcgctttcccagactgcagcccacccca

SEQ ID NO: 493242 - DNA, 120 bp, Artificial Sequence
  ENSG00000163075_14 (sequence is synthesized)
ggactccaacgagttggctcctgatggccttggactggtcccaattaagtcttcagaagttcaaatcaagcagagttattccttcttcaatctgcaggttcctcaactgtacaaaattaa

SEQ ID NO: 493243 - DNA, 120 bp, Artificial Sequence
  ENSG00000163075_15 (sequence is synthesized)
gagatatcagccattctctgtccacaagtcttcaacaagttacagacctcaaaagcttgcccgagccctaaagcaaggagctgaggatgaagtcaccaccatcacagcccttccgaaaca

SEQ ID NO: 493244 - DNA, 120 bp, Artificial Sequence
  ENSG00000163075_16 (sequence is synthesized)
ggactccacaactcagctctctggcaaaacatcagtcttgagcatgaaaccacctgaggccttagccatgtctctagattatgatcctctgtatgtttttaatcccaacccaggattatt

SEQ ID NO: 493245 - DNA, 120 bp, Artificial Sequence
  ENSG00000163075_17 (sequence is synthesized)
tgctgtaatgcatcctctgacctatgcagaaacgttgatagattaccatctatgctctcaccccaagtacaaattcaccaaagagtcccgccacgggtccagcattcctgtcacccaaaa

SEQ ID NO: 493246 - DNA, 120 bp, Artificial Sequence
  ENSG00000163075_18 (sequence is synthesized)
gcagtttctccatcacacggacattattcccggaataatgcactggaaaagcttccagtccctggttctctcctccctgccggacccctccaagatggagaccacaaagagctgcgattc

SEQ ID NO: 493247 - DNA, 120 bp, Artificial Sequence
  ENSG00000163075_19 (sequence is synthesized)
cttcaattcatttatgcttccgatagacgtccctgccatccttgatgccttaccagaagaggacagactagaaacagtagaacgtgagctctgtgagcagaatgtagaagttatgttgac

SEQ ID NO: 493248 - DNA, 120 bp, Artificial Sequence
  ENSG00000163075_20 (sequence is synthesized)
tccagaaatgatcaaagtggaattccctatgttgaactacaaggacatcaggaaggagaaagaagtgaaagatcaagcacaaccagcagagaaggccggagagaagctgctcgaggagat

SEQ ID NO: 493249 - DNA, 120 bp, Artificial Sequence
  ENSG00000163075_21 (sequence is synthesized)
gaggaacctgcggggcaaagcactcaacacatacctgattctagaatgaaagtcaccagtaggtcagtcccttccatttgctttccgtgggccactgtggccccttgcgtccatttacat

SEQ ID NO: 493250 - DNA, 120 bp, Artificial Sequence
  ENSG00000163075_22 (sequence is synthesized)
gccagccatctctgcaattaaagtttctggataaaaaaatgaaatgtagaggatgtatatatcttttaagtgataattataaatcttatatttaaaaataaaatggagttaggatgatga

SEQ ID NO: 493251 - DNA, 120 bp, Artificial Sequence
  ENSG00000163075_23 (sequence is synthesized)
tttacccaacagcgtcttcctggtaccagataactagttgaaacttggagcaggtccagttggttgaccagttgctctcccatcaactcattttccttgcaccaagatgactttaaccaa

SEQ ID NO: 493252 - DNA, 120 bp, Artificial Sequence
  ENSG00000163075_24 (sequence is synthesized)
aagatctggtaaaatgatgccatgggcaaggccgccatgggctcctgcagcaagtggaccatgtactcatctcaaggctatagaggctctgtagcctgcagggccacattaacaacattc

SEQ ID NO: 493253 - DNA, 120 bp, Artificial Sequence
  ENSG00000163075_25 (sequence is synthesized)
acagaagaggctcctggtgactccattccaaagccaggatactttagcttcttgaacttttatgtcataaggtcagaaatttaccaaaggatgcttttccttacttagtgaatcttatgg

SEQ ID NO: 493254 - DNA, 120 bp, Artificial Sequence
  ENSG00000163075_26 (sequence is synthesized)
ctccttttagaaagcgtgggaacaaccaaggtcagaatatgatgtttgagtgtaaccaaattctcctactgcccctggagcttaaagcatctgggccacatgggaatgtgcactcttaag

SEQ ID NO: 493255 - DNA, 120 bp, Artificial Sequence
  ENSG00000163075_27 (sequence is synthesized)
ctagtgctaagaaggaagattgatggtgagagtttgcccccacgtagacagcccccagtcttgcattgtgccaataaacagtctctaggagagggggctgagaaccagctgtaactgggt

SEQ ID NO: 493256 - DNA, 120 bp, Artificial Sequence
  ENSG00000163075_28 (sequence is synthesized)
taaaatgcagatgtcaggagaagacgatcaaattgatgttcacaagtgttttttgaagccctccctactcggagagaaaaaattcacttttttcagcttgtcaagggaaacactgcttac

SEQ ID NO: 493257 - DNA, 120 bp, Artificial Sequence
  ENSG00000163075_29 (sequence is synthesized)
tcatatgagggactcattttatgtgccccaagcttgaagttgatggaaaggagcagcagcattttatgaaagcatctgaccagggtgacgtgagctcacgacatagtcgttctttacttt

SEQ ID NO: 493258 - DNA, 120 bp, Artificial Sequence
  ENSG00000163075_30 (sequence is synthesized)
aacagagcactcattgggaatattttttctctttggaatttcaagtgttaaacaatatctgacctttaatattgtttgccaacctttattttttggagaatatcagtgattccgtctttt

SEQ ID NO: 493259 - DNA, 120 bp, Artificial Sequence
  ENSG00000163075_31 (sequence is synthesized)
tacctcattcataaagatgaaaaaccagccagcattgactgagcacttagaagacctcacaccaggatctctgtgaataagatctcatttcacctttgctacaatgctgggagatgggaa

SEQ ID NO: 493260 - DNA, 120 bp, Artificial Sequence
  ENSG00000163075_32 (sequence is synthesized)
ttacaccattcgcacatcaggaaacaggggctgtggattcttgggtaacttgcccatgctcagaaactgatgcagctgaggccagaagccaggtttgaatcattcataagctgagtgttt

SEQ ID NO: 493261 - DNA, 120 bp, Artificial Sequence
  ENSG00000163075_33 (sequence is synthesized)
gttattcctttgcagtgcagctgccctgtagattttgagttttatatcaccttgattcagtctcatcaagcctttgctattgagccaacatcaggaactagaagcatcatctacgcacac

SEQ ID NO: 493262 - DNA, 120 bp, Artificial Sequence
  ENSG00000163075_34 (sequence is synthesized)
cttccaggcattttatgctgaagtttgccaaatgaaaaaacaatttgaatcaagctattaataattctatttataaggtatgccctcaactttaactcaactggccatccttaagatgca

SEQ ID NO: 493263 - DNA, 120 bp, Artificial Sequence
  ENSG00000163075_35 (sequence is synthesized)
ggtgggctctgtagccgtcaaaagctggacctgctgttgttgggggccaagatattcctgaggctggagaaaatgaataaaggattttatgaccttcctgtactgctgacaagaaatcat

SEQ ID NO: 493264 - DNA, 120 bp, Artificial Sequence
  ENSG00000163075_36 (sequence is synthesized)
ctctgttgataattttggaagagccagcaatgcacgactttggccaagatatttttttttccgtgaaatctgaagagaagtattgaccaagatcttattagcatcggagatcaggcaaat

SEQ ID NO: 493265 - DNA, 120 bp, Artificial Sequence
  ENSG00000163075_37 (sequence is synthesized)
gccacaaaaaaattgttgaacttgtctacttgtcactattttgtgatcctggacattcccttgttgtcacaaatgctagggaagaatgcatctaactcatataaatggtaaattatagca

SEQ ID NO: 493266 - DNA, 120 bp, Artificial Sequence
  ENSG00000163075_38 (sequence is synthesized)
ttaagtggctggctaagcaagagttccttgggggctgttgcttagagttcttatataaagtttcaataagttcattctctttttttaattataagaaaaatataagccacttacaaataa

SEQ ID NO: 493267 - DNA, 120 bp, Artificial Sequence
  ENSG00000163075_39 (sequence is synthesized)
gttcctgtcttccttgggaccattcaggaatactggaaaaatggagcgaacccagcagctttgaggacagatctctgttctggtcttctgcccataatgtcgcttgttggaaactgattt

SEQ ID NO: 493268 - DNA, 120 bp, Artificial Sequence
  ENSG00000163075_40 (sequence is synthesized)
cagtgagcttatttctaattgtcaggcagatattgagagtctgaccctgacagcatgtgggagtcataggtccactcctcagcagccttgctacaggtggtcggctgcagcgaacaggtc

SEQ ID NO: 493269 - DNA, 120 bp, Artificial Sequence
  ENSG00000163075_41 (sequence is synthesized)
tgagaagacactctgcaacacatatgaacacttactagcaagcaggcaaaaagatcattgtgtttgtaatctcacgaagtcccagctgcagttcctagtggggaggctttgatggccgca

SEQ ID NO: 493270 - DNA, 120 bp, Artificial Sequence
  ENSG00000163075_42 (sequence is synthesized)
caaatcctgcaaataaccatcattgaaatcactcgggcaacaaacaagtagaactgaacacaaattttaaaactgctgatttttctggtggcaaataagcagattagaagagtttgaaag

SEQ ID NO: 493271 - DNA, 120 bp, Artificial Sequence
  ENSG00000163075_43 (sequence is synthesized)
tgtcttcaccggaacatgctatcccaacatggccttaccgtatggcgtctttgcagtgtttttgtttatttttaacccttttttgaaaatccaagtcttcctttcttccattctgtcttt

SEQ ID NO: 493272 - DNA, 120 bp, Artificial Sequence
  ENSG00000163075_44 (sequence is synthesized)
cttgtaaaagaatgtcatcaaaaacttatttaaaatgatgagccaacataagatatactgtaaaacataacagaaatatagaatatatctatgctagtagcaagagttgcttctgacaag

SEQ ID NO: 493273 - DNA, 120 bp, Artificial Sequence
  ENSG00000163075_45 (sequence is synthesized)
gcctgtcctatgcctggcttagaaactggacattattcccggaataatgcactggaaaagcttccagtccctggttctctcctccctgccggacccctccaagatggagaccacaaagag

SEQ ID NO: 493274 - DNA, 120 bp, Artificial Sequence
  ENSG00000163075_46 (sequence is synthesized)
cagaagaggacagactagaaacagtagaacggagcacctggatctgctgctgtatctgtgacgacagagtcggggtatagcacaaagaaggccaccagccctgcatgacaagagctccgg

SEQ ID NO: 493275 - DNA, 120 bp, Artificial Sequence
  ENSG00000163075_47 (sequence is synthesized)
cacattaggaagactcttggtcccagagttcctccctacccgctatttcctgaactcctgttactgaagacccattcctttagctttgcgctttgtttctattaaactacctctggggag

SEQ ID NO: 493276 - DNA, 120 bp, Artificial Sequence
  ENSG00000163075_48 (sequence is synthesized)
ggcgctggcgccggccgaatccggcccgggaaccacctccaggattcactgcctgtcgcttgatgttgtccgtcttgggagtctgaagctatgggtcttctccagaaaaaacaaaaccga

SEQ ID NO: 493277 - DNA, 120 bp, Artificial Sequence
  ENSG00000163075_49 (sequence is synthesized)
aaaaacacacaaagatccacactaattaacattccatttcagaggcttcgccgaccagccccatggcctgcgcaagggccccaaggacatgacctttggctctaaaaagaagactccatt

SEQ ID NO: 493278 - DNA, 120 bp, Artificial Sequence
  ENSG00000163075_50 (sequence is synthesized)
agtcaccagtaggttgaaaaggtcgtggccccttggaaagattgtattgactgtgttggggatctggtgccacctggtggttgccacaagaaaggcctctcctgactcccaagttgtaac

SEQ ID NO: 493279 - DNA, 120 bp, Artificial Sequence
  ENSG00000163075_51 (sequence is synthesized)
ccgtttccaccaaatcgacttccaaataatatttatcagatcatcatctgtgcttttcttccttgtttcagaccacttttaggtggaaaaggcaaagaaggcttatatgtattttcttcc

SEQ ID NO: 493280 - DNA, 120 bp, Artificial Sequence
  ENSG00000163075_52 (sequence is synthesized)
ataatgagtccatcagaaaaagttccttcggtgaaatcgttgaccacgtgatgtttggggactccctatgggatcaatcatccgggttccttagagaccatggccataatcaggggctgg

SEQ ID NO: 493281 - DNA, 120 bp, Artificial Sequence
  ENSG00000163075_53 (sequence is synthesized)
cccctgtcttgcattaactcgggttatcatgccattctccttctaaggccaaagatacctgtaaccgaagaatcgggatacttcactgcagtcacttcatttttttttcttttgaggcag

SEQ ID NO: 493282 - DNA, 120 bp, Artificial Sequence
  ENSG00000163075_54 (sequence is synthesized)
ggcatgagccaccatgcctggccaagcagcttcattttagaagtgattattattgctttcctttctagaacttccggtttgtgaagtattttctcaatgatcctcaaaacattctaagac

SEQ ID NO: 493283 - DNA, 120 bp, Artificial Sequence
  ENSG00000163075_55 (sequence is synthesized)
acattctaagacataaagtagctgttattagtgtgattttatgcagaaactcaggcccagaaagcttcatggacttacccaattagcagaagagccaggtttgggcaggatcttggtttc

SEQ ID NO: 493284 - DNA, 120 bp, Artificial Sequence
  ENSG00000163075_56 (sequence is synthesized)
tggtgtgtacctgtagtcccagctacctggggggctggggtgggaggctcacctgagcccaggtagtcaaggctgcagtgagccatgatcctggtacccagtccactcttctctctacta

SEQ ID NO: 493285 - DNA, 120 bp, Artificial Sequence
  ENSG00000163075_57 (sequence is synthesized)
tcctggtacccagtccactcttctctctactacatggtaatcaatgaaaatattacagatttacattttttaactttttatttaaactttcagctttggagtctctaagagtaaagatat

SEQ ID NO: 493286 - DNA, 120 bp, Artificial Sequence
  ENSG00000163075_58 (sequence is synthesized)
tatgtgatgatatttgtattttacttaattgcttattctttaaaacatgtaatatagaaaaaaatacaaattagcaaatgtcctttgctctaaagaaatcagctggcaagtttgccccac

SEQ ID NO: 493287 - DNA, 120 bp, Artificial Sequence
  ENSG00000163075_59 (sequence is synthesized)
ccagcagcagccatgtcttactcatttctgtatccccagcatgcagcaagatgtttggcacaatgcaggctctcaataaatgttttttgaggctgggtatggtggctcacacctgtagtc

SEQ ID NO: 493288 - DNA, 75 bp, Artificial Sequence
  ENSG00000163075_60 (sequence is synthesized)
acctgcctctacaaaaaacacaaaaattggccgggcatggtggcccatgcccagctacttgggaggctgaggtgg

SEQ ID NO: 493289 - DNA, 74 bp, Artificial Sequence
  ENSG00000163075_61 (sequence is synthesized)
atcacttgagcctgagaggtcaaggctgcagtaagccgacattattttttaaaaattggctaggtgcagtggct

SEQ ID NO: 493290 - DNA, 87 bp, Artificial Sequence
  ENSG00000163075_62 (sequence is synthesized)
aattttttaaaaattggctcttaggagaccgaggtggacggattgcttgagctcaggcattcaagaccagcctgggcaacatggcaa

SEQ ID NO: 493291 - DNA, 120 bp, Artificial Sequence
  ENSG00000163075_63 (sequence is synthesized)
aaccccatctctacaaaaaatacaaaaaagattagccaggtgtgttggtgcacatctgtggtcccagctactggggagggtaagatggaaggatcacttgaccccaggaggctgaggctg

SEQ ID NO: 493292 - DNA, 120 bp, Artificial Sequence
  ENSG00000163075_64 (sequence is synthesized)
ttcggtgaggccgagctctgtggtagagactgccttttccctatcgctgcaactctggaaaataaacttaacagtactcgagaggtagcaaggacagtggggtgaggagtatggataccc

SEQ ID NO: 493293 - DNA, 120 bp, Artificial Sequence
  ENSG00000163075_65 (sequence is synthesized)
agcacaatcgactacattaaatcatggttctgccactaactatgtcaccttgtgtggaacacttaccctctcttgtgcctcagtttcctcttctgtaagtggggataatcacggcaccac

SEQ ID NO: 493294 - DNA, 120 bp, Artificial Sequence
  ENSG00000163075_66 (sequence is synthesized)
ctcataggattaaaatagttaatacatgggaaatgcatggggttactcctggcacacaggaagtgccagatcagcattggcagtcatcattgtttattacgtaacttgagtctccattcc

SEQ ID NO: 493295 - DNA, 120 bp, Artificial Sequence
  ENSG00000163075_67 (sequence is synthesized)
ttctacttggtgaaagaattaggaaacatctcacagagtgaagattgactgcatacctctaacagagcctgatttaagacaggatttgtgagtttggtagacaatcctatgaagttttca

SEQ ID NO: 493296 - DNA, 120 bp, Artificial Sequence
  ENSG00000163075_68 (sequence is synthesized)
gggcccctgaacatgagtatataaagtctgatgcaggcctataccctattggggatctcatgtgctcacagtacagctacgctcctctcaaagagacatcatagctaaggaacaatgttt

SEQ ID NO: 493297 - DNA, 120 bp, Artificial Sequence
  ENSG00000163075_69 (sequence is synthesized)
taaaaacaagtaccagtgcaaattaattagaaacagggcactgcctgacgttaggaactctgcattcagagtgtagatctctcaaaagtacagttagagacatctggtcaggatgaagca

SEQ ID NO: 493298 - DNA, 120 bp, Artificial Sequence
  ENSG00000163075_70 (sequence is synthesized)
gtgtgcgcaaactgcaatgaaccttttttgtgcaaaattactagttagtgacaaacaaaatataaagagacctccaaaaagacacactcaggctcagaaacaagctgaacaactccacag

SEQ ID NO: 493299 - DNA, 120 bp, Artificial Sequence
  ENSG00000163075_71 (sequence is synthesized)
agcaggaacagcatagaaatgctgagtgggttgcagggtggagccacaggcttgcaggctccaggttttgaagcagtcaggcagtgttggagaccactccatggggtaaaggagactgca

SEQ ID NO: 493300 - DNA, 120 bp, Artificial Sequence
  ENSG00000163075_72 (sequence is synthesized)
agtgtctcactgattcaggggatccgcacttggcctgcagccaggagaagaggtaagctgccccacctttgcacttcccacgaaaggaagctggaaaccctctgctgacctgttgcctgg

SEQ ID NO: 493301 - DNA, 120 bp, Artificial Sequence
  ENSG00000163081_0 (sequence is synthesized)
aagtgtgggcgcagccgggacaatttcgagacaacttcgagacaatttcgaatggacaaattgcggagaagttgcttctgccgctcagaagccggttcacctccttctccaccgcggcat

SEQ ID NO: 493302 - DNA, 120 bp, Artificial Sequence
  ENSG00000163081_1 (sequence is synthesized)
ttccaaaacaacagggacaagtctccccggctcgccgcaggcctgaccgcccagctccgccaggatttgcagagagcagcgcgctccatttgcagaaaggaaatcgagactggactcctt

SEQ ID NO: 493303 - DNA, 120 bp, Artificial Sequence
  ENSG00000163081_2 (sequence is synthesized)
ctgactccacgcggccccagctcctgaaccagcgcagtgagcctcagccgcttctcaaactgggtctcagaaaatttctcctcgagatggatttcagcggcaggaaagaggggccagtga

SEQ ID NO: 493304 - DNA, 120 bp, Artificial Sequence
  ENSG00000163081_3 (sequence is synthesized)
cgcgaggagcaagaaaagagtaacatgggagatgaatgttcaaacccagatctcctcgctgagcctggaagctcgccaccgtgggatcacgggaaccagaggcaagaggctgcgaatgag

SEQ ID NO: 493305 - DNA, 120 bp, Artificial Sequence
  ENSG00000163081_4 (sequence is synthesized)
tccaacacccgcgttcctcgagttttaaaagcacacctggggccagagactgcacagccaactaaacggagtaaacgcaacaggtggaggaggcagagttgtcaggggccaagcccggcg

SEQ ID NO: 493306 - DNA, 120 bp, Artificial Sequence
  ENSG00000163081_5 (sequence is synthesized)
cgatctggccagttcttggggagcgcggacctgggactgcagagaggcgttttgaagagtgctgcgcgcacctgcctctcggagatatccaactccacccgggcgtctcctgagagcgca

SEQ ID NO: 493307 - DNA, 120 bp, Artificial Sequence
  ENSG00000163081_6 (sequence is synthesized)
cagtccacagaccccgggagggctgcccgccctaggacacgtactctcccgacccctcactctttcaaaattggggaagaggcggaggagatgaaaaagaagaaagagagaaagagaaga

SEQ ID NO: 493308 - DNA, 120 bp, Artificial Sequence
  ENSG00000163081_7 (sequence is synthesized)
gaaattttaaaaaataataaaaggagggaagaatggaggtaaaacgcgggggagagaagaggggagaaactctcctcaccacaaccaaagcaggaggcctaagcttcctgaatttctaca

SEQ ID NO: 493309 - DNA, 120 bp, Artificial Sequence
  ENSG00000163081_8 (sequence is synthesized)
catgacttgcattaagttccttcctagaacttaaactttttcatctcccgtcacccaagaaaacacccatttcctcttttaaataaagtttctttttctggagatgaacctttaaataag

SEQ ID NO: 493310 - DNA, 120 bp, Artificial Sequence
  ENSG00000163081_9 (sequence is synthesized)
tcgtacgtttgggagcgagggacaggagaataattttgatccagaaccttggagattggagaagcaggtggaaaaattctaaaaagatgaaaactgaccatctccgacacagaaacccat

SEQ ID NO: 493311 - DNA, 120 bp, Artificial Sequence
  ENSG00000163081_10 (sequence is synthesized)
cgaaaggggccaccgagacccgttgattagctggagggagcatgcggcagaagtgcagacccctcgctaacccgccaacctccaagagccctcttgcagaaagctgcccggctccccacg

SEQ ID NO: 493312 - DNA, 120 bp, Artificial Sequence
  ENSG00000163081_11 (sequence is synthesized)
gtggccctgcgcgcgcaccatcctcgcggtctcgcttcttcgccccggaaaactctatgaggggcaccccagcctcagccgggttaagacaagtagccccaagaggaaggagcctcagag

SEQ ID NO: 493313 - DNA, 120 bp, Artificial Sequence
  ENSG00000163081_12 (sequence is synthesized)
agcctttcttcctgttcttcttcgtcttcttttttttctaaacgaaatctaatactatctggctgcaaaaatatattatcaccggctctcagcctaagagactaacatttggatatgtag

SEQ ID NO: 493314 - DNA, 120 bp, Artificial Sequence
  ENSG00000163081_13 (sequence is synthesized)
gaaatgtaatctgcatggctaattgattctcagcgtatcagtttaaaggataaagatcgatatctacatgatggatattgtattaataggggcataaataaaggtcgaagagtcgttacc

SEQ ID NO: 493315 - DNA, 120 bp, Artificial Sequence
  ENSG00000163081_14 (sequence is synthesized)
ggaagataggaagagagaaggaaaataggaaaggaaaaagaaaagaggaaaagaagagagaggtacttttttttttaaaggcagtgagggagggagagaagaataaatctcacagcagct

SEQ ID NO: 493316 - DNA, 120 bp, Artificial Sequence
  ENSG00000163082_0 (sequence is synthesized)
caccggcccggcgtggcagcggcggcggagcgcggccccgggcacaccatggccgagctgctgcggagcctgcaggattcccagctcgtcgcccgcttccagcgccgctgcgggctcttc

SEQ ID NO: 493317 - DNA, 120 bp, Artificial Sequence
  ENSG00000163082_1 (sequence is synthesized)
tgcgggctcttccccgctccggatgaaggcccccgggagaacggcgcggaccccacggagcgcgcggcgcgggtccccggggtcgagcatctccccgcagccaacggcaagggcggcgag

SEQ ID NO: 493318 - DNA, 120 bp, Artificial Sequence
  ENSG00000163082_2 (sequence is synthesized)
gctccggccaacgggctgcgcagagccgcggcgccggaggcttatgtacagaagtacgtcgtgaagaattatttctactattacctattccaattttcagctgctttgggccaagaagtg

SEQ ID NO: 493319 - DNA, 120 bp, Artificial Sequence
  ENSG00000163082_3 (sequence is synthesized)
ttctacatcacgtttcttccattcactcactggaatattgacccttatttatccagaagattgatcatcatatgggttttggtgatgtatattggccaagtggccaaggatgtcttgaag

SEQ ID NO: 493320 - DNA, 120 bp, Artificial Sequence
  ENSG00000163082_4 (sequence is synthesized)
tggccccgtccctcctcccctccagttgtaaaactggaaaagagactgatcgctgaatatggaatgccatccacccacgccatggcggccactgccattgccttcaccctccttatctct

SEQ ID NO: 493321 - DNA, 120 bp, Artificial Sequence
  ENSG00000163082_5 (sequence is synthesized)
actatggacagataccagtatccatttgtgttgggactggtgatggccgtggtgttttccaccttggtgtgtctcagcaggctctacactgggatgcatacggtcctggatgtgctgggt

SEQ ID NO: 493322 - DNA, 120 bp, Artificial Sequence
  ENSG00000163082_6 (sequence is synthesized)
ggcgtcctgatcaccgcactcctcatcgtcctcacctaccctgcctggaccttcatcgactgcctggactcggccagccccctcttccccgtgtgtgtcatagttgtgccattcttcctg

SEQ ID NO: 493323 - DNA, 120 bp, Artificial Sequence
  ENSG00000163082_7 (sequence is synthesized)
tgttacaattaccctgtttctgattactacagcccaacccgggcggacaccaccaccattctggctgccggggctggagtgaccataggattctggatcaaccatttcttccagcttgta

SEQ ID NO: 493324 - DNA, 120 bp, Artificial Sequence
  ENSG00000163082_8 (sequence is synthesized)
tccaagcccgctgaatctctccctgttattcagaacatcccaccactcaccacctacatgttagttttgggtctgaccaaatttgcagtgggaattgtgttgatcctcttggttcgtcag

SEQ ID NO: 493325 - DNA, 120 bp, Artificial Sequence
  ENSG00000163082_9 (sequence is synthesized)
cttgtacaaaatctctcactgcaagtattatactcatggttcaaggtggtcaccaggaacaaggaggccaggcggagactggagattgaagtgccttacaagtttgttacctacacatct

SEQ ID NO: 493326 - DNA, 120 bp, Artificial Sequence
  ENSG00000163082_10 (sequence is synthesized)
gttggcatctgcgctacaacctttgtgccgatgcttcacaggtttctgggattaccctgagtctcaaacagttggaaactagcccactggacatgaaagccaagacataggaaagttatt

SEQ ID NO: 493327 - DNA, 120 bp, Artificial Sequence
  ENSG00000163082_11 (sequence is synthesized)
ggtaggcaaatcttgacaacttatttttctttaacaacaacaaaaagtcatacggctgtcttgctactaccagataaatgatgctgctgtgtgaaaggaagaactgtctcatagcggtca

SEQ ID NO: 493328 - DNA, 120 bp, Artificial Sequence
  ENSG00000163082_12 (sequence is synthesized)
ttggtcgtccgtggtggttggttgtgctacagttgaacccaggctaaagaccataatccggatctttaaaggcacacaccgcgccccccccccccccgcccggcccctgctcctctcgct

SEQ ID NO: 493329 - DNA, 120 bp, Artificial Sequence
  ENSG00000163082_13 (sequence is synthesized)
gttgcacgggctttggatctagtcatgggctggcaggaattgtggcctggcttaggaatagctatgagccccactgggttctggagagccagtagagatggggtgatctgggaggctgga

SEQ ID NO: 493330 - DNA, 120 bp, Artificial Sequence
  ENSG00000163082_14 (sequence is synthesized)
ggtagagcctttcttttccgttacaaccttgcctagcatggagttatttctaaaatgggaactttggtctaggagaaggggtggcaccatatgaaacggcattccttggacagggtgact

SEQ ID NO: 493331 - DNA, 120 bp, Artificial Sequence
  ENSG00000163082_15 (sequence is synthesized)
cttggacagggtgacttccttatcgtttatttggtgattttttgttttgttttgtttgagacaggatcttgctctgtttcccaggctgtattacagtggcacaatctcagctcactgcaa

SEQ ID NO: 493332 - DNA, 120 bp, Artificial Sequence
  ENSG00000163082_16 (sequence is synthesized)
gcaaactctgcctcccgggctcaagcaatcctcctgcctgagccaactgagtagctgggactgtaagcatagaccaccatgtgcccagctaatttttgtagagacagggtttctccatgt

SEQ ID NO: 493333 - DNA, 83 bp, Artificial Sequence
  ENSG00000163082_17 (sequence is synthesized)
cctccttgttatgatcaaattagactgtgcctggttgggtggtaagatcactctgaaagaaagctcactgtgaagagatgaaa

SEQ ID NO: 493334 - DNA, 120 bp, Artificial Sequence
  ENSG00000163082_18 (sequence is synthesized)
aagatcactctgaaagaaagctcactgtgaagagatgaaaggtggaggcagagctgtgaggtcatggggaaaagcctgctttccttataagtcctgctgttcatgttggaataaggatct

SEQ ID NO: 493335 - DNA, 120 bp, Artificial Sequence
  ENSG00000163082_19 (sequence is synthesized)
gctcttccttgtttccatgcattttgcaggattccaggtaccattaccacactcttctgacccatgaaaccaactggctgctcacacatcaccaaacaggttgggggttagccttcagca

SEQ ID NO: 493336 - DNA, 120 bp, Artificial Sequence
  ENSG00000163082_20 (sequence is synthesized)
caggccctctgcccatcgtcagcagttttttgctttcatacaaacctggaaggcactggcatctgcctaggaaagtggatctgtgaagaacagatgaactcaatcctttctggagtctga

SEQ ID NO: 493337 - DNA, 120 bp, Artificial Sequence
  ENSG00000163082_21 (sequence is synthesized)
caaagaagggataggcttccttgacattgcctgtcctgacaaggcctccctgacattactcctccaatttcacagttaccttctgtaaatctattttctcatctactgaatagaatcagg

SEQ ID NO: 493338 - DNA, 120 bp, Artificial Sequence
  ENSG00000163082_22 (sequence is synthesized)
cgccctttttgtcttcccacctcttatctcttggcaattttaaggggaattaatgcaagaacaactttagtgtctcttgggaaaacaagccaaccaaatacaaaacccattaagcctact

SEQ ID NO: 493339 - DNA, 120 bp, Artificial Sequence
  ENSG00000163082_23 (sequence is synthesized)
agggtgagtcctcttaacatgggaaggcgatgattatgcaaacaccggagttccctcctcttcagttcctaagaataaagaacaggtatcaagaactttctttaaagttagtgtaactat

SEQ ID NO: 493340 - DNA, 120 bp, Artificial Sequence
  ENSG00000163082_24 (sequence is synthesized)
agttaacaaagtatccattgaagtttagtgcctgtaggactgagccagtgctttatcaacccaacacatcatcaccatgtgcatactctagaaaaaaaaatagcttccttaaaagttaca

SEQ ID NO: 493341 - DNA, 120 bp, Artificial Sequence
  ENSG00000163082_25 (sequence is synthesized)
gaggctcttaacgtgttaaaaccgaaaaatcacatttttcttgatttcaaatatgttctacggccttactgttgggatgatatttagtatgtaacttagcattccaatttctcaagaatt

SEQ ID NO: 493342 - DNA, 120 bp, Artificial Sequence
  ENSG00000163082_26 (sequence is synthesized)
gcgagactctctcaaaaaaaaaaaaaaagaatttttagcaaaacatcctgtttttacttaaaattcttctcatatttattatagttagaaggcaaagatcaagatgacctgccgtttgac

SEQ ID NO: 493343 - DNA, 120 bp, Artificial Sequence
  ENSG00000163082_27 (sequence is synthesized)
caaagatcaagatgacctgccgtttgactgcttttacatcaaactctgcccagtatttgcagcacaactcaggggaagggccttagcttacaggtactcccagccttcatctgcccctgc

SEQ ID NO: 493344 - DNA, 120 bp, Artificial Sequence
  ENSG00000163082_28 (sequence is synthesized)
agagcagtggctgtcagccggatgcggcacttttctgtattttcatccacacagctgcccagccagagttcgcaacactggatatttacaccaaataattgtggttgacttgtctgaagc

SEQ ID NO: 493345 - DNA, 120 bp, Artificial Sequence
  ENSG00000163082_29 (sequence is synthesized)
cagctgacaaaaggatcagcttttcccacttgtattttttaaaaagagggattgtgatcattgtcacagagtgggtgctggcctctcatatatatgatatatatatatcattttatatat

SEQ ID NO: 493346 - DNA, 120 bp, Artificial Sequence
  ENSG00000163082_30 (sequence is synthesized)
atatatatatcatatacataatttttactgctgtctctagttttaagtcccaacaataggaaggccgatcagctatattgatatatttaaggctgtacttaactaatttgggctgaggat

SEQ ID NO: 493347 - DNA, 120 bp, Artificial Sequence
  ENSG00000163082_31 (sequence is synthesized)
gaatatatcagccacagcacattaaagaatgagccaaggatttgtcatggttggtcactttttaaagtatttgattactgcaactggagaatgaaaagtgtatattggtgacgccaacct

SEQ ID NO: 493348 - DNA, 120 bp, Artificial Sequence
  ENSG00000163082_32 (sequence is synthesized)
cagtttctgagcactcctgctctgtggtgagaatcagacaaaaattcatcggggtgaaaaaggcattacctgattcacacccttgtcttgctagccctcttccattcatttctcacacag

SEQ ID NO: 493349 - DNA, 120 bp, Artificial Sequence
  ENSG00000163082_33 (sequence is synthesized)
cactttgctctgttaaatcctctctctgtctcagaccattgcttgccccttcaaagggtatggttcaggctcctttcaagacatttggagtttctctctggggaaagagagccccctact

SEQ ID NO: 493350 - DNA, 120 bp, Artificial Sequence
  ENSG00000163082_34 (sequence is synthesized)
ggtttggcttcagtctaggtccaccatccctctcgatctggcatcttggagattaatttaaaaggcaagctcaccacaatgtaagcctatggtctggccaaccttgcttttgggaactgt

SEQ ID NO: 493351 - DNA, 120 bp, Artificial Sequence
  ENSG00000163082_35 (sequence is synthesized)
gacaccaaagcccccaggactatctgcctctccaggagccagatagaatgacatgcctttttcctaattgtccacattccacccccaacccactgccactgtgggccaagccatccatct

SEQ ID NO: 493352 - DNA, 120 bp, Artificial Sequence
  ENSG00000163082_36 (sequence is synthesized)
tgcaatcttcatctaaaacagctctcatttcatgccagttttgctcaaacctgcaccgtcacaagatattcagaagatgaaaacgtagaagacacccctgaattaaaaacacttacatag

SEQ ID NO: 493353 - DNA, 120 bp, Artificial Sequence
  ENSG00000163082_37 (sequence is synthesized)
cagtggctggaattactccaaaacgtgcccagtgatcgcactgtaacatgggattttctcacccaaataggcaactcatgcttcctgagtgtaatcaaagcatgtggtgttttggggcca

SEQ ID NO: 493354 - DNA, 120 bp, Artificial Sequence
  ENSG00000163082_38 (sequence is synthesized)
tatgcaccaggtttctattttagaaaccttcagctgtcttgcttatgtactgtatgtaaatttattctttttaaaaatcacttttatttgattttgacttattaaatgctttaaaagcca

SEQ ID NO: 493355 - DNA, 80 bp, Artificial Sequence
  ENSG00000163083_0 (sequence is synthesized)
cggctcgactcggctcgcctcgcggcgggcgccctcgtcgccagcggcgcaccatggacgggctgcccggtcgggcgctg

SEQ ID NO: 493356 - DNA, 120 bp, Artificial Sequence
  ENSG00000163083_1 (sequence is synthesized)
ccgacgcctgccgcgccgccgccacccccgccacccggatccccgggtggctcgcaggacacctgtacgtcgtgcggcggcttccggcggccagaggagctcggccgagtggacggcgac

SEQ ID NO: 493357 - DNA, 120 bp, Artificial Sequence
  ENSG00000163083_2 (sequence is synthesized)
ggccagaggagctcggccgagtggacggcgacttcctggaggcggtgaagcggcacatcttgagccgcctgcagatgcggggccggcccaacatcacgcacgccgtgcctaaggccgcca

SEQ ID NO: 493358 - DNA, 120 bp, Artificial Sequence
  ENSG00000163083_3 (sequence is synthesized)
tggtcacggccctgcgcaagctgcacgcgggcaaggtgcgcgaggacggccgcgtggagatcccgcacctcgacggccacgccagcccgggcgccgacggccaggagcgcgtttccgaaa

SEQ ID NO: 493359 - DNA, 120 bp, Artificial Sequence
  ENSG00000163083_4 (sequence is synthesized)
tcatcagcttcgccgagacagatggcctcgcctcctcccgggtccgcctatacttcttcatctccaacgaaggcaaccagaacctgtttgtggtccaggccagcctgtggctttacctga

SEQ ID NO: 493360 - DNA, 120 bp, Artificial Sequence
  ENSG00000163083_5 (sequence is synthesized)
aactcctgccctacgtcctggagaagggcagccggcggaaggtgcgggtcaaagtgtacttccaggagcagggccacggtgacaggtggaacatggtggagaagagggtggacctcaagc

SEQ ID NO: 493361 - DNA, 120 bp, Artificial Sequence
  ENSG00000163083_6 (sequence is synthesized)
gcagcggctggcataccttcccactcacggaggccatccaggccttgtttgagcggggcgagcggcgactcaacctagacgtgcagtgtgacagctgccaggagctggccgtggtgccgg

SEQ ID NO: 493362 - DNA, 120 bp, Artificial Sequence
  ENSG00000163083_7 (sequence is synthesized)
tgttcgtggacccaggcgaagagtcgcaccggccctttgtggtggtgcaggctcggctgggcgacagcaggcaccgcattcgcaagcgaggcctggagtgcgatggccggaccaacctct

SEQ ID NO: 493363 - DNA, 120 bp, Artificial Sequence
  ENSG00000163083_8 (sequence is synthesized)
gttgcaggcaacagttcttcattgacttccgcctcatcggctggaacgactggatcatagcacccaccggctactacgggaactactgtgagggcagctgcccagcctacctggcagggg

SEQ ID NO: 493364 - DNA, 120 bp, Artificial Sequence
  ENSG00000163083_9 (sequence is synthesized)
tccccggctctgcctcctccttccacacggctgtggtgaaccagtaccgcatgcggggtctgaaccccggcacggtgaactcctgctgcattcccaccaagctgagcaccatgtccatgc

SEQ ID NO: 493365 - DNA, 120 bp, Artificial Sequence
  ENSG00000163083_10 (sequence is synthesized)
tgtacttcgatgatgagtacaacatcgtcaagcgggacgtgcccaacatgattgtggaggagtgcggctgcgcctgacagtgcaaggcaggggcacggtggtggggcacggagggcagtc

SEQ ID NO: 493366 - DNA, 120 bp, Artificial Sequence
  ENSG00000163083_11 (sequence is synthesized)
ccgggtgggcttcttccagcccccgcgggaacgggggtacacggtgggctgagtacagtcattctgttgggctgtggagatagtgccagggtgcggcctgagatatttttctacagcttc

SEQ ID NO: 493367 - DNA, 120 bp, Artificial Sequence
  ENSG00000163083_12 (sequence is synthesized)
atagagcaaccagtcaaaaccagagcgagaaccctcaactgacatgaaatactttaaaatgcacacgtagccacgcacagccagacgcatcctgccacccacacagcagcctccaggata

SEQ ID NO: 493368 - DNA, 120 bp, Artificial Sequence
  ENSG00000163083_13 (sequence is synthesized)
ccagctggcccggccactctgaattgcgccttccgagcacacataaaagcacaaagacagagacgcagagagagagagagagccacggagaggaaaagcagatgcaggggtggggagcgc

SEQ ID NO: 493369 - DNA, 120 bp, Artificial Sequence
  ENSG00000163083_14 (sequence is synthesized)
agctcggcggaggctgcgtgtgccccgtggcttttaccaggcctgctctgcctggctcgatgtctgcttcttccccagcctgggatccttcgtgcttcaaggcctggggagcctgtcctt

SEQ ID NO: 493370 - DNA, 120 bp, Artificial Sequence
  ENSG00000163083_15 (sequence is synthesized)
ccatgcccttgtcgagggaaagagacccagaaaggacacaacccgtcagagacctgggagcaggggcaatgaccgtttgactgtttgtggcttgggcctctgacatgacttatgtgtgtg

SEQ ID NO: 493371 - DNA, 120 bp, Artificial Sequence
  ENSG00000163083_16 (sequence is synthesized)
tgtgtttttggggtggggagggagggagagaagagggggctaaatttgatgctttaactgatctccaacagttgacaggtcatccttgccagttgtataactgaaaaaggacttttctac

SEQ ID NO: 493372 - DNA, 120 bp, Artificial Sequence
  ENSG00000163083_17 (sequence is synthesized)
caggtatgaccttttaagtgaaaatctgaattgttctaaatggaaagaaaaaaagttgcaatctgtgcccttcattggggacattcctctaggactggtttggggacgggtgggaatgac

SEQ ID NO: 493373 - DNA, 120 bp, Artificial Sequence
  ENSG00000163083_18 (sequence is synthesized)
ccctaggcaaggggatgagaccgcaggaggaaatggcggggaggaggcattcttgaactgctgaggatggggggtgtcccctcagcggaggccaagggaggggagcagcctagttggtct

SEQ ID NO: 493374 - DNA, 120 bp, Artificial Sequence
  ENSG00000163083_19 (sequence is synthesized)
tggagagatggggaaggctttcagctgatttgcagaagttgcccatgtgggccccagccatcagggctggccgtggacgtggcccctgcccactcacctgcccgcctgcccgcccgcccg

SEQ ID NO: 493375 - DNA, 120 bp, Artificial Sequence
  ENSG00000163083_20 (sequence is synthesized)
catagcacttgcagacctgcctgaacgcacatgacatagcacttgccgatctgcgtgtgtccagaagtggcccttggccgagcgccgaactcgctcgccctctagatgtccaagtgccac

SEQ ID NO: 493376 - DNA, 120 bp, Artificial Sequence
  ENSG00000163083_21 (sequence is synthesized)
gtgaactatgcaatttaaagggttgacccacactagacgaaactggactcgtacgactctttttatattttttatacttgaaatgaaatcctttgcttcttttttaagcgaatgattgct

SEQ ID NO: 493377 - DNA, 120 bp, Artificial Sequence
  ENSG00000163083_22 (sequence is synthesized)
tttaatgtttgcactgatttagttgcatgattagtcagaaactgccatttgaaaaaaagttatttttatagcagcaaaaaaaaaaaaaaaagaatacagttaaatgtattatacataatt

SEQ ID NO: 493378 - DNA, 120 bp, Artificial Sequence
  ENSG00000163083_23 (sequence is synthesized)
ttggaaccaaagaggccaacagatcagttttaattttattagacggtgaggccatctgagatgaggtggacgttctgagcagtcccttgagtggcctgccaacgtttcagggtatgaatg

SEQ ID NO: 493379 - DNA, 120 bp, Artificial Sequence
  ENSG00000163083_24 (sequence is synthesized)
gattttgtttattcggtttgatgtgtcttttccatccttacacacccagaaggtagagtaaaaatgactatgatagaatgcaggtgtgtatccttaaatcctcatctttatgtttattta

SEQ ID NO: 493380 - DNA, 120 bp, Artificial Sequence
  ENSG00000163083_25 (sequence is synthesized)
ataaagctccccttagattctgtttcataataatttaaaaccaaacaattttcccatagacttgctgttaaagtattgtacgtttgtgtacagtttaagaaaataaaagattgagtgcca

SEQ ID NO: 493381 - DNA, 120 bp, Artificial Sequence
  ENSG00000163092_0 (sequence is synthesized)
ggagaaatctggcaggtctctaggcagacaaaagggaacatctggtagggactgggacatgtagaaaaaaggacaacctggacccatccatgttcccaatgcagaagggctccctcaacc

SEQ ID NO: 493382 - DNA, 120 bp, Artificial Sequence
  ENSG00000163092_1 (sequence is synthesized)
tcctgaggcagaaatgggaatcttgtgattatcagagaagtgagtgtcatcccagggacagccattgtacaattttccagcctcaggaaagcaaattgcttgcgcctgaaggagaggtag

SEQ ID NO: 493383 - DNA, 120 bp, Artificial Sequence
  ENSG00000163092_2 (sequence is synthesized)
tatcagcacctcaatctttggatcccacaagtctgccctacagtacaggggaagagatgtggagttcgaagccggaagagaaggattctgtggacaagagtaacaacaccagggaatatg

SEQ ID NO: 493384 - DNA, 120 bp, Artificial Sequence
  ENSG00000163092_3 (sequence is synthesized)
gtcggccagaagtgctgaaggaggattccctgagcagtcggcgcaggattgaacgcttttccattgcccttgatgagctgaggagtgtgtttgaggctcctaagagtggaaacaaaccag

SEQ ID NO: 493385 - DNA, 120 bp, Artificial Sequence
  ENSG00000163092_4 (sequence is synthesized)
ctgagtacggtggaaaggaagtggaaattgagcgaagtttgtgctcgccagcttttaagagtcaccctgggagccagctggaggattctgtgaaagattcagacaagaaaggcaaggaaa

SEQ ID NO: 493386 - DNA, 120 bp, Artificial Sequence
  ENSG00000163092_5 (sequence is synthesized)
catcttttgacaagatgtcacctgaaagtggtcacagccgcatctttgaagcgactgctggccctaataagcctgagagtggatttgcagaagacagtgctgctcggggcgagggtgtgt

SEQ ID NO: 493387 - DNA, 120 bp, Artificial Sequence
  ENSG00000163092_6 (sequence is synthesized)
cagacctccacgaagtggtctccctgaaggagcggatggcgaggtaccaggcagctgtttccaggggtgactgccgcagcttctctgctaatatgatggaagaatcagaaatgtgcgcag

SEQ ID NO: 493388 - DNA, 120 bp, Artificial Sequence
  ENSG00000163092_7 (sequence is synthesized)
tgcctggtggtttggccaaggtgaagaaacaatttgaggacgaaattacttcttcccgtaatacctttgctcaataccaatatcaacatcagaacagatctgagcaggaggcaattcata

SEQ ID NO: 493389 - DNA, 120 bp, Artificial Sequence
  ENSG00000163092_8 (sequence is synthesized)
gcagccaggttggcacttcaagaagcagccaggaaatggcaagaaatgaacaagaagggtccaaagtacagaaaattgatgttcatggaacagaaatggtctctcatcttgaaaagcaca

SEQ ID NO: 493390 - DNA, 120 bp, Artificial Sequence
  ENSG00000163092_9 (sequence is synthesized)
ccgaggaagtaaaccaagcatctcagtttcatcaatatgttcaagaaactgtcattgatacacctgaggatgaagagattccaaaggtttcgactaagttgttaaaagagcagtttgaaa

SEQ ID NO: 493391 - DNA, 120 bp, Artificial Sequence
  ENSG00000163092_10 (sequence is synthesized)
agtctgcccaggaaaagatcctttattctgacaaagagatgacaaccccagccaagcagattaagaagctgctgctccaagacaaggaaatatgtatactttgtcaaaagacagtttatc

SEQ ID NO: 493392 - DNA, 120 bp, Artificial Sequence
  ENSG00000163092_11 (sequence is synthesized)
caatggagtgcctagtggcagacaagcagaattttcataagtcctgcttccgatgccaccattgcaacagtaaactaagtttgggaaattatgcatcacttcatggacaaatatactgta

SEQ ID NO: 493393 - DNA, 120 bp, Artificial Sequence
  ENSG00000163092_12 (sequence is synthesized)
aacctcactttaaacaacttttcaaatccaaaggaaattatgatgaaggttttggacataagcagcataaagatagatggaactgcaaaaaccaaagcagatcagtggactttattccta

SEQ ID NO: 493394 - DNA, 120 bp, Artificial Sequence
  ENSG00000163092_13 (sequence is synthesized)
agatcgtaatgaacatttagatgctggtaacagtgaagggcaaaggaatgatttgagaaaattaggggaaaggggaaaattaaaagtcatttggcctccttccaaggagatccctaagaa

SEQ ID NO: 493395 - DNA, 120 bp, Artificial Sequence
  ENSG00000163092_14 (sequence is synthesized)
aaccttaccctttgaggaagagctcaaaatgagtaaacctaagtggccacctgaaatgacaaccctgctatcccctgaatttaaaagtgaatctctgctagaagatgttagaactccaga

SEQ ID NO: 493396 - DNA, 120 bp, Artificial Sequence
  ENSG00000163092_15 (sequence is synthesized)
aaataaaggacaaagacaagatcactttccatttttgcagccttatctacagtccacccatgtttgtcagaaagaggatgttataggaatcaaagaaatgaaaatgcctgaaggaagaaa

SEQ ID NO: 493397 - DNA, 120 bp, Artificial Sequence
  ENSG00000163092_16 (sequence is synthesized)
agatgaaaagaaggaaggaaggaagaatgtgcaagataggccgagtgaagctgaagacacaaagagtaacaggaaaagtgctatggatcttaatgacaacaataatgtgattgtgcagag

SEQ ID NO: 493398 - DNA, 120 bp, Artificial Sequence
  ENSG00000163092_17 (sequence is synthesized)
tgctgaaaaggagaaaaatgaaaaaactaaccaaactaatggtgcagaagttttacaggttactaacactgatgatgagatgatgccagaaaatcataaagaaaatttgaataagaataa

SEQ ID NO: 493399 - DNA, 120 bp, Artificial Sequence
  ENSG00000163092_18 (sequence is synthesized)
taataacaattatgtagcagtctcatatctgaataattgcaggcagaagacatctattttagaatttcttgatctattacccttgtcgagtgaagcaaatgacactgcaaatgaatatga

SEQ ID NO: 493400 - DNA, 120 bp, Artificial Sequence
  ENSG00000163092_19 (sequence is synthesized)
aattgagaagttagaaaatacatctagaatctcagagttacttggtatatttgaatctgaaaagacttattcgaggaatgtactagcaatggctctgaagaaacagactgacagagcagc

SEQ ID NO: 493401 - DNA, 120 bp, Artificial Sequence
  ENSG00000163092_20 (sequence is synthesized)
tgctggcagtcctgtgcagcctgctccaaaaccaagcctcagcagaggccttatggtaaaggggggaagttcaatcatctctcctgatacaaatctcttaaacattaaaggaagccattc

SEQ ID NO: 493402 - DNA, 120 bp, Artificial Sequence
  ENSG00000163092_21 (sequence is synthesized)
aaagagcaaaaatttacactttttcttttctaacaccgtgaaaatcactgcattttccaagaaaaatgagaacattttcaattgtgatttaatagattctgtagatcaaattaaaaatat

SEQ ID NO: 493403 - DNA, 120 bp, Artificial Sequence
  ENSG00000163092_22 (sequence is synthesized)
gccatgcttggatttaagggaatttggaaaggatgttaaaccttggcatgttgaaacaacagaagctgcccgcaataatgaaaacacaggttttgatgctctgagccatgaatgtacagc

SEQ ID NO: 493404 - DNA, 120 bp, Artificial Sequence
  ENSG00000163092_23 (sequence is synthesized)
taagcctttgtttcccagagtggaggtgcagtcagaacaactcacggtggaagagcagattaaaagaaacaggtgctacagtgacactgagtaaaatatctatggccactgacagtccac

SEQ ID NO: 493405 - DNA, 120 bp, Artificial Sequence
  ENSG00000163092_24 (sequence is synthesized)
acttaggcactgagagatattgatgttctgaaataagattttatgaatttggatacccttttgaggaacttgatgtaaacatggtgttcagaaatctcgtgtctatctcaatgggatatt

SEQ ID NO: 493406 - DNA, 120 bp, Artificial Sequence
  ENSG00000163092_25 (sequence is synthesized)
tcttgtattacaccttgtcatttttttcacaatttatttacatctacttttgtttgaactggaatgaagagatgaaacactatggatatgttttccattcaaatggcactttagcatatt

SEQ ID NO: 493407 - DNA, 120 bp, Artificial Sequence
  ENSG00000163092_26 (sequence is synthesized)
gttctgttttcctgtaaaacatcatgggtgtgatttttatactgctgctgcttgtcacaattattataacttctctgtaatttcctctgaaataaaattgaatcacctgaggtgcaaacc

SEQ ID NO: 493408 - DNA, 120 bp, Artificial Sequence
  ENSG00000163092_27 (sequence is synthesized)
atacagagctcagttcctaaaaataggtgccaagttgcatcctttagacgctctgctaaaataaattcagccgtcccatctacttgcttgatagacccttcagtggagcgggcctccact

SEQ ID NO: 493409 - DNA, 120 bp, Artificial Sequence
  ENSG00000163092_28 (sequence is synthesized)
gcacccattgctttcaggggactgggaaattggctgtacatgaaacaagggaggaagctagtctgtgaagaactataaagatatatgatatttccacaaacttggggttaaacctaaata

SEQ ID NO: 493410 - DNA, 120 bp, Artificial Sequence
  ENSG00000163092_29 (sequence is synthesized)
catcttttgacaagatgtcacctgaaagtggtcacagccgcatctttgaagcagtgttctccacggaccaagcccagattctcaggctccacctgcatccaaaattgacaaagaccccca

SEQ ID NO: 493411 - DNA, 120 bp, Artificial Sequence
  ENSG00000163092_30 (sequence is synthesized)
gcgtttcaaccagccagaggaaggaaacatcaactacaagatatagtgatcacagtgtcacttcctcaactctggcacaaattaatgctacttcttcaggaatgacagaagaatttcctc

SEQ ID NO: 493412 - DNA, 120 bp, Artificial Sequence
  ENSG00000163092_31 (sequence is synthesized)
ctcccccacctgacgtacttcaaacttcagtagatgtgacagcattttcccagtcccctgaactgcccagtcctcctagaagactaccagtccccaaagatgtatattccaagcaaagaa

SEQ ID NO: 493413 - DNA, 120 bp, Artificial Sequence
  ENSG00000163092_32 (sequence is synthesized)
atttgtatgaattaaaccgtttatataaacacatccatcctgagttaagaaaaaacttagaaaaagattatatcagtgaagtttctgagattgtttctagtcaaatgaactcagggagtt

SEQ ID NO: 493414 - DNA, 120 bp, Artificial Sequence
  ENSG00000163092_33 (sequence is synthesized)
cagtctcagcagatgtgcaacaagcccggtatgtttttgaaaacacaaatgacagttctcaaaaagatctgaactcagaaagagaatacttggaatgggatgaaattctgaagggagagg

SEQ ID NO: 493415 - DNA, 120 bp, Artificial Sequence
  ENSG00000163092_34 (sequence is synthesized)
tgcagtccattagatggatctttgagaatcaaccattggattccatcaacaatggctctcctgatgaaggtgatatttccaggggcattgctgatcaagaaatcattgctggtggtgatg

SEQ ID NO: 493416 - DNA, 120 bp, Artificial Sequence
  ENSG00000163092_35 (sequence is synthesized)
tgaaatataccacatggatgtttgaaacccaacccatcgacacacttggggcttattcttctgacactgtagaaaatgcagagaaaattcctgagctagccagaggagatgtctgcacag

SEQ ID NO: 493417 - DNA, 120 bp, Artificial Sequence
  ENSG00000163092_36 (sequence is synthesized)
ctcggtggatgtttgaaacaaggccattggactcaatgaataaaatgcatcaaagtcaagaagaatcagcggtaactatcagtaaggacataactgggggggatgtcaagactgtgagat

SEQ ID NO: 493418 - DNA, 120 bp, Artificial Sequence
  ENSG00000163092_37 (sequence is synthesized)
acatgtttgaaactcaacatctagatcaacttggacagcttcattcagtggatgaggttcatttactgcagcttaggtctgagctcaaagaaattaagggaaatgttaaaagaagtataa

SEQ ID NO: 493419 - DNA, 120 bp, Artificial Sequence
  ENSG00000163092_38 (sequence is synthesized)
aatgtttcgaaactcaaccattatatgttattagagatggttcgggccaaatgctggaaattaaaactgttcacagagaagacgttgaaaagggagatgtaagaacagcacggtggatgt

SEQ ID NO: 493420 - DNA, 120 bp, Artificial Sequence
  ENSG00000163092_39 (sequence is synthesized)
ttgaaacacagccgttggacacaattaacaaagatatcacagaaattaaagttgtccgaggaatatccatggaagaaaatgtcaaaggtggggtgagtaaggcaaagtggttatttgaaa

SEQ ID NO: 493421 - DNA, 120 bp, Artificial Sequence
  ENSG00000163092_40 (sequence is synthesized)
cccaacctttggagaaaatcaaagagtcagaagaggtcatcattgaaaaggaaaaaataataggtacagatgtctccagaaagtgttggatgtttgaaacccagccattagacattctaa

SEQ ID NO: 493422 - DNA, 120 bp, Artificial Sequence
  ENSG00000163092_41 (sequence is synthesized)
aagaagttcctgatgcagattctctacaacgtgaggagataataggtggtgatgtacaaactactaagcatctatttgaaacacttccaattgaagcattaaaagacagtcctgatatag

SEQ ID NO: 493423 - DNA, 120 bp, Artificial Sequence
  ENSG00000163092_42 (sequence is synthesized)
gaaagcttcaaaaaatcactgcctctgaagaagaaaaaggggatgttaggcatcaaaaatggatttttgaaacccaacctctggaagacattagaaaagataaaaaggagtacacacgaa

SEQ ID NO: 493424 - DNA, 120 bp, Artificial Sequence
  ENSG00000163092_43 (sequence is synthesized)
cagtgaaacttgaagaagttgacagaggagatgtgaagaattacacacatatctttgaatcaaacaatttaattaaatttgatgcatcacataaaatagaggtggaaggagttacaagag

SEQ ID NO: 493425 - DNA, 120 bp, Artificial Sequence
  ENSG00000163092_44 (sequence is synthesized)
gtgctgtagagttaaataaatctctcttcgagacaacaccactgtatgccattcaagatccccttggaaaatatcatcaagtaaagacagtccagcaagaagaaatcgtaagaggtgatg

SEQ ID NO: 493426 - DNA, 120 bp, Artificial Sequence
  ENSG00000163092_45 (sequence is synthesized)
taagaagctgtaggtggctttttgaaacaaggcccattgaccagtttgatgaaagcattcataaatttcaaataattagaggaatatctgctcaagaaatacagactggaaatgtgaaat

SEQ ID NO: 493427 - DNA, 120 bp, Artificial Sequence
  ENSG00000163092_46 (sequence is synthesized)
ctgccaaatggttgtttgaaacccaacctcttgattcaattaaatattttagtgatgtggaagaaacagaaagtaaaactgaacaaactagagatattgttaaaggggatgtcaaaacct

SEQ ID NO: 493428 - DNA, 120 bp, Artificial Sequence
  ENSG00000163092_47 (sequence is synthesized)
gtaaatggctttttgagacccagccaatggagtctctttatgaaaaagtttcgttaatgaccagcagtgaagaaattcataagggagatgtcaaaacttgtacttggctctttgaaactc

SEQ ID NO: 493429 - DNA, 120 bp, Artificial Sequence
  ENSG00000163092_48 (sequence is synthesized)
agccacttgataccataaaagatgactctgaaacagcagtcaaattgcaaactgtaaaacaggaggagatccaaggtggggatgttcgtacagcatgttttctttttgagacagaaaatt

SEQ ID NO: 493430 - DNA, 120 bp, Artificial Sequence
  ENSG00000163092_49 (sequence is synthesized)
tggacagcatacaaggagaagaagtgaaggaaatcaagcctgttgaaatggatatacaagctggagatgtttccagcatgaggtataaatttgaaaatcagtccttagattctataagtt

SEQ ID NO: 493431 - DNA, 120 bp, Artificial Sequence
  ENSG00000163092_50 (sequence is synthesized)
ctagttcagaggaagttttgaaaaagatcaaaaccttaaaaactgaagatattcagaaaggcaatgttttaaattgtaggtggctttttgaaaaccaaccaattgataagataaaagaaa

SEQ ID NO: 493432 - DNA, 120 bp, Artificial Sequence
  ENSG00000163092_51 (sequence is synthesized)
gccaagaaggtgatgaatgtgttaagacggtgacagacatacaaggtggggatgtaagaaaggggtgctttatttttgagactttttctttagatgagattaaagaagaatctgactata

SEQ ID NO: 493433 - DNA, 120 bp, Artificial Sequence
  ENSG00000163092_52 (sequence is synthesized)
tcagcaccaagaaaacaattactgaagaagtaatacagggtgatgtaaaaagctacagaatgctctttgaaacccagccactctatgcaattcaagaccgagaagggtcctatcatgaag

SEQ ID NO: 493434 - DNA, 120 bp, Artificial Sequence
  ENSG00000163092_53 (sequence is synthesized)
tgaccacagttaaaaaagaagaggtaattcatggagatgtgcgaggaacaaggtggctttttgaaacaaagccattagactctattaataaatcagaaactgtgtatgttattaaatctg

SEQ ID NO: 493435 - DNA, 120 bp, Artificial Sequence
  ENSG00000163092_54 (sequence is synthesized)
tcacacaagaagacattcagaagggagatgttagttctgtcagatacagatttgaaactcagccactggatcagatttctgaagaatcacataatattatgcccagtattgaccatatac

SEQ ID NO: 493436 - DNA, 120 bp, Artificial Sequence
  ENSG00000163092_55 (sequence is synthesized)
aaggtggcaatgtaaagacaagtagacaattctttgagtctgaaaattttgataagaataactatatacgaacagtaagtgtcaatgaaatacaaaagggcaatgttaaaacatctactt

SEQ ID NO: 493437 - DNA, 120 bp, Artificial Sequence
  ENSG00000163092_56 (sequence is synthesized)
ggctatttgaaacccacactatggatgaactgagaggagaagggttagaatatgaaaatatcaagacagtcactcaggaagatgtgcagaaaggtgatgttaagcaggctgtgtggcttt

SEQ ID NO: 493438 - DNA, 120 bp, Artificial Sequence
  ENSG00000163092_57 (sequence is synthesized)
ttgaaaatcgaactttcgattctattatggaagcacataaaggtatcacaaaaatgaccaaggaagaaatccctccttctgatgtcaaaacaaccacatggctctttgaaacaacaccac

SEQ ID NO: 493439 - DNA, 120 bp, Artificial Sequence
  ENSG00000163092_58 (sequence is synthesized)
ttcatgaatttaatgaaactagagtagaaaagatagaaattattggcaagagcattaaagaaaccttagaagatctctactctcaaaaagttatccaggctcctggaatcatcattgaag

SEQ ID NO: 493440 - DNA, 120 bp, Artificial Sequence
  ENSG00000163092_59 (sequence is synthesized)
ctgatgaaataggggatgttcgaatggcaaaatacaagctaatgaaccaagcatctcctgagatacagaaagaagaaattatcagggctgatctcagaaatataatggtgaacctacttt

SEQ ID NO: 493441 - DNA, 120 bp, Artificial Sequence
  ENSG00000163092_60 (sequence is synthesized)
ccaaaagggactgtactgaaagagagattttgattagtgaagaagagaagggaaatgttaatttgactaaaactcaattattaaacagatcaactgaatttcatgctgaaaaagaagaga

SEQ ID NO: 493442 - DNA, 120 bp, Artificial Sequence
  ENSG00000163092_61 (sequence is synthesized)
tagtgaaaggtgatgtacaacaagcaataaaaaacctgttctctgaggaaagatctgtaaagaaaggcatcttaattcaggaagatgaaaaaggagatattaacatgactatctattgtc

SEQ ID NO: 493443 - DNA, 120 bp, Artificial Sequence
  ENSG00000163092_62 (sequence is synthesized)
ttcttcatgaaaatgatggtgacacaattgagcgtgaagaagtaataggtggtgatgtcaaacgtaccattcataatttattgtcttccacatcaaacaataaaatatctgaaagggcta

SEQ ID NO: 493444 - DNA, 120 bp, Artificial Sequence
  ENSG00000163092_63 (sequence is synthesized)
aaattgatgcctctgagagaggaaatgttcagtttttcacaacctgcatagaagctggagctttggattatctgaaacaactccacacagagtcaaatgaaacactgacagctaagaaac

SEQ ID NO: 493445 - DNA, 120 bp, Artificial Sequence
  ENSG00000163092_64 (sequence is synthesized)
aagaaggagagaaagaaatcattggtggtgatgttgaaggtacaaaactgttactgaagaaaaggcagtctctggttgaacgtactgttagtgaaactgacatcatccctggagatgtgc

SEQ ID NO: 493446 - DNA, 120 bp, Artificial Sequence
  ENSG00000163092_65 (sequence is synthesized)
ataacacagttaaggtttttatgaccgagcctcagagtacatttggtaagatacccaaagaagagattataaaaggtgatttgacatcaaccctaaattccctcagccaggctgtaaatc

SEQ ID NO: 493447 - DNA, 120 bp, Artificial Sequence
  ENSG00000163092_66 (sequence is synthesized)
agaaaacagtgacgaaaacagaagaaattataaaaggtaacatgctagccacactcaagtcacttaaagaatcaagccatcgatggaaagaatctaaacagcctgatgccatccctggtg

SEQ ID NO: 493448 - DNA, 120 bp, Artificial Sequence
  ENSG00000163092_67 (sequence is synthesized)
atattgaaaaagctattgaatgccttgaaaaagctacaaatacaaagacagaaattctgaaaaaggagcttctcaaagatgacctggaaacatcactaaggtctttgaaagaagcacaaa

SEQ ID NO: 493449 - DNA, 120 bp, Artificial Sequence
  ENSG00000163092_68 (sequence is synthesized)
gaagtttcaaagaggtacataaagaaggtgtaataaaaaaagatgctaaagctgtgatggcaggatcctcgggagagcagaaaacagatattcatcaggttgctgtccagaggaacaaaa

SEQ ID NO: 493450 - DNA, 120 bp, Artificial Sequence
  ENSG00000163092_69 (sequence is synthesized)
atagtcttcttcagccaaagccaggtccatttgagccagcggccaagtggcaagggggagcagatactctcagtcaaactatggggaaatcttgccatggcaatttagtagaagaaagaa

SEQ ID NO: 493451 - DNA, 120 bp, Artificial Sequence
  ENSG00000163092_70 (sequence is synthesized)
ctgaggttaatcttccaaaagcccccaaaggcactgtaaagattgtcatagatcgtgaacaaaacaatgatgctctggagaaaagccttagaagactatctaattcacaccataaatcta

SEQ ID NO: 493452 - DNA, 120 bp, Artificial Sequence
  ENSG00000163092_71 (sequence is synthesized)
atgttttggaatcaggagacaaaacgggtgtctggactgatactacaggagaacagcatcttagagatgaatatatgagcagacaattaacttcaactgtgtcagttaagaataatctaa

SEQ ID NO: 493453 - DNA, 120 bp, Artificial Sequence
  ENSG00000163092_72 (sequence is synthesized)
caactaaagaatcagacagggcagtgagagagctgaagaaggatgatgtctttaattccatccaatctgctggtaaaaccgttggaaagcaacagacatatgaactgagaaatgaccacc

SEQ ID NO: 493454 - DNA, 120 bp, Artificial Sequence
  ENSG00000163092_73 (sequence is synthesized)
gatacacaaagctccaagcccagtcccacccagcatccagtcagcatgccagttggaggaacttacgacctttcaggggactttcagaagcaaactttgttaaagcaagaaacaaaatat

SEQ ID NO: 493455 - DNA, 120 bp, Artificial Sequence
  ENSG00000163092_74 (sequence is synthesized)
tctaataaggatataaagaaaaagaatataaaccttcaaccaatgtggcagcttttgcctgtagagcaagacacatccaatgtaacagaaatgaaagtctctgaaaaaagtcacaataca

SEQ ID NO: 493456 - DNA, 120 bp, Artificial Sequence
  ENSG00000163092_75 (sequence is synthesized)
tttaaggcaaccaacaaaaagcgggagactgatgttcacttgaaaagccaggactttctaatgaaaacaaatacttccacaggcttaaaaatggcaatggaaaggtccttgaatccaatc

SEQ ID NO: 493457 - DNA, 120 bp, Artificial Sequence
  ENSG00000163092_76 (sequence is synthesized)
aactttaaccctgagaataatgtaaaagaaagtgagtgcccccttccacctccatctccacctcctccaccaccttctaatgcatcatctgaaattgaatttcctcttcctcctccacct

SEQ ID NO: 493458 - DNA, 120 bp, Artificial Sequence
  ENSG00000163092_77 (sequence is synthesized)
cctttgatgatgtttcctgaaaaaaatgggtttcttccctcactgtccacagagaagataaaggctgaatttgaaagttttccaggcctccctcttcctccacctccagtagatgagaaa

SEQ ID NO: 493459 - DNA, 120 bp, Artificial Sequence
  ENSG00000163092_78 (sequence is synthesized)
tctgaaagagaaagttcatcgatgtttctgccgcctcctcctcctccaactccatctcaaaagccagcacatctcctttcctcctctgctccggaaaagcacagtggagacttcatgcaa

SEQ ID NO: 493460 - DNA, 120 bp, Artificial Sequence
  ENSG00000163092_79 (sequence is synthesized)
caatattcccaaaaagaagcctcgaactctcagaattctcaggctaaaatcataacaggaaaaaccggtgtgttgccacctcccacattgcccaaacccaaacttcccaagcatataaaa

SEQ ID NO: 493461 - DNA, 120 bp, Artificial Sequence
  ENSG00000163092_80 (sequence is synthesized)
gataataagaacgatttttcccccaaagttgaactggcaacctccctgtcagatatggaatgtaaaattactacctcaaaggatcagaaaaaagtaatggtgatgaccagcagtgaacac

SEQ ID NO: 493462 - DNA, 120 bp, Artificial Sequence
  ENSG00000163092_81 (sequence is synthesized)
acggagacaaagcagaacgttattagtaagagtcttgatgaaagaaaacaattatctattgactctgcaaactgtctctcacacacagttccaggaacttcagcacccaggaaaaaacag

SEQ ID NO: 493463 - DNA, 120 bp, Artificial Sequence
  ENSG00000163092_82 (sequence is synthesized)
attgcgcctcttataaaatctcattcatttccagagagttcaggacaacaaaatccaaaaccttatatgagaaaatttaagacacctttaatgattgctgaagaaaaatatagacaacaa

SEQ ID NO: 493464 - DNA, 120 bp, Artificial Sequence
  ENSG00000163092_83 (sequence is synthesized)
aaagaagaaattgaaaaacagaaacaggagagttcttactacaacattgttaaaactcaaagccaaaatcaacacataacagaggtggaaaaggaaatgccattacaaaaaaccaatgag

SEQ ID NO: 493465 - DNA, 120 bp, Artificial Sequence
  ENSG00000163092_84 (sequence is synthesized)
gaggtttccctatctggaattgattcagaatgcactgtggttcaacccagcccaggctctcaaagtaatgctcggatactaggagtgtgttctgataaccaactctccacaacatcgcca

SEQ ID NO: 493466 - DNA, 120 bp, Artificial Sequence
  ENSG00000163092_85 (sequence is synthesized)
gaaacagtcgctgccaagaggctccaccatgttttagcagcttcagaagacaaagataagatgaaaaaggaagttttacaaagctcaagggacattatgcaatccaaatcagcttgcgaa

SEQ ID NO: 493467 - DNA, 120 bp, Artificial Sequence
  ENSG00000163092_86 (sequence is synthesized)
attaaacaaagtcaccaagaatgtagtacccaacaaacacaacagaagaagtatttggagcagttgcacttgccccaaagcaaaccaatttccccaaatttcaaagttaaaaccatcaaa

SEQ ID NO: 493468 - DNA, 120 bp, Artificial Sequence
  ENSG00000163092_87 (sequence is synthesized)
cttccaactctagatcatacattaaatgaaacagaccacagctatgaaagtcataaacagcaatctgagattgatgttcaaacctttaccaaaaaacaatatctgaaaaccaagaaaact

SEQ ID NO: 493469 - DNA, 120 bp, Artificial Sequence
  ENSG00000163092_88 (sequence is synthesized)
gaagcaagcactgaatgtagtcataagcaatctctggctgaaagacattatcagttacctaagaaggagaaaagagtgacagtacaattgcctacagaatccatacagaagaaccaggaa

SEQ ID NO: 493470 - DNA, 120 bp, Artificial Sequence
  ENSG00000163092_89 (sequence is synthesized)
gataagctcaagatggttcccaggaagcaaagagaatttagcggatctgacagagggaaacttccaggaagtgaagaaaaaaatcagggaccatcaatgattggtcgaaaagaagagaga

SEQ ID NO: 493471 - DNA, 120 bp, Artificial Sequence
  ENSG00000163092_90 (sequence is synthesized)
ttaataactgaaagaaaacacgaacatctgaagaataaatcagcaccaaaggtcgtcaagcaaaaggttatcgatgcacatcttgattcacagactcagaattttcagcaaacacaaata

SEQ ID NO: 493472 - DNA, 120 bp, Artificial Sequence
  ENSG00000163092_91 (sequence is synthesized)
cagaccgctgaaagtaaagctgaacataaaaaattgccccagccatataatagtctgcaggaagaaaaatgtctcgaagtcaagggcatacaagagaaacaagtcttctctaatactaaa

SEQ ID NO: 493473 - DNA, 120 bp, Artificial Sequence
  ENSG00000163092_92 (sequence is synthesized)
gattcaaagcaagagattacacagaacaaatctttcttttcctctgtgaaagaatcccagcgggatgatggaaaaggtgccttaaatatagtggaattcttgagaaaacgtgaagaactg

SEQ ID NO: 493474 - DNA, 120 bp, Artificial Sequence
  ENSG00000163092_93 (sequence is synthesized)
caacagattttgtcgagagtgaaacagtttgaagcagagccaaataaaagtggccttaaaacatttcagacactattaaatactatcccaggatggctgataagtgaagataagagagaa

SEQ ID NO: 493475 - DNA, 120 bp, Artificial Sequence
  ENSG00000163092_94 (sequence is synthesized)
tatgcagttcacattgccatggagaataatttagaaaaagtaaaagaagaaataacacatattaaaactcaagcggaagatatgcttgtgtcctatgaaaatataattcagacagccatg

SEQ ID NO: 493476 - DNA, 120 bp, Artificial Sequence
  ENSG00000163092_95 (sequence is synthesized)
atgtcctccaaaacaggaaaaccgggaaataaacccactagtcttgatgaaacatcatccaaagtatctaatgttcatgtcagcaataataaaaatagtgaacagaaagaaaataaaatt

SEQ ID NO: 493477 - DNA, 120 bp, Artificial Sequence
  ENSG00000163092_96 (sequence is synthesized)
gccaaagagaaaacagtacagcaccaagtagcagctcatcatgaagcaactgttcgtagtcacgtgaaaacccatcaggaaattaaacttgatgatagcaacattcctcctccctcttta

SEQ ID NO: 493478 - DNA, 120 bp, Artificial Sequence
  ENSG00000163092_97 (sequence is synthesized)
aaaacacgcccaccgtcaccaacttttatcacaatagaatctactgcccgacgaacagaaaaccctactaagaacgagctttctcagtcccctaaaaaggacagttatgttgaaccccca

SEQ ID NO: 493479 - DNA, 120 bp, Artificial Sequence
  ENSG00000163092_98 (sequence is synthesized)
ccaagaaggcccatgtcgcaaaaatctgaaattcacagagcaaacacttccccttctccacccaggagtcgctctgaacaacttgtcagactcaaagacaccactgcaaagttatccaaa

SEQ ID NO: 493480 - DNA, 120 bp, Artificial Sequence
  ENSG00000163092_99 (sequence is synthesized)
ggggccatcccatgtccagcagcaaccccggttccaattgtagagaagaggtctgaaatcatcatgtctcctgcaacacttcgtcgtcaaattaagatagaaactcgtggtagggactct

SEQ ID NO: 493481 - DNA, 120 bp, Artificial Sequence
  ENSG00000163092_100 (sequence is synthesized)
ccacctacaatcacaataccagtaaatataaatcatgctgctagtggttccttcagagaatctgtggacgctcaagaggaaatcaggaaagtggagaagagagctacttatgttcataaa

SEQ ID NO: 493482 - DNA, 120 bp, Artificial Sequence
  ENSG00000163092_101 (sequence is synthesized)
gatggactaaattccactgatcacatggtgcccgacactgaaagttatgatgcagttgaaatcatccgcaaggttgcagtgcctcctcgcctgtcagagcacacacagagatatgaagcg

SEQ ID NO: 493483 - DNA, 120 bp, Artificial Sequence
  ENSG00000163092_102 (sequence is synthesized)
gccaaccgaactgttcaaatggctgaaaatttcgtgaatgaccctgaaaatgaaataaacagatggttcagggaatttgagcatggcccagtttctgaagcaaagtcaaatagaagagtt

SEQ ID NO: 493484 - DNA, 120 bp, Artificial Sequence
  ENSG00000163092_103 (sequence is synthesized)
tatgcaaagggagaaacaaaccataacatacaacaagaaagtcgtacattttgtaaggaggaatttggattaacatctttaggaaacacgagttttacagacttttcttgcaaacatcct

SEQ ID NO: 493485 - DNA, 120 bp, Artificial Sequence
  ENSG00000163092_104 (sequence is synthesized)
agagaactgcgagaaaagattcctgttaagcagcccaggatctgctctgaaaccaggtctctaagtgaacatttctcaggcatggatgcatttgagagtcaaattgttgagtcgaagatg

SEQ ID NO: 493486 - DNA, 120 bp, Artificial Sequence
  ENSG00000163092_105 (sequence is synthesized)
aaaacctcttcatcacatagctcagaagctggcaaatctggctgtgacttcaagcatgccccaccaacctatgaggatgtcattgctggacatattttagatatctctgattcacctaaa

SEQ ID NO: 493487 - DNA, 120 bp, Artificial Sequence
  ENSG00000163092_106 (sequence is synthesized)
gaagtaagaaaaaattttcaaaagacgtggcaagagagtggaagagtttttaaaggcctgggatatgcaaccgcagatgcttctgcaactgagatgagaaccaccttccaagaggaatct

SEQ ID NO: 493488 - DNA, 120 bp, Artificial Sequence
  ENSG00000163092_107 (sequence is synthesized)
tttataagtggtaaatgagcttgcaatgtgttaaagaagattaaccatttaaaggcatgtgttccatagccaaaatgatgtacagttaaaaagagtgcgtggaaacaaccaaacaatata

SEQ ID NO: 493489 - DNA, 120 bp, Artificial Sequence
  ENSG00000163092_108 (sequence is synthesized)
agagctggctatgagagatttggtgtcttgtagctgctatctggcgacgtatgtccatcatgcttgatgttcattagttagatgagatcagtaagttaaagaactgttaaatttgtgttt

SEQ ID NO: 493490 - DNA, 120 bp, Artificial Sequence
  ENSG00000163093_0 (sequence is synthesized)
agagagacgcagctaggcctgcacggctgtggagagatcctgccacgggccttgttcaccatgtcggtgctggatgcgctttgggaggatcgggatgtccgtttcgacctgtccgcgcag

SEQ ID NO: 493491 - DNA, 120 bp, Artificial Sequence
  ENSG00000163093_1 (sequence is synthesized)
caaatgaaaacaagacctggagaagtccttattgattgtttagattccattgaagacaccaaaggaaataatggagatagaggtagactcttggtaacaaatttaagaattctctggcac

SEQ ID NO: 493492 - DNA, 120 bp, Artificial Sequence
  ENSG00000163093_2 (sequence is synthesized)
tctttggcattatcaagagtcaatgtttctgtcggttacaattgcatattgaatattacaacaaggactgctaactctaaattacgaggccaaactgaagctctctatatactaacaaaa

SEQ ID NO: 493493 - DNA, 120 bp, Artificial Sequence
  ENSG00000163093_3 (sequence is synthesized)
tgtaacagtactcgttttgaatttatatttacaaatttggttcctggaagccctagactttttacttctgtgatggcagtacacagagcttatgaaacttctaaaatgtatcgtgatttt

SEQ ID NO: 493494 - DNA, 120 bp, Artificial Sequence
  ENSG00000163093_4 (sequence is synthesized)
aaattaagaagtgcactaattcagaacaagcaactaagactgttgccacaagaacatgtatatgataaaataaatggagtttggaatttatccagtgatcagggcaatttaggaaccttt

SEQ ID NO: 493495 - DNA, 120 bp, Artificial Sequence
  ENSG00000163093_5 (sequence is synthesized)
tttattaccaatgtgagaattgtgtggcatgcaaatatgaatgatagttttaatgtcagtataccatatctgcaaattcgttcaataaagattagagattcaaaatttggtttagctctt

SEQ ID NO: 493496 - DNA, 120 bp, Artificial Sequence
  ENSG00000163093_6 (sequence is synthesized)
gtcatagaaagctctcagcagagtggtggatatgttcttggctttaaaatagatcctgtggaaaaactacaagaatcagttaaggaaatcaattcacttcacaaagtctattctgccagt

SEQ ID NO: 493497 - DNA, 120 bp, Artificial Sequence
  ENSG00000163093_7 (sequence is synthesized)
cccatatttggagttgattatgagatggaagaaaagccccagccgctcgaagctctgacagtcgaacaaattcaagatgatgtagaaatagactctgatggtcacacggatgcttttgtg

SEQ ID NO: 493498 - DNA, 120 bp, Artificial Sequence
  ENSG00000163093_8 (sequence is synthesized)
gcttattttgctgatggcaataagcaacaagatcgtgaacctgtattttcagaagaactggggcttgcaatagagaaattgaaggatggattcaccctacagggactttgggaagtaatg

SEQ ID NO: 493499 - DNA, 120 bp, Artificial Sequence
  ENSG00000163093_9 (sequence is synthesized)
agttgattgaccttgagttgagatggatttctattaaagatatctctagtttaaagatactagtcacctgccataagtcatggaatagtttttatatttacagcttttatatttaaaact

SEQ ID NO: 493500 - DNA, 120 bp, Artificial Sequence
  ENSG00000163093_10 (sequence is synthesized)
tgtaagagtttttttaatgattgaggaaaaagtcatttagaaaacttcagttttcggccagcgcgtcgagggaggggccagcgacacatggcctagtaaccgtccggccgcggcgctggc

SEQ ID NO: 493501 - DNA, 120 bp, Artificial Sequence
  ENSG00000163093_11 (sequence is synthesized)
ttaagccatggctgagggtagctggattcctcaggcccgggcgctcctacagcagtgcctgcacgcccggctgcaaattcgcccagccaatggggacgttgcggcccagtgggtggaggt

SEQ ID NO: 493502 - DNA, 120 bp, Artificial Sequence
  ENSG00000163093_12 (sequence is synthesized)
cgttgcggcccagtgggtggaggtccaaagaggactggtgatctacgtgtgctttttcaagggagctgataaagaacttcttcccaaaatggccgaagctggactgtactgctgccatct

SEQ ID NO: 493503 - DNA, 72 bp, Artificial Sequence
  ENSG00000163093_13 (sequence is synthesized)
atctaggaagtgaggagcgcctcttcccacccgccatcccatctaggaagtgaggagctggccgcgacccca

SEQ ID NO: 493504 - DNA, 72 bp, Artificial Sequence
  ENSG00000163093_14 (sequence is synthesized)
aggaagtgaggagctggccgcgaccccatttgggaggtgaggagcaactctgcccagccgccccgtctgaga

SEQ ID NO: 493505 - DNA, 69 bp, Artificial Sequence
  ENSG00000163093_15 (sequence is synthesized)
gatgatgacagtggcggctttgtggagtggaggtggggggaaggtggggaaaagattgagaaatcggat

SEQ ID NO: 493506 - DNA, 120 bp, Artificial Sequence
  ENSG00000163093_16 (sequence is synthesized)
taatcaaaatgtacctagtttataaatgtttattttgtacttaatacctgtaaagtcttagttttcagacattaagtgactgtatcatgttcggtttaataaagaatttatgcagcacca

SEQ ID NO: 493507 - DNA, 120 bp, Artificial Sequence
  ENSG00000163093_17 (sequence is synthesized)
ggcccatttcctttcttcttttcgtgtagtctgttccttttcaaggcctagttcaagaaaaacttagttcccttggccttcacagtctacagtgtattttttaaatcttgaaaggttacc

SEQ ID NO: 493508 - DNA, 120 bp, Artificial Sequence
  ENSG00000163093_18 (sequence is synthesized)
tttgatatttcagatgaacttatatttgaatacacttcaaaataagcctgcgttgggggaatggtgttcaggtgagggcgaggttacagatgaaacagggttgtccacatgttgctgctt

SEQ ID NO: 493509 - DNA, 120 bp, Artificial Sequence
  ENSG00000163093_19 (sequence is synthesized)
cttgaagctggatgatggctccgtggaggcccccttgtgctcttctgtttttgtatgtgcttgaaatttttcataataaaaagtttaattgaaaaaatgaacttacgtattatgctctaa

SEQ ID NO: 493510 - DNA, 69 bp, Artificial Sequence
  ENSG00000163093_20 (sequence is synthesized)
agcccctctgcccagtccgggagggaggtgggggggtcagtcccccgtccggccagccgccccgtccgg

SEQ ID NO: 493511 - DNA, 120 bp, Artificial Sequence
  ENSG00000163093_21 (sequence is synthesized)
tgtaccatatcatgctctttacattctttgcttttggattttagctgtcggttacaattgcatattgaatattacaacaaggactgctaactctgtaagtctaaaaaatcttattgcaat

SEQ ID NO: 493512 - DNA, 120 bp, Artificial Sequence
  ENSG00000163093_22 (sequence is synthesized)
atatatatagtaaagaaactagatatttgagattgatgtttgttttcactataaaggagaaattgctcttaaaatctgaacttttaaataaatttgtccttacagaaattacgaggccaa

SEQ ID NO: 493513 - DNA, 120 bp, Artificial Sequence
  ENSG00000163093_23 (sequence is synthesized)
tttctcagatttaaacagaagacaggataggtattaaacatgtagtttggtccttcagtaagtcctggttctaacatcacctttatccattgtagctgttaaaactcaagtagacctgtt

SEQ ID NO: 493514 - DNA, 120 bp, Artificial Sequence
  ENSG00000163093_24 (sequence is synthesized)
tgcaaggggcattagttctgaccgttagatctgtcttcccaaaaaaggatatggggtagtggaatataagtaggtcatagctgtagtacctggagccatgcttccttttcaaaaattcag

SEQ ID NO: 493515 - DNA, 120 bp, Artificial Sequence
  ENSG00000163104_0 (sequence is synthesized)
gggaacgtgcctgcgcgtgcttggatagttcatttaaagcccccatccctgcaaggtggtgctttctaccaatatgaatcttttcaacctggaccgttttcgctttgagaaaaggaataa

SEQ ID NO: 493516 - DNA, 120 bp, Artificial Sequence
  ENSG00000163104_1 (sequence is synthesized)
gattgaggaagcgcccgaagcaacccctcaaccttcccagcctggcccttcttcaccaatttctcttagtgctgaagaggagaatgctgaaggggaagttagcagggcaaacactcctga

SEQ ID NO: 493517 - DNA, 120 bp, Artificial Sequence
  ENSG00000163104_2 (sequence is synthesized)
ttcagatataactgaaaaaacagaagattctagtgttccagaaactccagataatgaaagaaaagcaagtatatcatatttcaaaaatcaaagaggaatacagtatattgatttgtcttc

SEQ ID NO: 493518 - DNA, 120 bp, Artificial Sequence
  ENSG00000163104_3 (sequence is synthesized)
tgatagtgaagatgtcgtttccccaaattgctccaatacagttcaagagaaaacattcaacaaagatacagtgattatagtttctgagccatctgaagatgaagagtcccaaggccttcc

SEQ ID NO: 493519 - DNA, 120 bp, Artificial Sequence
  ENSG00000163104_4 (sequence is synthesized)
taccatggcacgtagaaatgatgatatttcagaactggaagacctttcggaattggaagaccttaaagatgctaaacttcagactttgaaggaactttttccacaaagaagtgacaatga

SEQ ID NO: 493520 - DNA, 120 bp, Artificial Sequence
  ENSG00000163104_5 (sequence is synthesized)
tttacttaagttgattgaatcaacaagcactatggatggagcaattgctgctgccttgctgatgtttggtgatgcaggtggtgggcccaggaaaagaaaattatcttcttcttcagagcc

SEQ ID NO: 493521 - DNA, 120 bp, Artificial Sequence
  ENSG00000163104_6 (sequence is synthesized)
atatgaggaagatgaatttaatgatgatcaatctataaaaaagacaagactggatcatggagaggaatcaaatgagtctgcagaatctagcagtaattgggaaaagcaggaaagtattgt

SEQ ID NO: 493522 - DNA, 120 bp, Artificial Sequence
  ENSG00000163104_7 (sequence is synthesized)
actgaaattgcaaaaggaatttcccaattttgataaacaggaacttagagaagtactcaaggaacatgaatggatgtacacagaagctttagaatctctaaaagtgtttgcagaagacca

SEQ ID NO: 493523 - DNA, 120 bp, Artificial Sequence
  ENSG00000163104_8 (sequence is synthesized)
agatatgcaatatgtatcacaaagtgaggttccaaatggaaaagaagtttcttcaagaagtcaaaattaccctaaaaatgcaactaaaacaaaactaaaacagaaattttcaatgaaagc

SEQ ID NO: 493524 - DNA, 120 bp, Artificial Sequence
  ENSG00000163104_9 (sequence is synthesized)
acaaaatggctttaacaagaaacgtaaaaaaaatgtttttaatccaaagagagttgttgaagactctgaatatgattcaggttctgatgtcggtagttcactagatgaggactatagtag

SEQ ID NO: 493525 - DNA, 120 bp, Artificial Sequence
  ENSG00000163104_10 (sequence is synthesized)
tggtgaagaagtgatggaggatggctataaaggtaaaattcttcacttccttcaagatgcttcaattggtgaacttactttgattcctcagtgttctcagaaaaaggctcagaagataac

SEQ ID NO: 493526 - DNA, 120 bp, Artificial Sequence
  ENSG00000163104_11 (sequence is synthesized)
agaactccggccctttaatagttgggaggctctgttcacaaagatgtccaaaactaatggcttatcagaagatttgatatggcactgtaaaacactgatccaagaaagagatgtagttat

SEQ ID NO: 493527 - DNA, 120 bp, Artificial Sequence
  ENSG00000163104_12 (sequence is synthesized)
aaggcttatgaacaaatgtgaagacatttcaaataaattgaccaaacaagttaccatgcttactggaaatggaggtggatggaacatagaacaaccttccattctaaaccaaagtttgtc

SEQ ID NO: 493528 - DNA, 120 bp, Artificial Sequence
  ENSG00000163104_13 (sequence is synthesized)
actcaagccctatcagaaggttggtttgaattggctggcattggtacataaacatggacttaatggcattttggcagatgaaatgggcctaggaaaaactattcaagccattgcatttct

SEQ ID NO: 493529 - DNA, 120 bp, Artificial Sequence
  ENSG00000163104_14 (sequence is synthesized)
ggcatacctctatcaggagggtaataatggtcctcatttgatcgttgttccagcttcaactatagataactggttaagggaagttaatttatggtgccctactttgaaggtcctctgtta

SEQ ID NO: 493530 - DNA, 120 bp, Artificial Sequence
  ENSG00000163104_15 (sequence is synthesized)
ctatggttctcaagaagaacgtaaacaaattagatttaacattcatagtagatatgaagattacaatgtaattgtgaccacatataactgtgcgatcagcagttctgatgaccgtagtct

SEQ ID NO: 493531 - DNA, 120 bp, Artificial Sequence
  ENSG00000163104_16 (sequence is synthesized)
gtttcgacggctgaaacttaattacgcaatttttgatgagggccatatgctgaagaatatgggctccattcgctaccagcaccttatgacaattaatgcaaataaccgtttgctgctcac

SEQ ID NO: 493532 - DNA, 120 bp, Artificial Sequence
  ENSG00000163104_17 (sequence is synthesized)
aggcacacctgtacagaacaatctgttagaactcatgtcgctgttgaattttgttatgccacacatgtttagtagtagcaccagtgaaatacgaagaatgttttcctctaagacaaaatc

SEQ ID NO: 493533 - DNA, 120 bp, Artificial Sequence
  ENSG00000163104_18 (sequence is synthesized)
agcagatgagcaaagcatatatgaaaaggagagaatagcacatgcaaaacaaattataaagccatttattctcagaagagtaaaagaagaggttctcaagcagttaccccccaagaaaga

SEQ ID NO: 493534 - DNA, 120 bp, Artificial Sequence
  ENSG00000163104_19 (sequence is synthesized)
tcgaattgagttgtgtgcaatgtcggagaagcaggagcaactctatttgggtcttttcaacagattgaaaaaatctatcaataacttggaaaaaaacacagaaatgtgcaatgtcatgat

SEQ ID NO: 493535 - DNA, 120 bp, Artificial Sequence
  ENSG00000163104_20 (sequence is synthesized)
aaccctgacctgatctttgaagatatggaagttatgacagacttcgaactacatgtactttgtaaacagtaccgacacattaataactttcagttagacatggacttgattttagattct

SEQ ID NO: 493536 - DNA, 120 bp, Artificial Sequence
  ENSG00000163104_21 (sequence is synthesized)
ggaaaatttcgagttttaggatgcatcttgtctgaattgaaacagaagggtgatagagttgtgttatttagccaatttaccatgatgctggatatcttagaggttctattaaaacatcat

SEQ ID NO: 493537 - DNA, 120 bp, Artificial Sequence
  ENSG00000163104_22 (sequence is synthesized)
cagcataggtacctcagattagatggaaagactcagatttctgaaaggattcatctaattgatgagtttaataccgatatggatatctttgtgtttctgctatcaacaaaagctggtgga

SEQ ID NO: 493538 - DNA, 120 bp, Artificial Sequence
  ENSG00000163104_23 (sequence is synthesized)
ttaggaataaatctgacttcagcaaatgttgttatacttcacgatattgactgtaatccttataatgacaaacaagcagaagatagatgccatagagtaggccagactaaagaagtacta

SEQ ID NO: 493539 - DNA, 120 bp, Artificial Sequence
  ENSG00000163104_24 (sequence is synthesized)
gttataaaactaataagccaagggacgattgaagaatccatgctaaaaattaaccaacagaaattgaaactagaacaggatatgactacagtagatgaaggtgatgaagggagtatgcca

SEQ ID NO: 493540 - DNA, 120 bp, Artificial Sequence
  ENSG00000163104_25 (sequence is synthesized)
gcagatatagccacattactaaaaacatcaatgggcctgtgaaataagaactgtgaactctcaattgatgaggaaatatcaacttggtgcactcaaggacatttacattatgatgaccat

SEQ ID NO: 493541 - DNA, 120 bp, Artificial Sequence
  ENSG00000163104_26 (sequence is synthesized)
ggggtttatgaacatttataactttttataatttccatattacatttctcatagtatggacaactttttgccactaactgaattctccaaatactcacacgtgaaatttcaaaaaagaag

SEQ ID NO: 493542 - DNA, 120 bp, Artificial Sequence
  ENSG00000163104_27 (sequence is synthesized)
ccacaaatatgtagttctgaagatgttgaataatcattttacaaagcagttttctgaatggggattagttggtgattgtttgtaacaaatatgctaatgctttagaaatgtcagtatttt

SEQ ID NO: 493543 - DNA, 120 bp, Artificial Sequence
  ENSG00000163104_28 (sequence is synthesized)
tgtaattatttctacctccaaatatatatatattgtctttcactggataatgtgtgtagatttttacatgtgccttatttgacaatgcttatgtcttgtttttgcttgtctcatttgaag

SEQ ID NO: 493544 - DNA, 120 bp, Artificial Sequence
  ENSG00000163104_29 (sequence is synthesized)
ttcttttttattatgttaaagaatgcagctgtatagattatatagctttcattttattgctatttgaagcagatgttcaccaatgtcagcaagaactcaacctgaatttaaaggtggcat

SEQ ID NO: 493545 - DNA, 120 bp, Artificial Sequence
  ENSG00000163104_30 (sequence is synthesized)
tccatatactaacatcccccaggtcctctcaagtacttctgctgaaacaaatttatttggctaggcactaagttgttttccagtgaatagtaactaaagaagcccctaccttgctccatg

SEQ ID NO: 493546 - DNA, 120 bp, Artificial Sequence
  ENSG00000163104_31 (sequence is synthesized)
gattaattccttctgttcattttccaactgcactaattgtgcatattactctgcctaatcttgtgcatgttttcattgatttccctctcccggcttttgcttctcttgaaactgttgccc

SEQ ID NO: 493547 - DNA, 120 bp, Artificial Sequence
  ENSG00000163104_32 (sequence is synthesized)
agtcacttctgctccaattctcttcctctctaaatagtagtttattactgccacatctccatgcatcagcaaaatgttggtgacatttttctagcctggcagaacagattacttaaagct

SEQ ID NO: 493548 - DNA, 120 bp, Artificial Sequence
  ENSG00000163104_33 (sequence is synthesized)
atttcatttcaaagcagactgaatgtgacttcatctaaaggcagcattaggtactgcatggaaataggtcattaacttgaaactcttatcaaaatatattttaccagtttccagaatttc

SEQ ID NO: 493549 - DNA, 120 bp, Artificial Sequence
  ENSG00000163104_34 (sequence is synthesized)
cagtacaggaccgcctgaagagagagccattgttcaattccaattcagtgtgagtgacaaagtgaaatttagaagtgaagttgtctatttgatatttaactctttattaaatctttcttt

SEQ ID NO: 493550 - DNA, 120 bp, Artificial Sequence
  ENSG00000163104_35 (sequence is synthesized)
aaatttctgcctgtcagtctatattgctgtttttattatacatcagtttctttgtataacttgtgagttccatgtgttttgtttttattatgtaaatatcattataaataaacttattta

SEQ ID NO: 493551 - DNA, 120 bp, Artificial Sequence
  ENSG00000163104_36 (sequence is synthesized)
taaatcaaagatttgttaatttttggaaatcatgcttttcaaagcatcctaacttgctaagatgctaggtagtacgaccctctggatttggaaggcaaataaaactcttacagtgattat

SEQ ID NO: 493552 - DNA, 120 bp, Artificial Sequence
  ENSG00000163104_37 (sequence is synthesized)
ttagatattaaagactgagaactcacggcttaaccccagtcttgatggtatattgaacagactgaatatattttaccattacagggctaaaaggagtcttcatgtgttaatactacctcc

SEQ ID NO: 493553 - DNA, 120 bp, Artificial Sequence
  ENSG00000163104_38 (sequence is synthesized)
ttgtacatcactatacccaaatcagttattcaaattgttaggaattttaccttttaaaatctcataatggatatctcatgttttctgtattaatgtattttcaatgataggctgtttctt

SEQ ID NO: 493554 - DNA, 120 bp, Artificial Sequence
  ENSG00000163104_39 (sequence is synthesized)
tttttgttgttattgttgttgttgttatatccatacttttatctctaatgaaatgtagttgggttcttcctgtaatgcgctattatgtcttgggcttaataaaaatatttgtgatcataa

SEQ ID NO: 493555 - DNA, 120 bp, Artificial Sequence
  ENSG00000163104_40 (sequence is synthesized)
aagaaattagagcttacatttaggaaggagttgtttgctagcctgttctgatctgttactgctgagacaccatgcagaaagcaagaatgtggcagaaattttactacaactacttgaaga

SEQ ID NO: 493556 - DNA, 120 bp, Artificial Sequence
  ENSG00000163104_41 (sequence is synthesized)
gcaatagcaacggccaggggagctccatgattcaaaatgccagcctaagtgttttatgcttcaccacaaaagaagcaattgtttattttctttttttcttctaaaagtaacagctcagtc

SEQ ID NO: 493557 - DNA, 120 bp, Artificial Sequence
  ENSG00000163104_42 (sequence is synthesized)
tctaacatgtttttgttggttaagcaacgtggccattttatggagtgtagcaggctgcagcgtttttaattggaaagatagaaaaatttctggaagcctataattcaagcgttaggtgaa

SEQ ID NO: 493558 - DNA, 120 bp, Artificial Sequence
  ENSG00000163104_43 (sequence is synthesized)
attacgcgctcttaaggtttctccgtggtgttttggaaggtcccggcacggctaccgtcgccccacgctaggaaattttttttttattttcaacctttgttacatagcactgaggctaca

SEQ ID NO: 493559 - DNA, 120 bp, Artificial Sequence
  ENSG00000163104_44 (sequence is synthesized)
ctctcagctgggatcgcgccgcgtcaacttccgggcggatgcccgccagcacggcctccgccgctccccttctttggcccctttgtgtccccgcagtgtcgaggcgcgggccctggcagg

SEQ ID NO: 493560 - DNA, 120 bp, Artificial Sequence
  ENSG00000163104_45 (sequence is synthesized)
tatgtcttgggttcattttttttaagtaggtgtacatagcatctaacagttaaaaggtaagattagacctaggcattttagtttttatgtgcattgtaataactaatagaaaactgatag

SEQ ID NO: 493561 - DNA, 120 bp, Artificial Sequence
  ENSG00000163104_46 (sequence is synthesized)
gtgcctgggctgtaaaggtggcagtatgaattttgaagattttgaaatggtttctccagatgggtttcaccaggagaggaatcaaatgagtctgcagaatctagcagtaattgggaaaag

SEQ ID NO: 493562 - DNA, 120 bp, Artificial Sequence
  ENSG00000163104_47 (sequence is synthesized)
gcatgagggtcagctcgtggtttcagtaaggaggggcgggcgggggaggcggacgaaggggagtgaaaagcaatggaaaattttaaaagatacccccgtccaccttctaattgttgcggc

SEQ ID NO: 493563 - DNA, 120 bp, Artificial Sequence
  ENSG00000163104_48 (sequence is synthesized)
agtgaaacatgtagcaactcaaatataaacatgaagaatcaggttctcttagtagttgactataagctcattaagtaaaagtttaaattagcaaacttgttttcctcataaagaaatcag

SEQ ID NO: 493564 - DNA, 120 bp, Artificial Sequence
  ENSG00000163106_0 (sequence is synthesized)
agggatacaagacactgcagactcccgagagacataacacagaattgcaccatgccaaactacaaactcacttattttaatatgagggggagagcagaaattattcgttacatatttgct

SEQ ID NO: 493565 - DNA, 120 bp, Artificial Sequence
  ENSG00000163106_1 (sequence is synthesized)
tatttggacatacagtatgaagaccacagaatagaacaagctgactggcctgaaatcaaatcaactctcccatttggaaaaatccccattttggaagttgatggacttactcttcaccag

SEQ ID NO: 493566 - DNA, 120 bp, Artificial Sequence
  ENSG00000163106_2 (sequence is synthesized)
agcctagcaatagcaagatatttgaccaaaaacacagatttggctggaaacacagaaatggaacaatgtcatgttgatgctattgtggacactctggatgatttcatgtcatgttttcct

SEQ ID NO: 493567 - DNA, 120 bp, Artificial Sequence
  ENSG00000163106_3 (sequence is synthesized)
tgggcagagaaaaagcaagatgtgaaagagcagatgttcaatgagctgctcacgtataatgcgcctcatcttatgcaagacttggacacatatttaggggggagagaatggcttattggt

SEQ ID NO: 493568 - DNA, 120 bp, Artificial Sequence
  ENSG00000163106_4 (sequence is synthesized)
aactctgtaacttgggcagacttctactgggagatttgcagtaccacacttttggtctttaagcctgacctgttagacaaccatccaaggctggtgactttacggaagaaagtccaagcc

SEQ ID NO: 493569 - DNA, 120 bp, Artificial Sequence
  ENSG00000163106_5 (sequence is synthesized)
attcctgccgtcgctaactggataaaacgaaggccccaaaccaaactctagctgatccatgttgccttcaagtttgtttttctcgggggcatctctctcatcagataagacagctacatc

SEQ ID NO: 493570 - DNA, 120 bp, Artificial Sequence
  ENSG00000163106_6 (sequence is synthesized)
ccactaagattttcactttagccatattctgatttttaaaaaggaaaataaaaacaaatctttcttcagtatctttttctttcagaatagcttctcatcatttacaattacagaaaaata

SEQ ID NO: 493571 - DNA, 120 bp, Artificial Sequence
  ENSG00000163106_7 (sequence is synthesized)
gtatgtaatacaggcagaccttgctttgcacaggttctaacatgcacgaattgcagtcataatggtttagcaacaccattcttcccctcccccaaaatgttttggacttcagctaccaca

SEQ ID NO: 493572 - DNA, 120 bp, Artificial Sequence
  ENSG00000163106_8 (sequence is synthesized)
attacctgtaattgcataaaacacaaactttgctagtagctctccagttcacatatcgctgtgtaaataacctatgtacatcatgaccaatgaccagtcacttctatcaaagactgccag

SEQ ID NO: 493573 - DNA, 120 bp, Artificial Sequence
  ENSG00000163106_9 (sequence is synthesized)
aggtcactgcacatctgttattcctgcatagatagcaaagtgtgtagttgtattgctattgcctgcttgtggcccagtgataaatccctttgacattttacaaaaatgaatcaaaagagg

SEQ ID NO: 493574 - DNA, 120 bp, Artificial Sequence
  ENSG00000163106_10 (sequence is synthesized)
gaactccccaacaaagatgaaagtgcagcaaaggaacaaaaactgataatcctggaatgaaattcaaactgaatataaagagttatcgagaaaagagctgactgtgggaatctgacacgg

SEQ ID NO: 493575 - DNA, 120 bp, Artificial Sequence
  ENSG00000163106_11 (sequence is synthesized)
ctcaaaaggctctagatatgcagccagagaaacttgtaaagatgaatttactgacatgaataaagttgttgtgatgagaaaaatgtagataccccagagatcaagagaaggagaagacaa

SEQ ID NO: 493576 - DNA, 120 bp, Artificial Sequence
  ENSG00000163106_12 (sequence is synthesized)
gaagacaagccacagacttggagaaaatacttgtaaaacatgtatctgacaaaagactattattcaaaattatatagaactcataaaactcggctgactctcttttcggactcagcccac

SEQ ID NO: 493577 - DNA, 120 bp, Artificial Sequence
  ENSG00000163106_13 (sequence is synthesized)
aaatcaaggttttcgaagctcatgtagctttaaattgaaaagcagcagttcagactaaataaatgctgtgtgatcaagcaaatttcctattagaggtgaaaacacaaaacttacagaaag

SEQ ID NO: 493578 - DNA, 120 bp, Artificial Sequence
  ENSG00000163106_14 (sequence is synthesized)
agaatataaaggtaaaccagtataaagctttagcagacaatatgagctgaaataaacatgcgacattgtttgtttgtttgtttttctattttgtcactgggatagctgaagtgcacagag

SEQ ID NO: 493579 - DNA, 120 bp, Artificial Sequence
  ENSG00000163106_15 (sequence is synthesized)
tcaaggagaagtcagtagcacagatataagagttttatttgactctgcatatacacaaacattggtgcacctgaagctctggaaatgcacgttagaagaacagaatttgccaggagtgca

SEQ ID NO: 493580 - DNA, 120 bp, Artificial Sequence
  ENSG00000163110_0 (sequence is synthesized)
acttgtcagcccttgtctgaggcggaggcagccccgcgccgcgccggacccgagcatatttcattttctgtcattggactttgagccattagaaccatgagcaactacagtgtgtcactg

SEQ ID NO: 493581 - DNA, 120 bp, Artificial Sequence
  ENSG00000163110_1 (sequence is synthesized)
gttggcccagctccttggggtttccggctgcagggcggtaaggatttcaacatgcctctgacaatctctagtctaaaagatggcggcaaggcagcccaggcaaatgtaagaataggcgat

SEQ ID NO: 493582 - DNA, 120 bp, Artificial Sequence
  ENSG00000163110_2 (sequence is synthesized)
gtggttctcagcattgatggaataaatgcacaaggaatgactcatcttgaagcccagaataagattaagggttgtacaggctctttgaatatgactctgcaaagagcatctgctgcaccc

SEQ ID NO: 493583 - DNA, 120 bp, Artificial Sequence
  ENSG00000163110_3 (sequence is synthesized)
aagcctgagccggttcctgttcaaaagggagaacctaaagaagtagttaaacctgtgcccattacatctcctgctgtgtccaaagtcacttccacaaacaacatggcctacaataaggca

SEQ ID NO: 493584 - DNA, 120 bp, Artificial Sequence
  ENSG00000163110_4 (sequence is synthesized)
ccacggccttttggttctgtgtcttcaccaaaagtcacatccatcccatcaccatcgtctgccttcaccccagcccatgcgaccacctcatcacatgcttccccttcacccgtggctgcc

SEQ ID NO: 493585 - DNA, 120 bp, Artificial Sequence
  ENSG00000163110_5 (sequence is synthesized)
gtcactcctcccctgttcgctgcatctggactgcatgctaatgccaatcttagtgctgaccagtctccatctgcactgagcgctggtaaaactgcagttaatgtcccacggcagcccaca

SEQ ID NO: 493586 - DNA, 120 bp, Artificial Sequence
  ENSG00000163110_6 (sequence is synthesized)
gtcaccagcgtgtgttccgagacttctcaggagctagcagagggacagagaagaggatcccagggtgacagtaaacagcaaaatggcccaccaagaaaacacattgtggagcgctataca

SEQ ID NO: 493587 - DNA, 120 bp, Artificial Sequence
  ENSG00000163110_7 (sequence is synthesized)
gagttttatcatgtacccactcacagtgatgccagcaagaagagactgattgaggatactgaagactggcgtccaaggactggaacaactcagtctcgctctttccgaatccttgcccag

SEQ ID NO: 493588 - DNA, 120 bp, Artificial Sequence
  ENSG00000163110_8 (sequence is synthesized)
atcactgggactgaacatttgaaagaatctgaagccgataatacaaagaaggcaaataactctcaggagccttctccgcagttggcttcctcggtagcttccacacggagcatgcccgag

SEQ ID NO: 493589 - DNA, 120 bp, Artificial Sequence
  ENSG00000163110_9 (sequence is synthesized)
agcctggacagcccaacctctggcagaccaggggttaccagcctcacagctgcagctgccttcaagcctgtaggatccactggcgtcatcaagtcaccaagctggcaacggccaaaccaa

SEQ ID NO: 493590 - DNA, 120 bp, Artificial Sequence
  ENSG00000163110_10 (sequence is synthesized)
ggagtaccttccactggaagaatctcaaacagcgctacttactcaggatcagtggcaccagccaactcagctttgggacaaacccagccaagtgaccaggacactttagtgcaaagagct

SEQ ID NO: 493591 - DNA, 120 bp, Artificial Sequence
  ENSG00000163110_11 (sequence is synthesized)
gagcacattccagcagggaaacgaactccgatgtgcgcccattgtaaccaggtcatcagaggaccattcttagtggcactggggaaatcttggcacccagaagaattcaactgcgctcac

SEQ ID NO: 493592 - DNA, 120 bp, Artificial Sequence
  ENSG00000163110_12 (sequence is synthesized)
tgcaaaaatacaatggcctacattggatttgtagaggagaaaggagccctgtattgtgagctgtgctatgagaaattctttgcccctgaatgtggtcgatgccaaaggaagatccttgga

SEQ ID NO: 493593 - DNA, 120 bp, Artificial Sequence
  ENSG00000163110_13 (sequence is synthesized)
gaagtcatcagtgcgttgaaacaaacttggcatgtttcctgttttgtgtgtgtagcctgtggaaagcccattcggaacaatgtttttcacttggaggatggtgaaccctactgtgagact

SEQ ID NO: 493594 - DNA, 120 bp, Artificial Sequence
  ENSG00000163110_14 (sequence is synthesized)
gattattatgccctctttggtactatatgccatggatgtgaatttcccatagaagctggtgacatgttcctggaagctctgggctacacctggcatgacacttgctttgtatgctcagtg

SEQ ID NO: 493595 - DNA, 120 bp, Artificial Sequence
  ENSG00000163110_15 (sequence is synthesized)
tgttgtgaaagtttggaaggtcagacctttttctccaagaaggacaagcccctgtgtaagaaacatgctcattctgtgaatttttgaaagtcaacagttcaggagaagagaaggaatttg

SEQ ID NO: 493596 - DNA, 120 bp, Artificial Sequence
  ENSG00000163110_16 (sequence is synthesized)
aagagaaaaaggaaaattaaaattactaattaatttttagattcaatatttatatggagttttgaaaaataatagtggccctgaaggaataaattccagctttaaaaaccaagtctgagg

SEQ ID NO: 493597 - DNA, 120 bp, Artificial Sequence
  ENSG00000163110_17 (sequence is synthesized)
aaatatttggcttcataaagtaaagagacggtttggcatttattattactttttcctgtattttatgcccataaaataagctttataaaaaccaatttcctgatggactattaaattcat

SEQ ID NO: 493598 - DNA, 120 bp, Artificial Sequence
  ENSG00000163110_18 (sequence is synthesized)
cttagaataaattagtgaagaatttaattttagaataaataatccaatctgaaataattataccttctttccttgttaggtagttatgagtaaatctgcaaaaggcaatgaaaatgcctt

SEQ ID NO: 493599 - DNA, 120 bp, Artificial Sequence
  ENSG00000163110_19 (sequence is synthesized)
agaattattgtatttaaaaaaaaactaatacttatctttaaaatagtaaataggattttaaacagagaattttatcagtaataggtgtcagtttttaaaaaattgcttgtaggctgagcg

SEQ ID NO: 493600 - DNA, 120 bp, Artificial Sequence
  ENSG00000163110_20 (sequence is synthesized)
gagtgagactctgtctccaaaaaaaaactttgcttgtatattatttttgccttacagtggatcattctagtaggaaaggacaataagattttttatcaaaatgtgtcatgccagtaagag

SEQ ID NO: 493601 - DNA, 120 bp, Artificial Sequence
  ENSG00000163110_21 (sequence is synthesized)
ttttttatcaaaatgtgtcatgccagtaagagatgttatattcttttctcatttcttccccacccaaaaataagctaccatatagcttataagtctcaaatttttgccttttactaaaat

SEQ ID NO: 493602 - DNA, 120 bp, Artificial Sequence
  ENSG00000163110_22 (sequence is synthesized)
gtgattgtttctattcattgtgtatgcttcatcacctatattaggcaaattccatttttttcccttgtgctaaggtaaagatttaattaaataattttggcctctcatagttttctctct

SEQ ID NO: 493603 - DNA, 74 bp, Artificial Sequence
  ENSG00000163110_23 (sequence is synthesized)
ggcgtgcctgtagtcccatgtacttgggaggctgaggcaggaaaattcttgaacccaggagacggaagttgcag

SEQ ID NO: 493604 - DNA, 120 bp, Artificial Sequence
  ENSG00000163110_24 (sequence is synthesized)
aaaaaaaaaaaaaaagagagagagagaataaatagaaaagaatgtggctgggaattgtgaatcagaagattataccccccaattgtttttcaatccccttttctcaaataataaattagt

SEQ ID NO: 493605 - DNA, 120 bp, Artificial Sequence
  ENSG00000163110_25 (sequence is synthesized)
atccccttttctcaaataataaattagttaaatcagtttctgagttatgccactggctgatgaagagttgagaggtctctttgcagaatgatctttttgtttcgttttgtttcttcttct

SEQ ID NO: 493606 - DNA, 120 bp, Artificial Sequence
  ENSG00000163110_26 (sequence is synthesized)
gcatttaaaaattaaaagattggtttgaggatgtgatgaaattgagactttttgtggttttctctcaataataagtgaaccaatttcaaatgtgatcacaaagtttggaaagcttttatt

SEQ ID NO: 493607 - DNA, 120 bp, Artificial Sequence
  ENSG00000163110_27 (sequence is synthesized)
cacagaggttgggtagtgttgggaggggagtttaattactcagattggcctgttatttgatttcctcctttgggaaaagaattatgtagataccacatggagacagggaaacaattgtgg

SEQ ID NO: 493608 - DNA, 120 bp, Artificial Sequence
  ENSG00000163110_28 (sequence is synthesized)
taaaactgtggatcctgttgctatttgcccagtgagaaaacagattctggtatttgatttggtttttctctttgtttccagaatggatgaaagtccatgaacctcctaagttataattta

SEQ ID NO: 493609 - DNA, 120 bp, Artificial Sequence
  ENSG00000163110_29 (sequence is synthesized)
aatttgtttggggcaaggtgattttatagtcgagacagagccctaggtccttcctgccccatcactcacttacgacatcacttccattgtgtgcatgtttgttatagaggaggttttagg

SEQ ID NO: 493610 - DNA, 120 bp, Artificial Sequence
  ENSG00000163110_30 (sequence is synthesized)
ctacaatatttgtttaacctccctaagaactttcaaggcatctgtcctgaaagctgttaatttatggtctagcagatttatattatatgcagataataattaactggggataaaagaatg

SEQ ID NO: 493611 - DNA, 120 bp, Artificial Sequence
  ENSG00000163110_31 (sequence is synthesized)
gcaaggggtgacacaaagtagcaaactgaatacttctccaatagcaaccccaagctacctcctcaccctgcatcttggagggaggcaggaaatttcttttgaaataaagtgctggagctg

SEQ ID NO: 493612 - DNA, 120 bp, Artificial Sequence
  ENSG00000163110_32 (sequence is synthesized)
aattctgcattatttatcgttgctgctgaaaccacctataaaagacttgctggctaatgtgcattgtcatataatgtacactgtcacatctttacagtcttgtatgttatagaatacaaa

SEQ ID NO: 493613 - DNA, 120 bp, Artificial Sequence
  ENSG00000163110_33 (sequence is synthesized)
ataagttgatggttttgtttggtgtgagctttttgtttgtttgtttagttttgccttcataggttatatgccaagatagtatttgataagtcaatgacatttggatgttttcttcaaaga

SEQ ID NO: 493614 - DNA, 120 bp, Artificial Sequence
  ENSG00000163110_34 (sequence is synthesized)
attttatttgacccagatttcttataaagttatcttacattaaggatgtcattttcatcagaccttctttctacatattattcatgaagcataatgttgcatttctccaaattttatgcc

SEQ ID NO: 493615 - DNA, 120 bp, Artificial Sequence
  ENSG00000163110_35 (sequence is synthesized)
tgaaagggtagtgttgcttcctaaggtatcatgttgtctttgtgctttgtccatctcttccgtggcgaagctttatatctgttcctaaaacagttaatcctgtgaaataaatattgaaca

SEQ ID NO: 493616 - DNA, 120 bp, Artificial Sequence
  ENSG00000163110_36 (sequence is synthesized)
taatccagaagaatctctctgtttcccttggggaatgccatatttaattcaccagcagtaatcctttaataactggcagagcactttattcttctggtgagctccctgaatatttatttt

SEQ ID NO: 493617 - DNA, 120 bp, Artificial Sequence
  ENSG00000163110_37 (sequence is synthesized)
tctgattataaattttctatattagtagcattttttaattattacttcttcactatagagcatttacttttagtctctagatgtatattttggaatgctgtacttggcataacatagatt

SEQ ID NO: 493618 - DNA, 120 bp, Artificial Sequence
  ENSG00000163110_38 (sequence is synthesized)
aaaatcataatgcatgactaaaaactccttggatttatttcccattttaaaatttttagcggtaagttcagatttataatctttctctagacttccatggtctgaatgttgcctgctgaa

SEQ ID NO: 493619 - DNA, 120 bp, Artificial Sequence
  ENSG00000163110_39 (sequence is synthesized)
gtagcaacctaaaaagtatcccctgcttatgcttgtccagttggccctccatgtccataggcttcgcatctgtgattcagcccactgtgggtcaaaaatatttggggaaaaaaatggatg

SEQ ID NO: 493620 - DNA, 120 bp, Artificial Sequence
  ENSG00000163110_40 (sequence is synthesized)
gttgcgcctttgctgaacatgtacaaacttttttttgtcattaaacaatatagtataacaactatttacaaagcatttacattgtattagctattataggtaatctagagatgatttaaa

SEQ ID NO: 493621 - DNA, 120 bp, Artificial Sequence
  ENSG00000163110_41 (sequence is synthesized)
aggttatatgcaaatactacaccattttctataagggacttgaacatcatggactttagtatcctagggggttcttggaacccatcacccataggggcaccataggacaactatagtacc

SEQ ID NO: 493622 - DNA, 120 bp, Artificial Sequence
  ENSG00000163110_42 (sequence is synthesized)
cataggacaactatagtaccgtgtttatttcctattaattcaggttccgtttagagtctaaaactaaaacctaatcatttagtcacagtgtaaaaacaaatggaaataacagctcaaatc

SEQ ID NO: 493623 - DNA, 120 bp, Artificial Sequence
  ENSG00000163110_43 (sequence is synthesized)
ttcaaaatattactatagcattatgtttaaaataatctacaacaaaaatgtaccattttcaagcagtactacattaggagcccttttatagaaaataatttcttctttacccccgttcca

SEQ ID NO: 493624 - DNA, 120 bp, Artificial Sequence
  ENSG00000163110_44 (sequence is synthesized)
gtgtgaatctagtattctgttaacatttgtgtggcatttggagtttgtcatccccattgaagggagagccttctcagacatgaagcaagggaaacatactgaatagttttacacaaattt

SEQ ID NO: 493625 - DNA, 120 bp, Artificial Sequence
  ENSG00000163110_45 (sequence is synthesized)
gatctggcttccatttgtccccctcatttcccaaatgtttaaatgtattggatttggattctcaatgtataagttgccttatctgttaatgtctatcttctgtctctttaattttgtata

SEQ ID NO: 493626 - DNA, 120 bp, Artificial Sequence
  ENSG00000163110_46 (sequence is synthesized)
tctgctgttttgcttttggatacattttctaattagaagtcacatgataaatataatcagtatagtaataataccataatgtgcacatactcaataaataaatgactgcattgttgtaaa

SEQ ID NO: 493627 - DNA, 120 bp, Artificial Sequence
  ENSG00000163110_47 (sequence is synthesized)
tcactgggactgaacatttgaaagaatctgaagccgataatacaaagaaggcaaagtttgacagtgctctggaagacctacctaagagtggacctcaccctcctgcaactcctcaggtgt

SEQ ID NO: 493628 - DNA, 120 bp, Artificial Sequence
  ENSG00000163110_48 (sequence is synthesized)
taactattggtagccaagtggccacactttctaaagtagcaactacttattctagtttaagcagctccacaggaaatgtggaagattctttcgaaggttttcgaaacttttctaccttct

SEQ ID NO: 493629 - DNA, 120 bp, Artificial Sequence
  ENSG00000163110_49 (sequence is synthesized)
cttctcctgctagatatagtgctgcagttctgagcagcgcagctgctactgtgtctgctgttattgctacaaaaaccaggctctacactcctgaaagatatcactcactcctggatgcac

SEQ ID NO: 493630 - DNA, 120 bp, Artificial Sequence
  ENSG00000163110_50 (sequence is synthesized)
tttgcatcagccctgtctccaagcctttagctttttcctatctgcagtcctcaaggaaatcaactggctctatccatgttaagaaaacaagtaactctcaggagccttctccgcagttgg

SEQ ID NO: 493631 - DNA, 89 bp, Artificial Sequence
  ENSG00000163110_51 (sequence is synthesized)
tgcagtgagctgagatcgcgaaaaaaaaatgcttatgttctgtataaaatcttcaataaaatgacgataccagtacctcatatttgtat

SEQ ID NO: 493632 - DNA, 120 bp, Artificial Sequence
  ENSG00000163110_52 (sequence is synthesized)
taaaacaattgtataattttattttataaggaaagtgacatttaaccaatcccctactgaagagtatttgtggcatttccatattactgttacagtggtacagtgaataccaaatataag

SEQ ID NO: 493633 - DNA, 120 bp, Artificial Sequence
  ENSG00000163110_53 (sequence is synthesized)
tacatacatatatatgtgaatatatgtatctacgtcattttgaaaggttgtgccaatttacacttttgtgcaacgcatgaaaatactatttttgtgccagtcttaccaacaaacttggat

SEQ ID NO: 493634 - DNA, 120 bp, Artificial Sequence
  ENSG00000163110_54 (sequence is synthesized)
atttatcaagtgctgtgaatgcatcatctcatttaattatcataccaacatgcaaaatagtgatattattcccattgtatataactgtgctgtgcgctcacatgactgtatggaagagct

SEQ ID NO: 493635 - DNA, 120 bp, Artificial Sequence
  ENSG00000163110_55 (sequence is synthesized)
ggctttccaacagttatgctgtgctgcctctttaataattcactttaccttaaatttagttagttgtttctttaatcagatatttagaagattgtcattttggttaataatatatgtgta

SEQ ID NO: 493636 - DNA, 120 bp, Artificial Sequence
  ENSG00000163110_56 (sequence is synthesized)
tgtataaatatatatacacacacatactctgcatcttgtatgtgtatccaacttcattttgaaagattaaaaataagtttgtaacgcctaaatatccttattaaaatactgcaaatccca

SEQ ID NO: 493637 - DNA, 120 bp, Artificial Sequence
  ENSG00000163110_57 (sequence is synthesized)
tgactggcaccatgaagtttcagcacgtgctcttaacgtacagtgatttatgagccttgccccccaagcagccagcacataccttttcatttactttttttttttcaacttcatagcaaa

SEQ ID NO: 493638 - DNA, 120 bp, Artificial Sequence
  ENSG00000163110_58 (sequence is synthesized)
tagttggtagctcacaaatgtaaaaccaaaaaaaaaaaaaaatagaaaattaagggactagatctatttgtggatttgtatctgtttttgttgtgattagggtagtaatcttggaaaacg

SEQ ID NO: 493639 - DNA, 120 bp, Artificial Sequence
  ENSG00000163110_59 (sequence is synthesized)
aattattttcataagttgaatttggttagttggttggttgaagcagaggataatgagcaaataaagtccttgtctaatttggaaaatactttctttatattattaacatctcccaagatt

SEQ ID NO: 493640 - DNA, 120 bp, Artificial Sequence
  ENSG00000163110_60 (sequence is synthesized)
actttttaagttcattattatgttacattcaaagttgattgtaaattattctaaataagtaaatataaggaggcaagaataaacaaagactttattaaagaagagtgcgtgcattgtaga

SEQ ID NO: 493641 - DNA, 120 bp, Artificial Sequence
  ENSG00000163110_61 (sequence is synthesized)
tttaggtatcttttaaagtaggtactattcaggatggctctatgaagaggaggaggtccagatttggctcctgaaaaaggaaagaagagaattttacccctatttgcaatggagaaatac

SEQ ID NO: 493642 - DNA, 120 bp, Artificial Sequence
  ENSG00000163110_62 (sequence is synthesized)
agtattctttggtttggttggatttgcaaatcctatttcctatcaaaggaaatatctctagtggatatttttagaatatagacaatttctaggtattaactaataagatatggaaaagat

SEQ ID NO: 493643 - DNA, 120 bp, Artificial Sequence
  ENSG00000163110_63 (sequence is synthesized)
agctttgctttttttaatcagaagaacataaaataaattacaatatgaatgattgtgagacatcagagaaatattttacttagtgacgtaaactactgtgcactgctgctattcctagga

SEQ ID NO: 493644 - DNA, 120 bp, Artificial Sequence
  ENSG00000163110_64 (sequence is synthesized)
agctgtgttttgggcaatacatggaagctaaatatatgaccagaaatgctttctgccttgtaatatagtgtattatatattagagctaaatttagtaataaatgcattttgaagtttgga

SEQ ID NO: 493645 - DNA, 120 bp, Artificial Sequence
  ENSG00000163110_65 (sequence is synthesized)
aaagtattgtaataaagttgcctttaacttagctttgtacttgttctgtttccttgaggctagacacagtgccatccaggacttattacagtataactgggtaaaataaacaattctctg

SEQ ID NO: 493646 - DNA, 120 bp, Artificial Sequence
  ENSG00000163110_66 (sequence is synthesized)
attgagatttggctttttacctcattatggatttagtttgaatgtattctgtgtatatattttaaggatatgttttcatgatgatgatgatagcactgatgagaggagtaattaaagctt

SEQ ID NO: 493647 - DNA, 120 bp, Artificial Sequence
  ENSG00000163110_67 (sequence is synthesized)
ctatttattgagacttgactatatgtcaggtactgtttcactttcatcaccagtaggtaattattactattatataagtttctaaaaggtttgtttttgcatattcaaataaatatgaat

SEQ ID NO: 493648 - DNA, 120 bp, Artificial Sequence
  ENSG00000163110_68 (sequence is synthesized)
tcttagcaaactcaaagttcttgaactctgtagtttacacatccttagaacagcactaccttgtatgtgatattcaagagactgactttctaaagagtcttagagccaagctttaaattc

SEQ ID NO: 493649 - DNA, 120 bp, Artificial Sequence
  ENSG00000163110_69 (sequence is synthesized)
tgatctgttaatatatatttcagtagttgctaataatgccatacctcttcttcactatgctgatcccacacacagctttctttaggagaaggaatacctgtacatatgaatgagaaaact

SEQ ID NO: 493650 - DNA, 120 bp, Artificial Sequence
  ENSG00000163110_70 (sequence is synthesized)
gtagaaataatagttcggacccttttcaaaattgtattcggaattgctagtttagcctctactaaaccatacttggttcctgggcctagtgaagatttgatcatttaatttcgtgaaagc

SEQ ID NO: 493651 - DNA, 120 bp, Artificial Sequence
  ENSG00000163110_71 (sequence is synthesized)
caatacattctagcagcatattgatattaatggccgttgtgaatattgtccgcatctgtgtttcgtatggcatacagtgaacaatacaaataatttcaagaagtttgattttgactacta

SEQ ID NO: 493652 - DNA, 120 bp, Artificial Sequence
  ENSG00000163110_72 (sequence is synthesized)
tggactttcattttctagttgttttctttttttcttatcattttcctttcctttttcttcatgttggaaatctttcttctgctgccttcctctgtcaattaaaaggaaaatcccacctaa

SEQ ID NO: 493653 - DNA, 120 bp, Artificial Sequence
  ENSG00000163110_73 (sequence is synthesized)
ccggttcctgttcaaaaggtgtgtttttaagctagcacccagagtatcacttgattgtccttgctgagctactgtaattcccattactgtctcagaccatactgacattcatttaattta

SEQ ID NO: 493654 - DNA, 120 bp, Artificial Sequence
  ENSG00000163110_74 (sequence is synthesized)
tagtctcagtacaattttccttgtagttcttttccttcagagatgagtagggaaatggagatcagcacataccatttgtaattatacatgttataaaacattatttccaaagccatatgt

SEQ ID NO: 493655 - DNA, 120 bp, Artificial Sequence
  ENSG00000163110_75 (sequence is synthesized)
tacaataacttatgtcagatttcttacatttctattcacttttgatgagcccatctttatccaaatccttatattttctaaagagaataaataagtggttactgaaaattaatatcacaa

SEQ ID NO: 493656 - DNA, 120 bp, Artificial Sequence
  ENSG00000163110_76 (sequence is synthesized)
taattgtctctgtaactttccttcttgctttcaatttaatactaccagcaaattttgttaggattttctcattataagaattttcaaaaatgttaaggagcataagaagcattttttttt

SEQ ID NO: 493657 - DNA, 120 bp, Artificial Sequence
  ENSG00000163110_77 (sequence is synthesized)
atgctagataattttgtatgcatcagaggtatgtttagaacacccacacttctgtaatgaaaaacttagtaagttaaccttcattgagatatagatgagtattatggacagtgtatacca

SEQ ID NO: 493658 - DNA, 120 bp, Artificial Sequence
  ENSG00000163110_78 (sequence is synthesized)
cagtgcttagtcctcgggctgagttgtttaattctctgttgacctgtactctacttattatcattgctcctgggatttgatcttggcaaatttgattatctataataaaggatgagggga

SEQ ID NO: 493659 - DNA, 120 bp, Artificial Sequence
  ENSG00000163110_79 (sequence is synthesized)
tttcattgtcttttctttttcttcttttctcccctctttgtctgttgttcatcttccggggaacatcaatgtcttctctactctatcgcatctttttttgtgtgtgttattcttccctca

SEQ ID NO: 493660 - DNA, 120 bp, Artificial Sequence
  ENSG00000163110_80 (sequence is synthesized)
gtaaccctggcactgtgtaagtacttaaccaatgattcactttgtaattgtctctgtaactttccttcttgctttcaatttaatactaccagcaaattttgttaggattttctcattata

SEQ ID NO: 493661 - DNA, 120 bp, Artificial Sequence
  ENSG00000163110_81 (sequence is synthesized)
ctttactactctccttactctactaagagccaaatgggactttatatttcaaactggaaggattgctgttttgcatcaagtagtttaagtgatttaccttttccctttccatatatcctt

SEQ ID NO: 493662 - DNA, 120 bp, Artificial Sequence
  ENSG00000163114_0 (sequence is synthesized)
aggccttccggcggtcgttacgggacgccgctgccatctacagcactccgtgaagaatatgctggccgccttcatctcccgcgtgttgaggcgagttgcccagaaatcagctcgcagagt

SEQ ID NO: 493663 - DNA, 120 bp, Artificial Sequence
  ENSG00000163114_1 (sequence is synthesized)
gctggtggcatcccgtaactcctcaaatgacgctacatttgaaattaagaaatgtgatctttatctgttggaagagggtccccctgtcactacagtgctcactagggcggaggggcttaa

SEQ ID NO: 493664 - DNA, 120 bp, Artificial Sequence
  ENSG00000163114_2 (sequence is synthesized)
atactacaggatgatgctgactgttcgccgcatggaattgaaggcagatcagctgtacaaacagaaattcattcgcggtttctgtcacctgtgcgatggtcaggaagcttgttgcgtggg

SEQ ID NO: 493665 - DNA, 120 bp, Artificial Sequence
  ENSG00000163114_3 (sequence is synthesized)
ccttgaggccggcataaacccctcggatcacgtcattacatcctatagggctcatggtgtgtgctatactcggggactttctgtccgatccattctcgcagagctgacgggaagaagagg

SEQ ID NO: 493666 - DNA, 120 bp, Artificial Sequence
  ENSG00000163114_4 (sequence is synthesized)
aggttgtgctaaaggaaaaggaggatcgatgcatatgtataccaagaacttctatgggggcaatggcatcgtcggtgcacagggccccctgggcgctggcattgctctggcctgtaaata

SEQ ID NO: 493667 - DNA, 120 bp, Artificial Sequence
  ENSG00000163114_5 (sequence is synthesized)
caggggcagatagccgaagctttcaatatggcagctttatggaaattaccttgtgttttcatctgtgagaataacctatatggaatgggaacatctactgagagagcagcagccagccct

SEQ ID NO: 493668 - DNA, 120 bp, Artificial Sequence
  ENSG00000163114_6 (sequence is synthesized)
gattactacaagaggggcaattttatccctgggctaaaggtcgatggaatggatgttctgtgtgttcgtgaggcaacaaaatttgcagctaactactgtagatctggaaaggggcccata

SEQ ID NO: 493669 - DNA, 120 bp, Artificial Sequence
  ENSG00000163114_7 (sequence is synthesized)
ctgatggagctgcaaacctaccgttatcatggacacagtatgagtgatcctggagtcagttatcgtacacgagaagaaattcaggaagtaagaagtaagagggatcctataataattctc

SEQ ID NO: 493670 - DNA, 120 bp, Artificial Sequence
  ENSG00000163114_8 (sequence is synthesized)
caagatagaatggtaaacagcaagctcgccactgtggaagaattaaaggaaattggggctgaggtgaggaaagaaattgatgatgctgcccagtttgctaccactgatcctgagccacat

SEQ ID NO: 493671 - DNA, 120 bp, Artificial Sequence
  ENSG00000163114_9 (sequence is synthesized)
ttggaagaattaggccatcacatctacagcagtgattcatcttttgaagttcgtggtgcaaatccatggatcaagtttaagtccgtcagttaaagggaggctacgtgtgaatttatcatc

SEQ ID NO: 493672 - DNA, 120 bp, Artificial Sequence
  ENSG00000163114_10 (sequence is synthesized)
agtctctcaatggaatgttcatggtcaaatttaagaaactgtgttctcaactcaaggaggaataaaactcataaaacaaaagccttgtaagcatttattaaaagagattattaaaagaga

SEQ ID NO: 493673 - DNA, 120 bp, Artificial Sequence
  ENSG00000163116_0 (sequence is synthesized)
agggccggaagcaccggggcgagcgtctaatccctaatacccaattttggtggcgtgcacctggcaaactgatgattgtgtgggacgtctaatctctagtcgctcacccctctactttac

SEQ ID NO: 493674 - DNA, 120 bp, Artificial Sequence
  ENSG00000163116_1 (sequence is synthesized)
cacagagctagaaatcgatttgaggaaatctggtatcaatgagcgggcggggagacaaccccacccctaatttccctgtttacggaagttctttcccggcctcctcagactggtgtcggc

SEQ ID NO: 493675 - DNA, 120 bp, Artificial Sequence
  ENSG00000163116_2 (sequence is synthesized)
ttcctttttctccacacttctagctaccttgtttttatcgttttcggcacctgcccttccccagcgcccccaccaccccgagcactatgtatgatcgggctccccgcctgctcaaattgg

SEQ ID NO: 493676 - DNA, 120 bp, Artificial Sequence
  ENSG00000163116_3 (sequence is synthesized)
ctgaaggtggcagcactgaggcccatgtgggtcctggatcctaccaggtacctttcctgaagcagcaggcgacaggtagtaatgcaccatttctttctttgactgccagagaaagtactt

SEQ ID NO: 493677 - DNA, 120 bp, Artificial Sequence
  ENSG00000163116_4 (sequence is synthesized)
ttaccattgcctctagcattgagaaagctgttccaggtccaggacactataatgtttcagaagcacagaaaatttcaagatcacctacacttaccagaagtgttgatgttccttcaattc

SEQ ID NO: 493678 - DNA, 120 bp, Artificial Sequence
  ENSG00000163116_5 (sequence is synthesized)
cttcttgtggaaagtcatatggttatcatattaatgatgatggcagtattataaaatgttttccacctgcttgtgacagtacacttggtccagcatactacaaacctcaatttgatgttt

SEQ ID NO: 493679 - DNA, 120 bp, Artificial Sequence
  ENSG00000163116_6 (sequence is synthesized)
ccaatgcaactttgaaatacaaaggtatacattttggcaactcttcaggaagacaagagttacctaaaaagtcaggtcctggtccaggacagtatgatatagtccagaaaaagacatcat

SEQ ID NO: 493680 - DNA, 120 bp, Artificial Sequence
  ENSG00000163116_7 (sequence is synthesized)
aaaaagagatttttacctatgaaatcaatcaccccggctcctggcacatataatgaacctcgaactgctctcaagtctttgaagaaaacatcaggactgaaaaatattccatttggtcaa

SEQ ID NO: 493681 - DNA, 120 bp, Artificial Sequence
  ENSG00000163116_8 (sequence is synthesized)
agtgctgttcgattcacacaggacatcaggacagaggaaatgccaggtcctggattttataatgtcttgaacaatactataattgccagtgttagaaatatctgctcaaagaaacagaag

SEQ ID NO: 493682 - DNA, 120 bp, Artificial Sequence
  ENSG00000163116_9 (sequence is synthesized)
aaaagtgcatttggttcttctgttcctcggactttcttctcggttcagaaagaagcttgtgctacccctggacctgctgattatcaggaattttggcattcacagggtgtgggaatttct

SEQ ID NO: 493683 - DNA, 120 bp, Artificial Sequence
  ENSG00000163116_10 (sequence is synthesized)
gatgaattacctaacttgactaacaaatatgctgctttcttgtcaagagccaaaagaactatgaaagtaccagatatggttattccagcgccaggcagctatgatgttcacaaatcatat

SEQ ID NO: 493684 - DNA, 120 bp, Artificial Sequence
  ENSG00000163116_11 (sequence is synthesized)
gagatgtcccaagttaagcataaatatatgccacctcgtagtttagtggctaaaagaaaacatgcctcttttcttagtgcaactcctcggtgcctagaaaaagtgactgatgggccaggt

SEQ ID NO: 493685 - DNA, 120 bp, Artificial Sequence
  ENSG00000163116_12 (sequence is synthesized)
cctgcagcatacaatcctgttttaaggaaatcttgccccatacccttatttgtgaaagcatcaaagcgctttgaagagtccaaagagattactccaggcccagcaacatatgagatatcc

SEQ ID NO: 493686 - DNA, 120 bp, Artificial Sequence
  ENSG00000163116_13 (sequence is synthesized)
caggagaaaaagaaaggaaatctcattggtgaaatggctgctgatataatgtgacataaatttatggcaaaaacttaaaaaacaacttcatggaagtcagtttatttctttgtcatttta

SEQ ID NO: 493687 - DNA, 120 bp, Artificial Sequence
  ENSG00000163116_14 (sequence is synthesized)
acaaaatttattccaaatataggagtaataaaagcataattttcacttgttcaggcattcgctcaggctttagtgactatatgacacaaccacggagaaataaaccttgttaagacaaaa

SEQ ID NO: 493688 - DNA, 120 bp, Artificial Sequence
  ENSG00000163116_15 (sequence is synthesized)
agcccacgtggactgaggacatactacatggagcatggaggtgataagaccatttcttcaggaatgaccagaatagcataaaagatcaatggaagcattgccaaaaaaggaagactgaaa

SEQ ID NO: 493689 - DNA, 120 bp, Artificial Sequence
  ENSG00000163116_16 (sequence is synthesized)
tctcaacctttcagggagtaatttatcatttggatgagcctaatgagaaaagcagtgcagtgaatgatgtgacaatatgaaacaacaaaatagtgaatgattaacgagtgacaaattgag

SEQ ID NO: 493690 - DNA, 120 bp, Artificial Sequence
  ENSG00000163116_17 (sequence is synthesized)
agggaaaaaaaaggataacgctttcattatggtacaaaagagaatttgacaaactcatccaagaaagcaaccactttttcctccgtcttagttgaacgccttgaaaaacgaacaatcata

SEQ ID NO: 493691 - DNA, 120 bp, Artificial Sequence
  ENSG00000163116_18 (sequence is synthesized)
caatcatactgctttcaaggaatttcataagagtaaaatagttaaacttctatagaatttcaataattaagggttacaaatatatttaaaggattttgaagctttaataatcaaaacttt

SEQ ID NO: 493692 - DNA, 120 bp, Artificial Sequence
  ENSG00000163116_19 (sequence is synthesized)
tatgctgcaattattcagggcaaatcaaaatgagaaaaaaccgtggcattttgataagtataaaagttataaaataaaacatattatttgttacaaatgacaatttaatgaaatatagtt

SEQ ID NO: 493693 - DNA, 120 bp, Artificial Sequence
  ENSG00000163116_20 (sequence is synthesized)
ttgcattgaatctagctaggaaattttagatcatatgttttatggaattgatttgtattgtctgacatctaatttatagctggtcatgaattcaaattcttggcactgcttttttctaac

SEQ ID NO: 493694 - DNA, 120 bp, Artificial Sequence
  ENSG00000163116_21 (sequence is synthesized)
tatgtagcttgggaaaatatcttaagttttctaagtttcctaagattcaatttcctcatattctaacttgacctaacacactctatctgccaaaattattgtgaagaattaatgagctaa

SEQ ID NO: 493695 - DNA, 120 bp, Artificial Sequence
  ENSG00000163116_22 (sequence is synthesized)
tatctgggacagaaacaaaaaaatcaaagcctagtacctgtcacagaacacacatccacaatgtcattttcctcccattatgtcattagtctcaacaaaaagttaaaaatccaacctcat

SEQ ID NO: 493696 - DNA, 120 bp, Artificial Sequence
  ENSG00000163116_23 (sequence is synthesized)
ccaaaatccaatcaaaattaatcagaataagagaagttgggcaaattgatttccattaacttcaagtgcaaagtgttttgcacactcctgggatttacatgatggagaagaacagattcg

SEQ ID NO: 493697 - DNA, 120 bp, Artificial Sequence
  ENSG00000163116_24 (sequence is synthesized)
aatgaactttgcctaacacaaattagataaatatccttttccttgaggacattaacatttagtaaacattaatgaaaaaaaaacaagtaatgcatgcctaatcatgtgctacatatgcct

SEQ ID NO: 493698 - DNA, 120 bp, Artificial Sequence
  ENSG00000163116_25 (sequence is synthesized)
aatctgaattcatctttaaacggggaacggtttgaatggaaaattcatgttttgggttcctacttgtgacatgtaatgataataatttgtgtattccagtaaaattccatgccttttgaa

SEQ ID NO: 493699 - DNA, 120 bp, Artificial Sequence
  ENSG00000163116_26 (sequence is synthesized)
atgtctctgtatgaatatgttgactaaaatgggtcattttagaaagacttatgaagtttgataactggaaaaagtcctaagaatggcctaatttatgtaaataatatacacaatgataat

SEQ ID NO: 493700 - DNA, 120 bp, Artificial Sequence
  ENSG00000163116_27 (sequence is synthesized)
agaaatgtaactaatattagtttgttaataatgcttttatttctgaaaatacaaacaagtctgtagagtcacatgaacaatgggggaaatatttttctgactatgtctgtagaactttcc

SEQ ID NO: 493701 - DNA, 120 bp, Artificial Sequence
  ENSG00000163116_28 (sequence is synthesized)
agtggaatctctaagttgcttttttttttttttttttttggtatggacttttaattaatgacacccttgtagaaaaatagaatttaaaaaaggggggtgggggactagggaaggggtagc

SEQ ID NO: 493702 - DNA, 120 bp, Artificial Sequence
  ENSG00000163116_29 (sequence is synthesized)
gtgggggactagggaaggggtagcattaggagaaatacctaatgtggatgacgagttaatgggtgcagcaagccaccatggcaggtgtataactatgtaacaaacctgcaggttctgcac

SEQ ID NO: 493703 - DNA, 120 bp, Artificial Sequence
  ENSG00000163116_30 (sequence is synthesized)
ataaataaagaaaaatatataagagattttaagacattaaatggccattttgaattaactcctaaaactaaaaatcaatgtcctcagcatttttaaaagaacaactatggcagaaaatga

SEQ ID NO: 493704 - DNA, 120 bp, Artificial Sequence
  ENSG00000163116_31 (sequence is synthesized)
gaaacaaagtaagtggtggagtgagggatgaagatggggctgagtaatagggtgataaattgaaaggttttcagtatggatttgactgaatgacctggggcccaggtcacctgactccta

SEQ ID NO: 493705 - DNA, 120 bp, Artificial Sequence
  ENSG00000163116_32 (sequence is synthesized)
accaaattattttccctgtaataaaagtttatattctaagcagagaaaatatggttggatggatggatgaatcgatagatggatggatggatggatggattatagatatgaaaatctttc

SEQ ID NO: 493706 - DNA, 120 bp, Artificial Sequence
  ENSG00000163116_33 (sequence is synthesized)
tgaattctattacatactttgtggagaaaattattttcagtattagttattcatctgggttgtaatagagtgagtcatttgagctgagttggaaaattttccttaaacataaattgcccc

SEQ ID NO: 493707 - DNA, 120 bp, Artificial Sequence
  ENSG00000163116_34 (sequence is synthesized)
agactgtcattttgttctcaatgtttcattctgcagtgtttggttctctcttgatgtcaaactgtcagaaatcatcctgtggtcagtacacctgccacagcagtcacttcttgtcttccc

SEQ ID NO: 493708 - DNA, 120 bp, Artificial Sequence
  ENSG00000163116_35 (sequence is synthesized)
aggggaaacaggatagtatacttacagagaaaactgaatgaaccttggagttagacaaacctcagctataccctggatctcccattgtgggctagctactcaaactaaatgaagctctct

SEQ ID NO: 493709 - DNA, 120 bp, Artificial Sequence
  ENSG00000163116_36 (sequence is synthesized)
atcttcacctgaaaaatgaggataacaggaagtgcctgttgtgtgaatcaagtaaacaaaattttaaaaatatgtaacagaattcctgaaacacatacatacagtcaatggaacttttct

SEQ ID NO: 493710 - DNA, 120 bp, Artificial Sequence
  ENSG00000163116_37 (sequence is synthesized)
cctttctacattctcccatgctgttgaaggcatgcctttgttgttgttgtgttgttggagagtgctaatctagcttgataaggtgttatatgaaataatggtaaattggctgtgattgga

SEQ ID NO: 493711 - DNA, 120 bp, Artificial Sequence
  ENSG00000163116_38 (sequence is synthesized)
tgtctgagaagctcttcaatgtgtttacatttgactgttttggctgcctacatctaagtttttggctgttttctgaataattgagattttttgaacatgtgaaatgtcaccacagtgttg

SEQ ID NO: 493712 - DNA, 120 bp, Artificial Sequence
  ENSG00000163116_39 (sequence is synthesized)
caaaactctatattctttatgttcctgtgttaagataaaaatctcatgtgtcaaattgataacccgagttttcctacccatgtatgtcataagaaaatcactgaaaaaggtaaatatatc

SEQ ID NO: 493713 - DNA, 120 bp, Artificial Sequence
  ENSG00000163116_40 (sequence is synthesized)
aattaagttatttatcatatagactataaattttcccagattgttggggttttttttttagtactttacctagcatacattttaatttagtcaaactggtttcatgtatattttactaaa

SEQ ID NO: 493714 - DNA, 120 bp, Artificial Sequence
  ENSG00000163116_41 (sequence is synthesized)
catgcttcagacatggtaccagttcaatattctaatttaatttctatagattattaaaaatttttaaattataccagttttactgagttctgtttttaatacattttaggaattctgaaa

SEQ ID NO: 493715 - DNA, 120 bp, Artificial Sequence
  ENSG00000163116_42 (sequence is synthesized)
aatagaattcccacagaaaggaatcctaagaaaattcatgtgaagaatgagatcttatttgggggattaattataatctggaagttttacttataacctcgtatttcatatatattataa

SEQ ID NO: 493716 - DNA, 120 bp, Artificial Sequence
  ENSG00000163116_43 (sequence is synthesized)
gatacttacattgaattatagaaatatacaaacaataattgaaaagcttaacttctgcctctgaagatatgattatctcatctcctggcctcttttgtgtttgttttaaggcaataaata

SEQ ID NO: 493717 - DNA, 120 bp, Artificial Sequence
  ENSG00000163116_44 (sequence is synthesized)
ttgttttaaggcaataaatacttgcttttctcctcctgatcatgagaaaatgatctttatttaatataaatttgatttatattttatcttttaaaattattattttggttatatctgctc

SEQ ID NO: 493718 - DNA, 120 bp, Artificial Sequence
  ENSG00000163116_45 (sequence is synthesized)
gcttaactgatattgaattatttcaaatattacaacaagaaagcatacagaaatcacagtacagagatataaaatatgtaaaataaaaagtttaaaaagatttcaaatgtagcagaaaaa

SEQ ID NO: 493719 - DNA, 120 bp, Artificial Sequence
  ENSG00000163116_46 (sequence is synthesized)
ctctttcaccaacaccctccgtatagcacttaggatataggccatgcagtacccctgctatgaggaacctaatgaggaatgtagttagtttccctccctaactggaagaagctaagcagg

SEQ ID NO: 493720 - DNA, 120 bp, Artificial Sequence
  ENSG00000163116_47 (sequence is synthesized)
tggtatctgaatgttatggtcaaaggagaagggtcctgcagcatacaatcctgttttaaggaaatcttgccccatacccttatttgtgaaagcatcaaagcgctttgaagagtccaaaga

SEQ ID NO: 493721 - DNA, 120 bp, Artificial Sequence
  ENSG00000163116_48 (sequence is synthesized)
atgagaaaatatggaaaagtaaatgaaagaaaataaaaagatctgtaacagcaacacctggaaatgccactgttaacactgaggttgaggtccagttactgcaacatcagtattgaaaag

SEQ ID NO: 493722 - DNA, 120 bp, Artificial Sequence
  ENSG00000163116_49 (sequence is synthesized)
atgattttgcttcattgcactgcctttgcttcttcgtcaaaggaatgaccattgttgcattactactgggatttgaaaacacagcgtgatccctgtgggtggtacaatttcctctgagga

SEQ ID NO: 493723 - DNA, 120 bp, Artificial Sequence
  ENSG00000163121_0 (sequence is synthesized)
aacctgtccactggccttctccaggcagttccttctagacctggggacctgtgcccgaggaccttagactgatgggtgcccagctctgcttcgaggccaacgccaaggcgccccgagagg

SEQ ID NO: 493724 - DNA, 120 bp, Artificial Sequence
  ENSG00000163121_1 (sequence is synthesized)
cacttcgcttccatgccgaggccaagggcgcacaggtgcgtctggacacgcgtggctgcatcgcgcacaggcgcaccacgttccacgacggcatcgtgttcagccagcggccggtgcgcc

SEQ ID NO: 493725 - DNA, 120 bp, Artificial Sequence
  ENSG00000163121_2 (sequence is synthesized)
tgggcgagcgtgtggcgctgcgagtgctgcgggaggagagcggctggtgcggcggcctccgcgtgggcttcacgcgcctggaccccgcgtgcgtgtccgtgcccagcctgccgcccttcc

SEQ ID NO: 493726 - DNA, 120 bp, Artificial Sequence
  ENSG00000163121_3 (sequence is synthesized)
tgtgccccgacctggaggagcagagcccgacgtgggcggccgtgctgcctgagggctgcgcgctcactggggacttggtccgcttctgggtggaccgccgcggctgcctcttcgccaagg

SEQ ID NO: 493727 - DNA, 120 bp, Artificial Sequence
  ENSG00000163121_4 (sequence is synthesized)
tcaacgccggctgccggctcctgctgcgtgagggcgtgcccgtcggcgccccgctctgggccgtgatggacgtgtatgggaccactaaggccatcgagctgctggatcccacagccagcc

SEQ ID NO: 493728 - DNA, 120 bp, Artificial Sequence
  ENSG00000163121_5 (sequence is synthesized)
ggctcccaacacccatgccatgggacctcagcaacaaggctgtgcctgagcccaaagccacaccaggagaggagtgtgccatctgcttctatcacgctgccaacacccgccttgtgccct

SEQ ID NO: 493729 - DNA, 120 bp, Artificial Sequence
  ENSG00000163121_6 (sequence is synthesized)
gcagatactgtgcctggcgggtcttcagcgatacggccaagtgccctgtgtgccgctggcagatagaggcggtagcccctgcgcagggccctcctgctctgagggttgaggaaggctcat

SEQ ID NO: 493730 - DNA, 120 bp, Artificial Sequence
  ENSG00000163121_7 (sequence is synthesized)
gaaaggaggcttcccagtatgagtggcagcccgggcctagatctgagtctggcccctgcagagaggaaggaggcgcagccctaccttctttctggggaagagtcagaaaggctgattagc

SEQ ID NO: 493731 - DNA, 120 bp, Artificial Sequence
  ENSG00000163121_8 (sequence is synthesized)
aagaggtgcggcagagagaggaaggcagggaggtgctgtctgctgcctccacctgttccccaacaggatagcaaggaaaaacccctctttctgtccatgccagaactatccttctgatgg

SEQ ID NO: 493732 - DNA, 120 bp, Artificial Sequence
  ENSG00000163121_9 (sequence is synthesized)
ggtgctttgtttagagatggggtggcccaatccccaatcagttttacatctgagggagttcaggtatctgttgtgactggtgaagccctgtacctcctgggtattgaagaacctggactt

SEQ ID NO: 493733 - DNA, 120 bp, Artificial Sequence
  ENSG00000163121_10 (sequence is synthesized)
gaagcaggaggtatctgcaaggaatgtataaagttccacatggaagctgggttgcctcccacaagtccccagtagagtggatctgtagttacccgccctgcctccctttcagggtggtca

SEQ ID NO: 493734 - DNA, 120 bp, Artificial Sequence
  ENSG00000163121_11 (sequence is synthesized)
tgaggtcccagagagaccatgcatctgaagatgatttaaaacatgaaagtgtattgttgtcactgtggtaatttccttgccagtttctgagatatcaaaataaagtttgtgtttcctgaa

SEQ ID NO: 493735 - DNA, 120 bp, Artificial Sequence
  ENSG00000163121_12 (sequence is synthesized)
gcctcaacctgacactcagcagcaagttaggcctatctacaaatctcctgctctgtgcccgcgcagtccagtggaggagatattcctaattagggggcacttccaaggggcggagtctcc

SEQ ID NO: 493736 - DNA, 120 bp, Artificial Sequence
  ENSG00000163121_13 (sequence is synthesized)
gcggcgagtggccgtggaggggcgcaaggcagacggtctccagccacgatacctgggccaatcccagcctgtcacgtcatgcctagtgagctgaacaagctgcgtaactgtcgtgtgcct

SEQ ID NO: 493737 - DNA, 120 bp, Artificial Sequence
  ENSG00000163121_14 (sequence is synthesized)
tcagttattccatcagcccctgcccagtgttagctgtgaagatgggcactggagacgccagatagacaaggctcagtcgtagggagggcagtcttgtccctaaagaatgataagcagata

SEQ ID NO: 493738 - DNA, 120 bp, Artificial Sequence
  ENSG00000163121_15 (sequence is synthesized)
ggaccagcactcacaccatctgttactcaaacacctgttagagtgtccatctccttttacaaaggaagaaacatttgggctggctttgcagcctaaataggagttcactagatacaaagg

SEQ ID NO: 493739 - DNA, 120 bp, Artificial Sequence
  ENSG00000163121_16 (sequence is synthesized)
tggcaagcaaagggaacacacaggtgaggctagaggtgcgcatggagagtgcctgcagggagaaagctgagcctctcagtcagtgggggggaaaagagagccatccctttagccacccca

SEQ ID NO: 493740 - DNA, 120 bp, Artificial Sequence
  ENSG00000163121_17 (sequence is synthesized)
ggccttctccaggcagttccttctagacctggggacctgtgcccgaggaccttagactgatgggtgcccagctctgcttcgaggccatacagaaggggtttcaccatgttagccaggttg

SEQ ID NO: 493741 - DNA, 73 bp, Artificial Sequence
  ENSG00000163121_18 (sequence is synthesized)
ggacctggtctttcagcaccagctattggggttgtgcatctctggacctaccctcccagacgccaaggcgccc

SEQ ID NO: 493742 - DNA, 120 bp, Artificial Sequence
  ENSG00000163125_0 (sequence is synthesized)
gaagatggcggccggcggcggcggaggcagcagtaaggcctcctcctcgtcggcctcttcggcaggggctctggagtcctcgttggatcgaaaattccagtcggtaaccaacaccatgga

SEQ ID NO: 493743 - DNA, 120 bp, Artificial Sequence
  ENSG00000163125_1 (sequence is synthesized)
gtccattcaaggcttgtcgtcttggtgtatagagaacaaaaaacaccacagtactatcgtctatcattggatgaagtggctccggagatctgcatatccccaccgtttgaatctctttta

SEQ ID NO: 493744 - DNA, 120 bp, Artificial Sequence
  ENSG00000163125_2 (sequence is synthesized)
ccttgccaatgatgtcatacagaactgtaaaaggaaaaatgcaatcatattccgtgaatcatttgctgatgtacttcctgaagcagctgctctagtgaaggatccatctgtctctaagtc

SEQ ID NO: 493745 - DNA, 120 bp, Artificial Sequence
  ENSG00000163125_3 (sequence is synthesized)
tgtagaacgaatctttaaaatctgggaagatagaaatgtatacccagaagaaatgattgtggcattgagagaagctttgagtaccactttcaaaactcagaagcagctgaaagaaaatct

SEQ ID NO: 493746 - DNA, 120 bp, Artificial Sequence
  ENSG00000163125_4 (sequence is synthesized)
gaacaaacaaccgaataagcagtggaagaaatcacaaacatctacaaatccaaaagctgctctcaagtctaagatagttgctgaatttcgatctcaggccctaattgaagagctgttgct

SEQ ID NO: 493747 - DNA, 120 bp, Artificial Sequence
  ENSG00000163125_5 (sequence is synthesized)
atacaagcgctcagaagatcagatagaactgaaggaaaagcagttgtcaactatgagggtggatgtgtgcagcacagaaactctcaaatgcttaaaagataaaacaggtgggaagaagtt

SEQ ID NO: 493748 - DNA, 120 bp, Artificial Sequence
  ENSG00000163125_6 (sequence is synthesized)
ctccaaagaatttgaagaggcaagctccaagctggaagaatttgtgaatggattagataagcaggtgaaaaacggaccctcattaacagaagcactggaaaatgctggaattttctatga

SEQ ID NO: 493749 - DNA, 120 bp, Artificial Sequence
  ENSG00000163125_7 (sequence is synthesized)
agcacaatacaaagaagtaaaagtggtggctaatgcatataaaacctttgctaaccgagtaaacaatttaaagaagaagttggatcaattgaagtcaacccttccagatcctgaagaatc

SEQ ID NO: 493750 - DNA, 120 bp, Artificial Sequence
  ENSG00000163125_8 (sequence is synthesized)
accagttccttccccaagcatggacgctccctccccgactggttctgagtctccttttcagggaatgggaggtgaggaatcccagtcaccaaccatggagagtgagaaatctgccacacc

SEQ ID NO: 493751 - DNA, 120 bp, Artificial Sequence
  ENSG00000163125_9 (sequence is synthesized)
tgaacctgtgacagataatcgtgatgtggaagacatggaactctcagatgtggaagatgatgggtcaaaaatcattgtcgaggacaggaaggaaaaacctgcagagaagtcagctgtatc

SEQ ID NO: 493752 - DNA, 120 bp, Artificial Sequence
  ENSG00000163125_10 (sequence is synthesized)
cacttctgtacctacaaagccaacagaaaatatctcaaaggcctcttcatgtaccccagtgcctgtgaccatgacagcaactccacctcttccaaagcctgtgaatacttctctttcccc

SEQ ID NO: 493753 - DNA, 120 bp, Artificial Sequence
  ENSG00000163125_11 (sequence is synthesized)
ttccccagcattggctttgccaaacctggctaatgtggatctggcaaagatcagttccatccttagcagtttaacatcagtcatgaaaaatactggggtcagtcctgcatcaagaccttc

SEQ ID NO: 493754 - DNA, 120 bp, Artificial Sequence
  ENSG00000163125_12 (sequence is synthesized)
tccaggaacgcccaccagccccagcaacctcaccagtggcctgaaaacacctgcacctgccacgacaacatctcacaaccctctggcaaatatcctctccaaggtggagatcaccccaga

SEQ ID NO: 493755 - DNA, 120 bp, Artificial Sequence
  ENSG00000163125_13 (sequence is synthesized)
gagcattctgtctgcactttccaaaacccagacacagtcagcccctgcactgcaaggcctgtcatctttacttcagagtgttactgggaacccagttccagccagtgaagctgcctcaca

SEQ ID NO: 493756 - DNA, 120 bp, Artificial Sequence
  ENSG00000163125_14 (sequence is synthesized)
gagcacttcagcctcccctgccaacaccacagtctctaccataaagggaagaaatctgccctccagtgcccaaccttttattcccaaaagcttcaactattctcctaactcatcaacttc

SEQ ID NO: 493757 - DNA, 120 bp, Artificial Sequence
  ENSG00000163125_15 (sequence is synthesized)
tgaagtctcttcaacttcagccagcaaggcctcaattgggcaaagcccagggctcccaagcactacttttaaactaccttccaactctttggggtttacagctacccacaatactagccc

SEQ ID NO: 493758 - DNA, 120 bp, Artificial Sequence
  ENSG00000163125_16 (sequence is synthesized)
tgctgccccacctactgaagttaccatctgccaatcttcagaggtctccaagccaaagctggagtcagagtccacctccccaagcctggaaatgaagattcacaacttcttaaaaggtaa

SEQ ID NO: 493759 - DNA, 120 bp, Artificial Sequence
  ENSG00000163125_17 (sequence is synthesized)
tcctggtttcagtggcttaaacttaaacatcccaatcctgagcagtttggggtccagcgccccatcagagagccatccctcagacttccagcgtggccctactagcacctcaatcgacaa

SEQ ID NO: 493760 - DNA, 120 bp, Artificial Sequence
  ENSG00000163125_18 (sequence is synthesized)
cattgatggaacccctgtacgggatgaacggagtgggacacccacccaggatgagatgatggacaagcccacatccagcagtgtagatactatgtccctgctttctaagatcattagccc

SEQ ID NO: 493761 - DNA, 120 bp, Artificial Sequence
  ENSG00000163125_19 (sequence is synthesized)
agctacccccgagagctctccaattctgtatctacatatcgaccctttggtctgggcagtgaatctccctataagcagccttctgatggaatggagagaccatcttccctgatggactct

SEQ ID NO: 493762 - DNA, 120 bp, Artificial Sequence
  ENSG00000163125_20 (sequence is synthesized)
tcacaggaaaagttctacccagatacttctttccaagaagatgaggattaccgagattttgagtattcagggcctccaccctctgccatgatgaacctagagaagaaaccagccaaatct

SEQ ID NO: 493763 - DNA, 120 bp, Artificial Sequence
  ENSG00000163125_21 (sequence is synthesized)
atcctgaaatcaagcaagctgtctgataccaccgagtaccagccaattctgtccagttatagccacagagcccaagaatttggggtaaagtctgccttccctccatctgtaagggccctc

SEQ ID NO: 493764 - DNA, 120 bp, Artificial Sequence
  ENSG00000163125_22 (sequence is synthesized)
ctggactctagtgagaactgtgaccgtctctcatcttcccctgggctatttggtgccttcagcgtaagagggaatgaacctgggtctgaccggtcaccatcaccgagtaagaatgattca

SEQ ID NO: 493765 - DNA, 120 bp, Artificial Sequence
  ENSG00000163125_23 (sequence is synthesized)
tttttcacccctgactccaaccacaatagcttgtctcaatctaccactgggcatctcagtttgccacagaagcagtacccagactctcctcacccagtcccacatcgttcccttttctct

SEQ ID NO: 493766 - DNA, 120 bp, Artificial Sequence
  ENSG00000163125_24 (sequence is synthesized)
ccgcagaacacccttgccgctcccacgggtcacccacccacgtcaggcgtggagaaagtcctggcctccaccatttccaccacgtcgacgattgaatttaagaatatgcttaaaaacgcc

SEQ ID NO: 493767 - DNA, 120 bp, Artificial Sequence
  ENSG00000163125_25 (sequence is synthesized)
tcacgtaagccctcagatgataagcattttggccaggctcccagcaagggcactccaagtgatggtgtcagtctctcaaacctcacccaacccagcttgaccgccactgatcagcagcaa

SEQ ID NO: 493768 - DNA, 120 bp, Artificial Sequence
  ENSG00000163125_26 (sequence is synthesized)
caagaagagcactaccgcatagaaacccgcgtctcctcctcctgcttagacttgcctgatagcacagaagaaaagggggcccctatagaaaccttgggttatcacagtgcatccaatagg

SEQ ID NO: 493769 - DNA, 120 bp, Artificial Sequence
  ENSG00000163125_27 (sequence is synthesized)
aggatgtcaggggagccgatccagaccgtagagtccatccgagttcctgggaagggaaatagaggacatgggcgtgaggcttcaagggtgggttggtttgatctgagcacatcaggtagc

SEQ ID NO: 493770 - DNA, 120 bp, Artificial Sequence
  ENSG00000163125_28 (sequence is synthesized)
tcttttgacaatggcccttcaagtgcctctgagttggcatcccttgggggtgggggcagcggaggcctcactggctttaaaacagcaccatacaaggaacgggcacctcaatttcaggag

SEQ ID NO: 493771 - DNA, 120 bp, Artificial Sequence
  ENSG00000163125_29 (sequence is synthesized)
agtgtcggcagctttcgttccaacagtttcaactcaacatttgagcatcatcttcccccatcccccttggaacatgggacacccttccagagagagccagtggggccatcatctgcccca

SEQ ID NO: 493772 - DNA, 120 bp, Artificial Sequence
  ENSG00000163125_30 (sequence is synthesized)
cctgtccctcctaaggatcatggtggtatcttctctcgagatgcacccactcatctaccctctgtggatctttcgaaccccttcacaaaggaggcagccctggcccatgctgccccaccc

SEQ ID NO: 493773 - DNA, 120 bp, Artificial Sequence
  ENSG00000163125_31 (sequence is synthesized)
cctcctcctggagagcacagtggaattcctttccctaccccacctcctcctccccctcctggggaacatagcagcagtggtgggagtggtgtccccttttctactccaccccctcctcca

SEQ ID NO: 493774 - DNA, 120 bp, Artificial Sequence
  ENSG00000163125_32 (sequence is synthesized)
ccccctgttgaccactctggagttgtacccttcccagccccaccactggcagagcacggagtggcaggggctgtggcagtatttcccaaggaccatagttccctccttcaagggaccctg

SEQ ID NO: 493775 - DNA, 120 bp, Artificial Sequence
  ENSG00000163125_33 (sequence is synthesized)
gctgagcattttggggtactcccaggacccagggaccacgggggccccacccaacgggacctcaacggccctggccttagccgtgtacgagagagcctcaccctaccctcccattctctg

SEQ ID NO: 493776 - DNA, 120 bp, Artificial Sequence
  ENSG00000163125_34 (sequence is synthesized)
gaacacctgggcccaccccatggaggaggaggtgggggaggcagcaacagcagcagtggcccccccttgggtccctcacacagagacaccatcagccggagtggtataatcttacggagt

SEQ ID NO: 493777 - DNA, 120 bp, Artificial Sequence
  ENSG00000163125_35 (sequence is synthesized)
ccccggccagactttcggcctagggaaccttttctcagcagagacccatttcacagtttaaagagacccaggccaccttttgctaggggccctccgttctttgcaccaaaacgcccattc

SEQ ID NO: 493778 - DNA, 120 bp, Artificial Sequence
  ENSG00000163125_36 (sequence is synthesized)
ttccctcccaggtactgatggaaaccaagggaaaggcattttgaacagtctagagaacattggaagtaggagtttggtttattgttgttgtttttatttgttttctctttctcgattttt

SEQ ID NO: 493779 - DNA, 120 bp, Artificial Sequence
  ENSG00000163125_37 (sequence is synthesized)
tttttattataacaaagggcctctcttccaaagtaagaaatcacatacgcttacgttttactattcaattcaatcctccctcccattgcacttatctaccttccccaagttgtttgtatt

SEQ ID NO: 493780 - DNA, 120 bp, Artificial Sequence
  ENSG00000163125_38 (sequence is synthesized)
aaaaaaaaaaaaagtaaagaaacacaaccaaagccatttcatttggctggggggttggggagtggggaggaaaacaatctttattttaccccatctattgaagagtattattacatttga

SEQ ID NO: 493781 - DNA, 120 bp, Artificial Sequence
  ENSG00000163125_39 (sequence is synthesized)
aataaaacttccatcagtacagataaccacatgtgcaatgttgggatgttattttgggcttggcttatcgagtagtcaatggaaggattcccgtcccctctctcggcagcttagtaactg

SEQ ID NO: 493782 - DNA, 120 bp, Artificial Sequence
  ENSG00000163125_40 (sequence is synthesized)
ctgtagccagctcggctcccttccctgtgtatctgtgtcctgctaacagccaagagatgttgcaagggaggaaatgtgagagaccttgaacctgtcaggtttatttgttttgtttttaaa

SEQ ID NO: 493783 - DNA, 120 bp, Artificial Sequence
  ENSG00000163125_41 (sequence is synthesized)
ggcatgttgaagtttagttctttacccttctcctaaaatctttttttaatcagcctcaaggttaaaataaggagtgactacagtatgtaaaataaggaaaggaagcattaatggtgtgat

SEQ ID NO: 493784 - DNA, 120 bp, Artificial Sequence
  ENSG00000163125_42 (sequence is synthesized)
gtgacctgcctgtttttttgtaaacaagagaataggaaatgttttcaaggtagtttcacatgtcttgcaccaagctcatgcctcttgcttttcctttttgactttatctccctcagtttt

SEQ ID NO: 493785 - DNA, 120 bp, Artificial Sequence
  ENSG00000163125_43 (sequence is synthesized)
tcttctgctgtggccagaaagacagtcactacagttgactattgatacaaaggtgcaacagaaatattatccctgcatttttaaatataagaagtagacattaattttaccatggtgcct

SEQ ID NO: 493786 - DNA, 120 bp, Artificial Sequence
  ENSG00000163125_44 (sequence is synthesized)
ccctaatgtaagtgatatttattggtggttttcaacaaaggttaactattaaagaaagaaatatttgtctttatcttccttttccccttgcctcagtcgtgttattcacccctattcttg

SEQ ID NO: 493787 - DNA, 120 bp, Artificial Sequence
  ENSG00000163125_45 (sequence is synthesized)
atattttaaaggaggagattcagtagcattttcctttatattatacacatgtgtctatcccatttcaaggctcaagtcttacccccacctctcgctcccaataggaaataaagaccattt

SEQ ID NO: 493788 - DNA, 120 bp, Artificial Sequence
  ENSG00000163125_46 (sequence is synthesized)
ctgcccttagttgttttacatgcaagataagtgctttccttctccctggactgaaagacttgtttgtatttctacatctagtacttgggaaatagacaatcactgtactttgagtgttta

SEQ ID NO: 493789 - DNA, 120 bp, Artificial Sequence
  ENSG00000163125_47 (sequence is synthesized)
tatctttatatctagggacactgaaaagtaaatgttgctttactacaatttttttttaatttagtgtcttaccccaaggcatactcaactgataatctccagctagatgagtaaaacagt

SEQ ID NO: 493790 - DNA, 120 bp, Artificial Sequence
  ENSG00000163125_48 (sequence is synthesized)
atgtgtttagttttccagagaattctggcaagtttcatattttcttccaagttagtatagaactaactataggaagtatggggttgctttttcctccagtagaatattaaagatggggga

SEQ ID NO: 493791 - DNA, 120 bp, Artificial Sequence
  ENSG00000163125_49 (sequence is synthesized)
gggtgggcaatgtagtgacagaaaatgattctctcagaatgaacttttcagagaaagagcagcataaaccaggtgcacatcatgatttgggagtttttgcgtaatttattctgttattta

SEQ ID NO: 493792 - DNA, 120 bp, Artificial Sequence
  ENSG00000163125_50 (sequence is synthesized)
tttgggctcgccatgtgttctggggttaggatgctgcaggtcattcatcttcttaatgcctgtctggtcttaagccaactgttctttctttcctcgaccctctctgccctgtagctctcc

SEQ ID NO: 493793 - DNA, 120 bp, Artificial Sequence
  ENSG00000163125_51 (sequence is synthesized)
ccacaaaaatgcatgataccatgaccttacgtgtgggatggggtatgtagtgtagcaaagaaaagaaagtatagttatattgagtcctaagacatttgttagggaaaagcataagagaaa

SEQ ID NO: 493794 - DNA, 120 bp, Artificial Sequence
  ENSG00000163125_52 (sequence is synthesized)
atggggtgggaggtggggaaatgatatttgactttcaaaattgaaataggttttttttttgcagaaattaaatgggatgtttttcattctagaataaaagaatgtgaattctctttgctg

SEQ ID NO: 493795 - DNA, 120 bp, Artificial Sequence
  ENSG00000163125_53 (sequence is synthesized)
ctcttgtttaagctaaaagtagtgtttacttgataaggctctctgaccatttaatttttatcagaaaatgtggggatgtcaggaaagtggcttcctgaacgttggggcgggataattgtc

SEQ ID NO: 493796 - DNA, 120 bp, Artificial Sequence
  ENSG00000163125_54 (sequence is synthesized)
ctcaaaagtatgatggttaatacatgaaaggaagactttgttggacagtttcgaaggtgggcttttaaggagttgggtttttgtggggtacttttttgttttttaagccacaaaatcctc

SEQ ID NO: 493797 - DNA, 120 bp, Artificial Sequence
  ENSG00000163125_55 (sequence is synthesized)
aatatgtttgttttaggatggaagtgaggatttgtatgagactgtcagctattaattttaaggaaatcttaaaatttacatttacatcagtaaatgaagatgacagtgtgtatatatgtg

SEQ ID NO: 493798 - DNA, 120 bp, Artificial Sequence
  ENSG00000163125_56 (sequence is synthesized)
ataaatagtgaaacagaaaagacagttctggtattcataacgtgaaagaaaggggttttattctttctgtgtctgtgatttaaaactccgtgaccatgctctgacttttgtatttcaacc

SEQ ID NO: 493799 - DNA, 120 bp, Artificial Sequence
  ENSG00000163125_57 (sequence is synthesized)
tgagtttaaacaaataaacaagatattttttaaagaaagcataacatagtgtgtcttagcaaggacatgattcatatggaagcagaatgtgagaagttgtaaggtccttggtactcactg

SEQ ID NO: 493800 - DNA, 120 bp, Artificial Sequence
  ENSG00000163125_58 (sequence is synthesized)
taaaatcacagacagagaattggtaggggttgtgaatacactagtaccacttaaagttcagtgatacagttcagaaatagggtccttaagtattttgaaagagtttactcttcagtcagc

SEQ ID NO: 493801 - DNA, 120 bp, Artificial Sequence
  ENSG00000163125_59 (sequence is synthesized)
ttagatgagagctctctccctgctcccctctaccctctcaaaagttgagagtaaatagaatttggtttgattccagggaggggaaaataagcagagaataggacttttatactttccaat

SEQ ID NO: 493802 - DNA, 120 bp, Artificial Sequence
  ENSG00000163125_60 (sequence is synthesized)
accaggaataaaatgtttgtgatatatatgggtccagcaaacctatcgagataatgtgaatacgataaacttcctaatggcaggatattcactctcaatcctgaagttaccggttcctgc

SEQ ID NO: 493803 - DNA, 120 bp, Artificial Sequence
  ENSG00000163125_61 (sequence is synthesized)
agaattgagcttcagctgttactgttttgaagccgctgtaaattactgctttccccagttcccccactattttttttaagtgggcgggggcgcctgttaagatctaaaatagatatgttg

SEQ ID NO: 493804 - DNA, 120 bp, Artificial Sequence
  ENSG00000163125_62 (sequence is synthesized)
gattgatattctcacgtgttcggtgtggaaaacaaaacaagtacatgctttagaagcaacaacaatgaaatccttttgaaatgtgtgttaatatcgtttaataaaataactagtttgaaa

SEQ ID NO: 493805 - DNA, 120 bp, Artificial Sequence
  ENSG00000163125_63 (sequence is synthesized)
acctttttacagaatttaatactgtctgaaatgtacttgttggtggtgtcctgccactaaatcccggagggaacggatttttgtctgttttgctccccatgatctaaaacagtacttggc

SEQ ID NO: 493806 - DNA, 120 bp, Artificial Sequence
  ENSG00000163125_64 (sequence is synthesized)
acaagaggttcaacaactcgttgaattaatgaatagtggacatgaacttgacaaaacaggttccctgcctcaagaggcatggccgcagtgaggagacgttaaaagaattaaaactgtata

SEQ ID NO: 493807 - DNA, 120 bp, Artificial Sequence
  ENSG00000163125_65 (sequence is synthesized)
tgtttagtgggaacacaggagcctttaaattagctcagaggatttacatagatacctgcgataaaatggggttacatctcagatctttggactctcgtgctgatgccctttccattatac

SEQ ID NO: 493808 - DNA, 120 bp, Artificial Sequence
  ENSG00000163125_66 (sequence is synthesized)
cataatgcttgttttctgtaaagactacatggattgaaaacactgtatcagctgtcttagcccattgttggaacaaggcaaggtagacataaaatctgcatatccccaccgtttgaatct

SEQ ID NO: 493809 - DNA, 120 bp, Artificial Sequence
  ENSG00000163125_67 (sequence is synthesized)
tgtttaaagttaaatatttatgaaaaatctagatctgtttgaattaaaatgtaagtagaattggttttagggatggggtcggattttgttttttagtgactacaaaagtcaagcatgtta

SEQ ID NO: 493810 - DNA, 120 bp, Artificial Sequence
  ENSG00000163125_68 (sequence is synthesized)
agtggtaatagccatctggttattttcctgcatttgcgttgagtgtttcaaatggttcattgtttgtgttaataaatactgccctgtgcccttactgttggagaatttttgcacagggtg

SEQ ID NO: 493811 - DNA, 120 bp, Artificial Sequence
  ENSG00000163125_69 (sequence is synthesized)
tcagttcttactaagctgtttggtagtaagcatatatcagcagtctttagactgtcttttgatttagatttacagtaagtggtgtactgttttgttaaaaggaattatgtattatatgca

SEQ ID NO: 493812 - DNA, 120 bp, Artificial Sequence
  ENSG00000163125_70 (sequence is synthesized)
tgtaattaagttattgaacagaagtttgtgataatctgctaccatgaccgtcattttactagaaatttgctttaaaaatggcatcttctaagaagctgttaaattcttcattttaatttg

SEQ ID NO: 493813 - DNA, 120 bp, Artificial Sequence
  ENSG00000163126_0 (sequence is synthesized)
actggggggtgtgaggaacaggggggaccatggacttcatcagcattcagcagttggtaagtggagaaagagttgaagggaaagtgttgggatttggacatggagttcctgaccctggag

SEQ ID NO: 493814 - DNA, 120 bp, Artificial Sequence
  ENSG00000163126_1 (sequence is synthesized)
cctggcctagtgactggaggaggggcccccaagaggctgtggcccgggagaagctgaaattggaagaagagaagaagaagaaacttgaaagatttaacagtaccagatttaatctggata

SEQ ID NO: 493815 - DNA, 120 bp, Artificial Sequence
  ENSG00000163126_2 (sequence is synthesized)
acctggctgacttggaaaacttggttcaaagacggaaaaagcgactgagacacagagtcccccccaggaaacctgagcccctggttaagccgcagtcccaggcccaggtggagcctgtgg

SEQ ID NO: 493816 - DNA, 120 bp, Artificial Sequence
  ENSG00000163126_3 (sequence is synthesized)
gcctggagatgttcctgaaggcagctgctgagaaccaggagtacctgattgacaagtacttgacagacggaggggaccccaatgcccatgacaagctccaccgcaccgccttgcactggg

SEQ ID NO: 493817 - DNA, 120 bp, Artificial Sequence
  ENSG00000163126_4 (sequence is synthesized)
cctgtctgaagggtcacagccagctggtgaacaagctgctggtggcaggtgccacagtggacgcgcgagacttgctggacaggacacctgtgttctgggcctgccgcggaggacatctgg

SEQ ID NO: 493818 - DNA, 120 bp, Artificial Sequence
  ENSG00000163126_5 (sequence is synthesized)
tcatcctcaaacagctgcttaaccagggagcccgggtcaatgcccgggacaagatcgggagcacccccctgcacgtggcagtgcgcacccggcaccccgactgcctggagcacctcatcg

SEQ ID NO: 493819 - DNA, 120 bp, Artificial Sequence
  ENSG00000163126_6 (sequence is synthesized)
agtgtggcgcccacctgaacgcacaggataaggaaggggacacggctctgcacgaggccgtgcggcacggcagctacaaagccatgaagctactgctgctctatggggccgagctggggg

SEQ ID NO: 493820 - DNA, 120 bp, Artificial Sequence
  ENSG00000163126_7 (sequence is synthesized)
tgcggaacgcggcctccgtgaccccggtgcagctggctcgagactggcagcgcggcatccgggaggccctgcaggcccacgtggcgcatccccgcacccggtgctgaccgcagcaccgcc

SEQ ID NO: 493821 - DNA, 120 bp, Artificial Sequence
  ENSG00000163126_8 (sequence is synthesized)
ccccgccgcgcctttcgcactgccaccattccatcctgtgccccgcccccgcgtctgcacctctgtggttcctgccctcagccctggttcctccctctctggcctgtgccgcctcagcag

SEQ ID NO: 493822 - DNA, 120 bp, Artificial Sequence
  ENSG00000163126_9 (sequence is synthesized)
ccctggcagaactgaagagcggcaccgggcccagcaggcaaagagagaggcctccctggcttcgagtgtcaggggagccgcgttccctcccagggctggagcagaggaccacaaggcagc

SEQ ID NO: 493823 - DNA, 120 bp, Artificial Sequence
  ENSG00000163126_10 (sequence is synthesized)
agggagcagtcccaagctggagccacccagggctgggtctgggagtcctcagtgtccacttgtcccaggttagggggcttgccttgctctctccagggccagtctgtgtgtgtggggact

SEQ ID NO: 493824 - DNA, 120 bp, Artificial Sequence
  ENSG00000163126_11 (sequence is synthesized)
cagcccgtggccggcagatgccatccaggatgtacaaggtgcagccaaggcaggccatgcaggggccgggcctgtctgcagctggtggatgcctgtgggcatggctttctctggggaccc

SEQ ID NO: 493825 - DNA, 120 bp, Artificial Sequence
  ENSG00000163126_12 (sequence is synthesized)
cattcctgtcagtagcaaccctggcagtgtccggagcggctctagacaactttggtcataggaactctggaggtgggttctggtcatctgaggtggctactcaacaggtttgaggcccca

SEQ ID NO: 493826 - DNA, 120 bp, Artificial Sequence
  ENSG00000163126_13 (sequence is synthesized)
cagcaacagaagtccaggacccactaggttgcctcagaagccctaagactgatgagctggagcgcgcatttgagagaagcctcgcacccactgtgtactggccccgctcaggccggcctg

SEQ ID NO: 493827 - DNA, 120 bp, Artificial Sequence
  ENSG00000163126_14 (sequence is synthesized)
gcacaccgttgcctgctggcggctctcatggggaagcgcctgggcactggggattgcttgtggcccactcaactcttggggcagtggcccgtaaccctagtttgcctgaggcccttatgt

SEQ ID NO: 493828 - DNA, 120 bp, Artificial Sequence
  ENSG00000163126_15 (sequence is synthesized)
ccccttatgttcctggtactggagcttgagctcttgcctggaacgctgcagctgcacccaccctgcttgatcccacctgggaggccaggacactgaggagctctgaacccagcccacagg

SEQ ID NO: 493829 - DNA, 120 bp, Artificial Sequence
  ENSG00000163126_16 (sequence is synthesized)
gaagcagaggaaggtgagcccccgccgccccccagcccttcccatcccttccctgctccctggtggtctaaggacccaagctccctagacttcctcttccaccgtctgtacgtttcaaat

SEQ ID NO: 493830 - DNA, 120 bp, Artificial Sequence
  ENSG00000163126_17 (sequence is synthesized)
tacactggtgtaggcctgtactgctggtggggctgggcccctaaacgccagaaagtgaatcttaagaagctctgccctaaactgagaaccacatgctgagggaagggctgaaaggtgaag

SEQ ID NO: 493831 - DNA, 120 bp, Artificial Sequence
  ENSG00000163126_18 (sequence is synthesized)
gctcagcctccctcacatgggtcctgggttacattaggtaccgggctgattgataggcatttggccatggttccttttcgtctacctttgggggccttctcaggcccagaacaaggctgt

SEQ ID NO: 493832 - DNA, 120 bp, Artificial Sequence
  ENSG00000163126_19 (sequence is synthesized)
tgttactatgtggaaaagctgaccagtgctgcacactaggggcacacacctttccatgagcagctcctgccctgtggcgacagccagcgtgcacccagacgctggtgccatggcgaagca

SEQ ID NO: 493833 - DNA, 120 bp, Artificial Sequence
  ENSG00000163126_20 (sequence is synthesized)
ggcgttcaagaccatggagaagacaactcctcatctagaaaatgaggacacctcagtgacaaacacacctttttataccaatcagtatcctctgttcattaaaactggctatccattaca

SEQ ID NO: 493834 - DNA, 120 bp, Artificial Sequence
  ENSG00000163126_21 (sequence is synthesized)
ggggcccaccatacgccggtgtgacctcatcttaactaattacatcctcagtgactctgtttccaaataaggtcacattctgaggtacctggggttagtacttcatacgaatcttgggga

SEQ ID NO: 493835 - DNA, 120 bp, Artificial Sequence
  ENSG00000163126_22 (sequence is synthesized)
gatacaagtcaatccataacacacacgctcacacacacacagtctattcaatctcctggcgtgggattagaataagaaactgcattagtacgagccagcagtgttccttggtgggctgca

SEQ ID NO: 493836 - DNA, 120 bp, Artificial Sequence
  ENSG00000163126_23 (sequence is synthesized)
tgggacccgtgggccagactggtgaagctgtgacatcttgggcacctgcggccttcgggagtgatttggtcttgtcttcaactgaaccagccgcagtcccaggcccaggtggagcctgtg

SEQ ID NO: 493837 - DNA, 120 bp, Artificial Sequence
  ENSG00000163126_24 (sequence is synthesized)
tggcagcagctgcagctgcaggagcgctgccttcagtgtgttcaagtcctggcctaggaggctgcagggattttcactcttatgggcatgaatccagtggcacctgcagacggaggagag

SEQ ID NO: 493838 - DNA, 120 bp, Artificial Sequence
  ENSG00000163126_25 (sequence is synthesized)
ggagcggcccatcgcgtggtgggggaagtggcaattccattcagggacctggccctgggaaggggaccgcgtggggtctctaggggtggctgcactccctctgcctaatcttccatctct

SEQ ID NO: 493839 - DNA, 120 bp, Artificial Sequence
  ENSG00000163126_26 (sequence is synthesized)
ggtgctcggcgtacagcagacgctggaggagatggacttcgagaggggctgctgagaggggtcacggggacatctgctccctcctcctgcaacacagcccagccctgaaggccatccggg

SEQ ID NO: 493840 - DNA, 120 bp, Artificial Sequence
  ENSG00000163126_27 (sequence is synthesized)
accgaaaggcacggctagcatgtgacctgctgccttgcaacagtgacctgcgggacctgctatccagctgagccgccaccctatctccagctgcctttaaagggtaagtggagaaagagt

SEQ ID NO: 493841 - DNA, 120 bp, Artificial Sequence
  ENSG00000163126_28 (sequence is synthesized)
caggtgcaacaggcagctactctcctgggggccacacggcggagagaggattcgatgcagcatgacgatcccttcctcccaggcatgacctcttctcagaacacgggaactgacaacact

SEQ ID NO: 493842 - DNA, 120 bp, Artificial Sequence
  ENSG00000163126_29 (sequence is synthesized)
gcgagtggcaactcagcagatctggggctgcctagtgagccgttaaacgcctgggttccgcccagggctgccttccaccgggacgccgggcctgctgtggctggaccctacaggagacaa

SEQ ID NO: 493843 - DNA, 120 bp, Artificial Sequence
  ENSG00000163126_30 (sequence is synthesized)
gggaaggagaattaacatcaaagctggttgaaaatgaagcagtgggctcatgcccatctgcacaaggccccccaggcagagctggcagagctgggatccagctccaggtccgtgcacctc

SEQ ID NO: 493844 - DNA, 120 bp, Artificial Sequence
  ENSG00000163126_31 (sequence is synthesized)
catgacatggatgcagtttagacaaggatgcctccctccagtggagaacacaaatgcctcacacatcagccagcctgcacatgcaggctaacaagggcactgactctggaaacacaggct

SEQ ID NO: 493845 - DNA, 120 bp, Artificial Sequence
  ENSG00000163126_32 (sequence is synthesized)
ctcctgcgacagtccacacggggcagctgagtggggccacccagcctgactgtccttgggaggatttcctaagtctttttcttcttaaagtaaatatatatgctgtccatcctacataaa

SEQ ID NO: 493846 - DNA, 120 bp, Artificial Sequence
  ENSG00000163131_0 (sequence is synthesized)
ctccttgttgctttgaaatcttagaagagagcccactaattcaaggactcttactgtgggagcaactgctggttctatcacaatgaaacggctggtttgtgtgctcttggtgtgctcctc

SEQ ID NO: 493847 - DNA, 120 bp, Artificial Sequence
  ENSG00000163131_1 (sequence is synthesized)
tgcagtggcacagttgcataaagatcctaccctggatcaccactggcatctctggaagaaaacctatggcaaacaatacaaggaaaagaatgaagaagcagtacgacgtctcatctggga

SEQ ID NO: 493848 - DNA, 120 bp, Artificial Sequence
  ENSG00000163131_2 (sequence is synthesized)
aaagaatctaaagtttgtgatgcttcacaacctggagcattcaatgggaatgcactcatacgatctgggcatgaaccacctgggagacatgaccagtgaagaagtgatgtctttgatgag

SEQ ID NO: 493849 - DNA, 120 bp, Artificial Sequence
  ENSG00000163131_3 (sequence is synthesized)
ttccctgagagttcccagccagtggcagagaaatatcacatataagtcaaaccctaatcggatattgcctgattctgtggactggagagagaaagggtgtgttactgaagtgaaatatca

SEQ ID NO: 493850 - DNA, 120 bp, Artificial Sequence
  ENSG00000163131_4 (sequence is synthesized)
aggttcttgtggtgcttgctgggctttcagtgctgtgggggccctggaagcacagctgaagctgaaaacaggaaagctggtgtctctcagtgcccagaacctggtggattgctcaactga

SEQ ID NO: 493851 - DNA, 120 bp, Artificial Sequence
  ENSG00000163131_5 (sequence is synthesized)
aaaatatggaaacaaaggctgcaatggtggcttcatgacaacggctttccagtacatcattgataacaagggcatcgactcagacgcttcctatccctacaaagccatggatcagaaatg

SEQ ID NO: 493852 - DNA, 120 bp, Artificial Sequence
  ENSG00000163131_6 (sequence is synthesized)
tcaatatgactcaaaatatcgtgctgccacatgttcaaagtacactgaacttccttatggcagagaagatgtcctgaaagaagctgtggccaataaaggcccagtgtctgttggtgtaga

SEQ ID NO: 493853 - DNA, 120 bp, Artificial Sequence
  ENSG00000163131_7 (sequence is synthesized)
tgcgcgtcatccttctttcttcctctacagaagtggtgtctactatgaaccatcctgtactcagaatgtgaatcatggtgtacttgtggttggctatggtgatcttaatgggaaagaata

SEQ ID NO: 493854 - DNA, 120 bp, Artificial Sequence
  ENSG00000163131_8 (sequence is synthesized)
ctggcttgtgaaaaacagctggggccacaactttggtgaagaaggatatattcggatggcaagaaataaaggaaatcattgtgggattgctagctttccctcttacccagaaatctagag

SEQ ID NO: 493855 - DNA, 120 bp, Artificial Sequence
  ENSG00000163131_9 (sequence is synthesized)
gatctctcctttttataacaaatcaagaaatatgaagcactttctcttaacttaatttttcctgctgtatccagaagaaataattgtgtcatgattaatgtgtatttactgtactaatta

SEQ ID NO: 493856 - DNA, 76 bp, Artificial Sequence
  ENSG00000163131_10 (sequence is synthesized)
atataggggaggccaaggcaggcatatcaacttgaggccaggagttaaagagcagcctggctaacatggtgaaacc

SEQ ID NO: 493857 - DNA, 66 bp, Artificial Sequence
  ENSG00000163131_11 (sequence is synthesized)
attagccgttccttgaacccaagaggttgaggctatgttgagctgagatcacaccactgtactcca

SEQ ID NO: 493858 - DNA, 120 bp, Artificial Sequence
  ENSG00000163131_12 (sequence is synthesized)
cactgtactccagcctggatgacagagtggagactctgtttcaaaaaaacagaaaagaaaatatagtttgattcttcatttttttaaatttgcaaatctcaggataaagtttgctaagta

SEQ ID NO: 493859 - DNA, 120 bp, Artificial Sequence
  ENSG00000163131_13 (sequence is synthesized)
taaagtttgctaagtaaattagtaatgtactatagatataactgtacaaaaattgttcaacctaaaacaatctgtaattgcttattgttttattgtatactctttgtctttttaagaccc

SEQ ID NO: 493860 - DNA, 120 bp, Artificial Sequence
  ENSG00000163131_14 (sequence is synthesized)
ctaatagccttttgtaacttgatggcttaaaaatacttaataaatctgccatttcaaatttctatcattgccacataccattcttattcctaggcaactattaataatctatcctgagaa

SEQ ID NO: 493861 - DNA, 120 bp, Artificial Sequence
  ENSG00000163131_15 (sequence is synthesized)
tattaattgtggtattctggtgatggggtttagcaactttgatggaagaaaatattaggctataaatgtcctaaggactcagattgtatctttgtacagaagaggattcaaaacgccacg

SEQ ID NO: 493862 - DNA, 120 bp, Artificial Sequence
  ENSG00000163131_16 (sequence is synthesized)
tgagaccttgtctccacaaaaataaaaaagaaactatccaggagtggtggtgtgtgcctgtggtccctgctatgcagatgtctaagacaggaggatcacaagagcccaggaggttgagaa

SEQ ID NO: 493863 - DNA, 90 bp, Artificial Sequence
  ENSG00000163131_17 (sequence is synthesized)
gaggattcaacacatatttttatattatgttaaagtaaagaaatgcataaaagacaagcactttggaagaattattttaatgatcaacaa

SEQ ID NO: 493864 - DNA, 120 bp, Artificial Sequence
  ENSG00000163131_18 (sequence is synthesized)
aagacaagcactttggaagaattattttaatgatcaacaatttaatgtattagtccaaattatttttacgtagtcatcaacaatttgaccagggcctttatttggcaaataactgagcca

SEQ ID NO: 493865 - DNA, 120 bp, Artificial Sequence
  ENSG00000163131_19 (sequence is synthesized)
accagaataaaataaccaatactccactgctcatatttttatctaattcagatggatcttccttacaactgctctagattagtagatgcatctaagcaggcagcaggaactttaaatttt

SEQ ID NO: 493866 - DNA, 120 bp, Artificial Sequence
  ENSG00000163131_20 (sequence is synthesized)
ttaagttcatgtctatgacatgaacaatgtgtgggataatgtcattaatatatcctaaattaacctaaacgtatttcactaactctggctccttctccataaagcacattttaaggaaca

SEQ ID NO: 493867 - DNA, 120 bp, Artificial Sequence
  ENSG00000163131_21 (sequence is synthesized)
aaggaacaagaattgctaaatataaaaacataaataataccataatacatggctatcatcaaaagtgtatagaatattatagtttaaaagtatttagttgattacttttcagttttgttt

SEQ ID NO: 493868 - DNA, 120 bp, Artificial Sequence
  ENSG00000163131_22 (sequence is synthesized)
acaggcgtgagccactgagcccagcctacttttcagtttttaacataatttttgttttatccacaacttttcaagtattgaaagtagaataaaaacatgggttcttagtctttagctatc

SEQ ID NO: 493869 - DNA, 120 bp, Artificial Sequence
  ENSG00000163131_23 (sequence is synthesized)
ttagtctttagctatctgttaaagcctatgaatgccttcttaaaatcatgtttttaaatgcataaaatatataggattacaaaggaatctaattatatcgaaatacagttattaaaatgt

SEQ ID NO: 493870 - DNA, 120 bp, Artificial Sequence
  ENSG00000163131_24 (sequence is synthesized)
atgttaaaagataagtttgttatatattaatatgcatgcttctttataaatgcattaaataagagttaatagctatcctaaatttgaaatagtgataagcataatgaaaatagatgcaaa

SEQ ID NO: 493871 - DNA, 120 bp, Artificial Sequence
  ENSG00000163131_25 (sequence is synthesized)
taatgtgatatgaaaatatctgggtttttcttttgatgatgaagtattgctaatattaccgtggtttatgaactatgttcagaattgaagaaaatcctaactttcagttagaggttagtg

SEQ ID NO: 493872 - DNA, 120 bp, Artificial Sequence
  ENSG00000163131_26 (sequence is synthesized)
acggggttcaggacaccctacacaaaatacagcactttgacatattgaatattttaagctgaaggcatttgaggaaattgcagaagcaggaaggtgactctgaccttctgcctgctgttc

SEQ ID NO: 493873 - DNA, 120 bp, Artificial Sequence
  ENSG00000163131_27 (sequence is synthesized)
tccccagaagcagccataaaacctgggaaggattttctgaccttcccctgaagtagatcataagactgtcatgtaagaggtgctctcctggcacccagagaaaaggagcatccttacctc

SEQ ID NO: 493874 - DNA, 120 bp, Artificial Sequence
  ENSG00000163131_28 (sequence is synthesized)
caaaagcacagggacacaaagaggaatctaaacaaacaggcctctcagtttcccccagtttattacatttagcttgttcacactttgccctatgacatttctacatcactggctgctctt

SEQ ID NO: 493875 - DNA, 120 bp, Artificial Sequence
  ENSG00000163131_29 (sequence is synthesized)
catcaaacctactataaaaaacattcaagttcaactgtttctttgggcctttatttccttatggagcccctcgtgtcgtgtaaaacttatattaaataaatgtgcatgcttttctcttgc

SEQ ID NO: 493876 - DNA, 80 bp, Artificial Sequence
  ENSG00000163132_0 (sequence is synthesized)
agggcccggagccggcgagtgctcccgggaactctgcctgcgcggcggcagcgaccggaggccaggcccagcacgccgga

SEQ ID NO: 493877 - DNA, 120 bp, Artificial Sequence
  ENSG00000163132_1 (sequence is synthesized)
gctcgcagaggccggccgcgctcccagcccgcccggagcccatgcccggcggctggccagtgctgcggcagaagggggggcccggctctgcatggccccggctgctgacatgacttcttt

SEQ ID NO: 493878 - DNA, 120 bp, Artificial Sequence
  ENSG00000163132_2 (sequence is synthesized)
cccggctgctgacatgacttctttgccactcggtgtcaaagtggaggactccgccttcggcaagccggcggggggaggcgcgggccaggcccccagcgccgccgcggccacggcagccgc

SEQ ID NO: 493879 - DNA, 120 bp, Artificial Sequence
  ENSG00000163132_3 (sequence is synthesized)
catgggcgcggacgaggagggggccaagcccaaagtgtccccttcgctcctgcccttcagcgtggaggcgctcatggccgaccacaggaagccgggggccaaggagagcgccctggcgcc

SEQ ID NO: 493880 - DNA, 120 bp, Artificial Sequence
  ENSG00000163132_4 (sequence is synthesized)
cgggtggctcggcgcagccactgggcgtcccgccggggtcgctgggagccccggacgcgccctcttcgccgcggccgctcggccatttctcggtggggggactcctcaagctgccagaag

SEQ ID NO: 493881 - DNA, 120 bp, Artificial Sequence
  ENSG00000163132_5 (sequence is synthesized)
actcctcaagctgccagaagatgcgctcgtcaaagccgagagccccgagaagcccgagaggaccccgtggatgcagagcccccgcttctccccgccgccggccaggcggctgagcccccc

SEQ ID NO: 493882 - DNA, 120 bp, Artificial Sequence
  ENSG00000163132_6 (sequence is synthesized)
agcctgcaccctccgcaaacacaagacgaaccgtaagccgcggacgcccttcaccaccgcgcagctgctggcgctggagcgcaagttccgccagaagcagtacctgtccatcgccgagcg

SEQ ID NO: 493883 - DNA, 120 bp, Artificial Sequence
  ENSG00000163132_7 (sequence is synthesized)
cgcggagttctccagctcgctcagcctcactgagacgcaggtgaagatatggttccagaaccgccgcgccaaggcaaagagactacaagaggcagagctggagaagctgaagatggccgc

SEQ ID NO: 493884 - DNA, 120 bp, Artificial Sequence
  ENSG00000163132_8 (sequence is synthesized)
ctgccttcggcctctccttccctctcggcggccccgcagctgtagcggccgcggcgggtgcctcgctctacggtgcctctggccccttccagcgcgccgcgctgcctgtggcgcccgtgg

SEQ ID NO: 493885 - DNA, 120 bp, Artificial Sequence
  ENSG00000163132_9 (sequence is synthesized)
gactctacacggcccatgtgggctacagcatgtaccacctgacatagagggtcccaggtcgcccacctgtgggccagccgattcctccagccctggtgctgtacccccgacgtgctcccc

SEQ ID NO: 493886 - DNA, 120 bp, Artificial Sequence
  ENSG00000163132_10 (sequence is synthesized)
tgctcggcaccgccagccgccttccctttaaccctcacactgctccagtttcacctctttgctccctgagttcactctccgaagtctgatccctgccaaaaagtggctggaagagtccct

SEQ ID NO: 493887 - DNA, 120 bp, Artificial Sequence
  ENSG00000163132_11 (sequence is synthesized)
tagtactcttctagcatttagatctacactctcgagttaaagatggggaaactgagggcagagaggttaacagatttatctaaggtccccagcagaattgacagttgaacagagctagag

SEQ ID NO: 493888 - DNA, 120 bp, Artificial Sequence
  ENSG00000163132_12 (sequence is synthesized)
agaggccatgtctcctgcatagcttttccctgtcctgacaccaggcaagaaaagcgcagagaaatcggtgtctgacgattttggaaatgagaacaatctcaaaaaaaaaaaaaaaaaaaa

SEQ ID NO: 493889 - DNA, 120 bp, Artificial Sequence
  ENSG00000163132_13 (sequence is synthesized)
aaaaaaaagaaaagagaaaaaaaagactagccagccaggaagatgaatcctagcttcttccattggaaaatttaagacaagttcaacaacaaaacatttgctctggggggcagggaaaac

SEQ ID NO: 493890 - DNA, 120 bp, Artificial Sequence
  ENSG00000163132_14 (sequence is synthesized)
aaacacagatgtgttgcaaaggtaggttgaagggacctctctcttaccagtaccagaaacacaattgtaaaattaaaaaaaaaaaaaaactctttctatttaacagtacatttgtgtggc

SEQ ID NO: 493891 - DNA, 120 bp, Artificial Sequence
  ENSG00000163132_15 (sequence is synthesized)
tggctctcaaacatccctttggaagggattgtgtgtactatgtaatatactgtatatttgaaattttattatcatttatattatagctatatttgttaaataaattaattttaagctaca

SEQ ID NO: 493892 - DNA, 120 bp, Artificial Sequence
  ENSG00000163132_16 (sequence is synthesized)
taagatgtggacatcgagccttcaacgtgggtatttttctcctggaatcttagtttcttcatttgcaaaaagtagacaggaacttctcccctgcggggttgcaatgggaattggagaaaa

SEQ ID NO: 493893 - DNA, 120 bp, Artificial Sequence
  ENSG00000163138_0 (sequence is synthesized)
atttccccaaacgcaggcgctcggtggcggtagccgcggttgttggccgaccgagtgccggtcataagccccccccggtggggggcagctggtgtgcggatcgcggcgggagagaggcgc

SEQ ID NO: 493894 - DNA, 120 bp, Artificial Sequence
  ENSG00000163138_1 (sequence is synthesized)
ggtaggaacgggtccccggagccgtgaaccgcgggtacaggtgtcctgtctgcgctctctgccaagccggcttgcttcctgatctgttgctagggccgctggaccccgttgctaaggacc

SEQ ID NO: 493895 - DNA, 120 bp, Artificial Sequence
  ENSG00000163138_2 (sequence is synthesized)
cttgagatcgtgagcgcttggagtgtacccctcctttcctggggtagagggtcagtcgagagtagccttcgttaaccttaattgaaactggagtgaaagggaagcaatgcagaaatcaga

SEQ ID NO: 493896 - DNA, 120 bp, Artificial Sequence
  ENSG00000163138_3 (sequence is synthesized)
gggctctggaggtacacagttgaaaaacagagcaacaggtaactatgatcaaaggacatcatcaagcacacagttaaaacacaggaatgcagttcagggaagcaaatcctcattgtcaac

SEQ ID NO: 493897 - DNA, 120 bp, Artificial Sequence
  ENSG00000163138_4 (sequence is synthesized)
cagttctccagagtctgcaagaaaacttcatcctagaccaagtgataaactgaaccctaaaacaattaatccgtttggtgaacagtcacgagtgccttctgcatttgcagctatttactc

SEQ ID NO: 493898 - DNA, 120 bp, Artificial Sequence
  ENSG00000163138_5 (sequence is synthesized)
taaaggaggtattccttgcagattggtacatggttcagtaaaacacagattacagtgggaatgtcctcctgaaagtctttcatttgatccacttcttattactttagctgagggtctgag

SEQ ID NO: 493899 - DNA, 120 bp, Artificial Sequence
  ENSG00000163138_6 (sequence is synthesized)
agagactaagcatccatacacttttgtgtcaaaggagggttttagagaattacttttggtcaaaggtgctcctgaaaaagctattcctttgctacctagactgattcctgtgctaaaggc

SEQ ID NO: 493900 - DNA, 120 bp, Artificial Sequence
  ENSG00000163138_7 (sequence is synthesized)
agctctggtccattcggatgatgaagtgtttgaaagaggattgaatgctctagttcagctaagtgtcgttgttggtccttctctaaacgaccatctgaagcatctgcttacaagcctttc

SEQ ID NO: 493901 - DNA, 120 bp, Artificial Sequence
  ENSG00000163138_8 (sequence is synthesized)
caagagattaatggacaagaaattcaaagagccaatcaccagcgcattacaaaagctagagcaacatggtggaagtgggagccttagcatcatcaaatctaaaattccaacatactgctc

SEQ ID NO: 493902 - DNA, 120 bp, Artificial Sequence
  ENSG00000163138_9 (sequence is synthesized)
catatgctgttgaagaagggagccaacaaaaattgttttttctacctgttgacgtgtcaagcactaactgtgggtactcatttattttattcttttgtaaatcacagccaccattcatta

SEQ ID NO: 493903 - DNA, 120 bp, Artificial Sequence
  ENSG00000163138_10 (sequence is synthesized)
tttactaggttaagatgaatagacactgaatcaaagttattcatcaacaaaaaagaacagttactaatggaaagttattaaaataagttctataagagtacaattttgaggtttattttt

SEQ ID NO: 493904 - DNA, 120 bp, Artificial Sequence
  ENSG00000163138_11 (sequence is synthesized)
tgtatttttattatttgtgcgaagaaccattattgagtttgcaagataagatgtatttgtattttctagtgtctttttatttataacaacacttttttggcaatcagtttgtagctgtgc

SEQ ID NO: 493905 - DNA, 120 bp, Artificial Sequence
  ENSG00000163138_12 (sequence is synthesized)
ccttatttttatagatagtttgccatttcttgggtttaatgtttaacaaggctatagaagtttaaaatagtggacaaatgtttgtgaatacacttttaaaaaattgttttaaaagagaaa

SEQ ID NO: 493906 - DNA, 120 bp, Artificial Sequence
  ENSG00000163138_13 (sequence is synthesized)
agcggtcttgctttgttgcccagactggagtgcagtggcataatcatagctcaccgcaagcctcaaatttttgtgctcagatgatccttttcatctcagcctcctgattagctgggacta

SEQ ID NO: 493907 - DNA, 120 bp, Artificial Sequence
  ENSG00000163138_14 (sequence is synthesized)
cgtgtgccaccatgcccagctaattttgaaatttgcttgtagagatgggatctcactctgttgtccaggctggtctcagaattctggtgagtgatcctcccacagtggacttccaaagtg

SEQ ID NO: 493908 - DNA, 120 bp, Artificial Sequence
  ENSG00000163138_15 (sequence is synthesized)
gtgtgagccaccatgcctggccccatgaatacactactaatattatttgtaaatatgtattttataatgtacaatgcttggaaaattttcagagtattctagtttaaaaaattttttcta

SEQ ID NO: 493909 - DNA, 120 bp, Artificial Sequence
  ENSG00000163138_16 (sequence is synthesized)
taaaaaattttttctaattctgtaaattctattacaagtatgttgtttattacaactcattacaactacctaaattttaggtgttaactgtatttaagtaaatgtgttatttttgcattt

SEQ ID NO: 493910 - DNA, 120 bp, Artificial Sequence
  ENSG00000163138_17 (sequence is synthesized)
catagccagaaaatactgatgttcacttaaagatattcagcaattaaaatgttaaaacttgtacatgcattcattgattttgttgtgcttatgtttagcaatttttaagaagcttttaaa

SEQ ID NO: 493911 - DNA, 120 bp, Artificial Sequence
  ENSG00000163138_18 (sequence is synthesized)
atataatatagacatagttcagaattttgatgtaatagaagcaattccctctggctacaacagctgcctgcctgctggccttgcttttacctgttttcattgcattgagcaccatccaga

SEQ ID NO: 493912 - DNA, 120 bp, Artificial Sequence
  ENSG00000163138_19 (sequence is synthesized)
gctatctgccatctagaaagtactgtaagatttaattaattacaaaatttcttggaaaagacctgtaacatagacagtagagttataaacattttattttgcttttattttttctttttg

SEQ ID NO: 493913 - DNA, 120 bp, Artificial Sequence
  ENSG00000163138_20 (sequence is synthesized)
aaatacaaaatgtgcacattgagtttacacaaacacgtgatggcaaatttcagtgtacatgtattgtactactcttaatttctacactggtgatagcagggcagctttcaacatcctatc

SEQ ID NO: 493914 - DNA, 120 bp, Artificial Sequence
  ENSG00000163138_21 (sequence is synthesized)
tctacaccagaatagatacctgatttattgttgcaaagacagttgcaaatttcctccttctgtagcctcttggtctttgtgatatttctacaaaacagggacgatgtgtgtggctttagt

SEQ ID NO: 493915 - DNA, 120 bp, Artificial Sequence
  ENSG00000163138_22 (sequence is synthesized)
aatgtggcaactttacagttttggctaagatgattaaaaataatctgaattatgatgagctaaatcatactgtaatctggattagttgttgagcacttattttctactaaatcttggtag

SEQ ID NO: 493916 - DNA, 120 bp, Artificial Sequence
  ENSG00000163138_23 (sequence is synthesized)
tagttgtcaatgtaatggaaccactggtgctttcaaagtgaattttgcttgctaattttgcttgctgtttgttcttagtagacagtggggtagtcaaggtttctttctttgtccctgaat

SEQ ID NO: 493917 - DNA, 120 bp, Artificial Sequence
  ENSG00000163138_24 (sequence is synthesized)
ggcttgtaatataaataaacatgctgtaaggaagtcaggggaaagaggacagatttggcctttaatgctgttaggattacttgttattaagcattactatatactggaggatagatatcc

SEQ ID NO: 493918 - DNA, 120 bp, Artificial Sequence
  ENSG00000163138_25 (sequence is synthesized)
tgaccctttgcatatgtctgtaaacatccttgttttgtttgatgccttcttcaacttccacttaatgattgatactaatgattgatacaatagaaaacagcctgtaagaaagattgaaca

SEQ ID NO: 493919 - DNA, 120 bp, Artificial Sequence
  ENSG00000163138_26 (sequence is synthesized)
tttattaggcatatgctgatatctgataataaactaatttttaaatgtttaataatttttaaatgtttaaaaatgccagataaaactaatttctaacagaaggtgggaaggccatagaaa

SEQ ID NO: 493920 - DNA, 120 bp, Artificial Sequence
  ENSG00000163138_27 (sequence is synthesized)
ctggaactatgtgtttttttaattgttgtaatcttgtttccttaaagtatataaatggaatttaaatggaattacagcattcaaacatgaaaattaatttaatttctggaaattaaatgc

SEQ ID NO: 493921 - DNA, 120 bp, Artificial Sequence
  ENSG00000163138_28 (sequence is synthesized)
agatgtcactatattagaaaaccattcaaaatcctaggactgaatacatacaaatgagtagcaaaaaacactgatattttaaaatcactgatatgtgaaagcctcaataatcccatggct

SEQ ID NO: 493922 - DNA, 120 bp, Artificial Sequence
  ENSG00000163138_29 (sequence is synthesized)
aaggaaccaataaaactatatgccagattctattacttttgaatattcacagagtatgaaatgagttagaccatcccctgaactcagtggcattatgaaaaggatgcaaatttataactg

SEQ ID NO: 493923 - DNA, 120 bp, Artificial Sequence
  ENSG00000163138_30 (sequence is synthesized)
aaagctcaaatcttttggggattgctttatattaaaacaaagcttgtttgcataatatgcttcagtgtcaagctgagcaatctatgctaaaagtggtagctccaactttaagggtggtag

SEQ ID NO: 493924 - DNA, 120 bp, Artificial Sequence
  ENSG00000163138_31 (sequence is synthesized)
aatagttcacatttgtctgttggattcaggatctatttgacaagttaaatcacattttcaaagagctgcatggagcgcattatgttttcatcctgtaagggagaaacacagagcgattaa

SEQ ID NO: 493925 - DNA, 120 bp, Artificial Sequence
  ENSG00000163138_32 (sequence is synthesized)
attcagcatatctgcaaggaaaagtacactattttgcccctgagtattgcctcctcccatcaaccacctcaaccacctatgccaaaagctcaaatattaagtgtttgcaaatgtaaatgc

SEQ ID NO: 493926 - DNA, 120 bp, Artificial Sequence
  ENSG00000163138_33 (sequence is synthesized)
cattctattctatccattttccacatagatgactatgaaggacccattttatattttgtggagtctattgaccaggcattaaaccactttatttaaatctttacttggtattaatagagg

SEQ ID NO: 493927 - DNA, 120 bp, Artificial Sequence
  ENSG00000163138_34 (sequence is synthesized)
atatttctcaaatcataatgccaaaatggaaactacagaggtgcagaggtgtgtcaaagcaaatgagaattttggcattctatgtagatcacaggccaaatcacacagacttttatacag

SEQ ID NO: 493928 - DNA, 120 bp, Artificial Sequence
  ENSG00000163138_35 (sequence is synthesized)
gtacaaggaaaatttgtgtgtatgagccagcagttcatgaagattggaggctggcgcataggaggcagggtggtggattaagaggtaacatgtttgcagtaatcatctctctttctgtct

SEQ ID NO: 493929 - DNA, 120 bp, Artificial Sequence
  ENSG00000163138_36 (sequence is synthesized)
gctagttatggctaaagctgcatggcctgaaggagcctttaaaaatgaatggtctctcaattacagagaaagaattggggagcagaaaccactgctcagtggctgtgttcagtttagcat

SEQ ID NO: 493930 - DNA, 120 bp, Artificial Sequence
  ENSG00000163138_37 (sequence is synthesized)
attctttagaaatgagttaggggacagactttgggcattattggagcacttgtcagttgcatgtgaatagcacttactgagctgtttatggtagtggtaaatggtggctgaaccaataat

SEQ ID NO: 493931 - DNA, 120 bp, Artificial Sequence
  ENSG00000163138_38 (sequence is synthesized)
ggcttccactgctagaaaccaagtaacatcaccgtcaagcagcttaatgtcaccaaattaattctctcaaagaccactgcatggaaatccaagttgagagacaagcagacatccagaaaa

SEQ ID NO: 493932 - DNA, 120 bp, Artificial Sequence
  ENSG00000163138_39 (sequence is synthesized)
gtaagaacaacaatttaaaaataaagagaaaaactaaagaaacaacggatttctttgttttcaggattatttgaaaaattctttttttctttttttagttttgaggcagagtctatttct

SEQ ID NO: 493933 - DNA, 90 bp, Artificial Sequence
  ENSG00000163138_40 (sequence is synthesized)
ctttttttctttttttagttttgaggcagagtctatttctgttgcccatcattctggagtgcagtggcacaatcatggctcaacagggag

SEQ ID NO: 493934 - DNA, 120 bp, Artificial Sequence
  ENSG00000163138_41 (sequence is synthesized)
tgcccagctaacttaatttttttttgtagagatagatagggtcttgctatgttgcccacattggactcaaaatcctggccttaagttatcttcccgcctcagcctcccatagtgctggga

SEQ ID NO: 493935 - DNA, 120 bp, Artificial Sequence
  ENSG00000163138_42 (sequence is synthesized)
gctactgtaccaggccttaacaatttttaactgtggttctgcccacacatcaagtcaaataattctaagtaagctaacactggtttctttgataacaggctactacctggagttctcttc

SEQ ID NO: 493936 - DNA, 120 bp, Artificial Sequence
  ENSG00000163138_43 (sequence is synthesized)
agagaaaattttccactgtttattttttgtgactgaagaccattagtgagttcagtcaaagagccatttcttgtccacatacactaaaacaatgacttttctcttagaaatcagatagaa

SEQ ID NO: 493937 - DNA, 120 bp, Artificial Sequence
  ENSG00000163138_44 (sequence is synthesized)
gcttggcctgttgtgatgccatacttggctatctaggaattctaatgctgtggagatatgatagataatatatgagtgatgctaagttttggcaaagagcaattcaaatctcatgtatgt

SEQ ID NO: 493938 - DNA, 120 bp, Artificial Sequence
  ENSG00000163138_45 (sequence is synthesized)
tttatcctccatgaatactctctaaggaatttgggaatcaacacagtacatgtacaacttttgtatccccagggtttcctccatagcctgactcagtgggcactctaaatgttgattatg

SEQ ID NO: 493939 - DNA, 120 bp, Artificial Sequence
  ENSG00000163138_46 (sequence is synthesized)
taattggtgcttgttttcagagtggtaggcttatgctgcatgttgtagaagtggtaaacttaggcatatgatctctatatttcgcccagttcatggtagctagctgctaatactcagttt

SEQ ID NO: 493940 - DNA, 120 bp, Artificial Sequence
  ENSG00000163138_47 (sequence is synthesized)
agctgttatgatagctgaattgatagttattacactttcattacttactttttggcagctttcaatgaactcatctatggtaacaaccccatctttatttttgtccattttctgttcagg

SEQ ID NO: 493941 - DNA, 120 bp, Artificial Sequence
  ENSG00000163138_48 (sequence is synthesized)
aagaaaacaaaaattgtatttagacttatcccttaataccctcacacctggaccaaatgagctgaagctgataaaaagaaaacctagctgcttatttatttcacgtggaggaactgtttc

SEQ ID NO: 493942 - DNA, 120 bp, Artificial Sequence
  ENSG00000163138_49 (sequence is synthesized)
agagcaggaaccagcagttttttagagataaaaatgatagggccaaatgcttctggcttttcccttttcaatataatgtggtgaagatgtagagtcactctgtcctaggtaaaatcccac

SEQ ID NO: 493943 - DNA, 120 bp, Artificial Sequence
  ENSG00000163138_50 (sequence is synthesized)
cttctagatgtgacagagcttgcgcaatttgctgaaactttcagagcttgctttttgtctcatctgtaaaatgagattaatgaggatttataggattcttgtaaaaactgaatgaaaaca

SEQ ID NO: 493944 - DNA, 120 bp, Artificial Sequence
  ENSG00000163138_51 (sequence is synthesized)
aaacttgtgaaacatgagaactgtttagtgttgtatcttggatttagtgaatgttcaataaatgcagttatcagcattgtaaattcaaaaccaaagctattaaattaataggatgctaaa

SEQ ID NO: 493945 - DNA, 120 bp, Artificial Sequence
  ENSG00000163138_52 (sequence is synthesized)
actgtaatttgtcgttaagtttgttacaggaacaactttttgacgtgaaggaagatagaaatttagccataaaattccatccaaaacttccactgaattggagcttctcaaaacagaagt

SEQ ID NO: 493946 - DNA, 120 bp, Artificial Sequence
  ENSG00000163138_53 (sequence is synthesized)
aaaagacaagataattatgtcctaaaaatcaatggtccttctgatggagtttggatttcttctggcaagcacttgaagacagtggaaagttttaaagaagaggagtgaagccactggctt

SEQ ID NO: 493947 - DNA, 120 bp, Artificial Sequence
  ENSG00000163138_54 (sequence is synthesized)
tgactgggtgagagaaagaagcaaaggcaaaggaatgtccagctaggcagaaaactggataaaatgacgaaaagagaaactgtctacaaaagcatctatggttctggttttactcaactg

SEQ ID NO: 493948 - DNA, 120 bp, Artificial Sequence
  ENSG00000163138_55 (sequence is synthesized)
tgttactcagggccagataactacatacttgaagacatctttagaggatgtactaaaggtaaaaagggacattttaagtaattagaggaagtaatgaacctcaaatcagcctttctgtat

SEQ ID NO: 493949 - DNA, 120 bp, Artificial Sequence
  ENSG00000163138_56 (sequence is synthesized)
gctacatatattttagttaatgcttcagtcagatggaaaatttgttttttgcttctagatgtcctgtgttgaaggttatttttaaaattctaggttttgttgactatcttctgattgtag

SEQ ID NO: 493950 - DNA, 120 bp, Artificial Sequence
  ENSG00000163138_57 (sequence is synthesized)
ctctacatgttatttaatgaaaaaccacttgaaagggttaccaaggataagatttttaaagcttgctttcacaaacaactcatgctccaggcttgtcagtggcatgcttccagtctcttt

SEQ ID NO: 493951 - DNA, 120 bp, Artificial Sequence
  ENSG00000163138_58 (sequence is synthesized)
gtagccttcgttaaccttaattgaaactgtctctttcagatacccaaatccacccatgccaaagtcctccagtctgctctccgtatccgtggttgggtcaaatctatagatgtggaaccc

SEQ ID NO: 493952 - DNA, 120 bp, Artificial Sequence
  ENSG00000163138_59 (sequence is synthesized)
aggcttcagattggaagaatagattacctcctggatagttaagaggagattggaattagctctcaatgagaacctggaatgaaaaacacatgagcaatctacaagaatgaaggataaatg

SEQ ID NO: 493953 - DNA, 120 bp, Artificial Sequence
  ENSG00000163138_60 (sequence is synthesized)
actgaggaccagaaagaccaaagtacgtatatcctagcagatgacaacagaggaccagatgccacactcctccaagcctcatcctctcaacacaattccaaggagagaaagggagtgaaa

SEQ ID NO: 493954 - DNA, 120 bp, Artificial Sequence
  ENSG00000163138_61 (sequence is synthesized)
ggtaggaacgggtccccggagccgtgaaccgcgggtacagaaacttgtgttgttccccctccaggagcttctcaaaacagaagtcaggcacaatattaaatacttgttgaatgatcacag

SEQ ID NO: 493955 - DNA, 70 bp, Artificial Sequence
  ENSG00000163138_62 (sequence is synthesized)
ttccaagagattaatggacaagaaattcaaagagccaatcaccagcgcattacaaaagctagagcaacat

SEQ ID NO: 493956 - DNA, 120 bp, Artificial Sequence
  ENSG00000163138_63 (sequence is synthesized)
gtggcggtagccgcggttgttggccgaccgagtgccggtcataagccccccccggtggggggcagctggtgtgcggatcgcggcgggagagaggcgcgtttgttacaggaacaacttttt

SEQ ID NO: 493957 - DNA, 120 bp, Artificial Sequence
  ENSG00000163141_0 (sequence is synthesized)
cccttccacacctccctccttggaggcaagagctacaacagctgagacagaaaagaggtaaggaagtgttgggggctgggacaaccagctccccaacaactcctaggtgtttaaagaagg

SEQ ID NO: 493958 - DNA, 120 bp, Artificial Sequence
  ENSG00000163141_1 (sequence is synthesized)
aggcaggaagacttgtgaagatgggaactatacaagaggcaggaaaaaagacagatgttggggtcagggagattgcagaagcaccagaactaggagcagccctgagacatggggagttgg

SEQ ID NO: 493959 - DNA, 120 bp, Artificial Sequence
  ENSG00000163141_2 (sequence is synthesized)
agctgaaggaggaatggcaggatgaagaattccctagattgcttcctgaggaggctggcacttctgaagatcctgaagaccctaaaggagattcacaggcagctgcaggtacccccagca

SEQ ID NO: 493960 - DNA, 120 bp, Artificial Sequence
  ENSG00000163141_3 (sequence is synthesized)
ctttagccctgtgtggccagcgccccatgcgcaagcgtctttctgccccagagttgcggctgagtctgactaaggggcctggaaatgatggagcttcacccacccagtctgcaccttcct

SEQ ID NO: 493961 - DNA, 120 bp, Artificial Sequence
  ENSG00000163141_4 (sequence is synthesized)
ctcctgatggcagttctgacctggagatagacgaattggagacaccttcagactcggagcagctggacagtggacatgaatttgaatgggaagatgaactaccccgggcagagggtctgg

SEQ ID NO: 493962 - DNA, 120 bp, Artificial Sequence
  ENSG00000163141_5 (sequence is synthesized)
gcaccagtgagacagctgaaaggctgggccgaggttgtatgtgggatgtgactggagaagatggacatcactggagggtgttccgaatgggaccacgggagcagcgcgtagacatgactg

SEQ ID NO: 493963 - DNA, 120 bp, Artificial Sequence
  ENSG00000163141_6 (sequence is synthesized)
tcattgagccctataagaaagtcctgtctcatggaggttaccacggtgatggcctcaatgctgtcatcctttttgcttcctgttatctacccagaagcagcatccccaactacacctatg

SEQ ID NO: 493964 - DNA, 120 bp, Artificial Sequence
  ENSG00000163141_7 (sequence is synthesized)
tcatggaacacttgtttaggtatatggtgggaactctggagctgctagtagctgaaaattacctgcttgttcatttgagtggaggcacaagcagggcccaagttccacctctaagctgga

SEQ ID NO: 493965 - DNA, 120 bp, Artificial Sequence
  ENSG00000163141_8 (sequence is synthesized)
tacgtcagtgttaccgtaccctggatcggcggctacggaaaaacctgcgagccctggtggttgtccatgctacatggtatgtgaaagcatttctggcactgcttcggcccttcatcagtt

SEQ ID NO: 493966 - DNA, 120 bp, Artificial Sequence
  ENSG00000163141_9 (sequence is synthesized)
ctgtcagacagctggaccgggatctccatggctcaggagggacatagcacaggactggataaaaggccttagaaccagttagtgatctgcctacacctgaatccctgaaacatctgaact

SEQ ID NO: 493967 - DNA, 120 bp, Artificial Sequence
  ENSG00000163141_10 (sequence is synthesized)
gttttgtaaatcatcttatccccaacctcagtaccaccggatcttcacttctcagtgggattttgtcctttgcatgaccctactttcagcagggctttgaggctgggaaactgatctgct

SEQ ID NO: 493968 - DNA, 120 bp, Artificial Sequence
  ENSG00000163141_11 (sequence is synthesized)
gatctgctgggtgactttcattccagttgctgggacggaaggctgaatgtagggtcattttgtatgggatatgcagagctctgggtttttttgttttttgttttttgagacggagtctcg

SEQ ID NO: 493969 - DNA, 75 bp, Artificial Sequence
  ENSG00000163141_12 (sequence is synthesized)
cattcttctgcctcagcctcagcgagtagctgagactaccggcgcacgccaccacgcccagctaattgttttgta

SEQ ID NO: 493970 - DNA, 120 bp, Artificial Sequence
  ENSG00000163141_13 (sequence is synthesized)
tgagccaccgcgctcggccagagctctgggttttaatcctactttagctgtagaaccttgggcaaataacttcatctttttgggtcctaattttcctcctgtctaactggagggactgtg

SEQ ID NO: 493971 - DNA, 120 bp, Artificial Sequence
  ENSG00000163141_14 (sequence is synthesized)
atccttccaccttggatggaagaggcttacctgacagccagcctgcctgctgggagccaggagagtcagctcattaaatcttgaagaaccgctgtatgccctttttccttctaagtcatg

SEQ ID NO: 493972 - DNA, 120 bp, Artificial Sequence
  ENSG00000163141_15 (sequence is synthesized)
tctgctgcctgtgagcctgggaaggagtgctttcaaaacctgtatttttgccctctttagtaaatttagaactgtagaggctaataaactgcgatgagacatttaagctctgctccaaag

SEQ ID NO: 493973 - DNA, 120 bp, Artificial Sequence
  ENSG00000163141_16 (sequence is synthesized)
aagtgaacgactctttcaccaccccttgcatcccaaaccttcggttctggcagagttcttgccgcagaggttccttaggagcaccccgcgcggcccgcgcgagcgcgcctgcgcgtcgaa

SEQ ID NO: 493974 - DNA, 120 bp, Artificial Sequence
  ENSG00000163141_17 (sequence is synthesized)
atacaagaggcaggaaaaaagacagatgttgggtggagcaactgctacagaggtaaatatgattaactttacattccatctttcgtctgctcccaaacttaacagcaggtaatctgcttc

SEQ ID NO: 493975 - DNA, 120 bp, Artificial Sequence
  ENSG00000163141_18 (sequence is synthesized)
tagcaagtggtgaaggtaagagaagcatctgtataggaggcaagagatctgagtccttttgaaggcctatcctctgctctgtatctcaattactgttcttcatttcaattattcttacct

SEQ ID NO: 493976 - DNA, 120 bp, Artificial Sequence
  ENSG00000163141_19 (sequence is synthesized)
gcataggtgataaaatcatggtggggagagagaacctatatattgagtcctggcttgatgcctttggtgtatatgtctgccgccttttaatctcttcccctctagattgcttcctgagga

SEQ ID NO: 493977 - DNA, 120 bp, Artificial Sequence
  ENSG00000163141_20 (sequence is synthesized)
tgtgagccaccacgcccggccagaaacacaacggtttctactggtttttttgcttatttgtgtaaagagcaactttgagagggatatatggagtctggaaaggagaacaaattgccttcc

SEQ ID NO: 493978 - DNA, 120 bp, Artificial Sequence
  ENSG00000163141_21 (sequence is synthesized)
tagactcaaccgagactggcccccactagaaaatgcactctcctccccaaaacccgccccctcacaggaggcagggtttttcttttgggcaaacctgctcctggggagaggagtggcaaa

SEQ ID NO: 493979 - DNA, 120 bp, Artificial Sequence
  ENSG00000163141_22 (sequence is synthesized)
gtgaataaacagtccggagagacttccccaccacccagctcttactgggtcaaatctcgggttcctcaaggagacaagactgtaagagagtttgcagagaagagatgagggtggttttag

SEQ ID NO: 493980 - DNA, 120 bp, Artificial Sequence
  ENSG00000163141_23 (sequence is synthesized)
gtaggaaatgtcagtatggtatggaactggggaacaggattccaggataattccctggtttaaaaataaaggaagtttctgtaatatgttgtacctgataaatctgcctgtgttctttta

SEQ ID NO: 493981 - DNA, 120 bp, Artificial Sequence
  ENSG00000163141_24 (sequence is synthesized)
ttttctaaccctcaccctccagaatggccatcaggaaagctgaaccagaaccgagtttaggtccaggttctcgttctggcaaatctttctccttaccttcttcctccacccctccactta

SEQ ID NO: 493982 - DNA, 120 bp, Artificial Sequence
  ENSG00000163141_25 (sequence is synthesized)
tgccatgttttcccttagccactccccagctcggtggaggaaaggcaggcctaactaggtaccgtcttcccgactttgctcaatgatagctgggtgggtctagctgggttccagccactt

SEQ ID NO: 493983 - DNA, 120 bp, Artificial Sequence
  ENSG00000163141_26 (sequence is synthesized)
atcttggtcatggagcgatgtagaagcatgcaaaaggaacttacgcgagggtagagcacaagatggaaatggagcagaaaaagaccaggtggtcgggcgcggtggctcacgtctgtaatc

SEQ ID NO: 493984 - DNA, 120 bp, Artificial Sequence
  ENSG00000163141_27 (sequence is synthesized)
aaaaaaaaaaaaaaaaaaaaatcttgagagtttttttaaaaatgaggatcatggagggctaaataagatgggtggagctgagattacagctgacggaatggggattagacccaagtacca

SEQ ID NO: 493985 - DNA, 120 bp, Artificial Sequence
  ENSG00000163145_0 (sequence is synthesized)
ttgcacgccggggtccttgcccgctccctctctctgccaccgctcaaagcctgggagaacgcttttgaaagcgaatcaggaaattacttatcaatctgaagccccaaagaattatgaata

SEQ ID NO: 493986 - DNA, 120 bp, Artificial Sequence
  ENSG00000163145_1 (sequence is synthesized)
atcctcgctgccaaagggaaggggattttgagcaaaagctccacatctgcgcacactagagttcaaagactccagctgttggaaggtcttgtgagcaatagccaaagatgtttgtcttgc

SEQ ID NO: 493987 - DNA, 120 bp, Artificial Sequence
  ENSG00000163145_2 (sequence is synthesized)
tctatgttacaagttttgccatttgtgccagtggacaaccccggggtaatcagttgaaaggagagaactactcccccaggtatatctgcagcattcctggcttgcctggacctccagggc

SEQ ID NO: 493988 - DNA, 120 bp, Artificial Sequence
  ENSG00000163145_3 (sequence is synthesized)
cccctggagcaaatggttcccctgggccccatggtcgcatcggccttccaggaagagatggtagagacggcaggaaaggagagaaaggtgaaaagggaactgcaggtttgagaggtaaga

SEQ ID NO: 493989 - DNA, 120 bp, Artificial Sequence
  ENSG00000163145_4 (sequence is synthesized)
ctggaccgctaggtcttgccggtgagaaaggggaccaaggagagactgggaagaaaggacccataggaccagagggagagaaaggagaagtaggtccaattggtcctcctggaccaaagg

SEQ ID NO: 493990 - DNA, 120 bp, Artificial Sequence
  ENSG00000163145_5 (sequence is synthesized)
gagacagaggagaacaaggggacccggggctgcctggagtttgcagatgtggaagcatcgtgctcaaatccgccttttctgttggcatcacaaccagctacccagaagaaagactaccta

SEQ ID NO: 493991 - DNA, 120 bp, Artificial Sequence
  ENSG00000163145_6 (sequence is synthesized)
ttatatttaacaaggtcctcttcaacgagggagagcactacaaccctgccacagggaagttcatctgtgctttcccagggatctattacttttcttatgatatcacattggctaataagc

SEQ ID NO: 493992 - DNA, 120 bp, Artificial Sequence
  ENSG00000163145_7 (sequence is synthesized)
atctggcaatcggactggtacacaatgggcaataccggataaagaccttcgacgccaacacaggaaaccatgatgtggcttcggggtccacagtcatctatctgcagccagaagatgaag

SEQ ID NO: 493993 - DNA, 120 bp, Artificial Sequence
  ENSG00000163145_8 (sequence is synthesized)
tctggctggagattttcttcacagaccagaatggcctcttctcagacccaggttgggcagacagcttattctccgggtttctcttatacgttgacacagattacctagattccatatcag

SEQ ID NO: 493994 - DNA, 120 bp, Artificial Sequence
  ENSG00000163145_9 (sequence is synthesized)
aagatgatgaattgtgatcaggaccaagatccctgtggtaaacactctgattgaatctggggttccagaaggtggaacaagcaggaatgggatccaaagagactcccactcagattctaa

SEQ ID NO: 493995 - DNA, 120 bp, Artificial Sequence
  ENSG00000163145_10 (sequence is synthesized)
agcatttaaagacaattctagcagaatttatcaaaacaagatgaaacacagaaaagttgaaaccacaacaaaatgaattctattaaagaatagccccagatataaattctcttgaaagca

SEQ ID NO: 493996 - DNA, 120 bp, Artificial Sequence
  ENSG00000163145_11 (sequence is synthesized)
atgttcataaatatttaagcaaattaaagacaatgttaacaaattttctattaaatgccctgagtgataaaaccagttggcaataatattgccttattaaatcttcaaaaaatatatttt

SEQ ID NO: 493997 - DNA, 120 bp, Artificial Sequence
  ENSG00000163145_12 (sequence is synthesized)
agtctgttatttaagaaaaacataacatcccaaaatctttgacaattctcgaaaggctatatagtaagtcaaaaaccaaaggtaagagatgctaactatttttcaagcaagctacagaga

SEQ ID NO: 493998 - DNA, 120 bp, Artificial Sequence
  ENSG00000163145_13 (sequence is synthesized)
aatgataaatgttttttgttttattatttattccttcatgtttgtatatattcactcaacaaccctttaatgagcctgtaaggaccagacactgtggcgctgaatcagatttaataatga

SEQ ID NO: 493999 - DNA, 120 bp, Artificial Sequence
  ENSG00000163145_14 (sequence is synthesized)
gttaagacaaagcccctacctatgggctagtgtgtggtgatcaaactatcacaattcagtgtgatgagcagcatagcaaacagatggatttgaagctaaaagcacacagggtctgctatt

SEQ ID NO: 494000 - DNA, 120 bp, Artificial Sequence
  ENSG00000163145_15 (sequence is synthesized)
cctgaggctgggggccagagaagcttttacgcatggaaaaacactaatcatgccaaggtgtatgtgtttaagggggtgtgatggatgcaaagggaatgaggaattcagcactgcattctc

SEQ ID NO: 494001 - DNA, 120 bp, Artificial Sequence
  ENSG00000163145_16 (sequence is synthesized)
tttgcaccctcaatgcatgattggtattctcaacagcaaaggggtgaaaaatctagagacagaggaggcctggcaggggtgataaaaatggagattgaaatgaagagaaatagccagcag

SEQ ID NO: 494002 - DNA, 120 bp, Artificial Sequence
  ENSG00000163145_17 (sequence is synthesized)
gtgattcttctgaatcctttagtgtgatggtttcccaagacaaacatttgtcctaatagctttctcataaatatgggcaccactttacattgtggtaagacattgcttctcatggatctg

SEQ ID NO: 494003 - DNA, 120 bp, Artificial Sequence
  ENSG00000163145_18 (sequence is synthesized)
aaggcatatgttcactgatttacgagtaagctgatgagagcaatgaacaggagaaggagggagagagccaaatgtctgagtaaacagatatcccttccaagtctcacacctcccttagtc

SEQ ID NO: 494004 - DNA, 120 bp, Artificial Sequence
  ENSG00000163145_19 (sequence is synthesized)
ccactcttgcttgtgtcagcaccttgttcttcactgaactgcaattcttcaattattctcttccatgattttgtctgatctaccatttctatggtttatggtaatagtattccctttatc

SEQ ID NO: 494005 - DNA, 120 bp, Artificial Sequence
  ENSG00000163145_20 (sequence is synthesized)
cctcccttttggtaacttccaatcctccttctatgtattcctttctctgctcattgacttataaatagttttcatacctcttatgtttgaatcaccatgctagattctgtgaagacagaa

SEQ ID NO: 494006 - DNA, 120 bp, Artificial Sequence
  ENSG00000163145_21 (sequence is synthesized)
gagtatcaagattaatatattaatagtatagctctgactggtaaatttcttttttttaatcttccccaatttaaattttttaatttaaaagtaaattttactgtcgaaaatgcaaacttg

SEQ ID NO: 494007 - DNA, 120 bp, Artificial Sequence
  ENSG00000163145_22 (sequence is synthesized)
gggagggcggaaacatcacacacaaggtttccacttcacacttggagggttgcatggcggctgggcaaaggtgctccccacttcccagatggtgcggcggctggccagaggcactcttca

SEQ ID NO: 494008 - DNA, 120 bp, Artificial Sequence
  ENSG00000163145_23 (sequence is synthesized)
cttcccagacagaggggcggccgggcagaggtgctcctcacttcccagagggtgcaggagccagctctgactagtaaatttctaaggataccagaaaggaaatggcatgcacacacacaa

SEQ ID NO: 494009 - DNA, 120 bp, Artificial Sequence
  ENSG00000163145_24 (sequence is synthesized)
aaaatacctaaattttggatgagaaaatgataaaatatgctaagttctaggctggaaataagggcaaaatgctgtgaaagaagaggaaatgtttacttccaaattaggatgtgacagaga

SEQ ID NO: 494010 - DNA, 120 bp, Artificial Sequence
  ENSG00000163145_25 (sequence is synthesized)
agggatagggaaatcctctctgctcattgggccttacatgatgggtgacacttggagtggcacaagttgggggaaagcgcacttgagacagaggtaatgatggggacgaagtgagaacag

SEQ ID NO: 494011 - DNA, 120 bp, Artificial Sequence
  ENSG00000163145_26 (sequence is synthesized)
agacccagaaggagaatcaatggaccatatttgtaagagctttgaaagccagcctgagaattggaggatttattcataagaaagtgtagagaccctgtgtatttcagagctggatactgc

SEQ ID NO: 494012 - DNA, 120 bp, Artificial Sequence
  ENSG00000163145_27 (sequence is synthesized)
cattaccacagatgaaagttgcaatgatctagcagttgtgtgcaaaggcaaggcttgcttttcctgtctttcaaccctatcttgcttttcctgtctttcaaccctatcttgctttcattg

SEQ ID NO: 494013 - DNA, 120 bp, Artificial Sequence
  ENSG00000163145_28 (sequence is synthesized)
tcttcatcttcctgccatactttgtgcacttattgctctccttctgagtcaggacatgtgtacaggagaccaagaacaatgagtattagaaaaaaaggagacagcaaaggtggtttgagg

SEQ ID NO: 494014 - DNA, 120 bp, Artificial Sequence
  ENSG00000163145_29 (sequence is synthesized)
tagtcacctgcttacagataacagccaaagatagaattccaagttataaagcataaaaaagagccaacagaagtaactaatccgggaaaagtgaacatatgggccctttaaagactacaa

SEQ ID NO: 494015 - DNA, 120 bp, Artificial Sequence
  ENSG00000163145_30 (sequence is synthesized)
gatttgctagataaactggaaatggagaagttattgcagacagtcatgaaccacaaatcactgtgattaaaattttcttctgatcgtaatccacgaatgcattcattttttggacattgc

SEQ ID NO: 494016 - DNA, 120 bp, Artificial Sequence
  ENSG00000163145_31 (sequence is synthesized)
ttacttatcttttaaatgtttcttttattacaaagcctattttgagtagcttttaaaactgaatttcctttaattggtttgaagcctagagatgaatttcgttttcaaatatctggtggg

SEQ ID NO: 494017 - DNA, 120 bp, Artificial Sequence
  ENSG00000163145_32 (sequence is synthesized)
atggtaatggggattagagaactgacatgagaaaagaggagctgttttggtattaaacgaataaaatcttaagcaaatataggtgtcttttattcttaaaaaatagcagatacagtttat

SEQ ID NO: 494018 - DNA, 120 bp, Artificial Sequence
  ENSG00000163145_33 (sequence is synthesized)
ccacatttgtaaatatttgtataaagaaagtagcaaaacagttttggtttaaaaagttccaagtctcattgcaatcattctttgtaaaggctgacttgtaatgaatatgtattaagcaat

SEQ ID NO: 494019 - DNA, 120 bp, Artificial Sequence
  ENSG00000163145_34 (sequence is synthesized)
atttattgactatacaccatcttgttctagaagagtttaaagccacttaagaagataaataagatataaaaagaaaacagcagtcaaaagcagatgagaagaaatgggaaaaacaaaaaa

SEQ ID NO: 494020 - DNA, 120 bp, Artificial Sequence
  ENSG00000163145_35 (sequence is synthesized)
aaaagaaaataatgaggctaatataatgctgtgtgtacatgaacatgaatgtgcctgtgttacacattttcaggccacaaatgtttctttgtgcccctgcatgcacaagggtatttccag

SEQ ID NO: 494021 - DNA, 120 bp, Artificial Sequence
  ENSG00000163145_36 (sequence is synthesized)
gtcatttatcattgtgaacagtgttgcttatgataaaaaatagattctataaactctaaatatactttttttctaccactctgtgtaaaagatcatgaacgtaaataaattttagatatg

SEQ ID NO: 494022 - DNA, 120 bp, Artificial Sequence
  ENSG00000163145_37 (sequence is synthesized)
gaggccacaacacacagagatggagaagctctaaacttaccactgaaggaaagcaggcacttaaagtttatcccaaacaaaactgtaattttaactggtccccgagttgagcctcactcg

SEQ ID NO: 494023 - DNA, 120 bp, Artificial Sequence
  ENSG00000163145_38 (sequence is synthesized)
atgaatgacttccagggcctttggctctttgggactaaacgagaaaattatttttagcacaactatttggaaatctttgagaatttggatctgttattctgtctggtaccaaagcaagtt

SEQ ID NO: 494024 - DNA, 120 bp, Artificial Sequence
  ENSG00000163145_39 (sequence is synthesized)
gggagaaggagtgggaggttgtttaaactgagaaagacagttgcaaaacttcgtacaacagcatgagctccaagcttcaaacgcattctcatgctcagacgagcactttatttttcatca

SEQ ID NO: 494025 - DNA, 120 bp, Artificial Sequence
  ENSG00000163145_40 (sequence is synthesized)
agttattttttgcattgttttggagtagcttcgaataataaacacatatttctgctttaaatttttaatagttaactacattcatgggacaaccaaagcaagaaagcctcatgttttggg

SEQ ID NO: 494026 - DNA, 120 bp, Artificial Sequence
  ENSG00000163145_41 (sequence is synthesized)
cagagagattaccacattgtatgaccaagcaagggttactattacgattttcattctgcagctgtgaaaatcaagactcagaaacattaagggccatgtccagtgataggtatcttaaaa

SEQ ID NO: 494027 - DNA, 120 bp, Artificial Sequence
  ENSG00000163145_42 (sequence is synthesized)
gatcgagagtcagatctccagcccttgcatctgcctccacctccctacagtggacacagcactggcttgacagtcggctcttaggttcctgtccttccactaactagctgtgtgatgctg

SEQ ID NO: 494028 - DNA, 120 bp, Artificial Sequence
  ENSG00000163145_43 (sequence is synthesized)
agaagaacactacccactcctacttgttcttaactagtgtatatattaagctctttgaaatttaactacattcatgggacaaccaaagcaagaaagcctcatgttttgggggaaagtttg

SEQ ID NO: 494029 - DNA, 120 bp, Artificial Sequence
  ENSG00000163145_44 (sequence is synthesized)
caatgtccagacaagcaagtgcataatggaacgcaacttcatggaacccaactcagacaggattgacagttgaagaaccaactctttaattgtgagaaattaaaacaaatctactgaatg

SEQ ID NO: 494030 - DNA, 120 bp, Artificial Sequence
  ENSG00000163154_0 (sequence is synthesized)
acactaagtgaagcttctccattctgtaagctttccgggaacatccaaggcaagactggcacccagcacagcagtgactgaccacataccccactctccaggacccatggagtccttcag

SEQ ID NO: 494031 - DNA, 120 bp, Artificial Sequence
  ENSG00000163154_1 (sequence is synthesized)
ctcaaagagcctggcactgcaagcagagaagaagctactgagtaagatggcgggtcgctctgtggctcatctcttcatagatgagacaagcagtgaggtgctagatgagctctaccgtgt

SEQ ID NO: 494032 - DNA, 120 bp, Artificial Sequence
  ENSG00000163154_2 (sequence is synthesized)
gtccaaggagtacacgcacagccggccccaggcccagcgcgtgatcaaggacctgatcaaagtggccatcaaggtggctgtgctgcaccgcaatggctcctttggccccagtgagctggc

SEQ ID NO: 494033 - DNA, 120 bp, Artificial Sequence
  ENSG00000163154_3 (sequence is synthesized)
cctggctacccgctttcgccagaagctgcggcagggtgccatgacggcacttagctttggtgaggtagacttcaccttcgaggctgctgttctggctggcctgctgaccgagtgccggga

SEQ ID NO: 494034 - DNA, 120 bp, Artificial Sequence
  ENSG00000163154_4 (sequence is synthesized)
tgacccaggtctgctcacggccctctatgggcctgacttcactcagcaccttggcaagatctgtgacggactcaggaagctgctagacgaagggaagctctgagagccctgagcctagca

SEQ ID NO: 494035 - DNA, 120 bp, Artificial Sequence
  ENSG00000163154_5 (sequence is synthesized)
cattccaccttgacaaaatggttgactgagaaaacacagataatgggcttcctaaccctgctcacctggcactaacacttttcaatcttcaggcttcattccttcccaagagtgcttttg

SEQ ID NO: 494036 - DNA, 120 bp, Artificial Sequence
  ENSG00000163154_6 (sequence is synthesized)
actctgagaccagcccacccccaaacagctagtggagaaggagcaatgctgaggggtgaggcctctctcccactccagccccaggacaggaaacagaactgcctgaaaaaggtgaagtga

SEQ ID NO: 494037 - DNA, 120 bp, Artificial Sequence
  ENSG00000163154_7 (sequence is synthesized)
aacttggatctctatttctcccataagggacttctgaaacagggaagccccctcccatgtgaaccaaggaaaggaggcacagcccagagaacccctttggggatactaaagacagaagag

SEQ ID NO: 494038 - DNA, 120 bp, Artificial Sequence
  ENSG00000163154_8 (sequence is synthesized)
gggaaggtggcccttagagacagagcttggacagatgccagaggctctgttccagagtgcaggaagaaggggctagggcaggggagattctcataggggaaataaaactactaaaatatg

SEQ ID NO: 494039 - DNA, 120 bp, Artificial Sequence
  ENSG00000163155_0 (sequence is synthesized)
cttttctcaaagaccttgccgctcaactggatccaggcccttgcatcttggcggatctgaggcgtttggagggacaacaacctagatgtggagccgaaatttgagggtgtgacctatctt

SEQ ID NO: 494040 - DNA, 120 bp, Artificial Sequence
  ENSG00000163155_1 (sequence is synthesized)
atgcggagcggacctttgaggatctctgagtggaaggtgtactacaaattcttgcaatcctcacgctcttcgtctgcggcgacagttcacctggggtgggcctgatttgttcctgactct

SEQ ID NO: 494041 - DNA, 120 bp, Artificial Sequence
  ENSG00000163155_2 (sequence is synthesized)
agcaaacaaaccccgggaccggggagagctgggatgttggagcgccctgaggccaggctacttgggggcaaactgaggaaagagtgttgaggattatttctagagttcaaaggtcagagg

SEQ ID NO: 494042 - DNA, 120 bp, Artificial Sequence
  ENSG00000163155_3 (sequence is synthesized)
tcaatgtagcgaggagttgtgggggagtccaaagtcggaggggtgcttaggggagaattagggagggactgaatactcaagggacagatttgtggataagtagcttggagggaggagaaa

SEQ ID NO: 494043 - DNA, 120 bp, Artificial Sequence
  ENSG00000163155_4 (sequence is synthesized)
ccgggagggggcagatggcgtagtgctggggaggcggggacacaggggaagagagagggggaaaggaatcccctgaatattcattcccagacttcaggcctgtcagtcgcagtctcggtc

SEQ ID NO: 494044 - DNA, 120 bp, Artificial Sequence
  ENSG00000163155_5 (sequence is synthesized)
gtacctcccctagttgcaaccttagctgttggcagggtgaagagatggcttccccgtctagacagcccccgccaggggggtcaggactgcttcaagggagccgggctcgttcatatggaa

SEQ ID NO: 494045 - DNA, 120 bp, Artificial Sequence
  ENSG00000163155_6 (sequence is synthesized)
gcctggtgcaatcggcctgctccccagtgagggaaagacgcctggagcatcagttggagcccggagacaccctggctggactagcactcaaatatggggtgacgatggaacagattaaac

SEQ ID NO: 494046 - DNA, 120 bp, Artificial Sequence
  ENSG00000163155_7 (sequence is synthesized)
gtgcaaaccgcctttatactaatgactccatcttcctgaagaaaaccctctacatccccatcctgacagagcccagagacctgttcaatggtttggactctgaggaagagaaagatggag

SEQ ID NO: 494047 - DNA, 120 bp, Artificial Sequence
  ENSG00000163155_8 (sequence is synthesized)
aggaaaaagtacacccaagtaacagtgaagtttggccacactcaactgagaggaagaaacaagagacaggagcaggacgtgccaatggtgaagtcctccccacacctggccaggaaaccc

SEQ ID NO: 494048 - DNA, 120 bp, Artificial Sequence
  ENSG00000163155_9 (sequence is synthesized)
ccacgcccatccatgacctctctgcctctgatttccttaagaagcttgattcacagatcagcctgtccaagaaggctgctgctcagaagctgaaaaaaggggaaaatggggtacctgggg

SEQ ID NO: 494049 - DNA, 120 bp, Artificial Sequence
  ENSG00000163155_10 (sequence is synthesized)
ccgctgacccgtacctctcggacccggacactacgggaccaggaggatgaaatcttcaaactctgatgtccccagaactgactgagagaagcaagatgttgaaagagaaacttcaggggg

SEQ ID NO: 494050 - DNA, 120 bp, Artificial Sequence
  ENSG00000163155_11 (sequence is synthesized)
agaggagcctgaggtgaggctcaagaacatggcttatgagcctgcctccctccactccagccatcctccccagcctccttgtctgccaaaaattccttggcctggggcagttttattggc

SEQ ID NO: 494051 - DNA, 120 bp, Artificial Sequence
  ENSG00000163155_12 (sequence is synthesized)
aagattagggaatgggaactggacctttcccagttcttgggctgaatctagagttgagtcctttagactcaaaaggctctttttatatccttgttgcctttcctatcctttttacctttc

SEQ ID NO: 494052 - DNA, 120 bp, Artificial Sequence
  ENSG00000163155_13 (sequence is synthesized)
cctggccttagaacagggaagcagagactccccctcagcttcttcctcatctccaactatgtgacataatttatttggtgctaatattgaagtaatatttatttgctatattttatttct

SEQ ID NO: 494053 - DNA, 120 bp, Artificial Sequence
  ENSG00000163155_14 (sequence is synthesized)
tcccactcttagctgaaaaatggaatttctatagccctggggtgaggagaacccgggaacagtgagccagtgactgctggttctccactttccccaccttgttagccaaacatgttattg

SEQ ID NO: 494054 - DNA, 120 bp, Artificial Sequence
  ENSG00000163155_15 (sequence is synthesized)
aggatgaggcaatcggtgatatagcccaccacagagaatggatgactgttggccttttctccaatctcaaagtgacagatttgggctgattctttttttttttttttttggtaccccatt

SEQ ID NO: 494055 - DNA, 120 bp, Artificial Sequence
  ENSG00000163155_16 (sequence is synthesized)
cctgttgaatgggctcagtcttgacaaaccaattccctgtaactttttcacaattcttgactctgagaaaaagcagcactgtagggacctgaactctccattctaccagttcacccttct

SEQ ID NO: 494056 - DNA, 120 bp, Artificial Sequence
  ENSG00000163155_17 (sequence is synthesized)
gacctgttctgctcagcctgtggtgaggggaacagatggaagaaggctttccttggggtttgaagaggaagccagttgtgggagtctctttgttacaccccctcccctccagaccctctc

SEQ ID NO: 494057 - DNA, 120 bp, Artificial Sequence
  ENSG00000163155_18 (sequence is synthesized)
tctctatgccttcctcctcactgcatatttatttgcgatttgtagcactgatctatggtacagttgttttgtttcttaaacagaagtaggtaagggaacctcagtaataatggaaatctg

SEQ ID NO: 494058 - DNA, 120 bp, Artificial Sequence
  ENSG00000163155_19 (sequence is synthesized)
cctcagtctcctgtttggaaatgatgagaggtgagataagtaatgtttatatacctcctttcttctgtgatgattataaggtatacgaagctggacagattaaacattgagccctgtgca

SEQ ID NO: 494059 - DNA, 120 bp, Artificial Sequence
  ENSG00000163156_0 (sequence is synthesized)
acaggaagagaaggaaaaaagagaaggcgctgtcccgctcttgctacggtggcctggaggagtggcgaaaccggaacagagaatttatcacttctgggactcacagtcgtgatgtctttc

SEQ ID NO: 494060 - DNA, 120 bp, Artificial Sequence
  ENSG00000163156_1 (sequence is synthesized)
aagagggaaggagacgattggagtcaactcaatgtgctcaaaaaaagaagagtcggggacctcctagccagttacattccagaggatgaggcgctgatgcttcgggatggacgctttgct

SEQ ID NO: 494061 - DNA, 120 bp, Artificial Sequence
  ENSG00000163156_2 (sequence is synthesized)
tgtgccatctgcccccatcgaccggtactggacaccctggccatgctgactgcccaccgtgcaggcaagaaacatctgtccagcttgcagcttttctatggcaagaagcagccgggaaag

SEQ ID NO: 494062 - DNA, 120 bp, Artificial Sequence
  ENSG00000163156_3 (sequence is synthesized)
gaaagaaagcagaatccaaaacatcagaatgaattgagaagggaagaaaccaaagctgaggctcctctgctaactcagacacgacttatcacccagagtgctctgcacagagctccccac

SEQ ID NO: 494063 - DNA, 120 bp, Artificial Sequence
  ENSG00000163156_4 (sequence is synthesized)
tataacagttgctgccgccggaagtacagaccagaagcccctggtccctctgtctccctttcccctatgccaccctcagaggtcaaactccaaagtgggaagatcagtagggaacctgaa

SEQ ID NO: 494064 - DNA, 120 bp, Artificial Sequence
  ENSG00000163156_5 (sequence is synthesized)
cctgcggctggcccacaggccgaggagtcagcaactgtctcagcccctgcacccatgagccccacaagaagacgagccctggaccattatctcacccttcgaagctctggatggatccca

SEQ ID NO: 494065 - DNA, 120 bp, Artificial Sequence
  ENSG00000163156_6 (sequence is synthesized)
gatggacgaggtcgatgggtaaaagatgaaaatgttgagtttgactctgatgaggaggaaccacctgatctccccttggactgatacccttttcccattcattcacaaataaattacaat

SEQ ID NO: 494066 - DNA, 120 bp, Artificial Sequence
  ENSG00000163156_7 (sequence is synthesized)
gggtgctgagaacttaactttccttaagtctggttccttgttggatctcaggatttcagatctgttcattctcattccaactactccttgcctgcaaggtacacagctctccacactcct

SEQ ID NO: 494067 - DNA, 72 bp, Artificial Sequence
  ENSG00000163156_8 (sequence is synthesized)
ggctatccatacttctaacccctcccccacctcctaccaaagccatgccaagcgtcagctgcatcagcctgg

SEQ ID NO: 494068 - DNA, 120 bp, Artificial Sequence
  ENSG00000163156_9 (sequence is synthesized)
cctaccaaagccatgccaagcgtcagctgcatcagcctggtgccctattaataagactgtcaaaaagaggtctttgcccttcatgttgtctgcctgcttctccactaccactcaaagtcc

SEQ ID NO: 494069 - DNA, 120 bp, Artificial Sequence
  ENSG00000163156_10 (sequence is synthesized)
tttcccccttcaaatcacataaggactgcaggtaggcactagggggacctggccacatctggaaacagggctgtggctaagttccctgtgaaagtagaagagtcaaaaggcattggcagg

SEQ ID NO: 494070 - DNA, 120 bp, Artificial Sequence
  ENSG00000163156_11 (sequence is synthesized)
gttatggggaacaccaagggagggaacacccccacctcctcctagtaacctgaacctccctgcctgctgatccccagagtataaataatcccctggtgaactggcagtaacccttggggg

SEQ ID NO: 494071 - DNA, 120 bp, Artificial Sequence
  ENSG00000163156_12 (sequence is synthesized)
ttagcgccaagattctcaccccaaagcccaaggaaggaggcaggcaaaatggatagaagggcttttatttacaggaaaggaggacagatgaggatttaagtgtccagtgctcccagcgct

SEQ ID NO: 494072 - DNA, 120 bp, Artificial Sequence
  ENSG00000163156_13 (sequence is synthesized)
agttggtaaagggaaatgcagtgttatctcttcttttgctggcgacctgtaaaggagcaatattaaacataagtgtttgttccagctcctgctttctgcaaaggcactcttctcctttcc

SEQ ID NO: 494073 - DNA, 120 bp, Artificial Sequence
  ENSG00000163156_14 (sequence is synthesized)
agtcccttagccaaactcataaattggtagtgtcttaggccaccttacaggcccatcccacattaacaaaacaaaacaagaaaccacaccacaaataaaattacgatacctctaaacaag

SEQ ID NO: 494074 - DNA, 88 bp, Artificial Sequence
  ENSG00000163156_15 (sequence is synthesized)
gatggctctaaaagagttttccagtgtgtattctgaggaatactagtgttctggagatgttacttagtgtttcaagaaaaggagaatt

SEQ ID NO: 494075 - DNA, 120 bp, Artificial Sequence
  ENSG00000163156_16 (sequence is synthesized)
aaggagaattttgtgatttttaaataaagtttgggaaatggcactttgtaattctacttgaagaataacagttttaaaaactatacaaagtcttaagattaaaaaaaacttgtaaaattt

SEQ ID NO: 494076 - DNA, 120 bp, Artificial Sequence
  ENSG00000163156_17 (sequence is synthesized)
agtgatcctgcctcctcagcgtcgcgattagctgggtttacaagcgcatgccaccacgcctggcttcaacaaacttttgttattaattaggacagcaggagtacctaggattctttggcg

SEQ ID NO: 494077 - DNA, 120 bp, Artificial Sequence
  ENSG00000163156_18 (sequence is synthesized)
gccagtgaggactggaagaagtggagattgggtcaccagggagttgggttttgcaaagactgctaggacagggtgggacctatggcagggacgggcccaaccctcttcccctggaccact

SEQ ID NO: 494078 - DNA, 120 bp, Artificial Sequence
  ENSG00000163156_19 (sequence is synthesized)
ttttgtgatttttaaataaagtttgggaaatggcactttgtaattctacttgaagaataacagttttaaaaactatacaaagtcttaagattaaaaaaaacttgtaaaattttaagctag

SEQ ID NO: 494079 - DNA, 120 bp, Artificial Sequence
  ENSG00000163156_20 (sequence is synthesized)
cctttcccaaattcatgattctgaaatcctttgtatgcagaacttattaatatcttgagaaatatagtttaagaagcactgttttaagaggttgggagtcataggagagttggccctttc

SEQ ID NO: 494080 - DNA, 120 bp, Artificial Sequence
  ENSG00000163157_0 (sequence is synthesized)
agaacagacagacctactgacacaggggaggtgagaagggaggtgaccaccaggactggctctgtgagtaccacacagtggggagggggtgggggccaccatgtcatcatatcagaagga

SEQ ID NO: 494081 - DNA, 120 bp, Artificial Sequence
  ENSG00000163157_1 (sequence is synthesized)
actggagaaatacagagacatagatgaagatgagatcctaaggaccttgagccccgaggagctagagcagctggactgcgaactacaggagatggatcctgagaacatgctcctgccagc

SEQ ID NO: 494082 - DNA, 120 bp, Artificial Sequence
  ENSG00000163157_2 (sequence is synthesized)
tggactaagacaacgtgaccagacaaagaagagcccaacggggccactggaccgagaggcccttttgcagtacttggagcaacaggcactagaagtcaaagagcgtgatgacttggtgcc

SEQ ID NO: 494083 - DNA, 120 bp, Artificial Sequence
  ENSG00000163157_3 (sequence is synthesized)
cttcacaggcgagaagaaggggaaaccctatattcagcccaagagggaaatcccagcagaggagcagatcaccctggagcctgagctggaggaggcactggcacatgccacagatgctga

SEQ ID NO: 494084 - DNA, 120 bp, Artificial Sequence
  ENSG00000163157_4 (sequence is synthesized)
aatgtgtgacattgcagcaattctggacatgtacacactgatgagtaacaagcaatactatgatgccctctgcagtggagaaatctgcaacactgaaggcattagcagtgtggtacagcc

SEQ ID NO: 494085 - DNA, 120 bp, Artificial Sequence
  ENSG00000163157_5 (sequence is synthesized)
caaatcccacaaacattgaggagatactaaagagggtccgaagcaatgacaaggagctggaggaggtgaacttgaataatatacaggacatcccaatacccatgctaagtgagctgtgtg

SEQ ID NO: 494086 - DNA, 120 bp, Artificial Sequence
  ENSG00000163157_6 (sequence is synthesized)
aggcaatgaaggcaaatacctatgtgcggagcttcagtctggtagccacgaggagtggtgaccccattgccaatgcagtggctgacatgttgcgtgagaatcgtagcctccagagcctaa

SEQ ID NO: 494087 - DNA, 120 bp, Artificial Sequence
  ENSG00000163157_7 (sequence is synthesized)
acatcgaatccaacttcattagcagcacaggactcatggctgtgctgaaggcagttcgggaaaatgccacactcactgagctccgtgtagacaatcagcgccagtggcctggtgatgcag

SEQ ID NO: 494088 - DNA, 120 bp, Artificial Sequence
  ENSG00000163157_8 (sequence is synthesized)
tggagatggagatggccaccgtgctagagcagtgtccctctattgtccgctttggctaccactttacacagcaggggccacgagctcgggcagcccaggccatgacccgaaacaatgaac

SEQ ID NO: 494089 - DNA, 120 bp, Artificial Sequence
  ENSG00000163157_9 (sequence is synthesized)
tacgtcgccagcaaaagaagagataacactgcatttccctttaccaactagcgctgggagcactggacacttaaatcctcatctgtcctcctttcctgtaaataaaagcccttctatcca

SEQ ID NO: 494090 - DNA, 120 bp, Artificial Sequence
  ENSG00000163157_10 (sequence is synthesized)
aggtcgccagcaaaagaagagataacactgcatttccctttaccaactagcgctgggagcactggacacttaaatcctcatctgtcctcctttcctgtaaataaaagcccttctatccat

SEQ ID NO: 494091 - DNA, 120 bp, Artificial Sequence
  ENSG00000163157_11 (sequence is synthesized)
tcctatcactttacactcactgttttgaatacagcaggcaccaaataaggaggaactggctgattctagtcgaactcatatgtctcagactggggcttgtatgaagggaagtggaagaga

SEQ ID NO: 494092 - DNA, 120 bp, Artificial Sequence
  ENSG00000163157_12 (sequence is synthesized)
tgccatggctgttaatgaccactagaggctctcagggctgggcagggtatgggggctgtgtatatgtgatctcccactaccccccacctggccagagctaaaataataaaatgctgagct

SEQ ID NO: 494093 - DNA, 120 bp, Artificial Sequence
  ENSG00000163157_13 (sequence is synthesized)
agacagacctactgacacaggggaggtgagaagggaggtgaccaccaggactggtaggtggggaagacagggggcttatggatgagagcccggtgggagatgggaggagaagagtggctc

SEQ ID NO: 494094 - DNA, 120 bp, Artificial Sequence
  ENSG00000163157_14 (sequence is synthesized)
ctatggggaatgatgtggagtgtgtccctgtctctgtcactcagtgtatatttctgccactgtgccgtcctaccccttaactgtgtatagtttacattgtcgatgtgtctcacatacttt

SEQ ID NO: 494095 - DNA, 120 bp, Artificial Sequence
  ENSG00000163157_15 (sequence is synthesized)
ctggatctttcatattcagcatggtgtgtatgcatagctccttatgcgtatcttatattgtacaaaattgtgcgagtttaatattcccactgtttttaaagaaactttaccctatttaca

SEQ ID NO: 494096 - DNA, 120 bp, Artificial Sequence
  ENSG00000163159_0 (sequence is synthesized)
gtggccacccgcaggtagtgatgtcgagcgtcgagctcccaaaaccgagctggtgaggggctgcaggtggcggcgcagtctcggtaggcggtatgagtttggctgggggccgggcacccc

SEQ ID NO: 494097 - DNA, 120 bp, Artificial Sequence
  ENSG00000163159_1 (sequence is synthesized)
ggaagaccgctgggaaccggctttctgggcttttggaggcagaggaggaagatgagttctaccagacgacttatgggggtttcacagaggaatccggagatgatgagtatcaaggggacc

SEQ ID NO: 494098 - DNA, 120 bp, Artificial Sequence
  ENSG00000163159_2 (sequence is synthesized)
agtcagacacagaggacgaagtggactctgactttgacattgatgaaggggatgaaccatccagtgatggagaagcagaagagccaagaaggaagcgccgagtagtcaccaaggcctata

SEQ ID NO: 494099 - DNA, 120 bp, Artificial Sequence
  ENSG00000163159_3 (sequence is synthesized)
aggaacctctcaagagcttaaggcctcgaaaggtcaacaccccggctggtagctctcagaaggcgcgagaagagaaggcactactgccattagaactacaagatgacggctctgacagtc

SEQ ID NO: 494100 - DNA, 120 bp, Artificial Sequence
  ENSG00000163159_4 (sequence is synthesized)
ggaagtctatgcgtcagtctacagctgagcatacacgacaaacgttccttcgggtacaggagaggcagggccagtcaagacggcgaaaggggccccactgtgagcggccactaacccagg

SEQ ID NO: 494101 - DNA, 120 bp, Artificial Sequence
  ENSG00000163159_5 (sequence is synthesized)
aggaactgctccgggaggccaagatcacagaagagcttaatttacggtcactggagacatatgagcggctcgaggctgataaaaagaagcaggttcataagaagcggaagtgccccgggc

SEQ ID NO: 494102 - DNA, 120 bp, Artificial Sequence
  ENSG00000163159_6 (sequence is synthesized)
ctgctccctcggtgtctgcattgactcctcatgctgggactggacccgtcaacccccctgctcgctgctcacgtaccttcatcacttttagtgatgatgcaactttcgaggaatggttcc

SEQ ID NO: 494103 - DNA, 120 bp, Artificial Sequence
  ENSG00000163159_7 (sequence is synthesized)
cccaagggcggcccccaaaagtccctgttcgtgaggtctgtccagtgacccatcgtccagccctataccgggaccctgttacagacataccctatgccactgctcgagccttcaagatca

SEQ ID NO: 494104 - DNA, 120 bp, Artificial Sequence
  ENSG00000163159_8 (sequence is synthesized)
ttcgtgaggcttacaagaagtacattactgcccatggactgccgcccactgcctcagccctgggccccggcccgccacctcctgagcccctccctggctctgggccccgagccttgcgcc

SEQ ID NO: 494105 - DNA, 120 bp, Artificial Sequence
  ENSG00000163159_9 (sequence is synthesized)
agaaaattgtcattaaatgaagagatgtctagtcctcagaaacttctttcctgccctgattggggctcttgctgttccgtttcttctccctgcttctcccctttgtcatctctgatcttt

SEQ ID NO: 494106 - DNA, 120 bp, Artificial Sequence
  ENSG00000163159_10 (sequence is synthesized)
gcctaatctgtttctttttccttttcccctagttcttacaggtttcgttgtgttttttaatctaataaaatagaaagatcccttttgtctggtgtccagtctagggttgggagcaagaag

SEQ ID NO: 494107 - DNA, 120 bp, Artificial Sequence
  ENSG00000163159_11 (sequence is synthesized)
tatttgaatacctgcatatatttgggtctttattcgatagcatttattatgagctgtcctttctaaattgtattcattcctccaactaaattataaacatctgaaaattgcacaccaaaa

SEQ ID NO: 494108 - DNA, 120 bp, Artificial Sequence
  ENSG00000163159_12 (sequence is synthesized)
attcctattctctctttcatcaggtcccagtactccctatgccacttccatttctggcaatgctagttttctctcattgagatcctcatatttctcctgacttcttctgttccccagtat

SEQ ID NO: 494109 - DNA, 120 bp, Artificial Sequence
  ENSG00000163159_13 (sequence is synthesized)
ctgattccaatctgtcctcaggaacctctcaagagcttaaggcctcgaaaggtcaacaccccggctggtagctctcagaaggcgcgagaagagaaggcactactgccattagaactacaa

SEQ ID NO: 494110 - DNA, 120 bp, Artificial Sequence
  ENSG00000163159_14 (sequence is synthesized)
accaaataaggaggaactggctgattctagtcgaactcatatgtctcagactggggcttgtatgaagggaagtggaagagatgccatggctgttaatgaccactagaggctctcagggct

SEQ ID NO: 494111 - DNA, 120 bp, Artificial Sequence
  ENSG00000163159_15 (sequence is synthesized)
gggcagggtatgggggctgtgtatatgtgatctcccactaccccccacctggccagagctaaaataataaaatgctgagctcactgttcccccaccctctcccccggcaccgggctcctc

SEQ ID NO: 494112 - DNA, 120 bp, Artificial Sequence
  ENSG00000163159_16 (sequence is synthesized)
ctgctgctgggacagtgctctagtagaacagacagacctactgacacaggggaggtgagaagggaggtgaccaccaggactggtaggtggggaagacagggggcttatggatgagagccc

SEQ ID NO: 494113 - DNA, 120 bp, Artificial Sequence
  ENSG00000163159_17 (sequence is synthesized)
ggtgggagatgggaggagaagagtggctcctatggggaatgatgtggagtgtgtccctgtctctgtcactcagtgtatatttctgccactgtgccgtcctaccccttaactgtgtatagt

SEQ ID NO: 494114 - DNA, 120 bp, Artificial Sequence
  ENSG00000163159_18 (sequence is synthesized)
tccttatgcgtatcttatattgtacaaaattgtgcgagtttaatattcccactgtttttaaagaaactttaccctatttacacccattggtctggtgtcaccttcctgtccaaagcaagg

SEQ ID NO: 494115 - DNA, 120 bp, Artificial Sequence
  ENSG00000163159_19 (sequence is synthesized)
gacagattatggggactcacagaggccttactacccttcccccaacctggaagtcccccaactgctccgagcccttgctttcccttaagacttcaaattttagcaaacacagaaagtgaa

SEQ ID NO: 494116 - DNA, 120 bp, Artificial Sequence
  ENSG00000163159_20 (sequence is synthesized)
atcttgatcccccacaataaaagggaaatgaggatggggtaagagactctctcttccccttacacctcattgtccttggtttttttatccggtttaggaaaaagcctggattatgaggag

SEQ ID NO: 494117 - DNA, 120 bp, Artificial Sequence
  ENSG00000163159_21 (sequence is synthesized)
gagaggaggaatttccctgaagctctctattcccccacccctcatcccctttcaataggaactgggcataggaccagctgtgttggcagggcttccagcagctgtgttagggcgaaggca

SEQ ID NO: 494118 - DNA, 120 bp, Artificial Sequence
  ENSG00000163159_22 (sequence is synthesized)
ctgacaagtgaggttataggggaggggtgctgccaggatttctctgtcataccgtgggaagacaaacccagcttagatgtctgggatccccatccagagtggctggaagctggggaagca

SEQ ID NO: 494119 - DNA, 120 bp, Artificial Sequence
  ENSG00000163159_23 (sequence is synthesized)
gaaaggagactctagttctaactctaaacaacctaatcttccccacttcccatcctcaactagacttctaatctccaagaaatccaatccaatgttctgcccccctggctggtctctttg

SEQ ID NO: 494120 - DNA, 120 bp, Artificial Sequence
  ENSG00000163159_24 (sequence is synthesized)
tgtccctgctgtgtccctgtccatcttaccattgtccatccttttgtcccatgttgcccaggctctgtgagtaccacacagtggggagggggtgggggccaccatgtcatcatatcagaa

SEQ ID NO: 494121 - DNA, 120 bp, Artificial Sequence
  ENSG00000163159_25 (sequence is synthesized)
ggaactggagaaatacagagacatagatgaagatgagatcctaaggaccttgagccccgaggagctagagcagctggactgcgaactacaggagatggatcctgaggtaggggctccagc

SEQ ID NO: 494122 - DNA, 120 bp, Artificial Sequence
  ENSG00000163159_26 (sequence is synthesized)
acagggaaccagaggcagtcccaggcatttgggaagggtgttgggctctgggtggctgagaatagggtttgctacaggacctagggtcctaagaaggccaggggaaaggtgtccggtgat

SEQ ID NO: 494123 - DNA, 120 bp, Artificial Sequence
  ENSG00000163159_27 (sequence is synthesized)
gttttagggagccctagcagtacctaggtcagaggggaggtctgacttgctccccaaaactcatccctaagaacatgctcctgccagctggactaagacaacgtgaccagacaaagaaga

SEQ ID NO: 494124 - DNA, 120 bp, Artificial Sequence
  ENSG00000163159_28 (sequence is synthesized)
gcccaacggggccactggaccgagaggcccttttgcagtacttggagcaacaggcactagaagtcaaagagcgtgatgacttggtgcccttcacaggcgagaagaaggggaaaccctata

SEQ ID NO: 494125 - DNA, 120 bp, Artificial Sequence
  ENSG00000163159_29 (sequence is synthesized)
ttcagcccaagagggaaatcccagcagaggagcagatcaccctggagcctgagctggaggaggcactggcacatgccacagatgctgaaatgtgtgacattgcagcaattctggacatgt

SEQ ID NO: 494126 - DNA, 120 bp, Artificial Sequence
  ENSG00000163159_30 (sequence is synthesized)
acacactgatgagtaacaagcaatactatgatgccctctgcagtggagaaatctgcaacactgaaggcattagcagtgtggtacagcctgacaagtataagccagtgccggatgaacccc

SEQ ID NO: 494127 - DNA, 120 bp, Artificial Sequence; identical to SEQ ID NO: 494085
  ENSG00000163159_31 (sequence is synthesized)

SEQ ID NO: 494128 - DNA, 120 bp, Artificial Sequence; identical to SEQ ID NO: 494086
  ENSG00000163159_32 (sequence is synthesized)

SEQ ID NO: 494129 - DNA, 120 bp, Artificial Sequence; identical to SEQ ID NO: 494087
  ENSG00000163159_33 (sequence is synthesized)

SEQ ID NO: 494130 - DNA, 120 bp, Artificial Sequence; identical to SEQ ID NO: 494088
  ENSG00000163159_34 (sequence is synthesized)

SEQ ID NO: 494131 - DNA, 120 bp, Artificial Sequence; identical to SEQ ID NO: 494089
  ENSG00000163159_35 (sequence is synthesized)

SEQ ID NO: 494132 - DNA, 120 bp, Artificial Sequence
  ENSG00000163161_0 (sequence is synthesized)
gggagcttccggattgagccggaagtccccccagagcggatgccgcggcgggcctgtgggagcggggtcatcttctctctgctgctgtagctgccatgggcaaaagagaccgagcggacc

SEQ ID NO: 494133 - DNA, 120 bp, Artificial Sequence
  ENSG00000163161_1 (sequence is synthesized)
gcgacaagaagaaatccaggaagcggcactatgaggatgaagaggatgatgaagaggacgccccggggaacgaccctcaggaagcggttccctcggcggcggggaagcaggtggatgagt

SEQ ID NO: 494134 - DNA, 120 bp, Artificial Sequence
  ENSG00000163161_2 (sequence is synthesized)
caggcaccaaagtggatgaatatggagccaaggactacaggctgcaaatgccgctgaaggacgaccacacctccaggcccctctgggtggctcccgatggccatatcttcttggaagcct

SEQ ID NO: 494135 - DNA, 120 bp, Artificial Sequence
  ENSG00000163161_3 (sequence is synthesized)
tctctccagtttacaaatatgcccaagacttcttggtggctattgcagagccagtgtgccgaccaacccatgtgcatgagtacaaactaactgcctactccttgtatgcagctgtcagcg

SEQ ID NO: 494136 - DNA, 120 bp, Artificial Sequence
  ENSG00000163161_4 (sequence is synthesized)
ttgggctgcaaaccagtgacatcaccgagtacctcaggaagctcagcaagactggagtccctgatggaattatgcagtttattaagttgtgtactgtcagctatggaaaagtcaagctgg

SEQ ID NO: 494137 - DNA, 120 bp, Artificial Sequence
  ENSG00000163161_5 (sequence is synthesized)
tcttgaagcacaacagatacttcgttgaaagttgccaccctgatgtaatccagcatcttctccaggaccccgtgatccgagaatgccgcttaagaaactctgaaggggaggccactgagc

SEQ ID NO: 494138 - DNA, 120 bp, Artificial Sequence
  ENSG00000163161_6 (sequence is synthesized)
tcatcacagagactttcacaagcaaatctgccatttctaagactgctgaaagcagtggtgggccctccacttcccgagtgacagatccacagggtaaatctgacatccccatggacctgt

SEQ ID NO: 494139 - DNA, 120 bp, Artificial Sequence
  ENSG00000163161_7 (sequence is synthesized)
ttgacttctatgagcaaatggacaaggatgaagaagaagaagaagagacacagacagtgtcttttgaagtcaagcaggaaatgattgaggaactccagaaacgttgcatccacctggagt

SEQ ID NO: 494140 - DNA, 120 bp, Artificial Sequence
  ENSG00000163161_8 (sequence is synthesized)
accctctgttggcagaatatgacttccggaatgattctgtcaaccctgatatcaacattgacctaaagcccacagctgtcctcagaccctatcaggagaagagcttgcgaaagatgtttg

SEQ ID NO: 494141 - DNA, 120 bp, Artificial Sequence
  ENSG00000163161_9 (sequence is synthesized)
gaaacgggcgtgcacgttcgggggtcattgttcttccctgcggtgctggaaagtccctggttggtgtgactgctgcatgcactgtcagaaaacgctgtctggtgctgggcaactcagctg

SEQ ID NO: 494142 - DNA, 120 bp, Artificial Sequence
  ENSG00000163161_10 (sequence is synthesized)
tttctgtggagcagtggaaagcccagttcaagatgtggtccaccattgacgacagccagatctgccggttcacctccgatgccaaggacaagcccatcggctgctccgttgccattagca

SEQ ID NO: 494143 - DNA, 120 bp, Artificial Sequence
  ENSG00000163161_11 (sequence is synthesized)
ataccagccaagatgttccgaagggtgctcaccatcgtgcaggcccactgtaagctgggtttgactgcgaccctcgtccgcgaagatgacaaaattgtggatttaaattttctgattggg

SEQ ID NO: 494144 - DNA, 120 bp, Artificial Sequence
  ENSG00000163161_12 (sequence is synthesized)
cctaagctctacgaagccaactggatggagctgcagaataatggctacatcgccaaagtccagtgtgctgaggtctggtgccctatgtctcctgaattttaccgggaatatgtggcaatc

SEQ ID NO: 494145 - DNA, 120 bp, Artificial Sequence
  ENSG00000163161_13 (sequence is synthesized)
aaaaccaagaaacgaatcttgctgtacaccatgaaccccaacaaatttagagcttgccagtttctgatcaagtttcatgaaaggaggaatgacaagattattgtctttgctgacaatgtg

SEQ ID NO: 494146 - DNA, 120 bp, Artificial Sequence
  ENSG00000163161_14 (sequence is synthesized)
tttgccctaaaggaatatgccattcgactgaacaaaccctatatctacggacctacgtctcagggggaaaggatgcaaattctccagaatttcaagcacaaccccaaaattaacaccatc

SEQ ID NO: 494147 - DNA, 120 bp, Artificial Sequence
  ENSG00000163161_15 (sequence is synthesized)
ttcatatccaaggtaggtgacacttcgtttgatctgccggaagcaaatgtcctcattcagatctcatcccatggtggctccaggcgtcaggaagcccaaaggctagggcgggtgcttcga

SEQ ID NO: 494148 - DNA, 120 bp, Artificial Sequence
  ENSG00000163161_16 (sequence is synthesized)
gctaaaaaagggatggttgcagaagagtacaatgcctttttctactcactggtatcccaggacacacaggaaatggcttactcaaccaagcggcagagattcttggtagatcaaggttat

SEQ ID NO: 494149 - DNA, 120 bp, Artificial Sequence
  ENSG00000163161_17 (sequence is synthesized)
agcttcaaggtgatcacgaaactcgctggcatggaggaggaagacttggcgttttcgacaaaagaagagcaacagcagctcttacagaaagtcctggcagccactgacctggatgccgag

SEQ ID NO: 494150 - DNA, 120 bp, Artificial Sequence
  ENSG00000163161_18 (sequence is synthesized)
gaggaggtggtggctggggaatttggctccagatccagccaggcatctcggcgctttggcaccatgagttctatgtctggggccgacgacactgtgtacatggagtaccactcatcgcgg

SEQ ID NO: 494151 - DNA, 120 bp, Artificial Sequence
  ENSG00000163161_19 (sequence is synthesized)
agcaaggcgcccagcaaacatgtacacccgctcttcaagcgctttaggaaatgatgcttaggcagggtacttcgttcaagaccggcgcttggcacccttgttggaaagggattttcagca

SEQ ID NO: 494152 - DNA, 120 bp, Artificial Sequence
  ENSG00000163161_20 (sequence is synthesized)
taacattttccttccacctctttgaccttccctccagcgttggccaaattgtgctgaggaagatgcatcaagggcttggctgtgccttcataggtcatctagggttttataaaggaggag

SEQ ID NO: 494153 - DNA, 120 bp, Artificial Sequence
  ENSG00000163161_21 (sequence is synthesized)
gagacaatattttttcaaactttttggggagtggggtcatttctgtatataaaaaatgttaatatttaaggtgtatttatgttaccgttctgaataaacagaatggaccattgaaccagt

SEQ ID NO: 494154 - DNA, 120 bp, Artificial Sequence
  ENSG00000163161_22 (sequence is synthesized)
gtggtcttctctagactagggtgggggctgtgggaatagagaggaaaggcagaatgcaagattttaagcagcgttttataacttaatggatatgcatcagaattacccaggcaagaggaa

SEQ ID NO: 494155 - DNA, 120 bp, Artificial Sequence
  ENSG00000163161_23 (sequence is synthesized)
gattttgttctcagaaagcagaggccaatggaaaaagctcagtttaggcacatctgaccactttaggattgcaagttgggtttccctaaagtaaaatgaacttttcacttggttggtagg

SEQ ID NO: 494156 - DNA, 120 bp, Artificial Sequence
  ENSG00000163161_24 (sequence is synthesized)
ccagcacttacaacctagcagccctgctggttctaccctttacaacttcacccattgcttgataacagcagaattaaatgttgtgtgcacgttcagcacctacctctctcacagatttct

SEQ ID NO: 494157 - DNA, 120 bp, Artificial Sequence
  ENSG00000163161_25 (sequence is synthesized)
cagagcggatgccgcggcgggcctgtgggagcggggtcatcttctctctgctgctgtagctgccatgggcaaaagagaccgagcggaccgcggtgagacgttgcgcgggcacgctcagcc

SEQ ID NO: 494158 - DNA, 120 bp, Artificial Sequence
  ENSG00000163161_26 (sequence is synthesized)
ctgcccttgccggccctgccccccgctctgcctcggagctgctccgggcctctgcgccggccgaccctgctggccctcccgcgcgcaccccgttgggacaggcctttgggcgggagagat

SEQ ID NO: 494159 - DNA, 120 bp, Artificial Sequence
  ENSG00000163161_27 (sequence is synthesized)
ccacaccaccaaaaggtcctgggaggccgagcgagtcatggagtggctcaagacccaggagtggggcctcatgatcctggatgaagtgcacaccataccaggtctggtgccctatgtctc

SEQ ID NO: 494160 - DNA, 120 bp, Artificial Sequence
  ENSG00000163161_28 (sequence is synthesized)
ataggtgctccatgttgtcagcctgtggcagccatgagaatgtgccattcagatttcctgtggggagcataacgactgattaccccagccgctacactctggatccagcattgtgttctg

SEQ ID NO: 494161 - DNA, 120 bp, Artificial Sequence
  ENSG00000163161_29 (sequence is synthesized)
tgagccgctcccagctgtgggtattaacacagaggggctactaattcaggcccattgtagccagggagaatttggaaatgcagcccaaagtgagtgtgctggggactgaattgtgtgtgt

SEQ ID NO: 494162 - DNA, 120 bp, Artificial Sequence
  ENSG00000163161_30 (sequence is synthesized)
tcccctcaaattttgtcttcaaaacctaatatccaatggtaatgtatttggagtaagaaagtagttaagactaaatgaggtcgtgatccgctatgattagtgtcctcctaagaagagaca

SEQ ID NO: 494163 - DNA, 66 bp, Artificial Sequence
  ENSG00000163161_31 (sequence is synthesized)
tgggtggcaaatttttattgttgccacacagcctctactgtattccttcctaaaggtggttgggaa

SEQ ID NO: 494164 - DNA, 120 bp, Artificial Sequence
  ENSG00000163161_32 (sequence is synthesized)
cacagcctctactgtattccttcctaaaggtggttgggaacctgggaggatttaagctgtattctctgccatcaagatgcttacattctatttggggaaataggagcattggtgaagagg

SEQ ID NO: 494165 - DNA, 120 bp, Artificial Sequence
  ENSG00000163161_33 (sequence is synthesized)
accagcaggaataaagggatatgggaaggacctgatgtttatgctgtcttttctgtgaagcacagataagagaagagaaacaagagatgtggcccagactggaaactcatccactggcca

SEQ ID NO: 494166 - DNA, 120 bp, Artificial Sequence
  ENSG00000163161_34 (sequence is synthesized)
ctgtatttcctctagcagtggagctgggctcaggcccctgcctacttgacctcaaagtcacaaccctcatatgttaaatcatggccggcagctcatggtacagatttggcgaagggttgt

SEQ ID NO: 494167 - DNA, 120 bp, Artificial Sequence
  ENSG00000163161_35 (sequence is synthesized)
catagacaagagccttcaccagaaactgaatcggctgataccttgatcatagactttcagcctccacagctctgagaaaatacagttctaatgttgaagccacccagtctggaattttat

SEQ ID NO: 494168 - DNA, 120 bp, Artificial Sequence
  ENSG00000163161_36 (sequence is synthesized)
ctaactgtatgcagaaggatgaaaccagacccctgcctatcaccacatacaaaaatcaactcataatggattaaagatgtaaatgtaagacctcaaactataaggatcctcgaagaaaac

SEQ ID NO: 494169 - DNA, 120 bp, Artificial Sequence
  ENSG00000163161_37 (sequence is synthesized)
ctaggaaatacaatattcacaaagttgtgcaactatcaacacaattcatgtttagaatattctcatcagctcccaaaagaaaccctcatccatgcacagccactcctaatttcctcttgt

SEQ ID NO: 494170 - DNA, 120 bp, Artificial Sequence
  ENSG00000163161_38 (sequence is synthesized)
tcccaacccccagctctaggcagcccctaatctactttgatgtctgtaggccttttctggacatttcatgtaaatgcagtcagaccacttggggccttctgtgactggtttcttttcact

SEQ ID NO: 494171 - DNA, 120 bp, Artificial Sequence
  ENSG00000163161_39 (sequence is synthesized)
tagcataatgttttgtttgtttgttttttggagatggaatctcgctctatcgcccaggctggagtacagtggggcgatcttggctcactgcaaccactgcctcgcaggttcaagggattc

SEQ ID NO: 494172 - DNA, 120 bp, Artificial Sequence
  ENSG00000163161_40 (sequence is synthesized)
tcagcctcccaaagggctgggattacaggactgggtcaccacacccggcagcataatgttttcaaaaagattatctatattgtagcatctgtcagtacttcattcttttttattgctaaa

SEQ ID NO: 494173 - DNA, 120 bp, Artificial Sequence
  ENSG00000163161_41 (sequence is synthesized)
acttcattcttttttattgctaaataatattcgattccatggacataccacattttatttatccacacatctgttgatggacatttgggctgtttccactttttggctcttagaagaatt

SEQ ID NO: 494174 - DNA, 120 bp, Artificial Sequence
  ENSG00000163161_42 (sequence is synthesized)
ctgctatgaaattcatgtacaaatttttgtgtggatatagtttcatttctcttggatttatgcctggaagtggaattgccaggtcatgtggttataacagtgtgtttaacattttgatga

SEQ ID NO: 494175 - DNA, 120 bp, Artificial Sequence
  ENSG00000163161_43 (sequence is synthesized)
actgccagactgttttccaaagcagccgcatcatttacattctcaacagcaatgcatgcgggttctagtttttccacatccttgacaacagtggcagttatctgcttttttgattgtagc

SEQ ID NO: 494176 - DNA, 120 bp, Artificial Sequence
  ENSG00000163161_44 (sequence is synthesized)
catcctcggagaggggcgtgaggtgataatctcattgtgcttttgagttgcatttccctggtgattaatggtgtggagcatcatttcatgtgcttactggctatttttatattgtttttg

SEQ ID NO: 494177 - DNA, 120 bp, Artificial Sequence
  ENSG00000163161_45 (sequence is synthesized)
gagaagtaatctgttcatattcttctctcatttataattaatttgtcttgttgttgagtttcaacagttctttgtataacctagatacaaatcccttatcagatatatgctttccacatt

SEQ ID NO: 494178 - DNA, 120 bp, Artificial Sequence
  ENSG00000163161_46 (sequence is synthesized)
tttttattctgaggattgttttttcacttgatggtgtccttggaagcacaaaagacttccaaattttgatgcaatcccatgccaagttcaggtggtaaccccgagtgcagggcttttcca

SEQ ID NO: 494179 - DNA, 120 bp, Artificial Sequence
  ENSG00000163161_47 (sequence is synthesized)
agactaggaccaaggccttcttgataccctggcctccaggagaagcgagggccactgtcagcaggcaggcaccaagcattaggagattagaggccttgcctcaaactccctttatctctg

SEQ ID NO: 494180 - DNA, 120 bp, Artificial Sequence
  ENSG00000163161_48 (sequence is synthesized)
catgaatctctgagggcagctgttggtggaaagtgtgccgtcctggcaggactgaggtgccatggcactatgaccagcactgtgtgaatctgagccccgcagggctgctttctcagggat

SEQ ID NO: 494181 - DNA, 120 bp, Artificial Sequence
  ENSG00000163161_49 (sequence is synthesized)
agtttgcctcagtttgcctcccagacatcagagctatcctgtactacaaatcaggtattttaataattgggaaattctaaagctttggctaactttcactggctgaggcatttgctttct

SEQ ID NO: 494182 - DNA, 120 bp, Artificial Sequence
  ENSG00000163161_50 (sequence is synthesized)
ttcctgttacacaaatattacgtttatgtcagtatttggtgtccagagggctttatattttggggatagatggagggttctagaagtaggggaattaaattccccctatggtccactaaa

SEQ ID NO: 494183 - DNA, 120 bp, Artificial Sequence
  ENSG00000163161_51 (sequence is synthesized)
aggacatccctagaacattagactcccaggttcttgattgcaaaagactgcaatccaggctgccttttgagatacgtttttaatgtgtctctttatgcattggtgagagttcccattatt

SEQ ID NO: 494184 - DNA, 120 bp, Artificial Sequence
  ENSG00000163161_52 (sequence is synthesized)
ggccttaggaggacagggttgtctgaccttccctcttttagctagaggcagtgacacttcagacctctcatgctggcctagaggacaagatgcttgggttttgagcccagttttttggag

SEQ ID NO: 494185 - DNA, 120 bp, Artificial Sequence
  ENSG00000163161_53 (sequence is synthesized)
gatttgcatcatgacctttttatccatccatgaaaatccctgttggtaatagcattcctacctcctgattcctgccgagctgtgagggtaagaggagcaccaggtcagaaagagcaattc

SEQ ID NO: 494186 - DNA, 120 bp, Artificial Sequence
  ENSG00000163161_54 (sequence is synthesized)
tttgaaaggtgacctcgacaaaaaggcacaatgccatgccgtagtagtttgtgttggttggagctgtgtcttcggtgctgcctgttgaggagcagtggttggagttcccagagtcatgac

SEQ ID NO: 494187 - DNA, 120 bp, Artificial Sequence
  ENSG00000163161_55 (sequence is synthesized)
gtggagtggctgggcctgggcagatgtgcacatcgtctgtactctggatccctggcccagaaggactcagatccttacttctaggaattttcatttaatgaacattatgagaattggagg

SEQ ID NO: 494188 - DNA, 120 bp, Artificial Sequence
  ENSG00000163161_56 (sequence is synthesized)
gaaggagaattccctttacagaatcaacccaagttttctgcagggatagggagcccttgtagtaagttatccccatagaaatgaaaacccagtctccaccatgctgttcttactctctca

SEQ ID NO: 494189 - DNA, 120 bp, Artificial Sequence
  ENSG00000163161_57 (sequence is synthesized)
gagaagctctataaataatcttcctgatatcctatcattttcattttcacgtgctcattcctgctggaagccccagttgcggagcacagcagatgccagggaccttcacaaagggccaca

SEQ ID NO: 494190 - DNA, 120 bp, Artificial Sequence
  ENSG00000163161_58 (sequence is synthesized)
gcctgtgccttccagtcacttgtcccttcctttgtctgctccaagatgtgaaggctacccgaaggagccttttaaaatcactaagattcttcctgttgatcttccatacatgatcattta

SEQ ID NO: 494191 - DNA, 120 bp, Artificial Sequence
  ENSG00000163161_59 (sequence is synthesized)
gatgctgtgtgctgggggcagatttctctgaaattcctgcatccctctggtcttgagatcattagtcaagctccctgttaaaggcggctcctgatgctggtctctggaatgctagggagg

SEQ ID NO: 494192 - DNA, 120 bp, Artificial Sequence
  ENSG00000163161_60 (sequence is synthesized)
agctctccattgttggccaccagggtggctgggcctggggagggaagtgaccaaagcaggtggacccaggagaaggcagaggagggctggggagagagagcagaaaggggcatgtctgct

SEQ ID NO: 494193 - DNA, 120 bp, Artificial Sequence
  ENSG00000163162_0 (sequence is synthesized)
gaccccgcctcagtcttccagggcggcggtgggtgtccgcttctctctgctcttcgactgcaccgcactcgcgcgtgaccctgactccccctagtcagctcagcggtgctgccatggcgt

SEQ ID NO: 494194 - DNA, 120 bp, Artificial Sequence
  ENSG00000163162_1 (sequence is synthesized)
ggcggcggcgcgaagccagcgtcggggctcgcggcgtgttggctctggcgttgctcgccctggccctgtgcgtgcccggggcccggggccgggctctcgagtggttctcggccgtggtaa

SEQ ID NO: 494195 - DNA, 120 bp, Artificial Sequence
  ENSG00000163162_2 (sequence is synthesized)
acatcgagtacgtggacccgcagaccaacctgacggtgtggagcgtctcggagagtggccgcttcggcgacagctcgcccaaggagggcgcgcatggcctggtgggcgtcccgtgggcgc

SEQ ID NO: 494196 - DNA, 120 bp, Artificial Sequence
  ENSG00000163162_3 (sequence is synthesized)
ccggcggagacctcgagggctgcgcgcccgacacgcgcttcttcgtgcccgagcccggcggccgaggggccgcgccctgggtcgccctggtggctcgtgggggctgcaccttcaaggaca

SEQ ID NO: 494197 - DNA, 120 bp, Artificial Sequence
  ENSG00000163162_4 (sequence is synthesized)
aggtgctggtggcggcgcggaggaacgcctcggccgtcgtcctctacaatgaggagcgctacgggaacatcaccttgcccatgtctcacgcgggaacaggaaatatagtggtcattatga

SEQ ID NO: 494198 - DNA, 120 bp, Artificial Sequence
  ENSG00000163162_5 (sequence is synthesized)
ttagctatccaaaaggaagagaaattttggagctggtgcaaaaaggaattccagtaacgatgaccataggggttggcacccggcatgtacaggagttcatcagcggtcagtctgtggtgt

SEQ ID NO: 494199 - DNA, 120 bp, Artificial Sequence
  ENSG00000163162_6 (sequence is synthesized)
ttgtggccattgccttcatcaccatgatgattatctcgttagcctggctaatattttactatatacagcgtttcctatatactggctctcagattggaagtcagagccatagaaaagaaa

SEQ ID NO: 494200 - DNA, 120 bp, Artificial Sequence
  ENSG00000163162_7 (sequence is synthesized)
ctaagaaagttattggccagcttctacttcatactgtaaagcatggagaaaagggaattgatgttgatgctgaaaattgtgcagtgtgtattgaaaatttcaaagtaaaggatattatta

SEQ ID NO: 494201 - DNA, 120 bp, Artificial Sequence
  ENSG00000163162_8 (sequence is synthesized)
gaattctgccatgcaagcatatttttcatagaatatgcattgacccatggcttttggatcaccgaacatgtccaatgtgtaaacttgatgtcatcaaagccctaggatattggggagagc

SEQ ID NO: 494202 - DNA, 120 bp, Artificial Sequence
  ENSG00000163162_9 (sequence is synthesized)
ctggggatgtacaggagatgcctgctccagaatctcctcctggaagggatccagctgcaaatttgagtctagctttaccagatgatgacggaagtgatgacagcagtccaccatcagcct

SEQ ID NO: 494203 - DNA, 120 bp, Artificial Sequence
  ENSG00000163162_10 (sequence is synthesized)
cccctgctgaatctgagccacagtgtgatcccagctttaaaggagatgcaggagaaaatacggcattgctagaagccggcaggagtgactctcggcatggaggacccatctcctagcaca

SEQ ID NO: 494204 - DNA, 120 bp, Artificial Sequence
  ENSG00000163162_11 (sequence is synthesized)
cgtgcccactgaagtggcaccaacagaagtttggcttgaactaaaggacattttattttttttactttagcacataatttgtatatttgaaaataatgtatattattttacctattagat

SEQ ID NO: 494205 - DNA, 120 bp, Artificial Sequence
  ENSG00000163162_12 (sequence is synthesized)
ctactaaaatagagtgtttaccatgaacagtgtgttgcttcagactattacaaagacaactggggcaggtactctaatataaaggacaggtggtgtttctaaataattggctgctatggt

SEQ ID NO: 494206 - DNA, 120 bp, Artificial Sequence
  ENSG00000163162_13 (sequence is synthesized)
tctgtaaaaaccagttaattctatttttcaaggtttttggcaaagcacatcaatgttagactagttgaagtggaattgtataattcaattcgataattgatctcatgggctttccctgga

SEQ ID NO: 494207 - DNA, 120 bp, Artificial Sequence
  ENSG00000163162_14 (sequence is synthesized)
ggaaaggttttttttgttgttttttttttaagaacttgaaacttgtaaactgagatgtctgtagcttttttgcccatctgtagtgtatgtgaagatttcaaaacctgagagcactttttc

SEQ ID NO: 494208 - DNA, 120 bp, Artificial Sequence
  ENSG00000163162_15 (sequence is synthesized)
tttgtttagaattatgagaaaggcactagatgactttaggatttgcatttttccctttattgcctcatttcttgtgacgccttgttggggagggaaatctgtttattttttcctacaaat

SEQ ID NO: 494209 - DNA, 120 bp, Artificial Sequence
  ENSG00000163162_16 (sequence is synthesized)
aaaaagctaagattctatatcgcacatgagcattaagttcttcattgccttgttaaggaaaatgagtaggcagactcagaatctgttatattgatttcagttacaatttaatctttacaa

SEQ ID NO: 494210 - DNA, 120 bp, Artificial Sequence
  ENSG00000163162_17 (sequence is synthesized)
ttaaaagggcgaaagatgtagaattttagtttttgttgttgactcgaaataaccagttttcttgattagagtttaagcagatttaataccatgaccttgcttaaccgtttcttctttttt

SEQ ID NO: 494211 - DNA, 120 bp, Artificial Sequence
  ENSG00000163162_18 (sequence is synthesized)
acttgcttgctgttcttttgggtcaaaggagcaggctaatgcaaagcttttggagactgctaagtgttaaaaagtgattaaacacacactctgctattttttcacttcttggaggtagaa

SEQ ID NO: 494212 - DNA, 120 bp, Artificial Sequence
  ENSG00000163162_19 (sequence is synthesized)
gtcgagtatgaggcagttattttttagagtgtggaattatagtctttccttgctcctagttattctgtatatctttactttgtaggtaaaaataaatgtttatttaaaacaatttttaaa

SEQ ID NO: 494213 - DNA, 120 bp, Artificial Sequence
  ENSG00000163162_20 (sequence is synthesized)
tttatttttatagccatatgtaggatataaagatttatatagattattttctcaagctacttaatgctttaattctagctactcatcatgaaatagtaaacagttttactgaaataaact

SEQ ID NO: 494214 - DNA, 120 bp, Artificial Sequence
  ENSG00000163162_21 (sequence is synthesized)
aataaactctacagacagatgcagtatgaggagctattgaagtagaaaatgtatttcgctttgcacactgagttggttttagcagacaacctcaagtaggtttccataacagccattacc

SEQ ID NO: 494215 - DNA, 120 bp, Artificial Sequence
  ENSG00000163162_22 (sequence is synthesized)
tttgaaatctaccttctgtagtttattataaataggaaaatacatcctgattctgtagcaagtagattgtttgctctttgtctttaagaaatactaggagggccgggcgcggtggctcac

SEQ ID NO: 494216 - DNA, 120 bp, Artificial Sequence
  ENSG00000163162_23 (sequence is synthesized)
tagcaggattggaagcttcatgccatgggagctgtcaagaaaggcatcccaaagagaactgaaatttaaaaataataatagaccttcaggaataggtgatttgaagatattaaagctaga

SEQ ID NO: 494217 - DNA, 120 bp, Artificial Sequence
  ENSG00000163162_24 (sequence is synthesized)
aattggaactagaaaatcaaaagaattcaaggcatcttaacgtgacagttgaactcatttgattatacttaaaaaagtttattgcagttattgactctcaattttttttttttttttttg

SEQ ID NO: 494218 - DNA, 77 bp, Artificial Sequence
  ENSG00000163162_25 (sequence is synthesized)
accctgataatttttttttccccaatataaacgaggtcttgctatgtcctccagtctggtcttgaactcaagtgatc

SEQ ID NO: 494219 - DNA, 65 bp, Artificial Sequence
  ENSG00000163162_26 (sequence is synthesized)
cacaccctgataatttttttttccccaatataaacgaggtcttgctatgtcctccagtctggtct

SEQ ID NO: 494220 - DNA, 120 bp, Artificial Sequence
  ENSG00000163162_27 (sequence is synthesized)
ttttattttcaagcttttgttggtgttgcaagtgtaaatctgttttataaaatgttctataaatataaccactattccttgtaagctatttaaaataaattttaaagtctttcaagtaaa

SEQ ID NO: 494221 - DNA, 120 bp, Artificial Sequence
  ENSG00000163162_28 (sequence is synthesized)
tacttattactactagttgatttatgccacattttttcccaaaaagctttcaaataacttacagaggcacataaaaatgtacaacctagcgtgagagcataaataagccatggtttttgt

SEQ ID NO: 494222 - DNA, 120 bp, Artificial Sequence
  ENSG00000163162_29 (sequence is synthesized)
agagtgaagggaaaatttccctagaagtgccagattctgtttcatatggaagagagaataatgacatgataagtaagtagactagaatgtttatttgacatcagctaacttgtaatgaga

SEQ ID NO: 494223 - DNA, 120 bp, Artificial Sequence
  ENSG00000163162_30 (sequence is synthesized)
tgatgaatggaagggggggcctctctgtctccatcatggagccgtagtaaagccatttatctctctcagtgacagcaaagagaagggccgtcagagagccagtggcttcccaaggcaggc

SEQ ID NO: 494224 - DNA, 120 bp, Artificial Sequence
  ENSG00000163162_31 (sequence is synthesized)
cttttgagcgtccacttatttctgtcattgtggaaagttgactgttctgtcttgaggactaggaagaggcctttaccttttaggtacttgaatagatgagcatgtggtacccctatcctc

SEQ ID NO: 494225 - DNA, 120 bp, Artificial Sequence
  ENSG00000163162_32 (sequence is synthesized)
agcttcttactttcttgacaatatttaagcataagaagtggttgcttcttcagacaaattaaaatcagtactcttggtgaaacacctcttaaagttacatatggctgttctgcatattaa

SEQ ID NO: 494226 - DNA, 120 bp, Artificial Sequence
  ENSG00000163162_33 (sequence is synthesized)
gatttgaatggcttttgttgttagggggcttttttatgaagttggtgcaaaagtaatcgcagttttgccattaaaagttattttcagtatagtcatttgactttgcctttcaaatgaaat

SEQ ID NO: 494227 - DNA, 120 bp, Artificial Sequence
  ENSG00000163162_34 (sequence is synthesized)
gttaaaaattacttgacaagttttaggtgtctgacaaaatagttatttgttttttatgataatgaagatcttgtaatttgtgatcatctcttctttttagaaaagcagcttggattttaa

SEQ ID NO: 494228 - DNA, 120 bp, Artificial Sequence
  ENSG00000163162_35 (sequence is synthesized)
atataatatcttccctgccctttaagattgctttgcctaggagattcttaggtgacactaagactcgttaagtatctttgtcgtagattgacttttagtcttctaagcaaggctttatca

SEQ ID NO: 494229 - DNA, 120 bp, Artificial Sequence
  ENSG00000163162_36 (sequence is synthesized)
tcatgtggaccagtatttaactgtggaaaccgcgggtggcatggagaaggaggcagtgtccgtgactgtgctgctctccgcagccccctgcctgctgtcctgtttcctcggctcctcggt

SEQ ID NO: 494230 - DNA, 120 bp, Artificial Sequence
  ENSG00000163162_37 (sequence is synthesized)
aaccagaaatttgagaacagcctgggcagcatagtgagaccccatctctacaaaaacttcacagattagccaggtatggtggcattctcctgtagtcccagctactcagaatgctgaggc

SEQ ID NO: 494231 - DNA, 120 bp, Artificial Sequence
  ENSG00000163162_38 (sequence is synthesized)
cccagctactcagaatgctgaggcaggagagtggcttgtgaccaagagttcaggctgcagtgagctatgatcctgtcactgtactccagcctgagcctgggtgacagagcaagaccctgt

SEQ ID NO: 494232 - DNA, 120 bp, Artificial Sequence
  ENSG00000163166_0 (sequence is synthesized)
agacgccattttggccccagcggtgcttctaggaagtagaacgccggctcgcatgcctgcccgcccgccagcctgccgggtacggccttttccgccggggcttccaggtcaaagaattcg

SEQ ID NO: 494233 - DNA, 120 bp, Artificial Sequence
  ENSG00000163166_1 (sequence is synthesized)
cctttgccgctaccgctttcttaccctccgcacccgttaagttctccggtcgggcggcagtctctgaacacttagccgcgccatccggggtcacaccgcctggaaggaggtgacgggggc

SEQ ID NO: 494234 - DNA, 120 bp, Artificial Sequence
  ENSG00000163166_2 (sequence is synthesized)
ggcgcggggcgcggacactccccgctgagagtccgcctgccatggactcggaatattacagcggcgaccagtcagatgatggtggtgctaccccagtacaggatgaacgggattcagggt

SEQ ID NO: 494235 - DNA, 120 bp, Artificial Sequence
  ENSG00000163166_3 (sequence is synthesized)
cagacggtgaggatgatgtaaatgagcaacactccggatcagacactggaagtgtagaacgtcattcagagaatgaaactagtgatcgagaagatggcctccccaaaggacatcatgtga

SEQ ID NO: 494236 - DNA, 120 bp, Artificial Sequence
  ENSG00000163166_4 (sequence is synthesized)
cagactctgagaacgatgagcccttaaatcttaatgctagtgactctgaaagtgaggagcttcacaggcaaaaggacagcgactctgaatctgaggaacgtgcagagcctcctgcaagcg

SEQ ID NO: 494237 - DNA, 120 bp, Artificial Sequence
  ENSG00000163166_5 (sequence is synthesized)
attctgaaaatgaggatgtcaatcagcatgggagcgactctgagagtgaagagaccaggaaattacctggtagtgactctgaaaatgaggaacttcttaatgggcatgcaagtgactcag

SEQ ID NO: 494238 - DNA, 120 bp, Artificial Sequence
  ENSG00000163166_6 (sequence is synthesized)
aaaacgaagatgttgggaagcatcccgccagtgattctgagattgaggagctccagaagagtcctgctagtgactctgaaacagaagatgctctaaaacctcaaatcagtgactctgaga

SEQ ID NO: 494239 - DNA, 120 bp, Artificial Sequence
  ENSG00000163166_7 (sequence is synthesized)
gtgaggaacccccaaggcaccaagccagtgactccgaaaatgaggagcctcccaaacctcgaatgagtgattctgaaagtgaggagcttcctaaacctcaggtcagtgattcagaaagtg

SEQ ID NO: 494240 - DNA, 120 bp, Artificial Sequence
  ENSG00000163166_8 (sequence is synthesized)
aggaacccccaaggcaccaggccagtgactctgaaaatgaggagcttcccaaacctcgtatcagtgactcagaaagtgaggaccctccgaggcaccaggccagtgactcagaaaatgaag

SEQ ID NO: 494241 - DNA, 120 bp, Artificial Sequence
  ENSG00000163166_9 (sequence is synthesized)
agcttcccaaaccccgaatcagtgattcggaaagtgaggatcccccaaggaaccaggccagtgattcggaaaatgaggagctacccaaaccccgagtcagtgactctgagagtgaggggc

SEQ ID NO: 494242 - DNA, 120 bp, Artificial Sequence
  ENSG00000163166_10 (sequence is synthesized)
ctcagaaggggcctgccagtgactcagaaactgaggatgcgtccagacacaaacagaagccagagtcagatgatgacagcgacagggagaataagggagaggatacagaaatgcagaatg

SEQ ID NO: 494243 - DNA, 120 bp, Artificial Sequence
  ENSG00000163166_11 (sequence is synthesized)
actccttccattcagacagccatatggacagaaaaaagtttcacagttctgatagtgaggaggaagaacacaaaaagcaaaaaatggacagtgatgaagatgaaaaagagggtgaggagg

SEQ ID NO: 494244 - DNA, 120 bp, Artificial Sequence
  ENSG00000163166_12 (sequence is synthesized)
atgactctgacagtgatgctgtatcagacaagtcaggcaaaagagagaagaccatagcatctgacagtgaggaagaagctgggaaagaattgtctgataagaaaaatgaagagaaggatc

SEQ ID NO: 494245 - DNA, 120 bp, Artificial Sequence
  ENSG00000163166_13 (sequence is synthesized)
tgtttgggagtgacagtgagtcaggcaatgaagaagaaaatcttattgcagacatatttggagaatctggtgatgaagaggaagaagaatttacaggttttaaccaagaagatctggaag

SEQ ID NO: 494246 - DNA, 120 bp, Artificial Sequence
  ENSG00000163166_14 (sequence is synthesized)
aagaaaaaggtgaaacacaggtaaaagaagcagaagattcagattctgatgataacataaagagaggaaaacatatggactttctgtcagattttgagatgatgttgcagcgaaaaaaga

SEQ ID NO: 494247 - DNA, 120 bp, Artificial Sequence
  ENSG00000163166_15 (sequence is synthesized)
gcatgagtggcaagcgcagacggaaccgcgatggtggcacctttattagtgatgcagacgacgtcgtgagtgccatgatcgtcaagatgaatgaagctgctgaggaagacagacagttga

SEQ ID NO: 494248 - DNA, 120 bp, Artificial Sequence
  ENSG00000163166_16 (sequence is synthesized)
acaatcaaaaaaagccagcactgaaaaaattaactttactgcctgctgtagttatgcaccttaagaagcaggaccttaaagaaacattcattgacagtggtgtgatgtctgccatcaaag

SEQ ID NO: 494249 - DNA, 120 bp, Artificial Sequence
  ENSG00000163166_17 (sequence is synthesized)
aatggctctcacctctaccagataggagtttgcctgcactcaagatccgggaggagctgctgaagatcctgcaagagctgcctagtgtgagccaggagaccctgaagcatagtgggattg

SEQ ID NO: 494250 - DNA, 120 bp, Artificial Sequence
  ENSG00000163166_18 (sequence is synthesized)
gacgagcagtgatgtatctctataaacaccccaaggagtcaaggtctaacaaggacatggcagggaaattaatcaatgagtggtctaggcctatatttggtcttacctcaaactacaaag

SEQ ID NO: 494251 - DNA, 120 bp, Artificial Sequence
  ENSG00000163166_19 (sequence is synthesized)
gaatgacaagagaagaaagggagcagagagatctagaacagatgcctcaacgacgaagaatgaacagcactggtggtcagacacccagaagagacctggaaaaggtgctgacaggagagg

SEQ ID NO: 494252 - DNA, 120 bp, Artificial Sequence
  ENSG00000163166_20 (sequence is synthesized)
agaaggctcttagacctggagatcctggattctgtgcccgtgcaagggtcccaatgccttcaaacaaggactatgttgtcaggcccaaatggaatgtggaaatggagtcatccaggtttc

SEQ ID NO: 494253 - DNA, 120 bp, Artificial Sequence
  ENSG00000163166_21 (sequence is synthesized)
aggcgacctccaagaagggtatcagtcgactggataaacagatgagaaagttcacagatataaggaaaaaaagcagatctgcacacgcagtgaaaatcagcattgagggcaacaaaatgc

SEQ ID NO: 494254 - DNA, 120 bp, Artificial Sequence
  ENSG00000163166_22 (sequence is synthesized)
cattgtgaccttgcctggaatgtgtccccatctctactctaagaaatgcgcaatggactctttggagaaagaagatattttaaaacatttttagtgtgtctgtaaatggttcagcgtgta

SEQ ID NO: 494255 - DNA, 120 bp, Artificial Sequence
  ENSG00000163166_23 (sequence is synthesized)
tcagatgttgtcataggactcacatttctctcagttatatttaaaaccgttgtgtactttgtacaaaggaatactagtcatacttctataaactttacacaataaaatttcattctggtt

SEQ ID NO: 494256 - DNA, 120 bp, Artificial Sequence
  ENSG00000163166_24 (sequence is synthesized)
ttttggccccagcggtgcttctaggaagtagaacgccggctcgcatgcctgcccgcccgccagcctgccggaatgaaactagtgatcgagaagatggcctccccaaaggacatcatgtga

SEQ ID NO: 494257 - DNA, 120 bp, Artificial Sequence
  ENSG00000163166_25 (sequence is synthesized)
agtgcccctgcttgggccttgctgggctctgggctcacttggatttgcctggactcaccctgcccactcggcctggcaggctgcacttggtttttgctaccggcctctgcaggcaagaca

SEQ ID NO: 494258 - DNA, 120 bp, Artificial Sequence
  ENSG00000163166_26 (sequence is synthesized)
tacagtaagtataagatggaaatatttcctccttgattgtgcttttttttggtgtttttatggcagtgataccattatagatgattctaataagtaggaataaacaattatgatgtattc

SEQ ID NO: 494259 - DNA, 120 bp, Artificial Sequence
  ENSG00000163166_27 (sequence is synthesized)
aagataaaaatctagaagagggattcaggaagtaaaatgaaagcgtatatacaaagacataaaaggaagctaatgggcaaaattgaattaagggggaagggacactttgagacaaagaaa

SEQ ID NO: 494260 - DNA, 120 bp, Artificial Sequence
  ENSG00000163166_28 (sequence is synthesized)
agacgccattttggccccagcggtgcttctaggaagtagaacgccggctcgcatgcctgcccgcccgccagcctgccggatgatggtggtgctaccccagtacaggatgaacgggattca

SEQ ID NO: 494261 - DNA, 120 bp, Artificial Sequence
  ENSG00000163166_29 (sequence is synthesized)
atactacaagtcccagtgagcaacgcccgctttcttgcctactgcgggcgggaaccaggcgcctctgggcctgacgggaaagacagtggtttggctgaatgacggaaaagtcatttgagc

SEQ ID NO: 494262 - DNA, 120 bp, Artificial Sequence
  ENSG00000163166_30 (sequence is synthesized)
aggtcttcatttttcggaagagtatctcaaaagctcttcaaacaaggcacggacacagaatctaggaaatgataaagaatcaatgataacgttattaccacgggggtcagaccaggatcc

SEQ ID NO: 494263 - DNA, 120 bp, Artificial Sequence
  ENSG00000163166_31 (sequence is synthesized)
ccaatgccttcaaacaaggactatgttgtcaggcccaaatggaatgtggaaatggagtcatccagggttttgctgttactgctcagtgtagtcacaccttgaataagaaatggaaaacct

SEQ ID NO: 494264 - DNA, 120 bp, Artificial Sequence
  ENSG00000163166_32 (sequence is synthesized)
gtctaatgtgctggagtggcccaggcggaggcccacttgcagagactaatgggagcctcaagagaaaatctaccataagaaaaggaccagtctgatagcaagcccagcttcccaagaaga

SEQ ID NO: 494265 - DNA, 120 bp, Artificial Sequence
  ENSG00000163166_33 (sequence is synthesized)
tagaaggttggaggcaagctgctgtccagaactcgcacacaaagcagcatgagacagaagcttttgaaggggagtggaatggcttttaccggcagtgcagttttcttcttgcaccagtgt

SEQ ID NO: 494266 - DNA, 120 bp, Artificial Sequence
  ENSG00000163166_34 (sequence is synthesized)
agacgccattttggccccagcggtgcttctaggaagtagaacgccggctcgcatgcctgcccgcccgccagcctgccgggtacggccttttccgccggggcttccagatgatggtggtgc

SEQ ID NO: 494267 - DNA, 120 bp, Artificial Sequence
  ENSG00000163170_0 (sequence is synthesized)
atacagtgacctcgggcggcgggtcacgtcggccgggcatggctgcatggagcccggccgcggcagcgcctctcctccgcgggatccgcgggcttccacttcaccatcggatgtttgcca

SEQ ID NO: 494268 - DNA, 120 bp, Artificial Sequence
  ENSG00000163170_1 (sequence is synthesized)
ctcagactgagggggagctcagagtgacccaaattctcaaagaaaagtttccacgagctacagctataaaagtcactgacatttcaggaggttgtggggcgatgtatgaaattaaaattg

SEQ ID NO: 494269 - DNA, 120 bp, Artificial Sequence
  ENSG00000163170_2 (sequence is synthesized)
aagagatgcatggattgcggatatttacctctgtccccaaacgctgaccacgccctggctgcatagatgctgctgcttaagaccttggatgaacttcactgacatcattcttccctaagc

SEQ ID NO: 494270 - DNA, 120 bp, Artificial Sequence
  ENSG00000163170_3 (sequence is synthesized)
agtcaccaaaaaatttatatattttgctcatatacatttccatattataattatagaagatgtataatctatttagatgttaattaaaggaaacaaacaactgaagcttttgaagggtca

SEQ ID NO: 494271 - DNA, 120 bp, Artificial Sequence
  ENSG00000163170_4 (sequence is synthesized)
cgccaataaaagtttattctgtgttttggggcacttacatggactcctgataccacagagcccctctgacataacccatggctgtgctggcgagggctcaggggcctgccttgcaggggg

SEQ ID NO: 494272 - DNA, 120 bp, Artificial Sequence
  ENSG00000163170_5 (sequence is synthesized)
atacagtgacctcgggcggcgggtcacgtcggccgggcatggctgcatggagcccggccgcggcagcgcctctcctccgcgggatccgcggggtgagcgtgggcagggtcggggctgctc

SEQ ID NO: 494273 - DNA, 120 bp, Artificial Sequence
  ENSG00000163170_6 (sequence is synthesized)
tccccgggacgggagctgcggagggaccgcggggccggcggctgtcggggcttgaggactggctcccggagggcgcgcgcggcactggcaatggggggctcctcttcctttctctcattc

SEQ ID NO: 494274 - DNA, 120 bp, Artificial Sequence
  ENSG00000163170_7 (sequence is synthesized)
attctttcattcattcattcactcagcgacaacggcattcgaaatttcaagctctggcgcgctctaggggagctcccgagctgggtggaggttggaggtcaggcggacagacacatgaac

SEQ ID NO: 494275 - DNA, 120 bp, Artificial Sequence
  ENSG00000163170_8 (sequence is synthesized)
agtcataatactgcgggcacaggaaaaaaaaaggattggtttaccgagcagaagacaggagtcatagcccagagtcaaggcgtgggtgcgagggactgcagcggggccggggccttggga

SEQ ID NO: 494276 - DNA, 120 bp, Artificial Sequence
  ENSG00000163170_9 (sequence is synthesized)
aggtcgactgggcctctgaccttgatcctcctccaaatcccacactaccggagcagaacccaagcagggggcacttcccacgcgctctcctaatctctccccctttctgaaccatccttt

SEQ ID NO: 494277 - DNA, 120 bp, Artificial Sequence
  ENSG00000163170_10 (sequence is synthesized)
gcttcagctcataccattctttctcttaactttcattttccttctcccctggttctgaacctgcctgccctgtgcatgaagagaagttcttccactgcggtgactttcagcgtggacagt

SEQ ID NO: 494278 - DNA, 120 bp, Artificial Sequence
  ENSG00000163170_11 (sequence is synthesized)
gatcatctggggatgtcagttgattgttccactaaaggccgctgcccacagatccgctaagatgaaaggcttctcccaaggattctgcaacgctcacctctctcaccccttagtagctgc

SEQ ID NO: 494279 - DNA, 120 bp, Artificial Sequence
  ENSG00000163170_12 (sequence is synthesized)
cgattctgtctgccatctggttactctctgcctttaccctcaagattctgcccccagaagcagctccaccccaccctcactcctggcaatcctgtccagcctctcaacatcgagtttctg

SEQ ID NO: 494280 - DNA, 120 bp, Artificial Sequence
  ENSG00000163170_13 (sequence is synthesized)
tccctccacacagcaggcagacaatcacactctggacctttctcctgtcttgcatttctgtccctaattgactagttcttcccctgctcattcattcatccagcaccaagtgcctctgag

SEQ ID NO: 494281 - DNA, 120 bp, Artificial Sequence
  ENSG00000163170_14 (sequence is synthesized)
ggcctgccctggggtcagctctgggatgctgccggactcattcctggcctataagaccagtggtgagagagccagtgcacagctcattttaaaggaggtgctctgagattctgtgacaca

SEQ ID NO: 494282 - DNA, 120 bp, Artificial Sequence
  ENSG00000163170_15 (sequence is synthesized)
ggaccctgctctgagctatcaggaaggactgaggggtagaggggtgggaccttcagcaccagcacccatgaacggccctagtgtcctccaacctgtcatccacgtctagtcagggaccag

SEQ ID NO: 494283 - DNA, 120 bp, Artificial Sequence
  ENSG00000163170_16 (sequence is synthesized)
tgcccggtgcttccatcattgtaatgcctcttacttgggcatctctcctgactcgctccagaaggcactgtttcctgcaggttactttggtcccatgagcctgggttctatcacctggag

SEQ ID NO: 494284 - DNA, 120 bp, Artificial Sequence
  ENSG00000163170_17 (sequence is synthesized)
tgcactcagcccagccaagtgactgccgacctgcttttctgctccttcactactaactgttgagacgtgttccatcagaaacatgggctcccctggccgggcgtggtggctcatgcctgt

SEQ ID NO: 494285 - DNA, 120 bp, Artificial Sequence
  ENSG00000163170_18 (sequence is synthesized)
aaaaaaaaaaaaaaaggaaacacaaacacaggttcccccatggtagccattggggaaggggtgttgttgccaatggtaaacaacctacagatactccttcttcaggttctttcatagaat

SEQ ID NO: 494286 - DNA, 120 bp, Artificial Sequence
  ENSG00000163170_19 (sequence is synthesized)
tctgactttgctcccagtgagaaggagtgcatgatgaaggatagctggctaattgagcagtgggctgtgaggtcacatcccactggggagggcgagacatgttaatcaggcctaaaggcg

SEQ ID NO: 494287 - DNA, 120 bp, Artificial Sequence
  ENSG00000163170_20 (sequence is synthesized)
agggagtgtggaatttggccccaccatccagggcagtggatggcctagtggtatggatctgaggcaggctatccagcttttctggctctgtatcttaccgaattcaaccttgggcacatt

SEQ ID NO: 494288 - DNA, 120 bp, Artificial Sequence
  ENSG00000163170_21 (sequence is synthesized)
actgtgtgcctcagtttccttacctataaaactatcggcataatagtgtcacaacattatatggaagcaaacatctcttgaattaggtttggggcctcttgtctctggagtcaaattgag

SEQ ID NO: 494289 - DNA, 120 bp, Artificial Sequence
  ENSG00000163170_22 (sequence is synthesized)
atacagtgacctcgggcggcgggtcacgtcggccgggcatggctgcatggagcccggccgcggcagcgcctctcctccgcgggatccgcgggttcttccactgcggtgactttcagcgtg

SEQ ID NO: 494290 - DNA, 120 bp, Artificial Sequence
  ENSG00000163171_0 (sequence is synthesized)
ccggagcccgggctgagagggacctggggagctgcggcctggccggggcggcgcactcaggtggcctcgcttccctgcgggtcaccgcccgccactcgcacagctaggtcggcctgttgg

SEQ ID NO: 494291 - DNA, 120 bp, Artificial Sequence
  ENSG00000163171_1 (sequence is synthesized)
gatcgggagaggtgggcgcacgagttttagtgcgggagtccggggtgcgggcggagtcctattgtccccgtgcacccgggcggcagcacctccgggtccctctttaaaccgagcgtccgg

SEQ ID NO: 494292 - DNA, 120 bp, Artificial Sequence
  ENSG00000163171_2 (sequence is synthesized)
cgacctttctttgtgcttagggagtcgaaagcggcatcttctccgagagaagtcgcctactggggggtggcgctggggaggtaacaatgggcgcccattgtcctccgagggtccaacggt

SEQ ID NO: 494293 - DNA, 120 bp, Artificial Sequence
  ENSG00000163171_3 (sequence is synthesized)
gtaacaatgggcgcccattgtcctccgagggtccaacggtgacccccccccgcgcgcgcgcccggccaccggttggccccgggccagggcacaggtaccgcggctgggagggtcggcccc

SEQ ID NO: 494294 - DNA, 80 bp, Artificial Sequence
  ENSG00000163171_4 (sequence is synthesized)
cagtcctcgcgtccggccgccccgcgctcagtcgcgcgcaccttctctcgcggccgggggaccgcagcgcggggctagcc

SEQ ID NO: 494295 - DNA, 120 bp, Artificial Sequence
  ENSG00000163171_5 (sequence is synthesized)
cggagacccggccaccggcctggggcgccttcacgccgtctcggagcggataatgcggtgagcaggcaccacgccggcagactcggctggatctgcgcacagcggcagggattgcgtgcg

SEQ ID NO: 494296 - DNA, 120 bp, Artificial Sequence
  ENSG00000163171_6 (sequence is synthesized)
cccgcgggaggcccggggcagcggctgggatcctcagcggcggccggtttgtcctggttgtggtcaagactggatgatgtaactggctctctaggaagcctcacttggccgtaacctcag

SEQ ID NO: 494297 - DNA, 120 bp, Artificial Sequence
  ENSG00000163171_7 (sequence is synthesized)
gaaggttctctttgaccccatctcatttcgaagccacttctgaagccacttgagaaaaatgatgtgacagttcctatcaaaaaggattcagaaacatataccatctgtgaagaaagtggc

SEQ ID NO: 494298 - DNA, 120 bp, Artificial Sequence
  ENSG00000163171_8 (sequence is synthesized)
cctttctcccgcttgcaaaatagacattctcaaattccaaaatgccagccaagaccccaatttacctgaaagcagccaataacaagaaaggaaagaaatttaaactgagggacattctgt

SEQ ID NO: 494299 - DNA, 120 bp, Artificial Sequence
  ENSG00000163171_9 (sequence is synthesized)
ctcctgatatgatcagtcccccgcttggagactttcgccacaccatccacattggcaaagagggccagcacgatgtctttggagatatttcctttcttcaagggaactacgagcttttac

SEQ ID NO: 494300 - DNA, 120 bp, Artificial Sequence
  ENSG00000163171_10 (sequence is synthesized)
ctggaaaccaggagaaagcacacctgggccagttccctgggcataatgagttcttccgggccaacagcacctcggactctgtgttcacagaaacgccctccccggtgctcaaaaatgcca

SEQ ID NO: 494301 - DNA, 120 bp, Artificial Sequence
  ENSG00000163171_11 (sequence is synthesized)
tctccctcccgaccattggaggatcccaagctctcatgttgcccttattgtcaccagtgacatttaattccaaacaggagtccttcgggccagcaaagctgcccaggcttagctgcgagc

SEQ ID NO: 494302 - DNA, 120 bp, Artificial Sequence
  ENSG00000163171_12 (sequence is synthesized)
ccgtcatggaggaaaaagctcaggagaaaagcagtctgttggagaatgggacagtccaccagggagacacctcgtggggctccagcggttctgcatctcagtccagccaaggcagagaca

SEQ ID NO: 494303 - DNA, 120 bp, Artificial Sequence
  ENSG00000163171_13 (sequence is synthesized)
gccactcctccagcctgtccgaacagtaccccgactggccagccgaggacatgtttgaccatcccaccccatgcgagctcatcaagggaaagactaagtcagaggagtccctctctgacc

SEQ ID NO: 494304 - DNA, 120 bp, Artificial Sequence
  ENSG00000163171_14 (sequence is synthesized)
ttacaggttccctcctctccctgcagcttgatcttgggccctcacttttggatgaggtgctgaatgtaatggataaaaataagtaacaagatgccaacttttttcctttggggtaaaagg

SEQ ID NO: 494305 - DNA, 120 bp, Artificial Sequence
  ENSG00000163171_15 (sequence is synthesized)
tacaaaaacaaactaaccacagttgaagagaagggcttccggagctgtatttgcagttttgtgttgggttttctaaaataatattcttacaaagtatttttttacctgttatgccctgtt

SEQ ID NO: 494306 - DNA, 120 bp, Artificial Sequence
  ENSG00000163171_16 (sequence is synthesized)
tgcaaaaacaatttagaaaaaaacaacaaagcaaaacctatcttggcaaaaaaaggaagtgagtcagagcccattttcaggaggcattggtgatgttcggctcacatattgtttgcagac

SEQ ID NO: 494307 - DNA, 120 bp, Artificial Sequence
  ENSG00000163171_17 (sequence is synthesized)
acacaagaaatctggcttggccaggattggcactagctatgaagggctgagcgagtcacattaaggaacttcacggaactttatagcactccgacattttctgagcaagaggaagtcaaa

SEQ ID NO: 494308 - DNA, 120 bp, Artificial Sequence
  ENSG00000163171_18 (sequence is synthesized)
atttatttaacacctaagcctttttgtagactcttttctatatattgcttaggctcaccatagcgaattctccagtgttaaaacttttctgttttcacatttgaactttatgggttttgg

SEQ ID NO: 494309 - DNA, 120 bp, Artificial Sequence
  ENSG00000163171_19 (sequence is synthesized)
ggattttcttgtagttcttatatatccctatatattatatctatattgcaaaattttgactgtcagctacatgttggtaagacacaggcaaagtattactgtaactaagttatttttaaa

SEQ ID NO: 494310 - DNA, 120 bp, Artificial Sequence
  ENSG00000163171_20 (sequence is synthesized)
gttaaaatatatttttacgtgcctttggctttttattgcagagtctacattttatagattctacatcagatgttgtcacttatttccattgggattccattgtaagctgtgtatgtgcgt

SEQ ID NO: 494311 - DNA, 120 bp, Artificial Sequence
  ENSG00000163171_21 (sequence is synthesized)
gtttggaaaagtgtattcatacttagtttttttttcttcatctgttatcatacttttaacagcaaccaataacggattgtaaagtgtaaaggcacaggttactcatgatgcttctgcaga

SEQ ID NO: 494312 - DNA, 120 bp, Artificial Sequence
  ENSG00000163171_22 (sequence is synthesized)
gactgtgggctacaccacatatgttatttggaaatataggtattttagtacagtacatacttgcattacataggtacttcaagcaacacaataaaaagtaaatgataaagtgaacttgct

SEQ ID NO: 494313 - DNA, 120 bp, Artificial Sequence
  ENSG00000163171_23 (sequence is synthesized)
gaaatgtacatgagcccttaaggtaagagatgatttccatctactctcattttgattacttccttatggtttgagaggctagaaactgagcctctctacttttggaaaaatgaacatgtg

SEQ ID NO: 494314 - DNA, 120 bp, Artificial Sequence
  ENSG00000163171_24 (sequence is synthesized)
aggtcagatttttttttttttttttaagtcagcactgatgccaccctctcagtggtcatttctgagcatcttcctgacttgaacaccttctacagcaaactcttgcaagtccagtttcat

SEQ ID NO: 494315 - DNA, 120 bp, Artificial Sequence
  ENSG00000163171_25 (sequence is synthesized)
ccctgtaaggcaaatgtcttttcacgcagaaagtgccatatagacgagataaaggcagctaaaacgagggcagtagagagcacttacccgaccccaaggtgccagagatgccctgaggat

SEQ ID NO: 494316 - DNA, 120 bp, Artificial Sequence
  ENSG00000163171_26 (sequence is synthesized)
ggtggttaaggaaacaggagcaggaaatgtacacacagattcctgtccctttgccaactactccttccccatcaaagaaaaacacttgcacacagtaactaccagctccttctctcaaac

SEQ ID NO: 494317 - DNA, 120 bp, Artificial Sequence
  ENSG00000163171_27 (sequence is synthesized)
ttgtatttctcctggaaatgtatctcagaaatgacctcctctcccaaccacttcaacgattctttctttgggtttggggttcttgcagttctatcatctaaaataacctttggactgcag

SEQ ID NO: 494318 - DNA, 120 bp, Artificial Sequence
  ENSG00000163171_28 (sequence is synthesized)
gtaaaatgcaattaggacaactaaccaagtagacgaaacaagttcccctaggcaggggtgtccaatattttagcttccctggaccgcattggaagaattttcttgggccacatgtaaaac

SEQ ID NO: 494319 - DNA, 88 bp, Artificial Sequence
  ENSG00000163171_29 (sequence is synthesized)
ggaccgcattggaagaattttcttgggccacatgtaaaacacactaacactaaccatagttgatgagcttaaaaaaataaaaatctca

SEQ ID NO: 494320 - DNA, 120 bp, Artificial Sequence
  ENSG00000163171_30 (sequence is synthesized)
tgcgggccacaggttggacaagcttgccctagggcattgtgtgctttccgtaacttctcagttgtatttcgttatccatgactctccagtgttttttctgttggaccacacccgtcacag

SEQ ID NO: 494321 - DNA, 120 bp, Artificial Sequence
  ENSG00000163171_31 (sequence is synthesized)
ttcacagttccaaagagaaatttcccagcctattctaaatcttgttaatgacgaagagtccaatgtatctcattatttgtagccaattttagactcttttcaatacctcccccccatttt

SEQ ID NO: 494322 - DNA, 120 bp, Artificial Sequence
  ENSG00000163171_32 (sequence is synthesized)
aattagtattgatcatattcagtctttcattttactcttcatctgtagcgtgacctcaaggtaaagatgaaactatttcatgaaaaggggaggagtatggctgtgcattagctctactcc

SEQ ID NO: 494323 - DNA, 120 bp, Artificial Sequence
  ENSG00000163171_33 (sequence is synthesized)
ctctctggtaagtactggggagagaacagccctgccagtactgggtttgatagattctaaatattaatcacacatcctgcctacagttagccattttagtttctgggagttctttcatgt

SEQ ID NO: 494324 - DNA, 120 bp, Artificial Sequence
  ENSG00000163171_34 (sequence is synthesized)
acattttcttccattaattgaattaggtataattgagatggcaataaatatgcccgtattagaaagaggaaacaaagctacatgcggcttatgattttgttgagtcacttctcccgaggc

SEQ ID NO: 494325 - DNA, 120 bp, Artificial Sequence
  ENSG00000163171_35 (sequence is synthesized)
agcctttccaatgcctggtcccttcccctgagagcaggtggactgctggtggtggctttctttcctgcagagaggcactttagacccatacctgctgtgagctgaattgatgttctcatc

SEQ ID NO: 494326 - DNA, 120 bp, Artificial Sequence
  ENSG00000163171_36 (sequence is synthesized)
ctgtgaaccttctcccactttaacctaatttatctttacttgtttaaagataaggaaacccaagatgtactttatttgcaaactcaaagcaaatggcgagccacctgtgacccagtaacc

SEQ ID NO: 494327 - DNA, 120 bp, Artificial Sequence
  ENSG00000163171_37 (sequence is synthesized)
agaaaagaaaccatgccatttgtataagtagagacacttcttgttgaggtaggcaaggctcttgtgagcgatttttttcccctagtgagacctaacaaaagacaagctatatcatttctg

SEQ ID NO: 494328 - DNA, 120 bp, Artificial Sequence
  ENSG00000163171_38 (sequence is synthesized)
cctgaaattatctgcttgaaaagatcaaaatatcaggatacttagctcttcacaaatatgaagtcattatcacatttcactgagccagaaatcactgttaacagcacacacaaaagacta

SEQ ID NO: 494329 - DNA, 120 bp, Artificial Sequence
  ENSG00000163171_39 (sequence is synthesized)
cactggttgaacagcaaagagaaacccgggtctccagaatcacagtttagtccttctatattactgcaagtgacctgttttttctgaaggctccccgcaaatgaagtcctggaatggaaa

SEQ ID NO: 494330 - DNA, 120 bp, Artificial Sequence
  ENSG00000163171_40 (sequence is synthesized)
aaatccataagtccataaattaacttgataaatattttagaacagacaaaagaaaatattgagtgatgtagttctaatcctcctaatatggaacctggcaagactgaatcattttactgt

SEQ ID NO: 494331 - DNA, 120 bp, Artificial Sequence
  ENSG00000163171_41 (sequence is synthesized)
gaaatatataaacacaatagaatgagccaacatgatggtttctctccagtaagagtttttcttttggaaatgaggttaacctagccccaaatctagcaattctcataaaatccgatttta

SEQ ID NO: 494332 - DNA, 120 bp, Artificial Sequence
  ENSG00000163171_42 (sequence is synthesized)
gaattagcctcccagattaatctgaatgattgacttattttttcttaggcaagtcagtaagccacccactagacagccatatccagcaaaataagagaagtttccagatgccaaatgata

SEQ ID NO: 494333 - DNA, 120 bp, Artificial Sequence
  ENSG00000163171_43 (sequence is synthesized)
agccaccatcaacccagcggggaagccttctggttggtttggctgtatgagattcaggaaggccagaatacccaaaattattcacacgacgttaacttattggtactggctaagcaatac

SEQ ID NO: 494334 - DNA, 120 bp, Artificial Sequence
  ENSG00000163171_44 (sequence is synthesized)
atgtatttcctaaaggaggagatggtcttttggttgatttatggacacacttgtttcatctgactgtaaatatattgcatgctttattctgatggtgcactatttcatccagcaagcttt

SEQ ID NO: 494335 - DNA, 120 bp, Artificial Sequence
  ENSG00000163171_45 (sequence is synthesized)
tcatctgagaatgtttaatgttgaccttattcttagagcaagtagatctaaatatttttcagctgagttattagggagtcattattctgtggtacaatgctgcaaaaagcatcatgtgga

SEQ ID NO: 494336 - DNA, 120 bp, Artificial Sequence
  ENSG00000163171_46 (sequence is synthesized)
agaatgggaactatgcttactttatgaagtgatgtataacacaatgaaatctgttttacaactactgtgctgcatttaattatcttccatttttgctgttaaaaaaaaaaaatccgttaa

SEQ ID NO: 494337 - DNA, 120 bp, Artificial Sequence
  ENSG00000163171_47 (sequence is synthesized)
cgctggcggtggccgggtgaccggcgggcgcaggtgccaccgcggcctgaattttactctctcgggccggcagctgcgccacttgcgcctcgtcgcgcgtctggggcagccgccaccggc

SEQ ID NO: 494338 - DNA, 120 bp, Artificial Sequence
  ENSG00000163171_48 (sequence is synthesized)
taaacctctttcctttataaattacctggtctcaggtttgtctttattaacagcgtgaaaatggagtaagacactggggatggtagaagatgaggttagagaggtaggcacagccaggga

SEQ ID NO: 494339 - DNA, 120 bp, Artificial Sequence
  ENSG00000163171_49 (sequence is synthesized)
gaggtaggcacagccagggaatgacagaatatttttgtagtcagctgagtactttgtattttatcctgatggctatgagaagccacatgcggtggtccaatctatttgacttggtgacta

SEQ ID NO: 494340 - DNA, 120 bp, Artificial Sequence
  ENSG00000163171_50 (sequence is synthesized)
atgggatctggggagaaggtgtaaaggaaccaggtgagatatgatgacagcctcaaccaaagatataattgacaaataaatggcctcatgtgatcccataggtttcactaggcaggagaa

SEQ ID NO: 494341 - DNA, 120 bp, Artificial Sequence
  ENSG00000163171_51 (sequence is synthesized)
gaaaatagaataattctcctatcagtaatattattctccaatgactactcggtaccttttttcattatttatgtaaattttattgcccctattcaatcatcaggtccttgaaggaagatc

SEQ ID NO: 494342 - DNA, 120 bp, Artificial Sequence
  ENSG00000163171_52 (sequence is synthesized)
agagagacctgtgtctaattcatgtttgtgctgctcacactttctaacacagatcttgcacatatcaaagatgctataaatatatattgaataaatattaacacagaatttgtggggggt

SEQ ID NO: 494343 - DNA, 120 bp, Artificial Sequence
  ENSG00000163171_53 (sequence is synthesized)
ggtggtgccagagtcagtatttaaaccaagagaaagcccttcaactccctcctttgcagagagattactcattctgccatactgcacatccacaagacatttacagcctaccagagacct

SEQ ID NO: 494344 - DNA, 120 bp, Artificial Sequence
  ENSG00000163171_54 (sequence is synthesized)
ttaaagaaagtttcataacatccctgctgaccatctttttggagatggtgggtactagagtctatataatttctacaagattctaaagtagactgccagacattagaaaatgatctgaat

SEQ ID NO: 494345 - DNA, 120 bp, Artificial Sequence
  ENSG00000163171_55 (sequence is synthesized)
ttatgagtcagtcatccacaagagctacatgtttgtcagtggcagggccaaaatcaacaggaccttcttgccaaagtttcgagatacccactcacctatttattgatatctaagggttca

SEQ ID NO: 494346 - DNA, 120 bp, Artificial Sequence
  ENSG00000163171_56 (sequence is synthesized)
gggtcatcaggattctctaaagtcatccatttgcaaacatgttccaagaccagcagtattttgtatatgaaagctatcttgcaatgtagactagctgaatgaaatgtctgtctttgtcat

SEQ ID NO: 494347 - DNA, 120 bp, Artificial Sequence
  ENSG00000163171_57 (sequence is synthesized)
gaactttcatgttttcatttcagtaatgcaaaccacaacagtgctatgatcaaccctcatcatcagtatagaagaaattatctagtcctaacccatgttcttactggtttaatcatttat

SEQ ID NO: 494348 - DNA, 120 bp, Artificial Sequence
  ENSG00000163171_58 (sequence is synthesized)
ttccagctttctgctctttgtttattatttatgtaagatgttgtagctctgtatgctgagttaaaatgtaatcattttattaatattttttaaaaagttaaatttctaaccataaattat

SEQ ID NO: 494349 - DNA, 120 bp, Artificial Sequence
  ENSG00000163171_59 (sequence is synthesized)
aggatgattagttaaagacagaaatcagttttaagcaaaataactaagggcatatcctcttcccagcattttttattaaagaagtattttattttaaaatatttctagacttaacagaaa

SEQ ID NO: 494350 - DNA, 120 bp, Artificial Sequence
  ENSG00000163171_60 (sequence is synthesized)
aattgcaaagataatacagagtcccacataccctatacccattctcacttattaacatcttacattaatattgtccatttgtgataagtaatgaaccaatattgatatatagtttttaat

SEQ ID NO: 494351 - DNA, 120 bp, Artificial Sequence
  ENSG00000163171_61 (sequence is synthesized)
taaagtctatcatgtattaagatttccttagtttttaactaacattctttttctgttccaggatcccatcaacataactcattaaatttagtggttgtgtctctttaggcccttgtttgc

SEQ ID NO: 494352 - DNA, 120 bp, Artificial Sequence
  ENSG00000163171_62 (sequence is synthesized)
tgttaagacttcccttgctttttatgaccttgacagttttgaggagttctcctgtcatttctcctcacatattttgtagaatgtcccctaattgggaattatatgatggctttctcgtga

SEQ ID NO: 494353 - DNA, 120 bp, Artificial Sequence
  ENSG00000163171_63 (sequence is synthesized)
ttaggctggagttatggatttatgagatgaagaccacagaggtaaaatgtcattctcatcatatatcaaggctgcgtactatcaacaagatttatgactgctgatattgaccttaatcac

SEQ ID NO: 494354 - DNA, 120 bp, Artificial Sequence
  ENSG00000163171_64 (sequence is synthesized)
ctgcttggggtggtgtttgttagttttctccactgtaaagttactcctctcatcttttatttgtattttatattattgttattatttgtttatttgttattattttagagacagactctc

SEQ ID NO: 494355 - DNA, 85 bp, Artificial Sequence
  ENSG00000163171_65 (sequence is synthesized)
cttactgcaacgacttccacaagcgctaggattacagcccttctcccccactgcacctccccacatttttatattatactctgga

SEQ ID NO: 494356 - DNA, 120 bp, Artificial Sequence
  ENSG00000163171_66 (sequence is synthesized)
ccccactgcacctccccacatttttatattatactctggaaggaagccacaaggcatagcacacaattaagaagcagcgatttatactccactctttgatggcaaaatatctacagaaat

SEQ ID NO: 494357 - DNA, 120 bp, Artificial Sequence
  ENSG00000163171_67 (sequence is synthesized)
tatttgaacttcttctgcccgggagatttatctattgtcccccattgatttatttattcaatcatttgtttgtatcattatggtctcatggatatctattttgcactttcaatactattt

SEQ ID NO: 494358 - DNA, 120 bp, Artificial Sequence
  ENSG00000163171_68 (sequence is synthesized)
tattttgttgctcaagttgttccagccctggccatggagaatacattcagttggctcctgtgtccctgtaacatagccctgtcattattggatttggttgagcactttcttactttcagg

SEQ ID NO: 494359 - DNA, 120 bp, Artificial Sequence
  ENSG00000163171_69 (sequence is synthesized)
agctacaaaatgctctaggttcgtcttgtatatttcctgctccatcctagagtccatgtctccaaggagcttggttcttttattggagaatgtattagaaaccaagacctggacatgctc

SEQ ID NO: 494360 - DNA, 120 bp, Artificial Sequence
  ENSG00000163171_70 (sequence is synthesized)
cttgttgcaaaggtgttattgcttctaggctcagctgacagagaaataacatatatgtgtgtaaattaacccatgtctatacacatatatctacaaatccttctctttgtaactatctgt

SEQ ID NO: 494361 - DNA, 120 bp, Artificial Sequence
  ENSG00000163171_71 (sequence is synthesized)
atctatattaagctaaatatgagttgatactgatgtctccaatcccaacccagtagcacatagataattctaaccttctcccccttgcttgtttcctctccctcctacaatgaagaacct

SEQ ID NO: 494362 - DNA, 120 bp, Artificial Sequence
  ENSG00000163171_72 (sequence is synthesized)
ggcttctgccatcagccattcgtttatttcattgttcaattccagtctcctgtagagtacttccataattgttaagccatacccacatagaaataactttataagtttgagtgcttatac

SEQ ID NO: 494363 - DNA, 120 bp, Artificial Sequence
  ENSG00000163171_73 (sequence is synthesized)
agagctctttttgcctttaatcttacagactcgattcatttccaaacttacttacgtaagcattttctctcacatccccttcagtacgcttatttcatgcatttgtaatacagttagatt

SEQ ID NO: 494364 - DNA, 120 bp, Artificial Sequence
  ENSG00000163171_74 (sequence is synthesized)
attttgccatattttacatttcatcctggaatcctccaaccttctaaatattttttaaattttgtataattaagtttctctatgccatgaagttctatgggctttgacaagtgcatagtg

SEQ ID NO: 494365 - DNA, 120 bp, Artificial Sequence
  ENSG00000163171_75 (sequence is synthesized)
tcatgtatctagtattatcacaatatcataaaaagatagttttaccaccctttaaaaaatccctagtggttgacctattcaattcctttcaccaagagtttctgaaaccactggtctatt

SEQ ID NO: 494366 - DNA, 120 bp, Artificial Sequence
  ENSG00000163171_76 (sequence is synthesized)
tgccatctccataagagttttgccttttccaggatattacttaaatggaattataccttatgtagccttttaagactggcttttttcacttagcaacatgcatttaagattcatctatgt

SEQ ID NO: 494367 - DNA, 120 bp, Artificial Sequence
  ENSG00000163171_77 (sequence is synthesized)
cttcctgtggtttgacagctcattccattgtgtggatgtgccacagtttatttagccattcacctactaaagtttacttctagtttttggtagttgtaaataaaactgctataaaattct

SEQ ID NO: 494368 - DNA, 120 bp, Artificial Sequence
  ENSG00000163171_78 (sequence is synthesized)
ccacaagcaaggctttgcctatgttttctcctggctccttctgcctcctgaccaaccctggtgcttccccgtgtggacccctgtgacatggcatgcccttcttgggagctgcagaaacga

SEQ ID NO: 494369 - DNA, 120 bp, Artificial Sequence
  ENSG00000163171_79 (sequence is synthesized)
gtaatgtgagagcctgcaattgtaatcttcataaagtatatcacataccgttcaaaaacatcaagtggcatgttaaataagcttttggagaataagttgagcgtgacaccacaagaagaa

SEQ ID NO: 494370 - DNA, 120 bp, Artificial Sequence
  ENSG00000163171_80 (sequence is synthesized)
aaacagaatccatgacttctcaaaacatgatcttgcttcagatgagaaagctctgtgcttagtttgctgtgagtacttctttgtgtccattgtggcctcctatctaacataaggattcct

SEQ ID NO: 494371 - DNA, 120 bp, Artificial Sequence
  ENSG00000163171_81 (sequence is synthesized)
gaggttgctcttccaaaagcgtccagagtcactgagacctgacctgtgtattttgtatcctatccatgtcagcacttctccttgctgccaccgtgtgaagaaggacgtgtttgcttcccc

SEQ ID NO: 494372 - DNA, 120 bp, Artificial Sequence
  ENSG00000163171_82 (sequence is synthesized)
gcagatcatgggggctcccttcgaattctgcctactgcatggaggatatagccttatcagtaatgtttcagaagtgttcccaagtgaaggcccagcctgtaatagagattcacaatgttt

SEQ ID NO: 494373 - DNA, 120 bp, Artificial Sequence
  ENSG00000163171_83 (sequence is synthesized)
tctctttgaagtgaagcagttttgttcatttcctcccatctcagaatgacttcaaatcctgacatcctcgacagcccaatactttgccacaacctgattacaactctagctctcttattt

SEQ ID NO: 494374 - DNA, 120 bp, Artificial Sequence
  ENSG00000163171_84 (sequence is synthesized)
cgcgcccaccggagcccgggctgagagggacctggggagctgcggcctggccggggcggcgcactcaggtggcctcgcttccctgcgggtcaccgcccgccactcgcacagctaggtttg

SEQ ID NO: 494375 - DNA, 120 bp, Artificial Sequence
  ENSG00000163191_0 (sequence is synthesized)
gaggagaggctccagacccgcacgccgcgcgcacagagctctcagcgccgctcccagccacagcctcccgcgcctcgctcagctccaacatggcaaaaatctccagccctacagagactg

SEQ ID NO: 494376 - DNA, 120 bp, Artificial Sequence
  ENSG00000163191_1 (sequence is synthesized)
agcggtgcatcgagtccctgattgctgtcttccagaagtatgctggaaaggatggttataactacactctctccaagacagagttcctaagcttcatgaatacagaactagctgccttca

SEQ ID NO: 494377 - DNA, 120 bp, Artificial Sequence
  ENSG00000163191_2 (sequence is synthesized)
gaatttcttaatctgattggtggcctagctatggcttgccatgactccttcctcaaggctgtcccttcccagaagcggacctgaggaccccttggccctggccttcaaacccaccccctt

SEQ ID NO: 494378 - DNA, 120 bp, Artificial Sequence
  ENSG00000163191_3 (sequence is synthesized)
tccttccagcctttctgtcatcatctccacagcccacccatcccctgagcacactaaccacctcatgcaggccccacctgccaatagtaataaagcaatgtcacttttttaaaacatgaa

SEQ ID NO: 494379 - DNA, 120 bp, Artificial Sequence
  ENSG00000163202_0 (sequence is synthesized)
atccaccgtctcctcaggaacagccttctcctgcctcctctgcacctggacaactcaactcctgccaagatgtcctgccagcagaaccagcagcagtgccaacccccacccaagtgtccc

SEQ ID NO: 494380 - DNA, 120 bp, Artificial Sequence
  ENSG00000163202_1 (sequence is synthesized)
tcacccaagtgtcccccaaagagcccagtacagtgtctgcctccagcttcctctggctgtgccccaagctctgggggctgtggccctagctccgagggcggctgcttcctgaaccaccac

SEQ ID NO: 494381 - DNA, 120 bp, Artificial Sequence
  ENSG00000163202_2 (sequence is synthesized)
agaggcccaactcctgtgacaggggcagtggtcagcaaggcgggggctctggctgcggccatggctctggaggctgctgctgacctggatcctgatgctgagacaagcgattttggagga

SEQ ID NO: 494382 - DNA, 120 bp, Artificial Sequence
  ENSG00000163202_3 (sequence is synthesized)
aacaagaatcccaagggcccaggaaaaccccatcttgatgcatgagttcccagataccctcttctggctttcacaggctgagctaggggttttcctgtggaaggtctgagctctccccag

SEQ ID NO: 494383 - DNA, 120 bp, Artificial Sequence
  ENSG00000163202_4 (sequence is synthesized)
aaggcacttcctgtctgatgtccaggatgtcacatgttcccttacccctgtacctgtgaaggattggcagtgcttgtgcctgacctcatcaaaaaataaagctccttgtcctcattacca

SEQ ID NO: 494384 - DNA, 120 bp, Artificial Sequence
  ENSG00000163206_0 (sequence is synthesized)
agaaggctttggcttctgatagtcatggactcactaggctgctgaggaagatcaataatacctactggaatcagtcatgagaagtcaagcatggaaattgtgaattgtgtgtgtggccag

SEQ ID NO: 494385 - DNA, 120 bp, Artificial Sequence
  ENSG00000163206_1 (sequence is synthesized)
accagtacctccaagtgttcagaagatgtgtgaccagacaaaacacagtaaatgctgcccagcaaaaggcaatcaatgctgcccaccacagcagaaccagtgctgccagtcaaaaggcaa

SEQ ID NO: 494386 - DNA, 120 bp, Artificial Sequence
  ENSG00000163206_2 (sequence is synthesized)
tcaatgctgcccaccaaaacagaaccagtgctgccagccaaaaggcagtcaatgctgcccaccaaaacacaatcactgctgccagccaaaacccccatgctgcattcaggccaggtgctg

SEQ ID NO: 494387 - DNA, 120 bp, Artificial Sequence
  ENSG00000163206_3 (sequence is synthesized)
ccaactcaccgcaaactcaggacaagggctgtcaaacccagcagcagccccatagcccacaaaatgagtccaggccaagcaaatgagagcagaagaagtcaaacaaagaagaagtccctg

SEQ ID NO: 494388 - DNA, 120 bp, Artificial Sequence
  ENSG00000163206_4 (sequence is synthesized)
gggccatgcctttcactttgtagggtgggggattactgagagtcaggctagacctgtgtttagagaagcagttttcacagtgactaccatttccacccaatgagaggctcctatttccca

SEQ ID NO: 494389 - DNA, 120 bp, Artificial Sequence
  ENSG00000163206_5 (sequence is synthesized)
tcatagctccctaccctagggaggcctccatctggaaatgggaggatgaagaggctagaatcatctttcctagtgatcctgacatttagacagcacagaaataaagagcaataaaaagaa

SEQ ID NO: 494390 - DNA, 120 bp, Artificial Sequence
  ENSG00000163207_0 (sequence is synthesized)
cagcactccaccaaagcctctgcctcagccttactgtgagtctggttgacagtagcttctaagatgtcccagcaacacacactgccagtgaccctctcccctgccctcagtcaggagctc

SEQ ID NO: 494391 - DNA, 120 bp, Artificial Sequence
  ENSG00000163207_1 (sequence is synthesized)
ctcaagactgttcctcctccagtcaatacccatcaggagcaaatgaaacagccaactccactgcctcccccatgccagaaggtgcctgtcgagctcccagtggaggtcccatcaaagcaa

SEQ ID NO: 494392 - DNA, 120 bp, Artificial Sequence
  ENSG00000163207_2 (sequence is synthesized)
gaggaaaagcacatgactgctgtaaagggactgcctgagcaagaatgtgagcaacagcagaaggagccacaggagcaggagctgcagcaacagcactgggaacagcatgaggaatatcag

SEQ ID NO: 494393 - DNA, 120 bp, Artificial Sequence
  ENSG00000163207_3 (sequence is synthesized)
aaagcagaaaacccagagcagcagcttaagcaggagaaaacacaaagggatcagcagctaaacaaacagctggaagaagagaagaagctcttagaccagcaactggatcaagagctagtc

SEQ ID NO: 494394 - DNA, 120 bp, Artificial Sequence
  ENSG00000163207_4 (sequence is synthesized)
aagagagatgagcaactgggaatgaagaaagagcaactgttggagctcccagagcagcaggaggggcacctgaagcacctagagcagcaggagggacagctgaagcacccggagcagcag

SEQ ID NO: 494395 - DNA, 120 bp, Artificial Sequence
  ENSG00000163207_5 (sequence is synthesized)
gaggggcagctggagctcccagagcagcaggaggggcagctggagctcccagagcagcaggaggggcagctggagctcccagagcagcaggaggggcagctggagctcccagagcagcag

SEQ ID NO: 494396 - DNA, 120 bp, Artificial Sequence
  ENSG00000163207_6 (sequence is synthesized)
gaggggcagctggagctcccagagcagcaggaggggcagctggagctcccacagcagcaggaggggcagctggagctctctgagcagcaggaggggcagctggagctctctgagcagcag

SEQ ID NO: 494397 - DNA, 120 bp, Artificial Sequence
  ENSG00000163207_7 (sequence is synthesized)
gagggacagctgaagcacctggagcaccaggaggggcagctggaggtcccagaggagcagatggggcagctgaagtacctggaacagcaggaggggcagctgaagcacctggatcagcag

SEQ ID NO: 494398 - DNA, 120 bp, Artificial Sequence
  ENSG00000163207_8 (sequence is synthesized)
aggagcaggaggggcagctgaagcacctggagcagcaggaggggcagctggagcacctggagcaccaggaagggcagctggggctcccagagcagcaggtgctgcagctgaagcagctag

SEQ ID NO: 494399 - DNA, 120 bp, Artificial Sequence
  ENSG00000163207_9 (sequence is synthesized)
agaagcagcaggggcagccaaagcacctggaggaggaggaggggcagctgaagcacctggtgcagcaggaggggcagctgaagcatctggtgcagcaggaggggcagctggagcagcagg

SEQ ID NO: 494400 - DNA, 120 bp, Artificial Sequence
  ENSG00000163207_10 (sequence is synthesized)
agaggcaggtggagcacctggagcagcaggtggggcagctgaagcacctagaggagcaggagggacaactgaagcatctggagcagcagcaggggcagttggaggtcccagagcagcagg

SEQ ID NO: 494401 - DNA, 120 bp, Artificial Sequence
  ENSG00000163207_11 (sequence is synthesized)
tggggcagccaaagaacctggagcaggaggagaagcaactggagctcccagagcagcaagagggccaggtgaagcacctggagaagcaggaggcacagctggagctcccagagcagcagg

SEQ ID NO: 494402 - DNA, 120 bp, Artificial Sequence
  ENSG00000163207_12 (sequence is synthesized)
taggacagccaaagcacctggaacagcaggaaaagcacctagagcacccagagcagcaggacggacaactaaaacatctggagcagcaggaggggcagctgaaggacctggagcagcaga

SEQ ID NO: 494403 - DNA, 120 bp, Artificial Sequence
  ENSG00000163207_13 (sequence is synthesized)
aggggcagctggagcagcctgtgtttgccccagctccaggccaggtccaagacattcaaccagccctgcccacaaagggagaagtattgcttcctgtagagcaccagcagcagaagcagg

SEQ ID NO: 494404 - DNA, 120 bp, Artificial Sequence
  ENSG00000163207_14 (sequence is synthesized)
aggtgcagtggccacccaaacataaataaccacccgcagtgtccagaggccctcagatcgtctcatacaagggaagagagagccactggctccacttatttcgggtccgctaggtggccc

SEQ ID NO: 494405 - DNA, 120 bp, Artificial Sequence
  ENSG00000163207_15 (sequence is synthesized)
gtctcatctgtgaacttgactctgtccctctacatgtctctttaatggggtgagggtgggggagagagggaattattgtccagtgccaaccccaatgaccccaatcccaacctcaggtga

SEQ ID NO: 494406 - DNA, 120 bp, Artificial Sequence
  ENSG00000163207_16 (sequence is synthesized)
gcagagcctctacttgagggactattgttactataggaatccttacttccccagtattgaagctgaatcagtgagtgtgtacaatgatacataataaatcctggaagtcttgggatccta

SEQ ID NO: 494407 - DNA, 120 bp, Artificial Sequence
  ENSG00000163209_0 (sequence is synthesized)
accagatcccagaggctgaacacctcgaccttctctgcacagcaggtccagcatcctttgaagcatgagttcttaccagcagaagcagacctttaccccaccacctcagcttcaacagca

SEQ ID NO: 494408 - DNA, 120 bp, Artificial Sequence
  ENSG00000163209_1 (sequence is synthesized)
gcaggtgaaacaacccagccagcctccacctcaggaaatatttgttcccacaaccaaggagccatgccactcaaaggttccacaacctggaaacacaaagattccagagccaggctgtac

SEQ ID NO: 494409 - DNA, 120 bp, Artificial Sequence
  ENSG00000163209_2 (sequence is synthesized)
caaggtccctgagccaggctgtaccaaggtccctgagccaggctgtaccaaggtccctgagccaggttgtaccaaggtccctgagccaggctgtaccaaggtccctgagccaggttgtac

SEQ ID NO: 494410 - DNA, 120 bp, Artificial Sequence
  ENSG00000163209_3 (sequence is synthesized)
ccaaggcttcatcaagtttcctgagccaggtgccatcaaagttcctgagcaaggatacaccaaagttcctgtgccaggctacacaaagctaccagagccatgtccttcaacggtcactcc

SEQ ID NO: 494411 - DNA, 120 bp, Artificial Sequence
  ENSG00000163209_4 (sequence is synthesized)
aggcccagctcagcagaagaccaagcagaagtaatttggtgcacagacaagcccttgagaagccaaccaccagatgctggacaccctcttcccatctgtttctgtgtcttaattgtctgt

SEQ ID NO: 494412 - DNA, 120 bp, Artificial Sequence
  ENSG00000163209_5 (sequence is synthesized)
agaccttgtaatcagcacattgtcaccccaagccatagtctctctcttatttgtatcctaaaaatacgtactataaagcttttgttcacacacactctgaagaatcctgtaagcccctga

SEQ ID NO: 494413 - DNA, 120 bp, Artificial Sequence
  ENSG00000163209_6 (sequence is synthesized)
attaagcagaaagtcttcatggcttttctggtcttcggctgctcagggttcatctgaagattcgaatgaaaagaaatgcatgtttcctgctcttccctcattaaattgcttttaattcca

SEQ ID NO: 494414 - DNA, 120 bp, Artificial Sequence
  ENSG00000163209_7 (sequence is synthesized)
tcaccagatcccagaggctgaacacctcgaccttctctgcacagcagatgatccctgagcagctgaagaccagaaaagccactaagactttctgcttaattcaggagcttagaggattct

SEQ ID NO: 494415 - DNA, 120 bp, Artificial Sequence
  ENSG00000163209_8 (sequence is synthesized)
accagatcccagaggctgaacacctcgaccttctctgcacagcagattacaggtgtggaacttaggatcagaaaaggggagtgatttctgtaaaggcttgctaagttagcaagacaatat

SEQ ID NO: 494416 - DNA, 120 bp, Artificial Sequence
  ENSG00000163209_9 (sequence is synthesized)
acccacttcaagagcactctcctgtcaacatgtattgaaaatttttaatatagaaggcactacattggcaattttgatgatcaaaagataagtttttctttattgcatgaatgtataatc

SEQ ID NO: 494417 - DNA, 120 bp, Artificial Sequence
  ENSG00000163209_10 (sequence is synthesized)
actaaaatttgcaaacatacagcatggggagtgattagcagagagggaaagcaagtatcatgctgtggcaaaacgaggaaggtgagagcatcaggaaggacagccatgagaggtgggcat

SEQ ID NO: 494418 - DNA, 120 bp, Artificial Sequence
  ENSG00000163209_11 (sequence is synthesized)
gtgtggggaggcagcgatgatgtggagagcctgccagagagcatgtgcagcaggcacagtgtgaacagaggctcccaggtggattgtgggagccttagggggaagtttagataagagttc

SEQ ID NO: 494419 - DNA, 120 bp, Artificial Sequence
  ENSG00000163214_0 (sequence is synthesized)
agaaggcgccgggactgtgccgctgcagctgggccaccgcagggctgctccaagtgagaatcgtgagggtggccaagtccagtttggacctctgacccttgggcagcacctcccgacagc

SEQ ID NO: 494420 - DNA, 120 bp, Artificial Sequence
  ENSG00000163214_1 (sequence is synthesized)
cggctcgggacccaactctgcgagccaggtgaaaatgagttcttcagtaagaagaaaaggcaagccaggcaaaggaggtggaaaagggtcttctagaggaggaagaggaggcaggagtca

SEQ ID NO: 494421 - DNA, 120 bp, Artificial Sequence
  ENSG00000163214_2 (sequence is synthesized)
cgccagtaaatctcatgggagtggtggcggtggcggtggtggtggtggtggaggtggcggcaacagaaaggcctccagtagaatatgggatgatggagatgacttttgtatcttcagtga

SEQ ID NO: 494422 - DNA, 120 bp, Artificial Sequence
  ENSG00000163214_3 (sequence is synthesized)
atcaaggcgcccttccagacctagcaacagtaacataagcaaaggagagtcacgcccaaaatggaaacccaaagccaaagtaccccttcagactctacatatgacttctgagaatcaaga

SEQ ID NO: 494423 - DNA, 120 bp, Artificial Sequence
  ENSG00000163214_4 (sequence is synthesized)
gaaagtgaaagctcttctccgagacctgcaagaacaagatgctgatgctggatctgaaagaggcctttctggggaggaggaagatgatgagcctgattgctgtaacgatgagcggtactg

SEQ ID NO: 494424 - DNA, 120 bp, Artificial Sequence
  ENSG00000163214_5 (sequence is synthesized)
gccagctggacaggaaccttccctcgttcccgacttggatcctttggaatatgctggcttagcctcagtggagccttatgttccagaatttacagtctccccatttgcagtgcaaaaact

SEQ ID NO: 494425 - DNA, 120 bp, Artificial Sequence
  ENSG00000163214_6 (sequence is synthesized)
ttccaggtatggtttcaatactgaacgctgtcaagcggtcctgaggatgtgtgatggagatgtgggagcatcactagagcatctccttacccagtgtttttcagagacatttggagagag

SEQ ID NO: 494426 - DNA, 120 bp, Artificial Sequence
  ENSG00000163214_7 (sequence is synthesized)
gatgaagatctctgaggcagtcaaccagataagcttggatgagtgtatggaacagcgacaggaagaggcatttgctctcaagtccatctgtggagaaaaatttatagaaagaattcagaa

SEQ ID NO: 494427 - DNA, 120 bp, Artificial Sequence
  ENSG00000163214_8 (sequence is synthesized)
cagagtctggaccattgggttagaactggagtatctgacaagtagattccgcaaatccaagccaaaagaaagtaccaaaaatgtacaagagaattcacttgaaatctgtaaattttacct

SEQ ID NO: 494428 - DNA, 120 bp, Artificial Sequence
  ENSG00000163214_9 (sequence is synthesized)
caaaggaaattgtaaatttggatcaaaatgcagattcaaacatgaagtgcccccaaatcaaattgttggaagaatagaaagaagtgtagatgattctcatcttaatgctattgaagatgc

SEQ ID NO: 494429 - DNA, 120 bp, Artificial Sequence
  ENSG00000163214_10 (sequence is synthesized)
atcttttttatatgaacttgaaattcgattttctaaagaccacaaatatccctaccaagctccgctcgtggcattttattccaccaatgagaacctacctctggcttgtcgtttacatat

SEQ ID NO: 494430 - DNA, 120 bp, Artificial Sequence
  ENSG00000163214_11 (sequence is synthesized)
ttctgagtttctttatgacaaggccttgacatttgcggaaacttcggaacctgtcgtatattctttgataacccttttagaggaagagtcggaaatagtcaagttactaacgaataccca

SEQ ID NO: 494431 - DNA, 120 bp, Artificial Sequence
  ENSG00000163214_12 (sequence is synthesized)
ccacaagtatagtgaccctcctgtgaactttctgccagtaccctctaggaccagaataaataatcctgcctgtcataaaacagtgattccaaataattcttttgtttctaatcaaattcc

SEQ ID NO: 494432 - DNA, 120 bp, Artificial Sequence
  ENSG00000163214_13 (sequence is synthesized)
agaagttgaaaaagcatcagaatctgaggagtcagatgaggatgacggtcctgcacctgttatagtagagaatgaaagctatgtgaaccttaagaaaaagatttccaaaagatatgactg

SEQ ID NO: 494433 - DNA, 120 bp, Artificial Sequence
  ENSG00000163214_14 (sequence is synthesized)
gcaggcaaagtcagtacatgctgaaaatggtaaaatctgcaagcagttccgaatgaaacaggcttccagacagttccagtccattctgcaagagaggcaatcactccctgcttgggaaga

SEQ ID NO: 494434 - DNA, 120 bp, Artificial Sequence
  ENSG00000163214_15 (sequence is synthesized)
aagagaaaccattcttaacttattgcgtaagcaccaggtggttgtcataagtggtatgactggatgtgggaaaaccacacaaattccgcagtttattctggatgattctctgaatggacc

SEQ ID NO: 494435 - DNA, 120 bp, Artificial Sequence
  ENSG00000163214_16 (sequence is synthesized)
acctgagaaggtagccaacatcatctgtacccaaccccgacgaatctctgcaatctctgttgctgaacgcgttgctaaagaaagagcagagagggtgggtctgaccgtgggataccagat

SEQ ID NO: 494436 - DNA, 120 bp, Artificial Sequence
  ENSG00000163214_17 (sequence is synthesized)
tcggttagaaagtgtcaagtcctcagccaccagactgttatactgcaccacgggagtgctgctgagaaggctagaaggagatacagctctacaaggagtttcccatatcattgttgatga

SEQ ID NO: 494437 - DNA, 120 bp, Artificial Sequence
  ENSG00000163214_18 (sequence is synthesized)
agttcatgagaggacagaagaaagtgacttcttgctgctagttttgaaggacattgtatcgcagaggccaggtcttcaagttattttaatgagtgcaactctaaacgctgagcttttttc

SEQ ID NO: 494438 - DNA, 120 bp, Artificial Sequence
  ENSG00000163214_19 (sequence is synthesized)
agactattttaattcctgccccgttattactataccaggtcgtacatttcctgttgatcaattttttttggaagatgcaattgctgtgacaaggtatgtattacaggatgggagcccata

SEQ ID NO: 494439 - DNA, 120 bp, Artificial Sequence
  ENSG00000163214_20 (sequence is synthesized)
aggctctcccttcacctccaggatcaggattctgtcaaagatgcagtgccagatcaacagttagattttaagcagctcctggcccgctataaaggggttagcaagtcagtcatcaaaaca

SEQ ID NO: 494440 - DNA, 120 bp, Artificial Sequence
  ENSG00000163214_21 (sequence is synthesized)
atgtccatcatggattttgaaaaggtgaatcttgaattaatagaggccttattagagtggattgtggatggaaagcactcctaccctccaggtgctatacttgtatttttaccaggacta

SEQ ID NO: 494441 - DNA, 120 bp, Artificial Sequence
  ENSG00000163214_22 (sequence is synthesized)
gcagaaatcaaaatgctttatgaacagctacagtctaattctcttttcaacaacagacgtagtaatcgatgtgttattcacccacttcattcatctttatccagtgaagagcagcaggct

SEQ ID NO: 494442 - DNA, 120 bp, Artificial Sequence
  ENSG00000163214_23 (sequence is synthesized)
gtgtttgtaaaacctcctgcaggagtaactaagattataatttccaccaacattgctgagacatccataaccatcgatgatgttgtctatgttatcgattctgggaaaatgaaagaaaag

SEQ ID NO: 494443 - DNA, 120 bp, Artificial Sequence
  ENSG00000163214_24 (sequence is synthesized)
agatatgatgccagcaaagggatggaaagtctagaggacacctttgtatctcaagctaatgctctacaaaggaaaggccgagcaggccgtgttgcatctggggtctgcttccatttattc

SEQ ID NO: 494444 - DNA, 120 bp, Artificial Sequence
  ENSG00000163214_25 (sequence is synthesized)
actagccatcactacaatcaccagcttttaaaacaacagctaccagaaatacaaagagtgccattggaacagctgtgtctaagaattaaaattttagagatgtttagtgctcataatctc

SEQ ID NO: 494445 - DNA, 120 bp, Artificial Sequence
  ENSG00000163214_26 (sequence is synthesized)
cagtctgtgttctctcggctcattgaacctccacacaccgattctcttcgtgcctcaaaaatacgattacgagacttaggagcattaactccagatgaaagattgacccctcttgggtat

SEQ ID NO: 494446 - DNA, 120 bp, Artificial Sequence
  ENSG00000163214_27 (sequence is synthesized)
catttggcctctctgcccgtggatgtgagaattggcaaactaatgttgtttgggtctatcttccgctgtttggatcctgctctcaccattgctgccagtttggcttttaagtctccgttt

SEQ ID NO: 494447 - DNA, 120 bp, Artificial Sequence
  ENSG00000163214_28 (sequence is synthesized)
gtatctccctgggataaaaaagaagaagctaaccagaaaaagctggaatttgcattcgcaaacagtgattatctggcccttctacaagcgtataagggatggcagctaagtacaaaagaa

SEQ ID NO: 494448 - DNA, 120 bp, Artificial Sequence
  ENSG00000163214_29 (sequence is synthesized)
ggcgtgcgtgcaagttataattactgcagacaaaacttcttgtctggaagagttctgcaggaaatggccagcctcaaacgacaattcacggaactgttatcggatatagggtttgcaagg

SEQ ID NO: 494449 - DNA, 120 bp, Artificial Sequence
  ENSG00000163214_30 (sequence is synthesized)
gaagggctcagagcaagggaaattgagaaaagggcccaaggaggagatggtgtcttagatgccacaggagaagaggcaaactcaaatgctgagaaccccaagctgatatcagcaatgctg

SEQ ID NO: 494450 - DNA, 120 bp, Artificial Sequence
  ENSG00000163214_31 (sequence is synthesized)
tgtgctgctttgtatccaaatgtagtgcaggtgaaaagcccagaaggaaaatttcagaagaccagtactggagctgtcagaatgcaaccaaaatcagctgagttgaagtttgtcaccaag

SEQ ID NO: 494451 - DNA, 120 bp, Artificial Sequence
  ENSG00000163214_32 (sequence is synthesized)
aacgatggatatgtacacattcacccttcatcagtgaactatcaggtgagacactttgacagcccctacctgttgtaccacgagaagataaaaactagtcgagtattcatccgagactgc

SEQ ID NO: 494452 - DNA, 120 bp, Artificial Sequence
  ENSG00000163214_33 (sequence is synthesized)
agcatggtgtctgtgtacccgctggtcttgtttggaggaggccaagtgaatgtgcagcttcaaagaggagagttcgttgtctccctggatgatggttggatccgttttgtagctgcttcc

SEQ ID NO: 494453 - DNA, 120 bp, Artificial Sequence
  ENSG00000163214_34 (sequence is synthesized)
catcaggtggctgaactggtaaaggagcttcgttgcgaacttgatcagcttctccaggataaaattaaaaacccaagcattgatctgtgtacgtgtcctcgaggatcccggatcatcagc

SEQ ID NO: 494454 - DNA, 120 bp, Artificial Sequence
  ENSG00000163214_35 (sequence is synthesized)
acaattgtgaaacttgtcaccacacaataaaaagcagtcttagagagtgcttgctactcacctgcttctagctcacctgggaaataacagcagaacctctacctcgaactaaagacctat

SEQ ID NO: 494455 - DNA, 120 bp, Artificial Sequence
  ENSG00000163214_36 (sequence is synthesized)
tggggctggccctggtggaggagcccagggcatgaagcccaaggcagctgaggcagtgtatatacccttagggccatttctaacaaagccttggccactcccagcacaatttggagtgtc

SEQ ID NO: 494456 - DNA, 120 bp, Artificial Sequence
  ENSG00000163214_37 (sequence is synthesized)
aagggtgagagcctaaaacccagcttgcctgtctttgtctctgtgattgttctggagtgaattaagttcacctgataactcaaaagtgaatgtataatacaattctgttttaatctgtgt

SEQ ID NO: 494457 - DNA, 120 bp, Artificial Sequence
  ENSG00000163214_38 (sequence is synthesized)
attctttttctcctactttttactggggtgagaggggcatgaagagaaatacgccttttttttttttcttttcctgtcgccaaggctcgactgagagaagtcagaacagagaaggggaaa

SEQ ID NO: 494458 - DNA, 120 bp, Artificial Sequence
  ENSG00000163214_39 (sequence is synthesized)
aaaaacccaaaattatgtgaacaagcaaaattaaaatttcattttaggctattggctactgagtaaacttgacttgtgaggggtttttatttttactcattaaaagtcaacttaaaaaaa

SEQ ID NO: 494459 - DNA, 120 bp, Artificial Sequence
  ENSG00000163214_40 (sequence is synthesized)
aatttggggagtcattaataggcagtatttaaatccgtgggactggggggttgttccctttttgttgccagtgacatcactgtcatcatctgaggttttttgttacaggtgagacacttt

SEQ ID NO: 494460 - DNA, 120 bp, Artificial Sequence
  ENSG00000163214_41 (sequence is synthesized)
aagtgtcaaggtttgtatgctctgcttatttcctggtaacagaaatttatggtttttaggtataaaaagttttgggggttaggagattcatgggcaatttgggatatatactttcaggtt

SEQ ID NO: 494461 - DNA, 120 bp, Artificial Sequence
  ENSG00000163214_42 (sequence is synthesized)
tactttcaggttatttttaaattaatgattacctttggtaatcatttatttaaatatttagaaatatttagaaatattttggtataagaactcttatggccaggcgcggtggctcacacc

SEQ ID NO: 494462 - DNA, 120 bp, Artificial Sequence
  ENSG00000163214_43 (sequence is synthesized)
tctcaaaaaaaaaaaaaaaaaaaaaactcttatttggttgtactaaatttcctctgtaaagctttttattttttattggcagaagtcatctagtaaagactgttttgctcttgaacttgg

SEQ ID NO: 494463 - DNA, 120 bp, Artificial Sequence
  ENSG00000163214_44 (sequence is synthesized)
ttttattactgtccctggcaagaaactatgtttagtatggtttcctattaaatggaactgctggtgtttccaatattttttatcactatccattcaaaatggctttccagtaatgtttcc

SEQ ID NO: 494464 - DNA, 120 bp, Artificial Sequence
  ENSG00000163214_45 (sequence is synthesized)
cgtcctggggtaggaaatgcaattccttaaattcagccacaccatgttctatcacttgctgtccccagcaataccactgactgagggaagattgaataagaataaacagactggaaattg

SEQ ID NO: 494465 - DNA, 120 bp, Artificial Sequence
  ENSG00000163214_46 (sequence is synthesized)
tgttgctgtattggacagcacaggtatagaacatttccatcaacacggaaagttctattggacagtactggtatagagactcttgttgggaagaactggatatgtgctaagcaagagggc

SEQ ID NO: 494466 - DNA, 120 bp, Artificial Sequence
  ENSG00000163214_47 (sequence is synthesized)
tttatttcacccagaaaatctttcggtttattcagatgttggaaaactaatgtacagattccacaactcattctggctgattctctgagcagcattctgaataaagtcttctacatccaa

SEQ ID NO: 494467 - DNA, 80 bp, Artificial Sequence
  ENSG00000163214_48 (sequence is synthesized)
ggagtgcaagaccatccagggcaacataacaagactctgtctctataattaaaaaaaaaaaaaagcttgagcacaggagt

SEQ ID NO: 494468 - DNA, 120 bp, Artificial Sequence
  ENSG00000163214_49 (sequence is synthesized)
caaaaaaatacaaaaagccgggcttccagacagttccagtccattctgcaagagaggcaatcactccctgcttgggaagaaagagaaaccattcttaacttattgcgtaagcaccaggtg

SEQ ID NO: 494469 - DNA, 120 bp, Artificial Sequence
  ENSG00000163214_50 (sequence is synthesized)
acgaaccactctaggcctgagtaaggaactgagaggacaggagcaaaaatgcaagtaggaaaagctaggtagtagacagtgccgcagcacttggagttggaattccagtcaaaacaaaca

SEQ ID NO: 494470 - DNA, 120 bp, Artificial Sequence
  ENSG00000163214_51 (sequence is synthesized)
gcattttttgctgtcctaagaatttcgtggaaaatcaggcctacccaaaatccaatgagagtgtttaaaattgtaatctagagttaaataaatgatccttggatttattgaatttttgca

SEQ ID NO: 494471 - DNA, 120 bp, Artificial Sequence
  ENSG00000163214_52 (sequence is synthesized)
acaaccccagatggtacaacctacaacacacctaggctgtatgatgtagccaattgctcctagactacaaatctatacagcatgttgctgtactgaatactctaagcaattataacacaa

SEQ ID NO: 494472 - DNA, 120 bp, Artificial Sequence
  ENSG00000163214_53 (sequence is synthesized)
atggcagaaaaaattgttttctagttccaattcagtttcatgcagctagtaatggtaatttgccacaaggaaggcctatgttagagaagagcaactgctttcttgatctccagggtctgt

SEQ ID NO: 494473 - DNA, 120 bp, Artificial Sequence
  ENSG00000163214_54 (sequence is synthesized)
aacactaaaaaggacagcacatgctcatcacttattagatggagtcatcctgttaggttagaaggtatacttcacaccatcctgggcattatgctaagttgaataccgtacttagtagaa

SEQ ID NO: 494474 - DNA, 120 bp, Artificial Sequence
  ENSG00000163214_55 (sequence is synthesized)
ataacagatgtcatgcatgctgtggctgaatgtatcttcttccttgtttatttggccattcagtcctgacattgattcatgtatttattgagcctgcattaaatgccaagtgatatatta

SEQ ID NO: 494475 - DNA, 120 bp, Artificial Sequence
  ENSG00000163214_56 (sequence is synthesized)
gttgctggggatacagtgatgaacaagcatgtatggctccccctcatctcttacagtccagtagaaaaaacaaataatgaacaagtaaacaagcaaatgattgtaaattggaataagcac

SEQ ID NO: 494476 - DNA, 120 bp, Artificial Sequence
  ENSG00000163214_57 (sequence is synthesized)
tatgaaggaataaacggcatgctgtgtttggagggagagacccatagatgctcaaagatcatatctctgtaagatgacaatttaaattcaaaactgaagtatggccgggcgcaatggctc

SEQ ID NO: 494477 - DNA, 89 bp, Artificial Sequence
  ENSG00000163214_58 (sequence is synthesized)
ggtgggaggatcgcttgagctcaggagttggagccccacctgggcaacatagtgagaccatgtttccacgtagccagtagtcattctac

SEQ ID NO: 494478 - DNA, 90 bp, Artificial Sequence
  ENSG00000163214_59 (sequence is synthesized)
aagtaaaaaaaacaaaacaaaacaaaaaatagccagtagtcattctactggggatacagatgcctcacacctaaggtcccagctactcag

SEQ ID NO: 494479 - DNA, 71 bp, Artificial Sequence
  ENSG00000163214_60 (sequence is synthesized)
aatcaattgagccccctggtcaagaaagcaagaccctgtctcaaaagaaaagaaaagaaaagaaaagaaaa

SEQ ID NO: 494480 - DNA, 120 bp, Artificial Sequence
  ENSG00000163214_61 (sequence is synthesized)
ccattcttaacttattgcgtaagcaccaggtggttgtcataagtggtatgactgggacttatttgttttaatgtacagatgtgggaaaaccacacaaattccgcagtttattctggatga

SEQ ID NO: 494481 - DNA, 120 bp, Artificial Sequence
  ENSG00000163216_0 (sequence is synthesized)
taaactcctggtactctagcaccgatctgctttggagaacctgatcctgagactccagcaggatgtcttatcaacagcagcagtgcaagcagccctgccagccacctcctgtgtgcccca

SEQ ID NO: 494482 - DNA, 120 bp, Artificial Sequence
  ENSG00000163216_1 (sequence is synthesized)
cgccaaagtgcccagagccatgtccacccccgaagtgccctgagccctgcccatcaccaaagtgtccacagccctgcccacctcagcagtgccagcagaaatatcctcctgtgacacctt

SEQ ID NO: 494483 - DNA, 120 bp, Artificial Sequence
  ENSG00000163216_2 (sequence is synthesized)
gataattggctcacctcgttccacagctccacttgcatcttctcaccaaagccttccatggatgcacagggagcttctttctccttaacctgtggcctgcctgtgatgatctgtgacagc

SEQ ID NO: 494484 - DNA, 120 bp, Artificial Sequence
  ENSG00000163216_3 (sequence is synthesized)
aaaagattccctttctgaggctgccatactgccactgtccaggtggagctaagaaaaggaagtcctcagctgtgccagctcccagagcttcggaagaaagagcagcagctctctccctgg

SEQ ID NO: 494485 - DNA, 120 bp, Artificial Sequence
  ENSG00000163216_4 (sequence is synthesized)
gaaccatcagacaattctgttgatgtgttctgtgtctgtctgtcacctggtcatgagcttctaccacctttgcaattgtcatttatctttcactccctgaataaagtatctatgcatata

SEQ ID NO: 494486 - DNA, 120 bp, Artificial Sequence
  ENSG00000163216_5 (sequence is synthesized)
ctgtagtacacatccttgatggcaccaagtagcaaacgtgctgtggagactagatctcactctcaaatctgtcctgggatgcaagtgcctctacgaatgtggtgcagaagctacaaatgt

SEQ ID NO: 494487 - DNA, 120 bp, Artificial Sequence
  ENSG00000163216_6 (sequence is synthesized)
ggtgcagaagacagcttcaaagaggaaaggaatataggtgccaagagcctgcaatccttcccaaacagccctttgttctgtgctcaagtcaacccactgggactttactacagataatga

SEQ ID NO: 494488 - DNA, 120 bp, Artificial Sequence
  ENSG00000163217_0 (sequence is synthesized)
taaaccttcctggcttggcctaggagctcgagcggagtcatgggctctctggtcctgacactgtgcgctcttttctgcctggcagcttacttggtttctggcagccccatcatgaaccta

SEQ ID NO: 494489 - DNA, 120 bp, Artificial Sequence
  ENSG00000163217_1 (sequence is synthesized)
gagcagtctcctctggaagaagatatgtccctctttggtgatgttttctcagagcaagacggtgtcgactttaacacactgctccagagcatgaaggatgagtttcttaagacactaaac

SEQ ID NO: 494490 - DNA, 120 bp, Artificial Sequence
  ENSG00000163217_2 (sequence is synthesized)
ctctctgacatccccacgcaggattcagccaaggtggacccaccagagtacatgttggaactctacaacaaatttgcaacagatcggacctccatgccctctgccaacatcattaggagt

SEQ ID NO: 494491 - DNA, 120 bp, Artificial Sequence
  ENSG00000163217_3 (sequence is synthesized)
ttcaagaatgaagatctgttttcccagccggtcagttttaatgggctccgaaaataccccctcctcttcaatgtgtccattcctcaccatgaagaggtcatcatggctgaacttaggcta

SEQ ID NO: 494492 - DNA, 120 bp, Artificial Sequence
  ENSG00000163217_4 (sequence is synthesized)
tacacactggtgcaaagggatcgtatgatatacgatggagtagaccggaaaattaccatttttgaagtgctggagagcaaaggggataatgagggagaaagaaacatgctggtcttggtg

SEQ ID NO: 494493 - DNA, 120 bp, Artificial Sequence
  ENSG00000163217_5 (sequence is synthesized)
tctggggagatatatggaaccaacagtgagtgggagacttttgatgtcacagatgccatcagacgttggcaaaagtcaggctcatccacccaccagctggaggtccacattgagagcaaa

SEQ ID NO: 494494 - DNA, 120 bp, Artificial Sequence
  ENSG00000163217_6 (sequence is synthesized)
cacgatgaagctgaggatgccagcagtggacggctagaaatagataccagtgcccagaataagcataaccctttgctcatcgtgttttctgatgaccaaagcagtgacaaggagaggaag

SEQ ID NO: 494495 - DNA, 120 bp, Artificial Sequence
  ENSG00000163217_7 (sequence is synthesized)
gaggaactgaatgaaatgatttcccatgagcaacttccagagctggacaacttgggcctggatagcttttccagtggacctggggaagaggctttgttgcagatgagatcaaacatcatc

SEQ ID NO: 494496 - DNA, 120 bp, Artificial Sequence
  ENSG00000163217_8 (sequence is synthesized)
tatgactccactgcccgaatcagaaggaacgccaaaggaaactactgtaagaggaccccgctctacatcgacttcaaggagattgggtgggactcctggatcatcgctccgcctggatac

SEQ ID NO: 494497 - DNA, 120 bp, Artificial Sequence
  ENSG00000163217_9 (sequence is synthesized)
gaagcctatgaatgccgtggtgtttgtaactaccccctggcagagcatctcacacccacaaagcatgcaattatccaggccttggtccacctcaagaattcccagaaagcttccaaagcc

SEQ ID NO: 494498 - DNA, 120 bp, Artificial Sequence
  ENSG00000163217_10 (sequence is synthesized)
tgctgtgtgcccacaaagctagagcccatctccatcctctatttagacaaaggcgtcgtcacctacaagtttaaatacgaaggcatggccgtctccgaatgtggctgtagatagaagaag

SEQ ID NO: 494499 - DNA, 120 bp, Artificial Sequence
  ENSG00000163217_11 (sequence is synthesized)
agtcctatggcttatttaataactgtaaatgtgtatatttggtgttcctatttaatgagattatttaataagggtgtacagtaatagaggcttgctgccttcaggaaatggacaggtcag

SEQ ID NO: 494500 - DNA, 120 bp, Artificial Sequence
  ENSG00000163217_12 (sequence is synthesized)
tttgttgtaggaaatgcatattttcctctccagttaagtccctttcaatctgttttctctttggacttgccatttcctggcaatgccacctccctgttgatttgaaaacaacccctaggc

SEQ ID NO: 494501 - DNA, 120 bp, Artificial Sequence
  ENSG00000163217_13 (sequence is synthesized)
aaaatacagtgtcaaaagacacacacttgtgtatgtatatttgtacatacatgaacttacaaaaatcttttggttctatgcaggcaggttatactcatctacatgcatgactcactcaaa

SEQ ID NO: 494502 - DNA, 120 bp, Artificial Sequence
  ENSG00000163217_14 (sequence is synthesized)
tgtatgcatattaaaggccaatggtatgttctctgttacctcttctctgagtaggatttaagtcaagataattgacatcagggttttaatcatcctaggaagtattacccttcctaaata

SEQ ID NO: 494503 - DNA, 120 bp, Artificial Sequence
  ENSG00000163217_15 (sequence is synthesized)
ctctggaaatgtaagtgtagcttttgtcagttgagtttctgtagttgctcagagaggaggggcctggcaaaggatgcttgaagggaagggttaattgatacagaaaccaaatggacttaa

SEQ ID NO: 494504 - DNA, 120 bp, Artificial Sequence
  ENSG00000163217_16 (sequence is synthesized)
gaggtcttagaggtacaacaggaaaaaatgaacccatggaggaccaatgtgctccagagggcaactcctggtcaaggcaggaaaacagaagaaaccagcatgaaatctgttcctgagaca

SEQ ID NO: 494505 - DNA, 120 bp, Artificial Sequence
  ENSG00000163217_17 (sequence is synthesized)
ataggaaagcaaggccatgagtactggccattgctgctgcagagagtagaggggttgggagggtacttgaaggggagaaagggagaaagggaagaggatattgatgttatcctcagaggc

SEQ ID NO: 494506 - DNA, 120 bp, Artificial Sequence
  ENSG00000163217_18 (sequence is synthesized)
tatcctcagatgtgtctgtaaaaccaaaagtggttctgtttaaagaattaaatcttttggacaaaatagaagtatcaaagactaagaggaggaaaatcagaaggggtctgtctgttggaa

SEQ ID NO: 494507 - DNA, 120 bp, Artificial Sequence
  ENSG00000163217_19 (sequence is synthesized)
gaaaggatgttaatatctttcttcacctgttaacactgttcccttgtctcagcacccctgctttcctctgctccatcttcttccttccctctttcttcttggccctagtgcctctcacct

SEQ ID NO: 494508 - DNA, 120 bp, Artificial Sequence
  ENSG00000163217_20 (sequence is synthesized)
tcctcccatccctgtgtccctgctcttccctggccttcatgatgcatgctgtgaactggaaagggacacctaagtgcctttgctctcagggtgaaaggagttagtgttctaatttctaaa

SEQ ID NO: 494509 - DNA, 120 bp, Artificial Sequence
  ENSG00000163217_21 (sequence is synthesized)
tcttcccgtgatatttaatttgattttattttaataatatcctttatcaaatgttttgttcatgaagaatacttagatataagagaaaagaaaaccagaataagtaagtataagaaaaag

SEQ ID NO: 494510 - DNA, 120 bp, Artificial Sequence
  ENSG00000163217_22 (sequence is synthesized)
aaaaccagagtccaaatgaatggatttaaataaacgaatttatgaatagacacacaagcaaatgactcaaaagccaagcctgaattttgaaatcatgattgtttcatggtagaaacccag

SEQ ID NO: 494511 - DNA, 120 bp, Artificial Sequence
  ENSG00000163217_23 (sequence is synthesized)
taactttcccatcttctcatcttaccatcttcccattttgcaactggccaggactgaaagtggtgaggaagtgttctgcacaggaagggtccggtgggttttcctggcaggtggcagcct

SEQ ID NO: 494512 - DNA, 120 bp, Artificial Sequence
  ENSG00000163217_24 (sequence is synthesized)
ccagtcttaacccctaaccatttccctctacctggcaagcatattctgggctttgtgcaggaggaaccagagcagagcagagcagtttccaaactgttccagcatctccaggcagggaac

SEQ ID NO: 494513 - DNA, 120 bp, Artificial Sequence
  ENSG00000163217_25 (sequence is synthesized)
cagtacgtcatcccccattcacccctactcatcttaaggaatgcttccttaagaagtctgacacttttttcttttttttaccctggaaaacaatcagtccccttttacaaatctcttaag

SEQ ID NO: 494514 - DNA, 120 bp, Artificial Sequence
  ENSG00000163217_26 (sequence is synthesized)
gttataaactcaaactgcactagacaatagaggcaaggaaaactattttgaagaaggcccaatttgaacctcagctcgctagatctgttgtctgctgggtgaatcctggggaattcattg

SEQ ID NO: 494515 - DNA, 120 bp, Artificial Sequence
  ENSG00000163217_27 (sequence is synthesized)
ctcatggaagagtggtgttttgaccgtcagtgggtatacagtgattgatgctttgagaaagccatgcaactcagaatcactatttgtggaacagcctccatataacatgatgtgtgtatg

SEQ ID NO: 494516 - DNA, 120 bp, Artificial Sequence
  ENSG00000163217_28 (sequence is synthesized)
tgtgtgtgatgtatagctggctttgaataaccacgcttaataccctcagtggaacgtggtgcatccttcatactccatggtacacaatgtatactcacatactccaaggtacttcttatc

SEQ ID NO: 494517 - DNA, 120 bp, Artificial Sequence
  ENSG00000163217_29 (sequence is synthesized)
ctttctaaaggacactgtaatacatacacagtaaaacctcagctgaccaggatagtcctggttagataaaaattaagcaaattttctttatgtctaatacatatgacagtggtgtgctgg

SEQ ID NO: 494518 - DNA, 120 bp, Artificial Sequence
  ENSG00000163217_30 (sequence is synthesized)
taaaacccttacaaccagcaatccagggggagaaaaagccctgatttgtggatttcaatgctgcaaacgctcctacatggtctatcttgagctgccaaggtgatgtcaactggcttgcaa

SEQ ID NO: 494519 - DNA, 120 bp, Artificial Sequence
  ENSG00000163217_31 (sequence is synthesized)
aacttctaaaacctaagtcagctcttgggagctgtgcactggtgctggcacaccgctgacatttagtatcccactgacattagcacaccgctgacattagcaccctgatactagaatgtt

SEQ ID NO: 494520 - DNA, 120 bp, Artificial Sequence
  ENSG00000163217_32 (sequence is synthesized)
aaggatgtgccagccctgctttccactgtgtgcgctgctggctccgggcttctggagaaatcttgtctcgagcacttatagtcactcttctgttaaagagatatgaaaatataggctgtt

SEQ ID NO: 494521 - DNA, 120 bp, Artificial Sequence
  ENSG00000163217_33 (sequence is synthesized)
ggcgatcaggctgcatagcccagttgtttctttctgcccatccagatgtaaacctgcatttctatgattttctgcttccctgtggaaagggagtgcagagagcaacatattgttattcaa

SEQ ID NO: 494522 - DNA, 120 bp, Artificial Sequence
  ENSG00000163217_34 (sequence is synthesized)
atgttgctagttgtatttttttggctttttgtcagaaagtgaaaagacacagcccgtagaggagttctcccagctcccaccggaaccccggcagcacaccggtgtcactttcaactcctg

SEQ ID NO: 494523 - DNA, 120 bp, Artificial Sequence
  ENSG00000163217_35 (sequence is synthesized)
cattgacaggaagccagaatattgtcagatccttaaaaaggtagaatcttactaatgtttctctggtcatagaccttcttctgggtcccatgccagtttttttcccccttttattgcaga

SEQ ID NO: 494524 - DNA, 120 bp, Artificial Sequence
  ENSG00000163217_36 (sequence is synthesized)
attatcatcaccgaagttgatatagctaaacaactcttgaggagaattatagcagagggacttgggcagcccacagccaaaatattcatgtaagagtttctaggcttcccactatttatt

SEQ ID NO: 494525 - DNA, 120 bp, Artificial Sequence
  ENSG00000163217_37 (sequence is synthesized)
gattgatatatttatttttgtaaaatattgtagaataccaaatattttatttttatgtctgtgattcccttttggatagagagtcttctgggcttcagagtatggctcacatataatata

SEQ ID NO: 494526 - DNA, 120 bp, Artificial Sequence
  ENSG00000163217_38 (sequence is synthesized)
tggcctgtatttccatctctctctttttgcatcagaatattctattggtttaaggaatcttgccatagcttgccataattttgtatatttgtgtcttgcaggcatgctgtgcctacaagc

SEQ ID NO: 494527 - DNA, 120 bp, Artificial Sequence
  ENSG00000163217_39 (sequence is synthesized)
atgctttgtagtatattttctgatttgtaaatagtacagttttaactgaagtgtagatgttccaggaaatatttaaccaatacattgtcatgcagtttcataaagtgatgttgtcagttt

SEQ ID NO: 494528 - DNA, 120 bp, Artificial Sequence
  ENSG00000163217_40 (sequence is synthesized)
atcatgagaagcaaatattgtcaggctgtgagagaatgtgattgctactcagtaaacggagatgctatttaaatgaatcttttcatcccccaaatctggtacttcccctctgaattcacc

SEQ ID NO: 494529 - DNA, 120 bp, Artificial Sequence
  ENSG00000163217_41 (sequence is synthesized)
tgttgccgtcactgacccagaaattcagagatgtgattggtcaaattcatttgtaattggaccaattactttgtaaatgtcaaaaatgttagcttagtgatttccaaaagagtcagcccc

SEQ ID NO: 494530 - DNA, 120 bp, Artificial Sequence
  ENSG00000163217_42 (sequence is synthesized)
aaagtgccgaattctttcctgatgtgtaaattttggtccggggaattaatgacaaaaaccttttttttttaagaactgttactaaatgtttcagtatttgttatgatttatattcttcaa

SEQ ID NO: 494531 - DNA, 120 bp, Artificial Sequence
  ENSG00000163217_43 (sequence is synthesized)
gtaaaagatattttcatataagagaattttatgtattcttcttacttgattcatcaacagattatgaagcctagcagtgttctggcaaaacctttttaacttgcctagaacacagaaggg

SEQ ID NO: 494532 - DNA, 120 bp, Artificial Sequence
  ENSG00000163217_44 (sequence is synthesized)
atgttgccctttttaaggttgtagatcttttcagagtcactgtgggtcattctcaaccctttgcagttctgcaagctcacatatggtgcaagaggaaatgctggtatgactctgtgcatt

SEQ ID NO: 494533 - DNA, 120 bp, Artificial Sequence
  ENSG00000163217_45 (sequence is synthesized)
ttcttgcccccaaacaggaacagttgatttcctacattaaatggaaggtagatgtgactatggaagagaagtacacaggggtgtttctgcatgtgaaatatttgtcataagttaaaaacc

SEQ ID NO: 494534 - DNA, 120 bp, Artificial Sequence
  ENSG00000163217_46 (sequence is synthesized)
catcatggaataactgtttgttgtgatcagcatgtttttatcacacatgggcactggttttgtgagcacctggcttgatagtggtggggcggccaatgtgccagcgcccgcctactgagc

SEQ ID NO: 494535 - DNA, 120 bp, Artificial Sequence
  ENSG00000163217_47 (sequence is synthesized)
attcatggacattggaaatcagcgaacaccacagacacaccgaatcagctgatgcacggtcatgttctggggtaaaacctgttcattatccatgtccacatttgtatagttatcactaga

SEQ ID NO: 494536 - DNA, 120 bp, Artificial Sequence
  ENSG00000163217_48 (sequence is synthesized)
ctaaaatgaagatggaaataaatattttaccctgtgttcatgaaccaaatgtgtaccttcagagtctttttaagtaaaataaaaaaattattttggtgataattatttgcagcttatttt

SEQ ID NO: 494537 - DNA, 120 bp, Artificial Sequence
  ENSG00000163217_49 (sequence is synthesized)
tccttgaggtaaggtatttaattttgcacactccccactttttcatgtttctacttgataacatatcccgatggaataaaactaattgctatattaataaagaatggtctgaagaaacca

SEQ ID NO: 494538 - DNA, 120 bp, Artificial Sequence
  ENSG00000163218_0 (sequence is synthesized)
acttgcatttctccaggtgctgtgaaaggagctggctcagagccttgccctctgtcttcccttctccccatcttttgttagggatcctgggctctcttctctctgggaagctagagcccg

SEQ ID NO: 494539 - DNA, 120 bp, Artificial Sequence
  ENSG00000163218_1 (sequence is synthesized)
agtgctccattcccagggagggagtgccctctagggctagggagagtgaaggctggaggagaaggcgccagttggtgaagaagggcagggcctggaggccaagtctggaagggaaggagc

SEQ ID NO: 494540 - DNA, 120 bp, Artificial Sequence
  ENSG00000163218_2 (sequence is synthesized)
tgctggccaatcaggggcaagctgactgcaccctgacctgctgggctgggacagcacaggacccacagatatctgctgccatccacactctccagattggtgtcctgggaccacgtgggg

SEQ ID NO: 494541 - DNA, 120 bp, Artificial Sequence
  ENSG00000163218_3 (sequence is synthesized)
atgctgccgtggcttcttgtcttctctgctctgggtatccaggcctggggtgattcctcctggaacaaaacacaagctaaacaggtatcagaggggctccagtacctatttgagaacatc

SEQ ID NO: 494542 - DNA, 120 bp, Artificial Sequence
  ENSG00000163218_4 (sequence is synthesized)
tcccagctcactgaaaaaggccttcccacagatgtctccaccacggtctctcgcaaggcatggggggcagaagctgttggctgcagtattcagctgaccacgccagtgaatgtccttgtt

SEQ ID NO: 494543 - DNA, 120 bp, Artificial Sequence
  ENSG00000163218_5 (sequence is synthesized)
atacaccatgtccctggactggagtgtcacgaccagacagtctgcagccagagactgcgggaactgcaggcccatcatgtccacaacaacagtgggtgtgatgtggcctacaacttcctg

SEQ ID NO: 494544 - DNA, 120 bp, Artificial Sequence
  ENSG00000163218_6 (sequence is synthesized)
gttggggatgatggcagggtgtatgaaggtgttggctggaatatccaaggagtgcacacccaaggctacaacaacatctccctgggctttgccttctttggcactaagaaaggccacagt

SEQ ID NO: 494545 - DNA, 120 bp, Artificial Sequence
  ENSG00000163218_7 (sequence is synthesized)
cccagccctgctgccctgtcggccatggaaaacctaatcacctatgctgtccagaagggccacctgtcatccagttatgttcagccacttcttgggaaaggcgagaactgcctggcccct

SEQ ID NO: 494546 - DNA, 120 bp, Artificial Sequence
  ENSG00000163218_8 (sequence is synthesized)
tctcccagcgaagtatggcatcattatccacactgccgggaggacctgcaacatttctgatgagtgccgcctgctggtccgggacatccagtctttctacatagacaggctcaagtcatg

SEQ ID NO: 494547 - DNA, 120 bp, Artificial Sequence
  ENSG00000163218_9 (sequence is synthesized)
cgacattggttataacttcctggtgggccaggatggcgccatttatgaaggggtgggctggaatgtccaaggctcctccacccctggctacgatgacattgccctgggcattaccttcat

SEQ ID NO: 494548 - DNA, 120 bp, Artificial Sequence
  ENSG00000163218_10 (sequence is synthesized)
gggcaccttcacaggtataccacccaatgctgcagcactagaggcagcccaagacctgatccagtgtgccatggtcaaagggtacctgactcccaactacctgctggtgggccacagtga

SEQ ID NO: 494549 - DNA, 120 bp, Artificial Sequence
  ENSG00000163218_11 (sequence is synthesized)
tgtggcccgaaccttgtctcctgggcaggctttgtacaacatcatcagcacctggcctcatttcaaacactgagagaagccccaggtccttctgagactgctttccctcccctgtcaggt

SEQ ID NO: 494550 - DNA, 120 bp, Artificial Sequence
  ENSG00000163218_12 (sequence is synthesized)
ctctcctgtcctaaccatccagcttggctcaacaccttttgccctcctcccctgccacacagtcctgtgcctcctttttcaggttgggatgatcatgccctctcctgccaacatcctcca

SEQ ID NO: 494551 - DNA, 120 bp, Artificial Sequence
  ENSG00000163218_13 (sequence is synthesized)
agggcctccaaacctcatagctggacattcacagccctctgagtctgagtccagatttcttctctccttaccttcctctcccttggaaacccaactcctcagccaggtgagacaatgggc

SEQ ID NO: 494552 - DNA, 120 bp, Artificial Sequence
  ENSG00000163218_14 (sequence is synthesized)
tggttcttgtttcatttctctctctctctccattcccctctgcctggtgagccttcccctggtgtctgcctggcagcccccacctcccacctatcacccctcacccataactcaggtcaa

SEQ ID NO: 494553 - DNA, 120 bp, Artificial Sequence
  ENSG00000163218_15 (sequence is synthesized)
cgtgaccaaccttccttgcttacacataaacttgtatatatttggatgtagcccttatttaatggctgtcattatttatagatatgtctatccttgctacttggttgtgagtttctccag

SEQ ID NO: 494554 - DNA, 120 bp, Artificial Sequence
  ENSG00000163218_16 (sequence is synthesized)
gggaggaactgtgttttattcatctctatgtcctctgtttctcagcagtgtctgaaatttaatgggttctactgatgtttattagagaaatggatgaataaatgaatgaagagatccaaa

SEQ ID NO: 494555 - DNA, 120 bp, Artificial Sequence
  ENSG00000163218_17 (sequence is synthesized)
ggcacatggtcagtgttgcttccctgggatgcttctcctgtcccttctcatcccttttcctcattttctgggttgtggtcctatatgttttataatgaataaaatatttaaaacccccat

SEQ ID NO: 494556 - DNA, 120 bp, Artificial Sequence
  ENSG00000163219_0 (sequence is synthesized)
agttgtttatcacgacctcaactcagtaaggcctgagattctttcgaaaaggagctttgcttcccatgacgcagagggaagtgtcaactgggatatttctggtaaaactgaaagcaagaa

SEQ ID NO: 494557 - DNA, 120 bp, Artificial Sequence
  ENSG00000163219_1 (sequence is synthesized)
aagcagggtgctagcccctgtgggactgagggtggaggctgggggagtttgggtgccatcctccagtgacagatggatggacctttcatctaagagaaaggaggagacacgttggcaaat

SEQ ID NO: 494558 - DNA, 120 bp, Artificial Sequence
  ENSG00000163219_2 (sequence is synthesized)
cagcctcaagcctaagattgcttgtgaagcaatcataaggaggaacaaaaacagacacaaaaacagagggaaagagtgaaaagacaagaagggcgcaaactgtgacagactcaccgcttc

SEQ ID NO: 494559 - DNA, 120 bp, Artificial Sequence
  ENSG00000163219_3 (sequence is synthesized)
actaactactcacttaaactggaagcaaaatgtccctaaaattgccaaggaactgggatttcaacctgaaagtggaggctgcgaaaatagctcggtcaaggagtgtgatgactggcgagc

SEQ ID NO: 494560 - DNA, 120 bp, Artificial Sequence
  ENSG00000163219_4 (sequence is synthesized)
agatggctgccttccatccatcgtccacccccaacccgctggagaggcccatcaagatgggctggctgaagaagcagaggtccatcgtgaagaactggcagcagaggtactttgtgctga

SEQ ID NO: 494561 - DNA, 120 bp, Artificial Sequence
  ENSG00000163219_5 (sequence is synthesized)
gggcgcagcagctctactactacaaggatgaagaggacacgaagccccagggctgcatgtatctaccaggatgtacaatcaaggagatcgccacaaacccagaagaagctgggaagtttg

SEQ ID NO: 494562 - DNA, 120 bp, Artificial Sequence
  ENSG00000163219_6 (sequence is synthesized)
tctttgaaatcattccagcctcatgggaccagaatcgcatgggacaggactcctatgtcctcatggccagctctcaggcggagatggaggagtgggttaaattcctcaggagagttgctg

SEQ ID NO: 494563 - DNA, 120 bp, Artificial Sequence
  ENSG00000163219_7 (sequence is synthesized)
gcacaccctgtggagcagtgtttggccagcgcttggatgagactgtggcctatgaacagaaattcggcccccatctggtgcccatcctggtggagaaatgtgcagagttcatcctggagc

SEQ ID NO: 494564 - DNA, 120 bp, Artificial Sequence
  ENSG00000163219_8 (sequence is synthesized)
acggccggaatgaagagggcatcttccgtctgcctgggcaggacaacctggtgaagcagctgagagacgcttttgatgctggggagcggccctcctttgacagagacacagatgtgcaca

SEQ ID NO: 494565 - DNA, 120 bp, Artificial Sequence
  ENSG00000163219_9 (sequence is synthesized)
ctgtggcttccctgttaaagctctacctccgagacctcccagagcccgtggttccctggagccagtacgaagggttcctgctctgtgggcagctcacgaatgcggatgaggcaaaggctc

SEQ ID NO: 494566 - DNA, 120 bp, Artificial Sequence
  ENSG00000163219_10 (sequence is synthesized)
agcaggagttgatgaagcagctctccatccttcctcgtgacaactatagtctcctgagctacatctgcaggttcctacatgaaatacagctgaactgtgctgttaacaagatgagtgtgg

SEQ ID NO: 494567 - DNA, 120 bp, Artificial Sequence
  ENSG00000163219_11 (sequence is synthesized)
acaacctggctactgtgattggtgtgaatctcatcaggtcgaaggtcgaagaccctgccgtgatcatgagagggactcctcagatccaaagagtgatgactatgatgatcagagaccatg

SEQ ID NO: 494568 - DNA, 120 bp, Artificial Sequence
  ENSG00000163219_12 (sequence is synthesized)
gtaggctgggatgccactgaagacctccgaatttctaggacagacagcttcagtagcatgacaagcgactctgatacaaccagccccaccggacagcagccgagcgatgcgtttccggag

SEQ ID NO: 494569 - DNA, 120 bp, Artificial Sequence
  ENSG00000163219_13 (sequence is synthesized)
gacagcagcaaagtacccagggaaaagccaggagactggaaaatgcaatctcgtaaaaggactcaaacactccctaaccggaaatgtttcttgacatcagcttttcagggtgccaacagc

SEQ ID NO: 494570 - DNA, 120 bp, Artificial Sequence
  ENSG00000163219_14 (sequence is synthesized)
agcaaaatggagatctttaaaaatgaattctggtcgccttcctcagaggctaaggcaggggaagggcacaggagaacgatgtctcaagacttgcgccaactttctgactcccaacggact

SEQ ID NO: 494571 - DNA, 120 bp, Artificial Sequence
  ENSG00000163219_15 (sequence is synthesized)
tccacctacgataacgtcccttccctgccagggtcccctggggaggaagccagtgcactctcttcccaagcctgtgactccaagggagatactcttgccagtccaaactctgaaactggg

SEQ ID NO: 494572 - DNA, 120 bp, Artificial Sequence
  ENSG00000163219_16 (sequence is synthesized)
cctggaaaaaagaactctggagaagaggaaattgattctttgcagaggatggtccaagagctacgaaaggaaatagaaacacagaagcaaatgtatgaggaacagattaaaaaccttgag

SEQ ID NO: 494573 - DNA, 120 bp, Artificial Sequence
  ENSG00000163219_17 (sequence is synthesized)
aaggaaaattatgacgtttgggctaaagtggtgaggctcaatgaagaactggagaaggaaaagaagaagtctgcagccctagagatcagcctccgcaacatggagcgctcccgggaggat

SEQ ID NO: 494574 - DNA, 120 bp, Artificial Sequence
  ENSG00000163219_18 (sequence is synthesized)
gttgagaagaggaacaaggccttggaagaagaagtcaaggaatttgtcaaatccatgaaggaacccaagaccgaggcttaagggtcccaggagtactgcagggacagccccagagaggcc

SEQ ID NO: 494575 - DNA, 120 bp, Artificial Sequence
  ENSG00000163219_19 (sequence is synthesized)
caactctggcccctttctcagtgctatctgatgacggggaaacaaaattattctctgagagggaaaggacatttgagggaaacatcaaatttccccataaataaatgaatggagtttgca

SEQ ID NO: 494576 - DNA, 120 bp, Artificial Sequence
  ENSG00000163219_20 (sequence is synthesized)
ggaaggtgagggtgagcagagatgtgtgtggacatctctgaccatccatcgctgtattcaaatggattgttttattccattctggtctcaggcatgaccacgtccagtgaagacatttga

SEQ ID NO: 494577 - DNA, 120 bp, Artificial Sequence
  ENSG00000163219_21 (sequence is synthesized)
ggcagcacatctcaggacccaggcaatagactggccccaactcaggctggactaaggtgtgattaattctttgttttttgtgtggaacagctcaccttgtcagacagcctcagggcatct

SEQ ID NO: 494578 - DNA, 120 bp, Artificial Sequence
  ENSG00000163219_22 (sequence is synthesized)
ctgagacacaggggcagaaaatgacattcatcttttgagtcctcatccatggagtgctgtgtttggggggctgcatctgctgaagcgagaaccccattctgccaccccaccaggatgccc

SEQ ID NO: 494579 - DNA, 120 bp, Artificial Sequence
  ENSG00000163219_23 (sequence is synthesized)
attctccaggacttctccaacttactattagactaaaccagaacaagcaacaaactgtatttatgcaagcaaaattgatgagaaaattatattcaaataaagcaaaaattaaaaaaaaaa

SEQ ID NO: 494580 - DNA, 120 bp, Artificial Sequence
  ENSG00000163219_24 (sequence is synthesized)
ctcttcagaaggctccagccaacctttcggtttgcagaatgacggggcccgccgcggtgccggactgcctgtgcacggggccaccgactgcagcctgggttttattcttggcctggccct

SEQ ID NO: 494581 - DNA, 120 bp, Artificial Sequence
  ENSG00000163219_25 (sequence is synthesized)
gaccgggagctggcccctcggctgcttctctggctcgggggggactttctctggctcagatccggacccctgaactggacctggttgtcgtccccccgcttctcagccccctctggggtt

SEQ ID NO: 494582 - DNA, 120 bp, Artificial Sequence
  ENSG00000163219_26 (sequence is synthesized)
cactgtggagtttcctacacatggctctgagtcaagactggcaacagggcggtgatggtagtgacactcagtcaagggctcagagagagtggatttgggttcaggaaaaccgattttggg

SEQ ID NO: 494583 - DNA, 120 bp, Artificial Sequence
  ENSG00000163219_27 (sequence is synthesized)
accatttgcatgttggtctgcagggagcatagtctacttaaaaatggatctcgcagcaaatctgagtttgagggaccatttgcatttaagttggcatgccaggtccaagttctaaaatgc

SEQ ID NO: 494584 - DNA, 120 bp, Artificial Sequence
  ENSG00000163219_28 (sequence is synthesized)
tgggagggggttctctttcatttggacaaaacagtgggatggcactccttggtgtgcaggatctggggtacttcggatgatttaaggctacagactacacacaaaactctcggtcaagga

SEQ ID NO: 494585 - DNA, 120 bp, Artificial Sequence
  ENSG00000163219_29 (sequence is synthesized)
ggctgggatgccactgaagacctccgaatttctaggacagacagcttcagtagcatggtaaggtgcagagaaccttcctgcttccattgggttcttcctttagtccaggccatcccatgt

SEQ ID NO: 494586 - DNA, 120 bp, Artificial Sequence
  ENSG00000163219_30 (sequence is synthesized)
aaggcctgctctcgggtggcaatttggggagttttaggtgatgcagtggcagtgggcgctgctgctacagactcatctgaacacaccttgaaagcctggcctctttccaaatctagtttc

SEQ ID NO: 494587 - DNA, 120 bp, Artificial Sequence
  ENSG00000163219_31 (sequence is synthesized)
tattggcatctttgaggggggtgagtgacaagtgtgccaatcacccagtgactgagcaatgaggtcctcactgaagcccactctgaaagagagactcaaatacagtccagagaagttcag

SEQ ID NO: 494588 - DNA, 120 bp, Artificial Sequence
  ENSG00000163219_32 (sequence is synthesized)
tgggaaaaatgtatacaacattgtaaatgttttggtcagaattgttgaaaattctgggtgaacgtccagagaaaactggtttcctgctaacccatgaaacgtgattcctttctcagagta

SEQ ID NO: 494589 - DNA, 120 bp, Artificial Sequence
  ENSG00000163219_33 (sequence is synthesized)
attctgggccaccctggttattttccttcagccctttctggggacctgctgtgcgccacccctgtggcaactctagctgtggattgacccagatctggctcggctgggaactgggatctt

SEQ ID NO: 494590 - DNA, 120 bp, Artificial Sequence
  ENSG00000163219_34 (sequence is synthesized)
catcccagactgacctgaattttgtcttttattttttaaaaataatttgttgtagttcctagattataaaagtcatgcttgcttgacttggaaaccaggaagatatagcaaacagttcct

SEQ ID NO: 494591 - DNA, 69 bp, Artificial Sequence
  ENSG00000163219_35 (sequence is synthesized)
ccatcttctgcgtcgctcacgcaatttttgtatatagtgaaagagtctcctgcaatgattcagacttgg

SEQ ID NO: 494592 - DNA, 120 bp, Artificial Sequence
  ENSG00000163219_36 (sequence is synthesized)
gtatatagtgaaagagtctcctgcaatgattcagacttggctttactggcttcttccatagataagcaccagcctaggagctctcaaagttgttccagctaaaggacacactcagctttt

SEQ ID NO: 494593 - DNA, 120 bp, Artificial Sequence
  ENSG00000163219_37 (sequence is synthesized)
tatgtctctgcagcagtaaatgctaaagggagtccttcctgcaggttgatataaaaggacactaaacaataacttgatgccatatgaagaaaaaaagatctcagcaaagctcggtcaagg

SEQ ID NO: 494594 - DNA, 64 bp, Artificial Sequence
  ENSG00000163219_38 (sequence is synthesized)
cccagcttccgggcgtaggaccctccgagccagagtctcctgcaatgattcagacttggcttta

SEQ ID NO: 494595 - DNA, 120 bp, Artificial Sequence
  ENSG00000163219_39 (sequence is synthesized)
tgcacagatacaccaattctgtcccagggtctccttgctggcacatgggcaggctcatttactggtaaatgatttacttgtgtaaatctcttcccaggctcagcaggagttgatgaagca

SEQ ID NO: 494596 - DNA, 120 bp, Artificial Sequence
  ENSG00000163219_40 (sequence is synthesized)
gggaccacgtctgtgaacagagagattctggtctagcactttggaagatcagctgtattcacatagcactgaagtagcttcctgtataatttcaaggattctgaaaacctggttgaacca

SEQ ID NO: 494597 - DNA, 120 bp, Artificial Sequence
  ENSG00000163220_0 (sequence is synthesized)
aaacactctgtgtggctcctcggctttgacagagtgcaagacgatgacttgcaaaatgtcgcagctggaacgcaacatagagaccatcatcaacaccttccaccaatactctgtgaagct

SEQ ID NO: 494598 - DNA, 120 bp, Artificial Sequence
  ENSG00000163220_1 (sequence is synthesized)
ggggcacccagacaccctgaaccagggggaattcaaagagctggtgcgaaaagatctgcaaaattttctcaagaaggagaataagaatgaaaaggtcatagaacacatcatggaggacct

SEQ ID NO: 494599 - DNA, 120 bp, Artificial Sequence
  ENSG00000163220_2 (sequence is synthesized)
tgacgagggccctggccaccaccataagccaggcctcggggagggcaccccctaagaccacagtggccaagatcacagtggccacggccacggccacagtcatggtggccacggccacag

SEQ ID NO: 494600 - DNA, 120 bp, Artificial Sequence
  ENSG00000163220_3 (sequence is synthesized)
ccactaatcaggaggccaggccaccctgcctctacccaaccagggccccggggcctgttatgtcaaactgtcttggctgtggggctaggggctggggccaaataaagtctcttcctccaa

SEQ ID NO: 494601 - DNA, 120 bp, Artificial Sequence
  ENSG00000163221_0 (sequence is synthesized)
cttccttggctcagtgcccttcaccactgctggctttttgctgtagctccacattcctgtgcattgaggggttaacattaggctgggaagatgacaaaacttgaagagcatctggaggga

SEQ ID NO: 494602 - DNA, 120 bp, Artificial Sequence
  ENSG00000163221_1 (sequence is synthesized)
attgtcaatatcttccaccaatactcagttcggaaggggcattttgacaccctctctaagggtgagctgaagcagctgcttacaaaggagcttgcaaacaccatcaagaatatcaaagat

SEQ ID NO: 494603 - DNA, 120 bp, Artificial Sequence
  ENSG00000163221_2 (sequence is synthesized)
tgtcattgatgaaatattccaaggcctggatgctaatcaagatgaacaggtcgactttcaagaattcatatccctggtagccattgcgctgaaggctgcccattaccacacccacaaaga

SEQ ID NO: 494604 - DNA, 120 bp, Artificial Sequence
  ENSG00000163221_3 (sequence is synthesized)
gtaggtagctctctgaaggctttttacccagcaatgtcctcaatgagggtcttttctttccctcaccaaaacccagccttgcccgtggggagtaagagttaataaacacactcacgaaaa

SEQ ID NO: 494605 - DNA, 120 bp, Artificial Sequence
  ENSG00000163235_0 (sequence is synthesized)
actcgggcaccgcaggtagggcaggaggctggagagcctgctgcccgcccgcccgtaaaatggtcccctcggctggacagctcgccctgttcgctctgggtattgtgttggctgcgtgcc

SEQ ID NO: 494606 - DNA, 120 bp, Artificial Sequence
  ENSG00000163235_1 (sequence is synthesized)
aggccttggagaacagcacgtccccgctgagtgcagacccgcccgtggctgcagcagtggtgtcccattttaatgactgcccagattcccacactcagttctgcttccatggaacctgca

SEQ ID NO: 494607 - DNA, 120 bp, Artificial Sequence
  ENSG00000163235_2 (sequence is synthesized)
ggtttttggtgcaggaggacaagccagcatgtgtctgccattctgggtacgttggtgcacgctgtgagcatgcggacctcctggccgtggtggctgccagccagaagaagcaggccatca

SEQ ID NO: 494608 - DNA, 120 bp, Artificial Sequence
  ENSG00000163235_3 (sequence is synthesized)
ccgccttggtggtggtctccatcgtggccctggctgtccttatcatcacatgtgtgctgatacactgctgccaggtccgaaaacactgtgagtggtgccgggccctcatctgccggcacg

SEQ ID NO: 494609 - DNA, 120 bp, Artificial Sequence
  ENSG00000163235_4 (sequence is synthesized)
agaagcccagcgccctcctgaagggaagaaccgcttgctgccactcagaaacagtggtctgaagagcccagaggaggagtttggccaggtggactgtggcagatcaataaagaaaggctt

SEQ ID NO: 494610 - DNA, 120 bp, Artificial Sequence
  ENSG00000163235_5 (sequence is synthesized)
cttcaggacagcactgccagagatgcctgggtgtgccacagaccttcctacttggcctgtaatcacctgtgcagccttttgtgggccttcaaaactctgtcaagaactccgtctgcttgg

SEQ ID NO: 494611 - DNA, 120 bp, Artificial Sequence
  ENSG00000163235_6 (sequence is synthesized)
ggttattcagtgtgacctagagaagaaatcagcggaccacgatttcaagacttgttaaaaaagaactgcaaagagacggactcctgttcacctaggtgaggtgtgtgcagcagttggtgt

SEQ ID NO: 494612 - DNA, 120 bp, Artificial Sequence
  ENSG00000163235_7 (sequence is synthesized)
ctgagtccacatgtgtgcagttgtcttctgccagccatggattccaggctatatatttctttttaatgggccacctccccacaacagaattctgcccaacacaggagatttctatagtta

SEQ ID NO: 494613 - DNA, 120 bp, Artificial Sequence
  ENSG00000163235_8 (sequence is synthesized)
ttgttttctgtcatttgcctactggggaagaaagtgaaggaggggaaactgtttaatatcacatgaagaccctagctttaagagaagctgtatcctctaaccacgagaccctcaaccagc

SEQ ID NO: 494614 - DNA, 120 bp, Artificial Sequence
  ENSG00000163235_9 (sequence is synthesized)
ccaacatcttccatggacacatgacattgaagaccatcccaagctatcgccacccttggagatgatgtcttatttattagatggataatggttttatttttaatctcttaagtcaatgta

SEQ ID NO: 494615 - DNA, 120 bp, Artificial Sequence
  ENSG00000163235_10 (sequence is synthesized)
aaaagtataaaaccccttcagacttctacattaatgatgtatgtgttgctgactgaaaagctatactgattagaaatgtctggcctcttcaagacagctaaggcttgggaaaagtcttcc

SEQ ID NO: 494616 - DNA, 120 bp, Artificial Sequence
  ENSG00000163235_11 (sequence is synthesized)
agggtgcggagatggaaccagaggctgggttactggtaggaataaaggtaggggttcagaaatggtgccattgaagccacaaagccggtaaatgcctcaatacgttctgggagaaaactt

SEQ ID NO: 494617 - DNA, 120 bp, Artificial Sequence
  ENSG00000163235_12 (sequence is synthesized)
agcaaatccatcagcagggatctgtcccctctgttggggagagaggaagagtgtgtgtgtctacacaggataaacccaatacatattgtactgctcagtgattaaatgggttcacttcct

SEQ ID NO: 494618 - DNA, 120 bp, Artificial Sequence
  ENSG00000163235_13 (sequence is synthesized)
cgtgagccctcggtaagtatgtttagaaatagaacattagccacgagccataggcatttcaggccaaatccatgaaagggggaccagtcatttattttccattttgttgcttggttggtt

SEQ ID NO: 494619 - DNA, 120 bp, Artificial Sequence
  ENSG00000163235_14 (sequence is synthesized)
tgttgctttatttttaaaaggagaagtttaactttgctatttattttcgagcactaggaaaactattccagtaatttttttttcctcatttccattcaggatgccggctttattaacaaa

SEQ ID NO: 494620 - DNA, 120 bp, Artificial Sequence
  ENSG00000163235_15 (sequence is synthesized)
aactctaacaagtcacctccactatgtgggtcttcctttcccctcaagagaaggagcaattgttcccctgagcatctgggtccatctgacccatggggcctgcctgtgagaaacagtggg

SEQ ID NO: 494621 - DNA, 120 bp, Artificial Sequence
  ENSG00000163235_16 (sequence is synthesized)
tcccttcaaatacatagtggatagctcatccctaggaattttcattaaaatttggaaacagagtaatgaagaaataatatataaactccttatgtgaggaaatgctactaatatctgaaa

SEQ ID NO: 494622 - DNA, 120 bp, Artificial Sequence
  ENSG00000163235_17 (sequence is synthesized)
tagcttattacatcgtgaaaggtacatttaaaatatgttaaattggcttgaaattttcagagaattttgtcttcccctaattcttcttccttggtctggaagaacaatttctatgaattt

SEQ ID NO: 494623 - DNA, 120 bp, Artificial Sequence
  ENSG00000163235_18 (sequence is synthesized)
tctctttatttttttttataattcagacaattctatgacccgtgtcttcatttttggcactcttatttaacaatgccacacctgaagcacttggatctgttcagagctgaccccctagca

SEQ ID NO: 494624 - DNA, 120 bp, Artificial Sequence
  ENSG00000163235_19 (sequence is synthesized)
acgtagttgacacagctccaggtttttaaattactaaaataagttcaagtttacatcccttgggccagatatgtgggttgaggcttgactgtagcatcctgcttagagaccaatcaacgg

SEQ ID NO: 494625 - DNA, 120 bp, Artificial Sequence
  ENSG00000163235_20 (sequence is synthesized)
acactggtttttagacctctatcaatcagtagttagcatccaagagactttgcagaggcgtaggaatgaggctggacagatggcggaagcagaggttccctgcgaagacttgagatttag

SEQ ID NO: 494626 - DNA, 120 bp, Artificial Sequence
  ENSG00000163235_21 (sequence is synthesized)
tgtctgtgaatgttctagttcctaggtccagcaagtcacacctgccagtgccctcatccttatgcctgtaacacacatgcagtgagaggcctcacatatacgcctccctagaagtgcctt

SEQ ID NO: 494627 - DNA, 120 bp, Artificial Sequence
  ENSG00000163235_22 (sequence is synthesized)
ccaagtcagtcctttggaaaccagcaggtctgaaaaagaggctgcatcaatgcaagcctggttggaccattgtccatgcctcaggatagaacagcctggcttatttggggatttttcttc

SEQ ID NO: 494628 - DNA, 120 bp, Artificial Sequence
  ENSG00000163235_23 (sequence is synthesized)
tagaaatcaaatgactgataagcattggatccctctgccatttaatggcaatggtagtctttggttagctgcaaaaatactccatttcaagttaaaaatgcatcttctaatccatctctg

SEQ ID NO: 494629 - DNA, 120 bp, Artificial Sequence
  ENSG00000163235_24 (sequence is synthesized)
caagctccctgtgtttccttgccctttagaaaatgaattgttcactacaattagagaatcatttaacatcctgacctggtaagctgccacacacctggcagtggggagcatcgctgtttc

SEQ ID NO: 494630 - DNA, 120 bp, Artificial Sequence
  ENSG00000163235_25 (sequence is synthesized)
caatggctcaggagacaatgaaaagcccccatttaaaaaaataacaaacattttttaaaaggcctccaatactcttatggagcctggatttttcccactgctctacaggctgtgactttt

SEQ ID NO: 494631 - DNA, 120 bp, Artificial Sequence
  ENSG00000163235_26 (sequence is synthesized)
tttaagcatcctgacaggaaatgttttcttctacatggaaagatagacagcagccaaccctgatctggaagacagggccccggctggacacacgtggaaccaagccagggatgggctggc

SEQ ID NO: 494632 - DNA, 120 bp, Artificial Sequence
  ENSG00000163235_27 (sequence is synthesized)
cattgtgtccccgcaggagagatgggcagaatggccctagagttcttttccctgagaaaggagaaaaagatgggattgccactcacccacccacactggtaagggaggagaatttgtgct

SEQ ID NO: 494633 - DNA, 120 bp, Artificial Sequence
  ENSG00000163235_28 (sequence is synthesized)
tctggagcttctcaagggattgtgttttgcaggtacagaaaactgcctgttatcttcaagccaggttttcgagggcacatgggtcaccagttgctttttcagtcaatttggccgggatgg

SEQ ID NO: 494634 - DNA, 120 bp, Artificial Sequence
  ENSG00000163235_29 (sequence is synthesized)
actaatgaggctctaacactgctcaggagacccctgccctctagttggttctgggctttgatctcttccaacctgcccagtcacagaaggaggaatgactcaaatgcccaaaaccaagaa

SEQ ID NO: 494635 - DNA, 120 bp, Artificial Sequence
  ENSG00000163235_30 (sequence is synthesized)
cacattgcagaagtaagacaaacatgtatatttttaaatgttctaacataagacctgttctctctagccattgatttaccaggctttctgaaagatctagtggttcacacagagagagag

SEQ ID NO: 494636 - DNA, 120 bp, Artificial Sequence
  ENSG00000163235_31 (sequence is synthesized)
agagtactgaaaaagcaactcctcttcttagtcttaataatttactaaaatggtcaacttttcattatctttattataataaacctgatgcttttttttagaactccttactctgatgtc

SEQ ID NO: 494637 - DNA, 120 bp, Artificial Sequence
  ENSG00000163235_32 (sequence is synthesized)
tgtatatgttgcactgaaaaggttaatatttaatgttttaatttattttgtgtggtaagttaattttgatttctgtaatgtgttaatgtgattagcagttattttccttaatatctgaat

SEQ ID NO: 494638 - DNA, 120 bp, Artificial Sequence
  ENSG00000163235_33 (sequence is synthesized)
tatacttaaagagtagtgagcaatataagacgcaattgtgtttttcagtaatgtgcattgttattgagttgtactgtaccttatttggaaggatgaaggaatgaatctttttttcctaaa

SEQ ID NO: 494639 - DNA, 120 bp, Artificial Sequence
  ENSG00000163235_34 (sequence is synthesized)
gcccgcctgggagagtggagagaagcgagtagtctcaatgggttggcgcctgggaggcaaggggagtcattaagaatgacaaagaggggactgtccggtcgagcgccgaggcttccccgg

SEQ ID NO: 494640 - DNA, 120 bp, Artificial Sequence
  ENSG00000163235_35 (sequence is synthesized)
gaaagtggctgcctgggccgtgcgtgagaacacctgggaaggggaagcggagtgtgaacgggcttgaactttaatccgccgcagctgtgtgtctgctcagacacatgcctacacctacct

SEQ ID NO: 494641 - DNA, 120 bp, Artificial Sequence
  ENSG00000163235_36 (sequence is synthesized)
gcttacctggctgcctccaagcccggctcagccggcgtcgctggcgtgtagactgggccgcctcggaacgggggccggcgtctaaccctctggccgggtcttgcctgcgcccctttggca

SEQ ID NO: 494642 - DNA, 120 bp, Artificial Sequence
  ENSG00000163235_37 (sequence is synthesized)
agccgccttcctatttccgcccggcgggcagcgctgcggggcgagtgccagcagagaggcgctcggtcctccctccgccctcccgcgccgggggcaggccctgcctagtctgcgtctttt

SEQ ID NO: 494643 - DNA, 120 bp, Artificial Sequence
  ENSG00000163235_38 (sequence is synthesized)
gcccggctcgcgccgccaggctctgggatcccaggtcgccccgcccagcagcccgcgccctgctcggtattgtgttggctgcgtgccaggccttggagaacagcacgtccccgctgagtg

SEQ ID NO: 494644 - DNA, 120 bp, Artificial Sequence
  ENSG00000163239_0 (sequence is synthesized)
gtcttcaacgcctgcccggcccgaggacaccgtggctctcggaggcggcgggcgccgggggcttccccctgctctttcctcctgcggtgggagaggccaggcccacggaagccccctgcg

SEQ ID NO: 494645 - DNA, 120 bp, Artificial Sequence
  ENSG00000163239_1 (sequence is synthesized)
gcccagcccacgctcccagggaccagagaggaccgagcggaggcggcgggagtatccccggcgcagcgacagacggtggacggacggcgagcggcccatcaactccgcgcgcccctcccc

SEQ ID NO: 494646 - DNA, 120 bp, Artificial Sequence
  ENSG00000163239_2 (sequence is synthesized)
tggcgcctcccagccccgccacctcctgcccagagctgggggcggcggggtgagcgccatggcagaggcgggtcgggctgcgagctctggagaaaggggcggcggccgcacgtgcggatc

SEQ ID NO: 494647 - DNA, 120 bp, Artificial Sequence
  ENSG00000163239_3 (sequence is synthesized)
tgcggatcggccgcgccccactgagcagagagcccccttctgccgccgacagcccgcgtctgcaccgagccggtctcggccgggcgctgccttcacacgcgcccaggagtgtcacgtgcg

SEQ ID NO: 494648 - DNA, 120 bp, Artificial Sequence
  ENSG00000163239_4 (sequence is synthesized)
ccgctcacccccgggaaggaagcccctcgcccacccactccgctctactccactctttctgcagacgttatttttggcggtagggcagaggttgcggcccgaggtccgggcgcagggaca

SEQ ID NO: 494649 - DNA, 120 bp, Artificial Sequence
  ENSG00000163239_5 (sequence is synthesized)
acggtcgccagctcctgcgctagttccgttactcttcggtggcacacggtcctgggcagcgcgaggctcttcccgccgtggccgccggggattggctgccggcaagccccgccccgtgcc

SEQ ID NO: 494650 - DNA, 120 bp, Artificial Sequence
  ENSG00000163239_6 (sequence is synthesized)
cccgggctcagagggggcggagcgcggagggagaaggcgcgaaggctgggcgtcgcgatcgcaggtgcacgcgcgtggcccgcgagacgaggagatcctgttggaaagcaactgcagcat

SEQ ID NO: 494651 - DNA, 120 bp, Artificial Sequence
  ENSG00000163239_7 (sequence is synthesized)
gtcctggaacattagtcacccccaactctctgataaactgtttgggaagaatggagtgttggaggagcagaaatctccaggattcaagaaaagagagacagaggtgtatgttggcaatct

SEQ ID NO: 494652 - DNA, 120 bp, Artificial Sequence
  ENSG00000163239_8 (sequence is synthesized)
tccactggatatttctaaggaggaaattctgtaccttctaaaggacttcaaccctcttgatgtccacaaaatccagaatggctgcaaatgctttgcatttgtagatctgggctccatgca

SEQ ID NO: 494653 - DNA, 120 bp, Artificial Sequence
  ENSG00000163239_9 (sequence is synthesized)
aaaactgttcgtgaatacaagcaaaaggccccccaagaggacccctgatatgatccagcagcctcgggccccgctggtgttggagaaggcttctggtgaaggatttggcaaaaccgccgc

SEQ ID NO: 494654 - DNA, 120 bp, Artificial Sequence
  ENSG00000163239_10 (sequence is synthesized)
tattatacagctcgctcctaaagctcctgttgacctgtgtgagacagagaaactgagggcagccttctttgcagtcccgttggaaatgagagggtccttcctggtgctgctcctgaggga

SEQ ID NO: 494655 - DNA, 120 bp, Artificial Sequence
  ENSG00000163239_11 (sequence is synthesized)
atgcttccgagacctgagctggctggcactcatccatagcgtccgtggggaggcggggctgctggtgacgagtatcgtcccgaagaccccgtttttctgggctatgcacgtcactgaggc

SEQ ID NO: 494656 - DNA, 120 bp, Artificial Sequence
  ENSG00000163239_12 (sequence is synthesized)
tctgcaccagaacatgcaggctctgtttagcaccctggctcaggcggaggagcagcagccctacctggagggctccaccgttatgcgcgggactcgctgtctggcagagtaccacctggg

SEQ ID NO: 494657 - DNA, 120 bp, Artificial Sequence
  ENSG00000163239_13 (sequence is synthesized)
ggattatggacacgcctggaacaggtgttgggtgctggacagggtggacacctgggctgtggtcatgttcattgattttggacagttggccaccatccctgtgcagtctctgcgcagcct

SEQ ID NO: 494658 - DNA, 120 bp, Artificial Sequence
  ENSG00000163239_14 (sequence is synthesized)
agacagcgacgacttctggaccatcccacccctgactcagccattcatgctggagaaagacattttgagttcgtatgaggttgtccatcgaatcctcaaagggaaaatcactggtgcttt

SEQ ID NO: 494659 - DNA, 120 bp, Artificial Sequence
  ENSG00000163239_15 (sequence is synthesized)
gaactcggcgttgcacatcctaaagtttgaagagtctaaataacggggcttccctcagcatgttccctctcctgtttgccacggatccagaggccacctgccctgtcttctcgtacccct

SEQ ID NO: 494660 - DNA, 120 bp, Artificial Sequence
  ENSG00000163239_16 (sequence is synthesized)
ttcactcttgaggcctgggaggtgaaaaaggccagactgtgcccaggattgattcaattttgcttttactcccagcttccctctcaaaagagagtgaagtctcatttgtcatgtgtcttc

SEQ ID NO: 494661 - DNA, 120 bp, Artificial Sequence
  ENSG00000163239_17 (sequence is synthesized)
agttccccaacttggcatgaacatttgaaccaaacataggaaactaccattaggttgaaagcctgaggcagctgggatggtctttcttgtgtctcttctttgcaccccagagcatgatat

SEQ ID NO: 494662 - DNA, 120 bp, Artificial Sequence
  ENSG00000163239_18 (sequence is synthesized)
aagtggtcctaacagattctggataatggagaagccctctgctggttttcctggcattccatgtagaataggtagagaatatttaaccaatgagcaaataaatgttggcatgtttcatga

SEQ ID NO: 494663 - DNA, 120 bp, Artificial Sequence
  ENSG00000163239_19 (sequence is synthesized)
tgctgcctaggcctggacacagtatttacctggcattcttttagatcaaacgaactggttatctgaggggttgggtgaactggctcgggtgggccttccttcccaccaaggctttgtctt

SEQ ID NO: 494664 - DNA, 120 bp, Artificial Sequence
  ENSG00000163239_20 (sequence is synthesized)
agaacaggggctgccgatgctctgtctcccagtctacctggagtgattcaacatagaaatcaataaaacaaatgccaccatggctgagtgagacctttcatttttcttcccaggtgttgg

SEQ ID NO: 494665 - DNA, 120 bp, Artificial Sequence
  ENSG00000163249_0 (sequence is synthesized)
gaggagctccagccgcgctctctcccggcagtggctgtgcttcacagcgcttgttgggttccccaccccttttaaataagccgggctggtcaccgccctcgcagacgagtcagcttaagg

SEQ ID NO: 494666 - DNA, 120 bp, Artificial Sequence
  ENSG00000163249_1 (sequence is synthesized)
aagggaggcggcggcagcgcggcggtggggccccaagctgggccggcgcgcggggtcggcggagctgtactgcgcgtccgacatctacgaggcggtgtccggggacgcggtggcggtagc

SEQ ID NO: 494667 - DNA, 120 bp, Artificial Sequence
  ENSG00000163249_2 (sequence is synthesized)
gctgtggtggagcctgccgagttggatttcggagagggcgagggccaccacctgcagcacatcagcgaccgcgagatgcccgaagatttagctttggagtcaaacccttctgaccatcca

SEQ ID NO: 494668 - DNA, 120 bp, Artificial Sequence
  ENSG00000163249_3 (sequence is synthesized)
agggcaagcacaattttcctgagcaaatctcaaacggatgtgcgagaaaagaggaagagcaaccatttgaaccatgtatctccagggcagcttactaaaaagtatagctcatgctcaaca

SEQ ID NO: 494669 - DNA, 120 bp, Artificial Sequence
  ENSG00000163249_4 (sequence is synthesized)
atatttctagatgacagcacagtcagccagcctaatcttagaaccacagtaaaatgtgtgaccttagcaatatattaccacataaagaacagagatgcaaatagatccctggatattttt

SEQ ID NO: 494670 - DNA, 120 bp, Artificial Sequence
  ENSG00000163249_5 (sequence is synthesized)
gatgagagatcacatccacttacacgagaaaaagttccagaggaatactttaagcatgatcctgagcacaaatttatttacagatttgttcgtactctttttagtgctgcacagctaaca

SEQ ID NO: 494671 - DNA, 120 bp, Artificial Sequence
  ENSG00000163249_6 (sequence is synthesized)
gctgaatgtgcaatagtaactttggtttacttagaaaggcttttaacttatgctgaaatcgacatttgtcccaccaactggaaaaggattgttctgggagccattcttcttgcctccaag

SEQ ID NO: 494672 - DNA, 120 bp, Artificial Sequence
  ENSG00000163249_7 (sequence is synthesized)
gtttgggacgatcaggctgtatggaatgtggactactgccagatcctcaaggacattacagttgaggacatgaatgaaatggaaaggcattttctggagcttcttcagtttaatattaat

SEQ ID NO: 494673 - DNA, 120 bp, Artificial Sequence
  ENSG00000163249_8 (sequence is synthesized)
tgaccttcgctccttagcagatgacaacaacctgaattttctatttgctcctcttagcaaagaaagagcacagaacctagaggctatttctagattgtgtgaagacaaagacttgtgtag

SEQ ID NO: 494674 - DNA, 120 bp, Artificial Sequence
  ENSG00000163249_9 (sequence is synthesized)
agccgctatgagaaggtctttcagtgctgataacttcattggtattcagcgctctaaagccatcctctcttaaaaggagaaatgaggggttataacgtcatgggaccttcatctacaaag

SEQ ID NO: 494675 - DNA, 120 bp, Artificial Sequence
  ENSG00000163249_10 (sequence is synthesized)
actggagaaataccacctttcctgctcaaaaaccagcaaaattagtgttttcatcaaaaggaaagatctcaaattcaagagactcatggacaacaaggattatactccacaggaaagaat

SEQ ID NO: 494676 - DNA, 120 bp, Artificial Sequence
  ENSG00000163249_11 (sequence is synthesized)
gggaccttgtcaatgcaacaaaacactcttctgtcctttttaatgtaaacagagttacaaaaaccactccaaagtgaaggctcccatcctacacacagatatttgcttactgtgtgggcc

SEQ ID NO: 494677 - DNA, 120 bp, Artificial Sequence
  ENSG00000163249_12 (sequence is synthesized)
gatagctgtgaactatgtaaggttttttaaacaatagtttaaatttttagactttaaagacactaaccatataacttttatgtttcttccagtttctctccctccccccgcattttgctg

SEQ ID NO: 494678 - DNA, 120 bp, Artificial Sequence
  ENSG00000163249_13 (sequence is synthesized)
catatgcctttaaaatcaatgcagtattaccattaaaacatgggactctaactaaagccacttaggagcagacagcagcgttgttaggtactgaagggttcttcctccctactgttacca

SEQ ID NO: 494679 - DNA, 120 bp, Artificial Sequence
  ENSG00000163249_14 (sequence is synthesized)
ttgaagctgctagtcattggcaatcattttaaaccaaaaagctgctggataacatttgtcattcatattctttgcaagcattactttagcattttagcatgtttggggtcataaacagag

SEQ ID NO: 494680 - DNA, 120 bp, Artificial Sequence
  ENSG00000163249_15 (sequence is synthesized)
gaagtatcagttattgatatctacttctattggagtccatgttgcatttcttgtgaactataaatggtgcttctcattttctgataatttttctcttgctaaataaatgtattaaaagat

SEQ ID NO: 494681 - DNA, 80 bp, Artificial Sequence
  ENSG00000163249_16 (sequence is synthesized)
gaaccgcgggcgaggcggcgtctgcttgcgcggtgcagccccagcgtagcccggggctgccggtgccggccgcgccattg

SEQ ID NO: 494682 - DNA, 120 bp, Artificial Sequence
  ENSG00000163249_17 (sequence is synthesized)
gccgcgccattgttgggggagggggcggctgttgagggcggcggagtagggggcgagcgaaggcggtggcagagaggagcggaggcttcccatggggaacacgctgacctgttgcgtgtc

SEQ ID NO: 494683 - DNA, 120 bp, Artificial Sequence
  ENSG00000163249_18 (sequence is synthesized)
tcagtgacgatgagaaaaagtgaagcagttttaagcttgaatatagtttgggccctccaaggcactgcagcatgagtataaatgctataaacctttaaaaaacatgatttgaaagttttt

SEQ ID NO: 494684 - DNA, 120 bp, Artificial Sequence
  ENSG00000163249_19 (sequence is synthesized)
tgttttgttttgtttgtttttaaagagatgggggtcttactgcgttgtccaggctggagtgcagtggcttttcacaggtgcaatcattgtgcactcactgcagcctagaacttcctggtc

SEQ ID NO: 494685 - DNA, 120 bp, Artificial Sequence
  ENSG00000163249_20 (sequence is synthesized)
tcaagccatcctctagcctcagccacacaagtagctgggactacaagtgcaactggcacctgtctcctgaatattaagcttttaattttttgtttcggtcactcttgatagcagacattg

SEQ ID NO: 494686 - DNA, 120 bp, Artificial Sequence
  ENSG00000163249_21 (sequence is synthesized)
tttaattttttgtttcggtcactcttgatagcagacattgactgaaacaaaaaattaaaagctttatattcaaaatttgcaaaatgaagctgggtgtggtggtgcacgcctatagtccca

SEQ ID NO: 494687 - DNA, 120 bp, Artificial Sequence
  ENSG00000163249_22 (sequence is synthesized)
agtattggaggctgcagtgtaccatgatggtgcctataggaatagctactacactccaacctggacaacgttatcaagaccccatctcttagaaaaatgcaaaattaaatgcaaaagaaa

SEQ ID NO: 494688 - DNA, 90 bp, Artificial Sequence
  ENSG00000163249_23 (sequence is synthesized)
ctgcaggagttcaagaccagtctaggcaacatagtgagaccctgcctgtaaaaaaaaataataaaaatagttggatatggtggcatgtgt

SEQ ID NO: 494689 - DNA, 120 bp, Artificial Sequence
  ENSG00000163249_24 (sequence is synthesized)
aaaaaaaataataaaaatagttggatatggtggcatgtgtctgtagtcccagccactctggaggctaaggtgggaggatcagtagagcccaggaggtcaaggctgcagtgggccatgatc

SEQ ID NO: 494690 - DNA, 120 bp, Artificial Sequence
  ENSG00000163249_25 (sequence is synthesized)
atgtcactgctctccaacctgggcgacatccagaccctgtctcaaagaaaaaagcagaagaaaaatgttcagacaaggttttgtaaaggtttgtagcatttatatttctacaagtatcaa

SEQ ID NO: 494691 - DNA, 120 bp, Artificial Sequence
  ENSG00000163249_26 (sequence is synthesized)
agcttaaaattacactgaacttttggaataccttgtatctccataaaatgccctctttttaaaagtagttacccgcagagctgtgctctatatgctttgattaccgcagtttctttaaag

SEQ ID NO: 494692 - DNA, 120 bp, Artificial Sequence
  ENSG00000163249_27 (sequence is synthesized)
gaagattttgaagagcagtgttaattaacatgtaataaaaggaattggaccctaattatagaaggtgatatgaacagctgttttatcatcctacatgctaccaagctgtaggtgtcccat

SEQ ID NO: 494693 - DNA, 120 bp, Artificial Sequence
  ENSG00000163249_28 (sequence is synthesized)
taagtcctgctatttaagaaatacttacataacccttaggaactcttcaggctttaaaaggcaaggagcaaataattttaggagaccgataatgtcacctaaatttgaaatactaagaag

SEQ ID NO: 494694 - DNA, 120 bp, Artificial Sequence
  ENSG00000163249_29 (sequence is synthesized)
aggttagtgttctcaactatgtgaaatctgtttctcctactttctcaaatctaatcctaggaatcttgcttataaacaaagcatttctgggacaggagtacttcctctattatagcaatg

SEQ ID NO: 494695 - DNA, 120 bp, Artificial Sequence
  ENSG00000163249_30 (sequence is synthesized)
cttcacatcatattgtgctgcagtttccatcatttttaaaggacagagacataaatgataaataatggtatacaaatattacaatctaccacctcaaaaaaacaaatattgtttatggaa

SEQ ID NO: 494696 - DNA, 120 bp, Artificial Sequence
  ENSG00000163249_31 (sequence is synthesized)
ttcagagtttggagattcaagtattgattgcagttttattttgaaaagaatgctacaatttatgtggtttttatttctcatgtttatattaaaagctaataaactctattttaattaaaa

SEQ ID NO: 494697 - DNA, 120 bp, Artificial Sequence
  ENSG00000163249_32 (sequence is synthesized)
tggaactctgaagaatgaggcccgagtcagcagcacaagtgcatcggaggccgtaaccttcaaccttcatcccagttccagagtgctgggatgcagaagggaccacaagaatgaaatgga

SEQ ID NO: 494698 - DNA, 120 bp, Artificial Sequence
  ENSG00000163249_33 (sequence is synthesized)
tgctcctcttagcaaagaaagagcacagaacctagagcttgtgactttgccctttgcccccttttccaatggggaaaaatgagtgacaagaaagcatggggaagatgtgctaactactgt

SEQ ID NO: 494699 - DNA, 120 bp, Artificial Sequence
  ENSG00000163249_34 (sequence is synthesized)
gtcccggacatgtaaggtacagttgctcttctcttaggattcaactcaactatattttctagtctgcctctcctaactaccttatgcatcaatgtaataaacttcctagtgttcaccttg

SEQ ID NO: 494700 - DNA, 82 bp, Artificial Sequence
  ENSG00000163249_35 (sequence is synthesized)
cacctgcagcacatcagcgaccgcgagatgcccgaagagaaagagtctcactgtgttgaccaggctggcctcgaactcctgg

SEQ ID NO: 494701 - DNA, 120 bp, Artificial Sequence
  ENSG00000163249_36 (sequence is synthesized)
tcttatgtctatacattcatttcagtggataagaataaaagtagaggtaacaaaatggcctaaatatacccatcaaataaacaggttgataaattttaaagagtttgttctggtaactgt

SEQ ID NO: 494702 - DNA, 120 bp, Artificial Sequence
  ENSG00000163249_37 (sequence is synthesized)
gaattgaagctgagaatgcactggacagaggaatattagaagctggcaagagggaaggtaaggtaccaggcattaagcatgggatgatgataaagagtgctaaatcagaaaagttggaaa

SEQ ID NO: 494703 - DNA, 120 bp, Artificial Sequence
  ENSG00000163249_38 (sequence is synthesized)
aagagaatttgtaagcacagaatttaccattgtatgttagtatgacagttacatttttatttcaatttgtctcaaaatttatttttgtggcattcaataaagtgataatagaaatctcca

SEQ ID NO: 494704 - DNA, 120 bp, Artificial Sequence
  ENSG00000163251_0 (sequence is synthesized)
agagggcagccagcctgcggccgtgagtccgctgtggtcgccgccgcgcgcggttccgtgctcgccagaggtgggcgaaagggtgcgagagcgcgggggaggagccgagcagggcacgtc

SEQ ID NO: 494705 - DNA, 120 bp, Artificial Sequence
  ENSG00000163251_1 (sequence is synthesized)
gcagggcacgtcccgagagcgtcgccaccgcccccaggagtccactggagcgcggagccccctgcaggggaggaggcgagcggcgggcgggacgcggcggccggcgctcaccatgcagtc

SEQ ID NO: 494706 - DNA, 80 bp, Artificial Sequence
  ENSG00000163251_2 (sequence is synthesized)
gcgccggctgctcgcggtgctgtgaggcggcggggtcccacggcccccgcctcccgccttcctcccgcccaggtgctgcc

SEQ ID NO: 494707 - DNA, 120 bp, Artificial Sequence
  ENSG00000163251_3 (sequence is synthesized)
aacgcacggcctgcccctgcccggctccgtctggatcatgcggggggctcccgaggaggagagggcgagtgaccggcctgcgccgcccctgttctgggggcgccccccactctgagtcgc

SEQ ID NO: 494708 - DNA, 120 bp, Artificial Sequence
  ENSG00000163251_4 (sequence is synthesized)
ccccacctgctgccatgtgccgctgccacgggtacccagcctgtcgctaaactttccgggcgccagcccggctctgagtcgcgcttctcagcggagtgacccagggacggaggacccagg

SEQ ID NO: 494709 - DNA, 120 bp, Artificial Sequence
  ENSG00000163251_5 (sequence is synthesized)
ctggctggggactgtctgctcttctcggcgggatccgtggagagtcctttccctggaatccgagccctaaccgtctctccccagccctatccggcgaggagcggagcgctgccagcggag

SEQ ID NO: 494710 - DNA, 120 bp, Artificial Sequence
  ENSG00000163251_6 (sequence is synthesized)
gcagcgccttcccgaagcagtttatctttggacggttttctttaaaggaaaaagcaaccaacaggttgccagccccggcgccacacacgagacgccggagggagaagccccggcccggat

SEQ ID NO: 494711 - DNA, 120 bp, Artificial Sequence
  ENSG00000163251_7 (sequence is synthesized)
tcctctgcctgtgtgcgtccctcgcgggctgctggaggcgaggggagggagggggcgatggctcggcctgacccatccgcgccgccctcgctgttgctgctgctcctagcgcagctggtg

SEQ ID NO: 494712 - DNA, 120 bp, Artificial Sequence
  ENSG00000163251_8 (sequence is synthesized)
ggccgggcggccgccgcgtccaaggccccggtgtgccaggaaatcacggtgcccatgtgccgcggcatcggctacaacctgacgcacatgcccaaccagttcaaccacgacacgcaggac

SEQ ID NO: 494713 - DNA, 120 bp, Artificial Sequence
  ENSG00000163251_9 (sequence is synthesized)
gaggcgggcctggaggtgcaccagttctggccgctggtggagatccaatgctcgccggacctgcgcttcttcctatgctctatgtacacgcccatctgtctgcccgactaccacaagccg

SEQ ID NO: 494714 - DNA, 120 bp, Artificial Sequence
  ENSG00000163251_10 (sequence is synthesized)
ctgccgccctgccgctcggtgtgcgagcgcgccaaggccggctgctcgccgctgatgcgccagtacggcttcgcctggcccgagcgcatgagctgcgaccgcctcccggtgctgggccgc

SEQ ID NO: 494715 - DNA, 120 bp, Artificial Sequence
  ENSG00000163251_11 (sequence is synthesized)
gacgccgaggtcctctgcatggattacaaccgcagcgaggccaccacggcgccccccaggcctttcccagccaagcccacccttccaggcccgccaggggcgccggcctcggggggcgaa

SEQ ID NO: 494716 - DNA, 120 bp, Artificial Sequence
  ENSG00000163251_12 (sequence is synthesized)
tgccccgctgggggcccgttcgtgtgcaagtgtcgcgagcccttcgtgcccattctgaaggagtcacacccgctctacaacaaggtgcggacgggccaggtgcccaactgcgcggtaccc

SEQ ID NO: 494717 - DNA, 120 bp, Artificial Sequence
  ENSG00000163251_13 (sequence is synthesized)
tgctaccagccgtccttcagtgccgacgagcgcacgttcgccaccttctggataggcctgtggtcggtgctgtgcttcatctccacgtccaccacagtggccaccttcctcatcgacatg

SEQ ID NO: 494718 - DNA, 120 bp, Artificial Sequence
  ENSG00000163251_14 (sequence is synthesized)
gaacgcttccgctatcctgagcgccccatcatcttcctgtcagcctgctacctgtgcgtgtcgctgggcttcctggtgcgtctggtcgtgggccatgccagcgtggcctgcagccgcgag

SEQ ID NO: 494719 - DNA, 120 bp, Artificial Sequence
  ENSG00000163251_15 (sequence is synthesized)
cacaaccacatccactacgagaccacgggccctgcactgtgcaccatcgtcttcctcctggtctacttcttcggcatggccagctccatctggtgggtcatcctgtcgctcacctggttc

SEQ ID NO: 494720 - DNA, 120 bp, Artificial Sequence
  ENSG00000163251_16 (sequence is synthesized)
ctggccgccggcatgaagtggggcaacgaggccatcgcgggctacgcgcagtacttccacctggctgcgtggctcatccccagcgtcaagtccatcacggcactggcgctgagctccgtg

SEQ ID NO: 494721 - DNA, 120 bp, Artificial Sequence
  ENSG00000163251_17 (sequence is synthesized)
gacggggacccagtggccggcatctgctacgtgggcaaccagaacctgaactcgctgcgcggcttcgtgctgggcccgctggtgctctacctgctggtgggcacgctcttcctgctggcg

SEQ ID NO: 494722 - DNA, 120 bp, Artificial Sequence
  ENSG00000163251_18 (sequence is synthesized)
ggcttcgtgtcgctcttccgcatccgcagcgtcatcaagcagggcggcaccaagacggacaagctggagaagctcatgatccgcatcggcatcttcacgctgctctacacggtccccgcc

SEQ ID NO: 494723 - DNA, 120 bp, Artificial Sequence
  ENSG00000163251_19 (sequence is synthesized)
agcattgtggtggcctgctacctgtacgagcagcactaccgcgagagctgggaggcggcgctcacctgcgcctgcccgggccacgacaccggccagccgcgcgccaagcccgagtactgg

SEQ ID NO: 494724 - DNA, 120 bp, Artificial Sequence
  ENSG00000163251_20 (sequence is synthesized)
gtgctcatgctcaagtacttcatgtgcctggtggtgggcatcacgtcgggcgtctggatctggtcgggcaagacggtggagtcgtggcggcgtttcaccagccgctgctgctgccgcccg

SEQ ID NO: 494725 - DNA, 120 bp, Artificial Sequence
  ENSG00000163251_21 (sequence is synthesized)
gcggccacaagagcgggggcgccatggccgcaggggactaccccgaggcgagcgccgcgctcacaggcaggaccgggccgccgggccccgccgccacctaccacaagcaggtgtccctgt

SEQ ID NO: 494726 - DNA, 120 bp, Artificial Sequence
  ENSG00000163251_22 (sequence is synthesized)
ctgtcgcacgtgtaggaggctgccgccgagggactcggccggagagctgaggggaggggggcgttttgtttggtagttttgccaaggtcacttccgtttaccttcatggtgctgttgccc

SEQ ID NO: 494727 - DNA, 120 bp, Artificial Sequence
  ENSG00000163251_23 (sequence is synthesized)
cctcccgcggcgacttggagagagggaagaggggcgttttcgaggaagaacctgtcccaggtcttctccaaggggcccagctcacgtgtattctattttgcgtttcttactgccttcttt

SEQ ID NO: 494728 - DNA, 120 bp, Artificial Sequence
  ENSG00000163251_24 (sequence is synthesized)
atgggaaccctctttttaatttatatgtatttttcttaatttgtaactttgttgcattttggcaacaatttacctttgctttgggggctttacaatcctaaggttggcgttgtaatgaag

SEQ ID NO: 494729 - DNA, 120 bp, Artificial Sequence
  ENSG00000163251_25 (sequence is synthesized)
ttccacttggttcaggtttctttgaactgtgtggtctcaattgggaaaatatatttcctatacgtgtgtctttaaaaaaaaatgtgaacagtgaacgtttcggttgctgtgactgggaag

SEQ ID NO: 494730 - DNA, 120 bp, Artificial Sequence
  ENSG00000163251_26 (sequence is synthesized)
ttgttgggtgtgctttttcagccagcttctccttccactgcttaaagtgtccatgattctttaaggtgagctgcagtttatagccccaggtcatacctaggaggggagcataatgagctc

SEQ ID NO: 494731 - DNA, 120 bp, Artificial Sequence
  ENSG00000163251_27 (sequence is synthesized)
agggcctccccaaagtgacaaggttagggagtgcttagcggttttgtgttcagccttagctttgtttatagagggaggttcagtttcttttctgtagtgcttgtaataattctcactcct

SEQ ID NO: 494732 - DNA, 120 bp, Artificial Sequence
  ENSG00000163251_28 (sequence is synthesized)
aacagcaccatcgttgtgtcttgaataagttagaggtagcattatagaggatctggcataaatatttgcagtagtgagagcctaagcgatggtgattggtggagcttgaattttaggctg

SEQ ID NO: 494733 - DNA, 120 bp, Artificial Sequence
  ENSG00000163251_29 (sequence is synthesized)
ttttttaaggaacttgtgttataattttggtaaaagtataaacccactccctctggacaatacttagcgacagttgctaaagggggctcctttttaaatgtaaggactgaaatggatata

SEQ ID NO: 494734 - DNA, 120 bp, Artificial Sequence
  ENSG00000163251_30 (sequence is synthesized)
accccctcccccctcccccctccccctttatcatgttaaacagcctttttgcttttcttattcctcctctcctggagagctgtgattagaaaccacacccacccttgaatgaagtgcttg

SEQ ID NO: 494735 - DNA, 120 bp, Artificial Sequence
  ENSG00000163251_31 (sequence is synthesized)
attagaaaccacacccacccttgaatgaagtgcttgaactgggggagggaggctggctacctgtgaacaaacattggcccaaataagggaaaataagtgttcctggactttggactagtt

SEQ ID NO: 494736 - DNA, 120 bp, Artificial Sequence
  ENSG00000163251_32 (sequence is synthesized)
tatagccagatattccaagagcagcaagacgttgctctctgccgtctctgaaaacaaaagagatgcataacatgcttgcacaaccttttaaaatatagatcagtatagtgctacctctat

SEQ ID NO: 494737 - DNA, 120 bp, Artificial Sequence
  ENSG00000163251_33 (sequence is synthesized)
agttttcttcctcttctgagaaagcctgtatattgatgatcacacacacacacactttgcaattagagaatttggtttgctttactaatctgtttaactattccttcattcattatgaac

SEQ ID NO: 494738 - DNA, 120 bp, Artificial Sequence
  ENSG00000163251_34 (sequence is synthesized)
gcttatattgatgaacatacacacagaggtttctttgctattagaaaattctgtttgctttcctaatctgtttaagcattcattcatgaagagtgtggggccattactggggaagggggg

SEQ ID NO: 494739 - DNA, 120 bp, Artificial Sequence
  ENSG00000163251_35 (sequence is synthesized)
tgacagtgcctcagccagcaaaataccaatgaccaggattggggactaaatttaggaagctaaaatggccagagcaattaacatttgagaaaatcctgtctaggaaaacaacttgagtgt

SEQ ID NO: 494740 - DNA, 120 bp, Artificial Sequence
  ENSG00000163251_36 (sequence is synthesized)
aggcatttgtaattcacttataccaaagttggaaaagtaaaatttaagcctaggacaatttttacttcatggatgttaaatagacaaatgcatagttcccagggggaatttaaacacttt

SEQ ID NO: 494741 - DNA, 120 bp, Artificial Sequence
  ENSG00000163251_37 (sequence is synthesized)
actggtgggaagaaacctagtattaaagttgtaaggactctcaaaaacttcacatttattaaaatgcactgctcttacccaatttatcctctgaattaaaatttcagtggattctacaaa

SEQ ID NO: 494742 - DNA, 120 bp, Artificial Sequence
  ENSG00000163251_38 (sequence is synthesized)
acctcgtacaaatagctacagaactttgtgcctattttattcctctatttattcttctaggaagaagcctcttcctagaatcttgaaatagatcccttgactgaatgccaattcctctcc

SEQ ID NO: 494743 - DNA, 120 bp, Artificial Sequence
  ENSG00000163251_39 (sequence is synthesized)
tgtttttcaaatgagagaaccttttctgatcaccttgaccttttccctcatttcatatgtcttcccagaaagtagacagactgctctgctgccttcagtcattgtgcctcatttgggttg

SEQ ID NO: 494744 - DNA, 120 bp, Artificial Sequence
  ENSG00000163251_40 (sequence is synthesized)
tccctccttctttgtggagaaatctggaaatgatgcacagtgtatccaaaagttgtgggatgaagtggatgaaagtgatttaattcatttttagaatttttttttgttttgttttagcaa

SEQ ID NO: 494745 - DNA, 120 bp, Artificial Sequence
  ENSG00000163251_41 (sequence is synthesized)
catgctgaacaactaatttactttaaaaataagccagttaaaacaaaggacgctaagcccaagtggggggcaatattagtcaggatctttggggtctaattccagaccaactttcagaag

SEQ ID NO: 494746 - DNA, 120 bp, Artificial Sequence
  ENSG00000163251_42 (sequence is synthesized)
cacttctttgtctctgttctcacctctgctgtccctctcttccctcatcccctaagagagacaaagataaaagcccacctgcatccctaagtcttactgagatcagccaccccaggggag

SEQ ID NO: 494747 - DNA, 120 bp, Artificial Sequence
  ENSG00000163251_43 (sequence is synthesized)
agaaactggatctacttacagccaccccctgtttccatccatatagttacttcccccaatttgcatgtgattatggaaacaagtcatgctcatgaaagcaactgtaaaataaaaggttat

SEQ ID NO: 494748 - DNA, 120 bp, Artificial Sequence
  ENSG00000163251_44 (sequence is synthesized)
ggagtagttcagcaacttcttcacagccagctttgtggagctggggaggacttagggcccattggagtctcttatgtgtacagcttcagggctgtccctttcagtttgattttaagcaat

SEQ ID NO: 494749 - DNA, 120 bp, Artificial Sequence
  ENSG00000163251_45 (sequence is synthesized)
gcctcacttcatagcttagggggtaaggattccattcaggtaggttgtctaaaggaactaatgggacctctcagtgaattagctgaccagattttaggaaatctttttaatttctatgat

SEQ ID NO: 494750 - DNA, 120 bp, Artificial Sequence
  ENSG00000163251_46 (sequence is synthesized)
tttccttctcacattttgaaatggtaaaattgactggaaataatttttcttggtgccttattggttttccttgcaaacctttctcatattttctcatgaccattgccagtgaccaaggcc

SEQ ID NO: 494751 - DNA, 120 bp, Artificial Sequence
  ENSG00000163251_47 (sequence is synthesized)
catgtgtgtgttgtgtgtaattgtgggcatgtacaagcttaaataacgtgccgacagcactgtttcaaagttggtattcattaggctgttgcctcctgggctggagctgcgctaatcctg

SEQ ID NO: 494752 - DNA, 120 bp, Artificial Sequence
  ENSG00000163251_48 (sequence is synthesized)
acaccggctgccaggagaaaacctcatggatcacacaccaaaccttaataacagcatccgtgacctgcactctccagtacagaatgggaaccccagagctaggaaatgtagttgtatatt

SEQ ID NO: 494753 - DNA, 120 bp, Artificial Sequence
  ENSG00000163251_49 (sequence is synthesized)
ttaatgaactgctaccccagccaaagaagcttctttcacttttgtgctctacagaaagcccaaggggggtaggagggacagagctttgaataactgctttctaacactaaatgtggccaa

SEQ ID NO: 494754 - DNA, 120 bp, Artificial Sequence
  ENSG00000163251_50 (sequence is synthesized)
caggacagagcacatcacacgtataggcaggtgtgagggacagtggctaagaattgcctgctccctctgcatgctctttcttgtttccaaagtccaatcaagtgatcctgggaaacaaat

SEQ ID NO: 494755 - DNA, 120 bp, Artificial Sequence
  ENSG00000163251_51 (sequence is synthesized)
ctgtctggattgcggagggtggttctgaaagaactgccaagacgttaaagaagggtgaagagtaggcagaatataagtagctaacctgagtcaagactctcaaaagctagcagcctgatg

SEQ ID NO: 494756 - DNA, 120 bp, Artificial Sequence
  ENSG00000163251_52 (sequence is synthesized)
acaataggatttatttcagccaggatagtgtctgtctgtgagtgcatcattttaagacagtatgacttcatgttgttacaaactatgtatagtatgtatgttttgtgggttgtatatata

SEQ ID NO: 494757 - DNA, 120 bp, Artificial Sequence
  ENSG00000163251_53 (sequence is synthesized)
cataatatatattatatatatatatgagagatttggtgacttttgatacgggtttggtgcaggtgaatttattactgagccaaatgaggcacataccgagtcagtagttgaagtccaggg

SEQ ID NO: 494758 - DNA, 120 bp, Artificial Sequence
  ENSG00000163251_54 (sequence is synthesized)
cattcgatactgtttatgatttccatatatgtatagtgcctatcccatgctgtagtcactgttatgttaaatccagaagttacactagagccagcgatactttatttgtagacaatcaat

SEQ ID NO: 494759 - DNA, 120 bp, Artificial Sequence
  ENSG00000163251_55 (sequence is synthesized)
ttgaatccatatgttattactggcagatgatacatgattacagttctgaatctgtaacacttacaaaaggaaacccagagcagcttgatgagtttttgtttctgcttcgttcctgggagt

SEQ ID NO: 494760 - DNA, 120 bp, Artificial Sequence
  ENSG00000163251_56 (sequence is synthesized)
cagtagaaacagcagttgtatgtggttatgttagtctcaagatacttaatttgttgaccttacttcagaaaaattttgtatgtattatatttgtgggaaggtaaaataatcatttgagat

SEQ ID NO: 494761 - DNA, 120 bp, Artificial Sequence
  ENSG00000163251_57 (sequence is synthesized)
tttgagatttttatcaaatatgaagattagttatttatgaaaaacaaagaaatgtctatttttctttgttcccaattaatgtagataaattttaaaatgcattaaagtaatggtaaagac

SEQ ID NO: 494762 - DNA, 120 bp, Artificial Sequence
  ENSG00000163254_0 (sequence is synthesized)
atcacactgaactcgcatcatccgtgtcaaccagccatggggaagatcaccttctatgaggacagggccttccagggccgcagctacgaaaccaccactgactgccccaacctgcagccg

SEQ ID NO: 494763 - DNA, 120 bp, Artificial Sequence
  ENSG00000163254_1 (sequence is synthesized)
tatttcagccgctgcaactccatccgggtggagagcggctgctggatgctctatgagcgtcccaactaccaaggtcaacaatacttgctgcggcgaggggagtaccccgactaccagcaa

SEQ ID NO: 494764 - DNA, 120 bp, Artificial Sequence
  ENSG00000163254_2 (sequence is synthesized)
tcctgttgtctcatcccccaaacagtctcccacaggctgcggctgtacgagagggaagaccacaaaggcctcatgatggagctgagtgaagactgccccagcatccaggaccgcttccac

SEQ ID NO: 494765 - DNA, 120 bp, Artificial Sequence
  ENSG00000163254_3 (sequence is synthesized)
ctcagcgagatccgttccctccacgtgctggagggctgctgggtcctctacgagctgcccaactaccgggggcggcaatacctgctgaggccccaagagtacaggcggtgccaggactgg

SEQ ID NO: 494766 - DNA, 120 bp, Artificial Sequence
  ENSG00000163254_4 (sequence is synthesized)
ggggccatggatgctaaggcaggctctttgcggagagtggtggatttgtattaaaatagcttaacactaccaatttcccattttggaacctaataaatatttagtctgcattgctggcaa

SEQ ID NO: 494767 - DNA, 120 bp, Artificial Sequence
  ENSG00000163257_0 (sequence is synthesized)
ggaagtagcgtcggcgcgggagctgagcggagtggccttgccaccggaggggaagggctgctggcgttaggcctggctgggtcgtgcggctgagcgtgaggctagaaagaaaaagcgatc

SEQ ID NO: 494768 - DNA, 120 bp, Artificial Sequence
  ENSG00000163257_1 (sequence is synthesized)
ctccaagagtgagaacgggagatctgccgaggataacaacctcccttgtggccgaagggcgggggatccccacacgagggctccgcttcgagagacggcgacaaaggaaagttcgtagcg

SEQ ID NO: 494769 - DNA, 120 bp, Artificial Sequence
  ENSG00000163257_2 (sequence is synthesized)
cgttccggaggcccggccacctctgagaagggagacgacgctgctgggtccgctgagcggggcgacccgagcttatatagaattggtgataggatcacaacttctgaggtcccagcaaga

SEQ ID NO: 494770 - DNA, 120 bp, Artificial Sequence
  ENSG00000163257_3 (sequence is synthesized)
gtcctaacatctagcagctctaccaccaggacaggccccctaaaactaattccaacaagcacctctgaagtcttctcattcacaggttaaggctacctttccagataatccaacagctaa

SEQ ID NO: 494771 - DNA, 120 bp, Artificial Sequence
  ENSG00000163257_4 (sequence is synthesized)
atcaccagtttccaagggcatttgcatcacctatggaaagcatcggatccttatacaccagatgttcttgacagctcatcccgtcattcccccctgcacaaaagttgctataccagcgga

SEQ ID NO: 494772 - DNA, 120 bp, Artificial Sequence
  ENSG00000163257_5 (sequence is synthesized)
caagcaagacaactactgagcttcttttgattgtcaagtagatataatatcactgccagcaaaacagcacaaaaagtgtctcttcacagtatcactaccagttgggactatgctaagtaa

SEQ ID NO: 494773 - DNA, 120 bp, Artificial Sequence
  ENSG00000163257_6 (sequence is synthesized)
atcagcttgcctagatgaggaccccttctattcttgggtagccaggatttgaaggagatactctgacctgtgccagtggtaagtgactaatacttttacacactgaactggtcctggaaa

SEQ ID NO: 494774 - DNA, 120 bp, Artificial Sequence
  ENSG00000163257_7 (sequence is synthesized)
ctgagatgtcttctttgtaagtgaagaatatacaacataatcttgaagaacggcacagtggtatgggccacaagcatactttatgtgtgtaacggactgaaagacaaattaatcttggtg

SEQ ID NO: 494775 - DNA, 120 bp, Artificial Sequence
  ENSG00000163257_8 (sequence is synthesized)
aaaggatttttcatctcttatttctatttgccagtgttagtcagtgttctgctggcttagattattacctttttctggttccttactgtgttttattctgatgggtcctagaaatccctc

SEQ ID NO: 494776 - DNA, 120 bp, Artificial Sequence
  ENSG00000163257_9 (sequence is synthesized)
tcctgaccacttgtcagaatcagaaagtgaggaagaagaaaatattagttacctaaatgagagttctggggaagagtgggattcctctgaagaagaggactctatggtgcccaacttatc

SEQ ID NO: 494777 - DNA, 120 bp, Artificial Sequence
  ENSG00000163257_10 (sequence is synthesized)
gcctcttgagagtcttgcctggcaggttaagtgccttttaaaatattccacaacttggaaacctttaaatcctaattcctggttgtatcatgctaaactgttggatccaagcacaccagt

SEQ ID NO: 494778 - DNA, 120 bp, Artificial Sequence
  ENSG00000163257_11 (sequence is synthesized)
ccatatacttcgagagataggtctaagactctcccattgttcccattgtgtccccaaactggaaccaattcctgaatggccccctctggcctcttgtggagtcccaccttttcaaaagcc

SEQ ID NO: 494779 - DNA, 120 bp, Artificial Sequence
  ENSG00000163257_12 (sequence is synthesized)
tcttacaagtcccagccggctctctagagatcatgccactctaaatggagcactgcaatttgccaccaaacagctaagccgaacattgagtagagccactcccatacctgaatacctaaa

SEQ ID NO: 494780 - DNA, 120 bp, Artificial Sequence
  ENSG00000163257_13 (sequence is synthesized)
acagatccctaattcatgtgtttctgggtgttgctgtggctggctgactaaaacagttaaggaaacaactcgtactgaacccatcaacactacttattcttacactgacttccaaaaggc

SEQ ID NO: 494781 - DNA, 120 bp, Artificial Sequence
  ENSG00000163257_14 (sequence is synthesized)
agttaacaaactcctaactgcatcactgtaaagatctaccatttgctctgatatctctgatgttgctaattgagaaagtggtacaaagttagtcattacacagcccactaatgccttctc

SEQ ID NO: 494782 - DNA, 120 bp, Artificial Sequence
  ENSG00000163257_15 (sequence is synthesized)
ccactaatgccttctcagtcaaactctcttatgccctggcaagccaatgaggataccctttgacaaaccctgtggataaaatgataatatcaaggtcaggcatggtggctcacacctgta

SEQ ID NO: 494783 - DNA, 68 bp, Artificial Sequence
  ENSG00000163257_16 (sequence is synthesized)
actttgggaggctgaggcgggtggatctgctgaagtcagaagtttgagaccagccttcagcagtgcac

SEQ ID NO: 494784 - DNA, 120 bp, Artificial Sequence
  ENSG00000163257_17 (sequence is synthesized)
aatggctttaatgagatacctgattattaatgaagaaaagtagaccaccaccccttttgttatccagactttagaacagccattgttgaaagcaagaagttagctacccacaataatacc

SEQ ID NO: 494785 - DNA, 120 bp, Artificial Sequence
  ENSG00000163257_18 (sequence is synthesized)
tttctgagcatactcttctctaacatacatttctgtggaagtagttgaattaaattgagtaactacacaaaggaaaatggcagggctatgaatttctttcccagcttttatatagatgtg

SEQ ID NO: 494786 - DNA, 120 bp, Artificial Sequence
  ENSG00000163257_19 (sequence is synthesized)
tttattttttctttttttttttttttgaggtagttgaattaaactgggtaactacacaaaggaaaatggcagggatatgaatttctttcccagcttttatatagatgtgcctgcatatga

SEQ ID NO: 494787 - DNA, 120 bp, Artificial Sequence
  ENSG00000163257_20 (sequence is synthesized)
gcttttatatagatgtgcctgcatatgacactctttagagttcctttcactttttcttttttttggaagggggcggggaggcaggaggagtgcagttttaagcctagcctatactactac

SEQ ID NO: 494788 - DNA, 120 bp, Artificial Sequence
  ENSG00000163257_21 (sequence is synthesized)
aaacttattatggtacttaaaattacagcatgaacgttctatatcggagtctcccaccaggctgtctctgactaaatcagcctataagatcatcccttgggattaaacaaacacctgttc

SEQ ID NO: 494789 - DNA, 120 bp, Artificial Sequence
  ENSG00000163257_22 (sequence is synthesized)
tgtagggaatgtgtttcctgaatcttggtactcagacttttgtcaagagtaaataacatttcaaaagatgaatggaaaaatgattaagagagcatttctgctttcagcattaactgctaa

SEQ ID NO: 494790 - DNA, 120 bp, Artificial Sequence
  ENSG00000163257_23 (sequence is synthesized)
actgctaatggattaaaattttaatctgtatagcatttcctggagtaaaagctcaagtactttccacatccattgcaaacttttcaggaacccttctaattttttttttttttttttttt

SEQ ID NO: 494791 - DNA, 70 bp, Artificial Sequence
  ENSG00000163257_24 (sequence is synthesized)
ctgcctcccgaatagctgggactacaggcgtccaccaccactcctggctatttttttgtatttttagtag

SEQ ID NO: 494792 - DNA, 120 bp, Artificial Sequence
  ENSG00000163257_25 (sequence is synthesized)
tgggattgaacccttctaattttaaagaaccttgttattagaaaatctcagcctaatacaatctgaagttaagagttttagcagcattgtttttctaagtagatttagctatagattttc

SEQ ID NO: 494793 - DNA, 120 bp, Artificial Sequence
  ENSG00000163257_26 (sequence is synthesized)
ttctggccaaacaaggaagagtatatgcccttgtaaatgagtcttgttttgtttatttaaatagtcagtcaaaacgtagaaatcagtatacgtaaaataaaatgcatgagactattaaat

SEQ ID NO: 494794 - DNA, 120 bp, Artificial Sequence
  ENSG00000163257_27 (sequence is synthesized)
cttttcatatactctacaaataaaatgaaatctgtgtgtggtcctggttgactgggcatctaaagggaatcagaaaagagattgtgaaaagttatatatatatcctcttccttattttag

SEQ ID NO: 494795 - DNA, 120 bp, Artificial Sequence
  ENSG00000163257_28 (sequence is synthesized)
tatatatatatcctcttccttattttagttttgctttttcctattttccataattaagtgccgtttacaaagtggcatcaaaaaattgaagcaggccaggcatggtggctcatgcctgta

SEQ ID NO: 494796 - DNA, 120 bp, Artificial Sequence
  ENSG00000163257_29 (sequence is synthesized)
ttaggaatcacaaattgtgtaaatatatagcaactttaagaagagagaagaatgcttataacctagtgaatatttctgctgagccttagttgtcttgtctaaaggaaaaaagagggaatt

SEQ ID NO: 494797 - DNA, 120 bp, Artificial Sequence
  ENSG00000163257_30 (sequence is synthesized)
gtagaataaaagtatttgttagtggaaattattgacctgaaaccatatcatattgttagtgtaactgaatgtatcagaaattgttcctatgtaggtattctgtgaaactggtttctaaaa

SEQ ID NO: 494798 - DNA, 120 bp, Artificial Sequence
  ENSG00000163257_31 (sequence is synthesized)
tgttacaggaaactgtttcctttttttttgtttgtttgtttaagtggaggtgggaggaggtagggaagaggtctgaatattaaaatatgtttatgttcatgtgttcataatacgttcctt

SEQ ID NO: 494799 - DNA, 120 bp, Artificial Sequence
  ENSG00000163257_32 (sequence is synthesized)
tttctctctgtgtgtgtataaaagtgccttgctcatgaatgcatttttgctattcacttcgaaaggaagcctttccccagcttggcagctgaataaaccaatagctttgtacatgctgaa

SEQ ID NO: 494800 - DNA, 120 bp, Artificial Sequence
  ENSG00000163257_33 (sequence is synthesized)
aggaggatggagggaagccgtttttccctctcctacacctcagtaacctactgccagctgaagaaatagaacattactaaagccacctgtacatctttctccttttgaattacctgccct

SEQ ID NO: 494801 - DNA, 120 bp, Artificial Sequence
  ENSG00000163257_34 (sequence is synthesized)
ccgaagaagtaatggattttctgaatttactgttaacttttaccatgcagctttctatatcttaatgacatattttaatatattaatgacatgaataaatccctgaatgaggatattgta

SEQ ID NO: 494802 - DNA, 120 bp, Artificial Sequence
  ENSG00000163263_0 (sequence is synthesized)
agactgtatcaagcaaatctatagacatgtctgtggaaaagatgacaaaagtagaagagagttttcaaaaggccatgggacttaagaagacggtcgacaggtggcgaaattcacatactc

SEQ ID NO: 494803 - DNA, 120 bp, Artificial Sequence
  ENSG00000163263_1 (sequence is synthesized)
actgtctgtggcaaatggcattgggccagagaagaaacccgtatgccaccctaaggatgcaggacaccatggtacaggaattggcactggccaaaaagcaactactaatggtccgtcaag

SEQ ID NO: 494804 - DNA, 120 bp, Artificial Sequence
  ENSG00000163263_2 (sequence is synthesized)
tatgtagagagattctgatggcatccaaaacactgctcttccattctcaacatgcctgctaacctagccttctagaacctctaccaccttgaacctccttcccaaaacatacctggatct

SEQ ID NO: 494805 - DNA, 120 bp, Artificial Sequence
  ENSG00000163263_3 (sequence is synthesized)
tgctatctgtcagggacttaagacagcacttccactctcacttctccactctctcgttaatcctttgccgctatttgggaaacaatctatgaaacaacagtaacaacaagagtgacgcct

SEQ ID NO: 494806 - DNA, 120 bp, Artificial Sequence
  ENSG00000163263_4 (sequence is synthesized)
tgtggtcatagtgggatttactatgttgatgtaagggggcaggggtggggaggggtggacaatgagagttgagaatcctgatttggtataacaaataaatttacttcctaaaggctcaaa

SEQ ID NO: 494807 - DNA, 120 bp, Artificial Sequence
  ENSG00000163273_0 (sequence is synthesized)
cgcatccccctgctggtctgcccgccgacctgcgcgccctcgctgccgcccgtgtgcgcccctcgaccccagcggcaccatgcatctctcccagctgctggcctgcgccctgctgctcac

SEQ ID NO: 494808 - DNA, 120 bp, Artificial Sequence
  ENSG00000163273_1 (sequence is synthesized)
gctgctctccctccggccctccgaagccaagcccggggcgccgccgaaggtcccgcgaaccccgccggcagaggagctggccgagccgcaggctgcgggcggcggtcagaagaagggcga

SEQ ID NO: 494809 - DNA, 120 bp, Artificial Sequence
  ENSG00000163273_2 (sequence is synthesized)
gcgccaatctcaagggcgaccggtcgcgactgctccgggacctgcgcgtggacaccaagtcgcgggcagcgtgggctcgccttctgcaagagcaccccaacgcgcgcaaatacaaaggag

SEQ ID NO: 494810 - DNA, 120 bp, Artificial Sequence
  ENSG00000163273_3 (sequence is synthesized)
ccaacaagaagggcttgtccaagggctgcttcggcctcaagctggaccgaatcggctccatgagcggcctgggatgttagtgcggcgccccctggcggcggtgagtacggcccacccgac

SEQ ID NO: 494811 - DNA, 120 bp, Artificial Sequence
  ENSG00000163273_4 (sequence is synthesized)
ggtcatctttggtcatcagcctccagcatctggaaacacctccaacgcaatgtggcttttacatttctttctttctttctttttttttcctggtactgggaatacacaacaccagctgtt

SEQ ID NO: 494812 - DNA, 120 bp, Artificial Sequence
  ENSG00000163273_5 (sequence is synthesized)
ttattattatttggggagggggttgtgattttattatttgtttttttaaaatgaaaaataaaaagttatatattatatatatattatatacatgaaacacacacacctacaccgacttga

SEQ ID NO: 494813 - DNA, 120 bp, Artificial Sequence
  ENSG00000163273_6 (sequence is synthesized)
tgacaagggacagtttttaagagactgacagaaccagctgtaaaacattgctgtttgtaaattcatgtcatgcataaatgtatttatgttgtaaagctatttatattgtttataaagaga

SEQ ID NO: 494814 - DNA, 80 bp, Artificial Sequence
  ENSG00000163273_7 (sequence is synthesized)
aaatgaaagaagtcaatcattgtaatgtttttgtcctaactagttaaaaaaaatgtaaaaaaaaaaaagtcattccatga

SEQ ID NO: 494815 - DNA, 120 bp, Artificial Sequence
  ENSG00000163281_0 (sequence is synthesized)
actggtcagctggggtcgctctcgggtggttgggtgttgcttgttcccgctgttccagcatcgaagaaccattgggtctgccggtttgaacttgttctggaagctgtgcgtcaccgtaat

SEQ ID NO: 494816 - DNA, 120 bp, Artificial Sequence
  ENSG00000163281_1 (sequence is synthesized)
gaggcttgtaattcttgataactatgacttggctagtgaatgggcagccaaatacatctgtaatcgcatcattcagttcaaacctggacaggacagatattttacactgggtttaccaac

SEQ ID NO: 494817 - DNA, 120 bp, Artificial Sequence
  ENSG00000163281_2 (sequence is synthesized)
agggagtacacctttaggatgctataaaaaactaatagaatatcataagaatggacacctttcttttaaatatgtgaagacctttaatatggatgaatatgtaggacttccaagaaatca

SEQ ID NO: 494818 - DNA, 120 bp, Artificial Sequence
  ENSG00000163281_3 (sequence is synthesized)
tcctgaaagctaccattcttatatgtggaataatttttttaagcatatcgatatagatcctaataatgcacatatccttgacgggaatgctgcagatttacaagcagaatgtgatgcttt

SEQ ID NO: 494819 - DNA, 120 bp, Artificial Sequence
  ENSG00000163281_4 (sequence is synthesized)
tgaaaacaaaataaaagaagctggaggaatagatctttttgttggaggaattggtccagatggtcatatcgctttcaatgagcctggatccagtttagtgtcaaggacaagattaaagac

SEQ ID NO: 494820 - DNA, 120 bp, Artificial Sequence
  ENSG00000163281_5 (sequence is synthesized)
tctagcaatggataccatcttggcaaatgccaaatattttgatggagatttatcaaaagtgccaactatggctctaactgttggtgtggggacagtgatggatgctagagaagtaatgat

SEQ ID NO: 494821 - DNA, 120 bp, Artificial Sequence
  ENSG00000163281_6 (sequence is synthesized)
ccttataacaggggcacacaaggcatttgccctgtacaaagcaatagaagaaggagtcaatcacatgtggactgtttccgctttccagcagcatccccggactatttttgtatgcgatga

SEQ ID NO: 494822 - DNA, 120 bp, Artificial Sequence
  ENSG00000163281_7 (sequence is synthesized)
agatgctactttagaattaagagttaaaactgtgaaatactttaaaggtctaatgcatgtgcacaataaacttgtggatccactattcagtatgaaagatggaaactgaaggagactgga

SEQ ID NO: 494823 - DNA, 120 bp, Artificial Sequence
  ENSG00000163281_8 (sequence is synthesized)
gcaaaattcagcttgaatgaacagagcactttttactaagtagtagatgaattttcagctatgcaatatgacaaaacatggggaattttgaagattgtcattttttcattcgagtctcta

SEQ ID NO: 494824 - DNA, 120 bp, Artificial Sequence
  ENSG00000163281_9 (sequence is synthesized)
ctggctatttattataaagtactgaagtcacatagccacctataaaacagcatagaaatgtctgcctgtttaaaaagtcattttaaaggtagagtgtccacatcaggcaccatttgtgat

SEQ ID NO: 494825 - DNA, 120 bp, Artificial Sequence
  ENSG00000163281_10 (sequence is synthesized)
atgactccagtggcgtatatttcattttttaatgacaagacactccaaacctttcagataacaaactatcattgcagaccttcacttttggaatgcaatctttatattttctgtgcatca

SEQ ID NO: 494826 - DNA, 120 bp, Artificial Sequence
  ENSG00000163281_11 (sequence is synthesized)
cacacatgcttttctgcacgtggttgccttagtcatcttcctacagcaccatctagacatcaaaaattgtgctatatatcattggtaaaggaaatttgaagagatgacagtgcctaaaag

SEQ ID NO: 494827 - DNA, 120 bp, Artificial Sequence
  ENSG00000163281_12 (sequence is synthesized)
tacagtttacatccttttggaaagtatgtgtaagtgcatgttttttgtgcaccttcttctatagcacttttttacaaatatcttatttttatttaacgacttgggttcatgtccctaata

SEQ ID NO: 494828 - DNA, 120 bp, Artificial Sequence
  ENSG00000163281_13 (sequence is synthesized)
taagtatcttgacaattatgagctttatacctagcaagccacttcaggaaattcttttggagaatattttctgattattgttaaacttaatatacaattagctttattccttataaaatg

SEQ ID NO: 494829 - DNA, 120 bp, Artificial Sequence
  ENSG00000163281_14 (sequence is synthesized)
aatgtctaaaagaataatacgaagtatatataaaaggaattactgtaaactacattgccatagcaatttacataaaagtatattgttttttatctttaactcaaataaagcgtgtaataa

SEQ ID NO: 494830 - DNA, 120 bp, Artificial Sequence
  ENSG00000163281_15 (sequence is synthesized)
gttatctaaatttccagaagtgaacctgaagaatacatgcattcgactcccaacaattatagtacatgtgaacctgcattcattttgggtttgttaccatcatgcattaggagagttagg

SEQ ID NO: 494831 - DNA, 120 bp, Artificial Sequence
  ENSG00000163281_16 (sequence is synthesized)
ttaaaagatgtctttgcctctgtggggagcaaaaaaatgctccttttgcttattttgcatttcataagcccacctggtagaagaagccttacttatctgcttgtctatgtgattaaaatg

SEQ ID NO: 494832 - DNA, 120 bp, Artificial Sequence
  ENSG00000163281_17 (sequence is synthesized)
tagtttcttaaaatattaaaatagcaaataaattaatgaaataaaattggtaatagggttttatggttaaaagtgggggatggggtaaattatgctgctttaattccagatgatgtttta

SEQ ID NO: 494833 - DNA, 120 bp, Artificial Sequence
  ENSG00000163281_18 (sequence is synthesized)
atctgcatccgggtccgtgggattcgcgctccactggtcagctggggtcgctctcgggtggttgggtgttgcttgttcccgctgttccagcatcgaagaaccattgggtctgccggtaat

SEQ ID NO: 494834 - DNA, 120 bp, Artificial Sequence
  ENSG00000163281_19 (sequence is synthesized)
tggggttaaatctcacactgtgacctattgaaaagtggcaacacatagctagttctttcaagtaatggaaagttctcacctcagataatagtatcttcaaagtagtaccttttttttttt

SEQ ID NO: 494835 - DNA, 120 bp, Artificial Sequence
  ENSG00000163281_20 (sequence is synthesized)
ttcatgaagagaatctcttcagtctctattttcagtaaacaatttttcttgaaatccaaggtttaataatttactttcatattgaatatacaagaccaaataacccaaaagaaaatgtat

SEQ ID NO: 494836 - DNA, 120 bp, Artificial Sequence
  ENSG00000163281_21 (sequence is synthesized)
ctttgtccattctggatttcttttcatgtttactagtcccacctcaatccctcttcctcactcccctctaaccttaatttagaacctaatcagtggataagagatctcccactatctaat

SEQ ID NO: 494837 - DNA, 120 bp, Artificial Sequence
  ENSG00000163281_22 (sequence is synthesized)
atggaataaactctgcaagtaagcaggagtttgattgcccagacttcatgttgattttcctttttcctgtagtctagttcagtaattcagaaaccttactctaccaggctgtgtattaca

SEQ ID NO: 494838 - DNA, 120 bp, Artificial Sequence
  ENSG00000163281_23 (sequence is synthesized)
aaacacatatgcttgatataatggttttaagagattttcaagggacattttgcctatacccaatgtagaacctattctctgatttaagagtcagctccacatattacacatatgtaagca

SEQ ID NO: 494839 - DNA, 120 bp, Artificial Sequence
  ENSG00000163281_24 (sequence is synthesized)
aactgtacaaacaggtaattttcataaagcacctgtatttacatagctgatattaaaagttacatagttgatcatatagataggtcagtgattcactatgtagtatgtatgctacttttg

SEQ ID NO: 494840 - DNA, 120 bp, Artificial Sequence
  ENSG00000163281_25 (sequence is synthesized)
ctacatgattataccttttaatcttttttactctagtaactaggtatttattttaatgcctattggaaaatacactgaataaatcaaagctatattttttggatattattgcttaagaca

SEQ ID NO: 494841 - DNA, 120 bp, Artificial Sequence
  ENSG00000163281_26 (sequence is synthesized)
aggtccaaaaaagctaccatatttgattggctctaatacacgttgatcttgctgatgttggactgtgtcttaaaactggtgtcagatcatagcttactgggtagcatttttttctcagtg

SEQ ID NO: 494842 - DNA, 120 bp, Artificial Sequence
  ENSG00000163281_27 (sequence is synthesized)
gtacataaaatggtgtgtcttacaatttatagcatctcatactcagaaataaagtatataatcttaaatttttaattcaatgcaaagaaaaccaactcatatttcatgtatatgtgtgaa

SEQ ID NO: 494843 - DNA, 120 bp, Artificial Sequence
  ENSG00000163281_28 (sequence is synthesized)
tatggcaaatatcttgaaggtgttatacaaataactgacatttggcaagcactgaaaatagtctatttttaaacaaaatgctgatcatgctttgtatatagttttgtatttgtacttatg

SEQ ID NO: 494844 - DNA, 120 bp, Artificial Sequence
  ENSG00000163281_29 (sequence is synthesized)
atttatttaaacatttccttattaacacttagattatttctagtcatttatatttttaccatttaaattactaatttaccaagccacaaatatatcaaactgaaaaactgaaaaactgaa

SEQ ID NO: 494845 - DNA, 120 bp, Artificial Sequence
  ENSG00000163281_30 (sequence is synthesized)
aaactgaaaaatttctgatttgtgaataaaagagcatttgatggagttttaactctattttcccatgtaacccttcagatttcatcccaaataatagattccttgactacaaggaatcct

SEQ ID NO: 494846 - DNA, 120 bp, Artificial Sequence
  ENSG00000163281_31 (sequence is synthesized)
cactatccacaaattttaattccagttttaaggagattcatttaacatggccattttctagtcctcattaagtcccagataaatccctgtactaatctaattttgtcacaattaggtttt

SEQ ID NO: 494847 - DNA, 120 bp, Artificial Sequence
  ENSG00000163281_32 (sequence is synthesized)
acttatcacaaaaatgttatgaaatgggtattcatagtcccatttttaaattaataggcttaacagacagagacgttaagctacttacccaaagtcatacagcacatatttgggcagagc

SEQ ID NO: 494848 - DNA, 120 bp, Artificial Sequence
  ENSG00000163281_33 (sequence is synthesized)
tgggtaatagaaatcaaaatcaggctgatctctggagtatgcaggcttttgtctattctattatactgcctcccagaataaactctaggtatgataccatctacatcaaaaccatatttc

SEQ ID NO: 494849 - DNA, 120 bp, Artificial Sequence
  ENSG00000163281_34 (sequence is synthesized)
catctgcttttttcccatatgataatcactgcttccaaaaaaggtatatcgacatatgttagataatttaaaatagaagggtggtagatgtttatatgtatttagttcttttagttcatc

SEQ ID NO: 494850 - DNA, 120 bp, Artificial Sequence
  ENSG00000163281_35 (sequence is synthesized)
taattgtaagctcttctgaaaaattttgaaacagaccattcgtgagaggatagctgcactgcatcaagaggacacagtattttccactttggagctgtctgtatttctgaagaggtttca

SEQ ID NO: 494851 - DNA, 120 bp, Artificial Sequence
  ENSG00000163281_36 (sequence is synthesized)
gggtatcagcctgttaggatacctccttcaatatgaagacagaatttagacattctgggctacatatgggcctcattttacagcattttagtaaagggtagagaaattgaatattcttaa

SEQ ID NO: 494852 - DNA, 120 bp, Artificial Sequence
  ENSG00000163281_37 (sequence is synthesized)
ataaacacatttcaaatgtagtttgtatacttttcatacctccattgagttactagtatatcaaaatactggaggatgtaaattcctataattgtcatccataactcttcaaattccatt

SEQ ID NO: 494853 - DNA, 120 bp, Artificial Sequence
  ENSG00000163281_38 (sequence is synthesized)
cacatcactaccctttcttctgtcatcactaaaaagtgctgaccagaatcttaaagggttttatttagtgcctagataagatctaggttaactagatccaaaacaataaaaattgtcagt

SEQ ID NO: 494854 - DNA, 120 bp, Artificial Sequence
  ENSG00000163281_39 (sequence is synthesized)
aaatgcaagtttatttcaatatatacctatataacggtatataccttttgaaagatacaagttaatcacaagacaacaagtttagtacgtggggatttgttttattcattctcgcttttc

SEQ ID NO: 494855 - DNA, 120 bp, Artificial Sequence
  ENSG00000163281_40 (sequence is synthesized)
atttttgctttttaaatagaacagctttgatttttagtatatgacatcatcatcatgaatttttttctcttactttgtatttaggctccacctcagtagtttgacaaaggtagaatgagt

SEQ ID NO: 494856 - DNA, 120 bp, Artificial Sequence
  ENSG00000163281_41 (sequence is synthesized)
tcattttgagtcaaaaccataaaagttactttgtatagacattggttagaatctgtgacatttaacctttcttctggtaacgtttcaggaagtctggtgcatttttatcagaagaattat

SEQ ID NO: 494857 - DNA, 120 bp, Artificial Sequence
  ENSG00000163281_42 (sequence is synthesized)
ttctgtttgacttaagtagcaattatttatttatataaaattcgtatgtagaaagttgtcagtttttacctaaagtcacagtaaatatttgacttaatatctaaaaagcaattaatagaa

SEQ ID NO: 494858 - DNA, 120 bp, Artificial Sequence
  ENSG00000163281_43 (sequence is synthesized)
agtttggaagcagtcctatttgatgtataaaagatatatccaatgtaaagaaaaaaattttataaaggagttgaatttttaatatttactgatattttaatttgcatgtattttaaagct

SEQ ID NO: 494859 - DNA, 120 bp, Artificial Sequence
  ENSG00000163281_44 (sequence is synthesized)
tttgcatgtattttaaagctctgtgtattctttccgtaatcaaagttgttagcaaatgacagatgaatactatttaagtagaaaaacgatcctctacaaagtgatactctggaaaatgtt

SEQ ID NO: 494860 - DNA, 120 bp, Artificial Sequence
  ENSG00000163281_45 (sequence is synthesized)
gcatcttctaaatcatacagctgatattacccttatctttgttgtcccctctcctactggacatgaagtttcaggtgaccttcaagtaggctgttgagcagttgcaggactagtgaatgg

SEQ ID NO: 494861 - DNA, 120 bp, Artificial Sequence
  ENSG00000163281_46 (sequence is synthesized)
aatgcttcccccttccctcctttagagtcccattcttatggttagaatttctcctactacacaaacacttcccagtactctttgcttgtcccttaaaagtgggtctttctcaaagctggg

SEQ ID NO: 494862 - DNA, 120 bp, Artificial Sequence
  ENSG00000163281_47 (sequence is synthesized)
attttagagtcctttttgcagcctttctgacaaggaacatctgtttactaacaagcaacctatctctccaatccagtaatcccatttcctgcaaaaccgcattaagtgcctttccccacc

SEQ ID NO: 494863 - DNA, 120 bp, Artificial Sequence
  ENSG00000163281_48 (sequence is synthesized)
ctcccatgttcttaatacctggaaaacttaactcatttctttaccctccaaaatataaaatctctggttcattaactgggtcagtctttttagaacttttttctccccaaagaaatatag

SEQ ID NO: 494864 - DNA, 120 bp, Artificial Sequence
  ENSG00000163281_49 (sequence is synthesized)
tactgaggcattaaaacaggagtaactggaagatcagctatttcccaagcagcttccatagctaagagcagtctgcaagtatatgtaccaattacaaaatgaaagttataatctaccgga

SEQ ID NO: 494865 - DNA, 120 bp, Artificial Sequence
  ENSG00000163281_50 (sequence is synthesized)
tttaaaatcgtaatttctattctgaattaaatgatttaatacaggttgttttctgtcttgttttagtaaccctccctcagtgtagaatttgtaatcaacctttgtcataaatacacatgc

SEQ ID NO: 494866 - DNA, 120 bp, Artificial Sequence
  ENSG00000163281_51 (sequence is synthesized)
caaactattggaaagtaatttaccagacgaatggatagggtaatgtattaagagtgagacagcagttctgagcccctggctggagtctagtagaggaactgccagaggatcaatatcaac

SEQ ID NO: 494867 - DNA, 120 bp, Artificial Sequence
  ENSG00000163281_52 (sequence is synthesized)
atagacttttagatataattaaaacctattatctaagtcagtattcaaatttgtcatgcttaatctctttgaagacaagaaatgctcttctggttactcccaaagtacctgtacacattc

SEQ ID NO: 494868 - DNA, 120 bp, Artificial Sequence
  ENSG00000163281_53 (sequence is synthesized)
tagatctgcactgttacataattataaattggtatttgctaggtagataaaacttaagacattctgaaacatttctatttgtactttttcaataaacttgactatatcaagatgggaact

SEQ ID NO: 494869 - DNA, 120 bp, Artificial Sequence
  ENSG00000163281_54 (sequence is synthesized)
agaaatggccctcagctaccacaagttaattcaggagaactaccttctcaattctgtgcaaggctgtgcttcgaaggcaagaaagaagtttgctacagtttgggcttgaattccctgaaa

SEQ ID NO: 494870 - DNA, 120 bp, Artificial Sequence
  ENSG00000163281_55 (sequence is synthesized)
atatcaagatacaagatactgagatgaccattctattatatatcacaaaacttgtaatttaagaccattctatacatcttcatcaagagattttgcgttatgctaataataaaattaaac

SEQ ID NO: 494871 - DNA, 120 bp, Artificial Sequence
  ENSG00000163283_0 (sequence is synthesized)
atactccatgcccagaattcctgcctcgccactgtcctgctgccctccagacatgctggggccctgcatgctgctgctgctgctgctgctgggcctgaggctacagctctccctgggcat

SEQ ID NO: 494872 - DNA, 120 bp, Artificial Sequence
  ENSG00000163283_1 (sequence is synthesized)
catcccagttgaggaggagaacccggacttctggaaccgcgaggcagccgaggccctgggtgccgccaagaagctgcagcctgcacagacagccgccaagaacctcatcatcttcctggg

SEQ ID NO: 494873 - DNA, 120 bp, Artificial Sequence
  ENSG00000163283_2 (sequence is synthesized)
cgatgggatgggggtgtctacggtgacagctgccaggatcctaaaagggcagaagaaggacaaactggggcctgagatacccctggccatggaccgcttcccatatgtggctctgtccaa

SEQ ID NO: 494874 - DNA, 120 bp, Artificial Sequence
  ENSG00000163283_3 (sequence is synthesized)
gacatacaatgtagacaaacatgtgccagacagtggagccacagccacggcctacctgtgcggggtcaagggcaacttccagaccattggcttgagtgcagccgcccgctttaaccagtg

SEQ ID NO: 494875 - DNA, 120 bp, Artificial Sequence
  ENSG00000163283_4 (sequence is synthesized)
caacacgacacgcggcaacgaggtcatctccgtgatgaatcgggccaagaaagcagggaagtcagtgggagtggtaaccaccacacgagtgcagcacgcctcgccagccggcacctacgc

SEQ ID NO: 494876 - DNA, 120 bp, Artificial Sequence
  ENSG00000163283_5 (sequence is synthesized)
ccacacggtgaaccgcaactggtactcggacgccgacgtgcctgcctccgcccgccaggaggggtgccaggacatcgctacgcagctcatctccaacatggacattgacgtgatcctagg

SEQ ID NO: 494877 - DNA, 120 bp, Artificial Sequence
  ENSG00000163283_6 (sequence is synthesized)
tggaggccgaaagtacatgtttcgcatgggaaccccagaccctgagtacccagatgactacagccaaggtgggaccaggctggacgggaagaatctggtgcaggaatggctggcgaagcg

SEQ ID NO: 494878 - DNA, 120 bp, Artificial Sequence
  ENSG00000163283_7 (sequence is synthesized)
ccagggtgcccggtatgtgtggaaccgcactgagctcatgcaggcttccctggacccgtctgtgacccatctcatgggtctctttgagcctggagacatgaaatacgagatccaccgaga

SEQ ID NO: 494879 - DNA, 120 bp, Artificial Sequence
  ENSG00000163283_8 (sequence is synthesized)
ctccacactggacccctccctgatggagatgacagaggctgccctgcgcctgctgagcaggaacccccgcggcttcttcctcttcgtggagggtggtcgcatcgaccatggtcatcatga

SEQ ID NO: 494880 - DNA, 120 bp, Artificial Sequence
  ENSG00000163283_9 (sequence is synthesized)
aagcagggcttaccgggcactgactgagacgatcatgttcgacgacgccattgagagggcgggccagctcaccagcgaggaggacacgctgagcctcgtcactgccgaccactcccacgt

SEQ ID NO: 494881 - DNA, 120 bp, Artificial Sequence
  ENSG00000163283_10 (sequence is synthesized)
cttctccttcggaggctaccccctgcgagggagctccatcttcgggctggcccctggcaaggcccgggacaggaaggcctacacggtcctcctatacggaaacggtccaggctatgtgct

SEQ ID NO: 494882 - DNA, 120 bp, Artificial Sequence
  ENSG00000163283_11 (sequence is synthesized)
gttcgcgcgcggcccgcaggcgcacctggttcacggcgtgcaggagcagaccttcatagcgcacgtcatggccttcgccgcctgcctggagccctacaccgcctgcgacctggcgccccc

SEQ ID NO: 494883 - DNA, 120 bp, Artificial Sequence
  ENSG00000163283_12 (sequence is synthesized)
cgccggcaccaccgacgccgcgcacccggggcggtccgtggtccccgcgttgcttcctctgctggccgggaccctgctgctgctggagacggccactgctccctgagtgtcccgtccctg

SEQ ID NO: 494884 - DNA, 120 bp, Artificial Sequence
  ENSG00000163283_13 (sequence is synthesized)
gggctcctgcttccccatcccggagttctcctgctccccacctcctgtcgtcctgcctggcctccagcccgagtcgtcatccccggagtccctatacagaggtcctgccatggaaccttc

SEQ ID NO: 494885 - DNA, 120 bp, Artificial Sequence
  ENSG00000163283_14 (sequence is synthesized)
ccctccccgtgcgctctggggactgagcccatgacaccaaacctgccccttggctgctctcggactccctaccccaaccccagggactgcaggttgtgccctgtggctgcctgcacccca

SEQ ID NO: 494886 - DNA, 120 bp, Artificial Sequence
  ENSG00000163283_15 (sequence is synthesized)
ggaaaggagggggctcaggccatccagccaccacctacagcccagtgggtaccaggcaggctcccttcctggggaaaagaagcacccagaccccgcgccccgctgatctttgcttcagtc

SEQ ID NO: 494887 - DNA, 120 bp, Artificial Sequence
  ENSG00000163283_16 (sequence is synthesized)
cttgaatcacctgtgggacttgaggactcgggatcttcaggacgcctggagaagggtggtttcctgccaccctgctggccaaggaggctcctggggtggggatcaccagggggattttga

SEQ ID NO: 494888 - DNA, 120 bp, Artificial Sequence
  ENSG00000163283_17 (sequence is synthesized)
cacagccttcggctgccccccactaagctaattccacacccctgtacccccccagggggccctctgcctcatggcaaaggcttgccccaaatctcaacttctcagacgttccataccccc

SEQ ID NO: 494889 - DNA, 120 bp, Artificial Sequence
  ENSG00000163283_18 (sequence is synthesized)
acatgccaatttcagcacccaactgagatccgaggagctcctgggaagccctgggtgcaggacactggtcgagagccaaaggtccctccccagacatctggacactgggcatagatttct

SEQ ID NO: 494890 - DNA, 120 bp, Artificial Sequence
  ENSG00000163283_19 (sequence is synthesized)
gacactgggcatagatttctcaagaaggaagactcccctgcctccccagggcctctgctctcctgggagacaaagcaataataaaaggaagtgtttgtaatcccagcactttgggaggcc

SEQ ID NO: 494891 - DNA, 87 bp, Artificial Sequence
  ENSG00000163283_20 (sequence is synthesized)
taacacggtgaaaccccttatctaagcaggataatcgcttgaacccgggcggcggagattgcagtgagccgaggtcatgccactgca

SEQ ID NO: 494892 - DNA, 86 bp, Artificial Sequence
  ENSG00000163283_21 (sequence is synthesized)
gtgagccgagggagattctgcctcaaaaataaacaaataaattttaaaaataaataaataataaaaggaagtgttagacaatgtaa

SEQ ID NO: 494893 - DNA, 120 bp, Artificial Sequence
  ENSG00000163283_22 (sequence is synthesized)
gatgaatcgggccaagaaagcaggtgagctggggcccgctgctgggtcacggccaggtcacagacgttggtcacatatactgacctctgacacccttagggaagtcagtgggagtggtaa

SEQ ID NO: 494894 - DNA, 120 bp, Artificial Sequence
  ENSG00000163285_0 (sequence is synthesized)
gagtcgcatcctacctgtttgggaggtgcactgcctttccacactctcccttctgtactcagccagctgctgctgaggtgggaggaaaagtcctggctgggagaattgagctagtgcagc

SEQ ID NO: 494895 - DNA, 120 bp, Artificial Sequence
  ENSG00000163285_1 (sequence is synthesized)
acacgtaaaaaagcgattccgatgggtcctttgaaagcttttctcttctccccttttcttctgcggagtcaaagtagaggggtgaggttggtcttcttgttactgaccctgcatttggga

SEQ ID NO: 494896 - DNA, 120 bp, Artificial Sequence
  ENSG00000163285_2 (sequence is synthesized)
aactgtgttgataaggcagatgatgaagatgatgaggatttaacggtgaacaaaacctgggtcttggccccaaaaattcatgaaggagatatcacacaaattctgaattcattgcttcaa

SEQ ID NO: 494897 - DNA, 120 bp, Artificial Sequence
  ENSG00000163285_3 (sequence is synthesized)
ggctatgacaataaacttcgtccagatataggagtgaggcccacagtaattgaaactgatgtttatgtaaacagcattggaccagttgatccaattaatatggaatatacaatagatata

SEQ ID NO: 494898 - DNA, 120 bp, Artificial Sequence
  ENSG00000163285_4 (sequence is synthesized)
atttttgcccaaacctggtttgacagtcgtttaaaattcaatagtaccatgaaagtgcttatgcttaacagtaatatggttggaaaaatttggattcctgacactttcttcagaaactca

SEQ ID NO: 494899 - DNA, 120 bp, Artificial Sequence
  ENSG00000163285_5 (sequence is synthesized)
agaaaatctgatgctcactggataacaactcctaatcgtctgcttcgaatttggaatgatggacgagttctgtatactctaagattgacaattaatgcagaatgttatcttcagcttcat

SEQ ID NO: 494900 - DNA, 120 bp, Artificial Sequence
  ENSG00000163285_6 (sequence is synthesized)
aactttcccatggatgaacattcctgtccactggaattttcaagctatggataccctaaaaatgaaattgagtataagtggaaaaagccctccgtagaagtggctgatcctaaatactgg

SEQ ID NO: 494901 - DNA, 120 bp, Artificial Sequence
  ENSG00000163285_7 (sequence is synthesized)
agattatatcagtttgcatttgtagggttacggaactcaactgaaatcactcacacgatctctggggattatgttatcatgacaattttttttgacctgagcagaagaatgggatatttc

SEQ ID NO: 494902 - DNA, 120 bp, Artificial Sequence
  ENSG00000163285_8 (sequence is synthesized)
actattcagacctacattccatgcattctgacagttgttctttcttgggtgtctttttggatcaataaagatgcagtgcctgcaagaacatcgttgggtatcactacagttctgactatg

SEQ ID NO: 494903 - DNA, 120 bp, Artificial Sequence
  ENSG00000163285_9 (sequence is synthesized)
acaaccctgagtacaattgccaggaagtctttacctaaggtttcttatgtgactgcgatggatctctttgtttctgtttgtttcatttttgtttttgcagccttgatggaatatggaacc

SEQ ID NO: 494904 - DNA, 120 bp, Artificial Sequence
  ENSG00000163285_10 (sequence is synthesized)
ttgcattattttaccagcaaccaaaaaggaaagactgctactaaagacagaaagctaaaaaataaagcctcgatgactcctggtctccatcctggatccactctgattccaatgaataat

SEQ ID NO: 494905 - DNA, 120 bp, Artificial Sequence
  ENSG00000163285_11 (sequence is synthesized)
atttctgtgccgcaagaagatgattatgggtatcagtgtttggagggcaaagattgtgccagcttcttctgttgctttgaagactgcagaacaggatcttggagggaaggaaggatacac

SEQ ID NO: 494906 - DNA, 120 bp, Artificial Sequence
  ENSG00000163285_12 (sequence is synthesized)
atacgcattgccaaaattgactcttattctagaatatttttcccaaccgcttttgccctgttcaacttggtttattgggttggctatctttacttataaaatctacttcataagcaaaaa

SEQ ID NO: 494907 - DNA, 120 bp, Artificial Sequence
  ENSG00000163285_13 (sequence is synthesized)
tcaaaagaagtctgactaaattcagtagaatcttttgtgcttcagtaacttgaagtttaaatttaaaatgcagagagaccaatggttaaaatgtgaatagtattgtaactattttaaggc

SEQ ID NO: 494908 - DNA, 120 bp, Artificial Sequence
  ENSG00000163285_14 (sequence is synthesized)
cttcagaagtaaataaagtagcagctttcaggctaatttacgtgaaactgattagttgcaaaatccagtaggttaaaatactcacatatttttacttaaattttctttaatttacttata

SEQ ID NO: 494909 - DNA, 120 bp, Artificial Sequence
  ENSG00000163285_15 (sequence is synthesized)
atatttatgtagcaacttttgtgccagaaaaaagactgttaatttgttttttcttgcttttcatttgattaccctgcttgaaatacagttagttgataacataaagccatagttttcttg

SEQ ID NO: 494910 - DNA, 120 bp, Artificial Sequence
  ENSG00000163285_16 (sequence is synthesized)
gattttcttccaagatattgtattcccaagaagaaattgatttatttttaaactatcagttactgaagacttatgaaaaggtcaatttttacctgtcttttaatccagtccattttctga

SEQ ID NO: 494911 - DNA, 120 bp, Artificial Sequence
  ENSG00000163285_17 (sequence is synthesized)
cacaatattaaacagaacgccagttgcatttactttggtgatttgcaaacttggaatgaagccaccagtcattttttaagaatgcaagatgaaaaaatcaggtaaaatctaaccatttta

SEQ ID NO: 494912 - DNA, 120 bp, Artificial Sequence
  ENSG00000163285_18 (sequence is synthesized)
ttctctgcttcatagcatttataatgtatgatgaggttaacactgaaatattaaaatctgcaaatgcacattaatgcaaattaaatgcagagagaaatgattatttttttctttatgttt

SEQ ID NO: 494913 - DNA, 120 bp, Artificial Sequence
  ENSG00000163285_19 (sequence is synthesized)
tatgaaagtgttgcagtccctaaaataaaaatattgaggaacattgcttgtatttactcacgtggttaaaaaattattacctggcaaactgagttgccggtcatattgaggacaaaatct

SEQ ID NO: 494914 - DNA, 120 bp, Artificial Sequence
  ENSG00000163285_20 (sequence is synthesized)
taaatatgtgctattagcattgtttttagactagtaatatgcagaaaacagttttaggcctgcgttacatattgcctcttccagctccaaagttttggaccctgtcagttttgcaactac

SEQ ID NO: 494915 - DNA, 120 bp, Artificial Sequence
  ENSG00000163285_21 (sequence is synthesized)
attatacattattataatattcttttttttttctagaaactgggggcagcctcaaaatcatgttaaagagggagttttgttagaggcatctttaatgaacatgaatgtgagtgctctcta

SEQ ID NO: 494916 - DNA, 120 bp, Artificial Sequence
  ENSG00000163285_22 (sequence is synthesized)
aattcttagcatctcactggatgtaaaatctatcagttaatagttttaaaaatgtctcttttgttaagaataaatttaggcttcaatcattataatcctgtaagtagcttgacataccaa

SEQ ID NO: 494917 - DNA, 120 bp, Artificial Sequence
  ENSG00000163285_23 (sequence is synthesized)
ttgtttataagattcatcacataaatttctggagaaccaccaggtttagcttggaaataacctttaaagattgtttctgttgccaagaccaatgaccatgatgaagagttttatgatcac

SEQ ID NO: 494918 - DNA, 120 bp, Artificial Sequence
  ENSG00000163285_24 (sequence is synthesized)
agcctatcttacttaaggtttgagaggaaacctgtcacctctgcaattgttactctagtttttaatgttataattccgctgcgtggttagtgaatgtctggcatgattatacacgtgtat

SEQ ID NO: 494919 - DNA, 120 bp, Artificial Sequence
  ENSG00000163285_25 (sequence is synthesized)
tggaaatatctagttttttaaatttttaattaatttatttataatttactgtgtgttcccagctaactctattttttttttcacttgctcataaacttctggaaaaaaataagcatgaat

SEQ ID NO: 494920 - DNA, 120 bp, Artificial Sequence
  ENSG00000163285_26 (sequence is synthesized)
caaatggtaatgcccaatatccaccgacactgcttttcttgaatgaacagccaaactaaactttggccatctatatattcatttacagattattcatacattcattttaataacattgag

SEQ ID NO: 494921 - DNA, 120 bp, Artificial Sequence
  ENSG00000163285_27 (sequence is synthesized)
ataaataaaaaataaagtagtaataaagaataaaatactttactaaaatattgtatggctattttcatgtttgaagctatagcttactatcatgagacagttttgattttgggactcttt

SEQ ID NO: 494922 - DNA, 120 bp, Artificial Sequence
  ENSG00000163285_28 (sequence is synthesized)
caagtgtatctgagcatgactgtattttaaaatacttaaaagtgcttgatataaatagcttttccttctgaaccacgttctatgtaaaagaaaaaaaatagctttgattttctcactggt

SEQ ID NO: 494923 - DNA, 120 bp, Artificial Sequence
  ENSG00000163285_29 (sequence is synthesized)
gtttcattaacttggttttaaatgttgacaatatttacaagtggaaataaaatttgtaaatatatgaaagatgcctttccttgtatataccatcaagcaagcactttgttttcaaagcaa

SEQ ID NO: 494924 - DNA, 120 bp, Artificial Sequence
  ENSG00000163285_30 (sequence is synthesized)
gtggtattttgatcagttttatttaaatgtgtgatcagaaagaatggcgtacaaatcttattatttctaaaaataagaataaaaaggtaaaactacatttagacttctttctcaagaaat

SEQ ID NO: 494925 - DNA, 120 bp, Artificial Sequence
  ENSG00000163285_31 (sequence is synthesized)
caaatacagctttttttcaaagctgattcagttcatttcctgttcctctattccaagtataagtttcaccaccttgagaaataatttttttaaaaaatcttcctctttctctggggagtt

SEQ ID NO: 494926 - DNA, 120 bp, Artificial Sequence
  ENSG00000163285_32 (sequence is synthesized)
atataataatttattgaatttattggaacttgattttcctggatgctttcaatgtttttaatgctaacatagaccccaaaattagatataaagaattgggaaggatacctggagcacaag

SEQ ID NO: 494927 - DNA, 120 bp, Artificial Sequence
  ENSG00000163285_33 (sequence is synthesized)
gaataagatcatttgtaaaaatgtttgtttatatagacctatcctctaaatatgtgacaaggatctagaaattctgagaggggaaaatgtgattttggatttacaatgacagggtaatat

SEQ ID NO: 494928 - DNA, 120 bp, Artificial Sequence
  ENSG00000163285_34 (sequence is synthesized)
tttatttatcttcgaattccatggacaaaattaggctcacttaaattaatttttgtaaacccaagtaagttctaaaaaaaagtaaaaaatacatagaatacttgagaatttagcagggac

SEQ ID NO: 494929 - DNA, 120 bp, Artificial Sequence
  ENSG00000163285_35 (sequence is synthesized)
agggaaaaatttcccagtaagtctgaagtcttgatgtaagtgggaattagataactaattggaggcattttattttaagttaaagacagatttctttaataagtttttaaaattgatcaa

SEQ ID NO: 494930 - DNA, 120 bp, Artificial Sequence
  ENSG00000163285_36 (sequence is synthesized)
ctttaaattaagcacagtaaatgtgtataaatatgaaggcaatcataaggattttttcacttgtgtttccatattctggcattagtatatcatcataaaatagacaatgtttttgtctca

SEQ ID NO: 494931 - DNA, 120 bp, Artificial Sequence
  ENSG00000163285_37 (sequence is synthesized)
agaacaagaataaaattgaaatctgcattcatgccaattcagcataaaaaagaataggctacagttctctcacaccaagggccccatagttataaatgtgaaattatattccaggtcaaa

SEQ ID NO: 494932 - DNA, 120 bp, Artificial Sequence
  ENSG00000163285_38 (sequence is synthesized)
atttgtgaaaaatacacaaaacactttgattttacaagagaggagctttaaataagatgattttagtagattgaaataaataaccagtatttaagtaaatgtataacgaatgaataaata

SEQ ID NO: 494933 - DNA, 120 bp, Artificial Sequence
  ENSG00000163285_39 (sequence is synthesized)
catgcataatattttcaaagttctataccagtacctatttttactcttacaaaatttcctgtaaaaaaatactacatttgaaattatttcattggttttagaactggcattgaaggtacc

SEQ ID NO: 494934 - DNA, 120 bp, Artificial Sequence
  ENSG00000163285_40 (sequence is synthesized)
cagtagactcttaagcctttactgcttgtctcactagaaacatttatttctgacctaccaagttttcttcacatcatcaaatttattcagcttctcagtgctgtaccgtatgatggcaag

SEQ ID NO: 494935 - DNA, 120 bp, Artificial Sequence
  ENSG00000163285_41 (sequence is synthesized)
acatacttggtatttccatttttgttggtcattctttattgctttttactgctaggaaggtcttgccaggcttctatacagttacaaaaaccattaccaaactttatcaaggactttcca

SEQ ID NO: 494936 - DNA, 120 bp, Artificial Sequence
  ENSG00000163285_42 (sequence is synthesized)
aatggagttttcaaatactattgaccacattgctctagttaatgtaaggtcagctctgactttttgtgtttgcatttcggaagtgaggtaacctcattcaaatatatatgcagcactttc

SEQ ID NO: 494937 - DNA, 120 bp, Artificial Sequence
  ENSG00000163285_43 (sequence is synthesized)
tgtgtacaaagtactgttctaaatacaaaagggaatataaagatgactttcaaggaacatataatgtagtcagaaagatgagaggattagttatacaatttaaggaagggaggataactt

SEQ ID NO: 494938 - DNA, 120 bp, Artificial Sequence
  ENSG00000163285_44 (sequence is synthesized)
tgggaaggttttgtggaggatatgtgtttagagatgcgagctggggattcaacaggtaagagggagagagatcacaatttccaactgggtaaacagcttgaaaaaagaaacagaagcctg

SEQ ID NO: 494939 - DNA, 120 bp, Artificial Sequence
  ENSG00000163285_45 (sequence is synthesized)
ggcacaaatgaaaattccatattaattggaagttaagattcatatagagacaatgaaaggttaggttagaacaataaactgagaagtacgaatgtggacttcaggaggctaggggaaatt

SEQ ID NO: 494940 - DNA, 120 bp, Artificial Sequence
  ENSG00000163285_46 (sequence is synthesized)
acgaagtcataaaaagttcacagagatacttgagtacaaaagatacattattaaaatttctgcagaagtttcatcttatttgtgtgtgatggtttggaatataacaagccagttaggcgt

SEQ ID NO: 494941 - DNA, 120 bp, Artificial Sequence
  ENSG00000163285_47 (sequence is synthesized)
ataagcttatagtggctaatatgaggatgaaatccgtactcttgtgacacaagtcttcagcggagatgggggatgataggcccaaatagaaagaaaagtggcagacattaagctttgact

SEQ ID NO: 494942 - DNA, 120 bp, Artificial Sequence
  ENSG00000163285_48 (sequence is synthesized)
aacagacaacataactgagagacatggtgtgttgggtggaagggatcctgtagtagatacttgcttgcatgtagatgggtacaaagacaccataaggaaattctgaatgtaatacaaagg

SEQ ID NO: 494943 - DNA, 120 bp, Artificial Sequence
  ENSG00000163285_49 (sequence is synthesized)
cttatttttcctgttgatttatctttttcacacataaaagatgaagaaaaaaataatctgaaatgtaaatcctaaagtgatctgtctagattcttattttttgaaaaatgttcctcacta

SEQ ID NO: 494944 - DNA, 120 bp, Artificial Sequence
  ENSG00000163285_50 (sequence is synthesized)
aaagagttttctattcaaataaccatttccagttttctaactgagacatacatacatatatatatgtataaaattatatatatatttggacaaagagaataagagaattgcaggtagaaa

SEQ ID NO: 494945 - DNA, 120 bp, Artificial Sequence
  ENSG00000163285_51 (sequence is synthesized)
tagtctactgtgtgtagacaaatccagaaagttgatttctgttcctcaaacaatttctgaaatatttatgtcagaataaataaaagaattgttattgttggacaatgaaacatacctgga

SEQ ID NO: 494946 - DNA, 120 bp, Artificial Sequence
  ENSG00000163285_52 (sequence is synthesized)
ccctttgagtgtgtgaatagtaaaggctgtgataactgaaatgcagctaagcaaaaagggctaattagaagacttttgagacatgatttacctaaatggaaatagtttggttttcaatcc

SEQ ID NO: 494947 - DNA, 120 bp, Artificial Sequence
  ENSG00000163285_53 (sequence is synthesized)
ttcactgtaataacaattatttgcatctattaagtgtttgtagtcactttgtataataaagttttatggcttgtgattataatggcttctgttattctgctactgcctcattgttttgag

SEQ ID NO: 494948 - DNA, 120 bp, Artificial Sequence
  ENSG00000163285_54 (sequence is synthesized)
gaacatttgtaattttgtggcaaaggtgtctcaatttttcagtgttctttactctcatgatccttagaacaaaaaaaataccagtaacttgttataaataaagagtcacattctcttaaa

SEQ ID NO: 494949 - DNA, 120 bp, Artificial Sequence
  ENSG00000163286_0 (sequence is synthesized)
atactccatacctgggatttccgcctcgccgctctccgactgcttccagacatgcaggggccctgggtgctgctcctgctgggcctgaggctacagctctccctgggcatcatcccagtt

SEQ ID NO: 494950 - DNA, 120 bp, Artificial Sequence
  ENSG00000163286_1 (sequence is synthesized)
gaggaggagaacccggacttctggaaccgccaggcagccgaggccctgggtgccgccaagaagctgcagcctgcacagacagccgccaagaacctcatcatcttcctgggtgacgggatg

SEQ ID NO: 494951 - DNA, 120 bp, Artificial Sequence
  ENSG00000163286_2 (sequence is synthesized)
ggggtgtctacggtgacagctgccaggatcctaaaagggcagaagaaggacaaactggggcctgagaccttcctggccatggaccgcttcccgtacgtggctctgtccaagacatacagt

SEQ ID NO: 494952 - DNA, 120 bp, Artificial Sequence
  ENSG00000163286_3 (sequence is synthesized)
gtagacaagcatgtgccagacagtggagccacagccacggcctacctgtgcggggtcaagggcaacttccagaccattggcttgagtgcagccgcccgctttaaccagtgcaacacgaca

SEQ ID NO: 494953 - DNA, 120 bp, Artificial Sequence
  ENSG00000163286_4 (sequence is synthesized)
cgcggcaacgaggtcatctccgtgatgaatcgggccaagaaagcaggaaagtcagtgggagtggtaaccaccacacgggtgcagcatgcctcgccagccggcgcctacgcccacacggtg

SEQ ID NO: 494954 - DNA, 120 bp, Artificial Sequence
  ENSG00000163286_5 (sequence is synthesized)
aaccgcaactggtactcggatgccgacgtgcctgcctcggcccgccaggaggggtgccaggacatcgccacgcagctcatctccaacatggacattgatgtgatcctaggtggaggccga

SEQ ID NO: 494955 - DNA, 120 bp, Artificial Sequence
  ENSG00000163286_6 (sequence is synthesized)
aagtacatgtttcccatggggaccccagaccctgagtacccagatgactacagccaaggtgggaccaggctggacgggaagaatctggtgcaggaatggctggcgaagcaccagggtgcc

SEQ ID NO: 494956 - DNA, 120 bp, Artificial Sequence
  ENSG00000163286_7 (sequence is synthesized)
cggtacgtgtggaaccgcactgagctcctgcaggcttccctggacccgtctgtgacccatctcatgggtctctttgagcctggagacatgaaatacgagatccaccgagactccacactg

SEQ ID NO: 494957 - DNA, 120 bp, Artificial Sequence
  ENSG00000163286_8 (sequence is synthesized)
gacccctccctgatggagatgacagaggctgccctgctcctgctgagcaggaacccccgcggcttcttcctcttcgtggagggtggtcgcatcgaccatggtcatcatgaaagcagggct

SEQ ID NO: 494958 - DNA, 120 bp, Artificial Sequence
  ENSG00000163286_9 (sequence is synthesized)
taccgggcactgactgagacgatcatgttcgacgacgccattgagagggcgggccagctcaccagcgaggaggacacgctgagcctcgtcactgccgaccactcccacgtcttctccttc

SEQ ID NO: 494959 - DNA, 120 bp, Artificial Sequence
  ENSG00000163286_10 (sequence is synthesized)
cggtccaggctatgtgctcaaggacggcgcccggccggatgttacggagagcgagagcgggagccccgagtatcggcagcagtcagcagtgcccctggacggagagacccacgcaggcga

SEQ ID NO: 494960 - DNA, 120 bp, Artificial Sequence
  ENSG00000163286_11 (sequence is synthesized)
ggacgtggcggtgttcgcgcgcggcccgcaggcgcacctggttcacggcgtgcaggagcagaccttcatagcgcacgtcatggccttcgccgcctgcctggagccctacaccgcctgcga

SEQ ID NO: 494961 - DNA, 120 bp, Artificial Sequence
  ENSG00000163286_12 (sequence is synthesized)
cctggcgccccgcgccggcaccaccgacgccgcgcacccggggccgtccgtggtccccgcgttgcttcctctgctggcagggaccttgctgctgctggggacggccactgctccctgagt

SEQ ID NO: 494962 - DNA, 120 bp, Artificial Sequence
  ENSG00000163286_13 (sequence is synthesized)
gtcccgtccctggggctcctgcttccccatcccggagttcccctgctccccacctccagtcgtcctgccggacctccacctggagctgtcacccccggagtcgccacacagacgtcctgc

SEQ ID NO: 494963 - DNA, 120 bp, Artificial Sequence
  ENSG00000163286_14 (sequence is synthesized)
catggaaccttcccctcccggtgcaccctggggaccgagcccttgacaccacgccctttgctttatcttgctcttgaaattttggccccaactccagggactggggatttgtgcctggca

SEQ ID NO: 494964 - DNA, 120 bp, Artificial Sequence
  ENSG00000163286_15 (sequence is synthesized)
gctgcctgcatttcaggaaaagaggaggctcagaccatccagcccccgcccatatcctgaggtggatcaggcaggctctctccccggggacatgaggcacccatacctaggaccccctgc

SEQ ID NO: 494965 - DNA, 120 bp, Artificial Sequence
  ENSG00000163286_16 (sequence is synthesized)
gccttttttagcttcagtcatggcagcacctgagggacacaaggacttgggtgcatcaggacgccttggagaagcgtggcttcctgccaccctgcaacccaccctcccagccaaggaggc

SEQ ID NO: 494966 - DNA, 120 bp, Artificial Sequence
  ENSG00000163286_17 (sequence is synthesized)
tgctgtggtggggatccccaggggggctttgacacagtcctctgctgtccctccactgggctaattctacacccctgtgcccctcctaggggcccatgagtcagagaggcttgccccaag

SEQ ID NO: 494967 - DNA, 120 bp, Artificial Sequence
  ENSG00000163286_18 (sequence is synthesized)
tcacagccactcagatgttcgacgccccctaaggtccattccagcacccacctgagttccgaggagcacctgggaagctctgggtgcaggatagcagtccagagtccatggccccgccta

SEQ ID NO: 494968 - DNA, 120 bp, Artificial Sequence
  ENSG00000163286_19 (sequence is synthesized)
ggccatctgggtgctgggcatggatttctcagcaaggaagactcattaccttccctccctgggcctccattcttctgggaaacacaaagcaataataaaaggaagtgttagacaatgtaa

SEQ ID NO: 494969 - DNA, 120 bp, Artificial Sequence
  ENSG00000163288_0 (sequence is synthesized)
attcgggaattactgcccagcagccgactaagttgcattccttgaatcttcgcagaaaagacaattcttttaatcagagttagtaatgtggacagtacaaaatcgagagagtctggggct

SEQ ID NO: 494970 - DNA, 120 bp, Artificial Sequence
  ENSG00000163288_1 (sequence is synthesized)
tctctctttccctgtgatgattaccatggtctgttgtgcacacagcaccaatgaacccagcaacatgtcatacgtgaaagagacagtggacagattgctcaaaggatatgacattcgctt

SEQ ID NO: 494971 - DNA, 120 bp, Artificial Sequence
  ENSG00000163288_2 (sequence is synthesized)
gcggccggacttcggagggccccccgtcgacgttgggatgcggatcgatgtcgccagcatagacatggtctccgaagtgaatatggattatacactcaccatgtatttccagcagtcttg

SEQ ID NO: 494972 - DNA, 120 bp, Artificial Sequence
  ENSG00000163288_3 (sequence is synthesized)
gaaagacaaaaggctttcttattctggaatcccactgaacctcaccctagacaatagggtagctgaccaactctgggtaccagacacctactttctgaatgacaagaaatcatttgtgca

SEQ ID NO: 494973 - DNA, 120 bp, Artificial Sequence
  ENSG00000163288_4 (sequence is synthesized)
tggggtcacagtgaaaaatcgaatgattcgactgcatcctgatggaacagttctctatggactccgaatcacaaccacagctgcatgtatgatggatcttcgaagatatccattggatga

SEQ ID NO: 494974 - DNA, 120 bp, Artificial Sequence
  ENSG00000163288_5 (sequence is synthesized)
gcagaactgcaccctggagatcgaaagttatggctataccactgatgacattgaattttactggaatggaggagaaggggcagtcactggtgttaataaaatcgaacttcctcaattttc

SEQ ID NO: 494975 - DNA, 120 bp, Artificial Sequence
  ENSG00000163288_6 (sequence is synthesized)
aattgttgactacaagatggtgtctaagaaggtggagttcacaacaggagcgtatccacgactgtcactaagttttcgtctaaagagaaacattggttacttcattttgcaaacctacat

SEQ ID NO: 494976 - DNA, 120 bp, Artificial Sequence
  ENSG00000163288_7 (sequence is synthesized)
gccttctacactgattacaattctgtcctgggtgtctttttggatcaactatgatgcatctgcagccagagtcgcactaggaatcacgacagtgcttacaatgacaaccatcagcaccca

SEQ ID NO: 494977 - DNA, 120 bp, Artificial Sequence
  ENSG00000163288_8 (sequence is synthesized)
aagatcccttatgtcaaagcgattgatatttatctgatgggttgctttgtgtttgtgttcctggctctgctggagtatgcctttgtaaattacatcttctttgggaaaggccctcagaaa

SEQ ID NO: 494978 - DNA, 120 bp, Artificial Sequence
  ENSG00000163288_9 (sequence is synthesized)
aagggagctagcaaacaagaccagagtgccaatgagaagaataaactggagatgaataaagtccaggtcgacgcccacggtaacattctcctcagcaccctggaaatccggaatgagacg

SEQ ID NO: 494979 - DNA, 120 bp, Artificial Sequence
  ENSG00000163288_10 (sequence is synthesized)
agtggctcggaagtgctcacgagcgtgagcgaccccaaggccaccatgtactcctatgacagcgccagcatccagtaccgcaagcccctgagcagccgcgaggcctacgggcgcgccctg

SEQ ID NO: 494980 - DNA, 120 bp, Artificial Sequence
  ENSG00000163288_11 (sequence is synthesized)
gaccggcacggggtacccagcaaggggcgcatccgcaggcgtgcctcccagctcaaagtcaagatccccgacttgactgatgtgaattccatagacaagtggtcccgaatgtttttcccc

SEQ ID NO: 494981 - DNA, 120 bp, Artificial Sequence
  ENSG00000163288_12 (sequence is synthesized)
atcaccttttctctttttaatgtcgtctattggctttactatgtacactgaggtctgttctaatggttccatttagactactttcctcttctattgttttttaaccttacaggtccccaa

SEQ ID NO: 494982 - DNA, 120 bp, Artificial Sequence
  ENSG00000163288_13 (sequence is synthesized)
cagcgatactgctgtttctcgaggtaagagattcagccatccaattggttttaggtcttgcatatcagttttattactgcaccatgtttacttcaaaaagacaaaacaaaaaaaaaatta

SEQ ID NO: 494983 - DNA, 120 bp, Artificial Sequence
  ENSG00000163288_14 (sequence is synthesized)
tttttccagtctaccgtggtccaggttatcagctctttaagagctctattaattgccatgtttacaaacaaacacaaagagagaagttagacaggtagatctttagcagtcttttctagt

SEQ ID NO: 494984 - DNA, 120 bp, Artificial Sequence
  ENSG00000163288_15 (sequence is synthesized)
ttccctggatttcactgatttattttttagggaaaatgaaaagaggaccttgctgtccgcctgcactgcttcctggtaaactataacaaacttatgctgccaaaaaaaaaaaaaaaaaaa

SEQ ID NO: 494985 - DNA, 120 bp, Artificial Sequence
  ENSG00000163288_16 (sequence is synthesized)
gcgcgcttgcgctgcaagactcggcaagtttgttccgactgtaactccggggatgaggaacggggtctctcgcccctcctccggcttcgcagcccccgaccccaagtgggctccccgccc

SEQ ID NO: 494986 - DNA, 120 bp, Artificial Sequence
  ENSG00000163288_17 (sequence is synthesized)
acagcagtgttcgtcctcctacctcctggccccctcccttccgctgggatttggatctaaccaatgaagctcctctgtcatcagcaccaatgaacccagcaacatgtcatacgtgaaaga

SEQ ID NO: 494987 - DNA, 120 bp, Artificial Sequence
  ENSG00000163288_18 (sequence is synthesized)
aaataaaaatcccaagccaactattgagaggccaatgagaagagagaaagaagattcacgacagaggttaatattggccaactgaaaacttctgtcttcatgtggggagaactgatcttt

SEQ ID NO: 494988 - DNA, 120 bp, Artificial Sequence
  ENSG00000163288_19 (sequence is synthesized)
agaagtgtcgaagttgggaatgagaggaagactggataaaaaatttggagagtaggatatattcacaaaactggaaaaatggattcagtccttggtgggttatttgtgtctgcctcttat

SEQ ID NO: 494989 - DNA, 120 bp, Artificial Sequence
  ENSG00000163288_20 (sequence is synthesized)
atggacaggtccctttgccctctgcgtttcattggcggtcacctcgcccctggcccctgaggtcccactccgcacccgctccccgctccggcacacacacccggtcgcccctggtttgta

SEQ ID NO: 494990 - DNA, 120 bp, Artificial Sequence
  ENSG00000163288_21 (sequence is synthesized)
atttcgacacacacgggctactgcggtgttccaggggaaacgtgctcggcactattttgggaaggacgagtgactgttgcgccgtggatctgctggggcggagtctgagcgttactttag

SEQ ID NO: 494991 - DNA, 120 bp, Artificial Sequence
  ENSG00000163288_22 (sequence is synthesized)
ctgggtttccctgcgtgtttggatgaggagggcaccatctgctggcagccgggcggcctgcactagggtccccggaccggtggtcggcagccatcacctccccaggcgcggtgctggcaa

SEQ ID NO: 494992 - DNA, 120 bp, Artificial Sequence
  ENSG00000163288_23 (sequence is synthesized)
tccccatggccctcgcagtccgcgagcccggatgcaccaaggccctgccaccgagagcacagtctgggtttcaaagtgtcctctctctccaggttcaggcacacctggtggcaggagcaa

SEQ ID NO: 494993 - DNA, 80 bp, Artificial Sequence
  ENSG00000163291_0 (sequence is synthesized)
agaggaggctgcgacgctgccgggtccgccgcggcgctggcggcagtggccggtgtgagcgcagagccgggccctgggca

SEQ ID NO: 494994 - DNA, 120 bp, Artificial Sequence
  ENSG00000163291_1 (sequence is synthesized)
cgggggcgccagcggcgaagccccctccccggggaggcgggacctgggggagctcccgagccggggagcggcggcggccgggaacgatgcatcagaagctgctgaagagcgcgcattaca

SEQ ID NO: 494995 - DNA, 120 bp, Artificial Sequence
  ENSG00000163291_2 (sequence is synthesized)
gcattacatcgagctgggcagctaccagtactggccggtcctggtgccccgtggcatccgcctgtacacctacgagcagatccccgggtccctcaaggacaacccgtacatcaccgacgg

SEQ ID NO: 494996 - DNA, 120 bp, Artificial Sequence
  ENSG00000163291_3 (sequence is synthesized)
ctaccgggcctacctgccgtccaggctgtgtatcaaaagtttgtttattttatctaatgagacagtaaacatctggagtcatttgctgggtttctttctcttcttcaccctgggaatata

SEQ ID NO: 494997 - DNA, 120 bp, Artificial Sequence
  ENSG00000163291_4 (sequence is synthesized)
tgacatgacatctgtgttaccttcagcaagtgcgtccagagaagattttgtaatttgttctatttgtcttttctgcttccaggtctgtatgctttgctctgtgggctatcatcttttttc

SEQ ID NO: 494998 - DNA, 120 bp, Artificial Sequence
  ENSG00000163291_5 (sequence is synthesized)
ctgccatcggtcagaaaaaacatgtcgaagatggatggcattagattatgcaggaatttctattggaatactgggctgctatgtctcaggagtattttacgcattttattgtaataacta

SEQ ID NO: 494999 - DNA, 120 bp, Artificial Sequence
  ENSG00000163291_6 (sequence is synthesized)
ctggcgtcaggtgtacttgatcacagtgcttgctatgatcctggcagtgttctttgcgcagattcatcccaattacctcacgcagcaatggcaaaggctccgttctatcatcttttgttc

SEQ ID NO: 495000 - DNA, 120 bp, Artificial Sequence
  ENSG00000163291_7 (sequence is synthesized)
tgtttcgggatatggagtgattcctactcttcactgggtttggctcaatggaggaattggtgctcctattgtacaggactttgcaccccgtgtaattgtgatgtatatgattgctcttct

SEQ ID NO: 495001 - DNA, 120 bp, Artificial Sequence
  ENSG00000163291_8 (sequence is synthesized)
tgctttcctattctacatttccaaagtcccagagcggtactttccaggacaactaaactacctcggatcaagccaccaaatatggcatatccttgcagtagtgatgttatattggtggca

SEQ ID NO: 495002 - DNA, 120 bp, Artificial Sequence
  ENSG00000163291_9 (sequence is synthesized)
tcagtcaacagtgtatgtcatgcagtacagacatagcaagccttgtcctgactatgtttcacatttgtgaattaggtatggccacctggtgaattcagttgttaagcaatatataatggg

SEQ ID NO: 495003 - DNA, 120 bp, Artificial Sequence
  ENSG00000163291_10 (sequence is synthesized)
gaattgtataccccactatttctaagattcccattagttttccctttttcctttttaatatgagtaatgctttataaaaatgggaaaaaaagtatacttaaggatctgtagtaataactg

SEQ ID NO: 495004 - DNA, 120 bp, Artificial Sequence
  ENSG00000163291_11 (sequence is synthesized)
ctttacaaaatccttaaaactactaatttgctgcttgtacagaaagtgaaaattagttggcaatcataagaaacatctgaataacaacgatgaatgggaaactagtgttgaaataggatt

SEQ ID NO: 495005 - DNA, 120 bp, Artificial Sequence
  ENSG00000163291_12 (sequence is synthesized)
cattttacttagcaccagcttaatttccttaggaagggctcatgtccattagaaaatggagtcatcttatgtgcttaattattttcagttaattgtcaagtttaagtgcctaatcaaggc

SEQ ID NO: 495006 - DNA, 120 bp, Artificial Sequence
  ENSG00000163291_13 (sequence is synthesized)
aagtgttgtttcagcctatgcttaatgcaagctaggatagtgattttaaataatcactaaaatcactagatttaaataatcactaaaatgatttgtgagaaactggcacttcagatatta

SEQ ID NO: 495007 - DNA, 120 bp, Artificial Sequence
  ENSG00000163291_14 (sequence is synthesized)
tatcctttagctataggttcttctctccctaagaacattagatattttagttttccagaacaaaagctttaaacttctgcagtaagttgagagaagggttgagaagaggaaaagaacttc

SEQ ID NO: 495008 - DNA, 120 bp, Artificial Sequence
  ENSG00000163291_15 (sequence is synthesized)
tcattttctatcagataagaatcacattagaaactaagtacaagattagacaacaaattatgtggtcaaataatatagtcattagccacctaaacattttaattccagatattatttaat

SEQ ID NO: 495009 - DNA, 120 bp, Artificial Sequence
  ENSG00000163291_16 (sequence is synthesized)
tccatataataactgaattcttgtgagtggattacaggtttttgatcccaaaattccagagctttcaactctctgaatttgtagtcctgaatatcccagtggtgggggttcccagcattg

SEQ ID NO: 495010 - DNA, 120 bp, Artificial Sequence
  ENSG00000163291_17 (sequence is synthesized)
tgggtgctacttgcaaggccatagaatctagatggccctgtcttgaccctgaaatgaaccttaagccttagaacaaagtcatgcagatgccccatttgataataatcttattcacctgtg

SEQ ID NO: 495011 - DNA, 120 bp, Artificial Sequence
  ENSG00000163291_18 (sequence is synthesized)
ctctggtcctcggtttctgcatgtgttagcattgcattgataactcagaatcttgataaacacttaatatttgggcctgaagcattaaactttctttttattgtatatacttaaaaaata

SEQ ID NO: 495012 - DNA, 120 bp, Artificial Sequence
  ENSG00000163291_19 (sequence is synthesized)
gaactcactgccctatcatacattgtagccctcttattctttggtctttcatatgcattagttaaatcccttaaagtagacattcataaaaacttacattgtttattggagtataaaata

SEQ ID NO: 495013 - DNA, 120 bp, Artificial Sequence
  ENSG00000163291_20 (sequence is synthesized)
ttacccaagtttcttcatgagttgacatgagctgttttaaatactggtgtattttcagaacagtaaaattactgaatatcagaaaaaatgttaattgatgatgaagcttattcccaaaat

SEQ ID NO: 495014 - DNA, 120 bp, Artificial Sequence
  ENSG00000163291_21 (sequence is synthesized)
gccttttgtgcatatgatacttggaaagtcactaatgtgcctcagttaatacatcagtaaaatgttgtgtttcttttccagtgtagtgtttttggaatataaattccccatgctagtata

SEQ ID NO: 495015 - DNA, 120 bp, Artificial Sequence
  ENSG00000163291_22 (sequence is synthesized)
gtatctcagcaaagagaatttccccccaggaggctcagtaaaggaataccgtgtcttacccatcgttatgatggaaggctgctttgaaaatggctgttttaccttataaggttaaaattt

SEQ ID NO: 495016 - DNA, 120 bp, Artificial Sequence
  ENSG00000163291_23 (sequence is synthesized)
tgatccatatgttaagtgatagaagattttggtgcaacagtagtaggatatatttctcctagaacatcccttattggcttacatgattttattgccttttaatagatattttgtcatttt

SEQ ID NO: 495017 - DNA, 120 bp, Artificial Sequence
  ENSG00000163291_24 (sequence is synthesized)
ggccaaacaaaagacactgagtagttacacttaagttaaaaatgaggggaaaatcattattttaggtgtggagccatttttattataaaactttctcaaaataaaaaaacattgaatcat

SEQ ID NO: 495018 - DNA, 120 bp, Artificial Sequence
  ENSG00000163291_25 (sequence is synthesized)
ttcaatttttgcagtccctgtattagtatatgaatacatacttgccatttgaattaataacatgaaaagagtatactgtgtttttaaatccgtgtttctttgaatttaaagggtgtacag

SEQ ID NO: 495019 - DNA, 120 bp, Artificial Sequence
  ENSG00000163291_26 (sequence is synthesized)
gtctttctgtagggaaaattattccatgtaaacatttcaactctgtatgaaaatgttaaatattgtaagaaagttatcctctcattttttcactgctatgatatatttattataaaatag

SEQ ID NO: 495020 - DNA, 120 bp, Artificial Sequence
  ENSG00000163291_27 (sequence is synthesized)
ggaatgaatgaatgaatatggattgctgttaactagaaacacttctgtatgtcagtcagcatttaatgaccacctactgtgtgcacagcactactggtaaaattttgaagacattgttaa

SEQ ID NO: 495021 - DNA, 120 bp, Artificial Sequence
  ENSG00000163291_28 (sequence is synthesized)
actggtaaaattttgaagacattgttaacattaaaaaatattttaaagttgtctacaaatctgagccttgtaatgatgtatatttaagttatttttgtttttatagattaaagtaagatt

SEQ ID NO: 495022 - DNA, 120 bp, Artificial Sequence
  ENSG00000163291_29 (sequence is synthesized)
aaaagactggttttaattttaccaatgtgtgaactataaaagctttttgcctacagattttacattttaaaattatctatggctgttttaaattgtctagcaatttatatggttgtggtt

SEQ ID NO: 495023 - DNA, 120 bp, Artificial Sequence
  ENSG00000163291_30 (sequence is synthesized)
aactcatttaagaaacaattatctttctatattaagccattttcaaatagcaagacagtgcttgtctttttttgttattacactaactgcaattcagtaagctgcatgacaaaatatgta

SEQ ID NO: 495024 - DNA, 120 bp, Artificial Sequence
  ENSG00000163291_31 (sequence is synthesized)
ttatgtaaataaactgggtttactaaatatttttaactgctgcttgtcattctttgtaatacataacagctttaaaatcatattttagaatcaggaacgaagattcagggaatgtctgtc

SEQ ID NO: 495025 - DNA, 120 bp, Artificial Sequence
  ENSG00000163291_32 (sequence is synthesized)
acatcttatggcatcccacctggacagaatatccgatttgaagattgtgattgacttccgtaaaactgtacaactctccatttggcaggtacctactagataatactttgccctgtatta

SEQ ID NO: 495026 - DNA, 120 bp, Artificial Sequence
  ENSG00000163291_33 (sequence is synthesized)
aatgtcaaggggcaaagcctattcctgtgaattcctgctggttgctttgctgcattaggtccctgtccactgtaaatcatcattcctgggaattctacttctgcccaagtgtgtaaagaa

SEQ ID NO: 495027 - DNA, 120 bp, Artificial Sequence
  ENSG00000163291_34 (sequence is synthesized)
tcagctcacctattagagaaggggtagaaataccttctgtgtgcattatcacaataactgtgtttacactaaagaggtgtaaatacagtcctctgaaattttgtaccagaattcccaagt

SEQ ID NO: 495028 - DNA, 120 bp, Artificial Sequence
  ENSG00000163291_35 (sequence is synthesized)
agtgtaatgagataatgatccagaactgaaactacccttaagaaaacatttttggaagggagaggtaaatagcagtagggggtttcttgtgaaaaattaacctccatccttaagagggct

SEQ ID NO: 495029 - DNA, 120 bp, Artificial Sequence
  ENSG00000163291_36 (sequence is synthesized)
gaaatgaacagccaccaaggttctagtcctgctctataaaatctgagatcaaaatactacctaacctgcacataatctcaattgtgacaaccatctgaactatctcatttaatatgtaac

SEQ ID NO: 495030 - DNA, 120 bp, Artificial Sequence
  ENSG00000163291_37 (sequence is synthesized)
aacaaatacaagctcaagctttcaatatgagaatattaactacatgttacatatgatgcttgacctgggcttccttaaaaaggtattcgttatccaaaataaatagctcaaattgcagca

SEQ ID NO: 495031 - DNA, 120 bp, Artificial Sequence
  ENSG00000163291_38 (sequence is synthesized)
tatattcatctcaagtaactataactgaatttgaacagtaatacactgcaaactattctttgttaatagaacttttctaatcatttgtgttattttgctttgtaccattcattttcatta

SEQ ID NO: 495032 - DNA, 120 bp, Artificial Sequence
  ENSG00000163291_39 (sequence is synthesized)
aaaagatacaaagcccctttttttcacataactttagataaatgttacaacttcagaaaaagttaattcataaaaataggatgaacctttccacaggctaccaaagactccagtttttgg

SEQ ID NO: 495033 - DNA, 120 bp, Artificial Sequence
  ENSG00000163291_40 (sequence is synthesized)
ataattgaggattacaatgttatttaagcaaataaccagtattaattcagccaaagatgttatcagttttaaagatttttaaaaatttataatgtggaagctgtaaaataagttattcag

SEQ ID NO: 495034 - DNA, 120 bp, Artificial Sequence
  ENSG00000163291_41 (sequence is synthesized)
aaggcactacacaatattgtttttgccttactgtcatcactcgagtatcagtaattatgactcactgaaaaagtcgtgctattaagtgttcttgtggcaaaaactcttaagtcaaatggg

SEQ ID NO: 495035 - DNA, 120 bp, Artificial Sequence
  ENSG00000163291_42 (sequence is synthesized)
ttttcttacctaaattgtaaactctgagctccttaagaatagggatctaatcttagcaacttttctattccactagctgctacataataggtgcttaatgtttgtggtgtgaatgaaata

SEQ ID NO: 495036 - DNA, 120 bp, Artificial Sequence
  ENSG00000163291_43 (sequence is synthesized)
actgaatttgaatagaagtttacatccaaaagtcataataagacaaataatgaaaaactccaaagtcactgattataaagaatatgcaatccatttgggatttattgcatttaaagaaaa

SEQ ID NO: 495037 - DNA, 120 bp, Artificial Sequence
  ENSG00000163291_44 (sequence is synthesized)
cagattaaaacaggtatgataaatacagtaagaaaataactttaaatttcaaacaaaacagtgaatcagggacagaattcagtcaaaaagaataagcagtgtaaaggcaataaagtaata

SEQ ID NO: 495038 - DNA, 120 bp, Artificial Sequence
  ENSG00000163291_45 (sequence is synthesized)
aaatcagttagtgcttaattagatatggcaggggaaaaggggtgggagggggagactgagtctatctcataattgtttcccagctatatttgaggactgaagttactttagcaagtatgt

SEQ ID NO: 495039 - DNA, 120 bp, Artificial Sequence
  ENSG00000163291_46 (sequence is synthesized)
tttgtaacaagtagaaatacaataaagatgtaaatttgctttatttaaaggttaaagttatttgcttagtggtacataaaaggcttcagaaaattcaagtttaacaaaaaatggaagtgt

SEQ ID NO: 495040 - DNA, 120 bp, Artificial Sequence
  ENSG00000163291_47 (sequence is synthesized)
aatcaaagaaagtgcacttaaagctgtttgccagcaattaaaaagtagcttctatacagcttctattagatgacttttcaatcacaaaaagagcatagtcataaaaacaattctttcaaa

SEQ ID NO: 495041 - DNA, 120 bp, Artificial Sequence
  ENSG00000163291_48 (sequence is synthesized)
agtagcagtataaattttaaaataaaacaaaaataaccccaaatcatgaccctttgcattatcatctaccttattctcttagtagcttttgtaaaccctcactaggagtgaatgttctct

SEQ ID NO: 495042 - DNA, 120 bp, Artificial Sequence
  ENSG00000163291_49 (sequence is synthesized)
tagatatgattgtggttgcaattccattttttaaaaattcacattaactccacagtagagagatgtgacatgcatgtgtgtacatatttttatcttaatatataaaacaccactgagtat

SEQ ID NO: 495043 - DNA, 120 bp, Artificial Sequence
  ENSG00000163291_50 (sequence is synthesized)
aaaagttctcaaataaactattcatcatttatggtattctcacagtagatatgtcatctcattctcacagtagactgtcaactcaataattggacctaaaataacaagtttgctaaaaag

SEQ ID NO: 495044 - DNA, 120 bp, Artificial Sequence
  ENSG00000163291_51 (sequence is synthesized)
aaaaaaaaatgagaaaaaagtttactgcacattctaaatatattaaaaacaaatgtacccaagcgcctcaaaactagtgatattaatacacttgtaccttctaacagtgcttacgtgaag

SEQ ID NO: 495045 - DNA, 120 bp, Artificial Sequence
  ENSG00000163291_52 (sequence is synthesized)
taccaaaacctaaaataaaccaagcagagtagctgacttgtaagaaaactgctctgcctggtgaacttcagcatagaagagtgggctccaccttagattttccaccagcaagaggacaac

SEQ ID NO: 495046 - DNA, 120 bp, Artificial Sequence
  ENSG00000163291_53 (sequence is synthesized)
agtctatcactcttaaacaataaacagggtaagactgaaagttgtgtctatttgcaaatccggataatgtcgtaactatacccaacacgtacacagggattggggtaagggaaaataatt

SEQ ID NO: 495047 - DNA, 120 bp, Artificial Sequence
  ENSG00000163291_54 (sequence is synthesized)
acactcctgaataaatgttctagtcagttaaattttcatccggcctacaacctttcctcctccacctattatacttaccatgcaatttttgtgtcttagcagatacattcttcaatgcca

SEQ ID NO: 495048 - DNA, 120 bp, Artificial Sequence
  ENSG00000163291_55 (sequence is synthesized)
taaaaagctgatctttttaatactaacattttactgacgtgatattaaaataagcaaatggtccactttttaaaggattattcaaaatcaacaagcattattaaagctgttaagaaacaa

SEQ ID NO: 495049 - DNA, 120 bp, Artificial Sequence
  ENSG00000163291_56 (sequence is synthesized)
ctttggcctcaagatttttgctagcttcataataatttacttctcttagtgatgttcaagtataacaggtttagttataactacatcctaaagaagcacaggggacacccaaataatatt

SEQ ID NO: 495050 - DNA, 120 bp, Artificial Sequence
  ENSG00000163291_57 (sequence is synthesized)
agggaaaaaaaaccccaaatatatatatatatatatatttgcttagtggtacatatataataacctttcttccttccttaaaccagaattgaaccatcccataatagagccaaactttta

SEQ ID NO: 495051 - DNA, 120 bp, Artificial Sequence
  ENSG00000163291_58 (sequence is synthesized)
ttgagtgctgtgtgccaggtactgtgttaagcactttcacatatcttgggagctttattctcataattctcacaagggaataacctgagcatcagctgtgtggagtgacctacaccttga

SEQ ID NO: 495052 - DNA, 120 bp, Artificial Sequence
  ENSG00000163291_59 (sequence is synthesized)
ccatgattctgggggatgatgaatgaaaatgcaaagtataaatctatactccttaggaaaatgcctctactacaacacaaaggaatctctccatttctatcctattgaacccccaattga

SEQ ID NO: 495053 - DNA, 120 bp, Artificial Sequence
  ENSG00000163291_60 (sequence is synthesized)
atcctgtatcttttctctgagctacaatcttgaaagaagaaagtcactgtgctgtgttataagaatgtaaatattttatgctgtcagttgtttcctcagaatttataagtcaaagggtct

SEQ ID NO: 495054 - DNA, 120 bp, Artificial Sequence
  ENSG00000163291_61 (sequence is synthesized)
acatcagtgtcagaatcatttaaaattattcagtgtattgaaaagcaagtaaaactctaggtatttcatgtttacatctgaaggagacattagttcatcctctaccccttttctaaatga

SEQ ID NO: 495055 - DNA, 120 bp, Artificial Sequence
  ENSG00000163291_62 (sequence is synthesized)
tgaaactcatgaggtctagcagagaccaaggactaatacaatcaagaagcatattgtgtacacctcaacagattttcattaaaaaaaattgtttgatacaaacctactgtagttcatgaa

SEQ ID NO: 495056 - DNA, 120 bp, Artificial Sequence
  ENSG00000163291_63 (sequence is synthesized)
tttactatgtgtaatcatcaactcttcacttttaaaagaaagtatcacttgaatctattttgtaaagtttttaaacatctacttgagcatttgcattagcagtattaatcaacctgagaa

SEQ ID NO: 495057 - DNA, 120 bp, Artificial Sequence
  ENSG00000163291_64 (sequence is synthesized)
tcagaaaaaaaaaaaaaggtgcaaacatatttgcctttggcacgaggacaagtaattggtgcagtccagctctaaataataatgtaatgcttggtctgcctctgctacattgtgattcac

SEQ ID NO: 495058 - DNA, 120 bp, Artificial Sequence
  ENSG00000163291_65 (sequence is synthesized)
atattgcttccctatccacaaatctatatttgatttagcatataaaagaagggaaaaagcaataaaaagacaaatatgtggtttagttacatatactttgcttctttccaagttcagaac

SEQ ID NO: 495059 - DNA, 120 bp, Artificial Sequence
  ENSG00000163291_66 (sequence is synthesized)
tgtgaaaataggcaaatagcttatcccattggggcactataagagattcctaataaaattactcgtaaaatatactttgagatcgaagagagttaatttaaaatataaaaatcaaagaga

SEQ ID NO: 495060 - DNA, 120 bp, Artificial Sequence
  ENSG00000163291_67 (sequence is synthesized)
gtgccagttgatgagtttctactcctttctgtaaatagcattaactgttctagaaacttccaaatgttaatctgatagcgcagcacaattatatcttaaaatagtcatagacacaggaag

SEQ ID NO: 495061 - DNA, 120 bp, Artificial Sequence
  ENSG00000163291_68 (sequence is synthesized)
cacagatactatattcacattaattcacatatgtaatctctatcattaaatgatttctataaaacctcaagtttctaattaggatttgtggtgtaaaaaaaggcaaattggtagctgggt

SEQ ID NO: 495062 - DNA, 120 bp, Artificial Sequence
  ENSG00000163291_69 (sequence is synthesized)
tcttttcagtaaagacacaatcaactagcagaattaagatgctagtccaccttatatgcattttaggatctggtatattagtgcagaggtacttgcagcaggatgcatgaatcctgcctt

SEQ ID NO: 495063 - DNA, 120 bp, Artificial Sequence
  ENSG00000163291_70 (sequence is synthesized)
tatataaggctttgtgggtgtcaccattctgtgcactttattaaaactactccaccccccaaaacctaataaaaataattgttgcttatgacttggggaatatttggtgaagttgctaat

SEQ ID NO: 495064 - DNA, 120 bp, Artificial Sequence
  ENSG00000163291_71 (sequence is synthesized)
aaagtacattgttaaatgcaacatgatttcacattgtaaatgtcttgaaaattcagtttccgctacatattttcttcataaaataaaatttttatacaacccttgtcctccaatttttcc

SEQ ID NO: 495065 - DNA, 120 bp, Artificial Sequence
  ENSG00000163291_72 (sequence is synthesized)
tccaatttttccaataatctgctttattagggccatcacaataaaagtttggggcaagaagccatgcataaagtgtttctaaagtagtgaatgttttctgttctgtatctttttttcttc

SEQ ID NO: 495066 - DNA, 120 bp, Artificial Sequence
  ENSG00000163291_73 (sequence is synthesized)
tacaaatgtcagatatttctcttcatatttttgttctaggcttctgtgcgacgatagtccatttttttaatttgttttaactgacaaaaattatatatatttatcatgtataacattgtt

SEQ ID NO: 495067 - DNA, 120 bp, Artificial Sequence
  ENSG00000163291_74 (sequence is synthesized)
ttggaatatgtaagttgtggaatagttaaattgagctaattacacattatttcatatgcttatcattagatattccattttaatggcacttgtttttaaaaatgaaacagagttttaggc

SEQ ID NO: 495068 - DNA, 120 bp, Artificial Sequence
  ENSG00000163291_75 (sequence is synthesized)
acaatagtcagttacttctggctctgctttgtggagaaaggtgtatggactgaaatctctgcactctccagataataactttctaatgctttaagataactagattgtttttaactgtct

SEQ ID NO: 495069 - DNA, 120 bp, Artificial Sequence
  ENSG00000163291_76 (sequence is synthesized)
ggaaattaaaagagaccttaaaaaaaattcacaagtgtaactagtgtatgtagaaataaccctaattttagggatatgcacataaaaatgacattctgatatcaaaaataacagtttcac

SEQ ID NO: 495070 - DNA, 120 bp, Artificial Sequence
  ENSG00000163291_77 (sequence is synthesized)
tgtcccttctcagtggctacacacctagaaaggtgccatgtgctttcactggaagtaccacacttgcatttctgtgttgtgatgtcagtagcagaaacccttagttagagcttgcaattt

SEQ ID NO: 495071 - DNA, 120 bp, Artificial Sequence
  ENSG00000163291_78 (sequence is synthesized)
agctcccttttctcctgaagaggaatcaagttactaccctgtagagatacttcattcttctatttggtttatttagaaatcacctattctgactgatctttaagaatgaatgctataaag

SEQ ID NO: 495072 - DNA, 120 bp, Artificial Sequence
  ENSG00000163291_79 (sequence is synthesized)
agctaccaaattttctttcaaattcataaaactgttcacacttttttgaaacaggagttaatgccgagaatccatcagaagtatctactgtttagaaggaaatggagcagcaccaaatgg

SEQ ID NO: 495073 - DNA, 120 bp, Artificial Sequence
  ENSG00000163291_80 (sequence is synthesized)
gtctaattcgactggttgggactgttgggactgatgtggagtgatgctttgcaccacaagttctgtaaagggcacggcaccaaaatcatccattttcaatacatctgcactatggaatga

SEQ ID NO: 495074 - DNA, 120 bp, Artificial Sequence
  ENSG00000163291_81 (sequence is synthesized)
ttgattatggaaatgattcctctctttccaaatgttacctaaaactttcaaagggctttcacttttcctttcatcctgatcatgtgagttgagtccagtaggtggtgttgtcactgtttt

SEQ ID NO: 495075 - DNA, 120 bp, Artificial Sequence
  ENSG00000163291_82 (sequence is synthesized)
atggttatgaactagtgacaaagctgacattagactttgagtcttctgactcccaagcactatttcttttaaaaagtagaacaccgtcaactaccatttacttctctatatgccagctgg

SEQ ID NO: 495076 - DNA, 120 bp, Artificial Sequence
  ENSG00000163291_83 (sequence is synthesized)
attactgtgctatttatttataattttcattttgtaatatagttattttaaattttctccttcattattattatctacattttacccatgagggaactgaggctttccctcatggctcta

SEQ ID NO: 495077 - DNA, 120 bp, Artificial Sequence
  ENSG00000163291_84 (sequence is synthesized)
catggctctacatgtagagtgagctctacagtagccatgtaaggcacagagctagaatccaagcccataaatgtttgaattgaaagcctagcctcttaactacttccctgaatatcatgc

SEQ ID NO: 495078 - DNA, 120 bp, Artificial Sequence
  ENSG00000163291_85 (sequence is synthesized)
tgggttcaagacccacatcaaccactttctagttacgtgggctaaaatcacttccacggtgaatcagagaagggattgtaccactcgtcacgtgtgttgggaaagaagaaagggtgagaa

SEQ ID NO: 495079 - DNA, 120 bp, Artificial Sequence
  ENSG00000163291_86 (sequence is synthesized)
accctggcctaaacaatccatcccacagatcctcaggcattcctttgtgtacttggtttttcaccactgagctttaaataagaatggaaatacaagggaaaacctgcgttgtaaacatga

SEQ ID NO: 495080 - DNA, 120 bp, Artificial Sequence
  ENSG00000163291_87 (sequence is synthesized)
ggatttgggaacagatctaggacatgccactgaattgaagaccacccatcttccaggcagggccagaattacagaaaacaattctggacaactaaactacctcggatcaagccaccaaat

SEQ ID NO: 495081 - DNA, 120 bp, Artificial Sequence
  ENSG00000163291_88 (sequence is synthesized)
gttcaatgtactcagcagaaatcctaaacactcaattcttcttttggctttacattttgatgatgttacatgtgtaacttgcctgaatgagaaatgaaaggaacagaaccaaaaggatct

SEQ ID NO: 495082 - DNA, 120 bp, Artificial Sequence
  ENSG00000163291_89 (sequence is synthesized)
tctggaggatggttatgtggagcagaaagtgagtctacattcttatctgaggatgctctctcctcgagcctatctgcaaaaataagatgaaacgaaataaaaaatgaaatgaaataaaaa

SEQ ID NO: 495083 - DNA, 120 bp, Artificial Sequence
  ENSG00000163291_90 (sequence is synthesized)
gagggtgccatgacaggtctggagaatggaagggcttggcaccgaaggggtccaacaggctctcctcaggttgtaagacattccccctatctttcccatcagtcagtgcaacactaatgt

SEQ ID NO: 495084 - DNA, 120 bp, Artificial Sequence
  ENSG00000163291_91 (sequence is synthesized)
tctccttggagtctgagatggttaaaaattcattgctactttgagagtctcggcggcccacttttttgtgcctgcgagccctctctggagtgcgataggtaggcttcaaagtcttctttg

SEQ ID NO: 495085 - DNA, 120 bp, Artificial Sequence
  ENSG00000163291_92 (sequence is synthesized)
tgctagttggcgtgccatgatgccgcttcccattacttttggacatatcctgctttgtgcgcctttggcgagaggacagtttctgtaagctgcgctgtttgactttttgctgctggctcc

SEQ ID NO: 495086 - DNA, 120 bp, Artificial Sequence
  ENSG00000163291_93 (sequence is synthesized)
ccgttatttcatcaaagggcacaagcccaaaaaggtcctcattgctttcacttttacttgttgatgtgaggaagggctgaaatggagtggagccaaatacatctacacttttgggataac

SEQ ID NO: 495087 - DNA, 120 bp, Artificial Sequence
  ENSG00000163291_94 (sequence is synthesized)
cagggatagtatgtgcctcaggccccactgcatggcattcttgtacattcaccttcttgctaaaaggcgcctttgtgaatacatcaaattcctcctgctccagtcctgcagcaggaaacc

SEQ ID NO: 495088 - DNA, 120 bp, Artificial Sequence
  ENSG00000163291_95 (sequence is synthesized)
tgtgttgagggaggttcttttcattcttttcttgctggggctgttgagcacgcactgcaaagaaggggacagcgccaaatacatcaaactcctgtttgggagtctccactgcaacatcag

SEQ ID NO: 495089 - DNA, 120 bp, Artificial Sequence
  ENSG00000163291_96 (sequence is synthesized)
aggataattgggctgaggtgaggagtattgtattaagatcttgggttggtccactgccagatctgtctctgtagacagagctcatgtcactgtactttgctttagcctgctcataatcag

SEQ ID NO: 495090 - DNA, 120 bp, Artificial Sequence
  ENSG00000163291_97 (sequence is synthesized)
aatcagagctatgtttctcctcttcttcctcatcttcagaatccatgaggagaggcctatgacccagattttctggttcagtatcatcatcattaaaatctccttgttccccctgaagaa

SEQ ID NO: 495091 - DNA, 120 bp, Artificial Sequence
  ENSG00000163293_0 (sequence is synthesized)
gcgggtgcgtgtggagaggcccaggtgaggagcaagcgcccgcgttccggaagcccgctcccggggccatgggggcacaggtgaggctgccgcccggagagccctgccgagaaggatatg

SEQ ID NO: 495092 - DNA, 120 bp, Artificial Sequence
  ENSG00000163293_1 (sequence is synthesized)
tgctgtctctggtctgtccaaactcctcccaggcttggtgtgagatcacaaatgtgtcacagctgctggcttctcctgtgctctacacggacctgaattacagcataaacaacttgagca

SEQ ID NO: 495093 - DNA, 120 bp, Artificial Sequence
  ENSG00000163293_2 (sequence is synthesized)
tttcagcaaatgtagaaaacaaatacagtctttatgtgggcttggtactggcagtaagctcaagtatttttattggctccagcttcatactgaaaaagaagggcctcttgcaactggcca

SEQ ID NO: 495094 - DNA, 120 bp, Artificial Sequence
  ENSG00000163293_3 (sequence is synthesized)
gcaagggctttactagagctggacaaggtggacattcttacctgaaggaatggctctggtgggtaggattgctgtcaatgggagcaggagaggctgcaaattttgctgcttatgcttttg

SEQ ID NO: 495095 - DNA, 120 bp, Artificial Sequence
  ENSG00000163293_4 (sequence is synthesized)
cacctgccaccttggtcacccctctgggtgctttgagtgttctcataagtgcaatattatcttcctactttttaaacgagcacttgaacattcatgggaaaataggctgcatattaagta

SEQ ID NO: 495096 - DNA, 120 bp, Artificial Sequence
  ENSG00000163293_5 (sequence is synthesized)
tattggggtcaactgtgatggttatccatgccccacaagaagaggaagtcacatctttgcatgaaatggaaatgaaattgagagacccagggtttatttcctttgctgtgatcataactg

SEQ ID NO: 495097 - DNA, 120 bp, Artificial Sequence
  ENSG00000163293_6 (sequence is synthesized)
tgatctccttggtgctgattttgattgtggctcccaagaaaggacagaccaatatattggtttatatttcaatctgttccttgattggagcgttttcagtttcttctgtgaaaggcctgg

SEQ ID NO: 495098 - DNA, 120 bp, Artificial Sequence
  ENSG00000163293_7 (sequence is synthesized)
gaattgccattaaggagctgatagaatggaagccagtttacaaacatccgctggtctttgttttgctggctgtacttgtgctttcagtaactacacagattaactatctcaacaaggcac

SEQ ID NO: 495099 - DNA, 120 bp, Artificial Sequence
  ENSG00000163293_8 (sequence is synthesized)
tggacacctttaatacctctcttgtgacacccatttattatgtattcttcacatccatggtagtgacttgctctgccatcttattccaagagtggtatggcatgacagctggagatatca

SEQ ID NO: 495100 - DNA, 120 bp, Artificial Sequence
  ENSG00000163293_9 (sequence is synthesized)
ttgggaccctgagtggattcttcactattatcattggcatcttccttctacatgcttttaaaaatactgacattacttggagtgagcttacatccactgctaagaaagaagccgtctctc

SEQ ID NO: 495101 - DNA, 120 bp, Artificial Sequence
  ENSG00000163293_10 (sequence is synthesized)
tgaatgtcaatgaaaacaattatgttttactagagaacttggagtgttcagccccaggatacaatgatgacgttaccttgtttagtagaactgatgactgaagtctctagaaacactgag

SEQ ID NO: 495102 - DNA, 120 bp, Artificial Sequence
  ENSG00000163293_11 (sequence is synthesized)
ttttaaccaatatgagacacacgaagaggaaaatgaatgcttgcttcttggaagaactgctaggaaagttagcatttttgcagttctaactaatttagatgtgaggccaagtaaaaatgc

SEQ ID NO: 495103 - DNA, 120 bp, Artificial Sequence
  ENSG00000163293_12 (sequence is synthesized)
catttttttggccattgaatttgaaaatcaaattgattatcctccagaatctctacaaactttgaaatactctctaaggatcaaagaagtcaaagagctatgtgtgtctcagaataatct

SEQ ID NO: 495104 - DNA, 120 bp, Artificial Sequence
  ENSG00000163293_13 (sequence is synthesized)
ccttcttctggtcacagtatctttgtctctgccaggtggctcttcatttctttggtagctatttttagacttacagtcattcaccaatatacagttagcagtgttctgatagacacagta

SEQ ID NO: 495105 - DNA, 120 bp, Artificial Sequence
  ENSG00000163293_14 (sequence is synthesized)
tcagtcatattctccgttgagtcataatttcaaactcaacaagatttcagaaaggtataatcatgtaatttctcatattaaaactgagaagagaggccaggcatggtggttcacacctgt

SEQ ID NO: 495106 - DNA, 70 bp, Artificial Sequence
  ENSG00000163293_15 (sequence is synthesized)
ggtggttcacacctgtaatcctagcagccttgggccacaaggcgagaccctgtctctacaaaaaatacaa

SEQ ID NO: 495107 - DNA, 120 bp, Artificial Sequence
  ENSG00000163293_16 (sequence is synthesized)
gtggcacatgcctgtagttccagccacccgggagcctgaggtgggaggattgcttgagtctgcgaggttggggctgccgtgagcccagattgcgccattgtgctccagcctgggtgacaa

SEQ ID NO: 495108 - DNA, 120 bp, Artificial Sequence
  ENSG00000163293_17 (sequence is synthesized)
agcaaggccctgtctcaaaaaagaagaagagaaagggccaggggcttttgctttaaaaaactttttttaaaacagaagtgaaaccacgggtgctttgttcttccttctgcacctccttct

SEQ ID NO: 495109 - DNA, 120 bp, Artificial Sequence
  ENSG00000163293_18 (sequence is synthesized)
taaactagatagctaattagttattttaagaaaaaagaaatttaaaaaaaagcctgctttatttgttagtgggctagaatacacaagacatacccacccatgaagagtttatgaattgta

SEQ ID NO: 495110 - DNA, 120 bp, Artificial Sequence
  ENSG00000163293_19 (sequence is synthesized)
acttattgacattatcataggaatttactaccagttaaagagggagaacggaggaagagaaaaatacttcagataaaggaaaaagttttcttctcacaaaaacacagacacgtgattgtt

SEQ ID NO: 495111 - DNA, 120 bp, Artificial Sequence
  ENSG00000163293_20 (sequence is synthesized)
ttcacaggttccattaattaactcaggtctggaagacataggacaaaatggagtttctgaagaagtccaggtgaattcagctttggagtcacttatgttcattttttttccttttctttt

SEQ ID NO: 495112 - DNA, 120 bp, Artificial Sequence
  ENSG00000163293_21 (sequence is synthesized)
actattatcctaaaggttatttttcttgttgatatagagatttttgtaaaagattgctacattatttcaggattatatcctacatttcgattgctctcaaatgttttatccctaaagagt

SEQ ID NO: 495113 - DNA, 120 bp, Artificial Sequence
  ENSG00000163293_22 (sequence is synthesized)
aagcaactagaaaaatctttgtgaaaaatctgaacaaattatcataatggctctcttgaaattttgcactttcacccttattaaggaaattataattagttactaacctttaaaaataga

SEQ ID NO: 495114 - DNA, 120 bp, Artificial Sequence
  ENSG00000163293_23 (sequence is synthesized)
tatattctaataggatagaaagttaacttcctggcaaacaaaatactaagatctcaggggctactgcaggaaaatacctttttcgcacattaaaatgtttataaaattttcccctctcat

SEQ ID NO: 495115 - DNA, 120 bp, Artificial Sequence
  ENSG00000163293_24 (sequence is synthesized)
ttcaaatgcatggcaggaataacatttttggtggtctttaatgtgatggacagatttactgtcacttattgattttatggaaaataaattggctatcttatttttataacaatcttattt

SEQ ID NO: 495116 - DNA, 120 bp, Artificial Sequence
  ENSG00000163293_25 (sequence is synthesized)
ttctcaaaacaaaaatcctaaccaaaaagttgtcattaaaaaaaaaaaaattcaggtagactgaatgtttttctgctctaaccttaaatgttattaggtttggtttttgtttctaagcta

SEQ ID NO: 495117 - DNA, 120 bp, Artificial Sequence
  ENSG00000163293_26 (sequence is synthesized)
cttcaagactacctgaggtaataatggtaaactttattattcagaattcgattaaactaacttcagcatttccacagttctattaaacaatgactgatgttcacaatgacaacctacctg

SEQ ID NO: 495118 - DNA, 120 bp, Artificial Sequence
  ENSG00000163293_27 (sequence is synthesized)
agatggctgcaaggccctaatgttccattatacattatagtcttttcagcatagtttagtgttgagtgcaattctaatgcattctacgtttttgaaaatcgataatccatggaaggtcca

SEQ ID NO: 495119 - DNA, 120 bp, Artificial Sequence
  ENSG00000163293_28 (sequence is synthesized)
tgggttgatacctcaggtcaaaaatgtgtttactctgttgattgctgtttcactttacttgtatatcagatatataagctatgaacacaagtttgtagtaaaagtatcttctgtctgggc

SEQ ID NO: 495120 - DNA, 90 bp, Artificial Sequence
  ENSG00000163293_29 (sequence is synthesized)
ggtgggaggatttctagtcaactagaccccatgtctctaaaaaatgtaaaaaacatcaagaggctgagtcaggaggatcatttgagctta

SEQ ID NO: 495121 - DNA, 120 bp, Artificial Sequence
  ENSG00000163293_30 (sequence is synthesized)
tagaccccatgtctctaaaaaatgtaaaaaacatcaagaggctgagtcaggaggatcatttgagcttaggagttcaaggctgcagtaagttatgattgtgccactgcattccagcctggg

SEQ ID NO: 495122 - DNA, 120 bp, Artificial Sequence
  ENSG00000163293_31 (sequence is synthesized)
agtatcttctgataaagtggcatttgaaaattgcagaaattttaatattttttcttttaatattaagaactttattgatctctctaggacaccttggtgaggaaattaatggcacttttc

SEQ ID NO: 495123 - DNA, 120 bp, Artificial Sequence
  ENSG00000163293_32 (sequence is synthesized)
ttgacatccaacctgggactctggtgattctgtgttctggcgaatttaagtttcagacatttctttgtgtcaccttttacaaggtgtttgcccttggtacgttatgaccaggtcaaaggt

SEQ ID NO: 495124 - DNA, 120 bp, Artificial Sequence
  ENSG00000163293_33 (sequence is synthesized)
tcccaaacacaaggctcattgtgtaccctggacaggaaattgaactgatgttgacatgtatgcatgcccaggaggaagactgggaaagatttaatgagttgaagtatgctgagaaacaat

SEQ ID NO: 495125 - DNA, 120 bp, Artificial Sequence
  ENSG00000163293_34 (sequence is synthesized)
caatgaaatatttgaaaactgtctacataaaagttactgatgcacatgcattaaaaaaaaaaatgttgttgcaaatctaacactaaaaaatttttgactgggtgcagtggctcacacctg

SEQ ID NO: 495126 - DNA, 120 bp, Artificial Sequence
  ENSG00000163293_35 (sequence is synthesized)
aatacaaaaattagccaggcatggttgcgggtgcctataatcccaactaccccggaggctgaggcagggaattgcttgaagcaaggaggggcaggttgcagtgagccaagattgtgccac

SEQ ID NO: 495127 - DNA, 120 bp, Artificial Sequence
  ENSG00000163293_36 (sequence is synthesized)
tccgtctcaaaaaaaaaaaaaattcccaaataggaagatattttctaaggaagaataaaatgctggacccctatattcagactattagtcttaactggtagtttatgtatatattttaat

SEQ ID NO: 495128 - DNA, 120 bp, Artificial Sequence
  ENSG00000163293_37 (sequence is synthesized)
actttgtcatcatgtacatatcttaagatttattatgtgaatatctgcatgtgtgttattaaggattacaaagttgtgctcacacaggacaaatggaaagattttcctacttctgtaaag

SEQ ID NO: 495129 - DNA, 120 bp, Artificial Sequence
  ENSG00000163293_38 (sequence is synthesized)
ataagtttcattatacttttgtcttacaattttattcttaggtcaatggttatttattataagttcagattgcacaattttcataagaccctttggatttagcacatgaaattaacacat

SEQ ID NO: 495130 - DNA, 120 bp, Artificial Sequence
  ENSG00000163293_39 (sequence is synthesized)
attttaaagtattaaatacatggaaagcatctggcattatgcctgataataggcacttagtaaaatgtacttttctttgaatcaacatttgaattcttacagtcttgtcactagagactt

SEQ ID NO: 495131 - DNA, 120 bp, Artificial Sequence
  ENSG00000163293_40 (sequence is synthesized)
aaaaggaccattgagtgcctatttttatacattcatcttttctcaatttgtcacattatctcattttaaataatgcaagtgaaagtgaattcatcatactatctcaacaccaatacaaaa

SEQ ID NO: 495132 - DNA, 120 bp, Artificial Sequence
  ENSG00000163293_41 (sequence is synthesized)
ttattccaataaaaatatttttcttaataaaaccagaaaaactgaactaaatgctatttagccccgccaacaaagctttgtggaaaaatatatgaatatatgaaatgttctcaaatattt

SEQ ID NO: 495133 - DNA, 120 bp, Artificial Sequence
  ENSG00000163293_42 (sequence is synthesized)
tgaataaactgttcatgaagccttatattttgcaagtgtttttactgttgattttagaaagtttataaatcttaaatgtttgtatatttttcatttgcaataaaatgttatttaattatg

SEQ ID NO: 495134 - DNA, 120 bp, Artificial Sequence
  ENSG00000163293_43 (sequence is synthesized)
aaaagagtggaaggaggtgagcgcagcgaggaccgaggcgaaggagggtcagtgcggaaacccggtgtgaggggccgagtgaggaaggttcctgcagggcggcgaccgggttttaggagg

SEQ ID NO: 495135 - DNA, 120 bp, Artificial Sequence
  ENSG00000163293_44 (sequence is synthesized)
tcgcggccctgcctttaccggagggcgagtccccgccaagcccgggctttggagatggaccgaagaggggagggaggactaggtacagaaataaaccgcggagcaagaagcacacagtgc

SEQ ID NO: 495136 - DNA, 120 bp, Artificial Sequence
  ENSG00000163293_45 (sequence is synthesized)
tacaccccacggaaagctacgtctccttaccgactgcgcacgcccccaacagactacaactcccagaagcccccgcccgcgttccggcgactgcgtggcagcacgggccgcttccttatc

SEQ ID NO: 495137 - DNA, 120 bp, Artificial Sequence
  ENSG00000163293_46 (sequence is synthesized)
cgagaaattaacaacataaagaagaaaatgtttgcgaagaagattttatgtgatcaatcaacaaagacatgaagcatggagattttgagaaaggtcaggaaactatagagaaagacaggt

SEQ ID NO: 495138 - DNA, 120 bp, Artificial Sequence
  ENSG00000163295_0 (sequence is synthesized)
cggttcctggtgtccccacttcgcctccctcctgctgcccccaagacatgcaggggccctgggtgctgctgctgctgggcctgaggctacagctctccctgggcgtcatcccagctgagg

SEQ ID NO: 495139 - DNA, 120 bp, Artificial Sequence
  ENSG00000163295_1 (sequence is synthesized)
aggagaacccggccttctggaaccgccaggcagctgaggccctggatgctgccaagaagctgcagcccatccagaaggtcgccaagaacctcatcctcttcctgggcgatgggttggggg

SEQ ID NO: 495140 - DNA, 120 bp, Artificial Sequence
  ENSG00000163295_2 (sequence is synthesized)
tgcccacggtgacagccaccaggatcctaaaggggcagaagaatggcaaactggggcctgagacgcccctggccatggaccgcttcccatacctggctctgtccaagacatacaatgtgg

SEQ ID NO: 495141 - DNA, 120 bp, Artificial Sequence
  ENSG00000163295_3 (sequence is synthesized)
acagacaggtgccagacagcgcagccacagccacggcctacctgtgcggggtcaaggccaacttccagaccatcggcttgagtgcagccgcccgctttaaccagtgcaacacgacacgcg

SEQ ID NO: 495142 - DNA, 120 bp, Artificial Sequence
  ENSG00000163295_4 (sequence is synthesized)
gcaatgaggtcatctccgtgatgaaccgggccaagcaagcaggaaagtcagtaggagtggtgaccaccacacgggtgcagcacgcctcgccagccggcacctacgcacacacagtgaacc

SEQ ID NO: 495143 - DNA, 120 bp, Artificial Sequence
  ENSG00000163295_5 (sequence is synthesized)
gcaactggtactcagatgctgacatgcctgcctcagcccgccaggaggggtgccaggacatcgccactcagctcatctccaacatggacattgacgtgatccttggcggaggccgcaagt

SEQ ID NO: 495144 - DNA, 120 bp, Artificial Sequence
  ENSG00000163295_6 (sequence is synthesized)
acatgtttcccatggggaccccagaccctgagtacccagctgatgccagccagaatggaatcaggctggacgggaagaacctggtgcaggaatggctggcaaagcaccagggtgcctggt

SEQ ID NO: 495145 - DNA, 120 bp, Artificial Sequence
  ENSG00000163295_7 (sequence is synthesized)
atgtgtggaaccgcactgagctcatgcaggcgtccctggaccagtctgtgacccatctcatgggcctctttgagcccggagacacgaaatatgagatccaccgagaccccacactggacc

SEQ ID NO: 495146 - DNA, 120 bp, Artificial Sequence
  ENSG00000163295_8 (sequence is synthesized)
cctccctgatggagatgacagaggctgccctgcgcctgctgagcaggaacccccgcggcttctacctctttgtggagggcggccgcatcgaccatggtcatcatgagggtgtggcttacc

SEQ ID NO: 495147 - DNA, 120 bp, Artificial Sequence
  ENSG00000163295_9 (sequence is synthesized)
aggcactcactgaggcggtcatgttcgacgacgccattgagagggcgggccagctcaccagcgaggaggacacgctgaccctcgtcaccgctgaccactcccatgtcttctcctttggtg

SEQ ID NO: 495148 - DNA, 120 bp, Artificial Sequence
  ENSG00000163295_10 (sequence is synthesized)
gctacaccttgcgagggagctccatcttcgggttggcccccagcaaggctcaggacagcaaagcctacacgtccatcctgtacggcaatggcccgggctacgtgttcaactcaggcgtgc

SEQ ID NO: 495149 - DNA, 120 bp, Artificial Sequence
  ENSG00000163295_11 (sequence is synthesized)
gaccagacgtgaatgagagcgagagcgggagccccgattaccagcagcaggcggcggtgcccctgtcgtccgagacccacggaggcgaagacgtggcggtgtttgcgcgcggcccgcagg

SEQ ID NO: 495150 - DNA, 120 bp, Artificial Sequence
  ENSG00000163295_12 (sequence is synthesized)
cgcacctggtgcatggtgtgcaggagcagagcttcgtagcgcatgtcatggccttcgctgcctgtctggagccctacacggcctgcgacctggcgcctcccgcctgcaccaccgacgccg

SEQ ID NO: 495151 - DNA, 120 bp, Artificial Sequence
  ENSG00000163295_13 (sequence is synthesized)
gcacccagttgccgcgtcgctgccactgctggccgggaccctgctgctgctgggggcgtccgctgctccctgagtgccccactccggagttatcctgctccccacctccgggcgtcctgc

SEQ ID NO: 495152 - DNA, 120 bp, Artificial Sequence
  ENSG00000163295_14 (sequence is synthesized)
cctgttccccgtcctgagccgccacttccagcgaacacacacaggtgtcctgccgttggaccttcacctcctagagataaaccagcctcagctggcgcagcggggcccttcttccctccg

SEQ ID NO: 495153 - DNA, 120 bp, Artificial Sequence
  ENSG00000163295_15 (sequence is synthesized)
catccccttcagggagcaggagcccagggcgccctgggagctgagcctgggacttccaggacctcccctcaggttgttctctgattcttcctcccaaccccagagactgcagatttgtgc

SEQ ID NO: 495154 - DNA, 120 bp, Artificial Sequence
  ENSG00000163295_16 (sequence is synthesized)
catgcggctgcctgcaccccagacaataaagggaccaaaaccacccaacccccaccctgcctctatcctaaggaagaccaagcaggcctggacccagagacgtcccccatcgtgggacac

SEQ ID NO: 495155 - DNA, 120 bp, Artificial Sequence
  ENSG00000163295_17 (sequence is synthesized)
gacacacccagaccgcgtgccccaccgtcttagcttcaatcctggcagcacctggtagacccaaggacttgggtggatcaggacacctgaagaagagaagcttccggcaaccctgcaacc

SEQ ID NO: 495156 - DNA, 120 bp, Artificial Sequence
  ENSG00000163295_18 (sequence is synthesized)
cacccaaggaggctactggatcggggattcccaggggggctttgacacagtcctctgctgtctccccactaggatcattccacacccctgcacctgaccaagggaccaatgaggcagagg

SEQ ID NO: 495157 - DNA, 120 bp, Artificial Sequence
  ENSG00000163295_19 (sequence is synthesized)
cttgccccaagtcacagccactcagatgcttcctgccccccagtgcccattccaggtcaccagatccaaggagcgcttgaggagctctgggtacagggcagcaacccagagcccatgggc

SEQ ID NO: 495158 - DNA, 120 bp, Artificial Sequence
  ENSG00000163295_20 (sequence is synthesized)
cctcccgggacatctggatgctgggcatagatttctcaacaaggaagactcccctgcctcctcaaggtctccattctcctaggagacaaagcaataataaaaggtgttagacaatgtaat

SEQ ID NO: 495159 - DNA, 120 bp, Artificial Sequence
  ENSG00000163295_21 (sequence is synthesized)
gccagtactacttcctaggagaaaaatcatgagtgagtgtgggcacagtatctggagaggtggataacgcaggccaggaggtactgctgaggggcagatgattgagcaagagacttgaac

SEQ ID NO: 495160 - DNA, 120 bp, Artificial Sequence
  ENSG00000163295_22 (sequence is synthesized)
agagtgggggcttgagcaaggcagcacagcagtgcaaacgccctggggcagtgtcagcaggtgctctgggaggccaagggctggatcagaggggtgggggtgggtgggcagagtggggaa

SEQ ID NO: 495161 - DNA, 120 bp, Artificial Sequence
  ENSG00000163295_23 (sequence is synthesized)
agcctgaggggtcaggagagtggggtgtgcatgggggactgtgaagtctggttagaggggtgtggttggaggtctttgaggagggctgtgacctgccctggttgggaaataagcactctg

SEQ ID NO: 495162 - DNA, 120 bp, Artificial Sequence
  ENSG00000163295_24 (sequence is synthesized)
gctgctgccaggagaagggtctggtcttttgggcagagggtgggggtggtggcaggctcaggtgaaagctggggaaggagctgactccaggtgtttctgacctccctctgaaagtattct

SEQ ID NO: 495163 - DNA, 120 bp, Artificial Sequence
  ENSG00000163295_25 (sequence is synthesized)
ggagcgcccatcccaatacagccatacttagtgagtacacacctgctccaagagaacattgaaaagaataaaggtgaaatcaaccacattttccagcaaattttgcagtattacaaattt

SEQ ID NO: 495164 - DNA, 120 bp, Artificial Sequence
  ENSG00000163295_26 (sequence is synthesized)
atttgtacatttacaaaggtgcaaaaaagcatcttgcttttgcaagaaatagtaacatcattcaatatgctttcttatttactaaaaccttgaaataaaattgtaaaacatcagtttgaa

SEQ ID NO: 495165 - DNA, 120 bp, Artificial Sequence
  ENSG00000163295_27 (sequence is synthesized)
tttaaacccaggcagcctgcgctgcagccggttcctggtgtccccacttcgcctccctcctgctgcccccaagacatgcaggggccctgggtgctgctgctgctgggcctgaggctacag

SEQ ID NO: 495166 - DNA, 120 bp, Artificial Sequence
  ENSG00000163297_0 (sequence is synthesized)
acacgcagcccagacccggcccgagcgggctcctgccctcggcgtggcttctctccagccgggagtcccagggccagctagcctcctcccctaaaggggacggcctgtcagcgcagtgcc

SEQ ID NO: 495167 - DNA, 120 bp, Artificial Sequence
  ENSG00000163297_1 (sequence is synthesized)
agagtccagcaccgggaggaaagtttcggagtgcggagggagttggggccgccggaggagaagagtctccactcctagtttgttctgccgtcgccgcgtcccagggaccccttgtcccga

SEQ ID NO: 495168 - DNA, 120 bp, Artificial Sequence
  ENSG00000163297_2 (sequence is synthesized)
agcgcacggcagcgggggggacttcagccctccaggcggggtgggttccaggtccgggtccgaggcgggcgctggaggctcggccccaggccggagaggaactcctttcgcgagctgtcg

SEQ ID NO: 495169 - DNA, 120 bp, Artificial Sequence
  ENSG00000163297_3 (sequence is synthesized)
ccgtgggcccgcattgtctgcaggaactctccggaatcgggagggggaggactggatcgcgcttccactgggattcgtcaagagttccggcggcagctgcggcggtggcggagactccct

SEQ ID NO: 495170 - DNA, 120 bp, Artificial Sequence
  ENSG00000163297_4 (sequence is synthesized)
ttgtcctctcaggacctccctctctccctccctgtcagctggtgggtcccgctgccgcaggcgccggcgtctcagctgctcgccgccccccaccccagagtgcgtgccgggtgactcccg

SEQ ID NO: 495171 - DNA, 120 bp, Artificial Sequence
  ENSG00000163297_5 (sequence is synthesized)
ccacctttgcgaccctcctgagcttaggggactgcgagcgggagggagtctcaggcccccggccgcaggatggtggcggagcggtccccggcccgcagccccgggagctggctgttcccc

SEQ ID NO: 495172 - DNA, 120 bp, Artificial Sequence
  ENSG00000163297_6 (sequence is synthesized)
gggctgtggctgttggtgctcagcggtcccggggggctgctgcgcgcccaggagcagccctcctgcagaagagcctttgatctctacttcgtcctggacaagtctgggagtgtggcaaat

SEQ ID NO: 495173 - DNA, 120 bp, Artificial Sequence
  ENSG00000163297_7 (sequence is synthesized)
aactggattgaaatttataatttcgtacagcaacttgcggagagatttgtgagccctgaaatgagattatctttcattgtgttttcttctcaagcaactattattttgccattaactgga

SEQ ID NO: 495174 - DNA, 120 bp, Artificial Sequence
  ENSG00000163297_8 (sequence is synthesized)
gacagaggcaaaatcagtaaaggcttggaggatttaaaacgtgttagtccagtaggagagacatatatccatgaaggactaaagctagcgaatgaacaaattcagaaagcaggaggcttg

SEQ ID NO: 495175 - DNA, 120 bp, Artificial Sequence
  ENSG00000163297_9 (sequence is synthesized)
aaaacctccagtatcataattgctctgacagatggcaagttggacggtctggtgccatcatatgcagagaaagaggcaaagatatccaggtcacttggggctagtgtttattgtgttggt

SEQ ID NO: 495176 - DNA, 120 bp, Artificial Sequence
  ENSG00000163297_10 (sequence is synthesized)
gtccttgattttgaacaagcacagcttgaaagaattgctgattccaaggagcaagttttccctgtcaaaggtggatttcaggctcttaaaggaataattaattctatactagctcagtca

SEQ ID NO: 495177 - DNA, 120 bp, Artificial Sequence
  ENSG00000163297_11 (sequence is synthesized)
tgtactgaaatcctagaattgcagccctcaagtgtctgtgtgggggaggaatttcagattgtcttaagtggaagaggattcatgctgggcagtcggaatggcagtgttctctgcacttac

SEQ ID NO: 495178 - DNA, 120 bp, Artificial Sequence
  ENSG00000163297_12 (sequence is synthesized)
actgtaaatgaaacatatacaacgagtgtaaaaccagtaagtgtacagcttaattctatgctttgtcctgcacctatcctgaataaagctggagaaactcttgatgtttcagtgagcttt

SEQ ID NO: 495179 - DNA, 120 bp, Artificial Sequence
  ENSG00000163297_13 (sequence is synthesized)
aatggaggaaaatctgtcatttcaggatcattaattgtcacagccacagaatgttctaacgggatcgcagccatcattgttattttggtgttactgctactcctggggatcggtttgatg

SEQ ID NO: 495180 - DNA, 120 bp, Artificial Sequence
  ENSG00000163297_14 (sequence is synthesized)
tggtggttttggcccctttgctgcaaagtggttattaaggatcctccaccaccacccgcccctgcaccaaaagaggaggaagaagaacctttgcctactaaaaagtggccaactgtggat

SEQ ID NO: 495181 - DNA, 120 bp, Artificial Sequence
  ENSG00000163297_15 (sequence is synthesized)
gcttcctattatggtggtcgaggggttggaggaattaaaagaatggaggttcgttggggtgataaaggatctactgaggaaggtgcaaggctagagaaagccaaaaatgctgtggtgaag

SEQ ID NO: 495182 - DNA, 120 bp, Artificial Sequence
  ENSG00000163297_16 (sequence is synthesized)
attcctgaagaaacagaggaacccatcaggcctagaccacctcgacccaaacccacacaccagcctcctcagacaaaatggtacaccccaattaagggtcgtcttgatgctctctgggct

SEQ ID NO: 495183 - DNA, 120 bp, Artificial Sequence
  ENSG00000163297_17 (sequence is synthesized)
ttgttgaggcggcagtatgaccgggtttctttgatgcgacctcaggaaggagatgagggccggtgcataaacttctcccgagttccatctcagtaaaagggaagcaggaagaccaagaag

SEQ ID NO: 495184 - DNA, 120 bp, Artificial Sequence
  ENSG00000163297_18 (sequence is synthesized)
gtacgaagatggcacattttcacatagctgattttcaaccaaatgaaaaaaatcaagtgcatttcagaagcttttggaagagcagcttaattcctctcagtcgggaaatgttttctctgc

SEQ ID NO: 495185 - DNA, 120 bp, Artificial Sequence
  ENSG00000163297_19 (sequence is synthesized)
cttctgctttgcttgcaccaaacatttctaaacacttgttctgccatctacatgggaggtgatgaaactcagtggtaactcatgatttatgacattgaaaataaagaggaacattgacct

SEQ ID NO: 495186 - DNA, 120 bp, Artificial Sequence
  ENSG00000163297_20 (sequence is synthesized)
gcagactatggtttgtacaagaaagtttgtttgaatgtgtagaagaggaaaaagcaacaacagcaacaacacgaagatgataccaaaacaaggaccacaaaacaactagccatgatggga

SEQ ID NO: 495187 - DNA, 120 bp, Artificial Sequence
  ENSG00000163297_21 (sequence is synthesized)
gacaggagttttttacatggaaacatggcacttgtgtttttatgtggcaagatctttatccataggcagagtatgaaatttcccaccaggctaagcaaataaagaagtccattgccttat

SEQ ID NO: 495188 - DNA, 120 bp, Artificial Sequence
  ENSG00000163297_22 (sequence is synthesized)
agctatgtcagatcacagaatccttccaagtgctctatcacagtgtgccttatgggaagtttctgactggaaaatcttgtcattctaacactgaaaagtgcacacgcatgacaaaatgta

SEQ ID NO: 495189 - DNA, 120 bp, Artificial Sequence
  ENSG00000163297_23 (sequence is synthesized)
gacaagatgcctcaaggtattggtagcaagcaagattttgccctttagttttcgaagacacctttctttcattatgcactcgggacaagaaaattaatagagcgttattccacagaaggc

SEQ ID NO: 495190 - DNA, 120 bp, Artificial Sequence
  ENSG00000163297_24 (sequence is synthesized)
ctctagccagagatcttgagtgtagtgcaagggactcattttttgcgaacttgtccctgtgactagtagattcccccttttcctgtgtttaggatttagtagtgcataaagcattaatat

SEQ ID NO: 495191 - DNA, 120 bp, Artificial Sequence
  ENSG00000163297_25 (sequence is synthesized)
ccataaacatacctagaagtttgttttgcttttaatttaaaggaagcagtaaccacaaagcttccgctcagggttttttctttcttcaagtctccaagggctcttcagcgtcacaagcca

SEQ ID NO: 495192 - DNA, 120 bp, Artificial Sequence
  ENSG00000163297_26 (sequence is synthesized)
gcaactctctttgcattaaaatttcaaagtttaattaatataattaaaagcaacagcaagcagcagcctgtgaagattttgctcatcttttttatgccttttgacattgaatgacctatt

SEQ ID NO: 495193 - DNA, 120 bp, Artificial Sequence
  ENSG00000163297_27 (sequence is synthesized)
actgtatgcgcattacttggattttgaggggcactctaccttggttatgattcagtagaggaaaaagaccacctttcttcaatttacaaattaaatcttctggagggtcgctatcacaaa

SEQ ID NO: 495194 - DNA, 120 bp, Artificial Sequence
  ENSG00000163297_28 (sequence is synthesized)
acattgacgatgtatgtattataattttttagaaaaaccaccatcgtgtcacgtcgacgatgccaaattatgttagcgtgagcagaaacaccgtgggggaggaaggcagcagctgaagaa

SEQ ID NO: 495195 - DNA, 120 bp, Artificial Sequence
  ENSG00000163297_29 (sequence is synthesized)
aaaagctcaaatgatctagtcactttcgatactgtacttcagatgcgaaatggatattcgagtggaaacctgacaaagtgcgcctgctttgatgtgaactggtatagacaatgaccagtg

SEQ ID NO: 495196 - DNA, 120 bp, Artificial Sequence
  ENSG00000163297_30 (sequence is synthesized)
gctgggtcagtgggatgtctctctgtgagcacaaaggcttatcaaatgacactaaaaataagttcaacaaccatcacattggaagggagaaggcgaacatttcatgtttggcgggcatgt

SEQ ID NO: 495197 - DNA, 120 bp, Artificial Sequence
  ENSG00000163297_31 (sequence is synthesized)
gagtgcacaagatggaaagagcgattggagcatcctggtataattacccccattgtgctcttaatggaaatttcaaaggacgggagtattctgttggttggtgtccaggtttgtggcact

SEQ ID NO: 495198 - DNA, 120 bp, Artificial Sequence
  ENSG00000163297_32 (sequence is synthesized)
gttccaagaggccttacacacacacacaaatatataattttctatacatatatatcctctagcttgaaacttttgctcaagtttatttatgtcactggctggctggatccaaagtcatgt

SEQ ID NO: 495199 - DNA, 120 bp, Artificial Sequence
  ENSG00000163297_33 (sequence is synthesized)
gtccacacattcataaataaaaattttacctatgcctgtgctaccatttctttaagcccacataaagctaatgccttcttgggttgaatatgcagttgttatgcttagtttcagggatgg

SEQ ID NO: 495200 - DNA, 120 bp, Artificial Sequence
  ENSG00000163297_34 (sequence is synthesized)
aattctattcagttccaaaatgtccctcatgttcacagatgatactattggcagtagctgcatatgcaagtgtaacttggaagcctgatatagtatacccaaccctttctgcaatgagtt

SEQ ID NO: 495201 - DNA, 120 bp, Artificial Sequence
  ENSG00000163297_35 (sequence is synthesized)
catttgcatctggaacaagacctaatgtggcttccttaaatgggcacttcatttctgatgagtgcacaccaattattgctattttaatatcattgagaatactacagaagctaaggctat

SEQ ID NO: 495202 - DNA, 120 bp, Artificial Sequence
  ENSG00000163297_36 (sequence is synthesized)
gtttctttggtaactacttcaaatttctctagaattatgtagcatacttacattttgctgcatgaacaatgaaaattaacctctgcctttaaatggaaaaataactttctgtagattgtt

SEQ ID NO: 495203 - DNA, 120 bp, Artificial Sequence
  ENSG00000163297_37 (sequence is synthesized)
atacagctactatgaagagctcttaatgaagaggaagtggcagtggtctatatgtagactgaaaaaatatcattaataaagttcaaagactgatggaatttcattgcccttaaagatatg

SEQ ID NO: 495204 - DNA, 120 bp, Artificial Sequence
  ENSG00000163297_38 (sequence is synthesized)
aaccagatctgttttatgcttttctccaattatactaactagcagttgaaaagaatttgttttgaagagtgttattttcttaccaaaagaccagatcaaaaatccctatacttttccacc

SEQ ID NO: 495205 - DNA, 120 bp, Artificial Sequence
  ENSG00000163297_39 (sequence is synthesized)
aaaaaaagattaaaatgaagccatttctataaatttaatggcactttatattttatatagagaaatagcttctgtttgattttctggacaccatgtcagtcaagatctactttctgtgta

SEQ ID NO: 495206 - DNA, 120 bp, Artificial Sequence
  ENSG00000163297_40 (sequence is synthesized)
aaaatgaataagtcttgcacataatccattcgtgttgcataaggttgcaaaaacaattaagtgggaaatgactcctaacttatgtgtctactctgcctagaaagaaagttttgaaggcat

SEQ ID NO: 495207 - DNA, 120 bp, Artificial Sequence
  ENSG00000163297_41 (sequence is synthesized)
ctatatatatttcataacaatgtctgttctttatggatttgatccataaatatttatctatctgaaaactttgatacttggaatgttttccttagagcatttggtgctccaagaaaaaac

SEQ ID NO: 495208 - DNA, 120 bp, Artificial Sequence
  ENSG00000163297_42 (sequence is synthesized)
atttggtgctaagagttgcagcactgatgcctttccctaagttaattctattttaaaaatttatatttccttcccaatgagatgcagagtaaaatttgagaccctccattgactagggag

SEQ ID NO: 495209 - DNA, 120 bp, Artificial Sequence
  ENSG00000163297_43 (sequence is synthesized)
cagcatctgtcatctatggttaattactattttgacaaaaatatagaaggtttaaacccccatgtatttcagattgttagagaaagaagtagtttgcttatatttcccttgaactttatt

SEQ ID NO: 495210 - DNA, 120 bp, Artificial Sequence
  ENSG00000163297_44 (sequence is synthesized)
ccatttaaataataaattattcaatatttgttataataaatccttactagatacaagatttgggtgtttctgtgaagttaactttattatctaaatatcactaaccattgtttactgctc

SEQ ID NO: 495211 - DNA, 120 bp, Artificial Sequence
  ENSG00000163297_45 (sequence is synthesized)
gctcagaggcagatacatttgtttagtttaaagttgaaacaaattctatattgtggataattaggtgtttaaaacattttgatagaccagcttatatatgttatttttgaaatttaagaa

SEQ ID NO: 495212 - DNA, 120 bp, Artificial Sequence
  ENSG00000163297_46 (sequence is synthesized)
ggcagaatgtaattaggtcacatttacaagtagaaggaattataacttcctactccatgcatatattgtatattggttagcttttactagcattttctagcatcacattactttagaaag

SEQ ID NO: 495213 - DNA, 120 bp, Artificial Sequence
  ENSG00000163297_47 (sequence is synthesized)
tttttgagagtttcattactactggaaaagtttggtgggtatatgtacacaggaaagaaatatatgcatcatttcaatatgaaaggaaatacataatctagaaacatagaataactcttg

SEQ ID NO: 495214 - DNA, 120 bp, Artificial Sequence
  ENSG00000163297_48 (sequence is synthesized)
gtacatctgttacatagttaaggaaagaaacaggcaggtgaggctggagaatgttgtctatttgtaggaaataaagtcagtgcagacgcatattctagtttagagttagattaatattgt

SEQ ID NO: 495215 - DNA, 120 bp, Artificial Sequence
  ENSG00000163297_49 (sequence is synthesized)
gcttagtgaatttctatgacatatttctgagaacactttaatatatttccacacctactggaatctaattcagtcgatcggataaaagaaagacttttttgttgttgtttttgaaaatcc

SEQ ID NO: 495216 - DNA, 120 bp, Artificial Sequence
  ENSG00000163297_50 (sequence is synthesized)
ataatgtagcaggttctgcgctggttttttaatgtattttatttttgtgctctcctgccaaaagaaaaggctgataagtaagtacacagtacaacatgtaaatttgtataaaaatatgct

SEQ ID NO: 495217 - DNA, 83 bp, Artificial Sequence
  ENSG00000163297_51 (sequence is synthesized)
cagagggagaattgactcaatgtgttttctatgaagagtcttagcttaggaatcaggtaacagagaggtcctagaccatagac

SEQ ID NO: 495218 - DNA, 120 bp, Artificial Sequence
  ENSG00000163297_52 (sequence is synthesized)
gcttaggaatcaggtaacagagaggtcctagaccatagacccagccatcaactagcttgctgatgttgaacagatcaactctcaaccatagactgaagatggaatgaagatatcaaaagt

SEQ ID NO: 495219 - DNA, 83 bp, Artificial Sequence
  ENSG00000163297_53 (sequence is synthesized)
caatggcatggtctgggctgactgtaacctcctcttcctgggttcaagtgattctcatccctcagcctcctgagtagctggga

SEQ ID NO: 495220 - DNA, 120 bp, Artificial Sequence
  ENSG00000163297_54 (sequence is synthesized)
tcctgagtagctgggattacaggcacataacaccacacccagctaactcttgtatttttgtagaaatggggtttcgctatgttgctcagactggtctcaaacacctggcctcaagtgatc

SEQ ID NO: 495221 - DNA, 120 bp, Artificial Sequence
  ENSG00000163297_55 (sequence is synthesized)
aagtgatcctcctgcctcagtctcccaaatgctgtgattacaggcacaagctactgcaccaggcctctgactacatttctattaatatggttaggttggaggttttagtatttttgtatc

SEQ ID NO: 495222 - DNA, 120 bp, Artificial Sequence
  ENSG00000163297_56 (sequence is synthesized)
tatttttgtatctcatatttgtatcaatatgactggcttctttgtctgtagtgtgtggtaatattagttctgtaaactgtcagttgcaaaaaaaaaaaataccttgaactatagtatatg

SEQ ID NO: 495223 - DNA, 120 bp, Artificial Sequence
  ENSG00000163297_57 (sequence is synthesized)
ttgataattagccataataatttcttagttaatttcttataattaaatttgtcaaagaggaaacttacagtttatatctgatgaaatctctaaaaagatgggtaaaacattgggaaatgt

SEQ ID NO: 495224 - DNA, 120 bp, Artificial Sequence
  ENSG00000163297_58 (sequence is synthesized)
atgcatgtacttcactctggtttcatagggttagcaagtgtcttaaaaacatatataaagaagcacagagattgttaggagatatttatgctcccagttttaataattgggatactttgt

SEQ ID NO: 495225 - DNA, 120 bp, Artificial Sequence
  ENSG00000163297_59 (sequence is synthesized)
ataccacagaaagaaaaattactaaactcctctttttttagtcaaaattggaaaaaaagtcttaattgacagttactatgcctgtgctacccatagcaagtattcagtggaaaatacttt

SEQ ID NO: 495226 - DNA, 120 bp, Artificial Sequence
  ENSG00000163297_60 (sequence is synthesized)
actaagtaagtaatttgaacacagcttaaaatccatagtatgttacaattgctagcctttcacaaagtttgcattgtcttaatgtagaaggatactgtgatctaagaattcacaatttta

SEQ ID NO: 495227 - DNA, 120 bp, Artificial Sequence
  ENSG00000163297_61 (sequence is synthesized)
aaaagtggaacctaaatagggtttcctaattgccatgaagttatttgtatcttagatgaattatatttacaacattgtaaatgtcagtgggtgatccaaaataaattgttaaagttatta

SEQ ID NO: 495228 - DNA, 120 bp, Artificial Sequence
  ENSG00000163297_62 (sequence is synthesized)
aaatgtacatttaagtaggtttcagtttgactagaaataattggcaagaaggcaagaactagtcttctagagcagggatcccatcccccaggtcatggactggtactggtccatggcctg

SEQ ID NO: 495229 - DNA, 120 bp, Artificial Sequence
  ENSG00000163297_63 (sequence is synthesized)
ttagaaaccaggccacacagcaggagatgagtggaaagcaagtgaaacttcatgggtatttacagcaattccccgtcgctcgcattaccacctgagctgtgtctcctgtgagatcagcag

SEQ ID NO: 495230 - DNA, 120 bp, Artificial Sequence
  ENSG00000163297_64 (sequence is synthesized)
cagcattagattctcaaggagcacaaacccttttggaactgtgtgtgagggatctaagttgcgcatttcttatgagaatctaatacctgatgatctgttgttgtctcccaccacccccag

SEQ ID NO: 495231 - DNA, 90 bp, Artificial Sequence
  ENSG00000163297_65 (sequence is synthesized)
atctagttgcaggaaaacaagctcaggctcccactgattctacattatagtgagttgtgtaattatttcattatatatataataaatgta

SEQ ID NO: 495232 - DNA, 120 bp, Artificial Sequence
  ENSG00000163297_66 (sequence is synthesized)
taaatgtaatccacttgaattatcctgaaaccatccccaccccccaccccccggtctgtggaaaaattggcttccacgaaactggtccgtggtgccaaaaatattgggtatggttgttct

SEQ ID NO: 495233 - DNA, 120 bp, Artificial Sequence
  ENSG00000163297_67 (sequence is synthesized)
agggtgtagactatgaaaaagatatgcattgtctccatgaactaaaaggcaaggtgattttaaacaatttagatgccaaacaaagaaaccaaaagcttccaaagtaataaatgatagaga

SEQ ID NO: 495234 - DNA, 120 bp, Artificial Sequence
  ENSG00000163297_68 (sequence is synthesized)
aaggaaattgttacatcatgtgccaaattagaagcaaatctaaacttcttatcatgtactccaccatctgatttgtataagtaattggggaaagaaaaactcacaatataaaacaagatt

SEQ ID NO: 495235 - DNA, 120 bp, Artificial Sequence
  ENSG00000163297_69 (sequence is synthesized)
gactagttctagcagatgacacctgtaaatagaatttttactagttgaaattctgatgtgaaatgaagccattattattatcacaataaagtgttctttttagttctttttttaatatcc

SEQ ID NO: 495236 - DNA, 120 bp, Artificial Sequence
  ENSG00000163297_70 (sequence is synthesized)
gattgcggcgggaagtcctccgagacatgaatgtttcagcgcggcgcgcgaggtgagggccgcgcgtccaggtgtaagctagcaggttgtcgctgacatctgtttgcagcggcggcagcg

SEQ ID NO: 495237 - DNA, 120 bp, Artificial Sequence
  ENSG00000163297_71 (sequence is synthesized)
gcctccccatcccgcagctagcggccggattgtcagcggaggtagttgagagcggcaaaaccgttttggtctcactctcgctgcctggaggcctgaaacaccaaagggccggtgcataaa

SEQ ID NO: 495238 - DNA, 120 bp, Artificial Sequence
  ENSG00000163297_72 (sequence is synthesized)
gtcttttcacttgttcttgaatctgttaagtcgggcaactggtatattagcattctcgttggtagacatggttgtgagacaaagggaggaaagctgcaaagcaggcccagggttctacag

SEQ ID NO: 495239 - DNA, 120 bp, Artificial Sequence
  ENSG00000163297_73 (sequence is synthesized)
gaagcgacgcagggatcggcggctgtggggcggctacgctcaaagcgtccacttcgactcagctcaaagaagtgttgtcctcctgatcttaattagggtcagaaacgtcacctccttccc

SEQ ID NO: 495240 - DNA, 120 bp, Artificial Sequence
  ENSG00000163297_74 (sequence is synthesized)
ctcttatggctcggaggccgcaccgggcacgtttgtggaagaattcactgctgaattgaagtccttgatcaagtaattgaagttcaggcagaaagtatcaaagcgggcgagcagtctccc

SEQ ID NO: 495241 - DNA, 120 bp, Artificial Sequence
  ENSG00000163297_75 (sequence is synthesized)
gctcgggccctctctcgcgctctcttccgcgcgccagcttccgcagaggtggcggggtccgcgggccgcacgccgggcccgggctttgattgcggcgggaagtcctccgagacatgaatg

SEQ ID NO: 495242 - DNA, 85 bp, Artificial Sequence
  ENSG00000163297_76 (sequence is synthesized)
tgcagatcttccttcaagaaaagactttctgagaatttttgcctctatggttatcagtgacagtgacctacggagtcttactgtg

SEQ ID NO: 495243 - DNA, 62 bp, Artificial Sequence
  ENSG00000163297_77 (sequence is synthesized)
tggcacgatcttggctcactgcaagctgggactacagaccgagtttcactcttgttgcccag

SEQ ID NO: 495244 - DNA, 120 bp, Artificial Sequence
  ENSG00000163297_78 (sequence is synthesized)
ggctcaccgcaacctccgcctcccaggaatgacattatccggatagcttggcccagcctggtcatcccaccctattggcagcaggacaactgtgagacagaaacaaacagcctcagccag

SEQ ID NO: 495245 - DNA, 120 bp, Artificial Sequence
  ENSG00000163297_79 (sequence is synthesized)
gtggaaagatgaataaaaacaaggaagaggtttgggtagggatgtgataaaataaaaactggaatatgggattctaatttaaaaagaataatgctggttggcatgtggccaactgaactg

SEQ ID NO: 495246 - DNA, 120 bp, Artificial Sequence
  ENSG00000163297_80 (sequence is synthesized)
cgggtttctttgatgcgacctcaggaaggagatgaggtttgtatatgggaatgtattgagaaagagctaactgcttgagtcagtataatggaggcagggaaatagtaataaaaaatgatt

SEQ ID NO: 495247 - DNA, 120 bp, Artificial Sequence
  ENSG00000163312_0 (sequence is synthesized)
gagagctaacttggggtcttttcccaaggtggatgtagaagcgggctccggcgtcccactctcccttccatatgggcttagcgtctgggtcactgagaacgacgtctgaatagggccctg

SEQ ID NO: 495248 - DNA, 120 bp, Artificial Sequence
  ENSG00000163312_1 (sequence is synthesized)
ggtccttgccatggatgaatgtggttcccgcatccgccggcgggtgtctctccccaaaaggaaccgtccaagcttggggtgtatttttggcgctcccaccgcggccgagctcgtgcccgg

SEQ ID NO: 495249 - DNA, 120 bp, Artificial Sequence
  ENSG00000163312_2 (sequence is synthesized)
agatgaggggaaagaggaggaggaaatggtggctgagaacaggaggcggaaaaccgcgggcgtactgccggttgaggtacagccccttctactctcagattccccggaatgtctcgtcct

SEQ ID NO: 495250 - DNA, 120 bp, Artificial Sequence
  ENSG00000163312_3 (sequence is synthesized)
tggaggtggtgatacaaacccggacctcctacgtcacatgcccactgacagaggggtgggagaccagcctaatgacagtgaagtggacatgtttggtgactatgatagctttactgaaaa

SEQ ID NO: 495251 - DNA, 120 bp, Artificial Sequence
  ENSG00000163312_4 (sequence is synthesized)
ctcctttatagctcaagttgacgacctggaacaaaaatatatgcaactccctgaacataagaaacatgctacagactttgccactgaaaatctttgctcggaaagtatcaaaaacaaact

SEQ ID NO: 495252 - DNA, 120 bp, Artificial Sequence
  ENSG00000163312_5 (sequence is synthesized)
cagcattactaccataggcaaccttactgaattacaaactgataagcacacagagaaccagagtggatatgaaggtgtcactattgaacctggagctgatcttttgtatgatgtaccttc

SEQ ID NO: 495253 - DNA, 120 bp, Artificial Sequence
  ENSG00000163312_6 (sequence is synthesized)
ctcacaggctatatactttgaaaatttgcagaactcttcaaatgatttgggtgatcattctatgaaagaaagggattggaagtcatcctctcacaacactgtgaatgaggaactgcccca

SEQ ID NO: 495254 - DNA, 120 bp, Artificial Sequence
  ENSG00000163312_7 (sequence is synthesized)
taattgcatagagcaaccccagcaaaatgatgagtcctcttccaaagtcagaactagttcagatatgaacaggagaaaaagtattaaagatcatctaaaaaatgccatgactggaaatgc

SEQ ID NO: 495255 - DNA, 120 bp, Artificial Sequence
  ENSG00000163312_8 (sequence is synthesized)
gaaggcccagacaccaatattttctagaagtaaacagctcaaagacactctcctatctgaggaaattaatgttgctaagaaaacagttgagtcatcatcaaatgaccttggtccttttta

SEQ ID NO: 495256 - DNA, 120 bp, Artificial Sequence
  ENSG00000163312_9 (sequence is synthesized)
ttcattacccagcaaagtgagagacctttatgcccaattcaagggaattgaaaaattatatgaatggcaacatacttgtttaacattgaattctgtgcaagaaagaaaaaatttaatata

SEQ ID NO: 495257 - DNA, 120 bp, Artificial Sequence
  ENSG00000163312_10 (sequence is synthesized)
ttccttgccaacaagtggtggaaaaaccctcgtggctgagattttaatgctgcaagaactgctttgctgtcggaaagatgttttaatgattcttccatatgtggcaattgtccaagaaaa

SEQ ID NO: 495258 - DNA, 120 bp, Artificial Sequence
  ENSG00000163312_11 (sequence is synthesized)
gatttcaggtttgtcaagttttggtatagaactcggtttctttgttgaagaatatgctggaagcaaaggaagatttcctccaactaaaagaagggaaaagaaatcactctatattgccac

SEQ ID NO: 495259 - DNA, 120 bp, Artificial Sequence
  ENSG00000163312_12 (sequence is synthesized)
tattgaaaaaggacatagcttggtgaactccttgattgaaactggaagaattgacagtctgggtctggttgttgtagacgagttgcacatgattggtgaaggaagccgtggagctacact

SEQ ID NO: 495260 - DNA, 120 bp, Artificial Sequence
  ENSG00000163312_13 (sequence is synthesized)
ggaaatgaccctagcaaaaatcctctacactagcaaaacgactcaaattattggtatgagtgcaacattaaacaatgttgaagacctacaaaagtttcttcaagcagaatattataccag

SEQ ID NO: 495261 - DNA, 120 bp, Artificial Sequence
  ENSG00000163312_14 (sequence is synthesized)
cagcaaagctgagaatggcatgactttttcacgtcttcttaattataagtattctgataccctaaaaaagatggatcctgatcacttggtagcattggtgacagaagttattcccaatta

SEQ ID NO: 495262 - DNA, 120 bp, Artificial Sequence
  ENSG00000163312_15 (sequence is synthesized)
ttcctgcttagttttttgtcctagtaagaagaactgtgaaaatgtagcagaaatgatatgcaaatttttaagcaaggaatatctgaaacataaggagaaagaaaaatgtgaggtgattaa

SEQ ID NO: 495263 - DNA, 120 bp, Artificial Sequence
  ENSG00000163312_16 (sequence is synthesized)
gaacttgaagaatattggcaatggcaacctgtgtcctgttttaaagcgcactatcccatttggagttgcctatcaccacagtggcttaacaagtgatgaaaggaaactcttggaggaggc

SEQ ID NO: 495264 - DNA, 120 bp, Artificial Sequence
  ENSG00000163312_17 (sequence is synthesized)
ctactccacaggagtgctctgtctttttacctgcacatctaccctagcggcaggtgtcaacctaccagctcgaagagttattttaagagctccctatgttgctaaggaatttttaaagag

SEQ ID NO: 495265 - DNA, 120 bp, Artificial Sequence
  ENSG00000163312_18 (sequence is synthesized)
gaatcaatataaacagatgattggcagagctggtcgtgctggaatagatactattggggagagtatcctcatattgcaagaaaaagacaaacaacaggtattggagttaataactaaacc

SEQ ID NO: 495266 - DNA, 120 bp, Artificial Sequence
  ENSG00000163312_19 (sequence is synthesized)
attggaaaactgttacagccatcttgttcaggaattcaccaagggaatccaaacattatttctctctttgattggtttgaagattgcaacgaatcttgatgacatctatcatttcatgaa

SEQ ID NO: 495267 - DNA, 120 bp, Artificial Sequence
  ENSG00000163312_20 (sequence is synthesized)
tggtacattttttggtgttcagcaaaaggttttattgaaagaaaaaagtctctgggaaataactgttgaatcacttagatacctgacagaaaaaggactcctacaaaaagacactattta

SEQ ID NO: 495268 - DNA, 120 bp, Artificial Sequence
  ENSG00000163312_21 (sequence is synthesized)
taagtctgaagaagaggtccaatataattttcatattacaaagttgggacgtgcttcatttaagggaactatagatttagcttattgtgacattctgtacagagacttgaagaaaggtct

SEQ ID NO: 495269 - DNA, 120 bp, Artificial Sequence
  ENSG00000163312_22 (sequence is synthesized)
tgaaggacttgtgcttgaaagccttcttcatctaatctacctaacaaccccctatgatctggtttcacagtgtaaccctgattggatgatatacttcaggcagtttagccaactcagtcc

SEQ ID NO: 495270 - DNA, 120 bp, Artificial Sequence
  ENSG00000163312_23 (sequence is synthesized)
agcagaacaaaatgtagctgccattcttggagtctctgaaagctttattgggaagaaagcatcaggccaagccatcggaaagaaggtggacaagaacgttgtcaacaggctatatctgtc

SEQ ID NO: 495271 - DNA, 120 bp, Artificial Sequence
  ENSG00000163312_24 (sequence is synthesized)
ttttgttctttataccttgctcaaagagaccaacatttggactgtatctgaaaaatttaatatgcctcgaggatatatacaaaatcttctcactggaactgcctcattctcatcttgtgt

SEQ ID NO: 495272 - DNA, 120 bp, Artificial Sequence
  ENSG00000163312_25 (sequence is synthesized)
gttacatttctgtgaggagcttgaggagttttgggtttacagagcccttttggtagaacttaccaagaagctgacttactgtgtaaaggcagaattaatccctctcatggaagttactgg

SEQ ID NO: 495273 - DNA, 120 bp, Artificial Sequence
  ENSG00000163312_26 (sequence is synthesized)
agttttagagggtcgagcaaaacagttatacagtgcaggttacaaaagtctaatgcacttagctaatgcaaatcctgaagtgctcgtaaggacaattgatcatttatcaagacgccaagc

SEQ ID NO: 495274 - DNA, 120 bp, Artificial Sequence
  ENSG00000163312_27 (sequence is synthesized)
caagcaaattgtttcatcagcaaagatgctgttgcatgaaaaagcagaagccctgcaagaagaggtagaagagttactaagattgccttctgatttccctggtgctgtggcttcttccac

SEQ ID NO: 495275 - DNA, 120 bp, Artificial Sequence
  ENSG00000163312_28 (sequence is synthesized)
ccactgacaaagcatgaagctatctgatgagaattttcatatatgaattatttattgtacatgtgtgttattaaagataacttatactttataaatgaaaaaatacatttcagttataca

SEQ ID NO: 495276 - DNA, 120 bp, Artificial Sequence
  ENSG00000163312_29 (sequence is synthesized)
cctcctacgtcacatgcccactgacagaggggtgggagaccaggtacggaggacttggaacttgaaactgcaaacttttggcatccttcccagatgcaaagagttgaccagttttatcgc

SEQ ID NO: 495277 - DNA, 120 bp, Artificial Sequence
  ENSG00000163319_0 (sequence is synthesized)
agtggaagaaacgcggaaccatggccgctgtggttgctgtttgcggtggtctagggaggaagaagttgacacacttggtaacggctgctgtcagccttacacatcccgggactcacacgg

SEQ ID NO: 495278 - DNA, 120 bp, Artificial Sequence
  ENSG00000163319_1 (sequence is synthesized)
tgctttggagaagaggttgttcacaacaggtatccagcaatgaggacctgcccatttcaatggaaaatccttataaagaacctcttaagaaatgtatcttgtgtggaaagcatgtagatt

SEQ ID NO: 495279 - DNA, 120 bp, Artificial Sequence
  ENSG00000163319_2 (sequence is synthesized)
ataagaatgtacagcttttgtcccagtttgtttctccatttactggatgcatttatggaaggcacattacaggtctttgtgggaagaaacagaaagaaatcacaaaagcaattaagagag

SEQ ID NO: 495280 - DNA, 120 bp, Artificial Sequence
  ENSG00000163319_3 (sequence is synthesized)
ctcaaataatggggtttatgccagttacatacaaggatcctgcatatctcaaggaccctaaagtttgtaacatcagatatcgggaataaattctatcacgttaccactaataaacttatt

SEQ ID NO: 495281 - DNA, 120 bp, Artificial Sequence
  ENSG00000163319_4 (sequence is synthesized)
ttacagtaagtggttgtatgatgccaatactgactcaaaccaacctttggatagaaaagtgtttgaggagtgaggtaaagaatgacacttccccttcataccaatgtccattaagcagat

SEQ ID NO: 495282 - DNA, 120 bp, Artificial Sequence
  ENSG00000163319_5 (sequence is synthesized)
tgcttatttaaaatgttaacactcatcacattttatctatgttgaataaaagtggttctgtgtgattgtcatttatatctgatccccaaatagctcatacaataatccattcaatagaat

SEQ ID NO: 495283 - DNA, 120 bp, Artificial Sequence
  ENSG00000163319_6 (sequence is synthesized)
cagaaggacaaaatattcctagacgagtctaccctcaaaccagtagtgtcttttacatgaagagatgatttacacctaatagacattgaatatgatagacatacatgtatatatgtatca

SEQ ID NO: 495284 - DNA, 120 bp, Artificial Sequence
  ENSG00000163319_7 (sequence is synthesized)
gttctgagttccactggcctatcccaaatacactggattaccaggcttgtactgtattcaaaatgatagatttgctaaatttcatgcaaaggactctaaactaggggagagattactgtt

SEQ ID NO: 495285 - DNA, 120 bp, Artificial Sequence
  ENSG00000163319_8 (sequence is synthesized)
tgtgttgtgttatagttgtgtaataattaaggctgccagatttagcaagtacaaatgtaggacaaatttaaattttagatgatgttttgcaaatttattgcatgatatccagcattttat

SEQ ID NO: 495286 - DNA, 120 bp, Artificial Sequence
  ENSG00000163319_9 (sequence is synthesized)
ctggcaactctagccataatgtacttctaaaaaagtatcacttaaggagaattttaatgactcagataaattttcatataaatttctttccatattttgaaaataaggctattcttgctt

SEQ ID NO: 495287 - DNA, 120 bp, Artificial Sequence
  ENSG00000163319_10 (sequence is synthesized)
gcttttccattttattttttaatagacatggtctcaatacgttgcccaggctggtctctaactcctaacttcaatcaatcctcctgacttgtcttccctaagtgctgggattacaggtgt

SEQ ID NO: 495288 - DNA, 120 bp, Artificial Sequence
  ENSG00000163319_11 (sequence is synthesized)
cactgtgcctggtctcacttttccaattctaaagaatgtgtctgtgtaagccttcccctcaacaacttagtgaaaggtgaaaaaaaggtttggaaataaaagcatctgatgtttgaaaaa

SEQ ID NO: 495289 - DNA, 120 bp, Artificial Sequence
  ENSG00000163319_12 (sequence is synthesized)
actgaagaaatacaactcagtcaatgaagctaaaggaataatgacatctcgttcaacaagggacagcatctatgatggggtctcacaagattatattggagcacatatagaaagctgata

SEQ ID NO: 495290 - DNA, 120 bp, Artificial Sequence
  ENSG00000163319_13 (sequence is synthesized)
tatagcacttgatattggcattacagatcaaataggggaaatgactgatattcaataataatttggggacatttggttttccctatgaaaactaaaaagtaaaaatacatataggtttgt

SEQ ID NO: 495291 - DNA, 120 bp, Artificial Sequence
  ENSG00000163319_14 (sequence is synthesized)
gtaagtatatgtttgcacaatgataaaactgcctaatgacacatttctcagaaggtacatagccttcattaagcaactcataactgtataaatctaatcaagatgtcaggttatcctaaa

SEQ ID NO: 495292 - DNA, 120 bp, Artificial Sequence
  ENSG00000163319_15 (sequence is synthesized)
aaatgtcagtcattaacttgatatgaactctatctagaagtggttgacgtgtttgatatgttaacttacctttaattcctcttgtaatgaagcatacatttcatttatcttatgtacctc

SEQ ID NO: 495293 - DNA, 120 bp, Artificial Sequence
  ENSG00000163319_16 (sequence is synthesized)
attgaaaaacctcacctactctcgcgggtcctcagcgttctcctgcggaacctttgaacggggtactcgagcccacaggggaagagcagcggaaggggcctttcggaacgatttggaacg

SEQ ID NO: 495294 - DNA, 120 bp, Artificial Sequence
  ENSG00000163319_17 (sequence is synthesized)
aacgagatctggtattagactctaacatcttttattttagctacttgaatagagttctgccgtaggacaaaacaatttgataattactctgagttcagaaatgatgatgaattgattgta

SEQ ID NO: 495295 - DNA, 120 bp, Artificial Sequence
  ENSG00000163319_18 (sequence is synthesized)
gtcatgtagtcagctgagttttgaagtaggggaattcctagattagaagcaaagctgctataataccatatttttcttcctagatcttaaatttaaggatatgtgatttgggaattgttt

SEQ ID NO: 495296 - DNA, 120 bp, Artificial Sequence
  ENSG00000163319_19 (sequence is synthesized)
tttttttttttacatagccctttgtaagcaaatgatatgggaattttaaaaggtagtttgggtgagcagaattttagataactgaaaagagactgtacaaagcttagctataggttggct

SEQ ID NO: 495297 - DNA, 120 bp, Artificial Sequence
  ENSG00000163319_20 (sequence is synthesized)
atagtattaacatggactttctgaaagcacaggttcttgctacatgcaaaggtattttgacactaattagaccatacaaagcacttggcacagagctgaagagtagttacgtgagctgaa

SEQ ID NO: 495298 - DNA, 120 bp, Artificial Sequence
  ENSG00000163319_21 (sequence is synthesized)
tgtaaattggaaagtttgaggaattggaaaaaacaaaagaacttgtctagtttctctgagcatctgtcttggtaatctaatccatgcaccatactttaagaaagtaaagggacattattt

SEQ ID NO: 495299 - DNA, 120 bp, Artificial Sequence
  ENSG00000163319_22 (sequence is synthesized)
cttttttagttcataaatcccactttgtctctaatcaaagttatggaccctctccacagaaaaaggcacacagtcccattcatttgaagttttgcatacgattacagggagtcatgggct

SEQ ID NO: 495300 - DNA, 120 bp, Artificial Sequence
  ENSG00000163319_23 (sequence is synthesized)
tcaaagccatttctagattaagaacctctatcctggagacagccatactgactgtaggaaggaggcactgtgacaaaagcattagaggcagtggtggtaacagaaaagccaaaaagactg

SEQ ID NO: 495301 - DNA, 120 bp, Artificial Sequence
  ENSG00000163319_24 (sequence is synthesized)
aaaatagtgataaaatacttgatagagacatggggatggataaattagggattgtactcatttaagaatggcatatgttatctattgtgttgtaagtttccttaaatctaaaaatttttt

SEQ ID NO: 495302 - DNA, 120 bp, Artificial Sequence
  ENSG00000163319_25 (sequence is synthesized)
cattatctacaatctgagcaaagcattggaacactttcttatcagacatcatttttgttctgccataaaattttattctatgaagattgtactttattccagaatcttcccatgcgttaa

SEQ ID NO: 495303 - DNA, 120 bp, Artificial Sequence
  ENSG00000163319_26 (sequence is synthesized)
tccgtaggctaaactaaaacaaaataaagtgcttatacaaaatatgtacacagtaagaaaggtataactaatcctttgaatggatttgaatgtagaatagtaaccttttaaaattcagaa

SEQ ID NO: 495304 - DNA, 120 bp, Artificial Sequence
  ENSG00000163319_27 (sequence is synthesized)
ttaacacatcctattatcagacttttcgtttttttccctagcccatttcaatggaaaatccttataaagaacctcttaagaaatgtatcttgtgtggaaagcatgtagattataagaatg

SEQ ID NO: 495305 - DNA, 120 bp, Artificial Sequence
  ENSG00000163319_28 (sequence is synthesized)
tacaggtgagatctggttttacttcactatattttagggttttgcttctgatagatctgcttaaagagaatcaagtcagtttatagcaggcttttgtagaggtaactgttttagcaactt

SEQ ID NO: 495306 - DNA, 120 bp, Artificial Sequence
  ENSG00000163319_29 (sequence is synthesized)
cataatttcaaatttggttataattctatgtataagcttatctctgctttattcaagtaaaagcaccttggctttcccccacttactgttatttccactctgtttttttcactaccccaa

SEQ ID NO: 495307 - DNA, 120 bp, Artificial Sequence
  ENSG00000163319_30 (sequence is synthesized)
acatcttaatagctccctgtggcagtaattctcaattggtgagggtcagaactttggaaaaagctcatctggtgaagctgatctctttatctcaccacccatatcactgattcacatatt

SEQ ID NO: 495308 - DNA, 120 bp, Artificial Sequence
  ENSG00000163319_31 (sequence is synthesized)
atatcactgattcacatattacttatctcttgtctaactctcagcaagttagaagttgcaaatttggggcaagtgaatagcgctagaattctgtatgttggctgggtgtggtggctcacg

SEQ ID NO: 495309 - DNA, 120 bp, Artificial Sequence
  ENSG00000163319_32 (sequence is synthesized)
aataaattctatcacgttaccactaataaacttattttacaacagggtctcactcagtctcccaggctgcagtgcagtggtgcgatcatggctcaataatgcagcttcaacctcccgtgc

SEQ ID NO: 495310 - DNA, 72 bp, Artificial Sequence
  ENSG00000163319_33 (sequence is synthesized)
ctgggcccagatgacatgtaaagctgtgaaatgtgcttagtataatagtgtggaaaaacagtttaatggctc

SEQ ID NO: 495311 - DNA, 120 bp, Artificial Sequence
  ENSG00000163319_34 (sequence is synthesized)
gtgcttagtataatagtgtggaaaaacagtttaatggctcttttgattagtacatgtataaataaggcagtattgagatttaccctatcttccatgaacaataaaattattcttagttgg

SEQ ID NO: 495312 - DNA, 120 bp, Artificial Sequence
  ENSG00000163319_35 (sequence is synthesized)
gaaatgtgtctgaaatttagtaaagctttatataacctgaaggttgttttttgaaatttacacattcagaaataaataacagatacttttttttcccctccacataaaactccaaaacag

SEQ ID NO: 495313 - DNA, 120 bp, Artificial Sequence
  ENSG00000163319_36 (sequence is synthesized)
acagggtttatgccagttacatacaaggatcctgcatatctcaaggaccctaaagtttgtaacatcagatatcgggaataaattctatcacgttaccactaataaacttattttacagta

SEQ ID NO: 495314 - DNA, 120 bp, Artificial Sequence
  ENSG00000163320_0 (sequence is synthesized)
cgggctctgccataggcggtgcaggcggacggggcgcggcgggggacacggcggccgccgcggggctcgatcgggcaacggcggcgacggcggcagcgacggatcctcctcctcccttat

SEQ ID NO: 495315 - DNA, 120 bp, Artificial Sequence
  ENSG00000163320_1 (sequence is synthesized)
ggcggcagcgacggatcctcctcctcccttattcccttgctcctctttcttccttttcttttcctttccggccgggcctcgtccactttccctaacggcggcctcgatcctacgtaaagg

SEQ ID NO: 495316 - DNA, 120 bp, Artificial Sequence
  ENSG00000163320_2 (sequence is synthesized)
catgacttcctggcaccacagggaaaatcgggtgcaagcccagaaactatttccccaccaccacttgttgaaaaactgatttgaaggcatctccggggttgaacaaacggaaagtgccag

SEQ ID NO: 495317 - DNA, 120 bp, Artificial Sequence
  ENSG00000163320_3 (sequence is synthesized)
gatttgatgcgtctctggtttcgctctggagaccattccctgctaagtatcaagacgaaaaaaactggaaactaatccgaaccatatttatttagagtcagaatggagcgatttgtagta

SEQ ID NO: 495318 - DNA, 120 bp, Artificial Sequence
  ENSG00000163320_4 (sequence is synthesized)
acagcaccacctgctcgaaaccgttctaagactgctttgtatgtgactcccctggatcgagtcactgagtttggaggtgagctgcatgaagatggaggaaaactcttctgcacttcttgc

SEQ ID NO: 495319 - DNA, 120 bp, Artificial Sequence
  ENSG00000163320_5 (sequence is synthesized)
aatgtggttctgaatcatgttcgcaagtctgccattagtgaccacctcaagtcaaagactcataccaagaggaaggcagaatttgaagagcagaatgtgagaaagaagcagaggccccta

SEQ ID NO: 495320 - DNA, 120 bp, Artificial Sequence
  ENSG00000163320_6 (sequence is synthesized)
actgcatctcttcagtgcaacagtactgcgcaaacagagaaagtcagtgttatccaggactttgtgaaaatgtgcctggaagccaacatcccacttgagaaggctgatcacccagcagtc

SEQ ID NO: 495321 - DNA, 120 bp, Artificial Sequence
  ENSG00000163320_7 (sequence is synthesized)
cgtgctttcctatctcgccatgtgaagaatggaggctccatacctaagtcagaccagctacggagggcatatcttcctgatggatatgagaatgagaatcaactcctcaactcacaagat

SEQ ID NO: 495322 - DNA, 120 bp, Artificial Sequence
  ENSG00000163320_8 (sequence is synthesized)
tgttgactaggaggttaccaccattgtgatcaagataaatgtggagtattaaagttatgtgttgattgtgtggttcatttttgtatttatttcatttaaaatcatgtgacgcagaatagt

SEQ ID NO: 495323 - DNA, 120 bp, Artificial Sequence
  ENSG00000163320_9 (sequence is synthesized)
tttgcaatgtgtatatagttgcaggcaaaaaaaaaaccacctcactgcaaaacttattgttaattttagtcaccaatggtataaagcaaaacctaggtttagagtgtgctaggatacctg

SEQ ID NO: 495324 - DNA, 120 bp, Artificial Sequence
  ENSG00000163320_10 (sequence is synthesized)
aaacctgatggttatctttaaaattaatggtttttctcctgaaatgtttgtgcatggaagaactgccctgcttttttaccctgttgccatgtatgattattccttgtgagattacttaat

SEQ ID NO: 495325 - DNA, 120 bp, Artificial Sequence
  ENSG00000163320_11 (sequence is synthesized)
tacttggattgaagactagcctattgaagctgctgccaggcaacaccacttaacagtaacttaaaggaattattttctttagaggatcctcttcaaaaaggaagggagatagtggaaaac

SEQ ID NO: 495326 - DNA, 120 bp, Artificial Sequence
  ENSG00000163320_12 (sequence is synthesized)
tgttcttatatcttcagatccctagcagaaatgactgtttatttcaaactatgttttacttgtatatgatgtagtcaccttaactatctttcaattccatacttcccccgcccccatttt

SEQ ID NO: 495327 - DNA, 120 bp, Artificial Sequence
  ENSG00000163320_13 (sequence is synthesized)
aaaggcttattgttgtattttgtagcagcttcaagtgaccaaaagactaaaatctttcaacgtcaatgccaaaagccaaggggaattttgcagtgacaggattttagtctcttactatga

SEQ ID NO: 495328 - DNA, 120 bp, Artificial Sequence
  ENSG00000163320_14 (sequence is synthesized)
atactaatttcgaaccatagctttcattttaagcatcatcttgaatttctaaacttttttctatgtcttggtgttaaaagatttcaagattggcatttttacttaaacagacattttatg

SEQ ID NO: 495329 - DNA, 120 bp, Artificial Sequence
  ENSG00000163320_15 (sequence is synthesized)
gttgagttttctctttattatagagaattagtaatttttttttggctgacagatcagataaaattactttctattcattaatttttctctacaactttatgagtttatttaggtgaatag

SEQ ID NO: 495330 - DNA, 120 bp, Artificial Sequence
  ENSG00000163320_16 (sequence is synthesized)
tctagactagaaacaagtttactttatctgctttgcctctggtggtacaaggtttttaacatggatggtaaacaattgtctagaaattctggcaggttttttgtattggagatctggcag

SEQ ID NO: 495331 - DNA, 120 bp, Artificial Sequence
  ENSG00000163320_17 (sequence is synthesized)
tatcctgcataactttgggtgaggaaattgttctcttaaagatcagccatgttcaggaaatgatctctgtttgaacctcactatcctgtaaggttatccaagtagcttagcccagctaag

SEQ ID NO: 495332 - DNA, 120 bp, Artificial Sequence
  ENSG00000163320_18 (sequence is synthesized)
ctagagctttaataaaaaatcttaaattctttgaaattcaagttaaaaatacttatatatttctattacaaagcagtgacaaatgatgccctgtgtgacttggagttatctttgactttt

SEQ ID NO: 495333 - DNA, 120 bp, Artificial Sequence
  ENSG00000163320_19 (sequence is synthesized)
accacaaatcttcatttataaaagaaaaagccaaagtgaaaaaaagttagattgtgtatttttcagtaacagctttccatgtcttaagatttttttacagacttaagtttctaattcagg

SEQ ID NO: 495334 - DNA, 120 bp, Artificial Sequence
  ENSG00000163320_20 (sequence is synthesized)
ttgtcaaactggccatttgacttcagagatttgttttcattaaaaaataagcctgccgccaaaataaatcacttatcaaaatgtgaactgttttcctcatgttcagttatgttaaagtag

SEQ ID NO: 495335 - DNA, 120 bp, Artificial Sequence
  ENSG00000163320_21 (sequence is synthesized)
tatgataaatgcatgcctagagtagtgctctcgttgatgaagcacatgtatgaggagaccagcagcaaaacataaccatatgtgttttgcgtttacttcctctagaaaagaatttgcagg

SEQ ID NO: 495336 - DNA, 120 bp, Artificial Sequence
  ENSG00000163320_22 (sequence is synthesized)
caaccatgtttaatttgaactatctaagatggtagattttagaagctaggaataattgagttttatagcactattttcagaatacgaaaagatacacaatcattctgttttttgaaattc

SEQ ID NO: 495337 - DNA, 120 bp, Artificial Sequence
  ENSG00000163320_23 (sequence is synthesized)
catgtgattcaaactgctccctattatttgggtattaatttgcactaatagcaaaatgtaatggcagatcagctttgagagtggtcctaagcagtaaactggatgatgttgcattagaaa

SEQ ID NO: 495338 - DNA, 120 bp, Artificial Sequence
  ENSG00000163320_24 (sequence is synthesized)
aacatcaataattcatatttaagttttagtagttactactgatttgataatcacttaaattttatatatcttaatgtattttttcagactcctaattaattcccacattcactgtaacta

SEQ ID NO: 495339 - DNA, 120 bp, Artificial Sequence
  ENSG00000163320_25 (sequence is synthesized)
ggggcatagtccattctgttaggattatatcctctccttagaaatgttttccatcctgttgtggggatttggtattaatgtttcttcattgattatggaacttttgttccctgaagctag

SEQ ID NO: 495340 - DNA, 120 bp, Artificial Sequence
  ENSG00000163320_26 (sequence is synthesized)
ttaactgtgtctaaagttaaataaatacagcagaatgattgttttagcctgctcgaactgatacaaatccctgaaaccatgattggcatatgttagataacaaatgaggatgtctaagag

SEQ ID NO: 495341 - DNA, 120 bp, Artificial Sequence
  ENSG00000163320_27 (sequence is synthesized)
gcatatgctgctttggaggtgtagtgaacgtgtgtacagaagttttcaatcttaactatatagtgttagtgtgatgctatactattggaaaaatagcagcttttttctattttataagtt

SEQ ID NO: 495342 - DNA, 120 bp, Artificial Sequence
  ENSG00000163320_28 (sequence is synthesized)
gtatgcataaacataagatttgtaatgtttcatttataaactgccttcttcaacacatgttaatagtgttttctcaaagtattgatagtatgtcttccagaatttcacaatatgcttaca

SEQ ID NO: 495343 - DNA, 120 bp, Artificial Sequence
  ENSG00000163320_29 (sequence is synthesized)
gtaaatatttcctagcttgttgaaatgttcaattctttgttggctttcttcttgattctgtgggggtgtataacaagcctgaaggacattgtaatcatttcttacaaggtgaaaattaag

SEQ ID NO: 495344 - DNA, 120 bp, Artificial Sequence
  ENSG00000163320_30 (sequence is synthesized)
aaagattgtgtatgagagcctatatagttgttttatccattatcatctttgattaagactttaaaaaaatgctatttccagttaatgcatttggccctattgaattttcagggaccagaa

SEQ ID NO: 495345 - DNA, 120 bp, Artificial Sequence
  ENSG00000163320_31 (sequence is synthesized)
aacattaaaaagttctgcatcttataatggtaaccaattaagcttgagattgttctgaaagtatcaattgctttaaaactgttgtaagtacagttggcaagatctccaagctgaaacttc

SEQ ID NO: 495346 - DNA, 120 bp, Artificial Sequence
  ENSG00000163320_32 (sequence is synthesized)
cacgttaaaacttttgcctgtaagaatttgcacatgaatgttaatggaaaacacaaaacttaagatggcccaaaacaaaagccacaaacagttcatcatttggtgcttagtctttgtaag

SEQ ID NO: 495347 - DNA, 120 bp, Artificial Sequence
  ENSG00000163320_33 (sequence is synthesized)
ggctctctgtggtttgacttaccccagctaccgttaaatgaggacaaatcaccttaaaacatgttcatttgattcataacaaggaaaattgggtctatgattttttgccaatcttagcct

SEQ ID NO: 495348 - DNA, 120 bp, Artificial Sequence
  ENSG00000163320_34 (sequence is synthesized)
aaaagaaattgctttagcttctggtcagcactgattaaaatgtgaatagtgaagtggctatcctaaactggtttatctccacccacactatcatagatttcttaggtaaatacaattctt

SEQ ID NO: 495349 - DNA, 120 bp, Artificial Sequence
  ENSG00000163320_35 (sequence is synthesized)
atctagtggtattctacttgtattcagaatactgtattaaaattttactatttcatttttgtattctgtgcttattttttttgctcacgcatgtatgcttagtataaatgtgtcacttct

SEQ ID NO: 495350 - DNA, 120 bp, Artificial Sequence
  ENSG00000163320_36 (sequence is synthesized)
aaagttttgtctctgacttttagaaataaatttcagaaaaattgtttcaaaagattttgaaagcacattttgttttgtgagtcaatgacaaatatatttcctgattacaaaacagcagaa

SEQ ID NO: 495351 - DNA, 120 bp, Artificial Sequence
  ENSG00000163320_37 (sequence is synthesized)
tttatcgtacttttcagaatttctgtggaatgtttaatcttctggatccatgactgtctgatacgttggcaatttaaagtccttttgaaagagagttcatgttacccagctattctctag

SEQ ID NO: 495352 - DNA, 120 bp, Artificial Sequence
  ENSG00000163320_38 (sequence is synthesized)
tatgtattcatggaatactccatcgtttctgattacacttatgagacataattcttcagagcacacttagaattatttctctaacatatttatgcagacagaattccatcttgaatttta

SEQ ID NO: 495353 - DNA, 120 bp, Artificial Sequence
  ENSG00000163320_39 (sequence is synthesized)
tcaaattcactttaacttcttaagtcttggttattgtaagagcccaaaggtatggccccagggaacaattaagacttgatgatttgtcacctaccaaaatatgttcattatgtaaaggtt

SEQ ID NO: 495354 - DNA, 120 bp, Artificial Sequence
  ENSG00000163320_40 (sequence is synthesized)
tcaatgcccataaggctgtcatttggtatttagtgcagtgctcataaaagtgtgttattaggataaattgagaaattaattaagctgcttctagattaaataaatataaatatttggaca

SEQ ID NO: 495355 - DNA, 120 bp, Artificial Sequence
  ENSG00000163320_41 (sequence is synthesized)
aatattgaagatacgtactttttccatcaaattttaattgaggttctgctgtatactagactctatgttcttgattttgttcttactagttaagtgaagtaagtattaacaaatgtaatt

SEQ ID NO: 495356 - DNA, 120 bp, Artificial Sequence
  ENSG00000163320_42 (sequence is synthesized)
attaattttaatgggaaaaggaaacaagtattagagaagtaagactttgcatatcttaacaccttttggaaaacggaggtatacatgcattacaaaataactttgaactgtatattttgg

SEQ ID NO: 495357 - DNA, 120 bp, Artificial Sequence
  ENSG00000163320_43 (sequence is synthesized)
ctttacaatttaatgtcattgttgcttttagttgtatttggtctggtttttttttgtggtttttcctcagaacaattttggaaactatattcatcttcatatagaattatggcagtttat

SEQ ID NO: 495358 - DNA, 120 bp, Artificial Sequence
  ENSG00000163320_44 (sequence is synthesized)
aggcccacctgtttgaaaaaactttatccacagttgtgttcctaaaatcagttgtcccagaattgtgacaggaaagaagctcttttgaacttgaatgcatatctaagttagatgagatta

SEQ ID NO: 495359 - DNA, 120 bp, Artificial Sequence
  ENSG00000163320_45 (sequence is synthesized)
atacaatttatatcctgaatgtaatttatatcctaaatgttgaactgtgattaggtttccctaaataatggtgacatctgggatagtttgagttctttctttatagtctaatttacttga

SEQ ID NO: 495360 - DNA, 120 bp, Artificial Sequence
  ENSG00000163320_46 (sequence is synthesized)
atttcgtaaaaatcaaggaatggacctgattgcgactggttagtaacttgttctagttttgccttcccttatatatttcaggtaagttaagattaatagacacacagtctactaatttga

SEQ ID NO: 495361 - DNA, 120 bp, Artificial Sequence
  ENSG00000163320_47 (sequence is synthesized)
attaagttttttgaagtatttgaagtgtttatatactgccttttattgttcattacttccagaatgaactgttgttataatactcatctttgtttcttttgtcttgaaagaaccatattt

SEQ ID NO: 495362 - DNA, 120 bp, Artificial Sequence
  ENSG00000163320_48 (sequence is synthesized)
aaacgcagtgccctcacttgtggttccgggctggggacggagtgaagtcccacgtatctcaattaagggaagtgctgggtttatatggagaacatagactatccgcaagggagctggtta

SEQ ID NO: 495363 - DNA, 120 bp, Artificial Sequence
  ENSG00000163320_49 (sequence is synthesized)
ccgaaagagaagtccctcctccaaaagagcgccttggagggctgcgcaggtgcagatacctctactaagaagacagaagacttactttcatcatctgaatcaaatccaaagagtgtctga

SEQ ID NO: 495364 - DNA, 120 bp, Artificial Sequence
  ENSG00000163320_50 (sequence is synthesized)
taagtatcaagacgaaaaaaactggaaactaatccgaatttctgtggaatgtttaatcttctggatccatgactgtctgatacgttggcaatttaaagtccttttgaaagagagttcatg

SEQ ID NO: 495365 - DNA, 120 bp, Artificial Sequence
  ENSG00000163320_51 (sequence is synthesized)
cttatgatgagttttcttttgatctagcaaacgatatgctttttctcttttgttggctaattcctgcactttttaatttcttcatttgttgaaaatgttttcttctattgaaaacacttt

SEQ ID NO: 495366 - DNA, 120 bp, Artificial Sequence
  ENSG00000163320_52 (sequence is synthesized)
tgttcttcgggtatgtaaactcgagcatcctctactgggtggaaatttgcctctgcagtaacacaaacagacttcttgaaattacgaaaacattggaaagtataggcctttcacattagc

SEQ ID NO: 495367 - DNA, 120 bp, Artificial Sequence
  ENSG00000163320_53 (sequence is synthesized)
acaaatgattgagcattttatgctataaagaattacatgcttattgtttttgaaatccaaatatttaaagatacaagactttttacatagaaagtaagacttaacgcattacggggcaca

SEQ ID NO: 495368 - DNA, 120 bp, Artificial Sequence
  ENSG00000163322_0 (sequence is synthesized)
ctcttgtgtagcctgaggcggcggtagcatggagggggagagtacgtcggcggtgctctcgggctttgtgctcggcgcactcgctttccagcacctcaacacggactcggacacggaagg

SEQ ID NO: 495369 - DNA, 120 bp, Artificial Sequence
  ENSG00000163322_1 (sequence is synthesized)
ttttcttcttggggaagtaaaaggtgaagccaagaacagcattactgattcccaaatggatgatgttgaagttgtttatacaattgacattcagaaatatattccatgctatcagctttt

SEQ ID NO: 495370 - DNA, 120 bp, Artificial Sequence
  ENSG00000163322_2 (sequence is synthesized)
tagcttttataattcttcaggcgaagtaaatgagcaagcactgaagaaaatattatcaaatgtcaaaaagaatgtggtaggttggtacaaattccgtcgtcattcagatcagatcatgac

SEQ ID NO: 495371 - DNA, 120 bp, Artificial Sequence
  ENSG00000163322_3 (sequence is synthesized)
gtttagagagaggctgcttcacaaaaacttgcaggagcatttttcaaaccaagaccttgtttttctgctattaacaccaagtataataacagaaagctgctctactcatcgactggaaca

SEQ ID NO: 495372 - DNA, 120 bp, Artificial Sequence
  ENSG00000163322_4 (sequence is synthesized)
ttccttatataaacctcaaaaaggactttttcacagggtacctttagtggttgccaatctgggcatgtctgaacaactgggttataaaactgtatcaggttcctgtatgtccactggttt

SEQ ID NO: 495373 - DNA, 120 bp, Artificial Sequence
  ENSG00000163322_5 (sequence is synthesized)
tagccgagcagtacaaacacacagctctaaattttttgaagaagatggatccttaaaggaggtacataagataaatgaaatgtatgcttcattacaagaggaattaaagagtatatgcaa

SEQ ID NO: 495374 - DNA, 120 bp, Artificial Sequence
  ENSG00000163322_6 (sequence is synthesized)
aaaagtggaagacagtgaacaagcagtagataaactagtaaaggatgtaaacagattaaaacgagaaattgagaaaaggagaggagcacagattcaggcagcaagagagaagaacatcca

SEQ ID NO: 495375 - DNA, 120 bp, Artificial Sequence
  ENSG00000163322_7 (sequence is synthesized)
aaaagaccctcaggagaacatttttctttgtcaggcattacggaccttttttccaaattctgaatttcttcattcatgtgttatgtctttaaaaaatagacatgtttctaaaagtagctg

SEQ ID NO: 495376 - DNA, 120 bp, Artificial Sequence
  ENSG00000163322_8 (sequence is synthesized)
taactacaaccaccatctcgatgtagtagacaatctgaccttaatggtagaacacactgacattcctgaagctagtccagctagtacaccacaaatcattaagcataaagccttagactt

SEQ ID NO: 495377 - DNA, 120 bp, Artificial Sequence
  ENSG00000163322_9 (sequence is synthesized)
agatgacagatggcaattcaagagatctcggttgttagatacacaagacaaacgatctaaagcagatactggtagtagtaaccaagataaagcatccaaaatgagcagcccagaaacaga

SEQ ID NO: 495378 - DNA, 120 bp, Artificial Sequence
  ENSG00000163322_10 (sequence is synthesized)
tgaagaaattgaaaagatgaagggttttggtgaatattcacggtctcctacattttgatccttttaaccttacaaggagatttttttatttggctgatgggtaaagccaaacatttctat

SEQ ID NO: 495379 - DNA, 120 bp, Artificial Sequence
  ENSG00000163322_11 (sequence is synthesized)
tgtttttactatgttgagctacttgcagtaagttcatttgtttttactatgttcacctgtttgcagtaatacacagataactcttagtgcatttacttcacaaagtactttttcaaacat

SEQ ID NO: 495380 - DNA, 120 bp, Artificial Sequence
  ENSG00000163322_12 (sequence is synthesized)
cagatgcttttatttccaaacctttttttcacctttcactaagttgttgaggggaaggcttacacagacacattctttagaattggaaaagtgagaccaggcacagtggctcacacctgt

SEQ ID NO: 495381 - DNA, 120 bp, Artificial Sequence
  ENSG00000163322_13 (sequence is synthesized)
aatcccagcacttagggaagacaagtcaggaggattgattgaagttaggagttagagaccagcctgggcaacgtattgagaccatgtctattaaaaaataaaatggaaaagcaagaatag

SEQ ID NO: 495382 - DNA, 120 bp, Artificial Sequence
  ENSG00000163322_14 (sequence is synthesized)
ccttattttcaaaatatggaaagaaatttatatgaaaatttatctgagtcattaaaattctccttaagtgatacttttttagaagtacattatggctagagttgccagataaaatgctgg

SEQ ID NO: 495383 - DNA, 120 bp, Artificial Sequence
  ENSG00000163322_15 (sequence is synthesized)
atatcatgcaataaatttgcaaaacatcatctaaaatttaaatttgtcctacatttgtacttgctaaatctggcagccttaattattacacaactataacacaacacaaacagtaatctc

SEQ ID NO: 495384 - DNA, 120 bp, Artificial Sequence
  ENSG00000163322_16 (sequence is synthesized)
tcccctagtttagagtcctttgcatgaaatttagcaaatctatcattttgaatacagtacaagcctggtaatccagtgtatttgggataggccagtggaactcagaactgatacatatat

SEQ ID NO: 495385 - DNA, 120 bp, Artificial Sequence
  ENSG00000163322_17 (sequence is synthesized)
ctatcatattcaatgtctattaggtgtaaatcatctcttcatgtaaaagacactactggtttgagggtagactcgtctaggaatattttgtccttctgtgacagcaccactatccatccc

SEQ ID NO: 495386 - DNA, 120 bp, Artificial Sequence
  ENSG00000163322_18 (sequence is synthesized)
aatgtaacatttctacaaagggaagatatcttaaccaggcatacttatatttgctagttggaaaatcattctgaacagttttaattccattctattgaatggattattgtatgagctatt

SEQ ID NO: 495387 - DNA, 120 bp, Artificial Sequence
  ENSG00000163322_19 (sequence is synthesized)
tggggatcagatataaatgacaatcacacagaaccacttttattcaacatagataaaatgtgatgagtgttaacattttaaataagcaatctgcttaatggacattggtatgaaggggaa

SEQ ID NO: 495388 - DNA, 120 bp, Artificial Sequence
  ENSG00000163322_20 (sequence is synthesized)
gtgtcattctttacctcactcctcaaacacttttctatccaaaggttggtttgagtcagtattggcatcatacaaccacttactgtaaaataagtttattagtggtaacgtgatagaatt

SEQ ID NO: 495389 - DNA, 120 bp, Artificial Sequence
  ENSG00000163322_21 (sequence is synthesized)
tattcccgatatctgatgttacaaactttagggtccttgagatatgcaggatccttgtatgtaactggcataaaccctgtaaagagataattaaagttcttgacaaaacataatgagcaa

SEQ ID NO: 495390 - DNA, 120 bp, Artificial Sequence
  ENSG00000163322_22 (sequence is synthesized)
aatttcagctagctcaattcagttgttgaggtattctttcttacccattatttgagctctcttaattgcttttgtgatttctttctgtttcttcccacaaagacctgtaaaataaaaagc

SEQ ID NO: 495391 - DNA, 90 bp, Artificial Sequence
  ENSG00000163322_23 (sequence is synthesized)
tcacccaggctggagtacagtggtgctctctcgcctcactgcaacctccgccacccaggctcaatcgattatcttgcctcagcctcctta

SEQ ID NO: 495392 - DNA, 120 bp, Artificial Sequence
  ENSG00000163322_24 (sequence is synthesized)
ccacccaggctcaatcgattatcttgcctcagcctccttagtaactggaattacaggcatgcaccgccacacccggataatttttttgtatttgtagtagaaacggggtttcaccatatt

SEQ ID NO: 495393 - DNA, 64 bp, Artificial Sequence
  ENSG00000163322_25 (sequence is synthesized)
caacaagtttttaagtcaaggattggtaaatcatttttgtcaagggccacaataataatctagg

SEQ ID NO: 495394 - DNA, 120 bp, Artificial Sequence
  ENSG00000163322_26 (sequence is synthesized)
ggtaaatcatttttgtcaagggccacaataataatctaggttttgtgggccatacagtctccatcactgccactcaactctgctgttgtagctcgaaaacaaccatatggcactacgtaa

SEQ ID NO: 495395 - DNA, 61 bp, Artificial Sequence
  ENSG00000163322_27 (sequence is synthesized)
tgctgttgtagctcgaaaacaaccatatggcactacgtaaacaaaactacaaaaacaagtg

SEQ ID NO: 495396 - DNA, 90 bp, Artificial Sequence
  ENSG00000163322_28 (sequence is synthesized)
gacgtggcatttgtatatgatgaacctaatcaagataaaaagggagcaggtcgaatttggcctatgggccatagtttgctgacaccaagt

SEQ ID NO: 495397 - DNA, 120 bp, Artificial Sequence
  ENSG00000163322_29 (sequence is synthesized)
tcgaatttggcctatgggccatagtttgctgacaccaagtttaagtatcaatctaggaatgattatagtatattccaaaacatcaacaacagttttttaaagcccagtttttctatatag

SEQ ID NO: 495398 - DNA, 120 bp, Artificial Sequence
  ENSG00000163322_30 (sequence is synthesized)
ttaactctgcataagacagcaaaataataatcctcttggcctaagagactttttcatagtaactagctctagtccctgtagtatctgatctagtagtaatttatagcacaatttgaaaat

SEQ ID NO: 495399 - DNA, 120 bp, Artificial Sequence
  ENSG00000163322_31 (sequence is synthesized)
ttgagttttcttaaatgatagaaatagattgatataattcgtatctacatttatattcccataataaaaaagaacatacctgtaatgtgccttccataaatgcatccagtaaatggagaa

SEQ ID NO: 495400 - DNA, 120 bp, Artificial Sequence
  ENSG00000163322_32 (sequence is synthesized)
acaaactgggacaaaagctgttttggagttttatgtggaggggaaaaaaaagtatctgttatttatttctgaatgtgtaaatttcaaaaaacaaccttcaggttatataaagctttacta

SEQ ID NO: 495401 - DNA, 120 bp, Artificial Sequence
  ENSG00000163322_33 (sequence is synthesized)
aatttcagacacatttcataaaatataagaaaaaaatattgttatcctcctgttaccttttaaatattttctatccagtgtgtcaagtctatatataattaaacagcagattaatcagca

SEQ ID NO: 495402 - DNA, 120 bp, Artificial Sequence
  ENSG00000163322_34 (sequence is synthesized)
gcataaggcaaagagcaagaaagctagtggattacaggcgtgagccaccgcagctggcccatgagttaatatttcagtttatttctgtatattttcagcgaactaactggcatgataaaa

SEQ ID NO: 495403 - DNA, 120 bp, Artificial Sequence
  ENSG00000163322_35 (sequence is synthesized)
gctgtataaatgagaagttacatgtgaaaaagcattttacaacctataaggcttatttataacctacaagtgcttgttactgacatcctccagaaaataaataaaatttatataaaaggc

SEQ ID NO: 495404 - DNA, 67 bp, Artificial Sequence
  ENSG00000163322_36 (sequence is synthesized)
aaatgtgtatactttttatttacacaaatgggatcttactatatgtgcctaatatctcccaagatat

SEQ ID NO: 495405 - DNA, 120 bp, Artificial Sequence
  ENSG00000163322_37 (sequence is synthesized)
atgggatcttactatatgtgcctaatatctcccaagatatcacaagtacagaatagtatctgtgtgtataattcatcactctttgttttttttttttttgagatgaggtcttgctctttc

SEQ ID NO: 495406 - DNA, 73 bp, Artificial Sequence
  ENSG00000163322_38 (sequence is synthesized)
tattgctgggaccataggtatgcaccaccacgcctggctaattttttattgtttgtagagacaggttctcact

SEQ ID NO: 495407 - DNA, 73 bp, Artificial Sequence
  ENSG00000163322_39 (sequence is synthesized)
cctcctgtattgctgggaccataggtatgcaccaccacgcctggctaattttttattgtttgtagagacaggt

SEQ ID NO: 495408 - DNA, 120 bp, Artificial Sequence
  ENSG00000163322_40 (sequence is synthesized)
tagacgtaccataatttttttaaccatctaagaatgattttctgggtttttttgttaacataaacagtattaccatgaacatttagtattgtacatttctttgtgctgttgagtgtatat

SEQ ID NO: 495409 - DNA, 120 bp, Artificial Sequence
  ENSG00000163322_41 (sequence is synthesized)
ttgaaagtcacactcctggaggtagactagctgattgccttttggaaaacttatgccattttaggcttctccacagtatataaaagtgcctaggtccccatactcttttttttttttttt

SEQ ID NO: 495410 - DNA, 120 bp, Artificial Sequence
  ENSG00000163322_42 (sequence is synthesized)
gggattaccggcgactgccaccacacccagccaatatttgtatttttagtagagatggggctttgccatcttggccaagctggtctcaaacacctgacctcaggtgatctgcccgccctg

SEQ ID NO: 495411 - DNA, 120 bp, Artificial Sequence
  ENSG00000163322_43 (sequence is synthesized)
tacaggcgtgagtcaccatgcccggcccccatgctcttgccaacactaggtattatcaaatcttttaatctttgccaatttgataagtgaaaaaaatagcattttaatttgcatttctta

SEQ ID NO: 495412 - DNA, 120 bp, Artificial Sequence
  ENSG00000163322_44 (sequence is synthesized)
attttaatttgcatttcttaattacaaaagaggttaagtatttttttgatactttttactttttttcttggccattttctctgaaaaggataggcctattctttggctgcatttgtactg

SEQ ID NO: 495413 - DNA, 120 bp, Artificial Sequence
  ENSG00000163322_45 (sequence is synthesized)
ttttgcttttagtgatttgtaatcacattacttaaggaaactgggcttttgtcatgttttatacatatgctaatacagtttataattttttttctgtcaataaacactttaatgagaacc

SEQ ID NO: 495414 - DNA, 120 bp, Artificial Sequence
  ENSG00000163322_46 (sequence is synthesized)
ctcttgtgtagcctgaggcggcggtagcatggagggggagagtacgtcggcggtgctctcgggctttgtgctcggcgcactcgctttccagcacctcaacacggactcggacacggtgag

SEQ ID NO: 495415 - DNA, 120 bp, Artificial Sequence
  ENSG00000163322_47 (sequence is synthesized)
caacacggactcggacacggtgagccgagggacggggcggggtccggcgtcgcctgggaagagccctgcgcgcggcctgcctccccgctgttgctccggtccccgcccgctcccccgacg

SEQ ID NO: 495416 - DNA, 120 bp, Artificial Sequence
  ENSG00000163322_48 (sequence is synthesized)
attagtattctgtaagtttcagtgagtgaagggtgctaaaatgcagcttgaaaaccaaaaccgtggcatatccactgtggcatcgtaatgttgctactcaactcttttattcttgtaatc

SEQ ID NO: 495417 - DNA, 120 bp, Artificial Sequence
  ENSG00000163322_49 (sequence is synthesized)
attgcttgtcttaaaatgaccctgtcaaccgtgttcattttgatagctttgcatgtttgtgacaggtcgctcagcaggcgcaggccaccaaaagcaattcgcagccctctgcagtggtac

SEQ ID NO: 495418 - DNA, 120 bp, Artificial Sequence
  ENSG00000163322_50 (sequence is synthesized)
atttagaatttaagcctagatacttcagcagtttttctataactgaacaaagaaacaaagtagctcttgatggtccagtaaaatgagtctaaccagggactccttacaggttttatatat

SEQ ID NO: 495419 - DNA, 120 bp, Artificial Sequence
  ENSG00000163322_51 (sequence is synthesized)
agtaaactacattttcgtggaatatgagaattacgttaaaagagtaccaactaagaataattttattgttcatggaagatagggtaaatctcaatactgccttatttatacatgtactaa

SEQ ID NO: 495420 - DNA, 120 bp, Artificial Sequence
  ENSG00000163322_52 (sequence is synthesized)
tttatacatgtactaatcaaaagagccattaaactgtttttccacactattatactaagcacatttcacagctttacatgtcatctgggcccagtgtggtgactcatacctgtaatccca

SEQ ID NO: 495421 - DNA, 80 bp, Artificial Sequence
  ENSG00000163322_53 (sequence is synthesized)
tttgggaggccaaggcaggaggatcactgagcaacattaggagacctcatctctacaaaaaacttaaaaattagtcgggt

SEQ ID NO: 495422 - DNA, 89 bp, Artificial Sequence
  ENSG00000163322_54 (sequence is synthesized)
ggctgaggcaagaggattgcttgagcacgggaggttgaagctgcattattgagccatgatcgcaccactgcactgcagcctgggagact

SEQ ID NO: 495423 - DNA, 120 bp, Artificial Sequence
  ENSG00000163322_55 (sequence is synthesized)
agtaaattctattttggataagtagtaaagaatgggttttggggggtgtatttttttaaatcttgtaggggacaagtaatctattccagcaggtagatactaatctttcttttcattcta

SEQ ID NO: 495424 - DNA, 120 bp, Artificial Sequence
  ENSG00000163322_56 (sequence is synthesized)
gggacttctaataccccaacactacaaagctttagattttcagtattcgtaaggaaaggtgtgatacctttcctcactcatcaccagggtcacagccaacagccctataacaaaagacag

SEQ ID NO: 495425 - DNA, 120 bp, Artificial Sequence
  ENSG00000163322_57 (sequence is synthesized)
gttaacaagagaaaagaacgacaaatttatttaatcaaagtttaacacgacataggcgccttcagaaatgaagacctcaagccccaaggaaaactgtctatttttatgcttcacttcgat

SEQ ID NO: 495426 - DNA, 120 bp, Artificial Sequence
  ENSG00000163322_58 (sequence is synthesized)
gtcctcttgtgtagcctgaggcggcggtagcatggagggggagagtacgtcggcggtgctctcgggctttgtgctcggcgcactcgctttccagcacctcaacacggactcggacacggt

SEQ ID NO: 495427 - DNA, 120 bp, Artificial Sequence
  ENSG00000163322_59 (sequence is synthesized)
cgcggtggctcacgcctgtaattccagccctttgggaagccgaggcgggtgaatcacctgagcccacgagttcgagaccatcggggacaacgtagtgagacccggtctctacaaaatcta

SEQ ID NO: 495428 - DNA, 120 bp, Artificial Sequence
  ENSG00000163328_0 (sequence is synthesized)
cccaccttactttatcggaacgtgcctaagctgctgcagctggcacccggttgcgctcggcgaagagggctgggggcgggagatgacggtggtcttctccctgcttggcaccctgcgagc

SEQ ID NO: 495429 - DNA, 120 bp, Artificial Sequence
  ENSG00000163328_1 (sequence is synthesized)
accagctcccttctcctcgccactccaaggttgcagacgaagcaggtactgtcctagatgttaaggacacaacattgagcaaaaacatgcatagtccctgcttccgtgacacttgagtga

SEQ ID NO: 495430 - DNA, 120 bp, Artificial Sequence
  ENSG00000163328_2 (sequence is synthesized)
actgaatgtgcaaagtccctgtggcacaaagtccctggggccagtgtgtgtggcgggtgtagaaggagctaaagagatctggttggagttggagggtgagagaaaatgaattctaattta

SEQ ID NO: 495431 - DNA, 120 bp, Artificial Sequence
  ENSG00000163328_3 (sequence is synthesized)
cctgcagagaacttaaccattgcagtcaatatgaccaagactttgcctacagcagtaacgcatggatttaattccactaatgacccaccttcaatgtcaattacaaggctttttccagcc

SEQ ID NO: 495432 - DNA, 120 bp, Artificial Sequence
  ENSG00000163328_4 (sequence is synthesized)
ttactggaatgctttggcattgtcctttgtggctacatagcaggaagggccaatgtcataacatcaacccaggccaaaggactaggaaattttgtctccagatttgcacttccagcttta

SEQ ID NO: 495433 - DNA, 120 bp, Artificial Sequence
  ENSG00000163328_5 (sequence is synthesized)
ttattcaaaaacatggttgtacttaatttttccaatgtggactggtccttcctatatagtatcttaattgccaaagcttctgtatttttcattgtatgtgtattaaccttattggttgcc

SEQ ID NO: 495434 - DNA, 120 bp, Artificial Sequence
  ENSG00000163328_6 (sequence is synthesized)
agtcctgatagtcgatttagcaaagctggactattccctatttttgctacacaaagtaatgactttgcattgggataccctatagttgaagctttatatcaaactacatacccagaatat

SEQ ID NO: 495435 - DNA, 120 bp, Artificial Sequence
  ENSG00000163328_7 (sequence is synthesized)
ctccagtacatttatttggtggcaccaatatctcttatgatgttaaaccctatagggtttattttctgtgaaatccaaaagtggaaagacactcaaaatgcttctcaaaataaaataaaa

SEQ ID NO: 495436 - DNA, 120 bp, Artificial Sequence
  ENSG00000163328_8 (sequence is synthesized)
attgtgggactcggactcctgcgtgtattacagaacccaatagtatttatggtcttcattggcatcgccttcaattttattcttgatcgaaaggtacctgtatatgtcgaaaattttctt

SEQ ID NO: 495437 - DNA, 120 bp, Artificial Sequence
  ENSG00000163328_9 (sequence is synthesized)
gatggacttggaaattctttttctggatcagccctattttatcttggtctcacgatggtgggaaaaataaagagactgaagaagtcggcatttgtagtactaattcttctcatcacagct

SEQ ID NO: 495438 - DNA, 120 bp, Artificial Sequence
  ENSG00000163328_10 (sequence is synthesized)
aaacttctggtgctgccacttctgtgcagagaaatggtggaactcttggacaagggcgacagtgtggtgaaccatacaagtttatcaaattatgcatttctgtatggtgtatttcctgta

SEQ ID NO: 495439 - DNA, 120 bp, Artificial Sequence
  ENSG00000163328_11 (sequence is synthesized)
gcaccaggagtggctatctttgcaacacaattcaacatggaagtagaaattataacctcagggatggtgataagcacatttgtgtctgctcccatcatgtacgtttctgcctggttactg

SEQ ID NO: 495440 - DNA, 120 bp, Artificial Sequence
  ENSG00000163328_12 (sequence is synthesized)
acctttcccactatggaccctaagccattggcatatgccatccagaatgttagttttgatataagtattgtcagcctgatctccttgatctggtctctggctattcttcttttgagtaag

SEQ ID NO: 495441 - DNA, 120 bp, Artificial Sequence
  ENSG00000163328_13 (sequence is synthesized)
aaatataaacagcttcctcatatgcttacaactaatttactcattgctcagtctattgtctgtgctggaatgatgatatggaattttgttaaagaaaaaaattttgttggacaaattttg

SEQ ID NO: 495442 - DNA, 120 bp, Artificial Sequence
  ENSG00000163328_14 (sequence is synthesized)
gtgtttgttctattgtacagctccctctatagcacctacctgtggacaggccttctagcaatttctttgtttcttttgaaaaagcgagagagggtacaaattcctgttggaataatcata

SEQ ID NO: 495443 - DNA, 120 bp, Artificial Sequence
  ENSG00000163328_15 (sequence is synthesized)
atatctggctggggaattcctgctctccttgttggtgttcttttgataactggaaaacacaatggagatagcattgactcagccttcttttatggaaaagaacagatgatcaccacagca

SEQ ID NO: 495444 - DNA, 120 bp, Artificial Sequence
  ENSG00000163328_16 (sequence is synthesized)
cagtctcagagccacaaagtggtggagcctggaaatactgcttttgaggagagtccagcaccagtaaatgaaccagaactttttacaagctctattccagaaacaagttgctgctcctgc

SEQ ID NO: 495445 - DNA, 120 bp, Artificial Sequence
  ENSG00000163328_17 (sequence is synthesized)
tccatgggaaatggtgaattacactgcccatcaatagagccaatagcaaacacaagcaccagtgagcctgtgattccttcgtttgagaaaaacaatcattgtgtgagtcgctgtaactcc

SEQ ID NO: 495446 - DNA, 120 bp, Artificial Sequence
  ENSG00000163328_18 (sequence is synthesized)
cagagctgcatattagcccaggaagaagaacagtatctacagagtggagaccagcaactgacccgacatgtgttgctgtgtttacttctcatcattggcctgttcgctaatctttccagt

SEQ ID NO: 495447 - DNA, 120 bp, Artificial Sequence
  ENSG00000163328_19 (sequence is synthesized)
tgtttatggtggctattcaaccaagagcctggaagactttatgttgagttacagtttttctgtgccgtgtttaactttggtcagggatttatttcctttggaatctttggattagataaa

SEQ ID NO: 495448 - DNA, 120 bp, Artificial Sequence
  ENSG00000163328_20 (sequence is synthesized)
catttaatcatcctgcctttcaaaagaagacttgaattcctatggaacaataaagacacagcagaaaacagggattctcctgtttcagaggaaataaaaatgacctgtcaacaatttatc

SEQ ID NO: 495449 - DNA, 120 bp, Artificial Sequence
  ENSG00000163328_21 (sequence is synthesized)
cattatcaccgtgacctctgtatccgaaacattgtcaaagaaagaaggtgtggtgcaaagacttctgctggaactttctgtggctgtgacctggtgagctggctaattgaagtcggcctt

SEQ ID NO: 495450 - DNA, 120 bp, Artificial Sequence
  ENSG00000163328_22 (sequence is synthesized)
gcctccgaccgtggtgaagctgtgatatacggagacaggctggtacaagggggagtcatccaacatattaccaacgagtatgaattccgggatgagtacttgttttacagatttcttcaa

SEQ ID NO: 495451 - DNA, 120 bp, Artificial Sequence
  ENSG00000163328_23 (sequence is synthesized)
aagagtcctgaacagagtcctcctgctattaatgcaaacactctccaacaggaaagatataaagaaattgagcattcatccccaccctcacattcccctaagacctaaattatgcagggg

SEQ ID NO: 495452 - DNA, 120 bp, Artificial Sequence
  ENSG00000163328_24 (sequence is synthesized)
agaaccctacatggaatcatattctagccgcgtattcattagtttttagctgggtgaccttgggcaagttaacagaggcaacctctctgagcctcagttgtctcttctgtaaaatgtgaa

SEQ ID NO: 495453 - DNA, 120 bp, Artificial Sequence
  ENSG00000163328_25 (sequence is synthesized)
aagatgtgctcccaccacatgcgcagggtctgtgattttacatgtatgtaaaacacataggaagctgacttaggaaaaagagaaaaccaaattaaagttctgataatgaatataatatag

SEQ ID NO: 495454 - DNA, 120 bp, Artificial Sequence
  ENSG00000163328_26 (sequence is synthesized)
atagtcatcctttagtatccaaggggattggttccaggactcctgaagatcccaaaatctgaggatactcaagtcccttatataaaatggtgtaggccgggcatggtggctcacgcctgt

SEQ ID NO: 495455 - DNA, 80 bp, Artificial Sequence
  ENSG00000163328_27 (sequence is synthesized)
tagtatttgcatataacctatgcacattctcccatatagtttaatcatctttagatacttataatgcctaatacaatgta

SEQ ID NO: 495456 - DNA, 120 bp, Artificial Sequence
  ENSG00000163328_28 (sequence is synthesized)
tgcctaatacaatgtaaatgctatgtaaatagttgttgttatactgtattgtttagggaataacaataagaaaaacagtctgtacatgttcactacagatgcaaccattgttaagcctga

SEQ ID NO: 495457 - DNA, 120 bp, Artificial Sequence
  ENSG00000163328_29 (sequence is synthesized)
ctacatctttttatctgcggttgattgaatctatggatgtggaacctgtgcatatggagggtcaactgtactataaataatacgaatatgccaacattatataatcattgctttctgcaa

SEQ ID NO: 495458 - DNA, 120 bp, Artificial Sequence
  ENSG00000163328_30 (sequence is synthesized)
ttaactgttcctataaattatcaaatttggcaagtgtattactagcaggagatggaccttaaattatgacaactttatattttttgatagcatctcttgaaaaagaattttaatgattct

SEQ ID NO: 495459 - DNA, 120 bp, Artificial Sequence
  ENSG00000163328_31 (sequence is synthesized)
aaaagaattttaatgattctaataagaggttctttttcttttttccatttccttgacaaatagtactcatttaaaaactagagggctaggcttagtggctcacgcctgtaatctcagcac

SEQ ID NO: 495460 - DNA, 77 bp, Artificial Sequence
  ENSG00000163328_32 (sequence is synthesized)
cgcttgaggtcaggagttcaagaccagcccgggcaacgtggtgaaacccggtctgcccaggtgtggtagtgcatgcc

SEQ ID NO: 495461 - DNA, 120 bp, Artificial Sequence
  ENSG00000163328_33 (sequence is synthesized)
tgcctgtagtcccagctactttggagactgaggtgggagtaccccttgagcctgggaggcgcaggttgcagtgaaccaagatcacatcactgcacttcaacctgggtgacagagcaagac

SEQ ID NO: 495462 - DNA, 120 bp, Artificial Sequence
  ENSG00000163328_34 (sequence is synthesized)
cctgtctcaaaaacaaaaaacaagcaaaaaaaacctagaggcactatttttttttaaagtttgtcttttcttttctacccaaattactaatctatgccattaaggaaaggaataagaacc

SEQ ID NO: 495463 - DNA, 120 bp, Artificial Sequence
  ENSG00000163328_35 (sequence is synthesized)
tccatatgtattattatctccacagtcctgcagaagtacaatctgatctttaactttcatgctacaaataataatttgagtagattaatttgaattttatcaacaaaattattgccatat

SEQ ID NO: 495464 - DNA, 120 bp, Artificial Sequence
  ENSG00000163328_36 (sequence is synthesized)
gatgtatcatttctgtgtttgaacaaagcatcgtaatgcaggataacttctactttattccctgtagttaaaaaaaaaaaaactatatagttcaagccaatatttaaaaattctaaacct

SEQ ID NO: 495465 - DNA, 63 bp, Artificial Sequence
  ENSG00000163328_37 (sequence is synthesized)
aactatatagttcaagccaatatttaaaaattctaaacctaggctgggttcagcccaggagtt

SEQ ID NO: 495466 - DNA, 84 bp, Artificial Sequence
  ENSG00000163328_38 (sequence is synthesized)
ctgcactccagcctgagtgtttctaaagattacatttagaatttagtctttttaaagtgtccatgtataaaaatatataatttt

SEQ ID NO: 495467 - DNA, 120 bp, Artificial Sequence
  ENSG00000163328_39 (sequence is synthesized)
ataatttttaaaattactaaatgttgccttttctcttagtctaatattttagctactaaaacaaaatataaactggatagcttataaacaacataaacttatttctcacagttttggagg

SEQ ID NO: 495468 - DNA, 120 bp, Artificial Sequence
  ENSG00000163328_40 (sequence is synthesized)
cagttttggaggctgtgaagtccaagattaaggcactaacagatctagtgtctggtaaggcaaatttctggctcatagatggtaccttcttgctgtgtccccacatggtagatgggaaga

SEQ ID NO: 495469 - DNA, 120 bp, Artificial Sequence
  ENSG00000163328_41 (sequence is synthesized)
actggtctcattggccccttataaggacattaattccactcaataggctccaccctcatgatctaataacctctcaaaggccctacctcctaatactaacacattgaggatgtgacttca

SEQ ID NO: 495470 - DNA, 120 bp, Artificial Sequence
  ENSG00000163328_42 (sequence is synthesized)
actttacatttctacaggcagagaagtggggctgtgtaaattcttcccatcagtacttgaatgttcatttaacaaataacttatcgagcatctagcatgttccagacacaatctgaacac

SEQ ID NO: 495471 - DNA, 120 bp, Artificial Sequence
  ENSG00000163328_43 (sequence is synthesized)
tgagcacacaacagttggaacaaatatgattcctatcctcatggagcttctattctcctgtgaaaaacagatgttaaacatgattgaggattaggtttcaacataagaattctaggagga

SEQ ID NO: 495472 - DNA, 120 bp, Artificial Sequence
  ENSG00000163328_44 (sequence is synthesized)
cacagacatttagaccatagcatcttcaggtaaactttatcttcagtaaattaaagagatctatttagatgacctttgagcatcttaattattagatgtcagtgctagtttaacttattt

SEQ ID NO: 495473 - DNA, 120 bp, Artificial Sequence
  ENSG00000163328_45 (sequence is synthesized)
taaacgtttcagatatttatttaattatactttaagtgtctcatgtaaaaaagttatttataaaataatttatagggttagagtcattgcccttttaatgcaacaaataaacagtttttt

SEQ ID NO: 495474 - DNA, 120 bp, Artificial Sequence
  ENSG00000163328_46 (sequence is synthesized)
gcccttttaatgcaacaaataaacagttttttaaaaacctgcatgggggccaggcgcggtggttcatacctgcaatcccagcactttgggaggtcgaggctggcggatcacgaggtcagg

SEQ ID NO: 495475 - DNA, 80 bp, Artificial Sequence
  ENSG00000163328_47 (sequence is synthesized)
ggccctgcatggaagcctagtatatttattaataacaaataaattatactttagtgtactattaacctataccaatttta

SEQ ID NO: 495476 - DNA, 120 bp, Artificial Sequence
  ENSG00000163328_48 (sequence is synthesized)
ctttagtgtactattaacctataccaattttaagttgtgattagggaatggggatgtttttaagctgaattgtcttgctgcggaactttccttttttaataagaccatattatgactctg

SEQ ID NO: 495477 - DNA, 120 bp, Artificial Sequence
  ENSG00000163328_49 (sequence is synthesized)
aatgctcaagggtaagtctaaggcctcattgctgttaccaggagatttttctagttacagtaataaagatgttaattcacatgcatgcagacaactgaaactcaagtggagaatttgttt

SEQ ID NO: 495478 - DNA, 120 bp, Artificial Sequence
  ENSG00000163328_50 (sequence is synthesized)
gtgaacaagtcatactacttctgttatttgcatgaatggaatctgcaatatctttttccatgggagaccctaaaagaaaaccctggatcagaatgatctgcagtttcagataataaaggc

SEQ ID NO: 495479 - DNA, 120 bp, Artificial Sequence
  ENSG00000163328_51 (sequence is synthesized)
ttttaagagacatttttagaattaaaaatatgctaattttattaaatgaaaatatttgtaactgttaactttctcactgacaaagcaagtttctcaataaaatacctattttaacttgca

SEQ ID NO: 495480 - DNA, 120 bp, Artificial Sequence
  ENSG00000163328_52 (sequence is synthesized)
ttctcaatgttttcttaaatgggtttcctgagttctgttcttcatgactctgggctctgcaaacagggtttcccaattacgcattctataaacacttttatgaatgagtcaatatgacat

SEQ ID NO: 495481 - DNA, 120 bp, Artificial Sequence
  ENSG00000163328_53 (sequence is synthesized)
tgagtccttttcatacatttcatcatttccaatatgtagagtgacagctagaaaaatgataaaattttgattaaaacctatctctttttcttcagcatagtcaattgttttcttaactct

SEQ ID NO: 495482 - DNA, 120 bp, Artificial Sequence
  ENSG00000163328_54 (sequence is synthesized)
caatgagtaactccatgcctagcttgtgcttagctttcaatatttttagactaagacaaagtgtatttggcattttgagaacaacaattaatggtcagtaaatttctaaagcaagaaaaa

SEQ ID NO: 495483 - DNA, 120 bp, Artificial Sequence
  ENSG00000163328_55 (sequence is synthesized)
tgtgaaactagtgttttatatgtttgttacgcagcagaatgcggctcttagtgtttgccccttcatatctcatcatgtaaaatattaaattactttaggccactgcacataggtagtcct

SEQ ID NO: 495484 - DNA, 120 bp, Artificial Sequence
  ENSG00000163328_56 (sequence is synthesized)
gtcatgagtgatggctggagaaaagttcaggatcataaatgttatcatcattcttcaagaaaagatgagattataaatttctgcaattggtatgataaaaggttgaaataattaatgaaa

SEQ ID NO: 495485 - DNA, 120 bp, Artificial Sequence
  ENSG00000163328_57 (sequence is synthesized)
attatggctcatgtcttcttgcttcaaatctgatcagaatagataactgtttgaatgacatctgtcaggaggagaggttgaaactttcttattgaaaagataaagcctctatattctctc

SEQ ID NO: 495486 - DNA, 120 bp, Artificial Sequence
  ENSG00000163331_0 (sequence is synthesized)
acagctggcattcagcctccagagcaccagcactggcactggcactggcacacgctatggcaaatgaagtgcaagacctgctctcccctcggaaagggggacatcctcctgcagtaaaag

SEQ ID NO: 495487 - DNA, 120 bp, Artificial Sequence
  ENSG00000163331_1 (sequence is synthesized)
ctggaggaatgagaatttccaaaaaacaagaaattggcaccttggaaagacataccaaaaaaacaggattcgagaaaacaagtgccattgcaaatgttgccaaaatacagacactggatg

SEQ ID NO: 495488 - DNA, 120 bp, Artificial Sequence
  ENSG00000163331_2 (sequence is synthesized)
cacctgctctggaaaaggttgttccactgaaaaggatctacattattcagcagcctcgaaaatgttaagcctggatttaaaacacagccgtctggccagctgcctcgaatatctgacagc

SEQ ID NO: 495489 - DNA, 120 bp, Artificial Sequence
  ENSG00000163331_3 (sequence is synthesized)
ttagcaaaaagggccaaagctttccataggcgtgctgcacttgcttggtaaattaagcagcttttgtatcttcccctttgactttaggtaataaagcatccaaacttgtaaatctgacac

SEQ ID NO: 495490 - DNA, 120 bp, Artificial Sequence
  ENSG00000163331_4 (sequence is synthesized)
tgggagtgaggaatgaaaggcaggtccagccttttcaccatggttgcagctggaaggaaacaagtggatttgacacaaggtgtccaagacacacggagccacggaatctcacaggtgtct

SEQ ID NO: 495491 - DNA, 87 bp, Artificial Sequence
  ENSG00000163331_5 (sequence is synthesized)
caactataaatttccagcaacagtgcacatggcgcatcaaaaacccacacctgctctggaaaaggttgttccactgaaaaggatcta

SEQ ID NO: 495492 - DNA, 120 bp, Artificial Sequence
  ENSG00000163344_0 (sequence is synthesized)
gtcagcttcaggcatcgcgaggcgtggcggccccatggccccgctgggaggcgccccgcggctggtactgctgttcagcggcaagaggaaatccgggaaggacttcgtgaccgaggcgct

SEQ ID NO: 495493 - DNA, 120 bp, Artificial Sequence
  ENSG00000163344_1 (sequence is synthesized)
gcagagcagacttggagctgatgtctgtgctgtcctccggctctctggtccactcaaggaacagtatgctcaggagcatggcttgaacttccagagactcctggacaccagcacctacaa

SEQ ID NO: 495494 - DNA, 120 bp, Artificial Sequence
  ENSG00000163344_2 (sequence is synthesized)
ggaggcctttcggaaggacatgatccgctggggagaggagaaacgccaggctgacccaggcttcttttgcaggaagattgtggagggcatctcccagcccatctggctggtgagtgacac

SEQ ID NO: 495495 - DNA, 120 bp, Artificial Sequence
  ENSG00000163344_3 (sequence is synthesized)
acggagagtgtctgacatccagtggtttcgggaggcctatggggccgtgacgcagacggtccgcgttgtagcgttggagcagagccgacagcagcggggctgggtgttcacgccaggggt

SEQ ID NO: 495496 - DNA, 120 bp, Artificial Sequence
  ENSG00000163344_4 (sequence is synthesized)
ctttgactgggtcatcgagaaccatggagttgaacagcgcctggaggagcagttggagaacctgatagaatttatccgctccagactttagtcactaggttctaggagtgagctggggcc

SEQ ID NO: 495497 - DNA, 120 bp, Artificial Sequence
  ENSG00000163344_5 (sequence is synthesized)
tgctgaggtgggggtggggctgactctgcaaaatgggggtgtcccccgatcctggccgaggtgaggaacagacagggggggtctagattctgagggggttggtggatattgggcaaggca

SEQ ID NO: 495498 - DNA, 120 bp, Artificial Sequence
  ENSG00000163344_6 (sequence is synthesized)
ggaaacctctggagacctcattttctccatggggaagacagccatgctcttcaggaggagactccaagggcaaaggagggtgtcttggctgtgcttgaaggcgaaaccctgccatatccc

SEQ ID NO: 495499 - DNA, 120 bp, Artificial Sequence
  ENSG00000163344_7 (sequence is synthesized)
cagtgccagtcccctcagcctgtggtggccttgcatcctgactggatgttctcagccccttgttctgggcaagaacccagagctccccagtgtggatactaataaacctcttggagcaca

SEQ ID NO: 495500 - DNA, 120 bp, Artificial Sequence
  ENSG00000163346_0 (sequence is synthesized)
aagctgaagaccgaagcaagagctggttcaggtggcagccacagcagcctcagggacctcagcaactatggcctcctgcccagactctgataatagctgggtgcttgctggctccgagag

SEQ ID NO: 495501 - DNA, 120 bp, Artificial Sequence
  ENSG00000163346_1 (sequence is synthesized)
cctgccagtggagacactgggcccggcatccaggatggacccagaatctgagagagccctgcaggcccctcacagcccctccaagacagatgggaaagaattagctgggaccatggatgg

SEQ ID NO: 495502 - DNA, 120 bp, Artificial Sequence
  ENSG00000163346_2 (sequence is synthesized)
agaagggacgctcttccagactgaaagccctcagtctggcagcattctaacagaggagactgaggtcaagggcaccctggaaggtgatgtttgtggtgtggagcctcctggcccaggaga

SEQ ID NO: 495503 - DNA, 120 bp, Artificial Sequence
  ENSG00000163346_3 (sequence is synthesized)
cacagtagtccagggagacctgcaggagaccaccgtggtgacaggcctgggaccagacacacaggacctggaaggccagagccctccacagagcctgccttcaacccccaaagcagcttg

SEQ ID NO: 495504 - DNA, 120 bp, Artificial Sequence
  ENSG00000163346_4 (sequence is synthesized)
gatcagggaggagggccgctgctccagcagtgacgatgacaccgacgtggacatggagggtctgcggagacggcggggccgggaggccggcccacctcagcccatggtgcccctggctgt

SEQ ID NO: 495505 - DNA, 120 bp, Artificial Sequence
  ENSG00000163346_5 (sequence is synthesized)
ggagaaccaggctgggggtgagggtgcaggcggggagctgggcatctccctcaacatgtgcctccttggggccctggttctgcttggcctgggggtcctcctcttctcaggtggcctctc

SEQ ID NO: 495506 - DNA, 120 bp, Artificial Sequence
  ENSG00000163346_6 (sequence is synthesized)
agagtctgagactgggcccatggaggaagtggagcggcaggtcctcccagaccccgaggtgctggaagctgtgggggacaggcaggatgggctaagggaacagctgcaggccccagtgcc

SEQ ID NO: 495507 - DNA, 120 bp, Artificial Sequence
  ENSG00000163346_7 (sequence is synthesized)
tcctgacagtgtccccagcctgcaaaacatgggtcttctgctggacaagctggccaaggagaaccaggacatccggctgctgcaggcccagctgcaggcccaaaaggaagagcttcagag

SEQ ID NO: 495508 - DNA, 120 bp, Artificial Sequence
  ENSG00000163346_8 (sequence is synthesized)
cctgatgcaccagcccaaagggctagaggaggagaatgcccagctccggggggctctgcagcagggcgaagccttccagcgggctctggagtcagagctgcagcagctgcgggcccggct

SEQ ID NO: 495509 - DNA, 120 bp, Artificial Sequence
  ENSG00000163346_9 (sequence is synthesized)
ccaggggctggaggccgactgtgtccggggcccagatggggtgtgcctcagtgggggtagaggcccacagggtgacaaggccatcagggagcaaggccccagggagcaggagccagaact

SEQ ID NO: 495510 - DNA, 120 bp, Artificial Sequence
  ENSG00000163346_10 (sequence is synthesized)
cagcttcctgaagcagaaggaacagctggaggctgaggcacaggcattaaggcaagagttagagaggcagcgacggctgctggggtctgtacagcaggatctggagaggagcttgcagga

SEQ ID NO: 495511 - DNA, 120 bp, Artificial Sequence
  ENSG00000163346_11 (sequence is synthesized)
tgccagccgcggggacccagctcatgctggcttggctgagctgggccacagattggcccagaaactgcagggcctggagaactggggccaggaccctggggtctctgccaatgcctcaaa

SEQ ID NO: 495512 - DNA, 120 bp, Artificial Sequence
  ENSG00000163346_12 (sequence is synthesized)
ggcctggcaccagaagtcccacttccagaattctagggagtggagtggaaaggaaaagtggtgggatgggcagagagaccggaaggctgagcactggaaacataagaaggaagaatctgg

SEQ ID NO: 495513 - DNA, 120 bp, Artificial Sequence
  ENSG00000163346_13 (sequence is synthesized)
ggggagcaagaaggagggcaagcgacagggcccgaaggaacccccaaggaaaagtggtagcttccactcctctggagaaaagcagaagcaacctcggtggagggaagggactaaggacag

SEQ ID NO: 495514 - DNA, 120 bp, Artificial Sequence
  ENSG00000163346_14 (sequence is synthesized)
ccatgaccccctgccatcctgggcagagctgttgaggcccaagtaccgggcaccccagggctgctcaggtgtggacgagtgtgcccggcaggagggcctgactttctttggcacagagct

SEQ ID NO: 495515 - DNA, 120 bp, Artificial Sequence
  ENSG00000163346_15 (sequence is synthesized)
agccccagtgcggcaacaggagctggcctctctgctaagaacatacttggcacggctgccctgggctgggcagctgaccaaggagctacccctctcacctgctttctttggtgaggatgg

SEQ ID NO: 495516 - DNA, 120 bp, Artificial Sequence
  ENSG00000163346_16 (sequence is synthesized)
catcttccgtcatgaccgcctccgcttccgggattttgtggatgccctggaggacagcttggaggaggtggctgtgcaacagacaggtgatgatgatgaagtagatgactttgaggactt

SEQ ID NO: 495517 - DNA, 120 bp, Artificial Sequence
  ENSG00000163346_17 (sequence is synthesized)
catcttcagccacttctttggagacaaagcactgaagaagaggtcagggaagaaggacaagcactcacagagcccaagagctgcggggcccagggaggggcacagccatagccaccacca

SEQ ID NO: 495518 - DNA, 120 bp, Artificial Sequence
  ENSG00000163346_18 (sequence is synthesized)
ccaccaccggggctgacaccctgccccacagggaatggccttggcctggcccagcccaagatcccagcgttatctaactcctggagggtggactctgtcctggcttgtttggtgtcctca

SEQ ID NO: 495519 - DNA, 120 bp, Artificial Sequence
  ENSG00000163346_19 (sequence is synthesized)
gatatctttcacacagtagagcaaaatcaccagccctgcactgatgtcactttatgtagaaaaaggccttagctggacctgcgttgccgtctatgcaaatgcatgcaaatactccaggcc

SEQ ID NO: 495520 - DNA, 120 bp, Artificial Sequence
  ENSG00000163346_20 (sequence is synthesized)
ctgggatgtgggcttgtgttttgtcactgtgaagggggagatgggagaggagcctgttttggggtggggtctggggaaggcaatctgattctgaagctaaagagctttcatcctcttgag

SEQ ID NO: 495521 - DNA, 120 bp, Artificial Sequence
  ENSG00000163346_21 (sequence is synthesized)
tgtatgtccccatagtgggccccttgacccacatgctgaccggtgccttgggatttgactagagttgctggctcgaggcccagcacgaggacttaccctggggttttgttaggtttggaa

SEQ ID NO: 495522 - DNA, 120 bp, Artificial Sequence
  ENSG00000163346_22 (sequence is synthesized)
gcagctgtccctagggggtgaagtcccccccctttttttttttacccctgcttctcccacggcttcacctccctatgtgaactgtagactcagatcccaataaagtgctgttgcagctat

SEQ ID NO: 495523 - DNA, 120 bp, Artificial Sequence
  ENSG00000163346_23 (sequence is synthesized)
gatgctaggtggtttctaagcacaggggacaccccacaccccctgcctgaatggatgggtccatcccaggcactggtacttgcccccttgttctgtatccccctttgcccttgccttgcc

SEQ ID NO: 495524 - DNA, 120 bp, Artificial Sequence
  ENSG00000163346_24 (sequence is synthesized)
cttccaacaaaccctaggcccttgagaagctgatacttctccttttgctcacagctgccttggccccacccctgggagatgtagcaaattgagtgtgggttttggagtctgagcctcagg

SEQ ID NO: 495525 - DNA, 120 bp, Artificial Sequence
  ENSG00000163346_25 (sequence is synthesized)
ctcaaatccaggccaagtgatcttgggcaagttaatctctgggaactttgggtttcttatcctcaaaaaaggcgatggaagggctggggaagtgattaaataaaagcaacgcaagaaaaa

SEQ ID NO: 495526 - DNA, 120 bp, Artificial Sequence
  ENSG00000163346_26 (sequence is synthesized)
atgtttcctatttacccacacatcctgaccctcccctctcccactatagtcagggcgtcttcccagttcttggttcacatcccttgtgctaaggtttgggccagggctggcatacctgtt

SEQ ID NO: 495527 - DNA, 120 bp, Artificial Sequence
  ENSG00000163346_27 (sequence is synthesized)
ccacatggtacatgaaacatacatggtatcacctgtgattgattggtgtggtctgcctggagcactgtgtggaaaaggatttaaagaacatgccaggtgccatgatcagttaacactgtt

SEQ ID NO: 495528 - DNA, 120 bp, Artificial Sequence
  ENSG00000163346_28 (sequence is synthesized)
ttctcattccatcctggctttttcctgcctcttccaacctggtaggggcccgtgggatggacagagggctgcaaaggaaattcagctggggcagtgggtttttctgcgccttttctccta

SEQ ID NO: 495529 - DNA, 120 bp, Artificial Sequence
  ENSG00000163347_0 (sequence is synthesized)
gtctcagttcccgagcctgggagcaaccgcagcttctagtatccagactccagcgccgccccgggcgcggaccccaaccccgacccagagcttctccagcggcggcgcagcgagcagggc

SEQ ID NO: 495530 - DNA, 120 bp, Artificial Sequence
  ENSG00000163347_1 (sequence is synthesized)
tccccgccttaacttcctccgcggggcccagccaccttcgggagtccgggttgcccacctgcaaactctccgccttctgcacctgccacccctgagccagcgcgggcgcccgagcgagtc

SEQ ID NO: 495531 - DNA, 120 bp, Artificial Sequence
  ENSG00000163347_2 (sequence is synthesized)
atggccaacgcggggctgcagctgttgggcttcattctcgccttcctgggatggatcggcgccatcgtcagcactgccctgccccagtggaggatttactcctatgccggcgacaacatc

SEQ ID NO: 495532 - DNA, 120 bp, Artificial Sequence
  ENSG00000163347_3 (sequence is synthesized)
gtgaccgcccaggccatgtacgaggggctgtggatgtcctgcgtgtcgcagagcaccgggcagatccagtgcaaagtctttgactccttgctgaatctgagcagcacattgcaagcaacc

SEQ ID NO: 495533 - DNA, 120 bp, Artificial Sequence
  ENSG00000163347_4 (sequence is synthesized)
cgtgccttgatggtggttggcatcctcctgggagtgatagcaatctttgtggccaccgttggcatgaagtgtatgaagtgcttggaagacgatgaggtgcagaagatgaggatggctgtc

SEQ ID NO: 495534 - DNA, 120 bp, Artificial Sequence
  ENSG00000163347_5 (sequence is synthesized)
attgggggtgcgatatttcttcttgcaggtctggctattttagttgccacagcatggtatggcaatagaatcgttcaagaattctatgaccctatgaccccagtcaatgccaggtacgaa

SEQ ID NO: 495535 - DNA, 120 bp, Artificial Sequence
  ENSG00000163347_6 (sequence is synthesized)
tttggtcaggctctcttcactggctgggctgctgcttctctctgccttctgggaggtgccctactttgctgttcctgtccccgaaaaacaacctcttacccaacaccaaggccctatcca

SEQ ID NO: 495536 - DNA, 120 bp, Artificial Sequence
  ENSG00000163347_7 (sequence is synthesized)
aaacctgcaccttccagcgggaaagactacgtgtgacacagaggcaaaaggagaaaatcatgttgaaacaaaccgaaaatggacattgagatactatcattaacattaggaccttagaat

SEQ ID NO: 495537 - DNA, 120 bp, Artificial Sequence
  ENSG00000163347_8 (sequence is synthesized)
tttgggtattgtaatctgaagtatggtattacaaaacaaacaaacaaacaaaaaacccatgtgttaaaatactcagtgctaaacatggcttaatcttattttatcttctttcctcaatat

SEQ ID NO: 495538 - DNA, 120 bp, Artificial Sequence
  ENSG00000163347_9 (sequence is synthesized)
aggagggaagatttttccatttgtattactgcttcccattgagtaatcatactcaactgggggaaggggtgctccttaaatatatatagatatgtatatatacatgtttttctattaaaa

SEQ ID NO: 495539 - DNA, 120 bp, Artificial Sequence
  ENSG00000163347_10 (sequence is synthesized)
acagtaaaatactattctcattatgttgatactagcatacttaaaatatctctaaaataggtaaatgtatttaattccatattgatgaagatgtttattggtatattttctttttcgtct

SEQ ID NO: 495540 - DNA, 120 bp, Artificial Sequence
  ENSG00000163347_11 (sequence is synthesized)
gtctatatatacatatgtaacagtcaaatatcatttactcttcttcattagctttgggtgcctttgccacaagacctagcctaatttaccaaggatgaattctttcaattcttcatgcgt

SEQ ID NO: 495541 - DNA, 120 bp, Artificial Sequence
  ENSG00000163347_12 (sequence is synthesized)
gcccttttcatatacttattttattttttaccataatcttatagcacttgcatcgttattaagcccttatttgttttgtgtttcattggtctctatctcctgaatctaacacatttcata

SEQ ID NO: 495542 - DNA, 120 bp, Artificial Sequence
  ENSG00000163347_13 (sequence is synthesized)
gcctacattttagtttctaaagccaagaagaatttattacaaatcagaactttggaggcaaatctttctgcatgaccaaagtgataaattcctgttgaccttcccacacaatccctgtac

SEQ ID NO: 495543 - DNA, 120 bp, Artificial Sequence
  ENSG00000163347_14 (sequence is synthesized)
tttattgattgaatttttaagctacttattcatagttttatatccccctaaactacctttttgttccccattccttaattgtattgttttcccaagtgtaattatcatgcgttttatatc

SEQ ID NO: 495544 - DNA, 120 bp, Artificial Sequence
  ENSG00000163347_15 (sequence is synthesized)
ttcctaataaggtgtggtctgtttgtctgaacaaagtgctagactttctggagtgataatctggtgacaaatattctctctgtagctgtaagcaagtcacttaatctttctacctctttt

SEQ ID NO: 495545 - DNA, 120 bp, Artificial Sequence
  ENSG00000163347_16 (sequence is synthesized)
ttctatctgccaaattgagataatgatacttaaccagttagaagaggtagtgtgaatattaattagtttatattactctcattctttgaacatgaactatgcctatgtagtgtctttatt

SEQ ID NO: 495546 - DNA, 120 bp, Artificial Sequence
  ENSG00000163347_17 (sequence is synthesized)
tgctcagctggctgagacactgaagaagtcactgaacaaaacctacacacgtaccttcatgtgattcactgccttcctctctctaccagtctatttccactgaacaaaacctacacacat

SEQ ID NO: 495547 - DNA, 120 bp, Artificial Sequence
  ENSG00000163347_18 (sequence is synthesized)
accttcatgtggttcagtgccttcctctctctaccagtctatttccactgaacaaaacctacgcacataccttcatgtggctcagtgccttcctctctctaccagtctatttccattctt

SEQ ID NO: 495548 - DNA, 120 bp, Artificial Sequence
  ENSG00000163347_19 (sequence is synthesized)
tcagctgtgtctgacatgtttgtgctctgttccattttaacaactgctcttacttttccagtctgtacagaatgctatttcacttgagcaagatgatgtaatggaaagggtgttggcatt

SEQ ID NO: 495549 - DNA, 120 bp, Artificial Sequence
  ENSG00000163347_20 (sequence is synthesized)
ggtgtctggagacctggatttgagtcttggtgctatcaatcaccgtctgtgtttgagcaaggcatttggctgctgtaagcttattgcttcatctgtaagcggtggtttgtaattcctgat

SEQ ID NO: 495550 - DNA, 120 bp, Artificial Sequence
  ENSG00000163347_21 (sequence is synthesized)
cttcccacctcacagtgatgttgtggggatccagtgagatagaatacatgtaagtgtggttttgtaatttaaaaagtgctatactaagggaaagaattgaggaattaactgcatacgttt

SEQ ID NO: 495551 - DNA, 120 bp, Artificial Sequence
  ENSG00000163347_22 (sequence is synthesized)
tggtgttgcttttcaaatgtttgaaaacaaaaaaaatgttaagaaatgggtttcttgccttaaccagtctctcaagtgatgagacagtgaagtaaaattgagtgcactaaacaaataaga

SEQ ID NO: 495552 - DNA, 120 bp, Artificial Sequence
  ENSG00000163347_23 (sequence is synthesized)
ttctgaggaagtcttatcttctgcagtgagtatggcccgatgctttctgtggctaaacagatgtaatgggaagaaataaaagcctacgtgttggtaaatccaacagcaagggagattttt

SEQ ID NO: 495553 - DNA, 120 bp, Artificial Sequence
  ENSG00000163347_24 (sequence is synthesized)
gaatcataataactcataaggtgctatctgttcagtgatgccctcagagctcttgctgttagctggcagctgacgctgctaggatagttagtttggaaatggtacttcataataaactac

SEQ ID NO: 495554 - DNA, 120 bp, Artificial Sequence
  ENSG00000163347_25 (sequence is synthesized)
acaaggaaagtcagccactgtgtcttatgaggaattggacctaataaattttagtgtgccttccaaacctgagaatatatgcttttggaagttaaaatttaaatggcttttgccacatac

SEQ ID NO: 495555 - DNA, 120 bp, Artificial Sequence
  ENSG00000163347_26 (sequence is synthesized)
atagatcttcatgatgtgtgagtgtaattccatgtggatatcagttaccaaacattacaaaaaaattttatggcccaaaatgaccaacgaaattgttacaatagaatttatccaattttg

SEQ ID NO: 495556 - DNA, 120 bp, Artificial Sequence
  ENSG00000163347_27 (sequence is synthesized)
atctttttatattcttctaccacacctggaaacagaccaatagacattttggggttttataataggaatttgtataaagcattactctttttcaataaattgttttttaatttaaaaaaa

SEQ ID NO: 495557 - DNA, 120 bp, Artificial Sequence
  ENSG00000163347_28 (sequence is synthesized)
gtttttctggagaagatactgtatattgggttaccagcggaaacatcagtatgactggggtctctagattcctagtccagttttctctcttccatacaacagtgacatatacttggtctt

SEQ ID NO: 495558 - DNA, 120 bp, Artificial Sequence
  ENSG00000163348_0 (sequence is synthesized)
ggttccggttgctgccgccgctggcgggcggcgagtctggagagagcgcgcagtttgcgcggcggctcggcgcttccctgtcgtcgcactttgtggttgctgcagctcgggggcctgggc

SEQ ID NO: 495559 - DNA, 120 bp, Artificial Sequence
  ENSG00000163348_1 (sequence is synthesized)
tgcccctgacaccccttctgggcgatggtgcagcccaagggcgcctccatcccccgccgctgccgctaacccgggtcccccactccatggccgcctcggcgccgcccccaccggacaagc

SEQ ID NO: 495560 - DNA, 120 bp, Artificial Sequence
  ENSG00000163348_2 (sequence is synthesized)
tggagggaggtggcggccccgcaccgccccctgcgccgcccagcaccgggaggaagcagggcaaggccggtctgcaaatgaagagtccagaaaagaagcgaaggaagtcaaatactcagg

SEQ ID NO: 495561 - DNA, 120 bp, Artificial Sequence
  ENSG00000163348_3 (sequence is synthesized)
gccctgcatactcacatctgacggagtttgcaccacccccaactcccatggtggatcacctggttgcatccaacccttttgaagatgacttcggagcccccaaagtgggggttgcagccc

SEQ ID NO: 495562 - DNA, 120 bp, Artificial Sequence
  ENSG00000163348_4 (sequence is synthesized)
ctccattccttggcagtcctgtgcccttcggaggcttccgtgtgcaggggggcatggcgggccaggtacccccaggctacagcactggaggtggagggggcccccagccactccgtcgac

SEQ ID NO: 495563 - DNA, 120 bp, Artificial Sequence
  ENSG00000163348_5 (sequence is synthesized)
agccaccccccttccctcccaatcctatgggccctgctttcaacatgcccccccagggtcctggctacccacccccaggcaacatgaactttcccagccaacccttcaaccagcctctgg

SEQ ID NO: 495564 - DNA, 120 bp, Artificial Sequence
  ENSG00000163348_6 (sequence is synthesized)
gtcaaaactttagtcctcccagtgggcagatgatgccgggcccagtggggggatttggtcccatgatctcacccaccatgggacagcctcccagagcagagctgggcccaccttctctgt

SEQ ID NO: 495565 - DNA, 120 bp, Artificial Sequence
  ENSG00000163348_7 (sequence is synthesized)
cccaacgatttgctcagccaggggctccttttggcccttctcctctccagagacctggtcaggggctccccagcctgccgcctaacacaagtccctttcctggtccggaccctggctttc

SEQ ID NO: 495566 - DNA, 120 bp, Artificial Sequence
  ENSG00000163348_8 (sequence is synthesized)
ctggccctggtggtgaggatggggggaagcccttgaatccacctgcttctactgcttttccccaggagccccactcaggctccccggctgctgctgttaatgggaaccagcccagtttcc

SEQ ID NO: 495567 - DNA, 120 bp, Artificial Sequence
  ENSG00000163348_9 (sequence is synthesized)
ccccgaacagcagtgggcggggtgggggcactccagatgccaacagcttggcaccccctggcaaggcaggtgggggctccgggccccagcctcccccaggcttggtgtacccatgtggtg

SEQ ID NO: 495568 - DNA, 120 bp, Artificial Sequence
  ENSG00000163348_10 (sequence is synthesized)
cctgtcggagtgaggtgaacgatgaccaggatgccattctgtgtgaggcctcctgccagaaatggttccaccgtgagtgcacaggcatgactgagagcgcctatgggctgctgaccactg

SEQ ID NO: 495569 - DNA, 120 bp, Artificial Sequence
  ENSG00000163348_11 (sequence is synthesized)
aagcttctgccgtctgggcctgcgatctctgcctcaagaccaaggagatccagtctgtctacatccgtgagggcatggggcagctggtggctgctaacgatgggtgacgctggtgaagtg

SEQ ID NO: 495570 - DNA, 120 bp, Artificial Sequence
  ENSG00000163348_12 (sequence is synthesized)
gcccagggaagtgcacatgtctctccctgctcttccagggtgatttttttgatgtttggctcttggtccttgtttccactggctttccatccccatggggcagaaacagtggctcctggg

SEQ ID NO: 495571 - DNA, 120 bp, Artificial Sequence
  ENSG00000163348_13 (sequence is synthesized)
acttacatgttgagatctacagagatccaggaaaccaaagccctgctgagcagagccattttgtggctatttctggaggcccaggagtgtggctgcaagagaaaaggggctggaggaaga

SEQ ID NO: 495572 - DNA, 120 bp, Artificial Sequence
  ENSG00000163348_14 (sequence is synthesized)
tccggagggcaggggtgttccctctgctgatgatggatgcccctaacacctgtgcctaacacccctactgaaccccacagctccagccttagtttttggagtcaagtgttaaaggtttct

SEQ ID NO: 495573 - DNA, 120 bp, Artificial Sequence
  ENSG00000163348_15 (sequence is synthesized)
ggccagaggaattggggtcttgccatccctgcaatagcccttttatgggctctgggagacagctttagggaataaatggggattttcccctttttctacccactcctttgcttcctccaa

SEQ ID NO: 495574 - DNA, 120 bp, Artificial Sequence
  ENSG00000163348_16 (sequence is synthesized)
gacttacccaactccttccccctcagagaaccaaatagcctgaggaagcaggagagttcctggttatggcagtttcttggtgatttggggcttcaagacagtaggtgagagatgctgtca

SEQ ID NO: 495575 - DNA, 120 bp, Artificial Sequence
  ENSG00000163348_17 (sequence is synthesized)
ggacgtatcttcttcataccaaagtcactggtcctttctcagcctctctcgtgcttttctcctaatgaccatatttttgccaaaaattgggatatgttatctgacagaccagaatatttg

SEQ ID NO: 495576 - DNA, 120 bp, Artificial Sequence
  ENSG00000163348_18 (sequence is synthesized)
aagtttgggctgtcctgaaagtctggactttggtggtaccctcctcccccagcccatctgttgcacattatactccgtgtgttcttcaactttcggcgcccttattcccctgccttcctg

SEQ ID NO: 495577 - DNA, 120 bp, Artificial Sequence
  ENSG00000163348_19 (sequence is synthesized)
gcttgattgaaggaaagcttgaaaaggcgcagagccctatacctcatttcctccatgataaaaggatccaagtgaggccctgtcacagcctgtgggtaggggatgcggcgggatcctcat

SEQ ID NO: 495578 - DNA, 120 bp, Artificial Sequence
  ENSG00000163348_20 (sequence is synthesized)
tgccatggtactcaaaggtagaagagcctggagtttgttgcttctctttgctattctttcatatcctcttgggcctggtgattaattagcaattctcattcctctcagccaaaggcctgc

SEQ ID NO: 495579 - DNA, 120 bp, Artificial Sequence
  ENSG00000163348_21 (sequence is synthesized)
actgggctttatttgtctttttttattttttaagcactgcctgccagagatgggcctggggcctgatgaggaccttagcgctgctcgttctccttttctgttcatgcacacattcctcca

SEQ ID NO: 495580 - DNA, 120 bp, Artificial Sequence
  ENSG00000163348_22 (sequence is synthesized)
tggggtggggaaggcaggcatggggtgtggccctcggagaagttaggagtcccccagctcaagatacagtggcaaagacctagtggtcccctacccccacttctctcagttcctggcatg

SEQ ID NO: 495581 - DNA, 120 bp, Artificial Sequence
  ENSG00000163348_23 (sequence is synthesized)
aggagagaagaccctgctctggtggagctgacaacctttgaggctgggaggagagcagcctctgggcatcgttcccagtgtccctcacactaaaacggcgtagatggcaaccccccaccc

SEQ ID NO: 495582 - DNA, 120 bp, Artificial Sequence
  ENSG00000163348_24 (sequence is synthesized)
ccaccccgctgctcaactcttgtgtttgttgttctgtttgccccatttatctgttgctgtttttgtgttgtcttcccctgctccgcattttgtaaaatggcccctgggggagtgtttttg

SEQ ID NO: 495583 - DNA, 120 bp, Artificial Sequence
  ENSG00000163348_25 (sequence is synthesized)
ctggatctgctccctctcgctctctcactccactactttttggaacaaagtgatggcagaatgcggtggtggtgggggtcttttgtactgttggattaataaaatgattttaaaatccca

SEQ ID NO: 495584 - DNA, 120 bp, Artificial Sequence
  ENSG00000163348_26 (sequence is synthesized)
cgcgcccctccgcggcggctccaccgcccgggatggtacggtccggcagccgggccgcgcgctgccgcccctcggtgagctggtgtgggccgccgctagcggagacgaccctttccactc

SEQ ID NO: 495585 - DNA, 120 bp, Artificial Sequence
  ENSG00000163348_27 (sequence is synthesized)
tctgcgggcagcgaactgtgtctacagcaacctgtggagcggaaactgtgatctgccctagcgctctcttccagaagatgccctccaatcctttccaccctattccctaactctcgggac

SEQ ID NO: 495586 - DNA, 120 bp, Artificial Sequence
  ENSG00000163348_28 (sequence is synthesized)
ctcgtttgggagtgttctgtgggcttggccttgtgtcagagctgggagtagcatggactctgggtttcatatccagctgagtgagagggtttgagtcaaaagcctgggtgagaatcctgc

SEQ ID NO: 495587 - DNA, 80 bp, Artificial Sequence
  ENSG00000163349_0 (sequence is synthesized)
gaggcggcggcggcggcggcgggaaggggctgggtggtggagcgggagggaggctgaggaggctccccctgcgggacggg

SEQ ID NO: 495588 - DNA, 120 bp, Artificial Sequence
  ENSG00000163349_1 (sequence is synthesized)
cggctcgcgcggggggtatgatgacccggctgcggggccccagatctcgtctcctccgccgcctcctcacggcagccccagctcgcggctgagaaccagacacaccggcggtatggcatc

SEQ ID NO: 495589 - DNA, 120 bp, Artificial Sequence
  ENSG00000163349_2 (sequence is synthesized)
acagctgcaagtgttttcgcccccatcagtgtcgtcgagtgccttctgcagtgcgaagaaactgaaaatagagccctctggctgggatgtttcaggacagagtagcaacgacaaatatta

SEQ ID NO: 495590 - DNA, 120 bp, Artificial Sequence
  ENSG00000163349_3 (sequence is synthesized)
tacccacagcaaaaccctcccagccacacaagggcaagccaactcctctcaccaggtagcaaatttcaacatccctgcttacgaccagggcctcctcctcccagctcctgcagtggagca

SEQ ID NO: 495591 - DNA, 120 bp, Artificial Sequence
  ENSG00000163349_4 (sequence is synthesized)
tattgttgtaacagccgctgatagctcgggcagtgctgctacatcaaccttccaaagcagccagaccctgactcacagaagcaacgtttctttgcttgagccatatcaaaaatgtggatt

SEQ ID NO: 495592 - DNA, 120 bp, Artificial Sequence
  ENSG00000163349_5 (sequence is synthesized)
gaaacgaaaaagtgaggaagttgacagcaacggtagtgtgcagatcatagaagaacatccccctctcatgctgcaaaacaggactgtggtgggtgctgctgccacaaccaccactgtgac

SEQ ID NO: 495593 - DNA, 120 bp, Artificial Sequence
  ENSG00000163349_6 (sequence is synthesized)
cacaaagagtagcagttccagcggagaaggggattaccagctggtccagcatgagatcctttgctctatgaccaatagctatgaagtcttggagttcctaggccgggggacatttggaca

SEQ ID NO: 495594 - DNA, 120 bp, Artificial Sequence
  ENSG00000163349_7 (sequence is synthesized)
ggtggctaagtgctggaagaggagcaccaaggaaattgtggctattaaaatcttgaagaaccacccctcctatgccagacaaggacagattgaagtgagcatcctttcccgcctaagcag

SEQ ID NO: 495595 - DNA, 120 bp, Artificial Sequence
  ENSG00000163349_8 (sequence is synthesized)
tgaaaatgctgatgagtataattttgtccgttcatacgagtgctttcagcataagaatcacacctgccttgtttttgaaatgttggagcagaacttatatgattttctaaagcaaaacaa

SEQ ID NO: 495596 - DNA, 120 bp, Artificial Sequence
  ENSG00000163349_9 (sequence is synthesized)
atttagcccactgccactcaagtacatcagaccaatcttgcagcaggtggccacagccttgatgaagctcaagagtcttggtctgatccacgctgaccttaagcctgaaaacatcatgct

SEQ ID NO: 495597 - DNA, 120 bp, Artificial Sequence
  ENSG00000163349_10 (sequence is synthesized)
ggttgatccagttcgccagccctaccgagtgaaggtcattgactttggttctgctagtcacgtttccaaagctgtgtgctcaacctacttacagtcacgttactacagagctcctgaaat

SEQ ID NO: 495598 - DNA, 120 bp, Artificial Sequence
  ENSG00000163349_11 (sequence is synthesized)
tattcttgggttaccattttgtgaagctattgatatgtggtcactgggctgtgtgatagctgagctgttcctgggatggcctctttatcctggtgcttcagaatatgatcagattcgtta

SEQ ID NO: 495599 - DNA, 120 bp, Artificial Sequence
  ENSG00000163349_12 (sequence is synthesized)
tatttcacaaacacaaggcttgccagctgaatatcttctcagtgccggaacaaaaacaaccaggtttttcaacagagatcctaatttggggtacccactgtggaggcttaagacacctga

SEQ ID NO: 495600 - DNA, 120 bp, Artificial Sequence
  ENSG00000163349_13 (sequence is synthesized)
agaacatgaactggagactggaataaaatcaaaagaagctcggaagtacatttttaattgcttagatgacatggctcaggtgaatatgtctacagacctggagggaacagacatgttggc

SEQ ID NO: 495601 - DNA, 120 bp, Artificial Sequence
  ENSG00000163349_14 (sequence is synthesized)
agagaaggcagaccgaagagaatacattgatctgttaaagaaaatgctcacaattgatgcagataagagaattacccctctaaaaactcttaaccatcagtttgtgacaatgactcacct

SEQ ID NO: 495602 - DNA, 120 bp, Artificial Sequence
  ENSG00000163349_15 (sequence is synthesized)
tttggattttccacatagcaatcatgttaagtcttgttttcagaacatggagatctgcaagcggagggttcacatgtatgatacagtgagtcagatcaagagtcccttcactacacatgt

SEQ ID NO: 495603 - DNA, 120 bp, Artificial Sequence
  ENSG00000163349_16 (sequence is synthesized)
tgccccaaatacaagcacaaatctaaccatgagcttcagcaatcagctcaatacagtgcacaatcaggccagtgttctagcttccagttctactgcagcagctgctactctttctctggc

SEQ ID NO: 495604 - DNA, 120 bp, Artificial Sequence
  ENSG00000163349_17 (sequence is synthesized)
taattcagatgtctcactactaaactaccagtcagctttgtacccatcatctgctgcaccagttcctggagttgcccagcagggtgtttccttgcagcctggaaccacccagatttgcac

SEQ ID NO: 495605 - DNA, 120 bp, Artificial Sequence
  ENSG00000163349_18 (sequence is synthesized)
tcagacagatccattccaacagacatttatagtatgtccacctgcgtttcaaactggactacaagcaacaacaaagcattctggattccctgtgaggatggataatgctgtaccgattgt

SEQ ID NO: 495606 - DNA, 120 bp, Artificial Sequence
  ENSG00000163349_19 (sequence is synthesized)
accccaggcaccagctgctcagccactacagattcagtcaggagttctcacgcagggaagctgtacaccactaatggtagcaactctccaccctcaagtagccaccatcacaccgcagta

SEQ ID NO: 495607 - DNA, 120 bp, Artificial Sequence
  ENSG00000163349_20 (sequence is synthesized)
tgcggtgccctttactctgagctgcgcagccggccggccggcgctggttgaacagactgccgctgtactgcaggcgtggcctggagggactcagcaaattctcctgccttcaacttggca

SEQ ID NO: 495608 - DNA, 120 bp, Artificial Sequence
  ENSG00000163349_21 (sequence is synthesized)
acagttgcctggggtagctctacacaactctgtccagcccacagcaatgattccagaggccatggggagtggacagcagctagctgactggaggaatgcccactctcatggcaaccagta

SEQ ID NO: 495609 - DNA, 120 bp, Artificial Sequence
  ENSG00000163349_22 (sequence is synthesized)
cagcactatcatgcagcagccatccttgctgactaaccatgtgacattggccactgctcagcctctgaatgttggtgttgcccatgttgtcagacaacaacaatccagttccctcccttc

SEQ ID NO: 495610 - DNA, 120 bp, Artificial Sequence
  ENSG00000163349_23 (sequence is synthesized)
gaagaagaataagcagtcagctccagtctcttccaagtcctctctagatgttctgccttcccaagtctattctctggttgggagcagtcccctccgcaccacatcttcttataattcctt

SEQ ID NO: 495611 - DNA, 120 bp, Artificial Sequence
  ENSG00000163349_24 (sequence is synthesized)
ggtccctgtccaagatcagcatcagcccatcatcattccagatactcccagccctcctgtgagtgtcatcactatccgaagtgacactgatgaggaagaggacaacaaatacaagcccag

SEQ ID NO: 495612 - DNA, 120 bp, Artificial Sequence
  ENSG00000163349_25 (sequence is synthesized)
tagctctggactgaagccaaggtctaatgtcatcagttatgtcactgtcaatgattctccagactctgactcttctttgagcagcccttattccactgataccctgagtgctctccgagg

SEQ ID NO: 495613 - DNA, 120 bp, Artificial Sequence
  ENSG00000163349_26 (sequence is synthesized)
caatagtggatccgttttggaggggcctggcagagttgtggcagatggcactggcacccgcactatcattgtgcctccactgaaaactcagcttggtgactgcactgtagcaacccaggc

SEQ ID NO: 495614 - DNA, 120 bp, Artificial Sequence
  ENSG00000163349_27 (sequence is synthesized)
ctcaggtctcctgagcaataagactaagccagtcgcttcagtgagtgggcagtcatctggatgctgtatcacccccacagggtatcgagctcaacgcggggggaccagtgcagcacaacc

SEQ ID NO: 495615 - DNA, 120 bp, Artificial Sequence
  ENSG00000163349_28 (sequence is synthesized)
actcaatcttagccagaaccagcagtcatcggcggctccaacctcacaggagagaagcagcaacccagccccccgcaggcagcaggcgtttgtggcccctctctcccaagccccctacac

SEQ ID NO: 495616 - DNA, 120 bp, Artificial Sequence
  ENSG00000163349_29 (sequence is synthesized)
cttccagcatggcagcccgctacactcgacagggcacccacaccttgccccggcccctgctcacctgccaagccaggctcatctgtatacgtatgctgccccgacttctgctgctgcact

SEQ ID NO: 495617 - DNA, 120 bp, Artificial Sequence
  ENSG00000163349_30 (sequence is synthesized)
gggctcaaccagctccattgctcatcttttctccccacagggttcctcaaggcatgctgcagcctataccactcaccctagcactttggtgcaccaggtccctgtcagtgttgggcccag

SEQ ID NO: 495618 - DNA, 120 bp, Artificial Sequence
  ENSG00000163349_31 (sequence is synthesized)
cctcctcacttctgccagcgtggcccctgctcagtaccaacaccagtttgccacccaatcctacattgggtcttcccgaggctcaacaatttacactggatacccgctgagtcctaccaa

SEQ ID NO: 495619 - DNA, 120 bp, Artificial Sequence
  ENSG00000163349_32 (sequence is synthesized)
gatcagccagtattcctacttatagttggtgagcatgagggaggaggaatcatggctaccttctcctggccctgcgttcttaatattgggctatggagagatcctcctttaccctcttga

SEQ ID NO: 495620 - DNA, 120 bp, Artificial Sequence
  ENSG00000163349_33 (sequence is synthesized)
tttaaattcattatttttgtgacagtaattttggtacttggaagagttcagatgcccatcttctgcagttaccaaggaagagagattgttctgaagttaccctctgaaaaatattttgtc

SEQ ID NO: 495621 - DNA, 120 bp, Artificial Sequence
  ENSG00000163349_34 (sequence is synthesized)
tctctgacttgatttctataaatgcttttaaaaacaagtgaagcccctctttatttcattttgtgttattgtgattgctggtcaggaaaaatgctgatagaaggagttgaaatctgatga

SEQ ID NO: 495622 - DNA, 120 bp, Artificial Sequence
  ENSG00000163349_35 (sequence is synthesized)
caaaaaaagaaaaattactttttgtttgtttataaactcagacttgcctattttattttaaaagcggcttacacaatctcccttttgtttattggacatttaaacttacagagtttcagt

SEQ ID NO: 495623 - DNA, 120 bp, Artificial Sequence
  ENSG00000163349_36 (sequence is synthesized)
tttgttttaatgtcatattatacttaatgggcaattgttatttttgcaaaactggttacgtattactctgtgttactattgagattctctcaattgctcctgtgtttgttataaagtagt

SEQ ID NO: 495624 - DNA, 120 bp, Artificial Sequence
  ENSG00000163349_37 (sequence is synthesized)
gtttaaaaggcagctcaccatttgctggtaacttaatgtgagagaatccatatctgcgtgaaaacaccaagtattctttttaaatgaagcaccatgaattcttttttaaattatttttta

SEQ ID NO: 495625 - DNA, 120 bp, Artificial Sequence
  ENSG00000163349_38 (sequence is synthesized)
aaagtctttctctctctgattcagcttaaatttttttatcgaaaaagccattaaggtggttattattacatggtggtggtggttttattatatgcaaaatctctgtctattatgagatac

SEQ ID NO: 495626 - DNA, 120 bp, Artificial Sequence
  ENSG00000163349_39 (sequence is synthesized)
tggcattgatgagctttgcctaaagattagtatgaattttcagtaatacacctctgttttgctcatctctcccttctgttttatgtgatttgtttggggagaaagctaaaaaaacctgaa

SEQ ID NO: 495627 - DNA, 120 bp, Artificial Sequence
  ENSG00000163349_40 (sequence is synthesized)
accagataagaacatttcttgtgtatagcttttatacttcaaagtagcttcctttgtatgccagcagcaaattgaatgctctcttattaagacttatataataagtgcatgtaggaattg

SEQ ID NO: 495628 - DNA, 120 bp, Artificial Sequence
  ENSG00000163349_41 (sequence is synthesized)
tattactgaatttaaaaatattttagaagttttgtaatggtggtgttttaatattttacataattaaatatgtacatattgattagaaaaatataacaagcaatttttcctgctaaccca

SEQ ID NO: 495629 - DNA, 120 bp, Artificial Sequence
  ENSG00000163349_42 (sequence is synthesized)
caatttttcctgctaacccaaaatgttatttgtaatcaaatgtgtagtgattacacttgaattgtgtacttagtgtgtatgtgatcctccagtgttatcccggagatggattgatgtctc

SEQ ID NO: 495630 - DNA, 120 bp, Artificial Sequence
  ENSG00000163349_43 (sequence is synthesized)
cattgtatttaaaccaaaatgaactgatacttgttggaatgtatgtgaactaattgcaattatattagagcatattactgtagtgctgaatgagcaggggcattgcctgcaaggagagga

SEQ ID NO: 495631 - DNA, 120 bp, Artificial Sequence
  ENSG00000163349_44 (sequence is synthesized)
gacccttggaattgttttgcacaggtgtgtctggtgaggagtttttcagtgtgtgtctcttccttccctttcttcctccttcccttattgtagtgccttatatgataatgtagtggttaa

SEQ ID NO: 495632 - DNA, 120 bp, Artificial Sequence
  ENSG00000163349_45 (sequence is synthesized)
tagagtttacagtgagcttgccttaggatggaccagcaagcccccgtggaccctaagttgttcaccgggatttatcagaacaggattagtagctgtattgtgtaatgcattgttctcagt

SEQ ID NO: 495633 - DNA, 120 bp, Artificial Sequence
  ENSG00000163349_46 (sequence is synthesized)
ttccctgccaacattgaaaaataaaaacagcagcttttctcctttaccaccacctctacccctttccattttggattctcggctgagttctcacagaagcattttccccatgtggctctc

SEQ ID NO: 495634 - DNA, 120 bp, Artificial Sequence
  ENSG00000163349_47 (sequence is synthesized)
tcactgtgcgttgctaccttgcttctgtgagaattcaggaagcaggtgagaggagtcaagccaatattaaatatgcattcttttaaagtatgtgcaatcacttttagaatgaattttttt

SEQ ID NO: 495635 - DNA, 120 bp, Artificial Sequence
  ENSG00000163349_48 (sequence is synthesized)
ttccttttcccatgtggcagtccttcctgcacatagttgacattcctagtaaaatatttgcttgttgaaaaaaacatgttaacagatgtgtttataccaaagagcctgttgtattgctta

SEQ ID NO: 495636 - DNA, 120 bp, Artificial Sequence
  ENSG00000163349_49 (sequence is synthesized)
ccatgtccccatactatgaggagaagttttgtggtgccgctggtgacaaggaactcacagaaaggtttcttagctggtgaagaatatagagaaggaaccaaagcctgttgagtcattgag

SEQ ID NO: 495637 - DNA, 120 bp, Artificial Sequence
  ENSG00000163349_50 (sequence is synthesized)
gcttttgaggtttcttttttaacagcttgtatagtcttggggcccttcaagctgtgaaattgtccttgtactctcagctcctgcatggatctgggtcaagtagaaggtactggggatggg

SEQ ID NO: 495638 - DNA, 120 bp, Artificial Sequence
  ENSG00000163349_51 (sequence is synthesized)
gacattcctgcccataaaggatttggggaaagaagattaatcctaaaatacaggtgtgttccatctgaattgaaaatgatatatttgagatataattttaggactggttctgtgtagata

SEQ ID NO: 495639 - DNA, 120 bp, Artificial Sequence
  ENSG00000163349_52 (sequence is synthesized)
gagatggtgtcaaggaggtgcaggatggagatgggagatttcatggagcctggtcagccagctctgtaccaggttgaacaccgaggagctgtcaaagtatttggagtttcttcattgtaa

SEQ ID NO: 495640 - DNA, 120 bp, Artificial Sequence
  ENSG00000163349_53 (sequence is synthesized)
ggagtaagggcttccaagatggggcaggtagtccgtacagcctaccaggaacatgttgtgttttctttattttttaaaatcattatattgagttgtgttttcagcactatattggtcaag

SEQ ID NO: 495641 - DNA, 120 bp, Artificial Sequence
  ENSG00000163349_54 (sequence is synthesized)
atagccaagcagtttgtataatttctgtcactagtgtcatacagttttctggtcaacatgtgtgatctttgtgtctcctttttgccaagcacattctgattttcttgttggaacacaggt

SEQ ID NO: 495642 - DNA, 120 bp, Artificial Sequence
  ENSG00000163349_55 (sequence is synthesized)
ctagtttctaaaggacaaattttttgttccttgtcttttttctgtaagggacaagatttgttgtttttgtaagaaatgagatgcaggaaagaaaaccaaatcccattcctgcaccccagt

SEQ ID NO: 495643 - DNA, 120 bp, Artificial Sequence
  ENSG00000163349_56 (sequence is synthesized)
ccaataagcagataccacttaagataggagtctaaactccacagaaaaggataataccaagagcttgtattgttaccttagtcacttgcctagcagtgtgtggctttaaaaactagagat

SEQ ID NO: 495644 - DNA, 120 bp, Artificial Sequence
  ENSG00000163349_57 (sequence is synthesized)
ttttcagtcttagtctgcaaactggcatttccgattttccagcataaaaatccacctgtgtctgctgaatgtgtatgtatgtgctcactgtggctttagattctgtccctggggttagcc

SEQ ID NO: 495645 - DNA, 120 bp, Artificial Sequence
  ENSG00000163349_58 (sequence is synthesized)
ctgttggccctgacaggaagggaggaagcctggtgaatttagtgagcagctggcctgggtcacagtgacctgacctcaaaccagcttaaggctttaagtcctctctcagaacttggcatt

SEQ ID NO: 495646 - DNA, 120 bp, Artificial Sequence
  ENSG00000163349_59 (sequence is synthesized)
tccaacttcttcctttccgggtgagagaagaagcggagaagggttcagtgtagccactctgggctcatagggacacttggtcactccagagtttttaatagctcccaggaggtgatatta

SEQ ID NO: 495647 - DNA, 120 bp, Artificial Sequence
  ENSG00000163349_60 (sequence is synthesized)
ttttcagtgctcagctgaaataccaaccccaggaataagaactccatttcaaacagttctggccattctgagcctgcttttgtgattgctcatccattgtcctccactagaggggctaag

SEQ ID NO: 495648 - DNA, 120 bp, Artificial Sequence
  ENSG00000163349_61 (sequence is synthesized)
cttgactgcccttagccaggcaagcacagtaatgtgtgttttgttcagcattattatgcaaaaattcactagttgagatggtttgttttaggataggaaatgaaattgcctctcagtgac

SEQ ID NO: 495649 - DNA, 120 bp, Artificial Sequence
  ENSG00000163349_62 (sequence is synthesized)
aggagtggcccgagcctgcttcctattttgattttttttttttttaactgatagatggtgcagcatgtctacatggttgtttgttgctaaactttatataatgtgtggtttcaattcagc

SEQ ID NO: 495650 - DNA, 120 bp, Artificial Sequence
  ENSG00000163349_63 (sequence is synthesized)
ttgaaaaataatctcactacatgtagcagtacattatatgtacattatatgtaatgttagtatttctgctttgaatccttgatattgcaatggaattcctactttattaaatgtatttga

SEQ ID NO: 495651 - DNA, 120 bp, Artificial Sequence
  ENSG00000163349_64 (sequence is synthesized)
tatgctagttattgtgtgcgatttaaactttttttgctttctccctttttttggttgtgcgctttcttttacaacaagcctctagaaacagatagtttctgagaattactgagctatgtt

SEQ ID NO: 495652 - DNA, 120 bp, Artificial Sequence
  ENSG00000163349_65 (sequence is synthesized)
tgtaatgcagatgtacttagggagtatgtaaaataatcattttaacaaaagaaatagatatttaaaatttaatactaactatgggaaaagggtccattgtgtaaaacatagtttatcttt

SEQ ID NO: 495653 - DNA, 120 bp, Artificial Sequence
  ENSG00000163349_66 (sequence is synthesized)
ggattcaatgtttgtctttggttttacaaagtagcttgtattttcagtattttctacataatatggtaaaatgtagagcaattgcaatgcatcaataaaatgggtaaattttctgactta

SEQ ID NO: 495654 - DNA, 120 bp, Artificial Sequence
  ENSG00000163349_67 (sequence is synthesized)
gacattttacagttggatcccgtaccaccgccaggcacctttaaatcaccgcagagtctgcagtgcggagggggcgggaagtccaggccccgcactcgatccacgctggctccctacgga

SEQ ID NO: 495655 - DNA, 120 bp, Artificial Sequence
  ENSG00000163349_68 (sequence is synthesized)
atagtaggcaatatttatgtgtcatttattattattgctattagtgttacctattattttctttttgaacccacttattgcctaattagtcatagtttgacaattgcccttgtattccac

SEQ ID NO: 495656 - DNA, 120 bp, Artificial Sequence
  ENSG00000163349_69 (sequence is synthesized)
atctgtacaagggagatctagaggtctggcccaaagggaaacttttgctgccaccactttcaaagctttcgttaaaaaaacaaaagggagggggaaggtggagaaacaaccaaaattctg

SEQ ID NO: 495657 - DNA, 120 bp, Artificial Sequence
  ENSG00000163349_70 (sequence is synthesized)
ggtaagtgctatgggctactgccttctgtttgggccctgcactgttgttactttctggagaaccctgcttctggctggatgctgaataaagccaaatgaagccccttttgtgtcaaacaa

SEQ ID NO: 495658 - DNA, 120 bp, Artificial Sequence
  ENSG00000163349_71 (sequence is synthesized)
cacaccgcagtatgcggtgccctttactctgagctgcgcagccggccggccggcgctggttgaacagactgccgctgtactggcgtggcctggagggactcagcaaattctcctgccttc

SEQ ID NO: 495659 - DNA, 120 bp, Artificial Sequence
  ENSG00000163349_72 (sequence is synthesized)
gtttgttgtggtgacgagctgtgagcaatggcctgtgtttatgctgggcgagctttctttcctacttggggaggggggttcaggatgggaggatgcgggtagggaagagggggggaaaac

SEQ ID NO: 495660 - DNA, 120 bp, Artificial Sequence
  ENSG00000163349_73 (sequence is synthesized)
ccccaagctccacaacattttaagttttttgaagtcattccaaataaatctaagtgaactattgattttgatacaaagcaacagcctctgccacactgaagaagtgagctttaagcagag

SEQ ID NO: 495661 - DNA, 120 bp, Artificial Sequence
  ENSG00000163352_0 (sequence is synthesized)
tcctcggaactgttgcccacatgcagccccggacacagcccctagcccaaaccctacccttcttcctcggaggggcccctcgagacactgggctgcgggtgcctgtcattaagatgggca

SEQ ID NO: 495662 - DNA, 120 bp, Artificial Sequence
  ENSG00000163352_1 (sequence is synthesized)
cagggtgggagggcttccagcggaccctgaaggaagtcgcctacatcctcctctgctgctggtgtatcaaggaactgctggattaatggtagcagggaactgcctcctctccccaccagc

SEQ ID NO: 495663 - DNA, 120 bp, Artificial Sequence
  ENSG00000163352_2 (sequence is synthesized)
gccttagcttctcattctcttctttagcccccagcccaattgccatcaagactcctgaagccagctgtgcttgaccaaggatgggccataaacaatgagtaaacagtaaagtgtggatcc

SEQ ID NO: 495664 - DNA, 120 bp, Artificial Sequence
  ENSG00000163352_3 (sequence is synthesized)
tgctttgagctgtgtcatctagcagacctgcctcatctctgagcctccttcattcccaacccctgcctctggtggacctctggtgggcaggagcttggactgctctggctaggaccccag

SEQ ID NO: 495665 - DNA, 120 bp, Artificial Sequence
  ENSG00000163352_4 (sequence is synthesized)
agctcagatggttgatcttaccataccctcatagtaccaagaatggactgccccctaagaaacctgtttgagaatcactgaattataaatataatccataggccttgaggcccaagatta

SEQ ID NO: 495666 - DNA, 120 bp, Artificial Sequence
  ENSG00000163354_0 (sequence is synthesized)
agaatacggtgagaaattccaggagcacagaagtcagcgggcatctcctggagacaggcagacatttggtctcagcagccatgcccaaagtcatgaaggatgttgtgcaccccttggggg

SEQ ID NO: 495667 - DNA, 120 bp, Artificial Sequence
  ENSG00000163354_1 (sequence is synthesized)
gagaggagcctagcatggcgagagctgtggttcgcagcgtgggaggttttaccctgggcttgtctttagccacggcctacgggcttctggagctactggtggaaggccacagcccctggg

SEQ ID NO: 495668 - DNA, 120 bp, Artificial Sequence
  ENSG00000163354_2 (sequence is synthesized)
gttgcctggtgggcaccctcactttggctgccttccttagcctgggcatgggattctctcgccaggtccgagccactgtcctcctgctgctgcctcaggccttctccaggcagggccgga

SEQ ID NO: 495669 - DNA, 120 bp, Artificial Sequence
  ENSG00000163354_3 (sequence is synthesized)
cactactgttggtggctgcttttgggttggtgcttcaagggccttgtgccaacactctacgcaacttcacccgggccagcgaggctgtagcctgtggggcagagctggccctgaaccaga

SEQ ID NO: 495670 - DNA, 120 bp, Artificial Sequence
  ENSG00000163354_4 (sequence is synthesized)
ccgccgaagtgctacagagggccaagcaacctcttgtcagtgccctgaacaagattaaagctattgcccggaagaccaaagaggtggctgaccgggtccgcaagttctttcggtcaatca

SEQ ID NO: 495671 - DNA, 120 bp, Artificial Sequence
  ENSG00000163354_5 (sequence is synthesized)
tggatggtgtgaaacacatagccagggctctccggaatgtgtggcagtggctcctgcacatcggcgatgtgtgcaactcggaactgggcaacccttacctgaagtgtgcacgggttttcg

SEQ ID NO: 495672 - DNA, 120 bp, Artificial Sequence
  ENSG00000163354_6 (sequence is synthesized)
atgatgccaaggacagctgcatgatggtcataccacaagcctaccacctgtgttacgtgctcatgcccttcaaactggcgctctgtggacttgccagcctggtccaggtgttctgcgtca

SEQ ID NO: 495673 - DNA, 120 bp, Artificial Sequence
  ENSG00000163354_7 (sequence is synthesized)
tccctaagtacattcaacccttcttgcgccagaccatcggcacccccgtgattcagttgctcaaccgggtgcgtcaggagtttgagttcaacatgacagccacccaccacttctctgtgg

SEQ ID NO: 495674 - DNA, 120 bp, Artificial Sequence
  ENSG00000163354_8 (sequence is synthesized)
atctcaatgcctctcggagcctgtcccaggtagccatggacctccacgaggctgtcagcatgaagctgcaccgtgtccgagaggccctggctctgatgggcttcaccacgcctctgctgc

SEQ ID NO: 495675 - DNA, 120 bp, Artificial Sequence
  ENSG00000163354_9 (sequence is synthesized)
ttgtgcttctctacctccaagccctattttaccggtattgttacctgaactgggaccattatgacaatatctacatcactagccgattcctgcgcatggaggctgtgcgctccacggcag

SEQ ID NO: 495676 - DNA, 120 bp, Artificial Sequence
  ENSG00000163354_10 (sequence is synthesized)
gctcagtgctcacgaggccaggcgctacatcccaccgggctccatcttcttgtcccaatgggagaagtttttttacattctggagaccttcaaccttatccgacacctcctcctcgtgct

SEQ ID NO: 495677 - DNA, 120 bp, Artificial Sequence
  ENSG00000163354_11 (sequence is synthesized)
gttcctagtcttcctagactatgctgtcttctgggtgcttgacctggcccggcaccagctgcagggggagattgtggcccgcagtcctgtgttggtgtctctaaccgtggaaggtactgg

SEQ ID NO: 495678 - DNA, 120 bp, Artificial Sequence
  ENSG00000163354_12 (sequence is synthesized)
ctacgctgggaatatttatcgtgacctggtgtcagcatttgatgtcctgcagcaaggcaacatcagtattttgtcccggcgttgtctccttcgtccctcggagcctgacagcactggcta

SEQ ID NO: 495679 - DNA, 120 bp, Artificial Sequence
  ENSG00000163354_13 (sequence is synthesized)
catagtcattggcgtcatgtatggcctatgcttcttcatcaccctgtttggcagctatgtcagccggctgcggcgagtcatctgtgcctcctactacccatcccgggagcaggagaggat

SEQ ID NO: 495680 - DNA, 120 bp, Artificial Sequence
  ENSG00000163354_14 (sequence is synthesized)
ctcctacctgtacaatgtacttctgagccgccgaaccaatctgttggctgccctgcaccgatcagtgaggcggcgggcggctgaccagggccacagaagtgccttcctagtgctggccag

SEQ ID NO: 495681 - DNA, 120 bp, Artificial Sequence
  ENSG00000163354_15 (sequence is synthesized)
tcggtgcccctgcctaggtccatttgtcagccacttttggctgcatcaggcctactgcctgggctgtgggcagccccaggatgagggagacatggagaacactgtgtcctgcagtacccc

SEQ ID NO: 495682 - DNA, 120 bp, Artificial Sequence
  ENSG00000163354_16 (sequence is synthesized)
cggctgccaaggtctctactgcctcacttgcttccgcctcctggacaatacctgctccgtgtgtgcatctcccctctcctaccagggggacctggacctggagctggactccagcgatga

SEQ ID NO: 495683 - DNA, 120 bp, Artificial Sequence
  ENSG00000163354_17 (sequence is synthesized)
ggagggccctcagctatggctggctgcagctcaaaggaaggaccctgagcaggcatggttattgcagcaacagctccaagaagtgctcggcaggagcctctcaatggagtccacttccga

SEQ ID NO: 495684 - DNA, 120 bp, Artificial Sequence
  ENSG00000163354_18 (sequence is synthesized)
gtccagtgacctggatgaggagaaggggcctcagcagaggaagcacgggcagcagcccttacctgaagcccatcagcctgtcagcattctcaccagccctgagccccacagaccacctga

SEQ ID NO: 495685 - DNA, 120 bp, Artificial Sequence
  ENSG00000163354_19 (sequence is synthesized)
gacatcctccgccactaaaggagcccccactccagcttcagaaccctcagtccctctctcacctccctctcttcctgatccttcccacccaccccccaaataaaccaaaagtggacacaa

SEQ ID NO: 495686 - DNA, 120 bp, Artificial Sequence
  ENSG00000163354_20 (sequence is synthesized)
attcaacccttcttgcgccagaccatcggcacccgtgagtgaccccctcctgccacatatggtgctccctagtggtctccctccctcatcccggtgtggccatggccagcccccagtgct

SEQ ID NO: 495687 - DNA, 120 bp, Artificial Sequence
  ENSG00000163354_21 (sequence is synthesized)
cccagcccataaaggagaatgtaagagaaagaaaggggctcaagtgatcacccaggcccatatccatgctgtacagatcaggaaacgggtccagcgaagggccagtgcctcaccacagcc

SEQ ID NO: 495688 - DNA, 120 bp, Artificial Sequence
  ENSG00000163354_22 (sequence is synthesized)
tgccctgagagcaggagctgggaacagaaccagggcctcctgtccacattcaggtccacactcaggtcatcaagatcattccttaggggcatctgttgcatgccctgtgtcatgctgggt

SEQ ID NO: 495689 - DNA, 120 bp, Artificial Sequence
  ENSG00000163354_23 (sequence is synthesized)
gctgagcatgtgatggcgatggcacagatacgtggaggctttgtcccctcctcagtccaccttgacccaagcactggggggttcccagctggtctgtaagctgcgccccctgggctgtgc

SEQ ID NO: 495690 - DNA, 120 bp, Artificial Sequence
  ENSG00000163354_24 (sequence is synthesized)
caggcccctccccaggggcagctccaccctctcctaactctccttgcccacgtctcccctgaacctgctggccccagccgtgattcagttgctcaaccgggtgcgtcaggagtttgagtt

SEQ ID NO: 495691 - DNA, 120 bp, Artificial Sequence
  ENSG00000163357_0 (sequence is synthesized)
gacccagttccgaggactggagaggggatagaaccttgtgtccaaggaggtccttcaggagacctgggatgagtggtgcttccccaaaacagactcatggacattaaacatcatcagaat

SEQ ID NO: 495692 - DNA, 120 bp, Artificial Sequence
  ENSG00000163357_1 (sequence is synthesized)
ggcacaagagggcaaagaagaaaacagcctcataccacggtgcagaggctcctgacctgggggctgccagtctcctgtagctggttcctgtggcgccagccgggcgagtttcctgtcact

SEQ ID NO: 495693 - DNA, 120 bp, Artificial Sequence
  ENSG00000163357_2 (sequence is synthesized)
gctctcctgctgggggcaggcgctggggggctcctggccataggtctctttcagctcctggtgaaccccatgaacatctacgaagaacagaagattatgttcttgtacagcttggtgggc

SEQ ID NO: 495694 - DNA, 120 bp, Artificial Sequence
  ENSG00000163357_3 (sequence is synthesized)
ttgggggccatgggctgggggacctcccctcacatccgctgtgccagcctcctactagtacccaagatgctgggcaaggaaggcaggctctttgtcctgggatacgccttggctgccatc

SEQ ID NO: 495695 - DNA, 120 bp, Artificial Sequence
  ENSG00000163357_4 (sequence is synthesized)
tatgtggggccagtagccaatctgcgacacaatctcaacaacgtgatcgcatcgctgggctgcaccgtggagctgcagatcaacaacacccgcgcagcttggcgcatctccacagccccc

SEQ ID NO: 495696 - DNA, 120 bp, Artificial Sequence
  ENSG00000163357_5 (sequence is synthesized)
ttacgggccatgttcaaggacctgctgagtagcaaagaattgctgagagcagagactcggaacatctccgccacttttgaggacctggatgcccaggtgaatagtgagacgggctacacg

SEQ ID NO: 495697 - DNA, 120 bp, Artificial Sequence
  ENSG00000163357_6 (sequence is synthesized)
cctgaggataccatggactcaggggagacagcccagggcagggaggcccgccaagccccagcctccagactccacctgtcgacacagaagatgtatgagctgaagaccaagctgcgttgc

SEQ ID NO: 495698 - DNA, 120 bp, Artificial Sequence
  ENSG00000163357_7 (sequence is synthesized)
tcctatgtggtgaaccaggccatactcagctgccgtcgttggtttgaccgcaagcatgaacagtgcatgaagcacatctgggtcccactcctcacccacctgctctgcctgcctatgaag

SEQ ID NO: 495699 - DNA, 120 bp, Artificial Sequence
  ENSG00000163357_8 (sequence is synthesized)
ttcaagttcttctgtggcattgccaaggtgatggaggtttggtgccgcaatcgcatcccagtggaaggcaactttgggcagacctacgactccctcaaccagtctattcgtggcctggat

SEQ ID NO: 495700 - DNA, 120 bp, Artificial Sequence
  ENSG00000163357_9 (sequence is synthesized)
ccggctggagtgggccctggggctgctgcacgtgctgctctcctgcactttcctgctggtcctgcatgcgtctttctcctacatggacagctataaccatgacattcgttttgacaacat

SEQ ID NO: 495701 - DNA, 120 bp, Artificial Sequence
  ENSG00000163357_10 (sequence is synthesized)
ctacatcagtacctacttctgccagatcgatgaccgcaggaagaagctgggcaaacggactctgctgccactccgcaaagctgaggagaaaaccgtcatcttcccttgcaagcccaccat

SEQ ID NO: 495702 - DNA, 120 bp, Artificial Sequence
  ENSG00000163357_11 (sequence is synthesized)
ccaggcctcagaaatgagcaatgtggtgagggagctcctggagacactgcccattctgctgctgctggtggtgctgtgtggcttggactgggctctctactccatcttcgacaccatccg

SEQ ID NO: 495703 - DNA, 120 bp, Artificial Sequence
  ENSG00000163357_12 (sequence is synthesized)
ccaccactccttcctgcagtactccttccgcagcagtcataaactggaggtgaaggtcgggggagactccatgctagcccggcttcttcgaaaaaccattggggccctgaacacctcctc

SEQ ID NO: 495704 - DNA, 120 bp, Artificial Sequence
  ENSG00000163357_13 (sequence is synthesized)
agagacagtgatggaatcaaacaacatgccctgcctgccccagcctgtgggcctggatgccagggcctactggagagctgcagtaccgattggcctgttagtgtgtctctgcctgttaca

SEQ ID NO: 495705 - DNA, 120 bp, Artificial Sequence
  ENSG00000163357_14 (sequence is synthesized)
ggcttttggctaccgactccggagggtcatcgcagccttctacttccccaagcgagagaagaagcggatcctgttcctctacaatgacctattgaagaaaagagcagccttcaccaaact

SEQ ID NO: 495706 - DNA, 120 bp, Artificial Sequence
  ENSG00000163357_15 (sequence is synthesized)
caggagggccgctatcctgaggcgggagcgacagcagaaggctccgcgccacccgctggcggatatcctgcaccgcggctgcccgctcctgcgccgctggctgtgccggcgctgcgtggt

SEQ ID NO: 495707 - DNA, 120 bp, Artificial Sequence
  ENSG00000163357_16 (sequence is synthesized)
gtgccaggcacccgagacgcccgagtcctacgtgtgccggacgctggactgcgaggccgtgtactgctggtcgtgctgggacgacatgcggcagcggtgcccggtctgcacgccccgcga

SEQ ID NO: 495708 - DNA, 120 bp, Artificial Sequence
  ENSG00000163357_17 (sequence is synthesized)
agagctctcttcctccgcctttagtgacagcaacgacgacactgcctacgcggggtgaagaggcgtcctgctcgctcttccgcaccgtccttcccggttaataaaatgccctgtacgctt

SEQ ID NO: 495709 - DNA, 120 bp, Artificial Sequence
  ENSG00000163357_18 (sequence is synthesized)
ggcacaagagggcaaagaagaaaacagcctcataccagtttccccagcctctatccacctgcaagccctgaatcctaatgagccccatcccaggcagaagagtgggctgttgagctaccc

SEQ ID NO: 495710 - DNA, 120 bp, Artificial Sequence
  ENSG00000163357_19 (sequence is synthesized)
acctcctcagagacagtgatggaatcaaacaacatgccgagagaagaagcggatcctgttcctctacaatgacctattgaagaaaagagcagccttcaccaaactcaggagggccgctat

SEQ ID NO: 495711 - DNA, 120 bp, Artificial Sequence
  ENSG00000163357_20 (sequence is synthesized)
agaatggcaagactggagagatctgtaaggcctgctcactggagatcagcctagagtggtggtcaggtgtgggactccggtgccagagggcctaagtgtgtatcccggctccttccctca

SEQ ID NO: 495712 - DNA, 120 bp, Artificial Sequence
  ENSG00000163357_21 (sequence is synthesized)
ttactatgacaacggtgtgaccttgagcacatgacttaactgctgtgcctgggcttttgccttccataaaatggggttaactactccatctggttgttttaaggattaaatgagttgtac

SEQ ID NO: 495713 - DNA, 120 bp, Artificial Sequence
  ENSG00000163357_22 (sequence is synthesized)
tcaagcggcctgtggaacacagcgccgtcctgcatgcccaggaaggagtcgggacttgtttcttctgtacccatacatcccctgtggcttccgcctcctcctgggctttacggggaggtc

SEQ ID NO: 495714 - DNA, 120 bp, Artificial Sequence
  ENSG00000163357_23 (sequence is synthesized)
cagagggaagaggctgccaatttaagaaggaagacaccgtccttgccctgagggagtctctccattccgagggactccccatcacccacatgatatagtccaaccccataacccttcata

SEQ ID NO: 495715 - DNA, 120 bp, Artificial Sequence
  ENSG00000163357_24 (sequence is synthesized)
actctcatctctcctgacctgtctgacctcgttttctgatcctcctaagaaattaaattcattcattcattcattcattcactcagcacttactgagaatctgctgaggatttagcagta

SEQ ID NO: 495716 - DNA, 120 bp, Artificial Sequence
  ENSG00000163357_25 (sequence is synthesized)
cttactgagaatctgctgaggatttagcagtaaacaaggatgacaagcatccagccgttttgctttggttttgtttgtatgtttttgttttcgttttgagacggagtctcgctctgttgc

SEQ ID NO: 495717 - DNA, 120 bp, Artificial Sequence
  ENSG00000163359_0 (sequence is synthesized)
gcttgtagggtgaagacagaattcagagggtgacatcagcctgagcgggggccagaagaaacagagtggaggagtctggtttcatttacagttttgggtcagttctgcagtgaggagggg

SEQ ID NO: 495718 - DNA, 120 bp, Artificial Sequence
  ENSG00000163359_1 (sequence is synthesized)
gagaggaggggtccgggagggaggaggaggaggaggaggagctggaggaagccctgactggtatccctggccccagtccagtttggagctcagtcttccaccaaaggccgttcagttctc

SEQ ID NO: 495719 - DNA, 120 bp, Artificial Sequence
  ENSG00000163359_2 (sequence is synthesized)
ctgggctccagcctcctgcaaggactgcaagagttttcctccgcagctctgagtctccacttttttggtggagaaaggctgcaaaaagaaaaagagacgcagtgagtgggaaaagtatgc

SEQ ID NO: 495720 - DNA, 120 bp, Artificial Sequence
  ENSG00000163359_3 (sequence is synthesized)
atcctattcaaacctaattgaatcgaggagcccagggacacacgccttcaggtttgctcaggggttcatatttggtgcttagacaaattcaaaatgaggaaacatcggcacttgccctta

SEQ ID NO: 495721 - DNA, 120 bp, Artificial Sequence
  ENSG00000163359_4 (sequence is synthesized)
gtggccgtcttttgcctctttctctcaggctttcctacaactcatgcccagcagcagcaagcagatgtcaaaaatggtgcggctgctgatataatatttctagtggattcctcttggacc

SEQ ID NO: 495722 - DNA, 120 bp, Artificial Sequence
  ENSG00000163359_5 (sequence is synthesized)
attggagaggaacatttccaacttgttcgagagtttctatatgatgttgtaaaatccttagctgtgggagaaaatgatttccattttgctctggtccagttcaacggaaacccacatacc

SEQ ID NO: 495723 - DNA, 120 bp, Artificial Sequence
  ENSG00000163359_6 (sequence is synthesized)
gagttcctgttaaatacgtatcgtactaaacaagaagtcctttctcatatttccaacatgtcttatattgggggaaccaatcagactggaaaaggattagaatacataatgcaaagccac

SEQ ID NO: 495724 - DNA, 120 bp, Artificial Sequence
  ENSG00000163359_7 (sequence is synthesized)
ctcaccaaggctgctggaagccgggccggtgacggagtccctcaggttatcgtagtgttaactgatggacactcgaaggatggccttgctctgccctcagcggaacttaagtctgctgat

SEQ ID NO: 495725 - DNA, 120 bp, Artificial Sequence
  ENSG00000163359_8 (sequence is synthesized)
gttaacgtgtttgcaattggagttgaggatgcagatgaaggagcgttaaaagaaatagcaagtgaaccgctcaatatgcatatgttcaacctagagaattttacctcacttcatgacata

SEQ ID NO: 495726 - DNA, 120 bp, Artificial Sequence
  ENSG00000163359_9 (sequence is synthesized)
gtaggaaacttagtgtcctgtgtgcattcatccgtgagtccagaaagggctggggacacggaaacccttaaagacatcacagcacaagactctgctgacattattttccttattgatgga

SEQ ID NO: 495727 - DNA, 120 bp, Artificial Sequence
  ENSG00000163359_10 (sequence is synthesized)
tcaaacaacaccggaagtgtcaatttcgcagtcattctcgacttccttgtaaatctccttgagaaactcccaattggaactcagcagatccgagtgggggtggtccagtttagcgatgag

SEQ ID NO: 495728 - DNA, 120 bp, Artificial Sequence
  ENSG00000163359_11 (sequence is synthesized)
cccagaaccatgttctccttggacacctactccaccaaggcccaggttctgggtgcagtgaaagccctcgggtttgctggtggggagttggccaatatcggcctcgcccttgatttcgtg

SEQ ID NO: 495729 - DNA, 120 bp, Artificial Sequence
  ENSG00000163359_12 (sequence is synthesized)
gtggagaaccacttcacccgggcagggggcagccgcgtggaggaaggggttccccaggtgctggtcctcataagtgccgggccttctagtgacgagattcgctacggggtggtagcactg

SEQ ID NO: 495730 - DNA, 120 bp, Artificial Sequence
  ENSG00000163359_13 (sequence is synthesized)
aagcaggctagcgtgttctcattcggccttggagcccaggccgcctccagggcagagcttcagcacatagctaccgatgacaacttggtgtttactgtcccggaattccgtagctttggg

SEQ ID NO: 495731 - DNA, 120 bp, Artificial Sequence
  ENSG00000163359_14 (sequence is synthesized)
gacctccaggagaaattactgccgtacattgttggcgtggcccaaaggcacattgtcttgaaaccgccaaccattgtcacacaagtcattgaagtcaacaagagagacatagtcttcctg

SEQ ID NO: 495732 - DNA, 120 bp, Artificial Sequence
  ENSG00000163359_15 (sequence is synthesized)
gtggatggctcatctgcactgggactggccaacttcaatgccatccgagacttcattgctaaagtcatccagaggctggaaatcggacaggatcttatccaggtggcagtggcccagtat

SEQ ID NO: 495733 - DNA, 120 bp, Artificial Sequence
  ENSG00000163359_16 (sequence is synthesized)
gcagacactgtgaggcctgaattttatttcaatacccatccaacaaaaagggaagtcataaccgctgtgcggaaaatgaagcccctggacggctcggccctgtacacgggctctgctcta

SEQ ID NO: 495734 - DNA, 120 bp, Artificial Sequence
  ENSG00000163359_17 (sequence is synthesized)
gactttgttcgtaacaacctattcacgagttcagccggctaccgggctgccgaggggattcctaagcttttggtgctgatcacaggtggtaagtccctagatgaaatcagccagcctgcc

SEQ ID NO: 495735 - DNA, 120 bp, Artificial Sequence
  ENSG00000163359_18 (sequence is synthesized)
caggagctgaagagaagcagcataatggcctttgccattgggaacaagggtgccgatcaggctgagctggaagagatcgctttcgactcctccctggtgttcatcccagctgagttccga

SEQ ID NO: 495736 - DNA, 120 bp, Artificial Sequence
  ENSG00000163359_19 (sequence is synthesized)
gccgccccattgcaaggcatgctgcctggcttgctggcacctctcaggaccctctctggaacccctgaagttcactcaaacaaaagggatatcatctttcttttggatggatcagccaac

SEQ ID NO: 495737 - DNA, 120 bp, Artificial Sequence
  ENSG00000163359_20 (sequence is synthesized)
gttggaaaaaccaatttcccttatgtgcgcgactttgtaatgaacctagttaacagccttgatattggaaatgacaatattcgtgttggtttagtgcaatttagtgacactcctgtaacg

SEQ ID NO: 495738 - DNA, 120 bp, Artificial Sequence
  ENSG00000163359_21 (sequence is synthesized)
gagttctctttaaacacataccagaccaagtcagatatccttggtcatctgaggcagctgcagctccagggaggttcgggcctgaacacaggctcagccctaagctatgtctatgccaac

SEQ ID NO: 495739 - DNA, 120 bp, Artificial Sequence
  ENSG00000163359_22 (sequence is synthesized)
cacttcacggaagctggcggcagcaggatccgtgaacacgtgccgcagctcctgcttctgctcacagctgggcagtctgaggactcctatttgcaagctgccaacgccttgacacgcgcg

SEQ ID NO: 495740 - DNA, 120 bp, Artificial Sequence
  ENSG00000163359_23 (sequence is synthesized)
ggcatcctgactttttgtgtgggagctagccaggcgaataaggcagagcttgagcagattgcttttaacccaagcctggtgtatctcatggatgatttcagctccctgccagctttgcct

SEQ ID NO: 495741 - DNA, 120 bp, Artificial Sequence
  ENSG00000163359_24 (sequence is synthesized)
cagcagctgattcagcccctaaccacatatgttagtggaggtgtggaggaagtaccactcgctcagccagagagcaagcgagacattctgttcctctttgacggctcagccaatcttgtg

SEQ ID NO: 495742 - DNA, 120 bp, Artificial Sequence
  ENSG00000163359_25 (sequence is synthesized)
ggccagttccctgttgtccgtgactttctctacaagattatcgatgagctcaatgtgaagccagaggggacccgaattgcggtggctcagtacagcgatgatgtcaaggtggagtcccgt

SEQ ID NO: 495743 - DNA, 120 bp, Artificial Sequence
  ENSG00000163359_26 (sequence is synthesized)
tttgatgagcaccagagtaagcctgagatcctgaatcttgtgaagagaatgaagatcaagacgggcaaagccctcaacctgggctacgcgctggactatgcacagaggtacatttttgtg

SEQ ID NO: 495744 - DNA, 120 bp, Artificial Sequence
  ENSG00000163359_27 (sequence is synthesized)
aagtctgctggcagccggatcgaggatggagtgcttcagttcctggtgctgctggtcgcaggaaggtcatctgaccgtgtggatgggccagcaagtaacctgaagcagagtggggttgtg

SEQ ID NO: 495745 - DNA, 120 bp, Artificial Sequence
  ENSG00000163359_28 (sequence is synthesized)
cctttcatcttccaagccaagaacgcagaccctgctgagttagagcagatcgtgctgtctccagcgtttatcctggctgcagagtcgcttcccaagattggagatcttcatccacagata

SEQ ID NO: 495746 - DNA, 120 bp, Artificial Sequence
  ENSG00000163359_29 (sequence is synthesized)
gtgaatctcttaaaatcagtgcacaacggagcaccagcaccagtttcaggtgaaaaggacgtggtgtttctgcttgatggctctgagggcgtcaggagcggcttccctctgttgaaagag

SEQ ID NO: 495747 - DNA, 120 bp, Artificial Sequence
  ENSG00000163359_30 (sequence is synthesized)
tttgtccagagagtggtggaaagcctggatgtgggccaggaccgggtccgcgtggccgtggtgcagtacagcgaccggaccaggcccgagttctacctgaattcatacatgaacaagcag

SEQ ID NO: 495748 - DNA, 120 bp, Artificial Sequence
  ENSG00000163359_31 (sequence is synthesized)
gacgtcgtcaacgctgtccgccagctgaccctgctgggagggccgacccccaacaccggggccgccctggagtttgtcctgaggaacatcctggtcagctctgcgggaagcaggataaca

SEQ ID NO: 495749 - DNA, 120 bp, Artificial Sequence
  ENSG00000163359_32 (sequence is synthesized)
gaaggtgtgccccagctgctgatcgtcctcacggccgacaggtctggggatgatgtgcggaacccctccgtggtcgtgaagaggggtggggctgtgcccattggcattggcatcgggaac

SEQ ID NO: 495750 - DNA, 120 bp, Artificial Sequence
  ENSG00000163359_33 (sequence is synthesized)
gctgacatcacagagatgcagaccatctccttcatcccggactttgccgtggccattcccacctttcgccagctggggaccgtccaacaggtcatctctgagagggtgacccagctcacc

SEQ ID NO: 495751 - DNA, 120 bp, Artificial Sequence
  ENSG00000163359_34 (sequence is synthesized)
cgcgaggagctgagcaggctgcagccggtgttgcagcctctaccgagcccaggtgttggtggcaagagggacgtggtctttctcatcgatgggtcccaaagtgccgggcctgagttccag

SEQ ID NO: 495752 - DNA, 120 bp, Artificial Sequence
  ENSG00000163359_35 (sequence is synthesized)
tacgttcgcaccctcatagagaggctggttgactacctggacgtgggctttgacaccacccgggtggctgtcatccagttcagcgatgaccccaaggtggagttcctgctgaacgcccat

SEQ ID NO: 495753 - DNA, 120 bp, Artificial Sequence
  ENSG00000163359_36 (sequence is synthesized)
tccagcaaggatgaagtgcagaacgcggtgcagcggctgaggcccaagggagggcggcagatcaacgtgggcaatgccctggagtacgtgtccaggaacatcttcaagaggcccctgggg

SEQ ID NO: 495754 - DNA, 120 bp, Artificial Sequence
  ENSG00000163359_37 (sequence is synthesized)
agccgcattgaagagggcgtcccgcagttcctggtcctcatctcgtctggaaagtctgacgatgaggtggacgacccggcggtggagctcaagcagtttggcgtggcccctttcacgatc

SEQ ID NO: 495755 - DNA, 120 bp, Artificial Sequence
  ENSG00000163359_38 (sequence is synthesized)
gccaggaacgcagaccaggaggagctggtgaagatctcgctgagccccgaatatgtgttctcggtgagcaccttccgggagctgcccagcctggagcagaaactgctgacgcccatcacg

SEQ ID NO: 495756 - DNA, 120 bp, Artificial Sequence
  ENSG00000163359_39 (sequence is synthesized)
accctgacctcagagcagatccagaagctcttagccagcactcgctatccacctccagcagttgagagtgatgctgcagacattgtctttctgatcgacagctctgagggagttaggcca

SEQ ID NO: 495757 - DNA, 120 bp, Artificial Sequence
  ENSG00000163359_40 (sequence is synthesized)
gatggctttgcacatattcgagattttgttagcaggattgttcgaagactcaacatcggccccagtaaagtgagagttggggtcgtgcagttcagcaatgatgtcttcccagaattctat

SEQ ID NO: 495758 - DNA, 120 bp, Artificial Sequence
  ENSG00000163359_41 (sequence is synthesized)
ctgaaaacctacagatcccaggccccggtgctggacgccatacggcgcctgaggctcagaggggggtccccactgaacactggcaaggctctcgaatttgtggcaagaaacctctttgtt

SEQ ID NO: 495759 - DNA, 120 bp, Artificial Sequence
  ENSG00000163359_42 (sequence is synthesized)
aagtctgcggggagtcgcatagaagacggggtgccccaacacctggtcctggtcctgggtggaaaatcccaggacgatgtgtccaggttcgcccaggtgatccgttcctcgggcattgtg

SEQ ID NO: 495760 - DNA, 120 bp, Artificial Sequence
  ENSG00000163359_43 (sequence is synthesized)
agtttaggggtaggagaccggaacatcgacagaacagagctgcagaccatcaccaatgaccccagactggtcttcacagtgcgagagttcagagagcttcccaacatagaagaaagaatc

SEQ ID NO: 495761 - DNA, 120 bp, Artificial Sequence
  ENSG00000163359_44 (sequence is synthesized)
ccagagaagaagaaagcagacattgtgttcctgttggatggttccatcaacttcaggagggacagtttccaggaagtgcttcgttttgtgtctgaaatagtggacacagtttatgaagat

SEQ ID NO: 495762 - DNA, 120 bp, Artificial Sequence
  ENSG00000163359_45 (sequence is synthesized)
ggcgactccatccaagtggggcttgtccagtacaactctgaccccactgacgaattcttcctgaaggacttctctaccaagaggcagattattgacgccatcaacaaagtggtctacaaa

SEQ ID NO: 495763 - DNA, 120 bp, Artificial Sequence
  ENSG00000163359_46 (sequence is synthesized)
gggggaagacacgccaacactaaggtgggccttgagcacctgcgggtaaaccactttgtgcctgaggcaggcagccgcctggaccagcgggtccctcagattgcctttgtgatcacggga

SEQ ID NO: 495764 - DNA, 120 bp, Artificial Sequence
  ENSG00000163359_47 (sequence is synthesized)
ggaaagtcggtggaagatgcacaggatgtgagcctggccctcacccagaggggggtcaaagtgtttgctgttggagtgaggaatatcgactcggaggaggttggaaagatagcgtccaac

SEQ ID NO: 495765 - DNA, 120 bp, Artificial Sequence
  ENSG00000163359_48 (sequence is synthesized)
agcgccacagcgttccgcgtgggcaacgtccaggagctgtccgaactgagcgagcaagttttggaaactttgcatgatgcgatgcatgaaaccctttgccctggtgtaactgatgctgcc

SEQ ID NO: 495766 - DNA, 120 bp, Artificial Sequence
  ENSG00000163359_49 (sequence is synthesized)
aaagcttgtaatctggatgtgattctggggtttgatggttctagagaccagaatgtttttgtggcccagaagggcttcgagtccaaggtggacgccatcttgaacagaatcagccagatg

SEQ ID NO: 495767 - DNA, 120 bp, Artificial Sequence
  ENSG00000163359_50 (sequence is synthesized)
cacagggtcagctgcagcggtggccgctcgcccaccgtgcgtgtgtcagtggtggccaacacgccctcgggcccggtggaggcctttgactttgacgagtaccagccagagatgctcgag

SEQ ID NO: 495768 - DNA, 120 bp, Artificial Sequence
  ENSG00000163359_51 (sequence is synthesized)
aagttccggaacatgcgcagccagcacccctacgtcctcacggaggacaccctgaaggtctacctgaacaagttcagacagtcctcgccggacagcgtgaaggtggtcattcattttact

SEQ ID NO: 495769 - DNA, 120 bp, Artificial Sequence
  ENSG00000163359_52 (sequence is synthesized)
gatggagcagacggagatctggctgatttacacagagcatctgagaacctccgccaagaaggagtccgtgccttgatcctggtgggccttgaacgagtggtcaacttggagcggctaatg

SEQ ID NO: 495770 - DNA, 120 bp, Artificial Sequence
  ENSG00000163359_53 (sequence is synthesized)
catctggagtttgggcgagggtttatgtatgacaggcccctgaggcttaacttgctggacttggattatgaactagcggagcagcttgacaacattgccgagaaagcttgctgtggggtt

SEQ ID NO: 495771 - DNA, 120 bp, Artificial Sequence
  ENSG00000163359_54 (sequence is synthesized)
ccctgcaagtgctctgggcagaggggagaccgcgggcccatcggcagcatcgggccaaagggtattcctggagaagacggctaccgaggctatcctggtgatgagggtggacccggtgag

SEQ ID NO: 495772 - DNA, 120 bp, Artificial Sequence
  ENSG00000163359_55 (sequence is synthesized)
cgtggtccgcctggtgtgaacggcactcaaggtttccagggctgcccgggccagagaggagtaaagggctctcggggattcccaggagagaagggcgaagtaggagaaattggactggat
